(19) United States
(12) Patent Application Publication
(10) Pub. No.: US 2025/0276017 A1
(43) Pub. Date: Sep. 4, 2025

(54) Compositions and Methods for Genomic Editing

(71) Applicant: Intellia Therapeutics, Inc., Cambridge, MA (US)

(72) Inventors: Ruan Oliveira, Boston, MA (US); Sung Hee Choi, Brookline, MA (US); Biao Liu, Cambridge, MA (US); Radhika Barve, Cambridge, MA (US)

(73) Assignee: Intellia Therapeutics, Inc., Cambridge, MA (US)

(21) Appl. No.: 18/980,502

(22) Filed: Dec. 13, 2024

Related U.S. Application Data
(63) Continuation of application No. PCT/US23/68499, filed on Jun. 15, 2023.
(60) Provisional application No. 63/352,990, filed on Jun. 16, 2022.

(51) Int. Cl. A61K 35/17; C12N 5/0783; C12N 9/22; C12N 15/11

(52) U.S. Cl. CPC A61K 35/17; C12N 5/0636; C12N 9/226; C12N 15/111; C12N 2310/20; C12N 2510/00

(57) ABSTRACT

Compositions and methods for ex vivo genomic editing using Neisseria meningitidis (Nine) CRISPR/Cas9 systems are disclosed. The present disclosure provides for engineered cells comprising a genetical modification for use e.g., in adoptive cell transfer therapies.

### CROSS-REFERENCE TO RELATED APPLICATION

[0001] This application is a continuation of International Application No. PCT/US2023/068499, filed Jun. 15, 2023, which claims the benefit under 35 USC 119(e) of U.S. Provisional Application No. 63/352,990, filed Jun. 16, 2022, the content of each of which is herein incorporated by reference in its entirety.

### SEQUENCE LISTING

[0002] This application contains a sequence listing, which has been submitted electronically in XML file format and is hereby incorporated by reference in its entirety. Said XML file, created on Jun. 13, 2023, is named “01155-0055-00PCT_SL.xml” and is 20,586,099 bytes in size.

### INTRODUCTION AND SUMMARY

[0003] The present disclosure relates to genomic editing using Neisseria meningitidis CRISPR/Cas9 systems.

[0004] The ability to downregulate endogenous T-cell receptor (TCR) alpha and beta units, MHC class I, and MHC class II loci is critical for many in vivo and ex vivo utilities, e.g., when using allogeneic cells (originating from a donor) for transplantation or e.g., for creating a cell population in vitro that does not activate T cells. In particular, the transfer of allogeneic cells into a subject is of great interest to the field of cell therapy. The use of allogeneic cells has been limited due to the problem of rejection by the recipient subject's immune cells, which recognize the transplanted cells as foreign and mount an attack. To avoid the problem of immune rejection, cell-based therapies have focused on autologous approaches that use a subject's own cells as the cell source for therapy, an approach that is time-consuming and costly.

[0005] Typically, immune rejection of allogeneic cells results from a mismatching of major histocompatibility complex (MHC) molecules between the donor and recipient. Within the human population, MHC molecules exist in various forms, including e.g., numerous genetic variants of any given MHC gene, i.e., alleles, encoding different forms of MHC protein. The primary classes of MHC molecules are referred to as MHC class I and MHC class II. MHC class I molecules (e.g., HLA-A, HLA-B, and HLA-C in humans) are expressed on all nucleated cells and present antigens to activate cytotoxic T cells (CD8+ T cells or CTLs). MHC class II molecules (e.g., HLA-DP, HLA-DQ, and HLA-DR in humans) are expressed on only certain cell types (e.g., B cells, dendritic cells, and macrophages) and present antigens to activate helper T cells (CD4+ T cells or Th cells), which in turn provide signals to B cells to produce antibodies.

[0006] Slight differences, e.g., in MHC alleles between individuals can cause the T cells in a recipient to become activated. During T cell development, an individual's T cell repertoire is tolerized to one's own MHC molecules, but T cells that recognize another individual's MHC molecules may persist in circulation and are referred to as alloreactive T cells. Alloreactive T cells can become activated e.g., by the presence of another individual's cells expressing MHC molecules in the body, causing e.g., graft versus host disease and transplant rejection.

[0007] Methods and compositions for reducing the susceptibility of an allogeneic cell to rejection are of interest, including e.g., reducing the cell's expression of MHC protein to avoid recipient T cell responses. In practice, the ability to genetically modify an allogeneic cell for transplantation into a subject has been hampered by the requirement for multiple genomic edits to reduce all MHC protein expression, while at the same time, avoiding other harmful recipient immune responses. For example, while strategies to deplete MHC class I protein may reduce activation of CTLs, cells that lack MHC class I on their surface are susceptible to lysis by natural killer (NK) cells of the immune system because NK cell activation is regulated by MHC class I-specific inhibitory receptors. Therefore, safely reducing or eliminating expression of MHC class I has proven challenging. Genomic editing strategies to deplete MHC class II molecules have also proven difficult particularly in certain cell types for reasons including low editing efficiencies and low cell survival rates, preventing practical application as a cell therapy.

[0008] Thus, there exists a need for improved methods and compositions for modifying cells to overcome the problem of recipient immune rejection and the technical difficulties associated with the multiple genetic modifications required to produce a safer cell for transplant. The present disclosure provides genomic editing using Neisseria meningitidis CRISPR/Cas9 systems. NmeCas9 is smaller than Streptococcus pyogenes Cas9 (SpyCas9), allowing NmeCas9 to be suitable for messenger RNA (mRNA)-based delivery methods. NmeCas9 has an advantageous specificity and low off-target cleavage rates.

[0009] The engineered cell comprises a genetic modification in the HLA-A, TRAC, TRBC, or CIITA (class II major histocompatibility complex transactivator), which may be useful in cell therapy. The disclosure further provides compositions and methods to reduce or eliminate surface expression of endogenous T-cell receptor, MHC class I or II protein in a cell by genetically modifying the HLA-A, TRAC, TRBC, or CIITA gene.

[0010] In some embodiments, a method of reducing surface expression of HLA-A protein in an engineered cell relative to an unmodified cell, is provided, the method comprising contacting a cell with a composition of any of embodiments provided herein. In some embodiments, a method of reducing surface expression of TRAC protein in an engineered cell relative to an unmodified cell, is provided, the method comprising contacting a cell with a composition of any of embodiments provided herein. In some embodiments, a method of reducing surface expression of TRBC protein in an engineered cell relative to an unmodified cell, is provided, the method comprising contacting a cell with a composition of any of embodiments provided herein. In some embodiments, a method of reducing surface expression of MHC class II protein in an engineered cell relative to an unmodified cell, is provided, the method comprising contacting a cell with a composition of any of embodiments provided herein.

### BRIEF DESCRIPTION OF THE DRAWINGS

[0011] FIG. 1A shows the distribution of percent of HLA-A2−, HLA-A3− T cells following editing with HLA-A targeting guides.

[0012] FIG. 1B shows the percent of HLA-A2− HLA-A3+ (HLA-A-), HLA-A+, HLA-A3+ (HLA-A3−) and HLA-A2−, HLA-A3− T cells following editing with select guides.

[0013] FIG. 1C shows percent HLA-B− T cells following editing with select HLA-A guides.

[0014] FIG. 2 shows percent HLA-A2 negative T cells following editing with a dilution series of HLA-A guides.

[0015] FIG. 3A shows the distribution of percent of CD3− T cells following editing with TRAC guides.

[0016] FIG. 3B shows percent editing at the TRAC locus.

[0017] FIG. 4 shows percent CD3 negative T cells following editing with a dilution series of TRAC guides.

[0018] FIG. 5A shows the distribution of percent of CD3− T cells following editing with TRBC guides.

[0019] FIG. 5B shows percent editing at the TRBC loci.

[0020] FIG. 6 shows percent CD3 negative T cells following editing with a dilution series of TRBC guides.

[0021] FIG. 7A shows the distribution of percent of HLA-DP, DQ, DR− T cells following editing with CIITA guides.

[0022] FIG. 7B shows percent editing at the CIITA locus.

[0023] FIG. 8 shows percentage of HLA II-DR, DP, DQ negative cells on the left vertical axis and mean percent editing on the right vertical axis following editing with CIITA guides.

[0024] FIG. 9A shows the percent of reads with C to T conversions at the CIITA locus following editing with a dilution series of CIITA guides.

[0025] FIG. 9B shows the percent of HLA-DP, DQ, DR negative T cells following editing with a dilution series of CIITA guides.

[0026] FIGS. 10A-10B show editing at the AAVS1 locus represented as indel frequency.

[0027] FIGS. 11A-11B show indel frequency at AAVS1 following editing with a dilution series of AAVS1 guides.

[0028] FIG. 12 shows mean editing frequency at various TRAC sgRNA concentrations.

[0029] FIG. 13 shows mean editing frequency at the CIITA locus.

[0030] FIG. 14 shows mean percentage of T cells negative for HLA-A2 surface expression.

[0031] FIG. 15 shows mean percentage editing at the CIITA locus.

[0032] FIGS. 16A-16L show mean percentage editing at a series of doses of the noted guide RNAs.

[0033] FIGS. 17A-17D show mean percentage editing of CD8+ T cells that are negative for respective expression markers at various sgRNA concentrations.

### DETAILED DESCRIPTION

[0034] The present disclosure provides engineered cells, as well as methods and compositions for genetically modifying a cell to make an engineered cell and populations of engineered cells, that are useful, for example, for adoptive cell transfer (ACT) therapies. The disclosure provided herein overcomes certain hurdles of prior methods by providing methods and compositions for genetically modifying the HLA-A, TRAC, TRBC, CIITA, or AAVS1 locus to reduce expression of HLA-A, TRAC, TRBC, or MHC class II protein on the surface of a cell. In some embodiments, the disclosure provides engineered cells with reduced or eliminated surface expression of HLA-A, TRAC, TRBC, or MHC class II as a result of a genetic modification in the HLA-A, TRAC, TRBC, or CIITA gene. In some embodiments, the disclosure provides compositions and methods for reducing or eliminating expression of HLA-A, TRAC, TRBC, or MHC class II protein and compositions and methods to further reduce the cell's susceptibility to immune rejection. For example, in some embodiments, the methods and compositions comprise reducing or eliminating surface expression of HLA-A protein by genetically modifying the HLA-A gene. In some embodiments, the methods and compositions comprise reducing or eliminating surface expression of TRAC protein by genetically modifying the TRAC gene. In some embodiments, the methods and compositions comprise reducing or eliminating surface expression of TRBC1 protein by genetically modifying the TRBC1 gene. In some embodiments, the methods and compositions comprise reducing or eliminating surface expression of TRBC2 protein by genetically modifying the TRBC2 gene. In some embodiments, the methods and compositions comprise reducing or eliminating surface expression of MHC class II protein by genetically modifying CIITA. The engineered cell compositions produced by the methods disclosed herein have desirable properties, including e.g., reduced expression of MHC molecules, reduced immunogenicity in vitro and in vivo, increased survival, and increased genetic compatibility with greater subjects for transplant.

[0035] The term “about” or “approximately” means an acceptable error for a particular value as determined by one of ordinary skill in the art, which depends in part on how the value is measured or determined, or a degree of variation that does not substantially affect the properties of the described subject matter, or within the tolerances accepted in the art, e.g., within 10%, 5%, 2%, or 1%. Accordingly, unless indicated to the contrary, the numerical parameters set forth in the following specification and attached claims are approximations that may vary depending upon the desired properties sought to be obtained. At the very least, and not as an attempt to limit the application of the doctrine of equivalents to the scope of the claims, each numerical parameter should at least be construed in light of the number of reported significant digits and by applying ordinary rounding techniques.

[0036] Provided herein are the following numbered embodiments:
[0037] Embodiment 1 is an engineered cell, which has reduced or eliminated surface expression of HLA-A relative to an unmodified cell, comprising a genetic modification in the HLA-A gene, wherein the genetic modification comprises at least one nucleotide within the genomic coordinates chr6:29942540-29945459.
[0038] Embodiment 2 is the engineered cell of embodiment 1, which has reduced or eliminated surface expression of HLA-A relative to an unmodified cell, comprising a genetic modification in the HLA-A gene, wherein the genetic modification comprises at least one nucleotide within the genomic coordinates chosen from any one of the genomic coordinates listed in Table 1 or wherein the genetic modification comprises at least one nucleotide within the genomic coordinates targeted by a guide RNA comprising a guide sequence of any one of SEQ ID NOs: 66, 61, 2-60, 62-65, 67-80.
[0039] Embodiment 3 is an engineered cell, which has reduced or eliminated surface expression of HLA-A relative to an unmodified cell, comprising a genetic modification in the HLA-A gene, wherein the genetic modification comprises at least one nucleotide within the genomic coordinates chosen from: chr6:29942891-29942915; chr6:29942609-29942633; chr6:29944266-29944290; chr6:29942889-29942913; chr6:29944471-29944495; and chr6:29944470-29944494.
[0040] Embodiment 4 is an engineered human cell, which has reduced or eliminated surface expression of HLA-A relative to an unmodified cell, comprising a genetic modification in the HLA-A gene, wherein the genetic modification comprises at least one nucleotide within the genomic coordinates chosen from: chr6:29942891-29942915; chr6:29942609-29942633; chr6:29942889-29942913; chr6:29944471-29944495; chr6:29944266-29944290; chr6:29942785-29942809.
[0041] Embodiment 5 is an engineered human cell, which has reduced or eliminated surface expression of HLA-A relative to an unmodified cell, comprising a genetic modification in an HLA-A gene, wherein the genetic modification comprises an indel, a C to T substitution, or an A to G substitution within the genomic coordinates chosen from: chr6:29942891-29942915; chr6:29942609-29942633; chr6:29944266-29944290; chr6:29942889-29942913; chr6:29944471-29944495; and chr6:29944470-29944494.
[0042] Embodiment 6 is an engineered human cell, which has reduced or eliminated surface expression of HLA-A relative to an unmodified cell, comprising a genetic modification in an HLA-A gene, wherein the genetic modification comprises an indel, a C to T substitution, or an A to G substitution within the genomic coordinates chosen from: chr6:29942891-29942915; chr6:29942609-29942633; chr6:29942889-29942913; chr6:29944471-29944495; chr6:29944266-29944290; chr6:29942785-29942809.
[0043] Embodiment 7 is the engineered cell of any one of embodiments 1-6, wherein the HLA-A expression is reduced or eliminated by a genomic editing system that binds to an HLA-A genomic target sequence comprising at least 5 contiguous nucleotides within the genomic coordinates chosen from: chr6:29942891-29942915; chr6:29942609-29942633; chr6:29944266-29944290; chr6:29942889-29942913; chr6:29944471-29944495; and chr6:29944470-29944494 or chosen from chr6:29942891-29942915; chr6:29942609-29942633; chr6:29942889-29942913; chr6:29944471-29944495; chr6:29944266-29944290; chr6:29942785-29942809.
[0044] Embodiment 8 is the engineered cell of any one of embodiments 1-7, wherein the genetic modification comprises at least one nucleotide within the genomic coordinates chosen from any one of the genomic coordinates listed in Table 1.
[0045] Embodiment 9 is the engineered cell of any one of embodiments 1-8, wherein the cell is homozygous for HLA-C.
[0046] Embodiment 10 is the engineered cell of any one of embodiments 1-9, wherein the cell is homozygous for HLA-B and homozygous for HLA-C.
[0047] Embodiment 11 is a composition comprising an HLA-A guide RNA and optionally an RNA-guided DNA binding agent or nucleic acid encoding an RNA-guided DNA binding agent, wherein the HLA-A guide RNA comprises: i. a guide sequence selected from SEQ ID NOs: 66, 61, 2-60, 62-65, 67-80; ii. at least 19, 20, 21, 22, 23, or 24 contiguous nucleotides of a sequence selected from SEQ ID NOs: 66, 61, 2-60, 62-65, 67-80; or iii. a guide sequence that is at least 95%, 90%, or 85% identical to a sequence selected from SEQ ID NOs: 66, 61, 2-60, 62-65, 67-80; iv. a sequence that comprises 10 contiguous nucleotides±10 nucleotides of a genomic coordinate listed in Table 1; v. at least 20, 21, 22, 23, or 24, contiguous nucleotides of a sequence from (iv); or vi. a guide sequence that is at least 95%, 90%, or 85% identical to a sequence selected from (iv).
[0048] Embodiment 12 is a method of making an engineered human cell, which has reduced or eliminated surface expression of HLA-A protein relative to an unmodified cell, comprising contacting a cell with a composition comprising an HLA-A guide RNA and optionally an RNA-guided DNA binding agent or nucleic acid encoding an RNA-guided DNA binding agent, wherein the HLA-A guide RNA comprises: i. a guide sequence selected from SEQ ID NOs: 66, 61, 2-60, 62-65, 67-80; ii. at least 20, 21, 22, 23, or 24 contiguous nucleotides of a sequence selected from SEQ ID NOs: 66, 61, 2-60, 62-65, 67-80; or iii. a guide sequence that is at least 95%, 90%, or 85% identical to a sequence selected from SEQ ID NOs: 66, 61, 2-60, 62-65, 67-80; iv. a sequence that comprises 10 contiguous nucleotides±10 nucleotides of a genomic coordinate listed in Table 1; v. at least 20, 21, 22, 23, or 24 contiguous nucleotides of a sequence from (iv); or vi. a guide sequence that is at least 95%, 90%, or 85% identical to a sequence selected from (iv).
[0049] Embodiment 13 is a method of reducing surface expression of HLA-A protein in a human cell relative to an unmodified cell, comprising contacting a cell with a composition comprising an HLA-A guide RNA and optionally an RNA-guided DNA binding agent or nucleic acid encoding an RNA-guided DNA binding agent, wherein the HLA-A guide RNA comprises: i. a guide sequence selected from SEQ ID NOs: 66, 61, 2-60, 62-65, 67-80; ii. at least 20, 21, 22, 23, or 24 contiguous nucleotides of a sequence selected from SEQ ID NOs: 66, 61, 2-60, 62-65, 67-80; or iii. a guide sequence that is at least 95%, 90%, or 85% identical to a sequence selected from SEQ ID NOs: 66, 61, 2-60, 62-65, 67-80; iv. a sequence that comprises 10 contiguous nucleotides±10 nucleotides of a genomic coordinate listed in Table 1; v. at least 20, 21, 22, 23, or 24 contiguous nucleotides of a sequence from (iv); or vi. a guide sequence that is at least 95%, 90%, or 85% identical to a sequence selected from (iv).
[0050] Embodiment 14 is the composition or method of any one of embodiments 11-13, wherein the HLA-A guide RNA comprises a guide sequence of any one of SEQ ID NO: 66, 61, 13, 55, 70, and 71.
[0051] Embodiment 15 is the composition or method of any one of embodiments 11-13, wherein the HLA-A guide RNA comprises a guide sequence of any one of SEQ ID NOs: 61, 66, 13, 17, 55, and 70.
[0052] Embodiment 16 is the composition or method of any one of embodiments 11-13, wherein the HLA-A guide RNA comprises a guide sequence comprising a sequence of SEQ ID NO: 61.
[0053] Embodiment 17 is the composition or method of any one of embodiments 11-13, wherein the HLA-A guide RNA comprises a guide sequence comprising a sequence of SEQ ID NO: 66.
[0054] Embodiment 18 is a population of cells comprising the engineered cells of any one of embodiments 1-10, or the engineered cells produced by the method of any one of embodiments 12-17 or by use of the composition of embodiment 11.
[0055] Embodiment 19 is a pharmaceutical composition comprising (a) the engineered cells of any one of embodiments 1-10; the engineered cells produced by the method of any one of embodiments 12-17 or by use of the composition of embodiment 11; or (b) a population of cells of embodiment 18.
[0056] Embodiment 20 is an engineered human cell, which has reduced or eliminated surface expression of TRAC relative to an unmodified cell, comprising a genetic modification in the TRAC gene, wherein the genetic modification comprises at least one nucleotide within the genomic coordinates chr14:22547505-22551621 or chr14:22547462-22551621.
[0057] Embodiment 21 is the engineered cell of embodiment 20, wherein the genetic modification comprises at least one nucleotide within the genomic coordinates chosen from any one of the genomic coordinates listed in Table 2 or wherein the genetic modification comprises at least one nucleotide within the genomic coordinates targeted by a guide RNA comprising a guide sequence of any one of SEQ ID NOs: 111, 107, 101-106, 108-110, and 112-120.
[0058] Embodiment 22 is the engineered cell of embodiment 20 or 21, wherein the genetic modification comprises at least one nucleotide within the genomic coordinates chosen from: chr14:22550574-22550598; chr14:22550544-22550568; chr14:22547505-22547529; or chr14:22547525-22547549; chr14:22547674-22547698.
[0059] Embodiment 23 is the engineered cell of embodiment 20 or 21, wherein the genetic modification comprises at least one nucleotide within the genomic coordinates chr14:22547481-22547505.
[0060] Embodiment 24 is the engineered cell of embodiment 20 or 21, wherein the genetic modification comprises at least one nucleotide within the genomic coordinates chr14:22547471-22547495.
[0061] Embodiment 25 is the engineered cell of embodiment 20 or 21, wherein the genetic modification comprises at least one nucleotide within the genomic coordinates chr14:22547470-22547494.
[0062] Embodiment 26 is the engineered cell of embodiment 20 or 21, wherein the genetic modification comprises at least one nucleotide within the genomic coordinates chr14:22547462-22547486.
[0063] Embodiment 27 is an engineered human cell, which has reduced or eliminated expression of TRAC relative to an unmodified cell, comprising a genetic modification in the TRAC gene, wherein the genetic modification comprises an indel, a C to T substitution, or an A to G substitution within the genomic coordinates chosen from: chr14:22550574-22550598; chr14:22550544-22550568; chr14:22547505-22547529; chr14:22547525-22547549; or chr14:22547674-22547698.
[0064] Embodiment 28 is the engineered cell of any one of embodiments 20-27, wherein the TRAC expression is reduced or eliminated by a genomic editing system that binds to a TRAC target sequence comprising at least 5 contiguous nucleotides within the genomic coordinates chosen from: chr14:22550574-22550598; chr14:22550544-22550568; chr14:22547505-22547529; chr14:22547525-22547549; or chr14:22547674-22547698.
[0065] Embodiment 29 is a composition comprising: a) a TRAC guide RNA comprising a guide sequence that i) targets a TRAC genomic target sequence; or ii) directs an RNA-guided DNA binding agent to induce a double stranded break (DSB) or a single-stranded break (SSB) in a TRAC genomic target sequence comprising at least 10 contiguous nucleotides within the genomic coordinates chosen from: chr14:22550574-22550598; chr14:22550544-22550568; chr14:22547505-22547529; chr14:22547525-22547549; or chr14:22547674-22547698.
[0066] Embodiment 30 is a composition comprising: (a) a TRAC guide RNA and optionally (b) an RNA-guided DNA binding agent or a nucleic acid encoding an RNA-guided DNA binding agent, wherein the TRAC guide RNA comprises: i) a guide sequence selected from SEQ ID NOs: 111, 107, 101-106, 108-110, and 112-120; ii) at least 20, 21, 22, 23, or 24 contiguous nucleotides of a sequence selected from SEQ ID NOs: 111, 107, 101-106, 108-110, and 112-120; or iii) a guide sequence that is at least 95%, 90%, or 85% identical to a sequence selected from SEQ ID NOs: 111, 107, 101-106, 108-110, and 112-120; or iv) a sequence that comprises 10 contiguous nucleotides±10 nucleotides of a genomic coordinate listed in Table 2; v) at least 20, 21, 22, 23, or 24 contiguous nucleotides of a sequence from (iv); or vi) a guide sequence that is at least 95%, 90%, or 85% identical to a sequence selected from (iv).
[0067] Embodiment 31 is the composition of embodiment 30, for use in altering a DNA sequence within the TRAC locus in a cell.
[0068] Embodiment 32 is the composition of embodiment 30, for use in reducing or eliminating the expression of TRAC protein in a cell.
[0069] Embodiment 33 is a method of making an engineered human cell, which has reduced or eliminated surface expression of TRAC protein relative to an unmodified cell, comprising contacting a cell with a composition comprising: (a) a TRAC guide RNA and optionally (b) an RNA-guided DNA binding agent or a nucleic acid encoding an RNA-guided DNA binding agent, wherein the TRAC guide RNA comprises: i) a guide sequence selected from SEQ ID NOs: 111, 107, 101-106, 108-110, and 112-120; ii) at least 20, 21, 22, 23, or 24 contiguous nucleotides of a sequence selected from SEQ ID NOs: 111, 107, 101-106, 108-110, and 112-120; or iii) a guide sequence that is at least 95%, 90%, or 85% identical to a sequence selected from SEQ ID NOs: 111, 107, 101-106, 108-110, and 112-120; or iv) a sequence that comprises 10 contiguous nucleotides±10 nucleotides of a genomic coordinate listed in Table 2; v) at least 20, 21, 22, 23, or 24 contiguous nucleotides of a sequence from (iv); or vi) a guide sequence that is at least 95%, 90%, or 85% identical to a sequence selected from (iv).
[0070] Embodiment 34 is a method of reducing surface expression of TRAC protein in a human cell relative to an unmodified cell, comprising contacting a cell with a composition comprising: (a) a TRAC guide RNA and optionally (b) an RNA-guided DNA binding agent or a nucleic acid encoding an RNA-guided DNA binding agent, wherein the TRAC guide RNA comprises: i) a guide sequence selected from SEQ ID NOs: 111, 107, 101-106, 108-110, and 112-120; ii) at least 20, 21, 22, 23, 24, or 25 contiguous nucleotides of a sequence selected from SEQ ID NOs: 111, 107, 101-106, 108-110, and 112-120; or iii) a guide sequence that is at least 95%, 90%, or 85% identical to a sequence selected from SEQ ID NOs: 111, 107, 101-106, 108-110, and 112-120; or iv) a sequence that comprises 10 contiguous nucleotides±10 nucleotides of a genomic coordinate listed in Table 2; v) at least 20, 21, 22, 23, 24, or 25 contiguous nucleotides of a sequence from (iv); or vi) a guide sequence that is at least 95%, 90%, or 85% identical to a sequence selected from (iv).
[0071] Embodiment 35 is the composition or method of any one of embodiments 29-34, wherein the TRAC guide RNA comprises a guide sequence of any one of SEQ ID NO: 111, 107, 101, 102, and 103.
[0072] Embodiment 36 is the composition or method of any one of embodiments 29-34, wherein the TRAC guide RNA comprises a guide sequence comprising a sequence of SEQ ID NO: 107.
[0073] Embodiment 37 is the composition or method of any one of embodiments 29-34, wherein the TRAC guide RNA comprises a guide sequence comprising a sequence of SEQ ID NO: 111.
[0074] Embodiment 38 is the composition or method of any one of embodiments 29-34, wherein the TRAC guide RNA comprises a guide sequence comprising a sequence of SEQ ID NO: 117.
[0075] Embodiment 39 is the composition or method of any one of embodiments 29-34, wherein the TRAC guide RNA comprises a guide sequence comprising a sequence of SEQ ID NO: 118.
[0076] Embodiment 40 is the composition or method of any one of embodiments 29-34, wherein the TRAC guide RNA comprises a guide sequence comprising a sequence of SEQ ID NO: 119.
[0077] Embodiment 41 is the composition or method of any one of embodiments 29-34, wherein the TRAC guide RNA comprises a guide sequence comprising a sequence of SEQ ID NO: 120.
[0078] Embodiment 42 is a population of cells comprising the engineered cells of any one of embodiments 20-28 or the engineered cells produced by use of the composition of claim 29 or 30 or the method of any one of embodiments 33-41, wherein greater than about 50%, greater than about 55%, greater than about 60%, greater than about 65%, greater than about 70%, greater than about 75%, greater than about 80%, greater than about 85%, greater than about 90%, greater than about 95%, greater than about 98%, or greater than about 99% of the population of cells are CD3-cells.
[0079] Embodiment 43 is a population of cells comprising the engineered cells of any one of embodiments 20-28, or the engineered cells produced by use of the composition of embodiment 29 or 30 or by the method of any one of embodiments 33-41, or the population of cells of embodiment 42, wherein greater than about 50%, greater than about 55%, greater than about 60%, greater than about 65%, greater than about 70%, greater than about 75%, greater than about 80%, greater than about 85%, greater than about 90%, greater than about 95%, greater than about 98%, or greater than about 99% of the population lacks an endogenous T-cell receptor.
[0080] Embodiment 44 is a population of cells comprising the engineered cells of any one of embodiments 20-28, or the engineered cells produced by use of the composition of embodiment 29 or 30 or by the method of any one of embodiments 33-41, or the population of cells of embodiment 42 or 43, wherein the expression of the TRAC gene in the population has been reduced relative to an unaltered population of the same cell by at least about 50%, at least about 55%, by at least about 60%, at least about 65%, at least about 70%, by at least about 75%, at least about 80%, at least about 85%, by at least about 90%, at least about 95%, or at least about 98%, or at least about 99%.
[0081] Embodiment 45 is a pharmaceutical composition comprising the engineered cells of any one of embodiments 20-28, or the engineered cells produced by use of the composition of embodiment 29 or 30 or by the method of any one of embodiments 33-41, or the population of cells of any one of embodiments 42-44.
[0082] Embodiment 46 is an engineered cell, which has reduced or eliminated surface expression of TRBC relative to an unmodified cell, comprising a genetic modification in the TRBC locus, wherein the genetic modification comprises at least one nucleotide within the genomic coordinates chr7: 142791756-142802543.
[0083] Embodiment 47 is an engineered cell, which has reduced or eliminated surface expression of TRBC relative to an unmodified cell, comprising a genetic modification in the TRBC locus, wherein the genetic modification comprises at least one nucleotide within the genomic coordinates: (a) chr7:142791862-142793149; (b) chr7: 142791756-142792721; or (c) chr7:142801104-142802543; or wherein the genetic modification comprises at least one nucleotide within the genomic coordinates targeted by a guide RNA comprising a guide sequence of any one of SEQ ID NOs: 215, 201-214, and 216-265.
[0084] Embodiment 48 is the engineered cell of embodiments 46 or 47, wherein the genetic modification comprises at least one nucleotide within the genomic coordinates chosen from any one of the genomic coordinates listed in Table 3.
[0085] Embodiment 49 is the engineered cell of embodiments 46 or 47, wherein the genetic modification comprises at least one nucleotide within the genomic coordinates chosen from: (a) chr7:142792690-142792714; or chr7:142792693-142792717; or (b) chr7:142791756-142791780; chr7:142791761-142791785; chr7:142791820-142791844; chr7:142791939-142791963; chr7:142791940-142791964; or chr7:142792004-142792028; or (c) chr7:142801104-142801124; chr7:142802103-142802127; or chr7:142802106-142802130.
[0086] Embodiment 50 is the engineered cell of embodiment 46 or 47, wherein the genetic modification comprises at least one nucleotide within the genomic coordinates chosen from: chr7:142792690-142792714; chr7:142802103-142802127; and chr7:142802106-14280213.
[0087] Embodiment 51 is an engineered cell, which has reduced or eliminated expression of TRBC relative to an unmodified cell, comprising a genetic modification in the human TRBC gene, wherein the genetic modification comprises an indel, a C to T substitution, or an A to G substitution within the genomic coordinates (a) chr7:142791862-142793149; (b) chr7: 142791756-142792721; or (c) chr7:142801104-142802543.
[0088] Embodiment 52 is an engineered human cell, which has reduced or eliminated expression of TRBC relative to an unmodified cell, comprising a genetic modification in the TRBC gene, wherein the genetic modification comprises an indel, a C to T substitution, or an A to G substitution within the genomic coordinates chosen from: (a) chr7:142792690-142792714 or chr7:142792693-142792717; or (b) chr7:142791756-142791780; chr7:142791761-142791785; chr7:142791820-142791844; chr7:142791939-142791963; chr7:142791940-142791964; or chr7:142792004-142792028; or (c) chr7:142801104-142801124; chr7:142802103-142802127; or chr7:142802106-142802130.
[0089] Embodiment 53 is an engineered human cell, which has reduced or eliminated expression of TRBC relative to an unmodified cell, comprising a genetic modification in the TRBC gene, wherein the genetic modification comprises an indel, a C to T substitution, or an A to G substitution within the genomic coordinates chosen from: chr7:142792690-142792714; chr7:142802103-142802127; and chr7:142802106-14280213.
[0090] Embodiment 54 is the engineered cell of any one of embodiments 46-53, wherein the TRBC expression is reduced or eliminated by a genomic editing system that binds to a TRBC target sequence comprising at least 5 contiguous nucleotides within the genomic coordinates chosen from: (a) chr7:142792690-142792714 or chr7:142792693-142792717; or (b) chr7:142791756-142791780; chr7:142791761-142791785; chr7:142791820-142791844; chr7:142791939-142791963; chr7:142791940-142791964; or chr7:142792004-142792028; or (c) chr7:142801104-142801124; chr7:142802103-142802127; or chr7:142802106-142802130.
[0091] Embodiment 55 is the engineered cell of any one of embodiments 46-54, wherein the TRBC expression is reduced or eliminated by a genomic editing system that binds to a TRBC target sequence comprising at least 5 contiguous nucleotides within the genomic coordinates chosen from: chr7:142792690-142792714; chr7:142802103-142802127; and chr7:142802106-14280213.
[0092] Embodiment 56 is a composition comprising (a) a TRBC guide RNA and optionally (b) an RNA-guided DNA binding agent or a nucleic acid encoding an RNA-guided DNA binding agent, wherein the TRBC guide RNA comprises: i) a guide sequence selected from SEQ ID NOs: 215, 201-214, and 216-265; ii) at least 20, 21, 22, 23, 24, or 25 contiguous nucleotides of a sequence selected from SEQ ID NOs: 215, 201-214, and 216-265; iii) a guide sequence that is at least 95%, 90%, or 85% identical to a sequence selected from SEQ ID NOs: 215, 201-214, and 216-265; iv) a sequence that comprises 10 contiguous nucleotides±10 nucleotides of a genomic coordinate listed in Table 3; v) at least 20, 21, 22, 23, 24, or 25 contiguous nucleotides of a sequence from (iv); or vi) a guide sequence that is at least 95%, 90%, or 85% identical to a sequence selected from (iv).
[0093] Embodiment 57 is the composition of embodiment 56, for use in altering a DNA sequence within the TRBC locus in a cell.
[0094] Embodiment 58 is the composition of embodiment 56, for use in reducing or eliminating the expression of TRBC protein in a cell.
[0095] Embodiment 59 is a method of making an engineered human cell, which has reduced or eliminated surface expression of TRBC protein relative to an unmodified cell, comprising contacting a cell with: (a) a TRBC guide RNA and optionally (b) an RNA-guided DNA binding agent or a nucleic acid encoding an RNA-guided DNA binding agent, wherein the TRBC guide RNA comprises: i) a guide sequence selected from SEQ ID NOs: 215, 201-214, and 216-265; ii) at least 20, 21, 22, 23, 24, or 25 contiguous nucleotides of a sequence selected from SEQ ID NOs: 215, 201-214, and 216-265; iii) a guide sequence that is at least 95%, 90%, or 85% identical to a sequence selected from SEQ ID NOs: 215, 201-214, and 216-265; iv) a sequence that comprises 10 contiguous nucleotides±10 nucleotides of a genomic coordinate listed in Table 3; v) at least 20, 21, 22, 23, 24, or 25 contiguous nucleotides of a sequence from (iv); or vi) a guide sequence that is at least 95%, 90%, or 85% identical to a sequence selected from (iv).
[0096] Embodiment 60 is a method of reducing surface expression of TRBC protein in a human cell relative to an unmodified cell, comprising contacting a cell with: (a) a TRBC guide RNA and optionally (b) an RNA-guided DNA binding agent or a nucleic acid encoding an RNA-guided DNA binding agent, wherein the TRBC guide RNA comprises: i) a guide sequence selected from SEQ ID NOs: 215, 201-214, and 216-265; ii) at least 20, 21, 22, 23, 24, or 25 contiguous nucleotides of a sequence selected from SEQ ID NOs: 215, 201-214, and 216-265; iii) a guide sequence that is at least 95%, 90%, or 85% identical to a sequence selected from SEQ ID NOs: 215, 201-214, and 216-265; iv) a sequence that comprises 10 contiguous nucleotides±10 nucleotides of a genomic coordinate listed in Table 3; v) at least 20, 21, 22, 23, 24, or 25 contiguous nucleotides of a sequence from (iv); or vi) a guide sequence that is at least 95%, 90%, or 85% identical to a sequence selected from (iv).
[0097] Embodiment 61 is the method or composition of any one of embodiments 56-60, wherein the TRBC guide RNA comprises a guide sequence of any one of SEQ ID NO: 215, 216, 223, 224, 229, 230, 246, 259, and 260.
[0098] Embodiment 62 is the method or composition of any one of embodiments 56-61, wherein the TRBC guide RNA comprises a guide sequence of any one of SEQ ID NO: 215, 216, 224, 229, 246, 259, and 260.
[0099] Embodiment 63 is the method or composition of any one of embodiments 56-62, wherein the TRBC guide RNA comprises a guide sequence of any one of SEQ ID NOs: 215, 259, and 260.
[0100] Embodiment 64 is a population of cells comprising the engineered cells of any one of embodiments 46-55 or the engineered cells produced by use of the composition of embodiment 56 or by the method of any one of embodiments 59-63, wherein greater than about 50%, greater than about 55%, greater than about 60%, greater than about 65%, greater than about 70%, greater than about 75%, greater than about 80%, greater than about 85%, greater than about 90%, greater than about 95%, greater than about 98%, or greater than about 99% of the population of cells are CD3-cells.
[0101] Embodiment 65 is a population of cells comprising the engineered cells of any one of embodiments 46-55 or the engineered cells produced by use of the composition of embodiment 56 or by the method of any one of embodiments 59-63, wherein greater than about 50%, greater than about 55%, greater than about 60%, greater than about 65%, greater than about 70%, greater than about 75%, greater than about 80%, greater than about 85%, greater than about 90%, greater than about 95%, greater than about 98%, or greater than about 99% of the population lacks an endogenous T-cell receptor.
[0102] Embodiment 66 is a population of cells comprising the engineered cells of any one of embodiments 46-55 or the engineered cells produced by use of the composition of embodiment 56 or by the method of any one of embodiments 59-63, wherein the expression of the TRBC gene in the population has been reduced relative to an unaltered population of the same cell by at least about 50%, at least about 55%, by at least about 60%, at least about 65%, at least about 70%, by at least about 75%, at least about 80%, at least about 85%, by at least about 90%, at least about 95%, at least about 98%, or at least about 99%.
[0103] Embodiment 67 is a pharmaceutical composition comprising (a) the engineered cells of any one of embodiments 46-55, or the engineered cells produced by use of the composition of embodiment 56 or by the method of any one of embodiments 59-63, or (b) a population of cells of any one of embodiments 64-66.
[0104] Embodiment 68 is an engineered cell, which has reduced or eliminated surface expression of MHC class II relative to an unmodified cell, comprising a genetic modification in the CIITA gene, wherein the genetic modification comprises at least one nucleotide within the genomic coordinates chosen from: (a) chr16:10877363-10907788 or (b) chr16:10906515-10908136.
[0105] Embodiment 69 is the engineered cell of embodiment 68, wherein the genetic modification comprises at least one nucleotide within the genomic coordinates chosen from any one of the genomic coordinates listed in Table 4.
[0106] Embodiment 70 is the engineered cell of embodiment 68, wherein the genetic modification comprises at least one nucleotide within the genomic coordinates chosen from: (a) chr16:10907504-10907528; chr16:10906643-10906667; chr16:10907508-10907532; chr16:10907539-10907559; chr16:10895658-10895682; chr16:10895668-10895692; chr16:10895750-10895774; chr16:10895753-10895777; chr16:10895754-10895778; chr16:10898684-10898708; chr16:10901529-10901553; chr16:10902121-10902145; chr16:10902701-10902725; chr16:10904726-10904750; chr16:10904760-10904784; chr16:10906493-10906517; chr16:10906515-10906539; chr16:10906631-10906655; chr16:10906636-10906660; chr16:10906770-10906794; chr16:10906788-10906812; chr16:10906789-10906813; chr16:10906816-10906840; chr16:10907148-10907172; chr16:10907254-10907278; chr16:10907331-10907355; chr16:10907477-10907501; chr16:10907497-10907521; chr16:10907503-10907527; chr16:10907574-10907598; or (b) chr16:10906889-10906913 or chr16:10907504-10907528.
[0107] Embodiment 71 is the engineered cell of embodiment 68, wherein the genetic modification comprises at least one nucleotide within the genomic coordinates chosen from: chr16:10907504-10907528; chr16:10906643-10906667; chr16:10895658-10895682; chr16:10902701-10902725; chr16:10906493-10906517; chr16:10906631-10906655; chr16:10907477-10907501; chr16:10907497-10907521; or chr16:10907508-10907532.
[0108] Embodiment 72 is an engineered cell, which has reduced or eliminated surface expression of MHC class II relative to an unmodified cell, comprising a genetic modification in the CIITA locus, wherein the genetic modification comprises an indel, a C to T substitution, or an A to G substitution within the genomic coordinates chosen from: (a) chr16:10907504-10907528; chr16:10906643-10906667; chr16:10907508-10907532; chr16:10907539-10907559; chr16:10895658-10895682; chr16:10895668-10895692; chr16:10895750-10895774; chr16:10895753-10895777; chr16:10895754-10895778; chr16:10898684-10898708; chr16:10901529-10901553; chr16:10902121-10902145; chr16:10902701-10902725; chr16:10904726-10904750; chr16:10904760-10904784; chr16:10906493-10906517; chr16:10906515-10906539; chr16:10906631-10906655; chr16:10906636-10906660; chr16:10906770-10906794; chr16:10906788-10906812; chr16:10906789-10906813; chr16:10906816-10906840; chr16:10907148-10907172; chr16:10907254-10907278; chr16:10907331-10907355; chr16:10907477-10907501; chr16:10907497-10907521; chr16:10907503-10907527; chr16:10907574-10907598; or (b) chr16:10907504-10907528.
[0109] Embodiment 73 is an engineered cell, which has reduced or eliminated surface expression of MHC class II relative to an unmodified cell, comprising a genetic modification in the CIITA locus, wherein the genetic modification comprises an indel, a C to T substitution, or an A to G substitution within the genomic coordinates chosen from: chr16:10907504-10907528; chr16:10906643-10906667; chr16:10895658-10895682; chr16:10902701-10902725; chr16:10906493-10906517; chr16:10906631-10906655; chr16:10907477-10907501; and chr16:10907497-10907521; chr16:10907504-10907528; chr16:10907508-10907532.
[0110] Embodiment 74 is the engineered cell of any one of embodiments 68-73, wherein the MHC class II expression is reduced or eliminated by a genomic editing system that binds to a CIITA genomic target sequence comprising at least 5 contiguous nucleotides within the genomic coordinates chosen from (a) chr16:10907504-10907528; chr16:10906643-10906667; chr16:10907508-10907532; chr16:10907539-10907559; chr16:10895658-10895682; chr16:10895668-10895692; chr16:10895750-10895774; chr16:10895753-10895777; chr16:10895754-10895778; chr16:10898684-10898708; chr16:10901529-10901553; chr16:10902121-10902145; chr16:10902701-10902725; chr16:10904726-10904750; chr16:10904760-10904784; chr16:10906493-10906517; chr16:10906515-10906539; chr16:10906631-10906655; chr16:10906636-10906660; chr16:10906770-10906794; chr16:10906788-10906812; chr16:10906789-10906813; chr16:10906816-10906840; chr16:10907148-10907172; chr16:10907254-10907278; chr16:10907331-10907355; chr16:10907477-10907501; chr16:10907497-10907521; chr16:10907503-10907527; chr16:10907574-10907598; or chr16:10907504-10907528.
[0111] Embodiment 75 is the engineered cell of any one of embodiments 68-74, wherein the MHC class II expression is reduced or eliminated by a genomic editing system that binds to a CIITA genomic target sequence comprising at least 5 contiguous nucleotides within the genomic coordinates chosen from: chr16:10907504-10907528; chr16:10906643-10906667; chr16:10895658-10895682; chr16:10902701-10902725; chr16:10906493-10906517; chr16:10906631-10906655; chr16:10907477-10907501; chr16:10907497-10907521; or chr16:10907508-10907532.
[0112] Embodiment 76 is a composition comprising (a) a CIITA guide RNA and optionally (b) an RNA-guided DNA binding agent or a nucleic acid encoding an RNA-guided DNA binding agent, wherein the CIITA guide RNA comprises: i) a guide sequence selected from SEQ ID NOs: 301, 422, 302-421, and 423-576; or ii) at least 20, 21, 22, 23, 24, or 25 contiguous nucleotides of a sequence selected from SEQ ID NOs: 301, 422, 302-421, and 423-576; or iii) a guide sequence that is at least 95%, 90%, or 85% identical to a sequence selected from SEQ ID NOs: 301, 422, 302-421, and 423-576; or iv) a sequence that comprises 10 contiguous nucleotides±10 nucleotides of a genomic coordinate listed in Table 4; or v) at least 20, 21, 22, 23, 24, or 25 contiguous nucleotides of a sequence from (iv); or vi) a guide sequence that is at least 95%, 90%, or 85% identical to a sequence selected from (iv).
[0113] Embodiment 77 is the composition of embodiment 76, for use in altering a DNA sequence within the CIITA gene in a cell.
[0114] Embodiment 78 is the composition of embodiment 76, for use in reducing or eliminating the expression of the CIITA in a cell.
[0115] Embodiment 79 is a method of making an engineered human cell, which has reduced or eliminated surface expression of MHC class II protein relative to an unmodified cell, comprising contacting a cell with: (a) a CIITA guide RNA and optionally (b) an RNA-guided DNA binding agent or a nucleic acid encoding an RNA-guided DNA binding agent, wherein the CIITA guide RNA comprises: i) a guide sequence selected from SEQ ID NOs: 301, 422, 302-421, and 423-576; or ii) at least 20, 21, 22, 23, 24, or 25 contiguous nucleotides of a sequence selected from SEQ ID NOs: 301, 422, 302-421, and 423-576; or iii) a guide sequence that is at least 95%, 90%, or 85% identical to a sequence selected from SEQ ID NOs: 301, 422, 302-421, and 423-576; or iv) a sequence that comprises 10 contiguous nucleotides±10 nucleotides of a genomic coordinate listed in Table 4; or v) at least 20, 21, 22, 23, 24, or 25 contiguous nucleotides of a sequence from (iv); or vi) a guide sequence that is at least 95%, 90%, or 85% identical to a sequence selected from (iv).
[0116] Embodiment 80 is a method of reducing surface expression of MHC class II protein in a human cell relative to an unmodified cell, comprising contacting a cell with: (a) a CIITA guide RNA and optionally (b) an RNA-guided DNA binding agent or a nucleic acid encoding an RNA-guided DNA binding agent, wherein the CIITA guide RNA comprises: i) a guide sequence selected from SEQ ID NOs: 301, 422, 302-421, and 423-576; or ii) at least 20, 21, 22, 23, 24, or 25 contiguous nucleotides of a sequence selected from SEQ ID NOs: 301, 422, 302-421, and 423-576; or iii) a guide sequence that is at least 95%, 90%, or 85% identical to a sequence selected from SEQ ID NOs: 301, 422, 302-421, and 423-576; or iv) a sequence that comprises 10 contiguous nucleotides±10 nucleotides of a genomic coordinate listed in Table 4; or v) at least 20, 21, 22, 23, 24, or 25 contiguous nucleotides of a sequence from (iv); or vi) a guide sequence that is at least 95%, 90%, or 85% identical to a sequence selected from (iv).
[0117] Embodiment 81 is the method or composition of any one of embodiments 76-80, wherein the CIITA guide RNA comprises a guide sequence of any one of SEQ ID NOs: 301, 422, 302, 320, 321, 324, 326, 327, 332, 354, 361, 372, 400, 408, 414, 415, 419, 420, 428, 431, 432, 434, 451, 455, 458, 462, 463, 464, 468.
[0118] Embodiment 82 is the method or composition of any one of embodiments 76-81, wherein the CIITA guide RNA comprises a guide sequence of any one of SEQ ID NO: 538.
[0119] Embodiment 83 is the method or composition of any one of embodiments 76-81, wherein the CIITA guide RNA comprises a guide sequence of any one of SEQ ID NOs: 301, 422, 302, 320, 372, 414, 419, 462, and 463.
[0120] Embodiment 84 is a population of cells comprising the engineered cells of any one of embodiments 68-75 or the engineered cells produced by use of the composition of embodiment 76 or by the method of any one of embodiments 79-83, wherein greater than about 50%, greater than about 55%, greater than about 60%, greater than about 65%, greater than about 70%, greater than about 75%, greater than about 80%, greater than about 85%, greater than about 90%, greater than about 95%, greater than about 98%, or greater than about 99% of the population of cells are MHC class II molecules negative as measured by flow cytometry.
[0121] Embodiment 85 is a population of cells comprising the engineered cells of any one of embodiments 68-75 or the engineered cells produced by use of the composition of embodiment 76 or by the method of any one of embodiments 79-83, wherein greater than about 50%, greater than about 55%, greater than about 60%, greater than about 65%, greater than about 70%, greater than about 75%, greater than about 80%, greater than about 85%, greater than about 90%, greater than about 95%, greater than about 98%, or greater than about 99% of the population of cells are negative for MHC class II molecules as measured by next generation sequencing (NGS).
[0122] Embodiment 86 is a population of cells comprising the engineered cells of any one of embodiments 68-75 or the engineered cells produced by use of the composition of embodiment 76 or by the method of any one of embodiments 79-83, wherein the expression of MHC Class II molecules in the population has been reduced relative to an unaltered population of the same cell by at least about 50%, at least about 55%, by at least about 60%, at least about 65%, at least about 70%, by at least about 75%, at least about 80%, at least about 85%, by at least about 90%, at least about 95%, at least about 98%, or at least about 99%.
[0123] Embodiment 87 is a pharmaceutical composition comprising (a) the engineered cells of any one of embodiments 68-75 or the engineered cells produced by use of the composition of embodiment 76 or by the method of any one of embodiments 79-83, or (b) a population of cells of any one of embodiments 84-86.
[0124] Embodiment 88 is an engineered cell comprising a genetic modification in the AAVS1 locus, wherein the genetic modification comprises at least one nucleotide within the genomic coordinates chosen from: chr19: 55115151-55116209.
[0125] Embodiment 89 is the engineered cell of embodiment 88, wherein the genetic modification comprises at least one nucleotide within the genomic coordinates chosen from any one of the genomic coordinates listed in Table 5.
[0126] Embodiment 90 is the engineered cell of embodiment 88, wherein the genetic modification comprises at least one nucleotide within the genomic coordinates chosen from: chr19:55115218-55115242; chr19:55115477-55115501; chr19:55115504-55115528; chr19:55115513-55115537; chr19:55115514-55115538; chr19:55115517-55115541; chr19:55115518-55115542; chr19:55115549-55115573; chr19:55115574-55115598; chr19:55115606-55115630; chr19:55115933-55115957; chr19:55116026-55116050; chr19:55116045-55116069; chr19:55116084-55116108; chr19:55115276-55115300; chr19:55115509-55115533; chr19:55115579-55115603; chr19:55115863-55115887; chr19:55115906-55115930; or chr19:55116006-55116030.
[0127] Embodiment 91 is an engineered cell comprising a genetic modification in the AAVS1 gene, wherein the genetic modification comprises an indel, a C to T substitution, or an A to G substitution within the genomic coordinates chosen from: chr19:55115218-55115242; chr19:55115477-55115501; chr19:55115504-55115528; chr19:55115513-55115537; chr19:55115514-55115538; chr19:55115517-55115541; chr19:55115518-55115542; chr19:55115549-55115573; chr19:55115574-55115598; chr19:55115606-55115630; chr19:55115933-55115957; chr19:55116026-55116050; chr19:55116045-55116069; chr19:55116084-55116108; chr19:55115276-55115300; chr19:55115509-55115533; chr19:55115579-55115603; chr19:55115863-55115887; chr19:55115906-55115930; or chr19:55116006-55116030.
[0128] Embodiment 92 is the engineered cell of any one of embodiments 88-91, wherein the genetic modification is induced by a genomic editing system that binds to an AAVS1 genomic target sequence comprising at least 5 contiguous nucleotides within the genomic coordinates chosen from chr19:55115218-55115242; chr19:55115477-55115501; chr19:55115504-55115528; chr19:55115513-55115537; chr19:55115514-55115538; chr19:55115517-55115541; chr19:55115518-55115542; chr19:55115549-55115573; chr19:55115574-55115598; chr19:55115606-55115630; chr19:55115933-55115957; chr19:55116026-55116050; chr19:55116045-55116069; chr19:55116084-55116108; chr19:55115276-55115300; chr19:55115509-55115533; chr19:55115579-55115603; chr19:55115863-55115887; chr19:55115906-55115930; or chr19:55116006-55116030.
[0129] Embodiment 93 is a composition comprising: a) an AAVS1 guide RNA comprising a guide sequence that i) targets an AAVS1 genomic target sequence; or ii) directs an RNA-guided DNA binding agent to induce a double stranded break (DSB) or a single-stranded break (SSB) in an AAVS1 genomic target sequence comprising at least 10 contiguous nucleotides within the genomic coordinates chosen from: chr19:55115218-55115242; chr19:55115477-55115501; chr19:55115504-55115528; chr19:55115513-55115537; chr19:55115514-55115538; chr19:55115517-55115541; chr19:55115518-55115542; chr19:55115549-55115573; chr19:55115574-55115598; chr19:55115606-55115630; chr19:55115933-55115957; chr19:55116026-55116050; chr19:55116045-55116069; chr19:55116084-55116108; chr19:55115276-55115300; chr19:55115509-55115533; chr19:55115579-55115603; chr19:55115863-55115887; chr19:55115906-55115930; or chr19:55116006-55116030.
[0130] Embodiment 94 is a composition comprising: a) an AAVS1 guide RNA (gRNA) and optionally (b) an RNA-guided DNA binding agent or a nucleic acid encoding an RNA-guided DNA binding agent, wherein the AAVS1 guide RNA comprises: i) a guide sequence selected from SEQ ID NOs: 601-774; ii) at least 20, 21, 22, 23, 24, or 25 contiguous nucleotides of a sequence selected from SEQ ID NOs: 601-774; iii) a guide sequence at least 95%, 90%, or 85% identical to a sequence selected from SEQ ID NOs: 601-774; iv) a sequence that comprises 10 contiguous nucleotides±10 nucleotides of a genomic coordinate listed in Table 5; v) at least 20, 21, 22, 23, 24, or 25 contiguous nucleotides of a sequence from (iv); or vi) a guide sequence that is at least 95%, 90%, or 85% identical to a sequence selected from (iv).
[0131] Embodiment 95 is a method of making an engineered human cell comprising contacting a cell with: (a) an AAVS1 guide RNA and optionally (b) an RNA-guided DNA binding agent or a nucleic acid encoding an RNA-guided DNA binding agent, wherein the AAVS1 guide RNA comprises: i) a guide sequence selected from SEQ ID NOs: 601-774; ii) at least 20, 21, 22, 23, 24, or 25 contiguous nucleotides of a sequence selected from SEQ ID NOs: 601-774; iii) a guide sequence at least 95%, 90%, or 85% identical to a sequence selected from SEQ ID NOs: 601-774; iv) a sequence that comprises 10 contiguous nucleotides±10 nucleotides of a genomic coordinate listed in Table 5; v) at least 20, 21, 22, 23, or 24, contiguous nucleotides of a sequence from (iv); or vi) a guide sequence that is at least 95%, 90%, or 85% identical to a sequence selected from (iv).
[0132] Embodiment 96 is the method or composition of any one of embodiments 93-95, wherein the AAVS1 guide RNA comprises a guide sequence of any one of SEQ ID NOs: 611, 620, 622, 626, 627, 628, 629, 632, 633, 634, 656, 659, 660, 661, 673, 691, 692, 730, 734, and 746.
[0133] Embodiment 97 is the engineered cell, population of cells, pharmaceutical composition, or method of any one of embodiments 1-96, wherein the genetic modification comprises at least 2, at least 3, at least 4, at least 5, at least 6, at least 7, at least 8, at least 9, or at least 10 contiguous nucleotides within the genomic coordinates.
[0134] Embodiment 98 is the engineered cell, population of cells, pharmaceutical composition, or method of any one of embodiments 1-97, wherein the genetic modification comprises at least 5, 6, 7, 8, 9, or 10 contiguous nucleotides within the genomic coordinates.
[0135] Embodiment 99 is the engineered cell, population of cells, pharmaceutical composition, or method of any one of embodiments 1-98, wherein the genomic target sequence comprises at least 10 contiguous nucleotides within the genomic coordinates.
[0136] Embodiment 100 is the engineered cell, population of cells, pharmaceutical composition, or method of any one of embodiments 1-99, wherein the genomic target sequence comprises at least 15 contiguous nucleotides within the genomic coordinates.
[0137] Embodiment 101 is the engineered cell, population of cells, pharmaceutical composition, or method of any one of embodiments 1-100, wherein the genomic target sequence comprises at least 17, 18, 19, 20, 21, 22, 23, or 24 contiguous nucleotides within the genomic coordinates.
[0138] Embodiment 102 is the engineered cell, population of cells, pharmaceutical composition, or method of any one of embodiments 1-101, wherein the genetic modification comprises an indel.
[0139] Embodiment 103 is the engineered cell of any one of embodiments 1-102, wherein the genetic modification comprises an insertion of a heterologous coding sequence.
[0140] Embodiment 104 is the engineered cell, population of cells, pharmaceutical composition, or method of any one of embodiments 1-103, wherein the genetic modification comprises at least one A to G substitution within the genomic coordinates.
[0141] Embodiment 105 is the engineered cell, population of cells, pharmaceutical composition, or method of any one of embodiments 1-104, wherein the genetic modification comprises at least one C to T substitution within the genomic coordinates.
[0142] Embodiment 106 is the engineered cell, population of cells, pharmaceutical composition, or method of any one of embodiments 1-105, wherein the cell has a genetic modification in the CIITA gene.
[0143] Embodiment 107 is the engineered cell, population of cells, pharmaceutical composition, or method of any one of embodiments 1-106, wherein the cell has reduced expression of TRAC protein on the surface of the cell.
[0144] Embodiment 108 is the engineered cell, population of cells, pharmaceutical composition, or method of any one of embodiments 1-107, wherein the cell has reduced expression of TRBC protein on the surface of the cell.
[0145] Embodiment 109 is the engineered cell, population of cells, pharmaceutical composition, or method of any one of embodiments 1-108, wherein the cell has reduced expression of MHC class II molecules on the surface of the cell.
[0146] Embodiment 110 is the engineered cell, population of cells, pharmaceutical composition, or method of any one of embodiments 1-109, wherein the engineered cell is an immune cell.
[0147] Embodiment 111 is the engineered cell, population of cells, pharmaceutical composition, or method of any one of embodiments 1-110, wherein the cell is a primary cell.
[0148] Embodiment 112 is the engineered cell, population of cells, pharmaceutical composition, or method of any one of embodiments 1-111, wherein the engineered cell is a monocyte, macrophage, mast cell, dendritic cell, or granulocyte.
[0149] Embodiment 113 is the engineered cell, population of cells, pharmaceutical composition, or method of any one of embodiments 1-112, wherein the engineered cell is a lymphocyte.
[0150] Embodiment 114 is the engineered cell, population of cells, pharmaceutical composition, or method of any one of embodiments 1-113, wherein the cell is a T cell.
[0151] Embodiment 115 is the engineered cell, population of cells, pharmaceutical composition, or method of any one of embodiments 1-114, wherein the cell is a CD8+ T cell.
[0152] Embodiment 116 is the engineered cell, population of cells, pharmaceutical composition, or method of any one of embodiments 1-114, wherein the cell is a CD4+ T cell.
[0153] Embodiment 117 is the engineered cell, population of cells, pharmaceutical composition, or method of any one of embodiments 1-113, wherein the cell is a natural killer (NK) cell.
[0154] Embodiment 118 is the engineered cell, population of cells, pharmaceutical composition, or method of any one of embodiments 1-113, wherein the cell is a macrophage.
[0155] Embodiment 119 is the engineered cell, population of cells, pharmaceutical composition, or method of any one of embodiments 1-113, wherein the cell is a B cell.
[0156] Embodiment 120 is the engineered cell, population of cells, pharmaceutical composition, or method of any one of embodiments 1-113, wherein the cell is a plasma B cell.
[0157] Embodiment 121 is the engineered cell, population of cells, pharmaceutical composition, or method of any one of embodiments 1-113, wherein the cell is memory B cell.
[0158] Embodiment 122 is the engineered cell, population of cells, pharmaceutical composition, or method of any one of embodiments 1-109, wherein the cell is a stem cell.
[0159] Embodiment 123 is the engineered cell, population of cells, pharmaceutical composition, or method of any one of embodiments 1-109, wherein the cell is a progenitor cell.
[0160] Embodiment 124 is the engineered cell, population of cells, pharmaceutical composition, or method of any one of embodiments 1-109, wherein the cell is an HSC.
[0161] Embodiment 125 is the engineered cell, population of cells, pharmaceutical composition, or method of any one of embodiments 1-109, wherein the cell is an iPSC.
[0162] Embodiment 126 is the engineered cell, population of cells, pharmaceutical composition, or method of any one of embodiments 1-121, wherein the cell is an activated cell.
[0163] Embodiment 127 is the engineered cell, population of cells, pharmaceutical composition, or method of any one of embodiments 1-121, wherein the cell is a non-activated cell.
[0164] Embodiment 128 is the population of embodiment 18 or pharmaceutical composition of embodiment 19, wherein the population of cells is at least 65%, at least 70%, at least 75%, at least 80%, at least 85%, at least 90%, at least 95%, at least 96%, at least 97%, at least 98%, or at least 99% HLA-A negative as measured by flow cytometry.
[0165] Embodiment 129 is the population of any one of embodiments 42-44 and 64-66 or pharmaceutical composition of embodiment 45 or 67, wherein the population of cells is at least 65%, at least 70%, at least 75%, at least 80%, at least 85%, at least 90%, at least 91%, at least 92%, at least 93%, at least 94%, at least 95%, at least 96%, at least 97%, at least 98%, at least 99%, or at least 99.5% endogenous TCR protein negative as measured by flow cytometry.
[0166] Embodiment 130 is the population of any one of embodiments 84-86 or pharmaceutical composition of embodiment 87, wherein the population of cells is at least 65%, at least 70%, at least 75%, at least 80%, at least 85%, at least 90%, at least 95%, at least 96%, at least 97%, at least 98%, at least 99%, or at least 99.5% HLA-DP, DQ, DR negative as measured by flow cytometry.
[0167] Embodiment 131 is the population of embodiment 18 or pharmaceutical composition of embodiment 19, wherein at least 65%, at least 70%, at least 75%, at least 80%, at least 85%, at least 90%, at least 91%, at least 92%, at least 93%, at least 94%, at least 95%, at least 96%, at least 97%, at least 98%, at least 99%, or at least 99.5% of the population of cells comprises the genetic modification in the HLA-A gene as measured by next-generation sequencing (NGS).
[0168] Embodiment 132 is the population of any one of embodiments 42-44 or pharmaceutical composition of embodiment 45, wherein at least 65%, at least 70%, at least 75%, at least 80%, at least 85%, at least 90%, at least 91%, at least 92%, at least 93%, at least 94%, at least 95%, at least 96%, at least 97%, at least 98%, or at least 99% of the population of cells comprises the genetic modification in the TRAC gene as measured by next-generation sequencing (NGS).
[0169] Embodiment 133 is the population of any one of embodiments 64-66 or pharmaceutical composition of embodiment 67, wherein at least 65%, at least 70%, at least 75%, at least 80%, at least 85%, at least 90%, at least 91%, at least 92%, at least 93%, at least 94%, at least 95%, at least 96%, at least 97%, at least 98%, or at least 99% of the population of cells comprises the genetic modification in the TRBC gene as measured by next-generation sequencing (NGS).
[0170] Embodiment 134 is the population of any one of embodiments 84-86 or pharmaceutical composition of embodiment 87, wherein at least 65%, at least 70%, at least 75%, at least 80%, at least 85%, at least 90%, at least 91%, at least 92%, at least 93%, at least 94%, at least 95%, at least 96%, at least 97%, at least 98%, or at least 99% of the population of cells comprises the genetic modification in the CIITA gene as measured by next-generation sequencing (NGS).
[0171] Embodiment 135 is the engineered cell, population of cells, pharmaceutical composition, or method of any one of embodiments 1-134, wherein the cell is an allogeneic cell.
[0172] Embodiment 136 is the engineered cell, population of cells, pharmaceutical composition, or method of any one of embodiments 1-135, wherein the cell is a primary cell.
[0173] Embodiment 137 is the engineered cell, population of cells, pharmaceutical composition, or method of any one of the embodiments 1-136, wherein the cell is a CD4+ T cell.
[0174] Embodiment 138 is the engineered cell, population of cells, pharmaceutical composition, or method of any one of embodiments 1-136, wherein the cell is a CD8+ T cell.
[0175] Embodiment 139 is the engineered cell, population of cells, pharmaceutical composition, or method of any one of embodiments 1-136, wherein the cell is a memory T cell.
[0176] Embodiment 140 is the engineered cell, population of cells, pharmaceutical composition, or method of any one of embodiments 1-136, wherein the cell is a B cell.
[0177] Embodiment 141 is the engineered cell, population of cells, pharmaceutical composition, or method of any one of embodiments 1-136, wherein the cell is a plasma B cell.
[0178] Embodiment 142 is the engineered cell, population of cells, pharmaceutical composition, or method of any one of embodiments 1-136, wherein the cell is a memory B cell.
[0179] Embodiment 143 is the engineered cell, population of cells, pharmaceutical composition, or method of any one of embodiments 1-136, wherein the cell is a natural killer (NK) cell.
[0180] Embodiment 144 is the engineered cell, population of cells, pharmaceutical composition, or method of any one of embodiments 1-136, wherein the cell is a macrophage.
[0181] Embodiment 145 is the engineered cell, population of cells, pharmaceutical composition, or method of any one of embodiments 1-136, wherein the cell is stem cell.
[0182] Embodiment 146 is the engineered cell, population of cells, pharmaceutical composition, or method of any one of embodiments 1-136, wherein the cell is a pluripotent stem cell (PSC).
[0183] Embodiment 147 is the engineered cell, population of cells, pharmaceutical composition, or method of any one of embodiments 1-136, wherein the cell is a hematopoietic stem cell (HSC).
[0184] Embodiment 148 is the engineered cell, population of cells, pharmaceutical composition, or method of any one of embodiments 1-136, wherein the cell is an induced pluripotent stem cell (iPSC).
[0185] Embodiment 149 is the engineered cell, population of cells, pharmaceutical composition, or method of any one of embodiments 1-136, wherein the cell is a mesenchymal stem cell (MSC).
[0186] Embodiment 150 is the engineered cell, population of cells, pharmaceutical composition, or method of any one of embodiments 1-136, wherein the cell is a neural stem cell (NSC).
[0187] Embodiment 151 is the engineered cell, population of cells, pharmaceutical composition, or method of any one of embodiments 1-136, wherein the cell is a limbal stem cell (LSC).
[0188] Embodiment 152 is the engineered cell, population of cells, pharmaceutical composition, or method of any one of embodiments 1-136, wherein the cell is a progenitor cell, e.g. an endothelial progenitor cell or a neural progenitor cell.
[0189] Embodiment 153 is the engineered cell, population of cells, pharmaceutical composition, or method of any one of embodiments 1-136, wherein the cell is a tissue-specific primary cell.
[0190] Embodiment 154 is the engineered cell, population of cells, pharmaceutical composition, or method of any one of embodiments 1-136, wherein the cell is a chosen from: chondrocyte, myocyte, and keratinocyte.
[0191] Embodiment 155 is the engineered cell, population of cells, pharmaceutical composition, or method of any one of embodiments 1-136, wherein the cell is an activated cell.
[0192] Embodiment 156 is the engineered cell, population of cells, pharmaceutical composition, or method of any one of embodiments 1-136, wherein the cell is a non-activated cell.
[0193] Embodiment 157 is the engineered cell, population of cells, pharmaceutical composition, or method of any one of embodiments 1-156, wherein the cells are engineered with a genomic editing system.
[0194] Embodiment 158 is the engineered cell, population of cells, pharmaceutical composition, or method of any one of embodiments 7-157, wherein the genomic editing system comprises an RNA-guided DNA-binding agent or a nucleic acid encoding an RNA-guided DNA binding agent.
[0195] Embodiment 159 is the engineered cell, population of cells, pharmaceutical composition, or method of embodiment 158, wherein the RNA-guided DNA-binding agent or the RNA-guided DNA-binding agent encoded by the nucleic acid is N. meningitidis Cas9 (NmeCas9).
[0196] Embodiment 160 is the engineered cell, population of cells, pharmaceutical composition, or method of embodiment 159, wherein the NmeCas9 is Nme1Cas9, Nme2Cas9, or Nme3Cas9.
[0197] Embodiment 161 is the engineered cell, population of cells, pharmaceutical composition, or method of any one of embodiments 158-160, wherein the RNA-guided DNA-binding agent or the RNA-guided DNA-binding agent encoded by the nucleic acid has double-stranded endonuclease activity.
[0198] Embodiment 162 is the engineered cell, population of cells, pharmaceutical composition, or method of any one of embodiments 158-161, wherein the RNA-guided DNA-binding agent or the RNA-guided DNA-binding agent encoded by the nucleic acid has nickase activity.
[0199] Embodiment 163 is the engineered cell, population of cells, pharmaceutical composition, or method of any one of embodiments 158-161, wherein the RNA-guided DNA-binding agent or the RNA-guided DNA-binding agent encoded by the nucleic acid comprises a dCas9 DNA binding domain.
[0200] Embodiment 164 is the engineered cell, population of cells, pharmaceutical composition, or method of any one of embodiments 158-160, wherein the RNA-guided DNA-binding agent or nucleic acid encoding the RNA-guided DNA binding agent is a A to G base editor.
[0201] Embodiment 165 is the engineered cell, population of cells, pharmaceutical composition, or method of any one of embodiments 158-160, wherein the RNA-guided DNA-binding agent or nucleic acid encoding the RNA-guided DNA binding agent is a C to T base editor.
[0202] Embodiment 166 is the engineered cell, population of cells, pharmaceutical composition, or method of any one of embodiments 158-165, wherein the RNA-guided DNA-binding agent or the RNA-guided DNA-binding agent encoded by the nucleic acid comprises a deaminase region.
[0203] Embodiment 167 is the engineered cell of embodiment 158, wherein the RNA-guided DNA-binding agent or the RNA-guided DNA-binding agent encoded by the nucleic acid comprises an APOBEC3A deaminase (A3A) and an N. meningitidis Cas9 nickase.
[0204] Embodiment 168 is the engineered cell, population of cells, pharmaceutical composition, or method of any one of embodiments 1-167, wherein the guide RNA is provided to the cell in a vector.
[0205] Embodiment 169 is the engineered cell, population of cells, pharmaceutical composition, or method of any one of embodiments 1-168, wherein the RNA-guided DNA binding agent is provided to the cell in a vector, optionally in the same vector as the guide RNA.
[0206] Embodiment 170 is the engineered cell, population of cells, pharmaceutical composition, or method of any one of embodiments 1-169, wherein the exogenous nucleic acid is provided to the cell in a vector.
[0207] Embodiment 171 is the engineered cell, population of cells, pharmaceutical composition, or method of any one of embodiments 168-170, wherein the vector is a viral vector.
[0208] Embodiment 172 is the engineered cell, population of cells, pharmaceutical composition, or method of any one of embodiments 168-170, wherein the vector is a non-viral vector.
[0209] Embodiment 173 is the engineered cell, population of cells, pharmaceutical composition, or method of any one of embodiments 168-171, wherein the vector is a lentiviral vector.
[0210] Embodiment 174 is the engineered cell, population of cells, pharmaceutical composition, or method of any one of embodiments 168-171, wherein the vector is a retroviral vector.
[0211] Embodiment 175 is the engineered cell, population of cells, pharmaceutical composition, or method of any one of embodiments 168-171, wherein the vector is an AAV.
[0212] Embodiment 176 is the engineered cell, population of cells, pharmaceutical composition, or method of any one of embodiments 1-175, wherein the guide RNA is provided to the cell in a lipid nucleic acid assembly composition, optionally in the same lipid nucleic acid assembly composition as an RNA-guided DNA binding agent.
[0213] Embodiment 177 is the engineered cell, population of cells, pharmaceutical composition, or method of any one of embodiments 1-176, wherein the exogenous nucleic acid is provided to the cell in a lipid nucleic acid assembly composition.
[0214] Embodiment 178 is the engineered cell, population of cells, pharmaceutical composition, or method of embodiment 176 or 177, wherein the lipid nucleic acid assembly composition is a lipid nanoparticle (LNP).
[0215] Embodiment 179 is the engineered cell, population of cells, pharmaceutical composition, or method of any one of embodiments 1-178, wherein the exogenous nucleic acid is integrated into the genome of the cell.
[0216] Embodiment 180 is the engineered cell, population of cells, pharmaceutical composition, or method of any one of embodiments 1-179, wherein the exogenous nucleic acid is integrated into the genome of the cell by homologous recombination (HR).
[0217] Embodiment 181 is the engineered cell, population of cells, pharmaceutical composition, or method of any one of embodiments 1-180, wherein the exogenous nucleic acid is integrated into a safe harbor locus in the genome of the cell.
[0218] Embodiment 182 is the engineered cell, population of cells, pharmaceutical composition, or method of any one of embodiments 1-181, wherein the guide RNA is a single guide RNA.
[0219] Embodiment 183 is the engineered cell, population of cells, pharmaceutical composition, or method of embodiment 182, wherein the single guide RNA comprises the nucleotide sequence of SEQ ID NO: 900 3′ to the guide sequence.
[0220] Embodiment 184 is the engineered cell, population of cells, pharmaceutical composition, or method of embodiment 182 or 183, wherein the single guide RNA comprises a guide region and a conserved region, wherein the conserved region comprising one or more of: (a) a shortened repeat/anti-repeat region, wherein the shortened repeat/anti-repeat region lacks 2-24 nucleotides, wherein (i) one or more of nucleotides 37-48 and 53-64 is deleted and optionally one or more of nucleotides 37-64 is substituted relative to SEQ ID NO: 900; and (ii) nucleotide 36 is linked to nucleotide 65 by at least 2 nucleotides; or (b) a shortened hairpin 1 region, wherein the shortened hairpin 1 lacks 2-10, optionally 2-8 nucleotides, wherein (i) one or more of nucleotides 82-86 and 91-95 is deleted and optionally one or more of positions 82-96 is substituted relative to SEQ ID NO: 900; and (ii) nucleotide 81 is linked to nucleotide 96 by at least 4 nucleotides; or (c) a shortened hairpin 2 region, wherein the shortened hairpin 2 lacks 2-18, optionally 2-16 nucleotides, wherein (i) one or more of nucleotides 113-121 and 126-134 is deleted and optionally one or more of nucleotides 113-134 is substituted relative to SEQ ID NO: 900; and (ii) nucleotide 112 is linked to nucleotide 135 by at least 4 nucleotides; wherein one or both nucleotides 144-145 are optionally deleted relative to SEQ ID NO: 900; wherein at least 10 nucleotides are modified nucleotides.
[0221] Embodiment 185 is the engineered cell, population of cells, pharmaceutical composition, or method of any one of embodiments 1-184, wherein the guide RNA comprises at least one modification.
[0222] Embodiment 186 is the engineered cell, population of cells, pharmaceutical composition, or method of embodiment 185, wherein the modification comprises a modified nucleotide selected from a 2′—O-methyl (2′—OMe) modified nucleotide, 2′—O-(2-methoxyethyl) (2′—O-moe) modified nucleotide, a 2′-fluoro (2′—F) modified nucleotide, a phosphorothioate (PS) linkage between nucleotides, or an inverted abasic modified nucleotide.
[0223] Embodiment 187 is the engineered cell, population of cells, pharmaceutical composition, or method of any one of embodiments 1-186, wherein the gRNA comprises a 5′ end modification, a modification in the repeat/anti-repeat region, a modification in the hairpin 1 region, a modification in the hairpin 2 region, or a 3′ end modification.
[0224] Embodiment 188 is the engineered cell, population of cells, pharmaceutical composition, or method of embodiment 187, wherein the 5′ end modification comprises at least one PS linkage, and wherein one or more of: i. there is one PS linkage, and the linkage is between the first and second nucleotides; ii. there are two PS linkages between the first three nucleotides; iii. there are PS linkages between any one or more of the first four nucleotides; and iv. there are PS linkages between any one or more of the first five nucleotides.
[0225] Embodiment 189 is the engineered cell, population of cells, pharmaceutical composition, or method of embodiment 187 or 188, wherein the 5′ end modification further comprises at least one 2′—OMe, 2′—O-moe, inverted abasic, or 2′—F modified nucleotide.
[0226] Embodiment 190 is the engineered cell, population of cells, pharmaceutical composition, or method of any one of embodiments 187-189, wherein the 5′ end modification comprises: i. a modification of one or more of the first 1-4 nucleotides, wherein the modification is a PS linkage, inverted abasic nucleotide, 2′—OMe, 2′—O-moe, or 2′—F; ii. a modification to the first nucleotide with 2′—OMe, 2′—O-moe, or 2′—F, and an optional one or two PS linkages to the next nucleotide or the first nucleotide of the 3′ tail; iii. a modification to the first or second nucleotide with 2′—OMe, 2′—O-moe, or 2′—F, and optionally one or more PS linkages; iv. a modification to the first, second, or third nucleotides with 2′—OMe, 2′—O-moe, or 2′—F, and optionally one or more PS linkages; or v. a modification to the first, second, third, or forth nucleotides with 2′—OMe, 2′—O-moe, or 2′—F, and optionally one or more PS linkages.
[0227] Embodiment 191 is the engineered cell, population of cells, pharmaceutical composition, or method of any one of embodiments 187-180, wherein the 3′ end modification comprises at least one PS linkage, and wherein one or more of: i. there is one PS linkage, and the linkage is between the last and second to last nucleotides; ii. there are two PS linkages between the last three nucleotides; and iii. there are PS linkages between any one or more of the last four nucleotides.
[0228] Embodiment 192 is the engineered cell, population of cells, pharmaceutical composition, or method of 191, wherein the 3′ end modification further comprises at least one 2′-OMe, 2′—O-moe, inverted abasic, or 2′—F modified nucleotide.
[0229] Embodiment 193 is the engineered cell, population of cells, pharmaceutical composition, or method of 192, wherein the 3′ end modification comprises: i. a modification of one or more of the last 1-4 nucleotides, wherein the modification is a PS linkage, inverted abasic nucleotide, 2′—OMe, 2′—O-moe, or 2′—F; ii. a modification to the last nucleotide with 2′—OMe, 2′-O-moe, or 2′—F, and an optional one or two PS linkages to the next nucleotide or the first nucleotide of the 3′ tail; iii. a modification to the last or second to last nucleotide with 2′—OMe, 2′—O-moe, or 2′—F, and optionally one or more PS linkages; iv. a modification to the last, second to last, or third to last nucleotides with 2′—OMe, 2′—O-moe, or 2′—F, and optionally one or more PS linkages; or v. a modification to the last, second to last, third to last, or fourth to last nucleotides with 2′—OMe, 2′—O-moe, or 2′—F, and optionally one or more PS linkages.
[0230] Embodiment 194 is the engineered cell, population of cells, pharmaceutical composition, or method of 193, further comprising a 3′ tail comprising a 2′—O-Me modified nucleotide.
[0231] Embodiment 195 is the engineered cell, population of cells, pharmaceutical composition, or method of any one of embodiments 1-194, wherein the guide RNA comprises a 5′ end modification or a 3′ end modification.
[0232] Embodiment 196 is the method or composition of any one of embodiments 1-195, wherein the guide RNA comprises:
   [0233] the guide sequence, wherein the guide sequence comprises: 2′—O-Me modified nucleotides at the first four nucleotides 1-4; PS linkages between nucleotides 1-2, 2-3, and 3-4; and 2′—O-Me modified nucleotides at nucleotides 5, 8, 9, 11, 13, 18, and 22 of the guide sequence; a shortened repeat/anti-repeat region, wherein nucleotides 38-48 and 53-63 are deleted relative to SEQ ID NO: 900, comprising: 2′—O-Me modified nucleotides at nucleotides 25, 29, 30, 31, 32, 37, 49-52, 64, 65, 69, 70, and 73; a shortened hairpin 1 region, wherein nucleotides 86 and 91 are deleted relative to SEQ ID NO: 900, comprising: 2′—O-Me modified nucleotides at nucleotides 80, 81, 83, 84, 85, 87-90, 92-94, and 99; 2′—O-Me modified nucleotide at nucleotide 101 between the shortened hairpin 1 region and the shortened hairpin 2 region; a shortened hairpin 2 region, wherein nucleotides 112-120 and 127-135 are deleted relative to SEQ ID NO: 900, comprising: 2′—O-Me modified nucleotides at nucleotides 104, 110, 111, 122-125, 142, and 143, PS linkages between nucleotides 141-142 and 142-143, wherein one or both nucleotides 144-145 are optionally deleted relative to SEQ ID NO: 900.
[0234] Embodiment 197 is the method or composition of any one of embodiments 1-196, wherein the guide RNA comprises the modified nucleotides of any one of SEQ ID NOs: 904-909, 911, 995-997, and 1081-1089.
[0235] Embodiment 198 is the method or composition of any one of embodiments 1-197, wherein the guide RNA comprises the modified nucleotides of SEQ ID NO: 995.
[0236] Embodiment 199 is the method or composition of any one of embodiments 1-198, wherein the guide RNA comprises the modified nucleotides of SEQ ID NO: 1083.
[0237] Embodiment 200 is the method or composition of any one of embodiments 1-199, wherein the guide RNA is modified according to the pattern of any one of SEQ ID NOs: 904-909, 911, and 995-997, wherein each N in the pattern is any natural or non-natural nucleotide wherein the N's are collectively any one of the guide sequences of Tables 1-5.
[0238] Embodiment 201 is the method or composition of any one of embodiments 1-200, wherein the guide RNA is modified according to the pattern of SEQ ID NO: 995, wherein each N in the pattern is any natural or non-natural nucleotide wherein the N's are collectively any one of the guide sequences of Tables 1-5.
[0239] Embodiment 202 is a method of administering the engineered cell, population of cells, pharmaceutical composition of any one of embodiments 1-10, 18-28, 42-55, 64-75, 84-92, and 97-195 to a subject in need thereof.
[0240] Embodiment 203 is a method of administering the engineered cell, population of cells, or pharmaceutical composition of any one of embodiments 1-10, 18-28, 42-55, 64-75, 84-92, and 97-195 to a subject as an adoptive cell transfer (ACT) therapy.
[0241] Embodiment 204 is a method of treating a disease or disorder comprising administering the engineered cell, population of cells, or pharmaceutical composition of any one of embodiments 1-10, 18-28, 42-55, 64-75, 84-92, and 97-195 to a subject in need thereof.
[0242] Embodiment 205 is the engineered cell, population of cells, pharmaceutical composition, or method of any one of embodiments 1-10, 18-28, 42-55, 64-75, 84-92, and 97-195, for use in administering to a subject as an adoptive cell transfer (ACT) therapy.
[0243] Embodiment 206 is the engineered cell, population of cells, pharmaceutical composition, or method of any one of embodiments 1-10, 18-28, 42-55, 64-75, 84-92, and 97-195, for use in treating a subject with cancer.
[0244] Embodiment 207 is the engineered cell, population of cells, pharmaceutical composition, or method of any one of embodiments 1-10, 18-28, 42-55, 64-75, 84-92, and 97-195, for use in treating a subject with an infectious disease.
[0245] Embodiment 208 is the engineered cell, population of cells, pharmaceutical composition, or method of any one of embodiments 1-10, 18-28, 42-55, 64-75, 84-92, and 97-195, for use in treating a subject with an autoimmune disease.

### I. Definitions

[0246] Unless stated otherwise, the following terms and phrases as used herein are intended to have the following meanings:

[0247] The term “or combinations thereof” as used herein refers to all permutations and combinations of the listed terms preceding the term. For example, “A, B, C, or combinations thereof” is intended to include at least one of: A, B, C, AB, AC, BC, or ABC, and if order is important in a particular context, also BA, CA, CB, ACB, CBA, BCA, BAC, or CAB. Continuing with this example, expressly included are combinations that contain repeats of one or more item or term, such as BB, AAA, AAB, BBC, CBBA, CABA, and so forth. The skilled artisan will understand that typically there is no limit on the number of items or terms in any combination, unless otherwise apparent from the context.

[0248] As used herein, the term “kit” refers to a packaged set of related components, such as one or more polynucleotides or compositions and one or more related materials such as delivery devices (e.g., syringes), solvents, solutions, buffers, instructions, or desiccants.

[0249] An “allogeneic” cell, as used herein, refers to a cell originating from a donor subject of the same species as a recipient subject, wherein the donor subject and recipient subject have genetic dissimilarity, e.g., genes at one or more loci that are not identical. Thus, e.g., a cell is allogeneic with respect to the subject to be administered the cell. As used herein, a cell that is removed or isolated from a donor, that will not be re-introduced into the original donor, is considered an allogeneic cell.

[0250] An “autologous” cell, as used herein, refers to a cell derived from the same subject to whom the material will later be re-introduced. Thus, e.g., a cell is considered autologous if it is removed from a subject and it will then be re-introduced into the same subject.

[0251] “CIITA” or “CIITA” or “C2TA,” as used herein, refers to the nucleic acid sequence or protein sequence of “class II major histocompatibility complex transactivator;” the human gene has accession number NC_000016.10 (range 10866208 . . . 10941562), reference GRCh38.p13. The CIITA protein in the nucleus acts as a positive regulator of MHC class II gene transcription and is required for MHC class II protein expression.

[0252] As used herein, “MHC” or “MHC molecule(s)” or “MHC protein” or “MHC complex(es),” refers to a major histocompatibility complex molecule (or plural), and includes e.g., MHC class I and MHC class II molecules. In humans, MHC molecules are referred to as “human leukocyte antigen” complexes or “HLA molecules” or “HLA protein.” The use of terms “MHC” and “HLA” are not meant to be limiting; as used herein, the term “MHC” may be used to refer to human MHC molecules, i.e., HLA molecules. Therefore, the terms “MHC” and “HLA” are used interchangeably herein.

[0253] The term “HLA-A,” as used herein in the context of HLA-A protein, refers to the MHC class I protein molecule, which is a heterodimer consisting of a heavy chain (encoded by the HLA-A gene) and a light chain (i.e., beta-2 microglobulin). The term “HLA-A” or “HLA-A gene,” as used herein in the context of nucleic acids refers to the gene encoding the heavy chain of the HLA-A protein molecule. The HLA-A gene is also referred to as “HLA class I histocompatibility, A alpha chain;” the human gene has accession number NC_000006.12 (29942532 . . . 29945870). The HLA-A gene is known to have thousands of different versions (also referred to as “alleles”) across the population (and an individual may receive two different alleles of the HLA-A gene). A public database for HLA-A alleles, including sequence information, may be accessed at IPD-IMGT/HLA: https://www.ebi.ac.uk/ipd/imgt/hla/. All alleles of HLA-A are encompassed by the terms “HLA-A” and “HLA-A gene.”

[0254] “HLA-B” as used herein in the context of nucleic acids refers to the gene encoding the heavy chain of the HLA-B protein molecule. The HLA-B is also referred to as “HLA class I histocompatibility, B alpha chain;” the human gene has accession number NC_000006.12 (31353875 . . . 31357179).

[0255] “HLA-C” as used herein in the context of nucleic acids refers to the gene encoding the heavy chain of the HLA-C protein molecule. The HLA-C is also referred to as “HLA class I histocompatibility, C alpha chain;” the human gene has accession number NC_000006.12 (31268749 . . . 31272092).

[0256] The term “TRAC,” as used herein in the context of TRAC protein, refers to the T-cell receptor a-chain. “TRAC” as used herein in the context of nucleic acids refers to the gene encoding the T-cell receptor a-chain. A human wild-type TRAC sequence is available at NCBI Gene ID: 28755; Ensembl: ENSG00000277734. T Cell Receptor Alpha Constant, TCRA, IMD7, TRCA and TRA are gene synonyms for TRAC.

[0257] The term “TRBC” (or “TRBC1/2”) is used to refer to the nucleic acid sequence or amino acid sequence of the “T-cell receptor 0-chain”, e.g., TRBC1 and TRBC2. The terms “TRBC1” and “TRBC2,” as used herein in the context of TRBC proteins, refer to two homologous proteins that comprise the T-cell receptor 0-chain. “TRBC1” and “TRBC2” as used herein in the context of nucleic acids refers to the genes encoding the T-cell receptor 0-chain. A human wild-type TRBC1 sequence is available at NCBI Gene ID: 28639; Ensembl: ENSG00000211751. T Cell Receptor Beta Constant, V_segment Translation Product, BV05S1J2.2, TCRBC1, and TCRB are gene synonyms for TRBC1. A human wild-type TRBC2 sequence is available at NCBI Gene ID: 28638; Ensembl: ENSG00000211772. T Cell Receptor Beta Constant, V_segment Translation Product, and TCRBC2 are gene synonyms for TRBC2.

[0258] As used herein, the term “AAVS1” refers to the genomic location at chr19:50900000-58617616 according to hg38.

[0259] As used herein, the term “within the genomic coordinates” includes the boundaries of the genomic coordinate range given. For example, if chr6:29942854-chr6:29942913 is given, the coordinates chr6:29942854-chr6:29942913 are encompassed. Throughout this application, the referenced genomic coordinates are based on genomic annotations in the GRCh38 (also referred to as hg38) assembly of the human genome from the Genome Reference Consortium, available at the National Center for Biotechnology Information website. Tools and methods for converting genomic coordinates between one assembly and another are known in the art and can be used to convert the genomic coordinates provided herein to the corresponding coordinates in another assembly of the human genome, including conversion to an earlier assembly generated by the same institution or using the same algorithm (e.g., from GRCh38 to GRCh37), and conversion of an assembly generated by a different institution or algorithm (e.g., from GRCh38 to NCBI33, generated by the International Human Genome Sequencing Consortium). Available methods and tools known in the art include, but are not limited to, NCBI Genome Remapping Service, available at the National Center for Biotechnology Information website, UCSC LiftOver, available at the UCSC Genome Brower website, and Assembly Converter, available at the Ensembl.org website.

[0260] As used herein, the term “homozygous” refers to having two identical alleles of a particular gene.

[0261] As used herein, the term “subject” is intended to include living organisms in which an immune response can be elicited, including e.g., mammals, primates, humans.

[0262] “Polynucleotide” and “nucleic acid” are used herein to refer to a multimeric compound comprising nucleosides or nucleoside analogs which have nitrogenous heterocyclic bases or base analogs linked together along a backbone, including conventional RNA, DNA, mixed RNA-DNA, and polymers that are analogs thereof. A nucleic acid “backbone” can be made up of a variety of linkages, including one or more of sugar-phosphodiester linkages, peptide-nucleic acid bonds (“peptide nucleic acids” or PNA; PCT No. WO 95/32305), phosphorothioate linkages, methylphosphonate linkages, or combinations thereof. Sugar moieties of a nucleic acid can be ribose, deoxyribose, or similar compounds with substitutions, e.g., 2′ methoxy or 2′ halide substitutions. Nitrogenous bases can be conventional bases (A, G, C, T, U), analogs thereof (e.g., modified uridines such as 5-methoxyuridine, pseudouridine, or N1-methylpseudouridine, or others); inosine; derivatives of purines or pyrimidines (e.g., N⁴-methyl deoxyguanosine, deaza- or aza-purines, deaza- or aza-pyrimidines, pyrimidine bases with substituent groups at the 5 or 6 position (e.g., 5-methylcytosine), purine bases with a substituent at the 2, 6, or 8 positions, 2-amino-6-methylaminopurine, O⁶-methylguanine, 4-thio-pyrimidines, 4-amino-pyrimidines, 4-dimethylhydrazine-pyrimidines, and O⁴-alkyl-pyrimidines; U.S. Pat. No. 5,378,825 and PCT No. WO 93/13121). For general discussion see The Biochemistry of the Nucleic Acids 5-36, Adams et al., ed., 11^{th} ed., 1992). Nucleic acids can include one or more “abasic” residues where the backbone includes no nitrogenous base for position(s) of the polymer (U.S. Pat. No. 5,585,481). A nucleic acid can comprise only conventional RNA or DNA sugars, bases and linkages, or can include both conventional components and substitutions (e.g., conventional bases with 2′ methoxy linkages, or polymers containing both conventional bases and one or more base analogs). Nucleic acid includes “locked nucleic acid” (LNA), an analogue containing one or more LNA nucleotide monomers with a bicyclic furanose unit locked in an RNA mimicking sugar conformation, which enhance hybridization affinity toward complementary RNA and DNA sequences (Vester and Wengel, 2004, Biochemistry 43(42):13233-41). RNA and DNA have different sugar moieties and can differ by the presence of uracil or analogs thereof in RNA and thymine or analogs thereof in DNA. [00263]“Guide RNA”, “gRNA”, and simply “guide” are used herein interchangeably to refer to, for example, the guide that directs an RNA-guided DNA binding agent to a target DNA and can be a single guide RNA, or the combination of a crRNA and a trRNA (also known as tracrRNA). Exemplary gRNAs include Class II Cas nuclease guide RNAs, in modified or unmodified forms. The crRNA and trRNA may be associated as a single RNA molecule (single guide RNA, sgRNA) or in two separate RNA strands (dual guide RNA, dgRNA). “Guide RNA” or “gRNA” refers to each type. The trRNA may be a naturally occurring sequence, or a trRNA sequence with modifications or variations compared to naturally-occurring sequences.

[0263] As used herein, a “guide sequence” refers to a sequence within a guide RNA that is complementary to a target sequence and functions to direct a guide RNA to a target sequence for binding or modification (e.g., cleavage) by an RNA-guided DNA binding agent. A “guide sequence” may also be referred to as a “targeting sequence,” or a “spacer sequence.” A guide sequence can be 19, 20, 21, 22, 23, or 24, or 25 nucleotides in length, e.g., in the case of Neisseria meningitides. In some embodiments, the Nme Cas9 guide sequence comprises at least 22, 23, or 24 contiguous nucleotides of a sequence selected from SEQ ID NOs: 2-80, 101-120, 201, 265, 301, 302, 304-576, or 601-774. In some embodiments, the target sequence is in a gene or on a chromosome, for example, and is complementary to the guide sequence. In some embodiments, the degree of complementarity or identity between a guide sequence and its corresponding target sequence is at least 80%, 85%, 90%, or 95%. For example, in some embodiments, the guide sequence comprises a sequence 24 contiguous nucleotides of a sequence selected from SEQ ID NO: 2-80, 101-120, 201, 265, 301, 302, 304-576, or 601-774. In some embodiments, the guide sequence and the target region may be 100% complementary or identical. In other embodiments, the guide sequence and the target region may contain at least one mismatch, i.e., one nucleotide that is not identical or not complementary, depending on the reference sequence. For example, the guide sequence and the target sequence may contain 1-2, preferably no more than 1 mismatch, where the total length of the target sequence is 19, 20, 21, 22, 23, or 24, nucleotides, or more. In some embodiments, the guide sequence and the target region may contain 1-2 mismatches where the guide sequence comprises at least 24 nucleotides, or more. In some embodiments, the guide sequence and the target region may contain 1-2 mismatches where the guide sequence comprises 24 nucleotides. That is, the guide sequence and the target region may form a duplex region having base pairs, or more. In certain embodiments, the duplex region may include 1-2 mismatches such that guide strand and target sequence are not fully complementary. Mismatch positions are known in the art as provided in, for example, PAM distal mismatches tend to be better tolerated than PAM proximal matches. Mismatch tolerances at other positions are known in the art (see, e.g., Edraki et al., 2019. Mol. Cell, 73:1-13).

[0264] Target sequences for RNA-guided DNA binding agents include both the positive and negative strands of genomic DNA (i.e., the sequence given and the sequence's reverse compliment), as a nucleic acid substrate for an RNA-guided DNA binding agent is a double stranded nucleic acid. Accordingly, where a guide sequence is said to be “complementary to a target sequence”, it is to be understood that the guide sequence may direct a guide RNA to bind to the reverse complement of a target sequence. Thus, in some embodiments, where the guide sequence binds the reverse complement of a target sequence, the guide sequence is identical to certain nucleotides of the target sequence (e.g., the target sequence not including the PAM) except for the substitution of U for T in the guide sequence.

[0265] As used herein, an “RNA-guided DNA binding agent” means a polypeptide or complex of polypeptides having RNA and DNA binding activity, or a DNA-binding subunit of such a complex, wherein the DNA binding activity is sequence-specific and depends on the presence of a PAM and the sequence of the guide RNA. Exemplary RNA-guided DNA binding agents include Cas cleavases/nickases and inactivated forms thereof (“dCas DNA binding agents”). “Cas nuclease”, also called “Cas protein” as used herein, encompasses Cas cleavases, Cas nickases, and dCas DNA binding agents. Cas cleavases/nickases and dCas DNA binding agents include a Csm or Cmr complex of a type III CRISPR system, the Cas10, Csm1, or Cmr2 subunit thereof, a Cascade complex of a type I CRISPR system, the Cas3 subunit thereof, and Class 2 Cas nucleases.

[0266] As used herein, a “Class 2 Cas nuclease” is a single-chain polypeptide with RNA-guided DNA binding activity. Class 2 Cas nucleases include Class 2 Cas cleavases/nickases (e.g., H840A, D10A, or N863A variants of Spy Cas9 and D16A and H588A of Nme Cas9, e.g., Nme2 Cas9), which further have RNA-guided DNA cleavases or nickase activity, and Class 2 dCas DNA binding agents, in which cleavase/nickase activity is inactivated. Class 2 Cas nucleases include, for example, Cas9, Cpf1, C2c1, C2c2, C2c3, HF Cas9 (e.g., N497A, R661A, Q695A, Q926A variants), HypaCas9 (e.g., N692A, M694A, Q695A, H698A variants), eSPCas9(1.0) (e.g., K810A, K1003A, R1060A variants), and eSPCas9(1.1) (e.g., K848A, K1003A, R1060A variants) proteins and modifications thereof. Cpf1 protein, Zetsche et al., Cell, 163: 1-13 (2015), is homologous to Cas9, and contains a RuvC-like nuclease domain. Cpf1 sequences of Zetsche are incorporated by reference in their entirety. See, e.g., Zetsche, Tables S1 and S3. See, e.g., Makarova et al., Nat Rev Microbiol, 13(11): 722-36 (2015); Shmakov et al., Molecular Cell, 60:385-397 (2015).

[0267] Several Cas9 orthologs have been obtained from N. meningitidis (Esvelt et al., NAT. METHODS, vol. 10, 2013, 1116-1121; Hou et al., PNAS, vol. 110, 2013, pages 15644-15649) (Nme1Cas9, Nme2Cas9, and Nme3Cas9). The Nme2Cas9 ortholog functions efficiently in mammalian cells, recognizes an N4CC PAM, and can be used for in vivo editing with cognate gRNAs (Ran et al., NATURE, vol. 520, 2015, pages 186-191; Kim et al., NAT. COMMUN., vol. 8, 2017, pages 14500). Nme2Cas9 can be specific and selective, e.g. capable of low off-target editing (Lee et al., MOL. THER., vol. 24, 2016, pages 645-654; Kim et al., 2017). See also e.g., WO/2020081568 (e.g., pages 28 and 42), describing an Nme2Cas9 D16A nickase, the contents of which are hereby incorporated by reference in its entirety. Throughout, “NmeCas9” or “Nme Cas9” is generic and encompasses any type of NmeCas9, including, Nme1Cas9, Nme2Cas9, and Nme3Cas9.

[0268] Exemplary nucleotide and polypeptide sequences of Cas9 molecules are provided in Table 7. Methods for identifying alternate nucleotide sequences encoding Cas9 polypeptide sequences, including alternate naturally occurring variants, are known in the art. Sequences with at least 75%, 80%, 85%, 90%, 95%, 96%, 97%, 98%, or 99% identity to any of the Cas9 nucleic acid sequences, or nucleic acid sequences encoding the amino acid sequences provided herein are also contemplated.

[0269] As used herein, the term “editor” refers to an agent comprising a polypeptide that is capable of making a modification within a DNA sequence. In some embodiments, the editor is a cleavase, such as a Cas9 cleavase. In some embodiments, the editor is capable of deaminating a base within a DNA molecule, and it may be called a base editor. In some embodiments, the editor is capable of deaminating a cytosine (C) in DNA. In some embodiments, the editor is a fusion protein comprising an RNA-guided nickase fused to a cytidine deaminase. In some embodiments, the editor is a fusion protein comprising an RNA-guided nickase fused to an APOBEC3A deaminase (A3A). In some embodiments, the editor comprises a Cas9 nickase fused to an APOBEC3A deaminase (A3A). In some embodiments, the editor is a fusion protein comprising an RNA-guided nickase fused to a cytidine deaminase and a UGI. In some embodiments, the editor lacks a UGI.

[0270] As used herein, a “cytidine deaminase” means a polypeptide or complex of polypeptides that is capable of cytidine deaminase activity, that is catalyzing the hydrolytic deamination of cytidine or deoxycytidine, typically resulting in uridine or deoxyuridine. Cytidine deaminases encompass enzymes in the cytidine deaminase superfamily, and in particular, enzymes of the APOBEC family (APOBEC1, APOBEC2, APOBEC4, and APOBEC3 subgroups of enzymes), activation-induced cytidine deaminase (AID or AICDA) and CMP deaminases (see, e.g., Conticello et al., Mol. Biol. Evol. 22:367-77, 2005; Conticello, Genome Biol. 9:229, 2008; Muramatsu et al., J. Biol. Chem. 274: 18470-6, 1999); Carrington et al., Cells 9:1690 (2020)). In some embodiments, variants of any known cytidine deaminase or APOBEC protein are encompassed. Variants include proteins having a sequence that differs from wild-type protein by one or several mutations (i.e., substitutions, deletions, insertions), such as one or several single point substitutions. For instance, a shortened sequence could be used, e.g., by deleting N-terminal, C-terminal, or internal amino acids, preferably one to four amino acids at the C-terminus of the sequence. As used herein, the term “variant” refers to allelic variants, splicing variants, and natural or artificial mutants, which are homologous to a reference sequence. The variant is “functional” in that it shows a catalytic activity of DNA editing.

[0271] As used herein, the term “APOBEC3A” refers to a cytidine deaminase such as the protein expressed by the human A3A gene. The APOBEC3A may have catalytic DNA editing activity. An amino acid sequence of APOBEC3A has been described (UniPROT accession ID: p31941) and is included herein as SEQ ID NO: 827. In some embodiments, the APOBEC3A protein is a human APOBEC3A protein or a wild-type protein. Variants include proteins having a sequence that differs from wild-type APOBEC3A protein by one or several mutations (i.e., substitutions, deletions, insertions), such as one or several single point substitutions. For instance, a shortened APOBEC3A sequence could be used, e.g., by deleting N-terminal, C-terminal, or internal amino acids, preferably one to four amino acids at the C-terminus of the sequence. As used herein, the term “variant” refers to allelic variants, splicing variants, and natural or artificial mutants, which are homologous to an APOBEC3A reference sequence. The variant is “functional” in that it shows a catalytic activity of DNA editing. In some embodiments, an APOBEC3A (such as a human APOBEC3A) has a wild-type amino acid position 57 (as numbered in the wild-type sequence). In some embodiments, an APOBEC3A (such as a human APOBEC3A) has an asparagine at amino acid position 57 (as numbered in the wild-type sequence).

[0272] As used herein, a “nickase” is an enzyme that creates a single-strand break (also known as a “nick”) in double strand DNA, i.e., cuts one strand but not the other of the DNA double helix. As used herein, an “RNA-guided DNA nickase” means a polypeptide or complex of polypeptides having DNA nickase activity, wherein the DNA nickase activity is sequence-specific and depends on the sequence of the RNA. Exemplary RNA-guided DNA nickases include Cas nickases. Class 2 Cas nickases include, polypeptides in which either the HNH or RuvC catalytic domain is inactivated, for example, Cas9 (e.g., H840A, D10A, or N863A variants of SpyCas9 or D16A variant of NmeCas9). Exemplary amino acid substitutions in the HNH or HNH-like nuclease domain or RuvC or RuvC-like domains for N. meningitidis include Nme2Cas9 D16A (HNH nickase) and Nme2Cas9 H588A (RuvC nickase). Cpf1, C2c1, C2c2, C2c3, HF Cas9 (e.g., N497A, R661A, Q695A, Q926A variants), HypaCas9 (e.g., N692A, M694A, Q695A, H698A variants), eSPCas9(1.0) (e.g., K810A, K1003A, R1060A variants), and eSPCas9(1.1) (e.g., K848A, K1003A, R1060A variants) proteins and modifications thereof. Cpf1 protein, Zetsche et al., Cell, 163: 1-13 (2015), is homologous to Cas9, and contains a RuvC-like protein domain. Cpf1 sequences of Zetsche are incorporated by reference in their entirety. See, e.g., Zetsche, Tables S1 and S3. “Cas9” encompasses S. pyogenes (Spy) Cas9, the variants of Cas9 listed herein, and equivalents thereof. See, e.g., Makarova et al., Nat Rev Microbiol, 13(11): 722-36 (2015); Shmakov et al., Molecular Cell, 60:385-397 (2015).

[0273] As used herein, the term “fusion protein” refers to a hybrid polypeptide which comprises protein domains from at least two different proteins. One protein may be located at the amino-terminal (N-terminal) portion of the fusion protein or at the carboxy-terminal (C-terminal) protein thus forming an “amino-terminal fusion protein” or a “carboxy-terminal fusion protein,” respectively. Any of the proteins provided herein may be produced by any method known in the art. For example, the proteins provided herein may be produced via recombinant protein expression and purification, which is especially suited for fusion proteins comprising a peptide linker. Methods for recombinant protein expression and purification are well known, and include those described by Green and Sambrook, Molecular Cloning: A Laboratory Manual (4th ed., Cold Spring Harbor Laboratory Press, Cold Spring Harbor, N.Y. (2012)), the entire contents of which are incorporated herein by reference.

[0274] The term “linker,” as used herein, refers to a chemical group or a molecule linking two adjacent molecules or moieties. Typically, the linker is positioned between, or flanked by, two groups, molecules, or other moieties and connected to each one via a covalent bond. In some embodiments, the linker is an amino acid or a plurality of amino acids (e.g., a peptide or protein) such as a 16-amino acid residue “XTEN” linker, or a variant thereof (See, e.g., the Examples; and Schellenberger et al. A recombinant polypeptide extends the in vivo half-life of peptides and proteins in a tunable manner. Nat. Biotechnol. 27, 1186-1190 (2009)). In some embodiments, the XTEN linker comprises the sequence SGSETPGTSESATPES (SEQ ID NO: 930), SGSETPGTSESA (SEQ ID NO: 931), or SGSETPGTSESATPEGGSGGS (SEQ ID NO: 932). In some embodiments, the linker is a peptide linker comprising one or more sequences selected from SEQ ID NOs: 933-994.

[0275] As used herein, the term “uracil glycosylase inhibitor” or “UGI” refers to a protein that is capable of inhibiting a uracil-DNA glycosylase (UDG) base-excision repair enzyme.

[0276] As used herein, “open reading frame” or “ORF” of a gene refers to a sequence consisting of a series of codons that specify the amino acid sequence of the protein that the gene codes for. The ORF begins with a start codon (e.g., ATG in DNA or AUG in RNA) and ends with a stop codon, e.g., TAA, TAG or TGA in DNA or UAA, UAG, or UGA in RNA.

[0277] As used herein, “ribonucleoprotein” (RNP) or “RNP complex” refers to a guide RNA together with an RNA-guided DNA binding agent, such as a Cas nuclease, e.g., a Cas cleavase, Cas nickase, or dCas DNA binding agent (e.g., Cas9). In some embodiments, the guide RNA guides the RNA-guided DNA binding agent such as Cas9 to a target sequence, and the guide RNA hybridizes with the target sequence and the agent binds to the target sequence; in cases where the agent is a cleavase or nickase, binding can be followed by cleaving or nicking.

[0278] As used herein, a first sequence is considered to “comprise a sequence with at least X % identity to” a second sequence if an alignment of the first sequence to the second sequence shows that X % or more of the positions of the second sequence in its entirety are matched by the first sequence. For example, the sequence AAGA comprises a sequence with 100% identity to the sequence AAG because an alignment would give 100% identity in that there are matches to all three positions of the second sequence. The differences between RNA and DNA (generally the exchange of uridine for thymidine or vice versa) and the presence of nucleoside analogs such as modified uridines do not contribute to differences in identity or complementarity among polynucleotides as long as the relevant nucleotides (such as thymidine, uridine, or modified uridine) have the same complement (e.g., adenosine for all of thymidine, uridine, or modified uridine; another example is cytosine and 5-methylcytosine, both of which have guanosine or modified guanosine as a complement). Thus, for example, the sequence 5′-AXG where X is any modified uridine, such as pseudouridine, N1-methyl pseudouridine, or 5-methoxyuridine, is considered 100% identical to AUG in that both are perfectly complementary to the same sequence (5′-CAU). Exemplary alignment algorithms are the Smith-Waterman and Needleman-Wunsch algorithms, which are well-known in the art. One skilled in the art will understand what choice of algorithm and parameter settings are appropriate for a given pair of sequences to be aligned; for sequences of generally similar length and expected identity >50% for amino acids or >75% for nucleotides, the Needleman-Wunsch algorithm with default settings of the Needleman-Wunsch algorithm interface provided by the EBI at the www.ebi.ac.uk web server is generally appropriate.

[0279] “Messenger RNA” or “mRNA” is used herein to refer to a polynucleotide and comprises an open reading frame that can be translated into a polypeptide (i.e., can serve as a substrate for translation by a ribosome and amino-acylated tRNAs). mRNA can comprise one or more modifications as provided below.

[0280] As used herein, a “genetic modification” is a change at the DNA level, e.g. induced by a CRISPR/Cas9 gRNA and Cas9 system. A genetic modification may comprise an insertion, deletion, or substitution (i.e., base sequence substitution, i.e., mutation), typically within a defined sequence or genomic locus. A genetic modification changes the nucleic acid sequence of the DNA. A genetic modification may be at a single nucleotide position. A genetic modification may be at multiple nucleotides, e.g., 2, 3, 4, 5 or more nucleotides, typically in close proximity to each other, e.g., contiguous nucleotides. A genetic modification can be in a coding sequence, e.g., an exon sequence. A genetic modification can be at a splice site, i.e., sufficiently close to a splice acceptor site or a splice donor site to disrupt splicing. A genetic modification can include insertion of a nucleotide sequence not endogenous to the genomic locus, e.g., insertion of a coding sequence of a heterologous open reading frame or gene. As used herein, a genetic modification can be used to prevent translation of an endogenous full-length protein having an amino acid sequence of the full-length protein prior to genetic modification of the genomic locus. Prevention of translation of an endogenous full-length protein or gene product includes prevention of translation of a protein or gene product of any length. Translation of an endogenous full-length protein can be prevented, for example, by a frameshift mutation that results in the generation of a premature stop codon or by generation of a nonsense mutation. Translation of an endogenous full-length protein can be prevented by disruption of splicing. Translation of an endogenous full-length protein can be prevented by the insertion of a heterologous coding sequence. Translation of an endogenous full-length protein, e.g., when the endogenous full-length protein contains an unwanted mutation, can be prevented by making a change at one or more positions to change an endogenous full-length protein coding sequence to provide a modified full-length coding sequence different from the endogenous sequence present in the cell, e.g., correction of a point mutation. Translation of an endogenous full-length protein can be prevented by altering the splicing of the endogenous full-length protein to produce a different protein by alternative splicing.

[0281] As used herein, “indel” refers to an insertion or deletion mutation consisting of a number of nucleotides that are either inserted, deleted, or inserted and deleted, e.g. at the site of double-stranded breaks (DSBs), in a target nucleic acid. As used herein, when indel formation results in an insertion, the insertion is a random insertion at the site of a DSB and may or may not be directed by or based on a template sequence.

[0282] As used herein, a “heterologous coding sequence” refers to a coding sequence that has been introduced as an exogenous source within a cell (e.g., inserted at a genomic locus such as a safe harbor locus including a TCR gene locus). That is, the introduced coding sequence is heterologous with respect to at least its insertion site. A polypeptide expressed from such heterologous coding sequence gene is referred to as a “heterologous polypeptide.” The heterologous coding sequence can be naturally-occurring or engineered, and can be wild-type or a variant. The heterologous coding sequence may include nucleotide sequences other than the sequence that encodes the heterologous polypeptide (e.g., an internal ribosomal entry site). The heterologous coding sequence can be a coding sequence that occurs naturally in the genome, as a wild-type or a variant (e.g., mutant). For example, although the cell contains the coding sequence of interest (as a wild-type or as a variant), the same coding sequence or variant thereof can be introduced as an exogenous source for, e.g., expression at a locus that is highly expressed. The heterologous gcoding sequence can also be a coding sequence that is not naturally occurring in the genome, or that expresses a heterologous polypeptide that does not naturally occur in the genome. “Heterologous coding sequence”, “exogenous coding sequence”, and “transgene” are used interchangeably. In some embodiments, the heterologous coding sequence or transgene includes an exogenous nucleic acid sequence, e.g., a nucleic acid sequence is not endogenous to the recipient cell. In some embodiments, the heterologous coding sequence or transgene includes an exogenous nucleic acid sequence, e.g., a nucleic acid sequence that does not naturally occur in the recipient cell. For example, a heterologous coding sequence may be heterologous with respect to its insertion site and with respect to its recipient cell.

[0283] As used herein, “reduced or eliminated” expression of a protein on a cell refers to a partial or complete loss of expression of the protein relative to an unmodified cell. In some embodiments, the surface expression of a protein on a cell is measured by flow cytometry and has “reduced” or “eliminated” surface expression relative to an unmodified cell as evidenced by a reduction in fluorescence signal upon staining with the same antibody against the protein. A cell that has “reduced” or “eliminated” surface expression of a protein by flow cytometry relative to an unmodified cell may be referred to as “negative” for expression of that protein as evidenced by a fluorescence signal similar to a cell stained with an isotype control antibody. The “reduction” or “elimination” of protein expression can be measured by other known techniques in the field with appropriate controls known to those skilled in the art.

[0284] As used herein, “knockdown” refers to a decrease in expression of a particular gene product (e.g., protein, mRNA, or both), e.g., as compared to expression of an unedited target sequence. Knockdown of a protein can be measured by detecting total cellular amount of the protein from a sample, such as a tissue, fluid, or cell population of interest. It can also be measured by measuring a surrogate, marker, or activity for the protein. Methods for measuring knockdown of mRNA are known and include analyzing mRNA isolated from a sample of interest. In some embodiments, “knockdown” may refer to some loss of expression of a particular gene product, for example a decrease in the amount of mRNA transcribed or a decrease in the amount of protein expressed by a cell or population of cells (including in vivo populations such as those found in tissues).

[0285] As used herein, “knockout” refers to a loss of expression from a particular gene or of a particular protein in a cell. Knockout can result in a decrease in expression below the level of detection of the assay. Knockout can be measured either by detecting total cellular amount of a protein in a cell, a tissue or a population of cells.

[0286] As used herein, a “target sequence” or “genomic target sequence” refers to a sequence of nucleic acid in a target gene that has complementarity to the guide sequence of the gRNA. The interaction of the target sequence and the guide sequence directs an RNA-guided DNA binding agent to bind, and potentially nick or cleave (depending on the activity of the agent), within the target sequence.

[0287] As used herein, “treatment” refers to any administration or application of a therapeutic for disease or disorder in a subject, and includes inhibiting the disease, arresting its development, relieving one or more symptoms of the disease, curing the disease, or preventing one or more symptoms of the disease, including recurrence of the symptom.

[0288] Reference will now be made in detail to certain embodiments of the invention, examples of which are illustrated in the accompanying drawings. While the invention is described in conjunction with the illustrated embodiments, it will be understood that they are not intended to limit the invention to those embodiments. On the contrary, the invention is intended to cover all alternatives, modifications, and equivalents, which may be included within the invention as defined by the appended claims and included embodiments.

[0289] Before describing the present teachings in detail, it is to be understood that the disclosure is not limited to specific compositions or process steps, as such may vary. It should be noted that, as used in this specification and the appended claims, the singular form “a”, “an” and “the” include plural references unless the context clearly dictates otherwise. Thus, for example, reference to “a conjugate” includes a plurality of conjugates and reference to “a cell” includes a plurality of cells and the like.

[0290] Numeric ranges are inclusive of the numbers defining the range. Measured and measurable values are understood to be approximate, taking into account significant digits and the error associated with the measurement. Also, the use of “comprise”, “comprises”, “comprising”, “contain”, “contains”, “containing”, “include”, “includes”, and “including” are not intended to be limiting. It is to be understood that both the foregoing general description and detailed description are exemplary and explanatory only and are not restrictive of the teachings.

[0291] Unless specifically noted in the specification, embodiments in the specification that recite “comprising” various components are also contemplated as “consisting of” or “consisting essentially of” the recited components; embodiments in the specification that recite “consisting of” various components are also contemplated as “comprising” or “consisting essentially of” the recited components; and embodiments in the specification that recite “consisting essentially of” various components are also contemplated as “consisting of” or “comprising” the recited components (this interchangeability does not apply to the use of these terms in the claims). The term “or” is used in an inclusive sense, i.e., equivalent to “and/or,” unless the context clearly indicates otherwise.

[0292] The section headings used herein are for organizational purposes only and are not to be construed as limiting the desired subject matter in any way. In the event that any material incorporated by reference contradicts any term defined in this specification or any other express content of this specification, this specification controls. While the present teachings are described in conjunction with various embodiments, it is not intended that the present teachings be limited to such embodiments. On the contrary, the present teachings encompass various alternatives, modifications, and equivalents, as will be appreciated by those of skill in the art.

### II. Genetically Modified Cells

### A. Engineered Cell Compositions

[0293] The present disclosure provides engineered cell compositions which have reduced or eliminated surface expression of HLA-A, HLA-B, TRAC, TRBC, and/or MHC class II relative to an unmodified cell as disclosed herein. In some embodiments, the engineered cell composition comprises a genetic modification in the HLA-A, HLA-B, TRAC, TRBC, and/or CIITA gene. In some embodiments, the engineered cell composition comprises a genetic modification in each of the HLA-A, HLA-B, and CIITA genes. In some embodiments, the engineered cell is an allogeneic cell. In some embodiments, the engineered cell with reduced HLA-A, HLA-B, TRAC, TRBC, and/or MHC class II expression is useful for adoptive cell transfer therapies. In some embodiments, the engineered cell comprises additional genetic modifications in the genome of the cell to yield a cell that is desirable for allogeneic transplant purposes.

[0294] In some embodiments, an engineered cell which has reduced or eliminated surface expression of HLA-A relative to an unmodified cell is provided, comprising a genetic modification in the HLA-A gene, wherein the modification comprises at least one nucleotide from within the genomic coordinates chr6:29942540-29945459. In some embodiments, an engineered cell which has reduced or eliminated surface expression of HLA-A relative to an unmodified cell is provided, comprising a genetic modification in the HLA-A gene, wherein the modification comprises at least one nucleotide from within the genomic coordinates chosen from: chr6:29942891-29942915; chr6:29942609-29942633; chr6:29944266-29944290; chr6:29942889-29942913; chr6:29944471-29944495; and chr6:29944470-29944494.

[0295] In some embodiments, an engineered cell which has reduced or eliminated surface expression of HLA-A relative to an unmodified cell is provided, comprising a genetic modification in the HLA-A gene, wherein the modification comprises at least one nucleotide from within the genomic coordinates chosen from: chr6:29942891-29942915; chr6:29942609-29942633; chr6:29942889-29942913; chr6:29944471-29944495; chr6:29944266-29944290; chr6:29942785-29942809.

[0296] In some embodiments, an engineered cell which has reduced or eliminated surface expression of HLA-A relative to an unmodified cell is provided, comprising a genetic modification in the HLA-A gene, wherein the modification comprises at least 5 contiguous nucleotides within the genomic coordinates chr6:29942540-29945459. In some embodiments, the engineered cell which has reduced or eliminated surface expression of HLA-A relative to an unmodified cell, comprises a genetic modification in the HLA-A gene, wherein the modification comprises at least 6, 7, 8, 9, or 10 contiguous nucleotides within the genomic coordinates.

[0297] In some embodiments, an engineered cell which has reduced or eliminated surface expression of HLA-A relative to an unmodified cell is provided, comprising a genetic modification in the HLA-A gene, wherein the modification comprises at least 5 contiguous nucleotides within the genomic coordinates chosen from: chr6:29942891-29942915; chr6:29942609-29942633; chr6:29944266-29944290; chr6:29942889-29942913; chr6:29944471-29944495; and chr6:29944470-29944494. In some embodiments, the engineered cell which has reduced or eliminated surface expression of HLA-A relative to an unmodified cell, comprises a genetic modification in the HLA-A gene, wherein the modification comprises at least 6, 7, 8, 9, or 10 contiguous nucleotides within the genomic coordinates.

[0298] In some embodiments, an engineered cell which has reduced or eliminated surface expression of HLA-A relative to an unmodified cell is provided, comprising a genetic modification in the HLA-A gene, wherein the modification comprises at least 5 contiguous nucleotides within the genomic coordinates chosen from: chr6:29942891-29942915; chr6:29942609-29942633; chr6:29942889-29942913; chr6:29944471-29944495; chr6:29944266-29944290; chr6:29942785-29942809. In some embodiments, the engineered cell which has reduced or eliminated surface expression of HLA-A relative to an unmodified cell, comprises a genetic modification in the HLA-A gene, wherein the modification comprises at least 6, 7, 8, 9, or 10 contiguous nucleotides within the genomic coordinates.

[0299] In some embodiments, an engineered cell which has reduced or eliminated surface expression of HLA-A relative to an unmodified cell is provided, comprising a genetic modification in the HLA-A gene, wherein the modification comprises at least one C to T substitution or at least one A to G substitution within the genomic coordinates chr6:29942540-29945459.

[0300] In some embodiments, an engineered cell which has reduced or eliminated surface expression of HLA-A relative to an unmodified cell is provided, comprising a genetic modification in the HLA-A gene, wherein the modification comprises at least one C to T substitution or at least one A to G substitution within the genomic coordinates chosen from: chr6:29942891-29942915; chr6:29942609-29942633; chr6:29944266-29944290; chr6:29942889-29942913; chr6:29944471-29944495; and chr6:29944470-29944494.

[0301] In some embodiments, an engineered cell which has reduced or eliminated surface expression of HLA-A relative to an unmodified cell is provided, comprising a genetic modification in the HLA-A gene, wherein the modification comprises at least one C to T substitution or at least one A to G substitution within the genomic coordinates chosen from: chr6:29942891-29942915; chr6:29942609-29942633; chr6:29942889-29942913; chr6:29944471-29944495; chr6:29944266-29944290; chr6:29942785-29942809.

[0302] In some embodiments, an engineered cell, which has reduced or eliminated surface expression of HLA-A relative to an unmodified cell, comprises a genetic modification in the HLA-A gene, wherein the genetic modification comprises an indel, a C to T substitution, or an A to G substitution within the genomic coordinates chosen from: (a) chr6:29942891-29942915; chr6:29942609-29942633; chr6:29944266-29944290; chr6:29942889-29942913; chr6:29944471-29944495; and chr6:29944470-29944494 or (b) chr6:29942891-29942915; chr6:29942609-29942633; chr6:29942889-29942913; chr6:29944471-29944495; chr6:29944266-29944290; chr6:29942785-29942809. In some embodiments, the genetic modification comprises at least 5 contiguous nucleotides within the genomic coordinates. In some embodiments, the genetic modification comprises at least 6, 7, 8, 9, or 10 contiguous nucleotides within the genomic coordinates. In some embodiments, the genetic modification comprises at least one C to T substitution or at least one A to G substitution within the genomic coordinates.

[0303] In some embodiments, an engineered cell is provided that has reduced or eliminated surface expression of HLA-A by a genomic editing system that binds to an HLA-A genomic target sequence comprising at least 10 contiguous nucleotides within the genomic coordinates chosen from: (a) chr6:29942891-29942915; chr6:29942609-29942633; chr6:29944266-29944290; chr6:29942889-29942913; chr6:29944471-29944495; and chr6:29944470-29944494 or (b) chr6:29942891-29942915; chr6:29942609-29942633; chr6:29942889-29942913; chr6:29944471-29944495; chr6:29944266-29944290; chr6:29942785-29942809. In some embodiments, an engineered cell is provided that has reduced or eliminated surface expression of HLA-A by a genomic editing system that binds to an HLA-A genomic target sequence comprising at least 5 contiguous nucleotides within the genomic coordinates. In some embodiments, the HLA-A genomic target sequence comprises at least 15 contiguous nucleotides within the genomic coordinates. In some embodiments, the genomic editing system comprises an RNA-guided DNA-binding agent. In some embodiments, the RNA-guided DNA-binding agent comprises a Cas9 protein, such as an N. meningitidis Cas9.

[0304] In some embodiments, an engineered cell is provided that has reduced or eliminated surface expression of HLA-A by a genomic editing system that binds to an HLA-A genomic target sequence comprising at least 5 contiguous nucleotides within the genomic coordinates chosen from: (a) chr6:29942891-29942915; chr6:29942609-29942633; chr6:29944266-29944290; chr6:29942889-29942913; chr6:29944471-29944495; and chr6:29944470-29944494 or (b) chr6:29942891-29942915; chr6:29942609-29942633; chr6:29942889-29942913; chr6:29944471-29944495; chr6:29944266-29944290; chr6:29942785-29942809. In some embodiments, the HLA-A genomic target sequence comprises at least 10 contiguous nucleotides within the genomic coordinates. In some embodiments, the HLA-A genomic target sequence comprises at least 15 contiguous nucleotides within the genomic coordinates. In some embodiments, the genomic editing system comprises an RNA-guided DNA-binding agent. In some embodiments, the RNA-guided DNA-binding agent comprises a Cas9 protein, such as an N. Meningitidis.

[0305] In some embodiments, an engineered cell which has reduced or eliminated surface expression of TRAC relative to an unmodified cell is provided, comprising a genetic modification in the TRAC gene, wherein the modification comprises at least one nucleotide from within the genomic coordinates chr14:22547462-22551621. In some embodiments, an engineered cell which has reduced or eliminated surface expression of TRAC relative to an unmodified cell is provided, comprising a genetic modification in the TRAC gene, wherein the modification comprises at least one nucleotide from within the genomic coordinates chr14:22547505-22551621. In some embodiments, an engineered cell which has reduced or eliminated surface expression of TRAC relative to an unmodified cell is provided, comprising a genetic modification in the TRAC gene, wherein the modification comprises at least one nucleotide from within the genomic coordinates from: chr14:22547505-22547529; chr14:22547525-22547549; chr14:22547674-22547698; chr14:22550544-22550568; or chr14:22550574-22550598.

[0306] In some embodiments, an engineered cell which has reduced or eliminated surface expression of TRAC relative to an unmodified cell is provided, comprising a genetic modification in the TRAC gene, wherein the modification comprises at least 5 contiguous nucleotides within the genomic coordinates chr14:22547462-22551621. In some embodiments, an engineered cell which has reduced or eliminated surface expression of TRAC relative to an unmodified cell is provided, comprising a genetic modification in the TRAC gene, wherein the modification comprises at least 5 contiguous nucleotides within the genomic coordinates chr14:22547505-22551621. In some embodiments, the engineered cell which has reduced or eliminated surface expression of TRAC relative to an unmodified cell, comprises a genetic modification in the TRAC gene, wherein the modification comprises at least 6, 7, 8, 9, or 10 contiguous nucleotides within the genomic coordinates.

[0307] In some embodiments, an engineered cell which has reduced or eliminated surface expression of TRAC relative to an unmodified cell is provided, comprising a genetic modification in the TRAC gene, wherein the modification comprises at least 5 contiguous nucleotides within the genomic coordinates chosen from: chr14:22547505-22547529; chr14:22547525-22547549; chr14:22547674-22547698; chr14:22550544-22550568; or chr14:22550574-22550598. In some embodiments, the engineered cell which has reduced or eliminated surface expression of TRAC relative to an unmodified cell, comprises a genetic modification in the TRAC gene, wherein the modification comprises at least 6, 7, 8, 9, or 10 contiguous nucleotides within the genomic coordinates.

[0308] In some embodiments, an engineered cell which has reduced or eliminated surface expression of TRAC relative to an unmodified cell is provided, comprising a genetic modification in the TRAC gene, wherein the modification comprises at least one C to T substitution or at least one A to G substitution within the genomic coordinates chr14:22547505-22551621 or chr14:22547462-22551621.

[0309] In some embodiments, an engineered cell which has reduced or eliminated surface expression of TRAC relative to an unmodified cell is provided, comprising a genetic modification in the TRAC gene, wherein the modification comprises at least one C to T substitution or at least one A to G substitution within the genomic coordinates chosen from: chr14:22547505-22547529; chr14:22547525-22547549; chr14:22547674-22547698; chr14:22550544-22550568; or chr14:22550574-22550598.

[0310] In some embodiments, an engineered cell, which has reduced or eliminated surface expression of TRAC relative to an unmodified cell, comprises a genetic modification in the TRAC gene, wherein the genetic modification comprises an indel, a C to T substitution, or an A to G substitution within the genomic coordinates chosen from: (a) chr14:22547505-22547529; chr14:22547525-22547549; chr14:22547674-22547698; chr14:22550544-22550568; and chr14:22550574-22550598. In some embodiments, the genetic modification comprises at least 5 contiguous nucleotides within the genomic coordinates. In some embodiments, the genetic modification comprises at least 6, 7, 8, 9, or 10 contiguous nucleotides within the genomic coordinates. In some embodiments, the genetic modification comprises at least one C to T substitution or at least one A to G substitution within the genomic coordinates.

[0311] In some embodiments, an engineered cell is provided that has reduced or eliminated surface expression of TRAC by a genomic editing system that binds to a TRAC genomic target sequence comprising at least 10 contiguous nucleotides within the genomic coordinates chosen from: (a) chr14:22547505-22547529; chr14:22547525-22547549; chr14:22547674-22547698; chr14:22550544-22550568; and chr14:22550574-22550598. In some embodiments, an engineered cell is provided that has reduced or eliminated surface expression of TRAC by a genomic editing system that binds to a TRAC genomic target sequence comprising at least 5 contiguous nucleotides within the genomic coordinates. In some embodiments, the TRAC genomic target sequence comprises at least 15 contiguous nucleotides within the genomic coordinates. In some embodiments, the genomic editing system comprises an RNA-guided DNA-binding agent. In some embodiments, the RNA-guided DNA-binding agent comprises a Cas9 protein, such as an N. meningitidis Cas9.

[0312] In some embodiments, an engineered cell is provided that has reduced or eliminated surface expression of TRAC by a genomic editing system that binds to a TRAC genomic target sequence comprising at least 5 contiguous nucleotides within the genomic coordinates chosen from: (a) chr14:22547505-22547529; chr14:22547525-22547549; chr14:22547674-22547698; chr14:22550544-22550568; and chr14:22550574-22550598. In some embodiments, the TRAC genomic target sequence comprises at least 10 contiguous nucleotides within the genomic coordinates. In some embodiments, the TRAC genomic target sequence comprises at least 15 contiguous nucleotides within the genomic coordinates. In some embodiments, the genomic editing system comprises an RNA-guided DNA-binding agent. In some embodiments, the RNA-guided DNA-binding agent comprises a Cas9 protein, such as an N. Meningitidis.

[0313] In some embodiments, an engineered cell which has reduced or eliminated surface expression of TRBC relative to an unmodified cell is provided, comprising a genetic modification in the TRBC gene, wherein the modification comprises at least one nucleotide from within the genomic coordinates chosen from: chr7:142791756-142802543. In some embodiments, an engineered cell which has reduced or eliminated surface expression of TRBC relative to an unmodified cell is provided, comprising a genetic modification in the TRBC gene, wherein the modification comprises at least one nucleotide from within the genomic coordinates chosen from: (a) chr7:142791862-142793149; (b) chr7: 142791756-142792721; or (c) chr7:142801104-142802543.

[0314] In some embodiments, an engineered cell which has reduced or eliminated surface expression of TRBC relative to an unmodified cell is provided, comprising a genetic modification in the TRBC gene, wherein the modification comprises at least one nucleotide from within the genomic coordinates from: (a) chr7:142792690-142792714; or chr7:142792693-142792717; or (b) chr7:142791756-142791780; chr7:142791761-142791785; chr7:142791820-142791844; chr7:142791939-142791963; chr7:142791940-142791964; or chr7:142792004-142792028; or (c) chr7:142801104-142801124; chr7:142802103-142802127; or chr7:142802106-142802130.

[0315] In some embodiments, an engineered cell which has reduced or eliminated surface expression of TRBC relative to an unmodified cell is provided, comprising a genetic modification in the TRBC gene, wherein the modification comprises at least one nucleotide from within the genomic coordinates chosen from: chr7:142792690-142792714; chr7:142802103-142802127; and chr7:142802106-14280213.

[0316] In some embodiments, an engineered cell which has reduced or eliminated surface expression of TRBC relative to an unmodified cell is provided, comprising a genetic modification in the TRBC gene, wherein the modification comprises at least 5 contiguous nucleotides within the genomic coordinates chosen from: (a) chr7:142791862-142793149; (b) chr7: 142791756-142792721; or (c) chr7:142801104-142802543. In some embodiments, the engineered cell which has reduced or eliminated surface expression of TRBC relative to an unmodified cell, comprises a genetic modification in the TRBC gene, wherein the modification comprises at least 6, 7, 8, 9, or 10 contiguous nucleotides within the genomic coordinates.

[0317] In some embodiments, an engineered cell which has reduced or eliminated surface expression of TRBC relative to an unmodified cell is provided, comprising a genetic modification in the TRBC gene, wherein the modification comprises at least 5 contiguous nucleotides within the genomic coordinates chosen from: (a) chr7:142792690-142792714; or chr7:142792693-142792717; or (b) chr7:142791756-142791780; chr7:142791761-142791785; chr7:142791820-142791844; chr7:142791939-142791963; chr7:142791940-142791964; or chr7:142792004-142792028; or (c) chr7:142801104-142801124; chr7:142802103-142802127; or chr7:142802106-142802130. In some embodiments, the engineered cell which has reduced or eliminated surface expression of TRBC relative to an unmodified cell, comprises a genetic modification in the TRBC gene, wherein the modification comprises at least 6, 7, 8, 9, or 10 contiguous nucleotides within the genomic coordinates.

[0318] In some embodiments, an engineered cell which has reduced or eliminated surface expression of TRBC relative to an unmodified cell is provided, comprising a genetic modification in the TRBC gene, wherein the modification comprises at least 5 contiguous nucleotides within the genomic coordinates chosen from: chr7:142792690-142792714; chr7:142802103-142802127; and chr7:142802106-14280213. In some embodiments, the engineered cell which has reduced or eliminated surface expression of TRBC relative to an unmodified cell, comprises a genetic modification in the TRBC gene, wherein the modification comprises at least 6, 7, 8, 9, or 10 contiguous nucleotides within the genomic coordinates.

[0319] In some embodiments, an engineered cell which has reduced or eliminated surface expression of TRBC relative to an unmodified cell is provided, comprising a genetic modification in the TRBC gene, wherein the modification comprises at least one C to T substitution or at least one A to G substitution within the genomic coordinates chosen from:

[0320] In some embodiments, an engineered cell which has reduced or eliminated surface expression of TRBC relative to an unmodified cell is provided, comprising a genetic modification in the TRBC gene, wherein the modification comprises at least one C to T substitution or at least one A to G substitution within the genomic coordinates chosen from: (a) chr7:142791862-142793149; (b) chr7: 142791756-142792721; or (c) chr7:142801104-142802543.

[0321] In some embodiments, an engineered cell which has reduced or eliminated surface expression of TRBC relative to an unmodified cell is provided, comprising a genetic modification in the TRBC gene, wherein the modification comprises at least one C to T substitution or at least one A to G substitution within the genomic coordinates chosen from: (a) chr7:142792690-142792714; or chr7:142792693-142792717; or (b) chr7:142791756-142791780; chr7:142791761-142791785; chr7:142791820-142791844; chr7:142791939-142791963; chr7:142791940-142791964; or chr7:142792004-142792028; or (c) chr7:142801104-142801124; chr7:142802103-142802127; or chr7:142802106-142802130.

[0322] In some embodiments, an engineered cell which has reduced or eliminated surface expression of TRBC relative to an unmodified cell is provided, comprising a genetic modification in the TRBC gene, wherein the modification comprises at least one C to T substitution or at least one A to G substitution within the genomic coordinates chosen from: chr7:142792690-142792714; chr7:142802103-142802127; and chr7:142802106-14280213.

[0323] In some embodiments, an engineered cell, which has reduced or eliminated surface expression of TRBC relative to an unmodified cell, comprises a genetic modification in the TRBC gene, wherein the genetic modification comprises an indel, a C to T substitution, or an A to G substitution within the genomic coordinates chosen from: (a) chr7:142792690-142792714; or chr7:142792693-142792717; or (b) chr7:142791756-142791780; chr7:142791761-142791785; chr7:142791820-142791844; chr7:142791939-142791963; chr7:142791940-142791964; or chr7:142792004-142792028; or (c) chr7:142801104-142801124; chr7:142802103-142802127; or chr7:142802106-142802130. In some embodiments, the genetic modification comprises at least 5 contiguous nucleotides within the genomic coordinates. In some embodiments, the genetic modification comprises at least 6, 7, 8, 9, or 10 contiguous nucleotides within the genomic coordinates. In some embodiments, the genetic modification comprises at least one C to T substitution or at least one A to G substitution within the genomic coordinates.

[0324] In some embodiments, an engineered cell, which has reduced or eliminated surface expression of TRBC relative to an unmodified cell, comprises a genetic modification in the TRBC gene, wherein the genetic modification comprises an indel, a C to T substitution, or an A to G substitution within the genomic coordinates chosen from: chr7:142792690-142792714; chr7:142802103-142802127; and chr7:142802106-14280213. In some embodiments, the genetic modification comprises at least 5 contiguous nucleotides within the genomic coordinates. In some embodiments, the genetic modification comprises at least 6, 7, 8, 9, or 10 contiguous nucleotides within the genomic coordinates. In some embodiments, the genetic modification comprises at least one C to T substitution or at least one A to G substitution within the genomic coordinates.

[0325] In some embodiments, an engineered cell is provided that has reduced or eliminated surface expression of TRBC by a genomic editing system that binds to a TRBC genomic target sequence comprising at least 10 contiguous nucleotides within the genomic coordinates chosen from: (a) chr7:142792690-142792714; or chr7:142792693-142792717; or (b) chr7:142791756-142791780; chr7:142791761-142791785; chr7:142791820-142791844; chr7:142791939-142791963; chr7:142791940-142791964; or chr7:142792004-142792028; or (c) chr7:142801104-142801124; chr7:142802103-142802127; or chr7:142802106-142802130. In some embodiments, an engineered cell is provided that has reduced or eliminated surface expression of TRBC by a genomic editing system that binds to a TRBC genomic target sequence comprising at least 5 contiguous nucleotides within the genomic coordinates. In some embodiments, the TRBC genomic target sequence comprises at least 15 contiguous nucleotides within the genomic coordinates. In some embodiments, the genomic editing system comprises an RNA-guided DNA-binding agent. In some embodiments, the RNA-guided DNA-binding agent comprises a Cas9 protein, such as an N. meningitidis Cas9.

[0326] In some embodiments, an engineered cell is provided that has reduced or eliminated surface expression of TRBC by a genomic editing system that binds to a TRBC genomic target sequence comprising at least 10 contiguous nucleotides within the genomic coordinates chosen from: chr7:142792690-142792714; chr7:142802103-142802127; and chr7:142802106-14280213. In some embodiments, an engineered cell is provided that has reduced or eliminated surface expression of TRBC by a genomic editing system that binds to a TRBC genomic target sequence comprising at least 5 contiguous nucleotides within the genomic coordinates. In some embodiments, the TRBC genomic target sequence comprises at least 15 contiguous nucleotides within the genomic coordinates. In some embodiments, the genomic editing system comprises an RNA-guided DNA-binding agent. In some embodiments, the RNA-guided DNA-binding agent comprises a Cas9 protein, such as an N. meningitidis Cas9.

[0327] In some embodiments, an engineered cell is provided that has reduced or eliminated surface expression of TRBC by a genomic editing system that binds to a TRBC genomic target sequence comprising at least 5 contiguous nucleotides within the genomic coordinates chosen from: (a) chr7:142792690-142792714; or chr7:142792693-142792717; or (b) chr7:142791756-142791780; chr7:142791761-142791785; chr7:142791820-142791844; chr7:142791939-142791963; chr7:142791940-142791964; or chr7:142792004-142792028; or (c) chr7:142801104-142801124; chr7:142802103-142802127; or chr7:142802106-142802130. In some embodiments, the TRBC genomic target sequence comprises at least 10 contiguous nucleotides within the genomic coordinates. In some embodiments, the TRBC genomic target sequence comprises at least 15 contiguous nucleotides within the genomic coordinates. In some embodiments, the genomic editing system comprises an RNA-guided DNA-binding agent. In some embodiments, the RNA-guided DNA-binding agent comprises a Cas9 protein, such as an N. Meningitidis.

[0328] In some embodiments, an engineered cell is provided that has reduced or eliminated surface expression of TRBC by a genomic editing system that binds to a TRBC genomic target sequence comprising at least 5 contiguous nucleotides within the genomic coordinates chosen from: chr7:142792690-142792714; chr7:142802103-142802127; and chr7:142802106-14280213. In some embodiments, the TRBC genomic target sequence comprises at least 10 contiguous nucleotides within the genomic coordinates. In some embodiments, the TRBC genomic target sequence comprises at least 15 contiguous nucleotides within the genomic coordinates. In some embodiments, the genomic editing system comprises an RNA-guided DNA-binding agent. In some embodiments, the RNA-guided DNA-binding agent comprises a Cas9 protein, such as an N. Meningitidis.

[0329] In some embodiments, an engineered cell which has reduced or eliminated surface expression of MHC class II relative to an unmodified cell is provided, comprising a genetic modification in the CIITA locus, wherein the modification comprises at least one nucleotide of the genomic coordinates (a) chr16:10877363-10907788 or (b) chr16:10906515-10908136.

[0330] In some embodiments, an engineered cell which has reduced or eliminated surface expression of MHC class II relative to an unmodified cell is provided, comprising a genetic modification in the CIITA gene, wherein the modification comprises at least one nucleotide of the genomic coordinates chosen from: (a) chr16:10907504-10907528; chr16:10907508-10907532; chr16:10907539-10907559; chr16:10895658-10895682; chr16:10895668-10895692; chr16:10895750-10895774; chr16:10895753-10895777; chr16:10895754-10895778; chr16:10898684-10898708; chr16:10901529-10901553; chr16:10902121-10902145; chr16:10902701-10902725; chr16:10904726-10904750; chr16:10904760-10904784; chr16:10906493-10906517; chr16:10906515-10906539; chr16:10906631-10906655; chr16:10906636-10906660; chr16:10906643-10906667; chr16:10906770-10906794; chr16:10906788-10906812; chr16:10906789-10906813; chr16:10906816-10906840; chr16:10907148-10907172; chr16:10907254-10907278; chr16:10907331-10907355; chr16:10907477-10907501; chr16:10907497-10907521; chr16:10907503-10907527; and chr16:10907574-10907598; or (b) chr16:10906889-10906913; and chr16:10907504-10907528.

[0331] In some embodiments, an engineered cell which has reduced or eliminated surface expression of MHC class II relative to an unmodified cell is provided, comprising a genetic modification in the CIITA gene, wherein the modification comprises at least one nucleotide of the genomic coordinates chosen from: chr16:10895658-10895682; chr16:10902701-10902725; chr16:10906493-10906517; chr16:10906631-10906655; chr16:10906643-10906667; chr16:10907477-10907501; and chr16:10907497-10907521; chr16:10907504-10907528; and chr16:10907508-10907532.

[0332] In some embodiments, an engineered cell which has reduced or eliminated surface expression of MHC class II relative to an unmodified cell is provided, comprising a genetic modification in the CIITA gene, wherein the modification comprises at least 5 contiguous nucleotides within the genomic coordinates chosen from: (a) chr16:10877363-10907788 or (b) chr16:10906515-10908136. In some embodiments, the engineered cell which has reduced or eliminated surface expression of MHC class II relative to an unmodified cell, comprises a genetic modification in the CIITA gene, wherein the modification comprises at least 6, 7, 8, 9, or 10 contiguous nucleotides within the genomic coordinates.

[0333] In some embodiments, an engineered cell which has reduced or eliminated surface expression of MHC class II relative to an unmodified cell is provided, comprising a genetic modification in the CIITA gene, wherein the modification comprises at least 5 contiguous nucleotides within the genomic coordinates chosen from: (a) chr16:10907504-10907528; chr16:10907508-10907532; chr16:10907539-10907559; chr16:10895658-10895682; chr16:10895668-10895692; chr16:10895750-10895774; chr16:10895753-10895777; chr16:10895754-10895778; chr16:10898684-10898708; chr16:10901529-10901553; chr16:10902121-10902145; chr16:10902701-10902725; chr16:10904726-10904750; chr16:10904760-10904784; chr16:10906493-10906517; chr16:10906515-10906539; chr16:10906631-10906655; chr16:10906636-10906660; chr16:10906643-10906667; chr16:10906770-10906794; chr16:10906788-10906812; chr16:10906789-10906813; chr16:10906816-10906840; chr16:10907148-10907172; chr16:10907254-10907278; chr16:10907331-10907355; chr16:10907477-10907501; chr16:10907497-10907521; chr16:10907503-10907527; chr16:10907574-10907598; or (b) chr16:10906889-10906913; or chr16:10907504-10907528. In some embodiments, the engineered cell which has reduced or eliminated surface expression of MHC class II relative to an unmodified cell, comprises a genetic modification in the CIITA gene, wherein the modification comprises at least 6, 7, 8, 9, or 10 contiguous nucleotides within the genomic coordinates.

[0334] In some embodiments, an engineered cell which has reduced or eliminated surface expression of MHC class II relative to an unmodified cell is provided, comprising a genetic modification in the CIITA gene, wherein the modification comprises at least 5 contiguous nucleotides within the genomic coordinates chosen from: chr16:10895658-10895682; chr16:10902701-10902725; chr16:10906493-10906517; chr16:10906631-10906655; chr16:10906643-10906667; chr16:10907477-10907501; and chr16:10907497-10907521; chr16:10907504-10907528; and chr16:10907508-10907532. In some embodiments, the engineered cell which has reduced or eliminated surface expression of MHC class II relative to an unmodified cell, comprises a genetic modification in the CIITA gene, wherein the modification comprises at least 6, 7, 8, 9, or 10 contiguous nucleotides within the genomic coordinates.

[0335] In some embodiments, an engineered cell which has reduced or eliminated surface expression of MHC class II relative to an unmodified cell is provided, comprising a genetic modification in the CIITA gene, wherein the modification comprises at least one C to T substitution or at least one A to G substitution within the genomic coordinates chosen from: (a) chr16:10877363-10907788 or (b) chr16:10906515-10908136.

[0336] In some embodiments, an engineered cell which has reduced or eliminated surface expression of MHC class II relative to an unmodified cell is provided, comprising a genetic modification in the CIITA gene, wherein the modification comprises at least one C to T substitution or at least one A to G substitution within the genomic coordinates chosen from: (a) chr16:10907504-10907528; chr16:10907508-10907532; chr16:10907539-10907559; chr16:10895658-10895682; chr16:10895668-10895692; chr16:10895750-10895774; chr16:10895753-10895777; chr16:10895754-10895778; chr16:10898684-10898708; chr16:10901529-10901553; chr16:10902121-10902145; chr16:10902701-10902725; chr16:10904726-10904750; chr16:10904760-10904784; chr16:10906493-10906517; chr16:10906515-10906539; chr16:10906631-10906655; chr16:10906636-10906660; chr16:10906643-10906667; chr16:10906770-10906794; chr16:10906788-10906812; chr16:10906789-10906813; chr16:10906816-10906840; chr16:10907148-10907172; chr16:10907254-10907278; chr16:10907331-10907355; chr16:10907477-10907501; chr16:10907497-10907521; chr16:10907503-10907527; chr16:10907574-10907598; or (b) chr16:10906889-10906913; or chr16:10907504-10907528.

[0337] In some embodiments, an engineered cell which has reduced or eliminated surface expression of MHC class II relative to an unmodified cell is provided, comprising a genetic modification in the CIITA gene, wherein the modification comprises at least one C to T substitution or at least one A to G substitution within the genomic coordinates chosen from: chr16:10895658-10895682; chr16:10902701-10902725; chr16:10906493-10906517; chr16:10906631-10906655; chr16:10906643-10906667; chr16:10907477-10907501; and chr16:10907497-10907521; chr16:10907504-10907528; and chr16:10907508-10907532.

[0338] In some embodiments, an engineered cell which has reduced or eliminated surface expression of MHC class II relative to an unmodified cell is provided, comprising a genetic modification in the CIITA gene, wherein the modification comprises at least one nucleotide within the genomic coordinates chosen from: (a) chr16:10877363-10907788 or (b) chr16:10906515-10908136.

[0339] In some embodiments, an engineered cell which has reduced or eliminated surface expression of MHC class II relative to an unmodified cell is provided, comprising a genetic modification in the CIITA gene, wherein the modification comprises at least one nucleotide within the genomic coordinates chosen from: (a) chr16:10907504-10907528; chr16:10907508-10907532; chr16:10907539-10907559; chr16:10895658-10895682; chr16:10895668-10895692; chr16:10895750-10895774; chr16:10895753-10895777; chr16:10895754-10895778; chr16:10898684-10898708; chr16:10901529-10901553; chr16:10902121-10902145; chr16:10902701-10902725; chr16:10904726-10904750; chr16:10904760-10904784; chr16:10906493-10906517; chr16:10906515-10906539; chr16:10906631-10906655; chr16:10906636-10906660; chr16:10906643-10906667; chr16:10906770-10906794; chr16:10906788-10906812; chr16:10906789-10906813; chr16:10906816-10906840; chr16:10907148-10907172; chr16:10907254-10907278; chr16:10907331-10907355; chr16:10907477-10907501; chr16:10907497-10907521; chr16:10907503-10907527; chr16:10907574-10907598; or (b) chr16:10906889-10906913; or chr16:10907504-10907528.

[0340] In some embodiments, an engineered cell which has reduced or eliminated surface expression of MHC class II relative to an unmodified cell is provided, comprising a genetic modification in the CIITA gene, wherein the modification comprises at least one nucleotide within the genomic coordinates chosen from: chr16:10895658-10895682; chr16:10902701-10902725; chr16:10906493-10906517; chr16:10906631-10906655; chr16:10906643-10906667; chr16:10907477-10907501; and chr16:10907497-10907521; chr16:10907504-10907528; and chr16:10907508-10907532.

[0341] In some embodiments, an engineered cell, which has reduced or eliminated surface expression of MHC class II relative to an unmodified cell, comprises a genetic modification in the CIITA gene, the genetic modification comprises at least one nucleotide within the genomic coordinates chosen from: (a) chr16:10877363-10907788 or (b) chr16:10906515-10908136.

[0342] In some embodiments, an engineered cell, which has reduced or eliminated surface expression of MHC class II relative to an unmodified cell, comprises a genetic modification in the CIITA gene, the genetic modification comprises at least one nucleotide within the genomic coordinates chosen from: chr16:10907504-10907528; chr16:10907508-10907532; chr16:10907539-10907559; chr16:10895658-10895682; chr16:10895668-10895692; chr16:10895750-10895774; chr16:10895753-10895777; chr16:10895754-10895778; chr16:10898684-10898708; chr16:10901529-10901553; chr16:10902121-10902145; chr16:10902701-10902725; chr16:10904726-10904750; chr16:10904760-10904784; chr16:10906493-10906517; chr16:10906515-10906539; chr16:10906631-10906655; chr16:10906636-10906660; chr16:10906643-10906667; chr16:10906770-10906794; chr16:10906788-10906812; chr16:10906789-10906813; chr16:10906816-10906840; chr16:10907148-10907172; chr16:10907254-10907278; chr16:10907331-10907355; chr16:10907477-10907501; chr16:10907497-10907521; chr16:10907503-10907527; chr16:10907574-10907598; or (b) chr16:10906889-10906913; or chr16:10907504-10907528.

[0343] In some embodiments, an engineered cell, which has reduced or eliminated surface expression of MHC class II relative to an unmodified cell, comprises a genetic modification in the CIITA gene, the genetic modification comprises at least one nucleotide within the genomic coordinates chosen from: chr16:10895658-10895682; chr16:10902701-10902725; chr16:10906493-10906517; chr16:10906631-10906655; chr16:10906643-10906667; chr16:10907477-10907501; and chr16:10907497-10907521; chr16:10907504-10907528; and chr16:10907508-10907532.

[0344] In some embodiments, an engineered cell, which has reduced or eliminated surface expression of MHC class II relative to an unmodified cell, comprises a genetic modification in the CIITA gene, wherein the genetic modification comprises an indel, a C to T substitution, or an A to G substitution within the genomic coordinates chosen from: (a) chr16:10907504-10907528; chr16:10907508-10907532; chr16:10907539-10907559; chr16:10895658-10895682; chr16:10895668-10895692; chr16:10895750-10895774; chr16:10895753-10895777; chr16:10895754-10895778; chr16:10898684-10898708; chr16:10901529-10901553; chr16:10902121-10902145; chr16:10902701-10902725; chr16:10904726-10904750; chr16:10904760-10904784; chr16:10906493-10906517; chr16:10906515-10906539; chr16:10906631-10906655; chr16:10906636-10906660; chr16:10906643-10906667; chr16:10906770-10906794; chr16:10906788-10906812; chr16:10906789-10906813; chr16:10906816-10906840; chr16:10907148-10907172; chr16:10907254-10907278; chr16:10907331-10907355; chr16:10907477-10907501; chr16:10907497-10907521; chr16:10907503-10907527; chr16:10907574-10907598; or (b) chr16:10906889-10906913; or chr16:10907504-10907528. In some embodiments, the genetic modification comprises at least 5 contiguous nucleotides within the genomic coordinates. In some embodiments, the genetic modification comprises at least 6, 7, 8, 9, or 10 contiguous nucleotides within the genomic coordinates. In some embodiments, the genetic modification comprises at least one C to T substitution or at least one A to G substitution within the genomic coordinates.

[0345] In some embodiments, an engineered cell, which has reduced or eliminated surface expression of MHC class II relative to an unmodified cell, comprises a genetic modification in the CIITA gene, wherein the genetic modification comprises an indel, a C to T substitution, or an A to G substitution within the genomic coordinates chosen from: chr16:10895658-10895682; chr16:10902701-10902725; chr16:10906493-10906517; chr16:10906631-10906655; chr16:10906643-10906667; chr16:10907477-10907501; and chr16:10907497-10907521; chr16:10907504-10907528; and chr16:10907508-10907532. In some embodiments, the genetic modification comprises at least 5 contiguous nucleotides within the genomic coordinates. In some embodiments, the genetic modification comprises at least 6, 7, 8, 9, or 10 contiguous nucleotides within the genomic coordinates. In some embodiments, the genetic modification comprises at least one C to T substitution or at least one A to G substitution within the genomic coordinates.

[0346] In some embodiments, an engineered cell is provided that has reduced or eliminated surface expression of MHC class II by a genomic editing system that binds to a CIITA genomic target sequence comprising at least 10 contiguous nucleotides within the genomic coordinates chosen from: (a) chr16:10907504-10907528; chr16:10907508-10907532; chr16:10907539-10907559; chr16:10895658-10895682; chr16:10895668-10895692; chr16:10895750-10895774; chr16:10895753-10895777; chr16:10895754-10895778; chr16:10898684-10898708; chr16:10901529-10901553; chr16:10902121-10902145; chr16:10902701-10902725; chr16:10904726-10904750; chr16:10904760-10904784; chr16:10906493-10906517; chr16:10906515-10906539; chr16:10906631-10906655; chr16:10906636-10906660; chr16:10906643-10906667; chr16:10906770-10906794; chr16:10906788-10906812; chr16:10906789-10906813; chr16:10906816-10906840; chr16:10907148-10907172; chr16:10907254-10907278; chr16:10907331-10907355; chr16:10907477-10907501; chr16:10907497-10907521; chr16:10907503-10907527; chr16:10907574-10907598; or (b) chr16:10906889-10906913; or chr16:10907504-10907528.

[0347] In some embodiments, an engineered cell is provided that has reduced or eliminated surface expression of MHC class II by a genomic editing system that binds to a CIITA genomic target sequence comprising at least 10 contiguous nucleotides within the genomic coordinates chosen from: (a) chr16:10895658-10895682; chr16:10902701-10902725; chr16:10906493-10906517; chr16:10906631-10906655; chr16:10906643-10906667; chr16:10907477-10907501; and chr16:10907497-10907521; chr16:10907504-10907528; and chr16:10907508-10907532. In some embodiments, an engineered cell is provided that has reduced or eliminated surface expression of MHC class II by a genomic editing system that binds to a CIITA genomic target sequence comprising at least 5 contiguous nucleotides within the genomic coordinates. In some embodiments, the CIITA genomic target sequence comprises at least 15 contiguous nucleotides within the genomic coordinates. In some embodiments, the genomic editing system comprises an RNA-guided DNA-binding agent. In some embodiments, the RNA-guided DNA-binding agent comprises a Cas9 protein, such as an N. meningitidis Cas9.

[0348] In some embodiments, an engineered cell is provided that has reduced or eliminated surface expression of MHC class II by a genomic editing system that binds to a CIITA genomic target sequence comprising at least 5 contiguous nucleotides within the genomic coordinates chosen from: (a) chr16:10907504-10907528; chr16:10907508-10907532; chr16:10907539-10907559; chr16:10895658-10895682; chr16:10895668-10895692; chr16:10895750-10895774; chr16:10895753-10895777; chr16:10895754-10895778; chr16:10898684-10898708; chr16:10901529-10901553; chr16:10902121-10902145; chr16:10902701-10902725; chr16:10904726-10904750; chr16:10904760-10904784; chr16:10906493-10906517; chr16:10906515-10906539; chr16:10906631-10906655; chr16:10906636-10906660; chr16:10906643-10906667; chr16:10906770-10906794; chr16:10906788-10906812; chr16:10906789-10906813; chr16:10906816-10906840; chr16:10907148-10907172; chr16:10907254-10907278; chr16:10907331-10907355; chr16:10907477-10907501; chr16:10907497-10907521; chr16:10907503-10907527; chr16:10907574-10907598; or (b) chr16:10906889-10906913; or chr16:10907504-10907528.

[0349] In some embodiments, an engineered cell is provided that has reduced or eliminated surface expression of MHC class II by a genomic editing system that binds to a CIITA genomic target sequence comprising at least 5 contiguous nucleotides within the genomic coordinates chosen from: chr16:10895658-10895682; chr16:10902701-10902725; chr16:10906493-10906517; chr16:10906631-10906655; chr16:10906643-10906667; chr16:10907477-10907501; and chr16:10907497-10907521; chr16:10907504-10907528; and chr16:10907508-10907532 . . . In some embodiments, the CIITA genomic target sequence comprises at least 10 contiguous nucleotides within the genomic coordinates. In some embodiments, the CIITA genomic target sequence comprises at least 15 contiguous nucleotides within the genomic coordinates. In some embodiments, the genomic editing system comprises an RNA-guided DNA-binding agent. In some embodiments, the RNA-guided DNA-binding agent comprises a Cas9 protein, such as an N. Meningitidis.

[0350] In some embodiments, an engineered cell is provided comprising a genetic modification in the AAVS1 gene, wherein the modification comprises at least one nucleotide from within the genomic coordinates chr19:55115151-55116209.

[0351] In some embodiments, an engineered cell is provided, comprising a genetic modification in the AAVS1 gene, wherein the modification comprises at least one nucleotide from within the genomic coordinates chosen from: chr19:55115218-55115242; chr19:55115477-55115501; chr19:55115504-55115528; chr19:55115513-55115537; chr19:55115514-55115538; chr19:55115517-55115541; chr19:55115518-55115542; chr19:55115549-55115573; chr19:55115574-55115598; chr19:55115606-55115630; chr19:55115933-55115957; chr19:55116026-55116050; chr19:55116045-55116069; chr19:55116084-55116108; chr19:55115276-55115300; chr19:55115509-55115533; chr19:55115579-55115603; chr19:55115863-55115887; chr19:55115906-55115930; orchr19:55116006-55116030.

[0352] In some embodiments, an engineered cell is provided, comprising a genetic modification in the AAVS1 gene, wherein the modification comprises at least 5 contiguous nucleotides within the genomic coordinates chr19:55115151-55116209. In some embodiments, the engineered cell comprises a genetic modification in the AAVS1 gene, wherein the modification comprises at least 6, 7, 8, 9, or 10 contiguous nucleotides within the genomic coordinates.

[0353] In some embodiments, an engineered cell is provided, comprising a genetic modification in the AAVS1 gene, wherein the modification comprises at least 5 contiguous nucleotides within the genomic coordinates chosen from: chr19:55115218-55115242; chr19:55115477-55115501; chr19:55115504-55115528; chr19:55115513-55115537; chr19:55115514-55115538; chr19:55115517-55115541; chr19:55115518-55115542; chr19:55115549-55115573; chr19:55115574-55115598; chr19:55115606-55115630; chr19:55115933-55115957; chr19:55116026-55116050; chr19:55116045-55116069; chr19:55116084-55116108; chr19:55115276-55115300; chr19:55115509-55115533; chr19:55115579-55115603; chr19:55115863-55115887; chr19:55115906-55115930; or chr19:55116006-55116030. In some embodiments, the engineered cell comprises a genetic modification in the AAVS1 gene, wherein the modification comprises at least 6, 7, 8, 9, or 10 contiguous nucleotides within the genomic coordinates.

[0354] In some embodiments, an engineered cell is provided, comprising a genetic modification in the AAVS1 gene, wherein the modification comprises at least one C to T substitution or at least one A to G substitution within the genomic coordinates chr19:55115151-55116209.

[0355] In some embodiments, an engineered cell is provided, comprising a genetic modification in the AAVS1 gene, wherein the modification comprises at least one C to T substitution or at least one A to G substitution within the genomic coordinates chosen from: chr19:55115218-55115242; chr19:55115477-55115501; chr19:55115504-55115528; chr19:55115513-55115537; chr19:55115514-55115538; chr19:55115517-55115541; chr19:55115518-55115542; chr19:55115549-55115573; chr19:55115574-55115598; chr19:55115606-55115630; chr19:55115933-55115957; chr19:55116026-55116050; chr19:55116045-55116069; chr19:55116084-55116108; chr19:55115276-55115300; chr19:55115509-55115533; chr19:55115579-55115603; chr19:55115863-55115887; chr19:55115906-55115930; or chr19:55116006-55116030.

[0356] In some embodiments, an engineered cell is provided that comprises a genetic modification in the AAVS1 gene, wherein the genetic modification comprises an indel, a C to T substitution, or an A to G substitution within the genomic coordinates chosen from: chr19:55115218-55115242; chr19:55115477-55115501; chr19:55115504-55115528; chr19:55115513-55115537; chr19:55115514-55115538; chr19:55115517-55115541; chr19:55115518-55115542; chr19:55115549-55115573; chr19:55115574-55115598; chr19:55115606-55115630; chr19:55115933-55115957; chr19:55116026-55116050; chr19:55116045-55116069; chr19:55116084-55116108; chr19:55115276-55115300; chr19:55115509-55115533; chr19:55115579-55115603; chr19:55115863-55115887; chr19:55115906-55115930; or chr19:55116006-55116030. In some embodiments, the genetic modification comprises at least 5 contiguous nucleotides within the genomic coordinates. In some embodiments, the genetic modification comprises at least 6, 7, 8, 9, or 10 contiguous nucleotides within the genomic coordinates. In some embodiments, the genetic modification comprises at least one C to T substitution or at least one A to G substitution within the genomic coordinates.

[0357] In some embodiments, an engineered cell is provided that has a genetic modification in AAVS1 induced by a genomic editing system that binds to an AAVS1 genomic target sequence comprising at least 10 contiguous nucleotides within the genomic coordinates chosen from: chr19:55115218-55115242; chr19:55115477-55115501; chr19:55115504-55115528; chr19:55115513-55115537; chr19:55115514-55115538; chr19:55115517-55115541; chr19:55115518-55115542; chr19:55115549-55115573; chr19:55115574-55115598; chr19:55115606-55115630; chr19:55115933-55115957; chr19:55116026-55116050; chr19:55116045-55116069; chr19:55116084-55116108; chr19:55115276-55115300; chr19:55115509-55115533; chr19:55115579-55115603; chr19:55115863-55115887; chr19:55115906-55115930; or chr19:55116006-55116030. In some embodiments, an engineered cell is provided that has a genetic modification in AAVS1 induced by a genomic editing system that binds to an AAVS1 genomic target sequence comprising at least 5 contiguous nucleotides within the genomic coordinates. In some embodiments, the AAVS1 genomic target sequence comprises at least 15 contiguous nucleotides within the genomic coordinates. In some embodiments, the genomic editing system comprises an RNA-guided DNA-binding agent. In some embodiments, the RNA-guided DNA-binding agent comprises a Cas9 protein, such as an N. meningitidis Cas9.

[0358] In some embodiments, an engineered cell is provided that has a genetic modification in AAVS1 induced by a genomic editing system that binds to an AAVS1 genomic target sequence comprising at least 5 contiguous nucleotides within the genomic coordinates chosen from: chr19:55115218-55115242; chr19:55115477-55115501; chr19:55115504-55115528; chr19:55115513-55115537; chr19:55115514-55115538; chr19:55115517-55115541; chr19:55115518-55115542; chr19:55115549-55115573; chr19:55115574-55115598; chr19:55115606-55115630; chr19:55115933-55115957; chr19:55116026-55116050; chr19:55116045-55116069; chr19:55116084-55116108; chr19:55115276-55115300; chr19:55115509-55115533; chr19:55115579-55115603; chr19:55115863-55115887; chr19:55115906-55115930; or chr19:55116006-55116030. In some embodiments, the AAVS1 genomic target sequence comprises at least 10 contiguous nucleotides within the genomic coordinates. In some embodiments, the AAVS1 genomic target sequence comprises at least 15 contiguous nucleotides within the genomic coordinates. In some embodiments, the genomic editing system comprises an RNA-guided DNA-binding agent. In some embodiments, the RNA-guided DNA-binding agent comprises a Cas9 protein, such as an N. Meningitidis.

[0359] In some embodiments, for each given range of genomic coordinates, a range may encompass +/−10 nucleotides on either end of the specified coordinates. For each given range of genomic coordinates, the range may encompass +/−5 nucleotides on either end of the range. For example, if chr16:10923222-10923242 is given, in some embodiments the genomic target sequence or genetic modification may fall within chr16:10923212-10923252.

[0360] In some embodiments, a given range of genomic coordinates may comprise a target sequence on both strands of the DNA (i.e., the plus (+) strand and the minus (−) strand).

[0361] Genetic modifications in the HLA-A, TRAC, TRBC, CIITA, and AAVS1 genes are described further herein.

[0362] In some embodiments, a genetic modification in the HLA-A, TRAC, TRBC, CIITA, or AAVS1 locus comprises any one or more of an insertion, deletion, substitution, or deamination of at least one nucleotide in a target sequence. In some embodiments, the engineered cell which has reduced or eliminated surface expression of HLA-A relative to an unmodified cell is provided, comprising a genetic modification in the HLA-A gene. In some embodiments, the engineered cell which has reduced or eliminated surface expression of TRAC relative to an unmodified cell is provided, comprising a genetic modification in the TRAC gene. In some embodiments, the engineered cell which has reduced or eliminated surface expression of TRBC1 relative to an unmodified cell is provided, comprising a genetic modification in the TRBC1 gene. In some embodiments, the engineered cell which has reduced or eliminated surface expression of TRBC2 relative to an unmodified cell is provided, comprising a genetic modification in the TRBC2 gene. In some embodiments, the engineered cell which has reduced or eliminated surface expression of MHC class II relative to an unmodified cell is provided, comprising a genetic modification in the CIITA gene.

[0363] In some embodiments, the engineered cell which has reduced or eliminated surface expression of HLA-A, TRAC, TRBC, or MHC class II relative to an unmodified cell is provided, comprising a genetic modification in the HLA-A, TRAC, TRBC, or CIITA gene, wherein the cell further has reduced or eliminated expression of an endogenous TCR protein relative to an unmodified cell. In some embodiments, the engineered cell which has reduced or eliminated surface expression of HLA-A, TRAC, TRBC, or MHC class II relative to an unmodified cell is provided, comprising a genetic modification in the HLA-A, TRAC, TRBC, or CIITA gene, wherein the cell further comprises an exogenous nucleic acid, and further has reduced or eliminated expression of an endogenous TCR protein relative to an unmodified cell. In some embodiments, the engineered cell which has reduced or eliminated surface expression of HLA-A, TRAC, TRBC, or MHC class II relative to an unmodified cell is provided, comprising a genetic modification in the HLA-A, TRAC, TRBC, or CIITA gene, wherein the cell further has reduced or eliminated surface expression of MHC class I, and wherein the cell further has reduced or eliminated expression of an endogenous TCR protein relative to an unmodified cell.

[0364] In some embodiments, the engineered cell which has reduced or eliminated surface expression of HLA-A, TRAC, TRBC, or MHC class II relative to an unmodified cell is provided, comprising a genetic modification in the HLA-A, TRAC, TRBC, or CIITA gene, wherein the cell further comprises an exogenous nucleic acid, and wherein the cell further has reduced or eliminated surface expression of MHC class I, and wherein the cell further has reduced or eliminated expression of an endogenous TCR protein relative to an unmodified cell. In some embodiments, the engineered cell has reduced or eliminated expression of a TRAC protein relative to an unmodified cell. In some embodiments, the engineered cell has reduced or eliminated expression of a TRBC protein relative to an unmodified cell.

[0365] In some embodiments, the engineered cell which has reduced or eliminated surface expression of MHC class II relative to an unmodified cell is provided, comprising a genetic modification in the CIITA gene, wherein the modification comprises at least one nucleotide of an exon within the genomic coordinates chr16:10902662-chr16:10923285, and wherein the cell further comprises an exogenous nucleic acid, and wherein the cell further has reduced or eliminated surface expression of HLA-A, and wherein the cell further has reduced or eliminated expression of an endogenous TCR protein relative to an unmodified cell. In some embodiments, the engineered cell has reduced or eliminated expression of a TRAC protein relative to an unmodified cell. In some embodiments, the engineered cell has reduced or eliminated expression of a TRBC protein relative to an unmodified cell. In some embodiments, the engineered cell comprises a genetic modification in the HLA-A gene. In some embodiments, the engineered cell comprises a genetic modification that reduces expression of HLA-A protein on the surface of the engineered cell.

[0366] The engineered cell may be any of the exemplary cell types disclosed herein. In some embodiments, the engineered cell is an immune cell. In some embodiments, the engineered cell is a hematopoetic stem cell (HSC). In some embodiments, the engineered cell is an induced pluripotent stem cell (iPSC). In some embodiments, the engineered cell is a monocyte, macrophage, mast cell, dendritic cell, or granulocyte. In some embodiments, the engineered cell is monocyte. In some embodiments, the engineered cell is a macrophage. In some embodiments, the engineered cell is a mast cell. In some embodiments, the engineered cell is a dendritic cell.

[0367] In some embodiments, the engineered cell is a granulocyte. In some embodiments, the engineered cell is a lymphocyte. In some embodiments, the engineered cell is a T cell. In some embodiments, the engineered cell is a CD4+ T cell. In some embodiments, the engineered cell is a CD8+ T cell. In some embodiments, the engineered cell is a memory T cell. In some embodiments, the engineered cell is a B cell. In some embodiments, the engineered cell is a plasma B cell. In some embodiments, the engineered cell is a memory B cell.

[0368] In some embodiments, the disclosure provides a pharmaceutical composition comprising any one of the engineered cells disclosed herein. In some embodiments, the pharmaceutical composition comprises a population of any one of the engineered cells disclosed herein. In some embodiments, the population of cells is at least 65%, at least 70%, at least 75%, at least 80%, at least 85%, at least 90%, at least 95%, at least 96%, at least 97%, at least 98%, at least 99%, or at least 99.5% negative for the surface antigen (e.g., HLA-A, MHC Class II (HLA-DP, DQ, DR), or endogenous TCR) as measured by flow cytometry. In some embodiments, the population of engineered cells that is at least 65% negative as measured by flow cytometry. In some embodiments, the population of engineered cells that is at least 70% negative as measured by flow cytometry. In some embodiments, the population of engineered cells is at least 80% negative as measured by flow cytometry. In some embodiments, the population of engineered cells is at least 90% negative as measured by flow cytometry. In some embodiments, the population of engineered cells is at least 91% negative as measured by flow cytometry. In some embodiments, the population of engineered cells is at least 92% negative as measured by flow cytometry. In some embodiments, the population of engineered cells is at least 93% negative as measured by flow cytometry. In some embodiments, the population of engineered cells is at least 94% negative as measured by flow cytometry. In some embodiments, the population of engineered cells is at least 95% endogenous TCR protein negative as measured by flow cytometry. In some embodiments, the population of engineered cells is at least 97% endogenous TCR protein negative as measured by flow cytometry. In some embodiments, the population of engineered cells is at least 98% endogenous TCR protein negative as measured by flow cytometry. In some embodiments, the population of engineered cells is at least 99% endogenous TCR protein negative as measured by flow cytometry.

[0369] In some embodiments, methods are provided for administering the engineered cells or pharmaceutical compositions disclosed herein to a subject in need thereof. In some embodiments, methods are provided for administering the engineered cells or pharmaceutical compositions disclosed herein to a subject as an ACT therapy. In some embodiments, methods are provided for administering the engineered cells or pharmaceutical compositions disclosed herein to a subject as a treatment for cancer. In some embodiments, methods are provided for administering the engineered cells or pharmaceutical compositions disclosed herein to a subject as a treatment for an autoimmune disease. In some embodiments, methods are provided for administering the engineered cells or pharmaceutical compositions disclosed herein to a subject as a treatment for an infectious disease.

### B. Methods and Compositions for Reducing or Eliminating Surface Expression of HLA-A, TRAC, TRBC, and MHC Class II

[0370] The present disclosure provides methods and compositions for reducing or eliminating surface expression of HLA-A, TRAC, TRBC, or MHC class II protein on a cell relative to an unmodified cell by genetically modifying the HLA-A, TRAC, TRBC, or CIITA gene. The resultant genetically modified cell may also be referred to herein as an engineered cell. In some embodiments, an already-genetically modified (or engineered) cell may be the starting cell for further genetic modification using the methods or compositions provided herein. In some embodiments, the cell is an allogeneic cell. In some embodiments, a cell with reduced HLA-A, TRAC, TRBC, or MHC class II expression is useful for adoptive cell transfer therapies. In some embodiments, editing of the HLA-A, TRAC, TRBC, or CIITA gene is combined with additional genetic modifications to yield a cell that is desirable for allogeneic transplant purposes.

[0371] In some embodiments, the methods comprise reducing or eliminating surface expression of HLA-A protein on the surface of a cell comprising contacting a cell with a composition comprising an HLA-A guide RNA comprising a guide sequence that targets an HLA-A genomic target sequence comprising at least 10 contiguous nucleotides within the genomic coordinates chr6:29942540-29945459. In some embodiments, the methods further comprise contacting the cell with an RNA-guided DNA binding agent or a nucleic acid encoding an RNA-guided DNA binding agent. In some embodiments, the RNA-guided DNA binding agent is Cas9. In some embodiments, the RNA-guided DNA binding agent is N. meningitidis Cas9. In some embodiments, the HLA-A guide RNA is a N. meningitidis Cas9 guide RNA. In some embodiments, the RNA-guided DNA binding agent comprises a deaminase domain. In some embodiments the RNA-guided DNA binding agent comprises an APOBEC3A deaminase (A3A) and an RNA-guided nickase. In some embodiments, the expression of HLA-A protein on the surface of the cell (i.e., engineered cell) is thereby reduced. In some embodiments, the HLA-A guide RNA comprises a guide sequence selected from SEQ ID NO: 2-80. In some embodiments, the methods comprise making an engineered cell, which has reduced or eliminated surface expression of HLA-A protein relative to an unmodified cell, comprising contact the cell with a composition comprising an HLA-A guide RNA comprising a guide sequence that targets a genomic target comprising at least 10 contiguous nucleotides within the genomic coordinates chr6:29942540-29945459. In some embodiments, the methods further comprise contacting the cell with an RNA-guided DNA binding agent or a nucleic acid encoding an RNA-guided DNA binding agent. In some embodiments, the RNA-guided DNA binding agent is Cas9. In some embodiments, the RNA-guided DNA binding agent is N. meningitidis Cas9. In some embodiments, the HLA-A guide RNA is a N. meningitidis Cas9 guide RNA. In some embodiments, the RNA-guided DNA binding agent comprises a deaminase region. In some embodiments the RNA-guided DNA binding agent comprises an APOBEC3A deaminase (A3A) and an RNA-guided nickase. In some embodiments, the expression of HLA-A protein on the surface of the cell (i.e., engineered cell) is thereby reduced. In some embodiments, the HLA-A guide RNA comprises a guide sequence selected from SEQ ID NO: 2-80.

[0372] In some embodiments, the methods comprise genetically modifying a cell to reduce or eliminate the surface expression of HLA-A protein comprising contacting the cell with a composition comprising an HLA-A guide RNA comprising a guide sequence that targets a genomic target comprising at least 10 contiguous nucleotides within the genomic coordinates chr6:29942540-29945459. In some embodiments, the methods further comprise contacting the cell with an RNA-guided DNA binding agent or a nucleic acid encoding an RNA-guided DNA binding agent. In some embodiments, the RNA-guided DNA binding agent is Cas9. In some embodiments, the RNA-guided DNA binding agent is N. meningitidis Cas9. In some embodiments, the HLA-A guide RNA is a N. meningitidis Cas9 guide RNA. In some embodiments, the RNA-guided DNA binding agent comprises a deaminase region. In some embodiments the RNA-guided DNA binding agent comprises an APOBEC3A deaminase (A3A) and an RNA-guided nickase. In some embodiments, the expression of HLA-A protein on the surface of the cell (i.e., engineered cell) is thereby reduced. In some embodiments, the HLA-A guide RNA comprises a guide sequence selected from SEQ ID NO: 2-80.

[0373] In some embodiments, the methods comprise genetically modifying HLA-A comprising contacting a cell with a composition comprising an HLA-A guide RNA comprising a guide sequence that targets a genomic target comprising at least 10 contiguous nucleotides within the genomic coordinates chr6:29942540-29945459. In some embodiments, the methods further comprise contacting the cell with an RNA-guided DNA binding agent or a nucleic acid encoding an RNA-guided DNA binding agent. In some embodiments, the RNA-guided DNA binding agent is Cas9. In some embodiments, the RNA-guided DNA binding agent is N. meningitidis Cas9. In some embodiments, the HLA-A guide RNA is a N. meningitidis Cas9 guide RNA. In some embodiments, the RNA-guided DNA binding agent comprises a deaminase region. In some embodiments the RNA-guided DNA binding agent comprises an APOBEC3A deaminase (A3A) and an RNA-guided nickase. In some embodiments, the expression of HLA-A protein on the surface of the cell (i.e., engineered cell) is thereby reduced. In some embodiments, the HLA-A guide RNA comprises a guide sequence selected from SEQ ID NO: 2-80.

[0374] In some embodiments, the methods comprise inducing a DSB or a single stranded break (SSB) in HLA-A comprising contacting a cell with a composition comprising an HLA-A guide RNA comprising a guide sequence targets a genomic target comprising at least 10 contiguous nucleotides within the genomic coordinates chr6:29942540-29945459. In some embodiments, the methods further comprise contacting the cell with an RNA-guided DNA binding agent or a nucleic acid encoding an RNA-guided DNA binding agent. In some embodiments, the RNA-guided DNA binding agent is Cas9. In some embodiments, the RNA-guided DNA binding agent is S. pyogenes Cas9. In some embodiments, the HLA-A guide RNA is a N. meningitidis Cas9 guide RNA. In some embodiments, the RNA-guided DNA binding agent comprises a deaminase region. In some embodiments the RNA-guided DNA binding agent comprises an APOBEC3A deaminase (A3A) and an RNA-guided nickase. In some embodiments, the expression of HLA-A protein on the surface of the cell (i.e., engineered cell) is thereby reduced. In some embodiments, the HLA-A guide RNA comprises a guide sequence selected from SEQ ID NO: 2-80.

[0375] In some embodiments, the methods comprise reducing expression of the HLA-A protein in a cell comprising delivering a composition to a cell comprising contacting a cell with a composition comprising an HLA-A guide RNA comprising a guide sequence targets a genomic target comprising at least 10 contiguous nucleotides within the genomic coordinates chr6:29942540-29945459. In some embodiments, the methods further comprise contacting the cell with an RNA-guided DNA binding agent or a nucleic acid encoding an RNA-guided DNA binding agent. In some embodiments, the RNA-guided DNA binding agent is Cas9. In some embodiments, the RNA-guided DNA binding agent is N. meningitidis Cas9. In some embodiments, the HLA-A guide RNA is a N. meningitidis Cas9 guide RNA. In some embodiments, the RNA-guided DNA binding agent comprises a deaminase region. In some embodiments the RNA-guided DNA binding agent comprises an APOBEC3A deaminase (A3A) and an RNA-guided nickase. In some embodiments, the expression of HLA-A protein on the surface of the cell (i.e., engineered cell) is thereby reduced. In some embodiments, the HLA-A guide RNA comprises a guide sequence selected from SEQ ID NO: 2-80.

[0376] In some embodiments, the methods of reducing expression of an HLA-A protein on the surface of a cell comprise contacting a cell with any one or more of the HLA-A guide RNAs disclosed herein. In some embodiments, the HLA-A guide RNA comprises a guide sequence selected from SEQ ID NO: 2-80.

[0377] In some embodiments, compositions are provided comprising an HLA-A guide RNA comprising a guide sequence that targets a genomic target comprising at least 10 contiguous nucleotides within the genomic coordinates chr6:29942540-29945459. In some embodiments, the composition further comprises an RNA-guided DNA binding agent or a nucleic acid encoding an RNA-guided DNA binding agent. In some embodiments, the composition comprises an RNA-guided DNA binding agent that is Cas9. In some embodiments, the RNA-guided DNA binding agent is N. meningitidis Cas9. In some embodiments, the HLA-A guide RNA is a N. meningitidis Cas9 guide RNA. In some embodiments, the RNA-guided DNA binding agent comprises a deaminase region. In some embodiments the RNA-guided DNA binding agent comprises an APOBEC3A deaminase (A3A) and an RNA-guided nickase. In some embodiments, the HLA-A guide RNA comprises a guide sequence selected from SEQ ID NO: 2-80.

[0378] In some embodiments, a composition is provided, the composition comprising: a) an HLA-A guide RNA (gRNA) comprising i) a guide sequence selected from SEQ ID NOs: 2-80; or ii) at least 19, 20, 21, 22, 23, or 24 contiguous nucleotides of a sequence selected from SEQ ID NOs: 2-80; or iii) a guide sequence at least 95%, 90%, or 85% identical to a sequence selected from SEQ ID NOs: 2-80; or iv) a sequence that comprises 10 contiguous nucleotides±10 nucleotides of a genomic coordinate listed in Table 1; or v) at least 19, 20, 21, 22, 23, or 24 contiguous nucleotides of a sequence from (iv); or vi) a guide sequence that is at least 95%, 90%, or 85% identical to a sequence selected from (iv). In some embodiments, the HLA-A guide RNA (gRNA) is a single guide RNA.

[0379] In some embodiments, a method of making an engineered cell, which has reduced or eliminated surface expression of HLA-A protein relative to an unmodified cell, is provided, the method comprising contacting a cell with a composition of any of the embodiments provided herein. In some embodiments, the composition comprises an HLA-A guide RNA, comprising a guide sequence of any one of: SEQ ID NOs: 1, 13, 55, 61, 66, 70, and 71. In some embodiments, the composition comprises an HLA-A guide RNA, comprising a guide sequence of any one of: SEQ ID NOs: 13, 55, 61, 66, 70, and 71. In some embodiments, the composition comprises an HLA-A guide RNA, comprising a guide sequence of any one of: SEQ ID NOs: 13, 17, 55, 61, 66, and 70.

[0380] In some embodiments, a method of reducing surface expression of HLA-A protein in an engineered cell relative to an unmodified cell, is provided, the method comprising contacting a cell with a composition of any of embodiments provided herein.

[0381] In some embodiments, the composition further comprises a uracil glycosylase inhibitor (UGI). In some embodiments, the composition comprises an RNA-guided DNA binding agent that the RNA-guided DNA binding agent generates a cytosine (C) to thymine (T) conversion with the HLA-A genomic target sequence. In some embodiments, the composition comprises an RNA-guided DNA binding agent that generates a adenosine (A) to guanine (G) conversion with the HLA-A genomic target sequence.

[0382] In some embodiments, an engineered cell produced by the methods described herein is provided. In some embodiments, the engineered cell produced by the methods and compositions described herein is an allogeneic cell. In some embodiments, the methods produce a composition comprising an engineered cell having reduced HLA-A expression. In some embodiments, the methods produce a composition comprising an engineered cell having reduced HLA-A protein expression. In some embodiments, the methods produce a composition comprising an engineered cell having reduced HLA-A levels in the cell nucleus. In some embodiments, the methods produce a composition comprising an engineered cell that expresses a truncated form of the HLA-A protein. In some embodiments, the methods produce a composition comprising an engineered cell that produces no detectable HLA-A protein. In some embodiments, the engineered cell has reduced HLA-A expression, reduced HLA-A protein, or reduced HLA-A levels in the cell nucleus as compared to an unmodified cell. In some embodiments, the engineered cell produced by the methods disclosed herein elicits a reduced response from CD4+ T cells as compared to an unmodified cell as measured in an in vitro cell culture assay containing CD4+ T cells.

[0383] In some embodiments, an engineered cell produced by the methods or compositions disclosed herein is provided wherein the cell has reduced or eliminated surface expression of HLA-A protein and wherein the cell comprises a genetic modification comprising at least 5 contiguous nucleotides within the genomic coordinates chr6:29942540-29945459. In some embodiments, an engineered cell produced by the methods or compositions disclosed herein is provided wherein the cell has reduced or eliminated surface expression of HLA-A protein and wherein the cell comprises a genetic modification comprising at least 10 contiguous nucleotides within the genomic coordinates chr6:29942540-29945459. In some embodiments, an engineered cell produced by the methods or compositions disclosed herein is provided wherein the cell has reduced or eliminated surface expression of HLA-A protein and wherein the cell comprises a genetic modification comprising at least one C to T substitution or at least one A to G substitution within the genomic coordinates chr6:29942540-29945459.

[0384] In some embodiments, the methods comprise reducing or eliminating surface expression of TRAC protein on the surface of a cell comprising contacting a cell with a composition comprising a TRAC guide RNA comprising a guide sequence that targets a genomic target comprising at least 10 contiguous nucleotides within the genomic coordinates chr14:22547505-22551621 or chr14:22547462-22551621. In some embodiments, the methods further comprise contacting the cell with an RNA-guided DNA binding agent or a nucleic acid encoding an RNA-guided DNA binding agent. In some embodiments, the RNA-guided DNA binding agent is Cas9. In some embodiments, the RNA-guided DNA binding agent is N. meningitidis Cas9. In some embodiments, the TRAC guide RNA is a N. meningitidis Cas9 guide RNA. In some embodiments, the RNA-guided DNA binding agent comprises a deaminase domain. In some embodiments the RNA-guided DNA binding agent comprises an APOBEC3A deaminase (A3A) and an RNA-guided nickase. In some embodiments, the expression of TRAC protein on the surface of the cell (i.e., engineered cell) is thereby reduced. In some embodiments, the TRAC guide RNA comprises a guide sequence selected from SEQ ID NO: 101-120.

[0385] In some embodiments, the methods comprise making an engineered cell, which has reduced or eliminated surface expression of TRAC protein relative to an unmodified cell, comprising contact the cell with a composition comprising a TRAC guide RNA comprising a guide sequence that targets a genomic target comprising at least 10 contiguous nucleotides within the genomic coordinates chr14:22547505-22551621 or chr14:22547462-22551621. In some embodiments, the methods further comprise contacting the cell with an RNA-guided DNA binding agent or a nucleic acid encoding an RNA-guided DNA binding agent. In some embodiments, the RNA-guided DNA binding agent is Cas9. In some embodiments, the RNA-guided DNA binding agent is N. meningitidis Cas9. In some embodiments, the TRAC guide RNA is a N. meningitidis Cas9 guide RNA. In some embodiments, the RNA-guided DNA binding agent comprises a deaminase region. In some embodiments the RNA-guided DNA binding agent comprises an APOBEC3A deaminase (A3A) and an RNA-guided nickase. In some embodiments, the expression of TRAC protein on the surface of the cell (i.e., engineered cell) is thereby reduced. In some embodiments, the TRAC guide RNA comprises a guide sequence selected from SEQ ID NO: 101-120.

[0386] In some embodiments, the methods comprise genetically modifying a cell to reduce or eliminate the surface expression of TRAC protein comprising contacting the cell with a composition comprising a TRAC guide RNA comprising a guide sequence that targets a genomic target comprising at least 10 contiguous nucleotides within the genomic coordinates chr14:22547505-22551621 or chr14:22547462-22551621. In some embodiments, the methods further comprise contacting the cell with an RNA-guided DNA binding agent or a nucleic acid encoding an RNA-guided DNA binding agent. In some embodiments, the RNA-guided DNA binding agent is Cas9. In some embodiments, the RNA-guided DNA binding agent is N. meningitidis Cas9. In some embodiments, the TRAC guide RNA is a N. meningitidis Cas9 guide RNA. In some embodiments, the RNA-guided DNA binding agent comprises a deaminase region. In some embodiments the RNA-guided DNA binding agent comprises an APOBEC3A deaminase (A3A) and an RNA-guided nickase. In some embodiments, the expression of TRAC protein on the surface of the cell (i.e., engineered cell) is thereby reduced. In some embodiments, the TRAC guide RNA comprises a guide sequence selected from SEQ ID NO: 101-120.

[0387] In some embodiments, the methods comprise genetically modifying TRAC comprising contacting a cell with a composition comprising a TRAC guide RNA comprising a guide sequence that targets a genomic target comprising at least 10 contiguous nucleotides within the genomic coordinates chr14:22547505-22551621 or chr14:22547462-22551621. In some embodiments, the methods further comprise contacting the cell with an RNA-guided DNA binding agent or a nucleic acid encoding an RNA-guided DNA binding agent. In some embodiments, the RNA-guided DNA binding agent is Cas9. In some embodiments, the RNA-guided DNA binding agent is N. meningitidis Cas9. In some embodiments, the TRAC guide RNA is a N. meningitidis Cas9 guide RNA. In some embodiments, the RNA-guided DNA binding agent comprises a deaminase region. In some embodiments the RNA-guided DNA binding agent comprises an APOBEC3A deaminase (A3A) and an RNA-guided nickase. In some embodiments, the expression of TRAC protein on the surface of the cell (i.e., engineered cell) is thereby reduced. In some embodiments, the TRAC guide RNA comprises a guide sequence selected from SEQ ID NO: 101-120.

[0388] In some embodiments, the methods comprise inducing a DSB or a single stranded break (SSB) in TRAC comprising contacting a cell with a composition comprising a TRAC guide RNA comprising a guide sequence targets a genomic target comprising at least 10 contiguous nucleotides within the genomic coordinates chr14:22547505-22551621 or chr14:22547462-22551621. In some embodiments, the methods further comprise contacting the cell with an RNA-guided DNA binding agent or a nucleic acid encoding an RNA-guided DNA binding agent. In some embodiments, the RNA-guided DNA binding agent is Cas9. In some embodiments, the RNA-guided DNA binding agent is S. pyogenes Cas9. In some embodiments, the TRAC guide RNA is a N. meningitidis Cas9 guide RNA. In some embodiments, the RNA-guided DNA binding agent comprises a deaminase region. In some embodiments the RNA-guided DNA binding agent comprises an APOBEC3A deaminase (A3A) and an RNA-guided nickase. In some embodiments, the expression of TRAC protein on the surface of the cell (i.e., engineered cell) is thereby reduced. In some embodiments, the TRAC guide RNA comprises a guide sequence selected from SEQ ID NO: 101-120.

[0389] In some embodiments, the methods comprise reducing expression of the TRAC protein in a cell comprising delivering a composition to a cell comprising contacting a cell with a composition comprising a TRAC guide RNA comprising a guide sequence targets a genomic target comprising at least 10 contiguous nucleotides within the genomic coordinates chr14:22547505-22551621 or chr14:22547462-22551621. In some embodiments, the methods further comprise contacting the cell with an RNA-guided DNA binding agent or a nucleic acid encoding an RNA-guided DNA binding agent. In some embodiments, the RNA-guided DNA binding agent is Cas9. In some embodiments, the RNA-guided DNA binding agent is N. meningitidis Cas9. In some embodiments, the TRAC guide RNA is a N. meningitidis Cas9 guide RNA. In some embodiments, the RNA-guided DNA binding agent comprises a deaminase region. In some embodiments the RNA-guided DNA binding agent comprises an APOBEC3A deaminase (A3A) and an RNA-guided nickase. In some embodiments, the expression of TRAC protein on the surface of the cell (i.e., engineered cell) is thereby reduced. In some embodiments, the TRAC guide RNA comprises a guide sequence selected from SEQ ID NO: 101-120.

[0390] In some embodiments, the methods of reducing expression of a TRAC protein on the surface of a cell comprise contacting a cell with any one or more of the TRAC guide RNAs disclosed herein. In some embodiments, the TRAC guide RNA comprises a guide sequence selected from SEQ ID NO: 101-120.

[0391] In some embodiments, compositions are provided comprising a TRAC guide RNA comprising a guide sequence that targets a genomic target comprising at least 10 contiguous nucleotides within the genomic coordinates chr14:22547505-22551621 or chr14:22547462-22551621. In some embodiments, the composition further comprises an RNA-guided DNA binding agent or a nucleic acid encoding an RNA-guided DNA binding agent. In some embodiments, the composition comprises an RNA-guided DNA binding agent that is Cas9. In some embodiments, the RNA-guided DNA binding agent is N. meningitidis Cas9. In some embodiments, the TRAC guide RNA is a N. meningitidis Cas9 guide RNA. In some embodiments, the RNA-guided DNA binding agent comprises a deaminase region. In some embodiments the RNA-guided DNA binding agent comprises an APOBEC3A deaminase (A3A) and an RNA-guided nickase. In some embodiments, the TRAC guide RNA comprises a guide sequence selected from SEQ ID NO: 101-120.

[0392] In some embodiments, a composition is provided, the composition comprising: a) a TRAC guide RNA (gRNA) comprising i) a guide sequence selected from SEQ ID NOs: 101-120; or ii) at least 19, 20, 21, 22, 23, or 24 contiguous nucleotides of a sequence selected from SEQ ID NOs: 101-120; or iii) a guide sequence at least 95%, 90%, or 85% identical to a sequence selected from SEQ ID NOs: 101-120; or iv) a sequence that comprises 10 contiguous nucleotides±10 nucleotides of a genomic coordinate listed in Table 2; or v) at least 19, 20, 21, 22, 23, or 24 contiguous nucleotides of a sequence from (iv); or vi) a guide sequence that is at least 95%, 90%, or 85% identical to a sequence selected from (v). In some embodiments, the TRAC guide RNA (gRNA) is a single-guide RNA (sgRNA).

[0393] In some embodiments, a method of making an engineered cell, which has reduced or eliminated surface expression of TRAC protein relative to an unmodified cell, is provided, the method comprising contacting a cell with a composition of any of the embodiments provided herein. In some embodiments, the composition comprises a TRAC guide RNA, comprising a guide sequence of any one of: SEQ ID NO: 101, 102, 103, 105, 107, 109, 111, and 115. In some embodiments, the composition comprises a TRAC guide RNA comprising a guide sequence of any one of: SEQ ID NO: 101, 102, 103, 107, and 111.

[0394] In some embodiments, a method of reducing surface expression of TRAC protein in an engineered cell relative to an unmodified cell, is provided, the method comprising contacting a cell with a composition of any of embodiments provided herein.
[0395] embodiments, the composition further comprises a uracil glycosylase inhibitor (UGI). In some embodiments, the composition comprises an RNA-guided DNA binding agent that the RNA-guided DNA binding agent generates a cytosine (C) to thymine (T) conversion with the TRAC genomic target sequence. In some embodiments, the composition comprises an RNA-guided DNA binding agent that generates a adenosine (A) to guanine (G) conversion with the TRAC genomic target sequence.

[0396] In some embodiments, an engineered cell produced by the methods described herein is provided. In some embodiments, the engineered cell produced by the methods and compositions described herein is an allogeneic cell. In some embodiments, the methods produce a composition comprising an engineered cell having reduced TRAC expression. In some embodiments, the methods produce a composition comprising an engineered cell having reduced TRAC protein expression. In some embodiments, the methods produce a composition comprising an engineered cell having reduced TRAC levels in the cell nucleus. In some embodiments, the methods produce a composition comprising an engineered cell that expresses a truncated form of the TRAC protein. In some embodiments, the methods produce a composition comprising an engineered cell that produces no detectable TRAC protein. In some embodiments, the engineered cell has reduced TRAC expression, reduced TRAC protein, or reduced TRAC levels in the cell nucleus as compared to an unmodified cell. In some embodiments, the engineered cell produced by the methods disclosed herein elicits a reduced response from CD4+ T cells as compared to an unmodified cell as measured in an in vitro cell culture assay containing CD4+ T cells.

[0397] In some embodiments, an engineered cell produced by the methods or compositions disclosed herein is provided wherein the cell has reduced or eliminated surface expression of TRAC protein and wherein the cell comprises a genetic modification comprising at least 5 contiguous nucleotides within the genomic coordinates chr14:22547505-22551621 or chr14:22547462-22551621. In some embodiments, an engineered cell produced by the methods or compositions disclosed herein is provided wherein the cell has reduced or eliminated surface expression of TRAC protein and wherein the cell comprises a genetic modification comprising at least 10 contiguous nucleotides within the genomic coordinates chr14:22547505-22551621 or chr14:22547462-22551621. In some embodiments, an engineered cell produced by the methods or compositions disclosed herein is provided wherein the cell has reduced or eliminated surface expression of TRAC protein and wherein the cell comprises a genetic modification comprising at least one C to T substitution or at least one A to G substitution within the genomic coordinates chr14:22547505-22551621 or chr14:22547462-22551621.

[0398] In some embodiments, the methods comprise reducing or eliminating surface expression of TRBC protein on the surface of a cell comprising contacting a cell with a composition comprising a TRBC guide RNA comprising a guide sequence that targets a genomic target comprising at least 10 contiguous nucleotides within the genomic coordinates chosen from chr7:142791756-142802543. In some embodiments, the methods comprise reducing or eliminating surface expression of TRBC protein on the surface of a cell comprising contacting a cell with a composition comprising a TRBC guide RNA comprising a guide sequence that targets a genomic target comprising at least 10 contiguous nucleotides within the genomic coordinates chosen from: (a) chr7:142791862-142793149; (b) chr7: 142791756-142792721; or (c) chr7:142801104-142802543. In some embodiments, the methods further comprise contacting the cell with an RNA-guided DNA binding agent or a nucleic acid encoding an RNA-guided DNA binding agent. In some embodiments, the RNA-guided DNA binding agent is Cas9. In some embodiments, the RNA-guided DNA binding agent is N. meningitidis Cas9. In some embodiments, the TRBC guide RNA is a N. meningitidis Cas9 guide RNA. In some embodiments, the RNA-guided DNA binding agent comprises a deaminase domain. In some embodiments the RNA-guided DNA binding agent comprises an APOBEC3A deaminase (A3A) and an RNA-guided nickase. In some embodiments, the expression of TRBC protein on the surface of the cell (i.e., engineered cell) is thereby reduced. In some embodiments, the TRBC guide RNA comprises a guide sequence selected from SEQ ID NO: 201-265.

[0399] In some embodiments, the methods comprise making an engineered cell, which has reduced or eliminated surface expression of TRBC protein relative to an unmodified cell, comprising contact the cell with a composition comprising a TRBC guide RNA comprising a guide sequence that targets a genomic target comprising at least 10 contiguous nucleotides within the genomic coordinates coordinates chosen from: (a) chr7:142791862-142793149; (b) chr7: 142791756-142792721; or (c) chr7:142801104-142802543. In some embodiments, the methods further comprise contacting the cell with an RNA-guided DNA binding agent or a nucleic acid encoding an RNA-guided DNA binding agent. In some embodiments, the RNA-guided DNA binding agent is Cas9. In some embodiments, the RNA-guided DNA binding agent is N. meningitidis Cas9. In some embodiments, the TRBC guide RNA is a N. meningitidis Cas9 guide RNA. In some embodiments, the RNA-guided DNA binding agent comprises a deaminase region. In some embodiments the RNA-guided DNA binding agent comprises an APOBEC3A deaminase (A3A) and an RNA-guided nickase. In some embodiments, the expression of TRBC protein on the surface of the cell (i.e., engineered cell) is thereby reduced. In some embodiments, the TRBC guide RNA comprises a guide sequence selected from SEQ ID NO: 201-265.

[0400] In some embodiments, the methods comprise genetically modifying a cell to reduce or eliminate the surface expression of TRBC protein comprising contacting the cell with a composition comprising a TRBC guide RNA comprising a guide sequence that targets a genomic target comprising at least 10 contiguous nucleotides within the genomic coordinates chosen from: (a) chr7:142791862-142793149; (b) chr7: 142791756-142792721; or (c) chr7:142801104-142802543. In some embodiments, the methods further comprise contacting the cell with an RNA-guided DNA binding agent or a nucleic acid encoding an RNA-guided DNA binding agent. In some embodiments, the RNA-guided DNA binding agent is Cas9. In some embodiments, the RNA-guided DNA binding agent is N. meningitidis Cas9. In some embodiments, the TRBC guide RNA is a N. meningitidis Cas9 guide RNA. In some embodiments, the RNA-guided DNA binding agent comprises a deaminase region. In some embodiments the RNA-guided DNA binding agent comprises an APOBEC3A deaminase (A3A) and an RNA-guided nickase. In some embodiments, the expression of TRBC protein on the surface of the cell (i.e., engineered cell) is thereby reduced. In some embodiments, the TRBC guide RNA comprises a guide sequence selected from SEQ ID NO: 201-265.

[0401] In some embodiments, the methods comprise genetically modifying TRBC comprising contacting a cell with a composition comprising a TRBC guide RNA comprising a guide sequence that targets a genomic target comprising at least 10 contiguous nucleotides within the genomic coordinates coordinates chosen from: (a) chr7:142791862-142793149; (b) chr7: 142791756-142792721; or (c) chr7:142801104-142802543. In some embodiments, the methods further comprise contacting the cell with an RNA-guided DNA binding agent or a nucleic acid encoding an RNA-guided DNA binding agent. In some embodiments, the RNA-guided DNA binding agent is Cas9. In some embodiments, the RNA-guided DNA binding agent is N. meningitidis Cas9. In some embodiments, the TRBC guide RNA is a N. meningitidis Cas9 guide RNA. In some embodiments, the RNA-guided DNA binding agent comprises a deaminase region. In some embodiments the RNA-guided DNA binding agent comprises an APOBEC3A deaminase (A3A) and an RNA-guided nickase. In some embodiments, the expression of TRBC protein on the surface of the cell (i.e., engineered cell) is thereby reduced. In some embodiments, the TRBC guide RNA comprises a guide sequence selected from SEQ ID NO: 201-265.

[0402] In some embodiments, the methods comprise inducing a DSB or a single stranded break (SSB) in TRBC comprising contacting a cell with a composition comprising a TRBC guide RNA comprising a guide sequence targets a genomic target comprising at least 10 contiguous nucleotides within the genomic coordinates coordinates chosen from: (a) chr7:142791862-142793149; (b) chr7: 142791756-142792721; or (c) chr7:142801104-142802543. In some embodiments, the methods further comprise contacting the cell with an RNA-guided DNA binding agent or a nucleic acid encoding an RNA-guided DNA binding agent. In some embodiments, the RNA-guided DNA binding agent is Cas9. In some embodiments, the RNA-guided DNA binding agent is S. pyogenes Cas9. In some embodiments, the TRBC guide RNA is a N. meningitidis Cas9 guide RNA. In some embodiments, the RNA-guided DNA binding agent comprises a deaminase region. In some embodiments the RNA-guided DNA binding agent comprises an APOBEC3A deaminase (A3A) and an RNA-guided nickase. In some embodiments, the expression of TRBC protein on the surface of the cell (i.e., engineered cell) is thereby reduced. In some embodiments, the TRBC guide RNA comprises a guide sequence selected from SEQ ID NO: 201-265.

[0403] In some embodiments, the methods comprise reducing expression of the TRBC protein in a cell comprising delivering a composition to a cell comprising contacting a cell with a composition comprising a TRBC guide RNA comprising a guide sequence targets a genomic target comprising at least 10 contiguous nucleotides within the genomic coordinates coordinates chosen from: (a) chr7:142791862-142793149; (b) chr7: 142791756-142792721; or (c) chr7:142801104-142802543. In some embodiments, the methods further comprise contacting the cell with an RNA-guided DNA binding agent or a nucleic acid encoding an RNA-guided DNA binding agent. In some embodiments, the RNA-guided DNA binding agent is Cas9. In some embodiments, the RNA-guided DNA binding agent is N. meningitidis Cas9. In some embodiments, the TRBC guide RNA is a N. meningitidis Cas9 guide RNA. In some embodiments, the RNA-guided DNA binding agent comprises a deaminase region. In some embodiments the RNA-guided DNA binding agent comprises an APOBEC3A deaminase (A3A) and an RNA-guided nickase. In some embodiments, the expression of TRBC protein on the surface of the cell (i.e., engineered cell) is thereby reduced. In some embodiments, the TRBC guide RNA comprises a guide sequence selected from SEQ ID NO: 201-265.

[0404] In some embodiments, the methods of reducing expression of an TRBC protein on the surface of a cell comprise contacting a cell with any one or more of the TRBC guide RNAs disclosed herein. In some embodiments, the TRBC guide RNA comprises a guide sequence selected from SEQ ID NO: 201-265.

[0405] In some embodiments, compositions are provided comprising a TRBC guide RNA comprising a guide sequence that targets a genomic target comprising at least 10 contiguous nucleotides within the genomic coordinates chosen from: (a) chr7:142791862-142793149; (b) chr7: 142791756-142792721; or (c) chr7:142801104-142802543. In some embodiments, the composition further comprises an RNA-guided DNA binding agent or a nucleic acid encoding an RNA-guided DNA binding agent. In some embodiments, the composition comprises an RNA-guided DNA binding agent that is Cas9. In some embodiments, the RNA-guided DNA binding agent is N. meningitidis Cas9. In some embodiments, the TRBC guide RNA is a N. meningitidis Cas9 guide RNA. In some embodiments, the RNA-guided DNA binding agent comprises a deaminase region. In some embodiments the RNA-guided DNA binding agent comprises an APOBEC3A deaminase (A3A) and an RNA-guided nickase. In some embodiments, the TRBC guide RNA comprises a guide sequence selected from SEQ ID NO: 201-265.

[0406] In some embodiments, a composition is provided, the composition comprising: a) a TRBC guide RNA (gRNA) comprising i) a guide sequence selected from SEQ ID NOs: 201-265; or ii) at least 19, 20, 21, 22, 23, or 24 contiguous nucleotides of a sequence selected from SEQ ID NOs: 201-265; or iii) a guide sequence at least 95%, 90%, or 85% identical to a sequence selected from SEQ ID NOs: 201-265; or iv) a sequence that comprises 10 contiguous nucleotides±10 nucleotides of a genomic coordinate listed in Table 3; or v) at least 19, 20, 21, 22, 23, or 24 contiguous nucleotides of a sequence from (iv); or vi) a guide sequence that is at least 95%, 90%, or 85% identical to a sequence selected from (v). In some embodiments, the TRBC guide RNA that is a single-guide RNA (sgRNA).

[0407] In some embodiments, the composition further comprises a uracil glycosylase inhibitor (UGI). In some embodiments, the composition comprises an RNA-guided DNA binding agent that the RNA-guided DNA binding agent generates a cytosine (C) to thymine (T) conversion with the TRBC genomic target sequence. In some embodiments, the composition comprises an RNA-guided DNA binding agent that generates a adenosine (A) to guanine (G) conversion with the TRBC genomic target sequence.

[0408] In some embodiments, an engineered cell produced by the methods described herein is provided. In some embodiments, the engineered cell produced by the methods and compositions described herein is an allogeneic cell. In some embodiments, the methods produce a composition comprising an engineered cell having reduced TRBC expression. In some embodiments, the methods produce a composition comprising an engineered cell having reduced TRBC protein expression. In some embodiments, the methods produce a composition comprising an engineered cell having reduced TRBC levels in the cell nucleus. In some embodiments, the methods produce a composition comprising an engineered cell that expresses a truncated form of the TRBC protein. In some embodiments, the methods produce a composition comprising an engineered cell that produces no detectable TRBC protein. In some embodiments, the engineered cell has reduced TRBC expression, reduced TRBC protein, or reduced TRBC levels in the cell nucleus as compared to an unmodified cell. In some embodiments, the engineered cell produced by the methods disclosed herein elicits a reduced response from CD4+ T cells as compared to an unmodified cell as measured in an in vitro cell culture assay containing CD4+ T cells.

[0409] In some embodiments, an engineered cell produced by the methods or compositions disclosed herein is provided wherein the cell has reduced or eliminated surface expression of TRBC protein and wherein the cell comprises a genetic modification comprising at least 5 contiguous nucleotides within the genomic coordinates chosen from: (a) chr7:142791862-142793149; (b) chr7: 142791756-142792721; or (c) chr7:142801104-142802543. In some embodiments, an engineered cell produced by the methods or compositions disclosed herein is provided wherein the cell has reduced or eliminated surface expression of TRBC protein and wherein the cell comprises a genetic modification comprising at least 10 contiguous nucleotides within the genomic coordinates chosen from: (a) chr7:142791862-142793149; (b) chr7: 142791756-142792721; or (c) chr7:142801104-142802543. In some embodiments, an engineered cell produced by the methods or compositions disclosed herein is provided wherein the cell has reduced or eliminated surface expression of TRBC protein and wherein the cell comprises a genetic modification comprising at least one C to T substitution or at least one A to G substitution within the genomic coordinates chosen from: (a) chr7:142791862-142793149; (b) chr7: 142791756-142792721; or (c) chr7:142801104-142802543.

[0410] In some embodiments, an engineered cell, which has reduced or eliminated surface expression of TRBC relative to an unmodified cell, is provided, the engineered cell comprising a genetic modification in the TRBC gene, wherein the genetic modification comprises at least one nucleotide within the genomic coordinates chosen from: (a) chr7:142792690-142792714; or chr7:142792693-142792717; or (b) chr7:142791756-142791780; chr7:142791761-142791785; chr7:142791820-142791844; chr7:142791939-142791963; chr7:142791940-142791964; or chr7:142792004-142792028; or (c) chr7:142801104-142801124; chr7:142802103-142802127; or chr7:142802106-142802130.

[0411] In some embodiments, an engineered cell, which has reduced or eliminated surface expression of TRBC relative to an unmodified cell, is provided, the engineered cell comprising a genetic modification in the TRBC gene, wherein the genetic modification comprises an indel, a C to T substitution, or an A to G substitution within the genomic coordinates chosen from: (a) chr7:142792690-142792714; or chr7:142792693-142792717; or (b) chr7:142791756-142791780; chr7:142791761-142791785; chr7:142791820-142791844; chr7:142791939-142791963; chr7:142791940-142791964; or chr7:142792004-142792028; or (c) chr7:142801104-142801124; chr7:142802103-142802127; or chr7:142802106-142802130.

[0412] In some embodiments, a method of making an engineered cell, which has reduced or eliminated surface expression of TRBC protein relative to an unmodified cell, is provided, the method comprising contacting a cell with a composition of any of the embodiments provided herein. In some embodiments, the composition comprises a TRBC guide RNA, comprising a guide sequence of any one of: SEQ ID NO: 215, 216, 223, 224, 229, 230, 246, 259, and 260. In some embodiments, the composition comprises a TRBC guide RNA, comprising a guide sequence of any one of: SEQ ID NO: 215, 216, 224, 229, 246, 259, and 260. In some embodiments, the composition comprises a TRBC guide RNA, comprising a guide sequence of any one of SEQ ID NOs: 215, 259, and 260.

[0413] In some embodiments, the methods comprise reducing or eliminating surface expression of MHC class II protein on the surface of a cell comprising contacting a cell with a composition comprising a CIITA guide RNA comprising a guide sequence that targets a genomic target comprising at least 10 contiguous nucleotides within the genomic coordinates chosen from: (a) chr16:10877363-10907788 or (b) chr16:10906515-10908136. In some embodiments, the methods further comprise contacting the cell with an RNA-guided DNA binding agent or a nucleic acid encoding an RNA-guided DNA binding agent. In some embodiments, the RNA-guided DNA binding agent is Cas9. In some embodiments, the RNA-guided DNA binding agent is N. meningitidis Cas9. In some embodiments, the CIITA guide RNA is a N. meningitidis Cas9 guide RNA. In some embodiments, the RNA-guided DNA binding agent comprises a deaminase domain. In some embodiments the RNA-guided DNA binding agent comprises an APOBEC3A deaminase (A3A) and an RNA-guided nickase. In some embodiments, the expression of MHC class II protein on the surface of the cell (i.e., engineered cell) is thereby reduced. In some embodiments, the CIITA guide RNA comprises a guide sequence selected from SEQ ID NO: 301, 302, 304-576.

[0414] In some embodiments, the methods comprise making an engineered cell, which has reduced or eliminated surface expression of MHC class II protein relative to an unmodified cell, comprising contact the cell with a composition comprising a CIITA guide RNA comprising a guide sequence that targets a genomic target comprising at least 10 contiguous nucleotides within the genomic coordinates chosen from: (a) chr16:10877363-10907788 or (b) chr16:10906515-10908136. In some embodiments, the methods further comprise contacting the cell with an RNA-guided DNA binding agent or a nucleic acid encoding an RNA-guided DNA binding agent. In some embodiments, the RNA-guided DNA binding agent is Cas9. In some embodiments, the RNA-guided DNA binding agent is N. meningitidis Cas9. In some embodiments, the CIITA guide RNA is a N. meningitidis Cas9 guide RNA. In some embodiments, the RNA-guided DNA binding agent comprises a deaminase region. In some embodiments the RNA-guided DNA binding agent comprises an APOBEC3A deaminase (A3A) and an RNA-guided nickase. In some embodiments, the expression of MHC class II protein on the surface of the cell (i.e., engineered cell) is thereby reduced. In some embodiments, the CIITA guide RNA comprises a guide sequence selected from SEQ ID NO: 301, 302, 304-576.

[0415] In some embodiments, the methods comprise genetically modifying a cell to reduce or eliminate the surface expression of MHC class II protein comprising contacting the cell with a composition comprising a CIITA guide RNA comprising a guide sequence that targets a genomic target comprising at least 10 contiguous nucleotides within the genomic coordinates chosen from: (a) chr16:10877363-10907788 or (b) chr16:10906515-10908136. In some embodiments, the methods further comprise contacting the cell with an RNA-guided DNA binding agent or a nucleic acid encoding an RNA-guided DNA binding agent. In some embodiments, the RNA-guided DNA binding agent is Cas9. In some embodiments, the RNA-guided DNA binding agent is N. meningitidis Cas9. In some embodiments, the CIITA guide RNA is a N. meningitidis Cas9 guide RNA. In some embodiments, the RNA-guided DNA binding agent comprises a deaminase region. In some embodiments the RNA-guided DNA binding agent comprises an APOBEC3A deaminase (A3A) and an RNA-guided nickase. In some embodiments, the expression of MHC class II protein on the surface of the cell (i.e., engineered cell) is thereby reduced. In some embodiments, the CIITA guide RNA comprises a guide sequence selected from SEQ ID NO: 301, 302, 304-576.

[0416] In some embodiments, the methods comprise genetically modifying CIITA comprising contacting a cell with a composition comprising a CIITA guide RNA comprising a guide sequence that targets a genomic target comprising at least 10 contiguous nucleotides within the genomic coordinates chosen from: (a) chr16:10877363-10907788 or (b) chr16:10906515-10908136. In some embodiments, the methods further comprise contacting the cell with an RNA-guided DNA binding agent or a nucleic acid encoding an RNA-guided DNA binding agent. In some embodiments, the RNA-guided DNA binding agent is Cas9. In some embodiments, the RNA-guided DNA binding agent is N. meningitidis Cas9. In some embodiments, the CIITA guide RNA is a N. meningitidis Cas9 guide RNA. In some embodiments, the RNA-guided DNA binding agent comprises a deaminase region. In some embodiments the RNA-guided DNA binding agent comprises an APOBEC3A deaminase (A3A) and an RNA-guided nickase. In some embodiments, the expression of MHC class II protein on the surface of the cell (i.e., engineered cell) is thereby reduced. In some embodiments, the CIITA guide RNA comprises a guide sequence selected from SEQ ID NO: 301, 302, 304-576.

[0417] In some embodiments, the methods comprise inducing a DSB or an single stranded break (SSB) in CIITA comprising contacting a cell with a composition comprising a CIITA guide RNA comprising a guide sequence targets a genomic target comprising at least 10 contiguous nucleotides within the genomic coordinates chosen from: (a) chr16:10877363-10907788 or (b) chr16:10906515-10908136. In some embodiments, the methods further comprise contacting the cell with an RNA-guided DNA binding agent or a nucleic acid encoding an RNA-guided DNA binding agent. In some embodiments, the RNA-guided DNA binding agent is Cas9. In some embodiments, the RNA-guided DNA binding agent is S. pyogenes Cas9. In some embodiments, the CIITA guide RNA is a N. meningitidis Cas9 guide RNA. In some embodiments, the RNA-guided DNA binding agent comprises a deaminase region. In some embodiments the RNA-guided DNA binding agent comprises an APOBEC3A deaminase (A3A) and an RNA-guided nickase. In some embodiments, the expression of MHC class II protein on the surface of the cell (i.e., engineered cell) is thereby reduced. In some embodiments, the CIITA guide RNA comprises a guide sequence selected from SEQ ID NO: 301, 302, 304-576.

[0418] In some embodiments, the methods comprise reducing expression of the CIITA protein in a cell comprising delivering a composition to a cell comprising contacting a cell with a composition comprising a CIITA guide RNA comprising a guide sequence targets a genomic target comprising at least 10 contiguous nucleotides within the genomic coordinates chosen from: (a) chr16:10877363-10907788 or (b) chr16:10906515-10908136. In some embodiments, the methods further comprise contacting the cell with an RNA-guided DNA binding agent or a nucleic acid encoding an RNA-guided DNA binding agent. In some embodiments, the RNA-guided DNA binding agent is Cas9. In some embodiments, the RNA-guided DNA binding agent is N. meningitidis Cas9. In some embodiments, the CIITA guide RNA is a N. meningitidis Cas9 guide RNA. In some embodiments, the RNA-guided DNA binding agent comprises a deaminase region. In some embodiments the RNA-guided DNA binding agent comprises an APOBEC3A deaminase (A3A) and an RNA-guided nickase. In some embodiments, the expression of MHC class II protein on the surface of the cell (i.e., engineered cell) is thereby reduced. In some embodiments, the CIITA guide RNA comprises a guide sequence selected from SEQ ID NO: 301, 302, 304-576.

[0419] In some embodiments, the methods of reducing expression of an MHC class II protein on the surface of a cell comprise contacting a cell with any one or more of the CIITA guide RNAs disclosed herein. In some embodiments, the CIITA guide RNA comprises a guide sequence selected from SEQ ID NO: 301, 302, 304-576.

[0420] In some embodiments, compositions are provided comprising a CIITA guide RNA comprising a guide sequence that targets a genomic target comprising at least 10 contiguous nucleotides within the genomic coordinates chosen from: (a) chr16:10877363-10907788 or (b) chr16:10906515-10908136. In some embodiments, the composition further comprises an RNA-guided DNA binding agent or a nucleic acid encoding an RNA-guided DNA binding agent. In some embodiments, the composition comprises an RNA-guided DNA binding agent that is Cas9. In some embodiments, the RNA-guided DNA binding agent is N. meningitidis Cas9. In some embodiments, the CIITA guide RNA is a N. meningitidis Cas9 guide RNA. In some embodiments, the RNA-guided DNA binding agent comprises a deaminase region. In some embodiments the RNA-guided DNA binding agent comprises an APOBEC3A deaminase (A3A) and an RNA-guided nickase. In some embodiments, the CIITA guide RNA comprises a guide sequence selected from SEQ ID NO: 301, 302, 304-576.

[0421] In some embodiments, a composition is provided, the composition comprising: a) a CIITA guide RNA (gRNA) comprising i) a guide sequence selected from SEQ ID NOs: 301, 302, 304-576; or ii) at least 19, 20, 21, 22, 23, or 24 contiguous nucleotides of a sequence selected from SEQ ID NOs: 301, 302, 304-576; or iii) a guide sequence at least 95%, 90%, or 85% identical to a sequence selected from SEQ ID NOs: 301, 302, 304-576; or iv) a sequence that comprises 10 contiguous nucleotides±10 nucleotides of a genomic coordinate listed in Table 4; or v) at least 19, 20, 21, 22, 23, or 24 contiguous nucleotides of a sequence from (iv); or vi) a guide sequence that is at least 95%, 90%, or 85% identical to a sequence selected from (v). In some embodiments, the CIITA guide RNA that is a single-guide RNA (sgRNA).

[0422] In some embodiments, a method of making an engineered cell, which has reduced or eliminated surface expression of MHC class II protein relative to an unmodified cell, is provided, the method comprising contacting a cell with a composition of any of the embodiments provided herein. In some embodiments, the composition comprises a CIITA guide RNA, comprising a guide sequence of any one of: SEQ ID NOs: 301-302, 320-321, 324, 326, 327, 332, 354, 361, 372, 400, 415, 419-420, 422, 428, 431, 432, 434, 451, 455, 458, 462-464, and 468. In some embodiments, the composition comprises a CIITA guide RNA, comprising a guide sequence of any one of: SEQ ID NOs: 301, 302, 320, 372, 414, 419, 422, and 462-463.

[0423] In some embodiments, the composition further comprises a uracil glycosylase inhibitor (UGI). In some embodiments, the composition comprises an RNA-guided DNA binding agent that the RNA-guided DNA binding agent generates a cytosine (C) to thymine (T) conversion with the CIITA genomic target sequence. In some embodiments, the composition comprises an RNA-guided DNA binding agent that generates a adenosine (A) to guanine (G) conversion with the CIITA genomic target sequence.

[0424] In some embodiments, an engineered cell produced by the methods described herein is provided. In some embodiments, the engineered cell produced by the methods and compositions described herein is an allogeneic cell. In some embodiments, the methods produce a composition comprising an engineered cell having reduced MHC class II expression. In some embodiments, the methods produce a composition comprising an engineered cell having reduced CIITA protein expression. In some embodiments, the methods produce a composition comprising an engineered cell having reduced CIITA levels in the cell nucleus. In some embodiments, the methods produce a composition comprising an engineered cell that expresses a truncated form of the CIITA protein. In some embodiments, the methods produce a composition comprising an engineered cell that produces no detectable CIITA protein. In some embodiments, the engineered cell has reduced MHC class II expression, reduced CIITA protein, or reduced CIITA levels in the cell nucleus as compared to an unmodified cell. In some embodiments, the engineered cell produced by the methods disclosed herein elicits a reduced response from CD4+ T cells as compared to an unmodified cell as measured in an in vitro cell culture assay containing CD4+ T cells.

[0425] In some embodiments, an engineered cell produced by the methods or compositions disclosed herein is provided wherein the cell has reduced or eliminated surface expression of MHC class II protein and wherein the cell comprises a genetic modification comprising at least 5 contiguous nucleotides within the genomic coordinates chosen from: (a) chr16:10877363-10907788 or (b) chr16:10906515-10908136. In some embodiments, an engineered cell produced by the methods or compositions disclosed herein is provided wherein the cell has reduced or eliminated surface expression of MHC class II protein and wherein the cell comprises a genetic modification comprising at least 10 contiguous nucleotides within the genomic coordinates chosen from: (a) chr16:10877363-10907788 or (b) chr16:10906515-10908136. In some embodiments, an engineered cell produced by the methods or compositions disclosed herein is provided wherein the cell has reduced or eliminated surface expression of MHC class II protein and wherein the cell comprises a genetic modification comprising at least one C to T substitution or at least one A to G substitution within the genomic coordinates chosen from: (a) chr16:10877363-10907788 or (b) chr16:10906515-10908136.

[0426] In some embodiments, the methods comprise making an engineered cell comprising contact the cell with a composition comprising an AAVS1 guide RNA comprising a guide sequence that targets a genomic target comprising at least 10 contiguous nucleotides within the genomic coordinates chr19:55115151-55116209. In some embodiments, the methods further comprise contacting the cell with an RNA-guided DNA binding agent or a nucleic acid encoding an RNA-guided DNA binding agent. In some embodiments, the RNA-guided DNA binding agent is Cas9. In some embodiments, the RNA-guided DNA binding agent is N. meningitidis Cas9. In some embodiments, the AAVS1 guide RNA is a N. meningitidis Cas9 guide RNA. In some embodiments, the RNA-guided DNA binding agent comprises a deaminase region. In some embodiments the RNA-guided DNA binding agent comprises an APOBEC3A deaminase (A3A) and an RNA-guided nickase. In some embodiments, the AAVS1 guide RNA comprises a guide sequence selected from SEQ ID NO: 601-774.

[0427] In some embodiments, the methods comprise genetically modifying a cell comprising contacting the cell with a composition comprising an AAVS1 guide RNA comprising a guide sequence that targets a genomic target comprising at least 10 contiguous nucleotides within the genomic coordinates chr19:55115151-55116209. In some embodiments, the methods further comprise contacting the cell with an RNA-guided DNA binding agent or a nucleic acid encoding an RNA-guided DNA binding agent. In some embodiments, the RNA-guided DNA binding agent is Cas9. In some embodiments, the RNA-guided DNA binding agent is N. meningitidis Cas9. In some embodiments, the AAVS1 guide RNA is a N. meningitidis Cas9 guide RNA. In some embodiments, the RNA-guided DNA binding agent comprises a deaminase region. In some embodiments the RNA-guided DNA binding agent comprises an APOBEC3A deaminase (A3A) and an RNA-guided nickase. In some embodiments, the AAVS1 guide RNA comprises a guide sequence selected from SEQ ID NO: 601-774.

[0428] In some embodiments, the methods comprise genetically modifying AAVS1 comprising contacting a cell with a composition comprising an AAVS1 guide RNA comprising a guide sequence that targets a genomic target comprising at least 10 contiguous nucleotides within the genomic coordinates chr19:55115151-55116209. In some embodiments, the methods further comprise contacting the cell with an RNA-guided DNA binding agent or a nucleic acid encoding an RNA-guided DNA binding agent. In some embodiments, the RNA-guided DNA binding agent is Cas9. In some embodiments, the RNA-guided DNA binding agent is N. meningitidis Cas9. In some embodiments, the AAVS1 guide RNA is a N. meningitidis Cas9 guide RNA. In some embodiments, the RNA-guided DNA binding agent comprises a deaminase region. In some embodiments the RNA-guided DNA binding agent comprises an APOBEC3A deaminase (A3A) and an RNA-guided nickase. In some embodiments, the AAVS1 guide RNA comprises a guide sequence selected from SEQ ID NO: 601-774.

[0429] In some embodiments, the methods comprise inducing a DSB or a single stranded break (SSB) in AAVS1 comprising contacting a cell with a composition comprising an AAVS1 guide RNA comprising a guide sequence targets a genomic target comprising at least 10 contiguous nucleotides within the genomic coordinates chr19:55115151-55116209. In some embodiments, the methods further comprise contacting the cell with an RNA-guided DNA binding agent or a nucleic acid encoding an RNA-guided DNA binding agent. In some embodiments, the RNA-guided DNA binding agent is Cas9. In some embodiments, the RNA-guided DNA binding agent is S. pyogenes Cas9. In some embodiments, the AAVS1 guide RNA is a N. meningitidis Cas9 guide RNA. In some embodiments, the RNA-guided DNA binding agent comprises a deaminase region. In some embodiments the RNA-guided DNA binding agent comprises an APOBEC3A deaminase (A3A) and an RNA-guided nickase. In some embodiments, the AAVS1 guide RNA comprises a guide sequence selected from SEQ ID NO: 601-774.

[0430] In some embodiments, the methods comprise delivering a composition to a cell comprising contacting a cell with a composition comprising an AAVS1 guide RNA comprising a guide sequence targets a genomic target comprising at least 10 contiguous nucleotides within the genomic coordinates chr19:55115151-55116209. In some embodiments, the methods further comprise contacting the cell with an RNA-guided DNA binding agent or a nucleic acid encoding an RNA-guided DNA binding agent. In some embodiments, the RNA-guided DNA binding agent is Cas9. In some embodiments, the RNA-guided DNA binding agent is N. meningitidis Cas9. In some embodiments, the AAVS1 guide RNA is a N. meningitidis Cas9 guide RNA. In some embodiments, the RNA-guided DNA binding agent comprises a deaminase region. In some embodiments the RNA-guided DNA binding agent comprises an APOBEC3A deaminase (A3A) and an RNA-guided nickase. In some embodiments, the AAVS1 guide RNA comprises a guide sequence selected from SEQ ID NO: 601-774.

[0431] In some embodiments, the methods of genetically modifying the AAVS1 gene comprise contacting a cell with any one or more of the AAVS1 guide RNAs disclosed herein. In some embodiments, the AAVS1 guide RNA comprises a guide sequence selected from SEQ ID NO: 601-774.

[0432] In some embodiments, compositions are provided comprising an AAVS1 guide RNA comprising a guide sequence that targets a genomic target comprising at least 10 contiguous nucleotides within the genomic coordinates chr19:55115151-55116209. In some embodiments, the composition further comprises an RNA-guided DNA binding agent or a nucleic acid encoding an RNA-guided DNA binding agent. In some embodiments, the composition comprises an RNA-guided DNA binding agent that is Cas9. In some embodiments, the RNA-guided DNA binding agent is N. meningitidis Cas9. In some embodiments, the AAVS1 guide RNA is a N. meningitidis Cas9 guide RNA. In some embodiments, the RNA-guided DNA binding agent comprises a deaminase region. In some embodiments the RNA-guided DNA binding agent comprises an APOBEC3A deaminase (A3A) and an RNA-guided nickase. In some embodiments, the AAVS1 guide RNA comprises a guide sequence selected from SEQ ID NO: 601-774.

[0433] In some embodiments, a composition is provided, the composition comprising: a) an AAVS1 guide RNA (gRNA) comprising i) a guide sequence selected from SEQ ID NOs: 601-774; or ii) at least 19, 20, 21, 22, 23, or 24 contiguous nucleotides of a sequence selected from SEQ ID NOs: 601-774; or iii) a guide sequence at least 95%, 90%, or 85% identical to a sequence selected from SEQ ID NOs: 601-774; or iv) a sequence that comprises 10 contiguous nucleotides±10 nucleotides of a genomic coordinate listed in Table 5; or v) at least 19, 20, 21, 22, 23, or 24 contiguous nucleotides of a sequence from (iv); or vi) a guide sequence that is at least 95%, 90%, or 85% identical to a sequence selected from (v). In some embodiments, the AAVS1 guide RNA (gRNA) is a single guide RNA.

[0434] In some embodiments, a method of making an engineered cell is provided, the method comprising contacting a cell with a composition of any of the embodiments provided herein. In some embodiments, the composition comprises an AAVS1 guide RNA, comprising a guide sequence of any one of from: SEQ ID NOs: 611, 620, 622, 626, 627, 628, 629, 632, 633, 634, 656, 659, 660, 661, 673, 691, 692, 730, 734, and 746.

[0435] In some embodiments, the composition further comprises a uracil glycosylase inhibitor (UGI). In some embodiments, the composition comprises an RNA-guided DNA binding agent that the RNA-guided DNA binding agent generates a cytosine (C) to thymine (T) conversion with the AAVS1 genomic target sequence. In some embodiments, the composition comprises an RNA-guided DNA binding agent that generates a adenosine (A) to guanine (G) conversion with the AAVS1 genomic target sequence.

[0436] In some embodiments, an engineered cell produced by the methods described herein is provided. In some embodiments, the engineered cell produced by the methods and compositions described herein is an allogeneic cell. In some embodiments, the engineered cell produced by the methods disclosed herein elicits a reduced response from CD4+ T cells as compared to an unmodified cell as measured in an in vitro cell culture assay containing CD4+ T cells.

[0437] In some embodiments, an engineered cell produced by the methods or compositions disclosed herein is provided wherein the cell comprises a genetic modification comprising at least 5 contiguous nucleotides within the genomic coordinates chr19:55115151-55116209. In some embodiments, an engineered cell produced by the methods or compositions disclosed herein is provided wherein the cell comprises a genetic modification comprising at least 10 contiguous nucleotides within the genomic coordinates chr19:55115151-55116209. In some embodiments, an engineered cell produced by the methods or compositions disclosed herein is provided wherein the cell comprises a genetic modification comprising at least one C to T substitution or at least one A to G substitution within the genomic coordinates chr19:55115151-55116209. In some embodiments, the compositions disclosed herein further comprise a pharmaceutically acceptable carrier. In some embodiments, a cell produced by the compositions disclosed herein comprising a pharmaceutically acceptable carrier is provided. In some embodiments, compositions comprising the cells disclosed herein are provided.

### C. HLA-A Guide RNAs

[0438] The methods and compositions provided herein disclose HLA-A guide RNAs useful for reducing the expression of HLA-A protein on the surface of a cell. In some embodiments, such guide RNAs direct an RNA-guided DNA binding agent to an HLA-A genomic target sequence and may be referred to herein as “HLA-A guide RNAs.” In some embodiments, the HLA-A guide RNA directs an RNA-guided DNA binding agent to a human HLA-A genomic target sequence. In some embodiments, the HLA-A guide RNA comprises a guide sequence selected from SEQ ID NO: 2-80.

[0439] In some embodiments, the methods and compositions disclosed herein comprise an HLA-A guide RNA comprising a guide sequence that targets an HLA-A genomic target sequence comprising at least 10 nucleotides within the genomic coordinates chr6:29942540-29945459. In some embodiments, the method and composition disclosed herein comprise an HLA-A guide RNA comprising a guide sequence that targets an HLA-A genomic target sequence comprising at least one nucleotide within the genomic coordinates chr6:29942540-29945459.

[0440] In some embodiments, the methods and compositions disclosed herein comprise an HLA-A guide RNA comprising a guide sequence that directs an RNA-guided DNA binding agent to induce a double stranded break (DSB) or a single-stranded break (SSB) in an HLA-A gene, wherein the HLA-A guide RNA targets and HLA-A genomic target sequence comprising at least 10 contiguous nucleotides within the genomic coordinates chr6:29942540-29945459. In some embodiments, the methods and compositions disclosed herein comprise an HLA-A guide RNA comprising a guide sequence that directs an RNA-guided DNA binding agent to induce a double stranded break (DSB) or a single-stranded break (SSB) in an HLA-A gene, wherein the HLA-A guide RNA targets an HLA-A genomic target sequence comprising at least one nucleotide within the genomic coordinates chr6:29942540-29945459.

[0441] In some embodiments, the methods and compositions disclose an HLA-A guide RNA that directs an RNA-guided DNA binding agent to induce a double stranded break (DSB) or a single-stranded break (SSB) in an HLA-A genomic target sequence. In some embodiments, the methods and compositions disclose an HLA-A guide RNA that directs an RNA-guided DNA binding agent to make a cut in an HLA-A genomic target sequence. In embodiments wherein the RNA-guided DNA cutting agent is Cas9, the cut occurs at the third base from the protospacer adjacent motif (PAM) sequence.

[0442] In some embodiments, a composition is provided comprising an HLA-A guide RNA described herein and an RNA-guided DNA binding agent or a nucleic acid encoding an RNA-guided DNA binding agent.

[0443] In some embodiments, a composition is provided comprising an HLA-A single-guide RNA (sgRNA) comprising a guide sequence that targets a genomic target comprising at least 10 contiguous nucleotides within the genomic coordinates chr6:29942540-29945459. In some embodiments, a composition is provided comprising an HLA-A sgRNA described herein and an RNA-guided DNA binding agent or a nucleic acid encoding an RNA-guided DNA binding agent.

[0444] In some embodiments, a composition is provided comprising an HLA-A dual-guide RNA (dgRNA) comprising a guide sequence that targets a genomic target comprising at least 10 contiguous nucleotides within the genomic coordinates chr6:29942540-29945459. In some embodiments, a composition is provided comprising an HLA-A dgRNA described herein and an RNA-guided DNA binding agent or a nucleic acid encoding an RNA-guided DNA binding agent.

[0445] In some embodiments, the TRAC gRNA comprises a guide sequence selected from any one of SEQ ID NOs: 2-80. Exemplary HLA-A guide sequences are shown below in Table 1 (SEQ ID NOs: 2-80) with corresponding guide RNA sequences 2-80.

TABLE 1
Exemplary HLA-A guide sequences

| | | | Exemplary | | |
|---|---|---|---|---|---|
| | | | Guide RNA | | |
| | SEQ ID | | Full | | |
| | NO to | | Sequence | Exemplary Guide | |
| | the | | (SEQ ID | RNA Modified | Genomic |
| Guide | Guide | Guide | NOs: | Sequence (SEQ ID | Coordinates |
| ID | Sequence | Sequence | 1002-1080) | NOs: 2002-2080) | (hg38) |
| G028854 | 2 | CCUGGGUCUGG | CCUGGGUCUGG | mC*mC*mU*mGmGGUm | chr6: |
| | | UCCUCCCCAUC | UCCUCCCCAUC | CmUGmGUmCCUCCmCC | 29944223-29944247 |
| | | CC | CCGUUGUAGCU | AUmCCCmGUUGmUmAm | |
| | | | CCCUGAAACCG | GmCUCCCmUmGmAmAm | |
| | | | UUGCUACAAUA | AmCmCGUUmGmCUAmC | |
| | | | AGGCCGUCGAA | AAU*AAGmGmCCmGmU | |
| | | | AGAUGUGCCGC | mCmGmAmAmAmGmAmU | |
| | | | AACGCUCUGCC | GUGCmCGmCAAmCGCU | |
| | | | UUCUGGCAUCG | CUmGmCCmUmUmCmUG | |
| | | | UU | GCAUCG*mU*mU | |
| G028855 | 3 | GUGGAGACCAG | GUGGAGACCAG | mG*mU*mG*mGmAGAm | chr6: |
| | | GCCUGCAGGGG | GCCUGCAGGGG | CmCAmGGmCCUGCmAG | 29944264-29944288 |
| | | AU | AUGUUGUAGCU | GGmGAUmGUUGmUmAm | |
| | | | CCCUGAAACCG | GmCUCCCmUmGmAmAm | |
| | | | UUGCUACAAUA | AmCmCGUUmGmCUAmC | |
| | | | AGGCCGUCGAA | AAU*AAGmGmCCmGmU | |
| | | | AGAUGUGCCGC | mCmGmAmAmAmGmAmU | |
| | | | AACGCUCUGCC | GUGCmCGmCAAmCGCU | |
| | | | UUCUGGCAUCG | CUmGmCCmUmUmCmUG | |
| | | | UU | GCAUCG*mU*mU | |
| G028856 | 4 | CCGUGUCCUGG | CCGUGUCCUGG | mC*mC*mG*mUmGUCm | chr6: |
| | | GUCUGGUCCUC | GUCUGGUCCUC | CmUGmGGmUCUGGmUC | 29944229-29944253 |
| | | CC | CCGUUGUAGCU | CUmCCCmGUUGmUmAm | |
| | | | CCCUGAAACCG | GmCUCCCmUmGmAmAm | |
| | | | UUGCUACAAUA | AmCmCGUUmGmCUAmC | |
| | | | AGGCCGUCGAA | AAU*AAGmGmCCmGmU | |
| | | | AGAUGUGCCGC | mCmGmAmAmAmGmAmU | |
| | | | AACGCUCUGCC | GUGCmCGmCAAmCGCU | |
| | | | UUCUGGCAUCG | CUmGmCCmUmUmCmUG | |
| | | | UU | GCAUCG*mU*mU | |
| G028857 | 5 | UCCGUGUCCUG | UCCGUGUCCUG | mU*mC*mC*mGmUGUm | chr6: |
| | | GGUCUGGUCCU | GGUCUGGUCCU | CmCUmGGmGUCUGmGU | 29944230-29944254 |
| | | CC | CCGUUGUAGCU | CCmUCCmGUUGmUmAm | |
| | | | CCCUGAAACCG | GmCUCCCmUmGmAmAm | |
| | | | UUGCUACAAUA | AmCmCGUUmGmCUAmC | |
| | | | AGGCCGUCGAA | AAU*AAGmGmCCmGmU | |
| | | | AGAUGUGCCGC | mCmGmAmAmAmGmAmU | |
| | | | AACGCUCUGCC | GUGCmCGmCAAmCGCU | |
| | | | UUCUGGCAUCG | CUmGmCCmUmUmCmUG | |
| | | | UU | GCAUCG*mU*mU | |
| G028858 | 6 | CACAUGGCAGG | CACAUGGCAGG | mC*mA*mC*mAmUGGm | chr6: |
| | | UGUAUCUCUGC | UGUAUCUCUGC | CmAGmGUmGUAUCmUC | 29944327-29944351 |
| | | UC | UCGUUGUAGCU | UGmCUCmGUUGmUmAm | |
| | | | CCCUGAAACCG | GmCUCCCmUmGmAmAm | |
| | | | UUGCUACAAUA | AmCmCGUUmGmCUAmC | |
| | | | AGGCCGUCGAA | AAU*AAGmGmCCmGmU | |
| | | | AGAUGUGCCGC | mCmGmAmAmAmGmAmU | |
| | | | AACGCUCUGCC | GUGCmCGmCAAmCGCU | |
| | | | UUCUGGCAUCG | CUmGmCCmUmUmCmUG | |
| | | | UU | GCAUCG*mU*mU | |
| G028859 | 7 | UGCUGCACAUG | UGCUGCACAUG | mU*mG*mC*mUmGCAm | chr6: |
| | | GCAGGUGUAUC | GCAGGUGUAUC | CmAUmGGmCAGGUmGU | 29944332-29944356 |
| | | UC | UCGUUGUAGCU | AUmCUCmGUUGmUmAm | |
| | | | CCCUGAAACCG | GmCUCCCmUmGmAmAm | |
| | | | UUGCUACAAUA | AmCmCGUUmGmCUAmC | |
| | | | AGGCCGUCGAA | AAU*AAGmGmCCmGmU | |
| | | | AGAUGUGCCGC | mCmGmAmAmAmGmAmU | |
| | | | AACGCUCUGCC | GUGCmCGmCAAmCGCU | |
| | | | UUCUGGCAUCG | CUmGmCCmUmUmCmUG | |
| | | | UU | GCAUCG*mU*mU | |
| G028860 | 8 | CCGCACGAACU | CCGCACGAACU | mC*mC*mG*mCmACGm | chr6: |
| | | GCGUGUCGUCC | GCGUGUCGUCC | AmACmUGmCGUGUmCG | 29942830-29942854 |
| | | AC | ACGUUGUAGCU | UCmCACmGUUGmUmAm | |
| | | | CCCUGAAACCG | GmCUCCCmUmGmAmAm | |
| | | | UUGCUACAAUA | AmCmCGUUmGmCUAmC | |
| | | | AGGCCGUCGAA | AAU*AAGmGmCCmGmU | |
| | | | AGAUGUGCCGC | mCmGmAmAmAmGmAmU | |
| | | | AACGCUCUGCC | GUGCmCGmCAAmCGCU | |
| | | | UUCUGGCAUCG | CUmGmCCmUmUmCmUG | |
| | | | UU | GCAUCG*mU*mU | |
| G028861 | 9 | CGCACGAACUG | CGCACGAACUG | mC*mG*mC*mAmCGAm | chr6: |
| | | CGUGUCGUCCA | CGUGUCGUCCA | AmCUmGCmGUGUCmGU | 29942829-29942853 |
| | | CG | CGGUUGUAGCU | CCmACGmGUUGmUmAm | |
| | | | CCCUGAAACCG | GmCUCCCmUmGmAmAm | |
| | | | UUGCUACAAUA | AmCmCGUUmGmCUAmC | |
| | | | AGGCCGUCGAA | AAU*AAGmGmCCmGmU | |
| | | | AGAUGUGCCGC | mCmGmAmAmAmGmAmU | |
| | | | AACGCUCUGCC | GUGCmCGmCAAmCGCU | |
| | | | UUCUGGCAUCG | CUmGmCCmUmUmCmUG | |
| | | | UU | GCAUCG*mU*mU | |
| G028862 | 10 | GUGCGCUGCAG | GUGCGCUGCAG | mG*mU*mG*mCmGCUm | chr6: |
| | | CGUCUCCUUCC | CGUCUCCUUCC | GmCAmGCmGUCUCmCU | 29943511-29943535 |
| | | CG | CGGUUGUAGCU | UCmCCGmGUUGmUmAm | |
| | | | CCCUGAAACCG | GmCUCCCmUmGmAmAm | |
| | | | UUGCUACAAUA | AmCmCGUUmGmCUAmC | |
| | | | AGGCCGUCGAA | AAU*AAGmGmCCmGmU | |
| | | | AGAUGUGCCGC | mCmGmAmAmAmGmAmU | |
| | | | AACGCUCUGCC | GUGCmCGmCAAmCGCU | |
| | | | UUCUGGCAUCG | CUmGmCCmUmUmCmUG | |
| | | | UU | GCAUCG*mU*mU | |
| G028863 | 11 | CCGAGGAUGGC | CCGAGGAUGGC | mC*mC*mG*mAmGGAm | chr6: |
| | | CGUCAUGGCGC | CGUCAUGGCGC | UmGGmCCmGUCAUmGG | 29942547-29942571 |
| | | CC | CCGUUGUAGCU | CGmCCCmGUUGmUmAm | |
| | | | CCCUGAAACCG | GmCUCCCmUmGmAmAm | |
| | | | UUGCUACAAUA | AmCmCGUUmGmCUAmC | |
| | | | AGGCCGUCGAA | AAU*AAGmGmCCmGmU | |
| | | | AGAUGUGCCGC | mCmGmAmAmAmGmAmU | |
| | | | AACGCUCUGCC | GUGCmCGmCAAmCGCU | |
| | | | UUCUGGCAUCG | CUmGmCCmUmUmCmUG | |
| | | | UU | GCAUCG*mU*mU | |
| G028864 | 12 | CGAGGAUGGCC | CGAGGAUGGCC | mC*mG*mA*mGmGAUm | chr6: |
| | | GUCAUGGCGCC | GUCAUGGCGCC | GmGCmCGmUCAUGmGC | 29942548-29942572 |
| | | CC | CCGUUGUAGCU | GCmCCCmGUUGmUmAm | |
| | | | CCCUGAAACCG | GmCUCCCmUmGmAmAm | |
| | | | UUGCUACAAUA | AmCmCGUUmGmCUAmC | |
| | | | AGGCCGUCGAA | AAU*AAGmGmCCmGmU | |
| | | | AGAUGUGCCGC | mCmGmAmAmAmGmAmU | |
| | | | AACGCUCUGCC | GUGCmCGmCAAmCGCU | |
| | | | UUCUGGCAUCG | CUmGmCCmUmUmCmUG | |
| | | | UU | GCAUCG*mU*mU | |
| G028865 | 13 | AAGGUUCCAUC | AAGGUUCCAUC | mA*mA*mG*mGmUUCm | chr6: |
| | | CCCUGCAGGCC | CCCUGCAGGCC | CmAUmCCmCCUGCmAG | 29944266-29944290 |
| | | UG | UGGUUGUAGCU | GCmCUGmGUUGmUmAm | |
| | | | CCCUGAAACCG | GmCUCCCmUmGmAmAm | |
| | | | UUGCUACAAUA | AmCmCGUUmGmCUAmC | |
| | | | AGGCCGUCGAA | AAU*AAGmGmCCmGmU | |
| | | | AGAUGUGCCGC | mCmGmAmAmAmGmAmU | |
| | | | AACGCUCUGCC | GUGCmCGmCAAmCGCU | |
| | | | UUCUGGCAUCG | CUmGmCCmUmUmCmUG | |
| | | | UU | GCAUCG*mU*mU | |
| G028866 | 14 | AGACCAGGCCU | AGACCAGGCCU | mA*mG*mA*mCmCAGm | chr6: |
| | | GCAGGGGAUGG | GCAGGGGAUGG | GmCCmUGmCAGGGmGA | 29944268-29944292 |
| | | AA | AAGUUGUAGCU | UGmGAAmGUUGmUmAm | |
| | | | CCCUGAAACCG | GmCUCCCmUmGmAmAm | |
| | | | UUGCUACAAUA | AmCmCGUUmGmCUAmC | |
| | | | AGGCCGUCGAA | AAU*AAGmGmCCmGmU | |
| | | | AGAUGUGCCGC | mCmGmAmAmAmGmAmU | |
| | | | AACGCUCUGCC | GUGCmCGmCAAmCGCU | |
| | | | UUCUGGCAUCG | CUmGmCCmUmUmCmUG | |
| | | | UU | GCAUCG*mU*mU | |
| G028867 | 15 | ACUUCUGGAAG | ACUUCUGGAAG | mA*mC*mU*mUmCUGm | chr6: |
| | | GUUCCAUCCCC | GUUCCAUCCCC | GmAAmGGmUUCCAmUC | 29944274-29944298 |
| | | UG | UGGUUGUAGCU | CCmCUGmGUUGmUmAm | |
| | | | CCCUGAAACCG | GmCUCCCmUmGmAmAm | |
| | | | UUGCUACAAUA | AmCmCGUUmGmCUAmC | |
| | | | AGGCCGUCGAA | AAU*AAGmGmCCmGmU | |
| | | | AGAUGUGCCGC | mCmGmAmAmAmGmAmU | |
| | | | AACGCUCUGCC | GUGCmCGmCAAmCGCU | |
| | | | UUCUGGCAUCG | CUmGmCCmUmUmCmUG | |
| | | | UU | GCAUCG*mU*mU | |
| G028868 | 16 | CGAUGAAGCGG | CGAUGAAGCGG | mC*mG*mA*mUmGAAm | chr6: |
| | | GGCUCCCCGCG | GGCUCCCCGCG | GmCGmGGmGCUCCmCC | 29942795-29942819 |
| | | GC | GCGUUGUAGCU | GCmGGCmGUUGmUmAm | |
| | | | CCCUGAAACCG | GmCUCCCmUmGmAmAm | |
| | | | UUGCUACAAUA | AmCmCGUUmGmCUAmC | |
| | | | AGGCCGUCGAA | AAU*AAGmGmCCmGmU | |
| | | | AGAUGUGCCGC | mCmGmAmAmAmGmAmU | |
| | | | AACGCUCUGCC | GUGCmCGmCAAmCGCU | |
| | | | UUCUGGCAUCG | CUmGmCCmUmUmCmUG | |
| | | | UU | GCAUCG*mU*mU | |
| G028869 | 17 | UCCGUGUCCCG | UCCGUGUCCCG | mU*mC*mC*mGmUGUm | chr6: |
| | | GCCCGGCCGCG | GCCCGGCCGCG | CmCCmGGmCCCGGmCC | 29942785-29942809 |
| | | GG | GGGUUGUAGCU | GCmGGGmGUUGmUmAm | |
| | | | CCCUGAAACCG | GmCUCCCmUmGmAmAm | |
| | | | UUGCUACAAUA | AmCmCGUUmGmCUAmC | |
| | | | AGGCCGUCGAA | AAU*AAGmGmCCmGmU | |
| | | | AGAUGUGCCGC | mCmGmAmAmAmGmAmU | |
| | | | AACGCUCUGCC | GUGCmCGmCAAmCGCU | |
| | | | UUCUGGCAUCG | CUmGmCCmUmUmCmUG | |
| | | | UU | GCAUCG*mU*mU | |
| G028870 | 18 | CCGUGUCCCGG | CCGUGUCCCGG | mC*mC*mG*mUmGUCm | chr6: |
| | | CCCGGCCGCGG | CCCGGCCGCGG | CmCGmGCmCCGGCmCG | 29942786-29942810 |
| | | GG | GGGUUGUAGCU | CGmGGGmGUUGmUmAm | |
| | | | CCCUGAAACCG | GmCUCCCmUmGmAmAm | |
| | | | UUGCUACAAUA | AmCmCGUUmGmCUAmC | |
| | | | AGGCCGUCGAA | AAU*AAGmGmCCmGmU | |
| | | | AGAUGUGCCGC | mCmGmAmAmAmGmAmU | |
| | | | AACGCUCUGCC | GUGCmCGmCAAmCGCU | |
| | | | UUCUGGCAUCG | CUmGmCCmUmUmCmUG | |
| | | | UU | GCAUCG*mU*mU | |
| G028871 | 19 | CAGACGCCGAG | CAGACGCCGAG | mC*mA*mG*mAmCGCm | chr6: |
| | | GAUGGCCGUCA | GAUGGCCGUCA | CmGAmGGmAUGGCmCG | 29942541-29942565 |
| | | UG | UGGUUGUAGCU | UCmAUGmGUUGmUmAm | |
| | | | CCCUGAAACCG | GmCUCCCmUmGmAmAm | |
| | | | UUGCUACAAUA | AmCmCGUUmGmCUAmC | |
| | | | AGGCCGUCGAA | AAU*AAGmGmCCmGmU | |
| | | | AGAUGUGCCGC | mCmGmAmAmAmGmAmU | |
| | | | AACGCUCUGCC | GUGCmCGmCAAmCGCU | |
| | | | UUCUGGCAUCG | CUmGmCCmUmUmCmUG | |
| | | | UU | GCAUCG*mU*mU | |
| G028872 | 20 | CCAGACGCCGA | CCAGACGCCGA | mC*mC*mA*mGmACGm | chr6: |
| | | GGAUGGCCGUC | GGAUGGCCGUC | CmCGmAGmGAUGGmCC | 29942540-29942564 |
| | | AU | AUGUUGUAGCU | GUmCAUmGUUGmUmAm | |
| | | | CCCUGAAACCG | GmCUCCCmUmGmAmAm | |
| | | | UUGCUACAAUA | AmCmCGUUmGmCUAmC | |
| | | | AGGCCGUCGAA | AAU*AAGmGmCCmGmU | |
| | | | AGAUGUGCCGC | mCmGmAmAmAmGmAmU | |
| | | | AACGCUCUGCC | GUGCmCGmCAAmCGCU | |
| | | | UUCUGGCAUCG | CUmGmCCmUmUmCmUG | |
| | | | UU | GCAUCG*mU*mU | |
| G028873 | 21 | AGACGCCGAGG | AGACGCCGAGG | mA*mG*mA*mCmGCCm | chr6: |
| | | AUGGCCGUCAU | AUGGCCGUCAU | GmAGmGAmUGGCCmGU | 29942542-29942566 |
| | | GG | GGGUUGUAGCU | CAmUGGmGUUGmUmAm | |
| | | | CCCUGAAACCG | GmCUCCCmUmGmAmAm | |
| | | | UUGCUACAAUA | AmCmCGUUmGmCUAmC | |
| | | | AGGCCGUCGAA | AAU*AAGmGmCCmGmU | |
| | | | AGAUGUGCCGC | mCmGmAmAmAmGmAmU | |
| | | | AACGCUCUGCC | GUGCmCGmCAAmCGCU | |
| | | | UUCUGGCAUCG | CUmGmCCmUmUmCmUG | |
| | | | UU | GCAUCG*mU*mU | |
| G028874 | 22 | CUGUCGAACCG | CUGUCGAACCG | mC*mU*mG*mUmCGAm | chr6: |
| | | CACGAACUGCG | CACGAACUGCG | AmCCmGCmACGAAmCU | 29942838-29942862 |
| | | UG | UGGUUGUAGCU | GCmGUGmGUUGmUmAm | |
| | | | CCCUGAAACCG | GmCUCCCmUmGmAmAm | |
| | | | UUGCUACAAUA | AmCmCGUUmGmCUAmC | |
| | | | AGGCCGUCGAA | AAU*AAGmGmCCmGmU | |
| | | | AGAUGUGCCGC | mCmGmAmAmAmGmAmU | |
| | | | AACGCUCUGCC | GUGCmCGmCAAmCGCU | |
| | | | UUCUGGCAUCG | CUmGmCCmUmUmCmUG | |
| | | | UU | GCAUCG*mU*mU | |
| G028875 | 23 | UCGUGCGGUUC | UCGUGCGGUUC | mU*mC*mG*mUmGCGm | chr6: |
| | | GACAGCGACGC | GACAGCGACGC | GmUUmCGmACAGCmGA | 29942852-29942876 |
| | | CG | CGGUUGUAGCU | CGmCCGmGUUGmUmAm | |
| | | | CCCUGAAACCG | GmCUCCCmUmGmAmAm | |
| | | | UUGCUACAAUA | AmCmCGUUmGmCUAmC | |
| | | | AGGCCGUCGAA | AAU*AAGmGmCCmGmU | |
| | | | AGAUGUGCCGC | mCmGmAmAmAmGmAmU | |
| | | | AACGCUCUGCC | GUGCmCGmCAAmCGCU | |
| | | | UUCUGGCAUCG | CUmGmCCmUmUmCmUG | |
| | | | UU | GCAUCG*mU*mU | |
| G028876 | 24 | CCAUCCCCAUC | CCAUCCCCAUC | mC*mC*mA*mUmCCCm | chr6: |
| | | GUGGGCAUCAU | GUGGGCAUCAU | CmAUmCGmUGGGCmAU | 29944517-29944541 |
| | | UG | UGGUUGUAGCU | CAmUUGmGUUGmUmAm | |
| | | | CCCUGAAACCG | GmCUCCCmUmGmAmAm | |
| | | | UUGCUACAAUA | AmCmCGUUmGmCUAmC | |
| | | | AGGCCGUCGAA | AAU*AAGmGmCCmGmU | |
| | | | AGAUGUGCCGC | mCmGmAmAmAmGmAmU | |
| | | | AACGCUCUGCC | GUGCmCGmCAAmCGCU | |
| | | | UUCUGGCAUCG | CUmGmCCmUmUmCmUG | |
| | | | UU | GCAUCG*mU*mU | |
| G028877 | 25 | UCCUCUGGCUC | UCCUCUGGCUC | mU*mC*mC*mUmCUGm | chr6: |
| | | GCGGCGUCGCU | GCGGCGUCGCU | GmCUmCGmCGGCGmUC | 29942858-29942882 |
| | | GU | GUGUUGUAGCU | GCmUGUmGUUGmUmAm | |
| | | | CCCUGAAACCG | GmCUCCCmUmGmAmAm | |
| | | | UUGCUACAAUA | AmCmCGUUmGmCUAmC | |
| | | | AGGCCGUCGAA | AAU*AAGmGmCCmGmU | |
| | | | AGAUGUGCCGC | mCmGmAmAmAmGmAmU | |
| | | | AACGCUCUGCC | GUGCmCGmCAAmCGCU | |
| | | | UUCUGGCAUCG | CUmGmCCmUmUmCmUG | |
| | | | UU | GCAUCG*mU*mU | |
| G028878 | 26 | CUCUGGUUGUA | CUCUGGUUGUA | mC*mU*mC*mUmGGUm | chr6: |
| | | GUAGCCGCGCA | GUAGCCGCGCA | UmGUmAGmUAGCCmGC | 29942988-29943012 |
| | | GG | GGGUUGUAGCU | GCmAGGmGUUGmUmAm | |
| | | | CCCUGAAACCG | GmCUCCCmUmGmAmAm | |
| | | | UUGCUACAAUA | AmCmCGUUmGmCUAmC | |
| | | | AGGCCGUCGAA | AAU*AAGmGmCCmGmU | |
| | | | AGAUGUGCCGC | mCmGmAmAmAmGmAmU | |
| | | | AACGCUCUGCC | GUGCmCGmCAAmCGCU | |
| | | | UUCUGGCAUCG | CUmGmCCmUmUmCmUG | |
| | | | UU | GCAUCG*mU*mU | |
| G028879 | 27 | ACCUGGGGACC | ACCUGGGGACC | mA*mC*mC*mUmGGGm | chr6: |
| | | CUGCGCGGCUA | CUGCGCGGCUA | GmACmCCmUGCGCmGG | 29942984-29943008 |
| | | CU | CUGUUGUAGCU | CUmACUmGUUGmUmAm | |
| | | | CCCUGAAACCG | GmCUCCCmUmGmAmAm | |
| | | | UUGCUACAAUA | AmCmCGUUmGmCUAmC | |
| | | | AGGCCGUCGAA | AAU*AAGmGmCCmGmU | |
| | | | AGAUGUGCCGC | mCmGmAmAmAmGmAmU | |
| | | | AACGCUCUGCC | GUGCmCGmCAAmCGCU | |
| | | | UUCUGGCAUCG | CUmGmCCmUmUmCmUG | |
| | | | UU | GCAUCG*mU*mU | |
| G028880 | 28 | CGCUCUGGUUG | CGCUCUGGUUG | mC*mG*mC*mUmCUGm | chr6: |
| | | UAGUAGCCGCG | UAGUAGCCGCG | GmUUmGUmAGUAGmCC | 29942990-29943014 |
| | | CA | CAGUUGUAGCU | GCmGCAmGUUGmUmAm | |
| | | | CCCUGAAACCG | GmCUCCCmUmGmAmAm | |
| | | | UUGCUACAAUA | AmCmCGUUmGmCUAmC | |
| | | | AGGCCGUCGAA | AAU*AAGmGmCCmGmU | |
| | | | AGAUGUGCCGC | mCmGmAmAmAmGmAmU | |
| | | | AACGCUCUGCC | GUGCmCGmCAAmCGCU | |
| | | | UUCUGGCAUCG | CUmGmCCmUmUmCmUG | |
| | | | UU | GCAUCG*mU*mU | |
| G028881 | 29 | GCUCUGGUUGU | GCUCUGGUUGU | mG*mC*mU*mCmUGGm | chr6: |
| | | AGUAGCCGCGC | AGUAGCCGCGC | UmUGmUAmGUAGCmCG | 29942989-29943013 |
| | | AG | AGGUUGUAGCU | CGmCAGmGUUGmUmAm | |
| | | | CCCUGAAACCG | GmCUCCCmUmGmAmAm | |
| | | | UUGCUACAAUA | AmCmCGUUmGmCUAmC | |
| | | | AGGCCGUCGAA | AAU*AAGmGmCCmGmU | |
| | | | AGAUGUGCCGC | mCmGmAmAmAmGmAmU | |
| | | | AACGCUCUGCC | GUGCmCGmCAAmCGCU | |
| | | | UUCUGGCAUCG | CUmGmCCmUmUmCmUG | |
| | | | UU | GCAUCG*mU*mU | |
| G028882 | 30 | UAUUUUUUUCU | UAUUUUUUUCU | mU*mA*mU*mUmUUUm | chr6: |
| | | AUAGUGUGAGA | AUAGUGUGAGA | UmUCmUAmUAGUGmUG | 29945435-29945459 |
| | | CA | CAGUUGUAGCU | AGmACAmGUUGmUmAm | |
| | | | CCCUGAAACCG | GmCUCCCmUmGmAmAm | |
| | | | UUGCUACAAUA | AmCmCGUUmGmCUAmC | |
| | | | AGGCCGUCGAA | AAU*AAGmGmCCmGmU | |
| | | | AGAUGUGCCGC | mCmGmAmAmAmGmAmU | |
| | | | AACGCUCUGCC | GUGCmCGmCAAmCGCU | |
| | | | UUCUGGCAUCG | CUmGmCCmUmUmCmUG | |
| | | | UU | GCAUCG*mU*mU | |
| G028883 | 31 | ACGCCUACGAC | ACGCCUACGAC | mA*mC*mG*mCmCUAm | chr6: |
| | | GGCAAGGAUUA | GGCAAGGAUUA | CmGAmCGmGCAAGmGA | 29943342-29943366 |
| | | CA | CAGUUGUAGCU | UUmACAmGUUGmUmAm | |
| | | | CCCUGAAACCG | GmCUCCCmUmGmAmAm | |
| | | | UUGCUACAAUA | AmCmCGUUmGmCUAmC | |
| | | | AGGCCGUCGAA | AAU*AAGmGmCCmGmU | |
| | | | AGAUGUGCCGC | mCmGmAmAmAmGmAmU | |
| | | | AACGCUCUGCC | GUGCmCGmCAAmCGCU | |
| | | | UUCUGGCAUCG | CUmGmCCmUmUmCmUG | |
| | | | UU | GCAUCG*mU*mU | |
| G028884 | 32 | UUUGUUCUACC | UUUGUUCUACC | mU*mU*mU*mGmUUCm | chr6: |
| | | CCAGGCAGUGA | CCAGGCAGUGA | UmACmCCmCAGGCmAG | 29945218-29945242 |
| | | CA | CAGUUGUAGCU | UGmACAmGUUGmUmAm | |
| | | | CCCUGAAACCG | GmCUCCCmUmGmAmAm | |
| | | | UUGCUACAAUA | AmCmCGUUmGmCUAmC | |
| | | | AGGCCGUCGAA | AAU*AAGmGmCCmGmU | |
| | | | AGAUGUGCCGC | mCmGmAmAmAmGmAmU | |
| | | | AACGCUCUGCC | GUGCmCGmCAAmCGCU | |
| | | | UUCUGGCAUCG | CUmGmCCmUmUmCmUG | |
| | | | UU | GCAUCG*mU*mU | |
| G028885 | 33 | UUUUGUUCUAC | UUUUGUUCUAC | mU*mU*mU*mUmGUUm | chr6: |
| | | CCCAGGCAGUG | CCCAGGCAGUG | CmUAmCCmCCAGGmCA | 29945217-29945241 |
| | | AC | ACGUUGUAGCU | GUmGACmGUUGmUmAm | |
| | | | CCCUGAAACCG | GmCUCCCmUmGmAmAm | |
| | | | UUGCUACAAUA | AmCmCGUUmGmCUAmC | |
| | | | AGGCCGUCGAA | AAU*AAGmGmCCmGmU | |
| | | | AGAUGUGCCGC | mCmGmAmAmAmGmAmU | |
| | | | AACGCUCUGCC | GUGCmCGmCAAmCGCU | |
| | | | UUCUGGCAUCG | CUmGmCCmUmUmCmUG | |
| | | | UU | GCAUCG*mU*mU | |
| G028886 | 34 | AGCGACCACAG | AGCGACCACAG | mA*mG*mC*mGmACCm | chr6: |
| | | CUCCAGUGAUC | CUCCAGUGAUC | AmCAmGCmUCCAGmUG | 29944558-29944582 |
| | | AC | ACGUUGUAGCU | AUmCACmGUUGmUmAm | |
| | | | CCCUGAAACCG | GmCUCCCmUmGmAmAm | |
| | | | UUGCUACAAUA | AmCmCGUUmGmCUAmC | |
| | | | AGGCCGUCGAA | AAU*AAGmGmCCmGmU | |
| | | | AGAUGUGCCGC | mCmGmAmAmAmGmAmU | |
| | | | AACGCUCUGCC | GUGCmCGmCAAmCGCU | |
| | | | UUCUGGCAUCG | CUmGmCCmUmUmCmUG | |
| | | | UU | GCAUCG*mU*mU | |
| G028887 | 35 | GAGCUCCGUGU | GAGCUCCGUGU | mG*mA*mG*mCmUCCm | chr6: |
| | | CCUGGGUCUGG | CCUGGGUCUGG | GmUGmUCmCUGGGmUC | 29944234-29944258 |
| | | UC | UCGUUGUAGCU | UGmGUCmGUUGmUmAm | |
| | | | CCCUGAAACCG | GmCUCCCmUmGmAmAm | |
| | | | UUGCUACAAUA | AmCmCGUUmGmCUAmC | |
| | | | AGGCCGUCGAA | AAU*AAGmGmCCmGmU | |
| | | | AGAUGUGCCGC | mCmGmAmAmAmGmAmU | |
| | | | AACGCUCUGCC | GUGCmCGmCAAmCGCU | |
| | | | UUCUGGCAUCG | CUmGmCCmUmUmCmUG | |
| | | | UU | GCAUCG*mU*mU | |
| G028888 | 36 | UCCACGAGCUC | UCCACGAGCUC | mU*mC*mC*mAmCGAm | chr6: |
| | | CGUGUCCUGGG | CGUGUCCUGGG | GmCUmCCmGUGUCmCU | 29944239-29944263 |
| | | UC | UCGUUGUAGCU | GGmGUCmGUUGmUmAm | |
| | | | CCCUGAAACCG | GmCUCCCmUmGmAmAm | |
| | | | UUGCUACAAUA | AmCmCGUUmGmCUAmC | |
| | | | AGGCCGUCGAA | AAU*AAGmGmCCmGmU | |
| | | | AGAUGUGCCGC | mCmGmAmAmAmGmAmU | |
| | | | AACGCUCUGCC | GUGCmCGmCAAmCGCU | |
| | | | UUCUGGCAUCG | CUmGmCCmUmUmCmUG | |
| | | | UU | GCAUCG*mU*mU | |
| G028889 | 37 | ACGAGCUCCGU | ACGAGCUCCGU | mA*mC*mG*mAmGCUm | chr6: |
| | | GUCCUGGGUCU | GUCCUGGGUCU | CmCGmUGmUCCUGmGG | 29944236-29944260 |
| | | GG | GGGUUGUAGCU | UCmUGGmGUUGmUmAm | |
| | | | CCCUGAAACCG | GmCUCCCmUmGmAmAm | |
| | | | UUGCUACAAUA | AmCmCGUUmGmCUAmC | |
| | | | AGGCCGUCGAA | AAU*AAGmGmCCmGmU | |
| | | | AGAUGUGCCGC | mCmGmAmAmAmGmAmU | |
| | | | AACGCUCUGCC | GUGCmCGmCAAmCGCU | |
| | | | UUCUGGCAUCG | CUmGmCCmUmUmCmUG | |
| | | | UU | GCAUCG*mU*mU | |
| G028890 | 38 | CGAGCUCCGUG | CGAGCUCCGUG | mC*mG*mA*mGmCUCm | chr6: |
| | | UCCUGGGUCUG | UCCUGGGUCUG | CmGUmGUmCCUGGmGU | 29944235-29944259 |
| | | GU | GUGUUGUAGCU | CUmGGUmGUUGmUmAm | |
| | | | CCCUGAAACCG | GmCUCCCmUmGmAmAm | |
| | | | UUGCUACAAUA | AmCmCGUUmGmCUAmC | |
| | | | AGGCCGUCGAA | AAU*AAGmGmCCmGmU | |
| | | | AGAUGUGCCGC | mCmGmAmAmAmGmAmU | |
| | | | AACGCUCUGCC | GUGCmCGmCAAmCGCU | |
| | | | UUCUGGCAUCG | CUmGmCCmUmUmCmUG | |
| | | | UU | GCAUCG*mU*mU | |
| G028891 | 39 | GCAGGCCUGGU | GCAGGCCUGGU | mG*mC*mA*mGmGCCm | chr6: |
| | | CUCCACGAGCU | CUCCACGAGCU | UmGGmUCmUCCACmGA | 29944251-29944275 |
| | | CC | CCGUUGUAGCU | GCmUCCmGUUGmUmAm | |
| | | | CCCUGAAACCG | GmCUCCCmUmGmAmAm | |
| | | | UUGCUACAAUA | AmCmCGUUmGmCUAmC | |
| | | | AGGCCGUCGAA | AAU*AAGmGmCCmGmU | |
| | | | AGAUGUGCCGC | mCmGmAmAmAmGmAmU | |
| | | | AACGCUCUGCC | GUGCmCGmCAAmCGCU | |
| | | | UUCUGGCAUCG | CUmGmCCmUmUmCmUG | |
| | | | UU | GCAUCG*mU*mU | |
| G028892 | 40 | UCCCCUGCAGG | UCCCCUGCAGG | mU*mC*mC*mCmCUGm | chr6: |
| | | CCUGGUCUCCA | CCUGGUCUCCA | CmAGmGCmCUGGUmCU | 29944257-29944281 |
| | | CG | CGGUUGUAGCU | CCmACGmGUUGmUmAm | |
| | | | CCCUGAAACCG | GmCUCCCmUmGmAmAm | |
| | | | UUGCUACAAUA | AmCmCGUUmGmCUAmC | |
| | | | AGGCCGUCGAA | AAU*AAGmGmCCmGmU | |
| | | | AGAUGUGCCGC | mCmGmAmAmAmGmAmU | |
| | | | AACGCUCUGCC | GUGCmCGmCAAmCGCU | |
| | | | UUCUGGCAUCG | CUmGmCCmUmUmCmUG | |
| | | | UU | GCAUCG*mU*mU | |
| G028893 | 41 | AUCCGUGUCCC | AUCCGUGUCCC | mA*mU*mC*mCmGUGm | chr6: |
| | | GGCCCGGCCGC | GGCCCGGCCGC | UmCCmCGmGCCCGmGC | 29942784-29942808 |
| | | GG | GGGUUGUAGCU | CGmCGGmGUUGmUmAm | |
| | | | CCCUGAAACCG | GmCUCCCmUmGmAmAm | |
| | | | UUGCUACAAUA | AmCmCGUUmGmCUAmC | |
| | | | AGGCCGUCGAA | AAU*AAGmGmCCmGmU | |
| | | | AGAUGUGCCGC | mCmGmAmAmAmGmAmU | |
| | | | AACGCUCUGCC | GUGCmCGmCAAmCGCU | |
| | | | UUCUGGCAUCG | CUmGmCCmUmUmCmUG | |
| | | | UU | GCAUCG*mU*mU | |
| G028894 | 42 | CCUUCCCGUUC | CCUUCCCGUUC | mC*mC*mU*mUmCCCm | chr6: |
| | | UCCAGGUAUCU | UCCAGGUAUCU | GmUUmCUmCCAGGmUA | 29943495-29943519 |
| | | GC | GCGUUGUAGCU | UCmUGCmGUUGmUmAm | |
| | | | CCCUGAAACCG | GmCUCCCmUmGmAmAm | |
| | | | UUGCUACAAUA | AmCmCGUUmGmCUAmC | |
| | | | AGGCCGUCGAA | AAU*AAGmGmCCmGmU | |
| | | | AGAUGUGCCGC | mCmGmAmAmAmGmAmU | |
| | | | AACGCUCUGCC | GUGCmCGmCAAmCGCU | |
| | | | UUCUGGCAUCG | CUmGmCCmUmUmCmUG | |
| | | | UU | GCAUCG*mU*mU | |
| G028895 | 43 | CCGUUCUCCAG | CCGUUCUCCAG | mC*mC*mG*mUmUCUm | chr6: |
| | | GUAUCUGCGGA | GUAUCUGCGGA | CmCAmGGmUAUCUmGC | 29943490-29943514 |
| | | GC | GCGUUGUAGCU | GGmAGCmGUUGmUmAm | |
| | | | CCCUGAAACCG | GmCUCCCmUmGmAmAm | |
| | | | UUGCUACAAUA | AmCmCGUUmGmCUAmC | |
| | | | AGGCCGUCGAA | AAU*AAGmGmCCmGmU | |
| | | | AGAUGUGCCGC | mCmGmAmAmAmGmAmU | |
| | | | AACGCUCUGCC | GUGCmCGmCAAmCGCU | |
| | | | UUCUGGCAUCG | CUmGmCCmUmUmCmUG | |
| | | | UU | GCAUCG*mU*mU | |
| G028896 | 44 | ACCUGCCAUGU | ACCUGCCAUGU | mA*mC*mC*mUmGCCm | chr6: |
| | | GCAGCAUGAGG | GCAGCAUGAGG | AmUGmUGmCAGCAmUG | 29944345-29944369 |
| | | GU | GUGUUGUAGCU | AGmGGUmGUUGmUmAm | |
| | | | CCCUGAAACCG | GmCUCCCmUmGmAmAm | |
| | | | UUGCUACAAUA | AmCmCGUUmGmCUAmC | |
| | | | AGGCCGUCGAA | AAU*AAGmGmCCmGmU | |
| | | | AGAUGUGCCGC | mCmGmAmAmAmGmAmU | |
| | | | AACGCUCUGCC | GUGCmCGmCAAmCGCU | |
| | | | UUCUGGCAUCG | CUmGmCCmUmUmCmUG | |
| | | | UU | GCAUCG*mU*mU | |
| G028897 | 45 | CACCUGCCAUG | CACCUGCCAUG | mC*mA*mC*mCmUGCm | chr6: |
| | | UGCAGCAUGAG | UGCAGCAUGAG | CmAUmGUmGCAGCmAU | 29944344-29944368 |
| | | GG | GGGUUGUAGCU | GAmGGGmGUUGmUmAm | |
| | | | CCCUGAAACCG | GmCUCCCmUmGmAmAm | |
| | | | UUGCUACAAUA | AmCmCGUUmGmCUAmC | |
| | | | AGGCCGUCGAA | AAU*AAGmGmCCmGmU | |
| | | | AGAUGUGCCGC | mCmGmAmAmAmGmAmU | |
| | | | AACGCUCUGCC | GUGCmCGmCAAmCGCU | |
| | | | UUCUGGCAUCG | CUmGmCCmUmUmCmUG | |
| | | | UU | GCAUCG*mU*mU | |
| G028898 | 46 | ACCUGGCAGCG | ACCUGGCAGCG | mA*mC*mC*mUmGGCm | chr6: |
| | | GGAUGGGGAGG | GGAUGGGGAGG | AmGCmGGmGAUGGmGG | 29944219-29944243 |
| | | AC | ACGUUGUAGCU | AGmGACmGUUGmUmAm | |
| | | | CCCUGAAACCG | GmCUCCCmUmGmAmAm | |
| | | | UUGCUACAAUA | AmCmCGUUmGmCUAmC | |
| | | | AGGCCGUCGAA | AAU*AAGmGmCCmGmU | |
| | | | AGAUGUGCCGC | mCmGmAmAmAmGmAmU | |
| | | | AACGCUCUGCC | GUGCmCGmCAAmCGCU | |
| | | | UUCUGGCAUCG | CUmGmCCmUmUmCmUG | |
| | | | UU | GCAUCG*mU*mU | |
| G028899 | 47 | CACUGACCUGG | CACUGACCUGG | mC*mA*mC*mUmGACm | chr6: |
| | | CAGCGGGAUGG | CAGCGGGAUGG | CmUGmGCmAGCGGmGA | 29944214-29944238 |
| | | GG | GGGUUGUAGCU | UGmGGGmGUUGmUmAm | |
| | | | CCCUGAAACCG | GmCUCCCmUmGmAmAm | |
| | | | UUGCUACAAUA | AmCmCGUUmGmCUAmC | |
| | | | AGGCCGUCGAA | AAU*AAGmGmCCmGmU | |
| | | | AGAUGUGCCGC | mCmGmAmAmAmGmAmU | |
| | | | AACGCUCUGCC | GUGCmCGmCAAmCGCU | |
| | | | UUCUGGCAUCG | CUmGmCCmUmUmCmUG | |
| | | | UU | GCAUCG*mU*mU | |
| G028900 | 48 | CCUGGCAGCGG | CCUGGCAGCGG | mC*mC*mU*mGmGCAm | chr6: |
| | | GAUGGGGAGGA | GAUGGGGAGGA | GmCGmGGmAUGGGmGA | 29944220-29944244 |
| | | CC | CCGUUGUAGCU | GGmACCmGUUGmUmAm | |
| | | | CCCUGAAACCG | GmCUCCCmUmGmAmAm | |
| | | | UUGCUACAAUA | AmCmCGUUmGmCUAmC | |
| | | | AGGCCGUCGAA | AAU*AAGmGmCCmGmU | |
| | | | AGAUGUGCCGC | mCmGmAmAmAmGmAmU | |
| | | | AACGCUCUGCC | GUGCmCGmCAAmCGCU | |
| | | | UUCUGGCAUCG | CUmGmCCmUmUmCmUG | |
| | | | UU | GCAUCG*mU*mU | |
| G028901 | 49 | CCAUCUCAGGG | CCAUCUCAGGG | mC*mC*mA*mUmCUCm | chr6: |
| | | UGAGGGGCUUG | UGAGGGGCUUG | AmGGmGUmGAGGGmGC | 29944366-29944390 |
| | | GG | GGGUUGUAGCU | UUmGGGmGUUGmUmAm | |
| | | | CCCUGAAACCG | GmCUCCCmUmGmAmAm | |
| | | | UUGCUACAAUA | AmCmCGUUmGmCUAmC | |
| | | | AGGCCGUCGAA | AAU*AAGmGmCCmGmU | |
| | | | AGAUGUGCCGC | mCmGmAmAmAmGmAmU | |
| | | | AACGCUCUGCC | GUGCmCGmCAAmCGCU | |
| | | | UUCUGGCAUCG | CUmGmCCmUmUmCmUG | |
| | | | UU | GCAUCG*mU*mU | |
| G028902 | 50 | UGGCCGUCAUG | UGGCCGUCAUG | mU*mG*mG*mCmCGUm | chr6: |
| | | GCGCCCCGAAC | GCGCCCCGAAC | CmAUmGGmCGCCCmCG | 29942554-29942578 |
| | | CC | CCGUUGUAGCU | AAmCCCmGUUGmUmAm | |
| | | | CCCUGAAACCG | GmCUCCCmUmGmAmAm | |
| | | | UUGCUACAAUA | AmCmCGUUmGmCUAmC | |
| | | | AGGCCGUCGAA | AAU*AAGmGmCCmGmU | |
| | | | AGAUGUGCCGC | mCmGmAmAmAmGmAmU | |
| | | | AACGCUCUGCC | GUGCmCGmCAAmCGCU | |
| | | | UUCUGGCAUCG | CUmGmCCmUmUmCmUG | |
| | | | UU | GCAUCG*mU*mU | |
| G028903 | 51 | AUGUCCGCCGC | AUGUCCGCCGC | mA*mU*mG*mUmCCGm | chr6: |
| | | GGUCCAAGAGC | GGUCCAAGAGC | CmCGmCGmGUCCAmAG | 29943379-29943403 |
| | | GC | GCGUUGUAGCU | AGmCGCmGUUGmUmAm | |
| | | | CCCUGAAACCG | GmCUCCCmUmGmAmAm | |
| | | | UUGCUACAAUA | AmCmCGUUmGmCUAmC | |
| | | | AGGCCGUCGAA | AAU*AAGmGmCCmGmU | |
| | | | AGAUGUGCCGC | mCmGmAmAmAmGmAmU | |
| | | | AACGCUCUGCC | GUGCmCGmCAAmCGCU | |
| | | | UUCUGGCAUCG | CUmGmCCmUmUmCmUG | |
| | | | UU | GCAUCG*mU*mU | |
| G028904 | 52 | GGUACCCGUGC | GGUACCCGUGC | mG*mG*mU*mAmCCCm | chr6: |
| | | GCUGCAGCGUC | GCUGCAGCGUC | GmUGmCGmCUGCAmGC | 29943518-29943542 |
| | | UC | UCGUUGUAGCU | GUmCUCmGUUGmUmAm | |
| | | | CCCUGAAACCG | GmCUCCCmUmGmAmAm | |
| | | | UUGCUACAAUA | AmCmCGUUmGmCUAmC | |
| | | | AGGCCGUCGAA | AAU*AAGmGmCCmGmU | |
| | | | AGAUGUGCCGC | mCmGmAmAmAmGmAmU | |
| | | | AACGCUCUGCC | GUGCmCGmCAAmCGCU | |
| | | | UUCUGGCAUCG | CUmGmCCmUmUmCmUG | |
| | | | UU | GCAUCG*mU*mU | |
| G028905 | 53 | GGGAAGGAGAC | GGGAAGGAGAC | mG*mG*mG*mAmAGGm | chr6: |
| | | GCUGCAGCGCA | GCUGCAGCGCA | AmGAmCGmCUGCAmGC | 29943518-29943542 |
| | | CG | CGGUUGUAGCU | GCmACGmGUUGmUmAm | |
| | | | CCCUGAAACCG | GmCUCCCmUmGmAmAm | |
| | | | UUGCUACAAUA | AmCmCGUUmGmCUAmC | |
| | | | AGGCCGUCGAA | AAU*AAGmGmCCmGmU | |
| | | | AGAUGUGCCGC | mCmGmAmAmAmGmAmU | |
| | | | AACGCUCUGCC | GUGCmCGmCAAmCGCU | |
| | | | UUCUGGCAUCG | CUmGmCCmUmUmCmUG | |
| | | | UU | GCAUCG*mU*mU | |
| G028906 | 54 | GCGGGCGCCGU | GCGGGCGCCGU | mG*mC*mG*mGmGCGm | chr6: |
| | | GGAUAGAGCAG | GGAUAGAGCAG | CmCGmUGmGAUAGmAG | 29942895-29942919 |
| | | GA | GAGUUGUAGCU | CAmGGAmGUUGmUmAm | |
| | | | CCCUGAAACCG | GmCUCCCmUmGmAmAm | |
| | | | UUGCUACAAUA | AmCmCGUUmGmCUAmC | |
| | | | AGGCCGUCGAA | AAU*AAGmGmCCmGmU | |
| | | | AGAUGUGCCGC | mCmGmAmAmAmGmAmU | |
| | | | AACGCUCUGCC | GUGCmCGmCAAmCGCU | |
| | | | UUCUGGCAUCG | CUmGmCCmUmUmCmUG | |
| | | | UU | GCAUCG*mU*mU | |
| G028907 | 55 | UCCUGCUCUAU | UCCUGCUCUAU | mU*mC*mC*mUmGCUm | chr6: |
| | | CCACGGCGCCC | CCACGGCGCCC | CmUAmUCmCACGGmCG | 29942889-29942913 |
| | | GC | GCGUUGUAGCU | CCmCGCmGUUGmUmAm | |
| | | | CCCUGAAACCG | GmCUCCCmUmGmAmAm | |
| | | | UUGCUACAAUA | AmCmCGUUmGmCUAmC | |
| | | | AGGCCGUCGAA | AAU*AAGmGmCCmGmU | |
| | | | AGAUGUGCCGC | mCmGmAmAmAmGmAmU | |
| | | | AACGCUCUGCC | GUGCmCGmCAAmCGCU | |
| | | | UUCUGGCAUCG | CUmGmCCmUmUmCmUG | |
| | | | UU | GCAUCG*mU*mU | |
| G028908 | 56 | CCCCUGGUACC | CCCCUGGUACC | mC*mC*mC*mCmUGGm | chr6: |
| | | CGUGCGCUGCA | CGUGCGCUGCA | UmACmCCmGUGCGmCU | 29943523-29943547 |
| | | GC | GCGUUGUAGCU | GCmAGCmGUUGmUmAm | |
| | | | CCCUGAAACCG | GmCUCCCmUmGmAmAm | |
| | | | UUGCUACAAUA | AmCmCGUUmGmCUAmC | |
| | | | AGGCCGUCGAA | AAU*AAGmGmCCmGmU | |
| | | | AGAUGUGCCGC | mCmGmAmAmAmGmAmU | |
| | | | AACGCUCUGCC | GUGCmCGmCAAmCGCU | |
| | | | UUCUGGCAUCG | CUmGmCCmUmUmCmUG | |
| | | | UU | GCAUCG*mU*mU | |
| G028909 | 57 | UGGUACCCGUG | UGGUACCCGUG | mU*mG*mG*mUmACCm | chr6: |
| | | CGCUGCAGCGU | CGCUGCAGCGU | CmGUmGCmGCUGCmAG | 29943519-29943543 |
| | | CU | CUGUUGUAGCU | CGmUCUmGUUGmUmAm | |
| | | | CCCUGAAACCG | GmCUCCCmUmGmAmAm | |
| | | | UUGCUACAAUA | AmCmCGUUmGmCUAmC | |
| | | | AGGCCGUCGAA | AAU*AAGmGmCCmGmU | |
| | | | AGAUGUGCCGC | mCmGmAmAmAmGmAmU | |
| | | | AACGCUCUGCC | GUGCmCGmCAAmCGCU | |
| | | | UUCUGGCAUCG | CUmGmCCmUmUmCmUG | |
| | | | UU | GCAUCG*mU*mU | |
| G028910 | 58 | CAUCUCAGGGU | CAUCUCAGGGU | mC*mA*mU*mCmUCAm | chr6: |
| | | GAGGGGCUUGG | GAGGGGCUUGG | GmGGmUGmAGGGGmCU | 29944365-29944389 |
| | | GC | GCGUUGUAGCU | UGmGGCmGUUGmUmAm | |
| | | | CCCUGAAACCG | GmCUCCCmUmGmAmAm | |
| | | | UUGCUACAAUA | AmCmCGUUmGmCUAmC | |
| | | | AGGCCGUCGAA | AAU*AAGmGmCCmGmU | |
| | | | AGAUGUGCCGC | mCmGmAmAmAmGmAmU | |
| | | | AACGCUCUGCC | GUGCmCGmCAAmCGCU | |
| | | | UUCUGGCAUCG | CUmGmCCmUmUmCmUG | |
| | | | UU | GCAUCG*mU*mU | |
| G028911 | 59 | ACGCAGUUCGU | ACGCAGUUCGU | mA*mC*mG*mCmAGUm | chr6: |
| | | GCGGUUCGACA | GCGGUUCGACA | UmCGmUGmCGGUUmCG | 29942845-29942869 |
| | | GC | GCGUUGUAGCU | ACmAGCmGUUGmUmAm | |
| | | | CCCUGAAACCG | GmCUCCCmUmGmAmAm | |
| | | | UUGCUACAAUA | AmCmCGUUmGmCUAmC | |
| | | | AGGCCGUCGAA | AAU*AAGmGmCCmGmU | |
| | | | AGAUGUGCCGC | mCmGmAmAmAmGmAmU | |
| | | | AACGCUCUGCC | GUGCmCGmCAAmCGCU | |
| | | | UUCUGGCAUCG | CUmGmCCmUmUmCmUG | |
| | | | UU | GCAUCG*mU*mU | |
| G028912 | 60 | CGCCCAGGUCU | CGCCCAGGUCU | mC*mG*mC*mCmCAGm | chr6: |
| | | GGGUCAGGGCC | GGGUCAGGGCC | GmUCmUGmGGUCAmGG | 29942595-29942619 |
| | | AG | AGGUUGUAGCU | GCmCAGmGUUGmUmAm | |
| | | | CCCUGAAACCG | GmCUCCCmUmGmAmAm | |
| | | | UUGCUACAAUA | AmCmCGUUmGmCUAmC | |
| | | | AGGCCGUCGAA | AAU*AAGmGmCCmGmU | |
| | | | AGAUGUGCCGC | mCmGmAmAmAmGmAmU | |
| | | | AACGCUCUGCC | GUGCmCGmCAAmCGCU | |
| | | | UUCUGGCAUCG | CUmGmCCmUmUmCmUG | |
| | | | UU | GCAUCG*mU*mU | |
| G028913 | 61 | CACUCACCCGC | CACUCACCCGC | mC*mA*mC*mUmCACm | chr6: |
| | | CCAGGUCUGGG | CCAGGUCUGGG | CmCGmCCmCAGGUmCU | 29942609-29942633 |
| | | UC | UCGUUGUAGCU | GGmGUCmGUUGmUmAm | |
| | | | CCCUGAAACCG | GmCUCCCmUmGmAmAm | |
| | | | UUGCUACAAUA | AmCmCGUUmGmCUAmC | |
| | | | AGGCCGUCGAA | AAU*AAGmGmCCmGmU | |
| | | | AGAUGUGCCGC | mCmGmAmAmAmGmAmU | |
| | | | AACGCUCUGCC | GUGCmCGmCAAmCGCU | |
| | | | UUCUGGCAUCG | CUmGmCCmUmUmCmUG | |
| | | | UU | GCAUCG*mU*mU | |
| G028914 | 62 | CCGCCCAGGUC | CCGCCCAGGUC | mC*mC*mG*mCmCCAm | chr6: |
| | | UGGGUCAGGGC | UGGGUCAGGGC | GmGUmCUmGGGUCmAG | 29942596-29942620 |
| | | CA | CAGUUGUAGCU | GGmCCAmGUUGmUmAm | |
| | | | CCCUGAAACCG | GmCUCCCmUmGmAmAm | |
| | | | UUGCUACAAUA | AmCmCGUUmGmCUAmC | |
| | | | AGGCCGUCGAA | AAU*AAGmGmCCmGmU | |
| | | | AGAUGUGCCGC | mCmGmAmAmAmGmAmU | |
| | | | AACGCUCUGCC | GUGCmCGmCAAmCGCU | |
| | | | UUCUGGCAUCG | CUmGmCCmUmUmCmUG | |
| | | | UU | GCAUCG*mU*mU | |
| G028915 | 63 | CCCGCCCAGGU | CCCGCCCAGGU | mC*mC*mC*mGmCCCm | chr6: |
| | | CUGGGUCAGGG | CUGGGUCAGGG | AmGGmUCmUGGGUmCA | 29942597-29942621 |
| | | CC | CCGUUGUAGCU | GGmGCCmGUUGmUmAm | |
| | | | CCCUGAAACCG | GmCUCCCmUmGmAmAm | |
| | | | UUGCUACAAUA | AmCmCGUUmGmCUAmC | |
| | | | AGGCCGUCGAA | AAU*AAGmGmCCmGmU | |
| | | | AGAUGUGCCGC | mCmGmAmAmAmGmAmU | |
| | | | AACGCUCUGCC | GUGCmCGmCAAmCGCU | |
| | | | UUCUGGCAUCG | CUmGmCCmUmUmCmUG | |
| | | | UU | GCAUCG*mU*mU | |
| G028916 | 64 | CAGCGACGCCG | CAGCGACGCCG | mC*mA*mG*mCmGACm | chr6: |
| | | CGAGCCAGAGG | CGAGCCAGAGG | GmCCmGCmGAGCCmAG | 29942865-29942889 |
| | | AU | AUGUUGUAGCU | AGmGAUmGUUGmUmAm | |
| | | | CCCUGAAACCG | GmCUCCCmUmGmAmAm | |
| | | | UUGCUACAAUA | AmCmCGUUmGmCUAmC | |
| | | | AGGCCGUCGAA | AAU*AAGmGmCCmGmU | |
| | | | AGAUGUGCCGC | mCmGmAmAmAmGmAmU | |
| | | | AACGCUCUGCC | GUGCmCGmCAAmCGCU | |
| | | | UUCUGGCAUCG | CUmGmCCmUmUmCmUG | |
| | | | UU | GCAUCG*mU*mU | |
| G028917 | 65 | CGCGAGCCAGA | CGCGAGCCAGA | mC*mG*mC*mGmAGCm | chr6: |
| | | GGAUGGAGCCG | GGAUGGAGCCG | CmAGmAGmGAUGGmAG | 29942874-29942898 |
| | | CG | CGGUUGUAGCU | CCmGCGmGUUGmUmAm | |
| | | | CCCUGAAACCG | GmCUCCCmUmGmAmAm | |
| | | | UUGCUACAAUA | AmCmCGUUmGmCUAmC | |
| | | | AGGCCGUCGAA | AAU*AAGmGmCCmGmU | |
| | | | AGAUGUGCCGC | mCmGmAmAmAmGmAmU | |
| | | | AACGCUCUGCC | GUGCmCGmCAAmCGCU | |
| | | | UUCUGGCAUCG | CUmGmCCmUmUmCmUG | |
| | | | UU | GCAUCG*mU*mU | |
| G028918 | 66 | GCUCUAUCCAC | GCUCUAUCCAC | mG*mC*mU*mCmUAUm | chr6: |
| | | GGCGCCCGCGG | GGCGCCCGCGG | CmCAmCGmGCGCCmCG | 29942891-29942915 |
| | | CU | CUGUUGUAGCU | CGmGCUmGUUGmUmAm | |
| | | | CCCUGAAACCG | GmCUCCCmUmGmAmAm | |
| | | | UUGCUACAAUA | AmCmCGUUmGmCUAmC | |
| | | | AGGCCGUCGAA | AAU*AAGmGmCCmGmU | |
| | | | AGAUGUGCCGC | mCmGmAmAmAmGmAmU | |
| | | | AACGCUCUGCC | GUGCmCGmCAAmCGCU | |
| | | | UUCUGGCAUCG | CUmGmCCmUmUmCmUG | |
| | | | UU | GCAUCG*mU*mU | |
| G028919 | 67 | CACAUCAGAGC | CACAUCAGAGC | mC*mA*mC*mAmUCAm | chr6: |
| | | CCUGGGCACUG | CCUGGGCACUG | GmAGmCCmCUGGGmCA | 29945232-29945256 |
| | | UC | UCGUUGUAGCU | CUmGUCmGUUGmUmAm | |
| | | | CCCUGAAACCG | GmCUCCCmUmGmAmAm | |
| | | | UUGCUACAAUA | AmCmCGUUmGmCUAmC | |
| | | | AGGCCGUCGAA | AAU*AAGmGmCCmGmU | |
| | | | AGAUGUGCCGC | mCmGmAmAmAmGmAmU | |
| | | | AACGCUCUGCC | GUGCmCGmCAAmCGCU | |
| | | | UUCUGGCAUCG | CUmGmCCmUmUmCmUG | |
| | | | UU | GCAUCG*mU*mU | |
| G028920 | 68 | CAGACCCAGGA | CAGACCCAGGA | mC*mA*mG*mAmCCCm | chr6: |
| | | CACGGAGCUCG | CACGGAGCUCG | AmGGmACmACGGAmGC | 29944243-29944267 |
| | | UG | UGGUUGUAGCU | UCmGUGmGUUGmUmAm | |
| | | | CCCUGAAACCG | GmCUCCCmUmGmAmAm | |
| | | | UUGCUACAAUA | AmCmCGUUmGmCUAmC | |
| | | | AGGCCGUCGAA | AAU*AAGmGmCCmGmU | |
| | | | AGAUGUGCCGC | mCmGmAmAmAmGmAmU | |
| | | | AACGCUCUGCC | GUGCmCGmCAAmCGCU | |
| | | | UUCUGGCAUCG | CUmGmCCmUmUmCmUG | |
| | | | UU | GCAUCG*mU*mU | |
| G028921 | 69 | CCAGGACACGG | CCAGGACACGG | mC*mC*mA*mGmGACm | chr6: |
| | | AGCUCGUGGAG | AGCUCGUGGAG | AmCGmGAmGCUCGmUG | 29944248-29944272 |
| | | AC | ACGUUGUAGCU | GAmGACmGUUGmUmAm | |
| | | | CCCUGAAACCG | GmCUCCCmUmGmAmAm | |
| | | | UUGCUACAAUA | AmCmCGUUmGmCUAmC | |
| | | | AGGCCGUCGAA | AAU*AAGmGmCCmGmU | |
| | | | AGAUGUGCCGC | mCmGmAmAmAmGmAmU | |
| | | | AACGCUCUGCC | GUGCmCGmCAAmCGCU | |
| | | | UUCUGGCAUCG | CUmGmCCmUmUmCmUG | |
| | | | UU | GCAUCG*mU*mU | |
| G028922 | 70 | CUCUGGGAAAA | CUCUGGGAAAA | mC*mU*mC*mUmGGGm | chr6: |
| | | GAGGGGAAGGU | GAGGGGAAGGU | AmAAmAGmAGGGGmAA | 29944471-29944495 |
| | | GA | GAGUUGUAGCU | GGmUGAmGUUGmUmAm | |
| | | | CCCUGAAACCG | GmCUCCCmUmGmAmAm | |
| | | | UUGCUACAAUA | AmCmCGUUmGmCUAmC | |
| | | | AGGCCGUCGAA | AAU*AAGmGmCCmGmU | |
| | | | AGAUGUGCCGC | mCmGmAmAmAmGmAmU | |
| | | | AACGCUCUGCC | GUGCmCGmCAAmCGCU | |
| | | | UUCUGGCAUCG | CUmGmCCmUmUmCmUG | |
| | | | UU | GCAUCG*mU*mU | |
| G028923 | 71 | UCUGGGAAAAG | UCUGGGAAAAG | mU*mC*mU*mGmGGAm | chr6: |
| | | AGGGGAAGGUG | AGGGGAAGGUG | AmAAmGAmGGGGAmAG | 29944470-29944494 |
| | | AG | AGGUUGUAGCU | GUmGAGmGUUGmUmAm | |
| | | | CCCUGAAACCG | GmCUCCCmUmGmAmAm | |
| | | | UUGCUACAAUA | AmCmCGUUmGmCUAmC | |
| | | | AGGCCGUCGAA | AAU*AAGmGmCCmGmU | |
| | | | AGAUGUGCCGC | mCmGmAmAmAmGmAmU | |
| | | | AACGCUCUGCC | GUGCmCGmCAAmCGCU | |
| | | | UUCUGGCAUCG | CUmGmCCmUmUmCmUG | |
| | | | UU | GCAUCG*mU*mU | |
| G028924 | 72 | AGACGCUGCAG | AGACGCUGCAG | mA*mG*mA*mCmGCUm | chr6: |
| | | CGCACGGGUAC | CGCACGGGUAC | GmCAmGCmGCACGmGG | 29943525-29943549 |
| | | CA | CAGUUGUAGCU | UAmCCAmGUUGmUmAm | |
| | | | CCCUGAAACCG | GmCUCCCmUmGmAmAm | |
| | | | UUGCUACAAUA | AmCmCGUUmGmCUAmC | |
| | | | AGGCCGUCGAA | AAU*AAGmGmCCmGmU | |
| | | | AGAUGUGCCGC | mCmGmAmAmAmGmAmU | |
| | | | AACGCUCUGCC | GUGCmCGmCAAmCGCU | |
| | | | UUCUGGCAUCG | CUmGmCCmUmUmCmUG | |
| | | | UU | GCAUCG*mU*mU | |
| G028925 | 73 | UCCUUUUCUAU | UCCUUUUCUAU | mU*mC*mC*mUmUUUm | Unavailable. |
| | | CUGUGGGAAGA | CUGUGGGAAGA | CmUAmUCmUGUGGmGA | Imperfect |
| | | AA | AAGUUGUAGCU | AGmAAAmGUUGmUmAm | alignment to |
| | | | CCCUGAAACCG | GmCUCCCmUmGmAmAm | human genome. |
| | | | UUGCUACAAUA | AmCmCGUUmGmCUAmC | |
| | | | AGGCCGUCGAA | AAU*AAGmGmCCmGmU | |
| | | | AGAUGUGCCGC | mCmGmAmAmAmGmAmU | |
| | | | AACGCUCUGCC | GUGCmCGmCAAmCGCU | |
| | | | UUCUGGCAUCG | CUmGmCCmUmUmCmUG | |
| | | | UU | GCAUCG*mU*mU | |
| G028926 | 74 | CACUGCCUGGG | CACUGCCUGGG | mC*mA*mC*mUmGCCm | chr6: |
| | | GUAGAACAAAA | GUAGAACAAAA | UmGGmGGmUAGAAmCA | 29945209-29945233 |
| | | AC | ACGUUGUAGCU | AAmAACmGUUGmUmAm | |
| | | | CCCUGAAACCG | GmCUCCCmUmGmAmAm | |
| | | | UUGCUACAAUA | AmCmCGUUmGmCUAmC | |
| | | | AGGCCGUCGAA | AAU*AAGmGmCCmGmU | |
| | | | AGAUGUGCCGC | mCmGmAmAmAmGmAmU | |
| | | | AACGCUCUGCC | GUGCmCGmCAAmCGCU | |
| | | | UUCUGGCAUCG | CUmGmCCmUmUmCmUG | |
| | | | UU | GCAUCG*mU*mU | |
| G028927 | 75 | ACAACCAGAGC | ACAACCAGAGC | mA*mC*mA*mAmCCAm | chr6: |
| | | GAGGCCGGUGA | GAGGCCGGUGA | GmAGmCGmAGGCCmGG | 29943008-29943032 |
| | | GU | GUGUUGUAGCU | UGmAGUmGUUGmUmAm | |
| | | | CCCUGAAACCG | GmCUCCCmUmGmAmAm | |
| | | | UUGCUACAAUA | AmCmCGUUmGmCUAmC | |
| | | | AGGCCGUCGAA | AAU*AAGmGmCCmGmU | |
| | | | AGAUGUGCCGC | mCmGmAmAmAmGmAmU | |
| | | | AACGCUCUGCC | GUGCmCGmCAAmCGCU | |
| | | | UUCUGGCAUCG | CUmGmCCmUmUmCmUG | |
| | | | UU | GCAUCG*mU*mU | |
| G028928 | 76 | CUACAACCAGA | CUACAACCAGA | mC*mU*mA*mCmAACm | chr6: |
| | | GCGAGGCCGGU | GCGAGGCCGGU | CmAGmAGmCGAGGmCC | 29943006-29943030 |
| | | GA | GAGUUGUAGCU | GGmUGAmGUUGmUmAm | |
| | | | CCCUGAAACCG | GmCUCCCmUmGmAmAm | |
| | | | UUGCUACAAUA | AmCmCGUUmGmCUAmC | |
| | | | AGGCCGUCGAA | AAU*AAGmGmCCmGmU | |
| | | | AGAUGUGCCGC | mCmGmAmAmAmGmAmU | |
| | | | AACGCUCUGCC | GUGCmCGmCAAmCGCU | |
| | | | UUCUGGCAUCG | CUmGmCCmUmUmCmUG | |
| | | | UU | GCAUCG*mU*mU | |
| G028929 | 77 | UACAACCAGAG | UACAACCAGAG | mU*mA*mC*mAmACCm | chr6: |
| | | CGAGGCCGGUG | CGAGGCCGGUG | AmGAmGCmGAGGCmCG | 29943007-29943031 |
| | | AG | AGGUUGUAGCU | GUmGAGmGUUGmUmAm | |
| | | | CCCUGAAACCG | GmCUCCCmUmGmAmAm | |
| | | | UUGCUACAAUA | AmCmCGUUmGmCUAmC | |
| | | | AGGCCGUCGAA | AAU*AAGmGmCCmGmU | |
| | | | AGAUGUGCCGC | mCmGmAmAmAmGmAmU | |
| | | | AACGCUCUGCC | GUGCmCGmCAAmCGCU | |
| | | | UUCUGGCAUCG | CUmGmCCmUmUmCmUG | |
| | | | UU | GCAUCG*mU*mU | |
| G028930 | 78 | CCAGAGCGAGG | CCAGAGCGAGG | mC*mC*mA*mGmAGCm | chr6: |
| | | CCGGUGAGUGA | CCGGUGAGUGA | GmAGmGCmCGGUGmAG | 29943012-29943036 |
| | | CC | CCGUUGUAGCU | UGmACCmGUUGmUmAm | |
| | | | CCCUGAAACCG | GmCUCCCmUmGmAmAm | |
| | | | UUGCUACAAUA | AmCmCGUUmGmCUAmC | |
| | | | AGGCCGUCGAA | AAU*AAGmGmCCmGmU | |
| | | | AGAUGUGCCGC | mCmGmAmAmAmGmAmU | |
| | | | AACGCUCUGCC | GUGCmCGmCAAmCGCU | |
| | | | UUCUGGCAUCG | CUmGmCCmUmUmCmUG | |
| | | | UU | GCAUCG*mU*mU | |
| G028933 | 79 | CCAUCCCGCUG | CCAUCCCGCUG | mC*mC*mA*mUmCCCm | chr6: |
| | | CCAGGUCAGUG | CCAGGUCAGUG | GmCUmGCmCAGGUmCA | 29944206-29944230 |
| | | UG | UGGUUGUAGCU | GUmGUGmGUUGmUmAm | |
| | | | CCCUGAAACCG | GmCUCCCmUmGmAmAm | |
| | | | UUGCUACAAUA | AmCmCGUUmGmCUAmC | |
| | | | AGGCCGUCGAA | AAU*AAGmGmCCmGmU | |
| | | | AGAUGUGCCGC | mCmGmAmAmAmGmAmU | |
| | | | AACGCUCUGCC | GUGCmCGmCAAmCGCU | |
| | | | UUCUGGCAUCG | CUmGmCCmUmUmCmUG | |
| | | | UU | GCAUCG*mU*mU | |
| G028934 | 80 | GUAUCUGCGGA | GUAUCUGCGGA | mG*mU*mA*mUmCUGm | chr6: |
| | | GCCACUCCACG | GCCACUCCACG | CmGGmAGmCCACUmCC | 29943479-29943503 |
| | | CA | CAGUUGUAGCU | ACmGCAmGUUGmUmAm | |
| | | | CCCUGAAACCG | GmCUCCCmUmGmAmAm | |
| | | | UUGCUACAAUA | AmCmCGUUmGmCUAmC | |
| | | | AGGCCGUCGAA | AAU*AAGmGmCCmGmU | |
| | | | AGAUGUGCCGC | mCmGmAmAmAmGmAmU | |
| | | | AACGCUCUGCC | GUGCmCGmCAAmCGCU | |
| | | | UUCUGGCAUCG | CUmGmCCmUmUmCmUG | |
| | | | UU | GCAUCG*mU*mU | |

[0446] Throughout this application, the terms “mA,” “mC,” “mU,” or “mG” may be used to denote a nucleotide that has been modified with 2′—O-Me. Throughout this application, the terms A*, C*, U*, or G* may be used to denote a nucleotide that is linked to the next (e.g., 3′) nucleotide with a phosphorothioate (PS) bond.

[0447] In some embodiments, the HLA-A guide RNA comprises a guide sequence selected from SEQ ID NOs: 2-80. In some embodiments, the HLA-A guide RNA comprises a guide sequence that is at least 19, 20, 21, 22, 23, or 24 contiguous nucleotides of a sequence selected from SEQ ID NOs: 2-80. In some embodiments, the HLA-A guide RNA comprises a guide sequence that is at least 9500, 90%, or 85% identical to a sequence selected from SEQ ID NOs: 2-80. In some embodiments, the HLA-A guide RNA comprises a guide sequence that is at least 9500 identical to a sequence selected from SEQ ID NOs: 2-80.

[0448] In some embodiments, the HLA-A guide RNA comprises a guide sequence that comprises at least 10 contiguous nucleotides±10 nucleotides of a genomic coordinate listed in Table 1. As used herein, at least 10 contiguous nucleotides±10 nucleotides of a genomic coordinate means, for example, at least 10 contiguous nucleotides within the genomic coordinates wherein the genomic coordinates include 10 nucleotides in the 5′ direction and 10 nucleotides in the 3′ direction from the ranges listed in Table 1. For example, an HLA-A guide RNA may comprise 10 contiguous nucleotides within the genomic coordinates chosen from: chr6:29942891-29942915; chr6:29942609-29942633; chr6:29944266-29944290; chr6:29942889-29942913; chr6:29944471-29944495; and chr6:29944470-29944494; including the boundary nucleotides of these ranges. In some embodiments, the HLA-A guide RNA comprises a guide sequence that is at least 19, 20, 21, 22, 23, or 24 contiguous nucleotides of a sequence that comprises 10 contiguous nucleotides±10 nucleotides of a genomic coordinate listed in Table 1. In some embodiments, the HLA-A guide RNA comprises a guide sequence that is at least 95%, 90%, or 85% identical to a sequence selected from a sequence that is 19, 20, 21, 22, 23, or 24 contiguous nucleotides of a sequence that comprises 10 contiguous nucleotides±10 nucleotides of a genomic coordinate listed in Table 1.

[0449] In some embodiments, the HLA-A guide RNA comprises a guide sequence that comprises at least 15 contiguous nucleotides±10 nucleotides of a genomic coordinate listed in Table 1. In some embodiments, the HLA-A guide RNA comprises a guide sequence that comprises at least 24 contiguous nucleotides±10 nucleotides of a genomic coordinate listed in Table 1.

[0450] In some embodiments, the HLA-A guide RNA comprises SEQ ID NO: 2. In some embodiments, the HLA-A guide RNA comprises SEQ ID NO: 3. In some embodiments, the HLA-A guide RNA comprises SEQ ID NO: 4. In some embodiments, the HLA-A guide RNA comprises SEQ ID NO: 5. In some embodiments, the HLA-A guide RNA comprises SEQ ID NO: 6. In some embodiments, the HLA-A guide RNA comprises SEQ ID NO: 7. In some embodiments, the HLA-A guide RNA comprises SEQ ID NO: 8. In some embodiments, the HLA-A guide RNA comprises SEQ ID NO: 9. In some embodiments, the HLA-A guide RNA comprises SEQ ID NO: 10. In some embodiments, the HLA-A guide RNA comprises SEQ ID NO: 11. In some embodiments, the HLA-A guide RNA comprises SEQ ID NO: 12. In some embodiments, the HLA-A guide RNA comprises SEQ ID NO: 13. In some embodiments, the HLA-A guide RNA comprises SEQ ID NO: 14. In some embodiments, the HLA-A guide RNA comprises SEQ ID NO: 15. In some embodiments, the HLA-A guide RNA comprises SEQ ID NO: 16. In some embodiments, the HLA-A guide RNA comprises SEQ ID NO: 17. In some embodiments, the HLA-A guide RNA comprises SEQ ID NO: 18. In some embodiments, the HLA-A guide RNA comprises SEQ ID NO: 19. In some embodiments, the HLA-A guide RNA comprises SEQ ID NO: 20. In some embodiments, the HLA-A guide RNA comprises SEQ ID NO: 21. In some embodiments, the HLA-A guide RNA comprises SEQ ID NO: 22. In some embodiments, the HLA-A guide RNA comprises SEQ ID NO: 23. In some embodiments, the HLA-A guide RNA comprises SEQ ID NO: 24. In some embodiments, the HLA-A guide RNA comprises SEQ ID NO: 25. In some embodiments, the HLA-A guide RNA comprises SEQ ID NO: 26. In some embodiments, the HLA-A guide RNA comprises SEQ ID NO: 27. In some embodiments, the HLA-A guide RNA comprises SEQ ID NO: 28. In some embodiments, the HLA-A guide RNA comprises SEQ ID NO: 29. In some embodiments, the HLA-A guide RNA comprises SEQ ID NO: 30. In some embodiments, the HLA-A guide RNA comprises SEQ ID NO: 31. In some embodiments, the HLA-A guide RNA comprises SEQ ID NO: 32. In some embodiments, the HLA-A guide RNA comprises SEQ ID NO: 33. In some embodiments, the HLA-A guide RNA comprises SEQ ID NO: 34. In some embodiments, the HLA-A guide RNA comprises SEQ ID NO: 35. In some embodiments, the HLA-A guide RNA comprises SEQ ID NO: 36. In some embodiments, the HLA-A guide RNA comprises SEQ ID NO: 37. In some embodiments, the HLA-A guide RNA comprises SEQ ID NO: 38. In some embodiments, the HLA-A guide RNA comprises SEQ ID NO: 39. In some embodiments, the HLA-A guide RNA comprises SEQ ID NO: 40. In some embodiments, the HLA-A guide RNA comprises SEQ ID NO: 41. In some embodiments, the HLA-A guide RNA comprises SEQ ID NO: 42. In some embodiments, the HLA-A guide RNA comprises SEQ ID NO: 43. In some embodiments, the HLA-A guide RNA comprises SEQ ID NO: 44. In some embodiments, the HLA-A guide RNA comprises SEQ ID NO: 45. In some embodiments, the HLA-A guide RNA comprises SEQ ID NO: 46. In some embodiments, the HLA-A guide RNA comprises SEQ ID NO: 47. In some embodiments, the HLA-A guide RNA comprises SEQ ID NO: 48. In some embodiments, the HLA-A guide RNA comprises SEQ ID NO: 49. In some embodiments, the HLA-A guide RNA comprises SEQ ID NO: 50. In some embodiments, the HLA-A guide RNA comprises SEQ ID NO: 51. In some embodiments, the HLA-A guide RNA comprises SEQ ID NO: 52. In some embodiments, the HLA-A guide RNA comprises SEQ ID NO: 53. In some embodiments, the HLA-A guide RNA comprises SEQ ID NO: 54. In some embodiments, the HLA-A guide RNA comprises SEQ ID NO: 55. In some embodiments, the HLA-A guide RNA comprises SEQ ID NO: 56. In some embodiments, the HLA-A guide RNA comprises SEQ ID NO: 57. In some embodiments, the HLA-A guide RNA comprises SEQ ID NO: 58. In some embodiments, the HLA-A guide RNA comprises SEQ ID NO: 59. In some embodiments, the HLA-A guide RNA comprises SEQ ID NO: 60. In some embodiments, the HLA-A guide RNA comprises SEQ ID NO: 61. In some embodiments, the HLA-A guide RNA comprises SEQ ID NO: 62. In some embodiments, the HLA-A guide RNA comprises SEQ ID NO: 63. In some embodiments, the HLA-A guide RNA comprises SEQ ID NO: 64. In some embodiments, the HLA-A guide RNA comprises SEQ ID NO: 65. In some embodiments, the HLA-A guide RNA comprises SEQ ID NO: 66. In some embodiments, the HLA-A guide RNA comprises SEQ ID NO: 67. In some embodiments, the HLA-A guide RNA comprises SEQ ID NO: 68. In some embodiments, the HLA-A guide RNA comprises SEQ ID NO: 69. In some embodiments, the HLA-A guide RNA comprises SEQ ID NO: 70. In some embodiments, the HLA-A guide RNA comprises SEQ ID NO: 71. In some embodiments, the HLA-A guide RNA comprises SEQ ID NO: 72. In some embodiments, the HLA-A guide RNA comprises SEQ ID NO: 73. In some embodiments, the HLA-A guide RNA comprises SEQ ID NO: 74. In some embodiments, the HLA-A guide RNA comprises SEQ ID NO: 75. In some embodiments, the HLA-A guide RNA comprises SEQ ID NO: 76. In some embodiments, the HLA-A guide RNA comprises SEQ ID NO: 77. In some embodiments, the HLA-A guide RNA comprises SEQ ID NO: 78. In some embodiments, the HLA-A guide RNA comprises SEQ ID NO: 79. In some embodiments, the HLA-A guide RNA comprises SEQ ID NO: 80.

[0451] In some embodiments, the HLA-A guide RNA comprises a guide sequence of any one of: SEQ ID NOs: 13, 55, 61, 66, and 70-71.

[0452] In some embodiments, the HLA-A guide RNA comprises a sequence listed in Table 1. In some embodiments, the HLA-A guide RNA comprises a sequence of any one of SEQ ID NO: 2-80. In some embodiments, the HLA-A guide RNA comprises a sequence of SEQ ID NO: 61 or 66. In some embodiments, the HLA-A guide RNA comprises a sequence of SEQ ID NO: 61. In some embodiments, the HLA-A guide RNA comprises a sequence of SEQ ID NO: 61. In some embodiments, the HLA-A guide RNA comprises a guide sequence comprising a sequence of any one of SEQ ID NO: 2-80. In some embodiments, the HLA-A guide RNA comprises a guide sequence comprising a sequence of SEQ ID NO: 61 or 66. In some embodiments, the HLA-A guide RNA comprises a guide sequence comprising a sequence of SEQ ID NO: 61. In some embodiments, the HLA-A guide RNA comprises a guide sequence comprising a sequence of SEQ ID NO: 66. In some embodiments, the HLA-A guide RNA comprises a sequence of any one of SEQ ID NOs: 1002-1080. In some embodiments, the HLA-A guide RNA comprises a sequence of SEQ ID NO: 1061 or 1066. In some embodiments, the HLA-A guide RNA comprises a sequence of SEQ ID NO: 1061. In some embodiments, the HLA-A guide RNA comprises a sequence of SEQ ID NO: 1066. In some embodiments, the HLA-A guide RNA comprises a sequence of any one of SEQ ID NOs: 2002-2080, 3001, and 3002. In some embodiments, the HLA-A guide RNA comprises a sequence of any one of SEQ ID NOs: 2061, 2066, 3001, and 3002. In some embodiments, the HLA-A guide RNA comprises a sequence of SEQ ID NO: 2061. In some embodiments, the HLA-A guide RNA comprises a sequence of SEQ ID NO: 2066. In some embodiments, the HLA-A guide RNA comprises a sequence of SEQ ID NO: 3001. In some embodiments, the HLA-A guide RNA comprises a sequence of SEQ ID NO: 3002.

[0453] In some embodiments, the HLA-A guide RNA is a single guide RNA (sgRNA) comprising a sequence of any one of the sgRNA sequences listed in Table 1.

[0454] Additional embodiments of HLA-A guide RNAs are provided herein, including e.g., exemplary modifications to the guide RNA.

### 1. Genetic Modifications to HLA-A

[0455] In some embodiments, the methods and compositions disclosed herein genetically modify at least one nucleotide of the HLA-A gene in a cell. In some embodiments, the genetic modification to HLA-A reduces or eliminates the expression of HLA-A protein on the surface of the genetically modified cell (or engineered cell). Genetic modifications encompass the population of modifications that results from contact with a genomic editing system (e.g., the population of edits that result from Cas9 and an HLA-A guide RNA, or the population of edits that result from BC22 and an HLA-A guide RNA).

[0456] In some embodiments, the genetic modification comprises at least one nucleotide within the genomic coordinates chr6:29942540-29945459. In some embodiments, the genetic modification comprises at least one nucleotide within the genomic coordinates chosen from any of the genomic coordinates listed in Table 1.

[0457] In some embodiments, the genetic modification comprises at least one nucleotide within the genomic coordinates chosen from: chr6:29942891-29942915; chr6:29942609-29942633; chr6:29944266-29944290; chr6:29942889-29942913; chr6:29944471-29944495; and chr6:29944470-29944494.

[0458] In some embodiments, the genetic modification comprises at least one nucleotide within the genomic coordinates chosen from: chr6:29942891-29942915; chr6:29942609-29942633; chr6:29942889-29942913; chr6:29944471-29944495; chr6:29944266-29944290; chr6:29942785-29942809

[0459] In some embodiments, the genetic modification comprises at least 5 contiguous nucleotides within the genomic coordinates chosen from: chr6:29942891-29942915; chr6:29942609-29942633; chr6:29944266-29944290; chr6:29942889-29942913; chr6:29944471-29944495; and chr6:29944470-29944494. In some embodiments, the genetic modification comprises at least 10 contiguous nucleotides within the genomic coordinates chosen from: chr6:29942891-29942915; chr6:29942609-29942633; chr6:29944266-29944290; chr6:29942889-29942913; chr6:29944471-29944495; chr6:29944470-29944494. In some embodiments, the genetic modification comprises at least one indel, at least one C to T substitution, or at least one A to G substitution within the genomic coordinates chosen from: chr6:29942891-29942915; chr6:29942609-29942633; chr6:29944266-29944290; chr6:29942889-29942913; chr6:29944471-29944495; chr6:29944470-29944494.

[0460] In some embodiments, the genetic modification comprises at least 5 contiguous nucleotides within the genomic coordinates chosen from: chr6:29942891-29942915; chr6:29942609-29942633; chr6:29942889-29942913; chr6:29944471-29944495; chr6:29944266-29944290; chr6:29942785-29942809 In some embodiments, the genetic modification comprises at least 10 contiguous nucleotides within the genomic coordinates chosen from: chr6:29942891-29942915; chr6:29942609-29942633; chr6:29942889-29942913; chr6:29944471-29944495; chr6:29944266-29944290; chr6:29942785-29942809 In some embodiments, the genetic modification comprises at least one indel, at least one C to T substitution, or at least one A to G substitution within the genomic coordinates chosen from: chr6:29942891-29942915; chr6:29942609-29942633; chr6:29942889-29942913; chr6:29944471-29944495; chr6:29944266-29944290; chr6:29942785-29942809

[0461] In some embodiments, the modification to HLA-A comprises any one or more of an insertion, deletion, substitution, or deamination of at least one nucleotide in a target sequence. In some embodiments, the modification to HLA-A comprises an insertion of 1, 2, 3, 4 or 5 or more nucleotides in a target sequence. In some embodiments, the modification to HLA-A comprises a deletion of 1, 2, 3, 4 or 5 or more nucleotides in a target sequence. In other embodiments, the modification to HLA-A comprises an insertion of 1, 2, 3, 4, 5, 6, 7, 8, 9, 10, 15, 20 or 25 or more nucleotides in a target sequence. In other embodiments, the modification to HLA-A comprises a deletion of 1, 2, 3, 4, 5, 6, 7, 8, 9, 10, 15, 20 or 25 or more nucleotides in a target sequence. In some embodiments, the modification to HLA-A comprises an indel, which is generally defined in the art as an insertion or deletion of less than 1000 base pairs (bp). In some embodiments, the modification to HLA-A comprises an indel which results in a frameshift mutation in a target sequence. In some embodiments, the modification to HLA-A comprises a substitution of 1, 2, 3, 4, 5, 6, 7, 8, 9, 10, 15, 20 or 25 or more nucleotides in a target sequence. In some embodiments, the modification to HLA-A comprises one or more of an insertion, deletion, or substitution of nucleotides resulting from the incorporation of a template nucleic acid. In some embodiments, the modification to HLA-A is not transient.

[0462] In some embodiments, the methods and compositions disclosed herein modify the HLA-A gene in a cell using an RNA-guided DNA binding agent (e.g., a Cas enzyme). In some embodiments, the RNA-guided DNA binding agent is Cas9. In some embodiments, the RNA-guided DNA binding agent cuts within the HLA-A gene, wherein the HLA-A guide RNA targets an HLA-A genomic target sequence comprising at least 10 contiguous nucleotides within the genomic coordinates chr6:29942540-29945459.

[0463] In some embodiments, the genetic modification to HLA-A results in utilization of an out-of-frame stop codon. In some embodiments, the genetic modification to HLA-A results in exon skipping during splicing. In some embodiments, the genetic modification to HLA-A results in reduced HLA-A protein expression by the cell. In some embodiments, the modification to the HLA-A results in reduced or eliminated HLA-A protein expression on the surface of the cell.

[0464] In some embodiments, HLA-A expression on the surface of a cell is reduced as a result of the genetic modification to HLA-A. In some embodiments, HLA-A expression on the surface of a cell is absent as a result of the genetic modification to HLA-A.

### 2. Efficacy of HLA-A Guide RNAs

[0465] The efficacy of an HLA-A guide RNA may be determined by techniques available in the art that assess the editing efficiency of a guide RNA, the levels of HLA-A mRNA, or the levels of HLA-A protein in a target cell. In some embodiments, the reduction or elimination of HLA-A protein on the surface of a cell may be determined by comparison to an unmodified cell (or “relative to an unmodified cell”). An engineered cell or cell population may also be compared to a population of unmodified cells.

[0466] An “unmodified cell” (or “unmodified cells”) refers to a control cell (or cells) of the same type of cell in an experiment or test, wherein the “unmodified” control cell has not been contacted with an HLA-A guide (i.e., a non-engineered cell). Therefore, an unmodified cell (or cells) may be a cell that has not been contacted with a guide RNA, or a cell that has been contacted with a guide RNA that does not target HLA-A.

[0467] In some embodiments, the efficacy of an HLA-A guide RNA is determined by measuring the reduction or elimination of HLA-A protein on the surface of the target cells). In some embodiments, HLA-A protein expression is measured by flow cytometry (e.g., with an antibody against HLA-A2/HLA-A3). In some embodiments, the population of cells is enriched (e.g., by FACS or MACS) and is at least 65%, 70%, 80%, 90%, 91%, 92%, 93%, or 94% HLA-A negative as measured by flow cytometry relative to a population of unmodified cells. In some embodiments, the population of cells is not enriched (e.g., by FACS or MACS) and is at least 65%, 70%, 80%, 90%, 91%, 92%, 93%, or 94% HLA-A negative as measured by flow cytometry relative to a population of unmodified cells.

[0468] In some embodiments, the population of cells is at least 65% HLA-A negative as measured by flow cytometry relative to a population of unmodified cells. In some embodiments, the population of cells is at least 70% HLA-A negative as measured by flow cytometry relative to a population of unmodified cells. In some embodiments, the population of cells is at least 80% HLA-A negative as measured by flow cytometry relative to a population of unmodified cells. In some embodiments, the population of cells is at least 90% HLA-A negative as measured by flow cytometry relative to a population of unmodified cells. In some embodiments, the population of cells is at least 91% HLA-A negative as measured by flow cytometry relative to a population of unmodified cells. In some embodiments, the population of cells is at least 92% HLA-A negative as measured by flow cytometry relative to a population of unmodified cells. In some embodiments, the population of cells is at least 93% HLA-A negative as measured by flow cytometry relative to a population of unmodified cells. In some embodiments, the population of cells is at least 94% HLA-A negative as measured by flow cytometry relative to a population of unmodified cells.

[0469] In some embodiments, an effective HLA-A guide RNA may be determined by measuring the response of immune cells in vitro or in vivo (e.g., CD8+ T cells) to the genetically modified target cell. For example, a reduced response from CD8+ T cells is indicative of an effective HLA-A guide RNA. A CD8+ T cell response may be evaluated by an assay that measures CD8+ T cell activation responses, e.g., CD8+ T cell proliferation, expression of activation markers, and/or cytokine production (IL-2, IFN-γ, TNF-α) (e.g., flow cytometry, ELISA). The CD8+ T cell response may be assessed in vitro or in vivo. In some embodiments, the CD8+ T cell response may be evaluated by co-culturing the genetically modified cell with CD8+ T cells in vitro. In some embodiments, CD8+ T cell activity may be evaluated in an in vivo model, e.g., a rodent model. In an in vivo model, e.g., genetically modified cells may be administered with CD8+ T cell; survival of the genetically modified cells is indicative of the ability to avoid CD8+ T cell lysis. In some embodiments, the methods produce a composition comprising a cell that survives in vivo in the presence of CD8+ T cells for greater than 1, 2, 3, 4, 5, or 6 weeks or more. In some embodiments, the methods produce a composition comprising a cell that survives in vivo in the presence of CD8+ T cells for at least one week to six weeks. In some embodiments, the methods produce a composition comprising a cell that survives in vivo in the presence of CD8+ T cells for at least two to four weeks. In some embodiments, the methods produce a composition comprising a cell that survives in vivo in the presence of CD8+ T cells for at least four to six weeks. In some embodiments, the methods produce a composition comprising a cell that survives in vivo in the presence of CD8+ T cells for more than six weeks.

[0470] The efficacy of an HLA-A guide RNA may also be assessed by the survival of the cell post-editing. In some embodiments, the cell survives post editing for at least one week to six weeks. In some embodiments, the cell survives post editing for at least two weeks. In some embodiments, the cell survives post editing for at least three weeks. In some embodiments, the cell survives post editing for at least four weeks. In some embodiments, the cell survives post editing for at least five weeks. In some embodiments, the cell survives post editing for at least six weeks. In some embodiments, the cell survives post editing for at least twelve weeks. The viability of a genetically modified cell may be measured using standard techniques, including e.g., by measures of cell death, by flow cytometry live/dead staining, or cell proliferation.

### D. TRAC Guide RNAs

[0471] The methods and compositions provided herein disclose TRAC guide RNAs useful for reducing the expression of TRAC protein on the surface of a cell. In some embodiments, such guide RNAs direct an RNA-guided DNA binding agent to a TRAC genomic target sequence and may be referred to herein as “TRAC guide RNAs.” In some embodiments, the TRAC guide RNA directs an RNA-guided DNA binding agent to a human TRAC genomic target sequence. In some embodiments, the TRAC guide RNA comprises a guide sequence selected from SEQ ID NO: 101-120.

[0472] In some embodiments, the methods and compositions disclosed herein comprise a TRAC guide RNA comprising a guide sequence that targets a TRAC genomic target sequence comprising at least 10 nucleotides within the genomic coordinates chr14:22547505-22551621 or chr14:22547462-22551621. In some embodiments, the method and composition disclosed herein comprise a TRAC guide RNA comprising a guide sequence that targets a TRAC genomic target sequence comprising at least one nucleotide within the genomic coordinates chr14:22547505-22551621 or chr14:22547462-22551621.

[0473] In some embodiments, the methods and compositions disclosed herein comprise a TRAC guide RNA comprising a guide sequence that directs an RNA-guided DNA binding agent to induce a double stranded break (DSB) or a single-stranded break (SSB) in a TRAC gene, wherein the TRAC guide RNA targets and TRAC genomic target sequence comprising at least 10 contiguous nucleotides within the genomic coordinates chr14:22547505-22551621 or chr14:22547462-22551621. In some embodiments, the methods and compositions disclosed herein comprise a TRAC guide RNA comprising a guide sequence that directs an RNA-guided DNA binding agent to induce a double stranded break (DSB) or a single-stranded break (SSB) in a TRAC gene, wherein the TRAC guide RNA targets a TRAC genomic target sequence comprising at least one nucleotide within the genomic coordinates chr14:22547505-22551621 or chr14:22547462-22551621.

[0474] In some embodiments, the methods and compositions disclose a TRAC guide RNA that directs an RNA-guided DNA binding agent to induce a double stranded break (DSB) or a single-stranded break (SSB) in a TRAC genomic target sequence. In some embodiments, the methods and compositions disclose a TRAC guide RNA that directs an RNA-guided DNA binding agent to make a cut in a TRAC genomic target sequence. In embodiments wherein the RNA-guided DNA cutting agent is Cas9, the cut or “cut site” occurs at the third base from the protospacer adjacent motif (PAM) sequence.

[0475] In some embodiments, a composition is provided comprising a TRAC guide RNA described herein and an RNA-guided DNA binding agent or a nucleic acid encoding an RNA-guided DNA binding agent.

[0476] In some embodiments, a composition is provided comprising a TRAC single-guide RNA (sgRNA) comprising a guide sequence that targets a genomic target comprising at least 10 contiguous nucleotides within the genomic coordinates chr14:22547505-22551621 or chr14:22547462-22551621. In some embodiments, a composition is provided comprising a TRAC sgRNA described herein and an RNA-guided DNA binding agent or a nucleic acid encoding an RNA-guided DNA binding agent.

[0477] In some embodiments, a composition is provided comprising a TRAC dual-guide RNA (dgRNA) comprising a guide sequence that targets a genomic target comprising at least 10 contiguous nucleotides within the genomic coordinates chr14:22547505-22551621 or chr14:22547462-22551621. In some embodiments, a composition is provided comprising a TRAC dgRNA described herein and an RNA-guided DNA binding agent or a nucleic acid encoding an RNA-guided DNA binding agent.

[0478] In some embodiments, the TRAC gRNA comprises a guide sequence selected from any one of SEQ ID NOs: 101-120. Exemplary TRAC guide sequences are shown below in Table 2 (SEQ ID NOs: 101-120) with corresponding guide RNA sequences 101-120.

TABLE 2
Exemplary TRAC guide sequences.

| | | | Exemplary | | |
|---|---|---|---|---|---|
| | SEQ ID | | Guide RNA | Exemplary Guide | |
| | NO to | | Full Sequence | RNA Modified | Genomic |
| Guide | the Guide | Guide | (SEQ ID Nos: | Sequence (SEQ ID | Coordinates |
| ID | Sequence | Sequence | 1101-1120) | NOs: 2101-2120) | (hg38) |
| G021469 | 101 | AUAUCCAGAAC | AUAUCCAGAAC | mA*mU*mA*mUmCCAm | chr14: 22547505- |
| | | CCUGACCCUGC | CCUGACCCUGC | GmAAmCCmCUGACmCC | 22547529 |
| | | CG | CGGUUGUAGCU | UGmCCGmGUUGmUmAm | |
| | | | CCCUGAAACCG | GmCUCCCmUmGmAmAm | |
| | | | UUGCUACAAUA | AmCmCGUUmGmCUAmC | |
| | | | AGGCCGUCGAA | AAU*AAGmGmCCmGmU | |
| | | | AGAUGUGCCGC | mCmGmAmAmAmGmAmU | |
| | | | AACGCUCUGCC | GUGCmCGmCAAmCGCU | |
| | | | UUCUGGCAUCG | CUmGmCCmUmUmCmUG | |
| | | | UU | GCAUCG*mU*mU | |
| G021481 | 102 | GCCGUGUACCA | GCCGUGUACCA | mG*mC*mC*mGmUGUm | chr14: 22547525- |
| | | GCUGAGAGACU | GCUGAGAGACU | AmCCmAGmCUGAGmAG | 22547549 |
| | | CU | CUGUUGUAGCU | ACmUCUmGUUGmUmAm | |
| | | | CCCUGAAACCG | GmCUCCCmUmGmAmAm | |
| | | | UUGCUACAAUA | AmCmCGUUmGmCUAmC | |
| | | | AGGCCGUCGAA | AAU*AAGmGmCCmGmU | |
| | | | AGAUGUGCCGC | mCmGmAmAmAmGmAmU | |
| | | | AACGCUCUGCC | GUGCmCGmCAAmCGCU | |
| | | | UUCUGGCAUCG | CUmGmCCmUmUmCmUG | |
| | | | UU | GCAUCG*mU*mU | |
| G028935 | 103 | CAGGCCACAGC | CAGGCCACAGC | mC*mA*mG*mGmCCAm | chr14: 22547674- |
| | | ACUGUUGCUCU | ACUGUUGCUCU | CmAGmCAmCUGUUmGC | 22547698 |
| | | UG | UGGUUGUAGCU | UCmUUGmGUUGmUmAm | |
| | | | CCCUGAAACCG | GmCUCCCmUmGmAmAm | |
| | | | UUGCUACAAUA | AmCmCGUUmGmCUAmC | |
| | | | AGGCCGUCGAA | AAU*AAGmGmCCmGmU | |
| | | | AGAUGUGCCGC | mCmGmAmAmAmGmAmU | |
| | | | AACGCUCUGCC | GUGCmCGmCAAmCGCU | |
| | | | UUCUGGCAUCG | CUmGmCCmUmUmCmUG | |
| | | | UU | GCAUCG*mU*mU | |
| G028936 | 104 | CCCAGCCCAGG | CCCAGCCCAGG | mC*mC*mC*mAmGCCm | chr14: 22547768- |
| | | UAAGGGCAGCU | UAAGGGCAGCU | CmAGmGUmAAGGGmCA | 22547792 |
| | | UU | UUGUUGUAGCU | GCmUUUmGUUGmUmAm | |
| | | | CCCUGAAACCG | GmCUCCCmUmGmAmAm | |
| | | | UUGCUACAAUA | AmCmCGUUmGmCUAmC | |
| | | | AGGCCGUCGAA | AAU*AAGmGmCCmGmU | |
| | | | AGAUGUGCCGC | mCmGmAmAmAmGmAmU | |
| | | | AACGCUCUGCC | GUGCmCGmCAAmCGCU | |
| | | | UUCUGGCAUCG | CUmGmCCmUmUmCmUG | |
| | | | UU | GCAUCG*mU*mU | |
| G028937 | 105 | GUCUUACCUGU | GUCUUACCUGU | mG*mU*mC*mUmUACm | chr14: 22549665- |
| | | UUCAAAGCUUU | UUCAAAGCUUU | CmUGmUUmUCAAAmGC | 22549689 |
| | | UC | UCGUUGUAGCU | UUmUUCmGUUGmUmAm | |
| | | | CCCUGAAACCG | GmCUCCCmUmGmAmAm | |
| | | | UUGCUACAAUA | AmCmCGUUmGmCUAmC | |
| | | | AGGCCGUCGAA | AAU*AAGmGmCCmGmU | |
| | | | AGAUGUGCCGC | mCmGmAmAmAmGmAmU | |
| | | | AACGCUCUGCC | GUGCmCGmCAAmCGCU | |
| | | | UUCUGGCAUCG | CUmGmCCmUmUmCmUG | |
| | | | UU | GCAUCG*mU*mU | |
| G028938 | 106 | CUUUGAAACAG | CUUUGAAACAG | mC*mU*mU*mUmGAAm | chr14: 22549671- |
| | | GUAAGACAGGG | GUAAGACAGGG | AmCAmGGmUAAGAmCA | 22549695 |
| | | GU | GUGUUGUAGCU | GGmGGUmGUUGmUmAm | |
| | | | CCCUGAAACCG | GmCUCCCmUmGmAmAm | |
| | | | UUGCUACAAUA | AmCmCGUUmGmCUAmC | |
| | | | AGGCCGUCGAA | AAU*AAGmGmCCmGmU | |
| | | | AGAUGUGCCGC | mCmGmAmAmAmGmAmU | |
| | | | AACGCUCUGCC | GUGCmCGmCAAmCGCU | |
| | | | UUCUGGCAUCG | CUmGmCCmUmUmCmUG | |
| | | | UU | GCAUCG*mU*mU | |
| G028939 | 107 | UUAGGUUCGUA | UUAGGUUCGUA | mU*mU*mA*mGmGUUm | chr14: 22550544- |
| | | UCUGUAAAACC | UCUGUAAAACC | CmGUmAUmCUGUAmAA | 22550568 |
| | | AA | AAGUUGUAGCU | ACmCAAmGUUGmUmAm | |
| | | | CCCUGAAACCG | GmCUCCCmUmGmAmAm | |
| | | | UUGCUACAAUA | AmCmCGUUmGmCUAmC | |
| | | | AGGCCGUCGAA | AAU*AAGmGmCCmGmU | |
| | | | AGAUGUGCCGC | mCmGmAmAmAmGmAmU | |
| | | | AACGCUCUGCC | GUGCmCGmCAAmCGCU | |
| | | | UUCUGGCAUCG | CUmGmCCmUmUmCmUG | |
| | | | UU | GCAUCG*mU*mU | |
| G028940 | 108 | UUACAGAUACG | UUACAGAUACG | mU*mU*mA*mCmAGAm | chr14: 22550550- |
| | | AACCUAAACUU | AACCUAAACUU | UmACmGAmACCUAmAA | 22550574 |
| | | UC | UCGUUGUAGCU | CUmUUCmGUUGmUmAm | |
| | | | CCCUGAAACCG | GmCUCCCmUmGmAmAm | |
| | | | UUGCUACAAUA | AmCmCGUUmGmCUAmC | |
| | | | AGGCCGUCGAA | AAU*AAGmGmCCmGmU | |
| | | | AGAUGUGCCGC | mCmGmAmAmAmGmAmU | |
| | | | AACGCUCUGCC | GUGCmCGmCAAmCGCU | |
| | | | UUCUGGCAUCG | CUmGmCCmUmUmCmUG | |
| | | | UU | GCAUCG*mU*mU | |
| G028941 | 109 | UUGAAAGUUUA | UUGAAAGUUUA | mU*mU*mG*mAmAAGm | chr14: 22550552- |
| | | GGUUCGUAUCU | GGUUCGUAUCU | UmUUmAGmGUUCGmUA | 22550576 |
| | | GU | GUGUUGUAGCU | UCmUGUmGUUGmUmAm | |
| | | | CCCUGAAACCG | GmCUCCCmUmGmAmAm | |
| | | | UUGCUACAAUA | AmCmCGUUmGmCUAmC | |
| | | | AGGCCGUCGAA | AAU*AAGmGmCCmGmU | |
| | | | AGAUGUGCCGC | mCmGmAmAmAmGmAmU | |
| | | | AACGCUCUGCC | GUGCmCGmCAAmCGCU | |
| | | | UUCUGGCAUCG | CUmGmCCmUmUmCmUG | |
| | | | UU | GCAUCG*mU*mU | |
| G028942 | 110 | ACUUUCAAAAC | ACUUUCAAAAC | mA*mC*mU*mUmUCAm | chr14: 22550568- |
| | | CUGUCAGUGAU | CUGUCAGUGAU | AmAAmCCmUGUCAmGU | 22550592 |
| | | UG | UGGUUGUAGCU | GAmUUGmGUUGmUmAm | |
| | | | CCCUGAAACCG | GmCUCCCmUmGmAmAm | |
| | | | UUGCUACAAUA | AmCmCGUUmGmCUAmC | |
| | | | AGGCCGUCGAA | AAU*AAGmGmCCmGmU | |
| | | | AGAUGUGCCGC | mCmGmAmAmAmGmAmU | |
| | | | AACGCUCUGCC | GUGCmCGmCAAmCGCU | |
| | | | UUCUGGCAUCG | CUmGmCCmUmUmCmUG | |
| | | | UU | GCAUCG*mU*mU | |
| G028943 | 111 | AAAACCUGUCA | AAAACCUGUCA | mA*mA*mA*mAmCCUm | chr14: 22550574- |
| | | GUGAUUGGGUU | GUGAUUGGGUU | GmUCmAGmUGAUUmGG | 22550598 |
| | | CC | CCGUUGUAGCU | GUmUCCmGUUGmUmAm | |
| | | | CCCUGAAACCG | GmCUCCCmUmGmAmAm | |
| | | | UUGCUACAAUA | AmCmCGUUmGmCUAmC | |
| | | | AGGCCGUCGAA | AAU*AAGmGmCCmGmU | |
| | | | AGAUGUGCCGC | mCmGmAmAmAmGmAmU | |
| | | | AACGCUCUGCC | GUGCmCGmCAAmCGCU | |
| | | | UUCUGGCAUCG | CUmGmCCmUmUmCmUG | |
| | | | UU | GCAUCG*mU*mU | |
| G028944 | 112 | UGUCAGUGAUU | UGUCAGUGAUU | mU*mG*mU*mCmAGUm | chr14: 22550580- |
| | | GGGUUCCGAAU | GGGUUCCGAAU | GmAUmUGmGGUUCmCG | 22550604 |
| | | CC | CCGUUGUAGCU | AAmUCCmGUUGmUmAm | |
| | | | CCCUGAAACCG | GmCUCCCmUmGmAmAm | |
| | | | UUGCUACAAUA | AmCmCGUUmGmCUAmC | |
| | | | AGGCCGUCGAA | AAU*AAGmGmCCmGmU | |
| | | | AGAUGUGCCGC | mCmGmAmAmAmGmAmU | |
| | | | AACGCUCUGCC | GUGCmCGmCAAmCGCU | |
| | | | UUCUGGCAUCG | CUmGmCCmUmUmCmUG | |
| | | | UU | GCAUCG*mU*mU | |
| G028945 | 113 | GGGUUCCGAAU | GGGUUCCGAAU | mG*mG*mG*mUmUCCm | chr14: 22550591- |
| | | CCUCCUCCUGA | CCUCCUCCUGA | GmAAmUCmCUCCUmCC | 22550615 |
| | | AA | AAGUUGUAGCU | UGmAAAmGUUGmUmAm | |
| | | | CCCUGAAACCG | GmCUCCCmUmGmAmAm | |
| | | | UUGCUACAAUA | AmCmCGUUmGmCUAmC | |
| | | | AGGCCGUCGAA | AAU*AAGmGmCCmGmU | |
| | | | AGAUGUGCCGC | mCmGmAmAmAmGmAmU | |
| | | | AACGCUCUGCC | GUGCmCGmCAAmCGCU | |
| | | | UUCUGGCAUCG | CUmGmCCmUmUmCmUG | |
| | | | UU | GCAUCG*mU*mU | |
| G028946 | 114 | AAGGCCCCUCA | AAGGCCCCUCA | mA*mA*mG*mGmCCCm | chr14: 22550652- |
| | | CCUCAGCUGGA | CCUCAGCUGGA | CmUCmACmCUCAGmCU | 22550676 |
| | | CC | CCGUUGUAGCU | GGmACCmGUUGmUmAm | |
| | | | CCCUGAAACCG | GmCUCCCmUmGmAmAm | |
| | | | UUGCUACAAUA | AmCmCGUUmGmCUAmC | |
| | | | AGGCCGUCGAA | AAU*AAGmGmCCmGmU | |
| | | | AGAUGUGCCGC | mCmGmAmAmAmGmAmU | |
| | | | AACGCUCUGCC | GUGCmCGmCAAmCGCU | |
| | | | UUCUGGCAUCG | CUmGmCCmUmUmCmUG | |
| | | | UU | GCAUCG*mU*mU | |
| G028947 | 115 | AGCUUCAAGGC | AGCUUCAAGGC | mA*mG*mC*mUmUCAm | chr14: 22550658- |
| | | CCCUCACCUCA | CCCUCACCUCA | AmGGmCCmCCUCAmCC | 22550682 |
| | | GC | GCGUUGUAGCU | UCmAGCmGUUGmUmAm | |
| | | | CCCUGAAACCG | GmCUCCCmUmGmAmAm | |
| | | | UUGCUACAAUA | AmCmCGUUmGmCUAmC | |
| | | | AGGCCGUCGAA | AAU*AAGmGmCCmGmU | |
| | | | AGAUGUGCCGC | mCmGmAmAmAmGmAmU | |
| | | | AACGCUCUGCC | GUGCmCGmCAAmCGCU | |
| | | | UUCUGGCAUCG | CUmGmCCmUmUmCmUG | |
| | | | UU | GCAUCG*mU*mU | |
| G028948 | 116 | AUUCCAGAUCU | AUUCCAGAUCU | mA*mU*mU*mCmCAGm | chr14: 22551597- |
| | | GCAAGAUUGUA | GCAAGAUUGUA | AmUCmUGmCAAGAmUU | 22551621 |
| | | AG | AGGUUGUAGCU | GUmAAGmGUUGmUmAm | |
| | | | CCCUGAAACCG | GmCUCCCmUmGmAmAm | |
| | | | UUGCUACAAUA | AmCmCGUUmGmCUAmC | |
| | | | AGGCCGUCGAA | AAU*AAGmGmCCmGmU | |
| | | | AGAUGUGCCGC | mCmGmAmAmAmGmAmU | |
| | | | AACGCUCUGCC | GUGCmCGmCAAmCGCU | |
| | | | UUCUGGCAUCG | CUmGmCCmUmUmCmUG | |
| | | | UU | GCAUCG*mU*mU | |
| G021475 | 117 | AACCCUGAUCC | AACCCUGAUCC | mA*mA*mC*mCmCUGm | chr14: 22547481- |
| | | UCUUGUCCCAC | UCUUGUCCCAC | AmUCmCUmCUUGUmCC | 22547505 |
| | | AG | AGGUUGUAGCU | CAmCAGmGUUGmUmAm | |
| | | | CCCUGAAACCG | GmCUCCCmUmGmAmAm | |
| | | | UUGCUACAAUA | AmCmCGUUmGmCUAmC | |
| | | | AGGCCGUCGAA | AAU*AAGmGmCCmGmU | |
| | | | AGAUGUGCCGC | mCmGmAmAmAmGmAmU | |
| | | | AACGCUCUGCC | GUGCmCGmCAAmCGCU | |
| | | | UUCUGGCAUCG | CUmGmCCmUmUmCmUG | |
| | | | UU | GCAUCG*mU*mU | |
| G021476 | 118 | AUCAUGUCCUA | AUCAUGUCCUA | mA*mU*mC*mAmUGUm | chr14: 22547471- |
| | | ACCCUGAUCCU | ACCCUGAUCCU | CmCUmAAmCCCUGmAU | 22547495 |
| | | CU | CUGUUGUAGCU | CCmUCUmGUUGmUmAm | |
| | | | CCCUGAAACCG | GmCUCCCmUmGmAmAm | |
| | | | UUGCUACAAUA | AmCmCGUUmGmCUAmC | |
| | | | AGGCCGUCGAA | AAU*AAGmGmCCmGmU | |
| | | | AGAUGUGCCGC | mCmGmAmAmAmGmAmU | |
| | | | AACGCUCUGCC | GUGCmCGmCAAmCGCU | |
| | | | UUCUGGCAUCG | CUmGmCCmUmUmCmUG | |
| | | | UU | GCAUCG*mU*mU | |
| G021477 | 119 | GAUCAUGUCCU | GAUCAUGUCCU | mG*mA*mU*mCmAUGm | chr14: 22547470- |
| | | AACCCUGAUCC | AACCCUGAUCC | UmCCmUAmACCCUmGA | 22547494 |
| | | UC | UCGUUGUAGCU | UCmCUCmGUUGmUmAm | |
| | | | CCCUGAAACCG | GmCUCCCmUmGmAmAm | |
| | | | UUGCUACAAUA | AmCmCGUUmGmCUAmC | |
| | | | AGGCCGUCGAA | AAU*AAGmGmCCmGmU | |
| | | | AGAUGUGCCGC | mCmGmAmAmAmGmAmU | |
| | | | AACGCUCUGCC | GUGCmCGmCAAmCGCU | |
| | | | UUCUGGCAUCG | CUmGmCCmUmUmCmUG | |
| | | | UU | GCAUCG*mU*mU | |
| G021478 | 120 | GGAAAUGAGAU | GGAAAUGAGAU | mG*mG*mA*mAmAUGm | chr14: 22547462- |
| | | CAUGUCCUAAC | CAUGUCCUAAC | AmGAmUCmAUGUCmCU | 22547486 |
| | | CC | CCGUUGUAGCU | AAmCCCmGUUGmUmAm | |
| | | | CCCUGAAACCG | GmCUCCCmUmGmAmAm | |
| | | | UUGCUACAAUA | AmCmCGUUmGmCUAmC | |
| | | | AGGCCGUCGAA | AAU*AAGmGmCCmGmU | |
| | | | AGAUGUGCCGC | mCmGmAmAmAmGmAmU | |
| | | | AACGCUCUGCC | GUGCmCGmCAAmCGCU | |
| | | | UUCUGGCAUCG | CUmGmCCmUmUmCmUG | |
| | | | UU | GCAUCG*mU*mU | |

[0479] Throughout this application, the terms “mA,” “MC”, “mU,” or “mG” may be used to denote a nucleotide that has been modified with 2′—O-Me. Throughout this application, the terms A*, C*, U*, or G* may be used to denote a nucleotide that is linked to the next (e.g., 3′) nucleotide with a phosphorothioate (PS) bond.

[0480] In some embodiments, the TRAC guide RNA comprises a guide sequence selected from SEQ ID NOs: 101-120. In some embodiments, the TRAC guide RNA comprises a guide sequence that is at least 19, 20, 21, 22, 23, or 24 contiguous nucleotides of a sequence selected from SEQ ID NOs: 101-120. In some embodiments, the TRAC guide RNA comprises a guide sequence that is at least 95%, 90%, or 85% identical to a sequence selected from SEQ ID NOs: 101-120. In some embodiments, the TRAC guide RNA comprises a guide sequence that is at least 95% identical to a sequence selected from SEQ ID NOs: 101-120.

[0481] In some embodiments, the TRAC guide RNA comprises a guide sequence that comprises at least 10 contiguous nucleotides±10 nucleotides of a genomic coordinate listed in Table 2. As used herein, at least 10 contiguous nucleotides±10 nucleotides of a genomic coordinate means, for example, at least 10 contiguous nucleotides within the genomic coordinates wherein the genomic coordinates include 10 nucleotides in the 5′ direction and 10 nucleotides in the 3′ direction from the ranges listed in Table 2. For example, a TRAC guide RNA may comprise 10 contiguous nucleotides within the genomic coordinates chosen from: chr14:22547505-22547529; chr14:22547525-22547549; chr14:22547674-22547698; chr14:22550544-22550568; or chr14:22550574-22550598; including the boundary nucleotides of these ranges. As another example, a TRAC guide RNA may comprise 10 contiguous nucleotides within the genomic coordinates chosen from: chr14:22547481-22547505; chr14:22547471-22547495; chr14:22547470-22547494; or chr14:22547462-22547486; including the boundary nucleotides of these ranges. In some embodiments, the TRAC guide RNA comprises a guide sequence that is at least 19, 20, 21, 22, 23, or 24 contiguous nucleotides of a sequence that comprises 10 contiguous nucleotides±10 nucleotides of a genomic coordinate listed in Table 2. In some embodiments, the TRAC guide RNA comprises a guide sequence that is at least 95%, 90%, or 85% identical to a sequence selected from a sequence that is 19, 20, 21, 22, 23, or 24 contiguous nucleotides of a sequence that comprises 10 contiguous nucleotides±10 nucleotides of a genomic coordinate listed in Table 2.

[0482] In some embodiments, the TRAC guide RNA comprises a guide sequence that comprises at least 15 contiguous nucleotides±10 nucleotides of a genomic coordinate listed in Table 2. In some embodiments, the TRAC guide RNA comprises a guide sequence that comprises at least 24 contiguous nucleotides±10 nucleotides of a genomic coordinate listed in Table 2.

[0483] In some embodiments, the TRAC guide RNA comprises SEQ ID NO: 101. In some embodiments, the TRAC guide RNA comprises SEQ ID NO: 102. In some embodiments, the TRAC guide RNA comprises SEQ ID NO: 103. In some embodiments, the TRAC guide RNA comprises SEQ ID NO: 104. In some embodiments, the TRAC guide RNA comprises SEQ ID NO: 105. In some embodiments, the TRAC guide RNA comprises SEQ ID NO: 106. In some embodiments, the TRAC guide RNA comprises SEQ ID NO: 107. In some embodiments, the TRAC guide RNA comprises SEQ ID NO: 108. In some embodiments, the TRAC guide RNA comprises SEQ ID NO: 109. In some embodiments, the TRAC guide RNA comprises SEQ ID NO: 110. In some embodiments, the TRAC guide RNA comprises SEQ ID NO: 111. In some embodiments, the TRAC guide RNA comprises SEQ ID NO: 112. In some embodiments, the TRAC guide RNA comprises SEQ ID NO: 113. In some embodiments, the TRAC guide RNA comprises SEQ ID NO: 114. In some embodiments, the TRAC guide RNA comprises SEQ ID NO: 115. In some embodiments, the TRAC guide RNA comprises SEQ ID NO: 116. In some embodiments, the TRAC guide RNA comprises SEQ ID NO: 117. In some embodiments, the TRAC guide RNA comprises SEQ ID NO: 118. In some embodiments, the TRAC guide RNA comprises SEQ ID NO: 119. In some embodiments, the TRAC guide RNA comprises SEQ ID NO: 120.

[0484] In some embodiments, the TRAC guide RNA comprises a nucleotide chosen from: SEQ ID NOs: 101-103, 107, 111, 117, or 118.

[0485] In some embodiments, the TRAC guide RNA comprises a sequence listed in Table 2. In some embodiments, the TRAC guide RNA comprises a sequence of any one of SEQ ID NOs: 101-120. In some embodiments, the TRAC guide RNA comprises a sequence of any one of SEQ ID NOs: 107, 111, and 117-120. In some embodiments, the TRAC guide RNA comprises a sequence of SEQ ID NO: 107. In some embodiments, the TRAC guide RNA comprises a sequence of SEQ ID NO: 111. In some embodiments, the TRAC guide RNA comprises a sequence of SEQ ID NO: 117. In some embodiments, the TRAC guide RNA comprises a sequence of SEQ ID NO: 118. In some embodiments, the TRAC guide RNA comprises a sequence of SEQ ID NO: 119. In some embodiments, the TRAC guide RNA comprises a sequence of SEQ ID NO: 120. In some embodiments, the TRAC guide RNA comprises a guide sequence comprising a sequence of any one of SEQ ID NOs: 101-120. In some embodiments, the TRAC guide RNA comprises a guide sequence comprising a sequence of any one of SEQ ID NOs: 107, 111, and 117-120. In some embodiments, the TRAC guide RNA comprises a guide sequence comprising a sequence of SEQ ID NO: 107. In some embodiments, the TRAC guide RNA comprises a guide sequence comprising a sequence of SEQ ID NO: 111. In some embodiments, the TRAC guide RNA comprises a guide sequence comprising a sequence of SEQ ID NO: 117. In some embodiments, the TRAC guide RNA comprises a guide sequence comprising a sequence of SEQ ID NO: 118. In some embodiments, the TRAC guide RNA comprises a guide sequence comprising a sequence of SEQ ID NO: 119. In some embodiments, the TRAC guide RNA comprises a guide sequence comprising a sequence of SEQ ID NO: 120. In some embodiments, the TRAC guide RNA comprises a sequence of any one of SEQ ID NOs: 1101-1120. In some embodiments, the TRAC guide RNA comprises a sequence of any one of SEQ ID NOs: 1107, 1111, and 1117-1120. In some embodiments, the TRAC guide RNA comprises a sequence of SEQ ID NO: 1107. In some embodiments, the TRAC guide RNA comprises a sequence of SEQ ID NO: 1111. In some embodiments, the TRAC guide RNA comprises a sequence of SEQ ID NO: 1117. In some embodiments, the TRAC guide RNA comprises a sequence of SEQ ID NO: 1118. In some embodiments, the TRAC guide RNA comprises a sequence of SEQ ID NO: 1119. In some embodiments, the TRAC guide RNA comprises a sequence of SEQ ID NO: 1120. In some embodiments, the TRAC guide RNA comprises a sequence of any one of SEQ ID NOs: 2101-2120, 3003, and 3004. In some embodiments, the TRAC guide RNA comprises a sequence of any one of SEQ ID NOs: 2107, 2111, 2117-2120, 3003, and 3004. In some embodiments, the TRAC guide RNA comprises a sequence of SEQ ID NO: 2107. In some embodiments, the TRAC guide RNA comprises a sequence of SEQ ID NO: 2111. In some embodiments, the TRAC guide RNA comprises a sequence of SEQ ID NO: 2117. In some embodiments, the TRAC guide RNA comprises a sequence of SEQ ID NO: 2118. In some embodiments, the TRAC guide RNA comprises a sequence of SEQ ID NO: 2119. In some embodiments, the TRAC guide RNA comprises a sequence of SEQ ID NO: 2120. In some embodiments, the TRAC guide RNA comprises a sequence of SEQ ID NO: 3003. In some embodiments, the TRAC guide RNA comprises a sequence of SEQ ID NO: 3004.

[0486] In some embodiments, the TRAC guide RNA is a single guide RNA (sgRNA) comprising a sequence of any one of the sgRNA sequences listed in Table 2.

[0487] Additional embodiments of TRAC guide RNAs are provided herein, including e.g., exemplary modifications to the guide RNA. 1. Genetic modifications to TRAC

[0488] In some embodiments, the methods and compositions disclosed herein genetically modify at least one nucleotide of the TRAC gene in a cell. In some embodiments, the genetic modification to TRAC reduces or eliminates the expression of TRAC protein on the surface of the genetically modified cell (or engineered cell). Genetic modifications encompass the population of modifications that results from contact with a genomic editing system (e.g., the population of edits that result from Cas9 and a TRAC guide RNA, or the population of edits that result from BC22 and a TRAC guide RNA).

[0489] In some embodiments, the genetic modification comprises at least one nucleotide within the genomic coordinates chr14:22547505-22551621 or chr14:22547462-22551621. In some embodiments, the genetic modification comprises at least one nucleotide within the genomic coordinates chosen from any of the genomic coordinates listed in Table 2.

[0490] In some embodiments, the genetic modification comprises at least one nucleotide within the genomic coordinates chosen from: chr14:22547505-22547529; chr14:22547525-22547549; chr14:22547674-22547698; chr14:22550544-22550568; or chr14:22550574-22550598. In some embodiments, the genetic modification comprises at least 5 contiguous nucleotides within the genomic coordinates chosen from: chr14:22547505-22547529; chr14:22547525-22547549; chr14:22547674-22547698; chr14:22550544-22550568; or chr14:22550574-22550598. In some embodiments, the genetic modification comprises at least 10 contiguous nucleotides within the genomic coordinates chosen from: chr14:22547505-22547529; chr14:22547525-22547549; chr14:22547674-22547698; chr14:22550544-22550568; or chr14:22550574-22550598. In some embodiments, the genetic modification comprises at least 10 contiguous nucleotides within the genomic coordinates chosen from: chr14:22547481-22547505; chr14:22547471-22547495; chr14:22547470-22547494; or chr14:22547462-22547486.

[0491] In some embodiments, the genetic modification comprises at least one indel, at least one C to T substitution, or at least one A to G substitution within the genomic coordinates chosen from: chr14:22547505-22547529; chr14:22547525-22547549; chr14:22547674-22547698; chr14:22550544-22550568; or chr14:22550574-22550598. In some embodiments, the genetic modification comprises at least one indel, at least one C to T substitution, or at least one A to G substitution within the genomic coordinates chosen from: chr14:22547481-22547505; chr14:22547471-22547495; chr14:22547470-22547494; or chr14:22547462-22547486.

[0492] In some embodiments, the modification to TRAC comprises any one or more of an insertion, deletion, substitution, or deamination of at least one nucleotide in a target sequence. In some embodiments, the modification to TRAC comprises an insertion of 1, 2, 3, 4 or 5 or more nucleotides in a target sequence. In some embodiments, the modification to TRAC comprises a deletion of 1, 2, 3, 4 or 5 or more nucleotides in a target sequence. In other embodiments, the modification to TRAC comprises an insertion of 1, 2, 3, 4, 5, 6, 7, 8, 9, 10, 15, 20 or 25 or more nucleotides in a target sequence. In other embodiments, the modification to TRAC comprises a deletion of 1, 2, 3, 4, 5, 6, 7, 8, 9, 10, 15, 20 or 25 or more nucleotides in a target sequence. In some embodiments, the modification to TRAC comprises an indel, which is generally defined in the art as an insertion or deletion of less than 1000 base pairs (bp). In some embodiments, the modification to TRAC comprises an indel which results in a frameshift mutation in a target sequence. In some embodiments, the modification to TRAC comprises a substitution of 1, 2, 3, 4, 5, 6, 7, 8, 9, 10, 15, 20 or 25 or more nucleotides in a target sequence. In some embodiments, the modification to TRAC comprises one or more of an insertion, deletion, or substitution of nucleotides resulting from the incorporation of a template nucleic acid. In some embodiments, the modification to TRAC comprises an insertion of a donor nucleic acid in a target sequence. In some embodiments, the modification to TRAC is not transient.

[0493] In some embodiments, the methods and compositions disclosed herein modify the TRAC gene in a cell using an RNA-guided DNA binding agent (e.g., a Cas enzyme). In some embodiments, the RNA-guided DNA binding agent is Cas9. In some embodiments, the RNA-guided DNA binding agent cuts within the TRAC gene, wherein the TRAC guide RNA targets a TRAC genomic target sequence comprising at least 10 contiguous nucleotides chr14:22547505-22551621 or chr14:22547462-22551621.

[0494] In some embodiments, the genetic modification to TRAC results in utilization of an out-of-frame stop codon. In some embodiments, the genetic modification to TRAC results in exon skipping during splicing. In some embodiments, the genetic modification to TRAC results in reduced TRAC protein expression by the cell. In some embodiments, the modification to the TRAC gene results in reduced or eliminated TRAC protein expression on the surface of the cell.

[0495] In some embodiments, TRAC expression on the surface of a cell is reduced as a result of the genetic modification to TRAC. In some embodiments, TRAC expression on the surface of a cell is absent as a result of the genetic modification to TRAC.

### 2. Efficacy of TRAC Guide RNAs

[0496] In some embodiments, the efficacy of a TRAC gRNA is determined when delivered or expressed together with other components forming an RNP. In some embodiments, the TRAC gRNA is expressed together with an RNA-guided DNA binding agent, such as a Cas protein, e.g. Cas9. In some embodiments, the TRAC gRNA is delivered to or expressed in a cell line that already stably expresses an RNA-guided DNA nuclease, such as a Cas nuclease or nickase, e.g. Cas9 nuclease or nickase. In some embodiments the TRAC gRNA is delivered to a cell as part of a RNP. In some embodiments, the TRAC gRNA is delivered to a cell along with a mRNA encoding an RNA-guided DNA nuclease, such as a Cas nuclease or nickase, e.g. Cas9 nuclease or nickase.

[0497] As described herein, use of an RNA-guided DNA nuclease and a TRAC guide RNA disclosed herein can lead to double-stranded breaks in the DNA which can produce errors in the form of insertion/deletion (indel) mutations upon repair by cellular machinery. Many mutations due to indels alter the reading frame or introduce premature stop codons and, therefore, produce a non-functional protein.

[0498] In some embodiments, the efficacy of particular TRAC gRNAs is determined based on in vitro models. In some embodiments, the in vitro model is HEK293 cells stably expressing Cas9 (HEK293_Cas9). In some embodiments the in vitro model is a peripheral blood mononuclear cell (PBMC). In some embodiments, the in vitro model is a T cell, such as primary human T cells. With respect to using primary cells, commercially available primary cells can be used to provide greater consistency between experiments. In some embodiments, the number of off-target sites at which a deletion or insertion occurs in an in vitro model (e.g., in T cell) is determined, e.g., by analyzing genomic DNA from transfected cells in vitro with Cas9 mRNA and the guide RNA. In some embodiments, such a determination comprises analyzing genomic DNA from the cells transfected in vitro with Cas9 mRNA, the TRAC guide RNA, and a donor oligonucleotide. Exemplary procedures for such determinations are provided in the working examples in which HEK293 cells, PBMCs, and human CD3+ T cells are used.

[0499] In some embodiments, the efficacy of particular TRAC gRNAs is determined across multiple in vitro cell models for a gRNA selection process. In some embodiments, a cell line comparison of data with selected TRAC gRNAs is performed. In some embodiments, cross screening in multiple cell models is performed.

[0500] In some embodiments, the efficacy of a TRAC guide RNA is measured by percent indels of TRAC. In some embodiments, the percent editing of TRAC is compared to the percent indels necessary to achieve knockdown of the TRAC protein products

[0501] In some embodiments, the efficacy of a guide RNA is measured by reduced or eliminated expression of a component of the T-cell receptor (TCR). In embodiments, the reduced or eliminated expression of a component of the T-cell receptor (TCR) includes reduced or eliminated expression of TRAC. In some embodiments, said reduced or eliminated expression of said component of the TCR is the result of introduction of one or more, e.g., one or two, e.g., one TRAC gRNA molecule described herein to said component of the TCR into said cell. In embodiments, said reduced or eliminated expression of a component of the TCR is as measured by flow cytometry, e.g., as described herein.

[0502] In some embodiments, the efficacy of a TRAC guide RNA is measured by the number and/or frequency of indels at off-target sequences within the genome of the target cell type, such as a T cell. In some embodiments, efficacious guide RNAs are provided which produce indels at off target sites at very low frequencies (e.g., <5%) in a cell population and/or relative to the frequency of indel creation at the target site. Thus, the disclosure provides for guide RNAs which do not exhibit off-target indel formation in the target cell type (e.g., a T cell), or which produce a frequency of off-target indel formation of <5% in a cell population and/or relative to the frequency of indel creation at the target site. In some embodiments, the disclosure provides guide RNAs which do not exhibit any off target indel formation in the target cell type (e.g., T cell). In some embodiments, guide RNAs are provided which produce indels at less than 5 off-target sites, e.g., as evaluated by one or more methods described herein. In some embodiments, guide RNAs are provided which produce indels at less than or equal to 4, 3, 2, or 1 off-target site(s) e.g., as evaluated by one or more methods described herein. In some embodiments, the off-target site(s) does not occur in a protein coding region in the target cell (e.g., hepatocyte) genome.

[0503] In some embodiments, detecting gene editing events, such as the formation of insertion/deletion (“indel”) mutations and homology directed repair (HDR) events in target DNA utilize linear amplification with a tagged primer and isolating the tagged amplification products (herein after referred to as “LAM-PCR,” or “Linear Amplification (LA)” method).

[0504] In some embodiments, the efficacy of a guide RNA is measured by the levels of functional protein complexes comprising the expressed protein product of the gene. In some embodiments, the efficacy of a guide RNA is measured by flow cytometric analysis of TCR expression by which the live population of edited cells is analyzed for loss of the TCR.

### E. TRBC Guide RNAs

[0505] The methods and compositions provided herein disclose TRBC guide RNAs useful for reducing the expression of TRBC1 protein or TRBC2 protein, or both, on the surface of a cell. In some embodiments, such guide RNAs direct an RNA-guided DNA binding agent to a TRBC1 genomic target sequence and may be referred herein as “TRBC1 guide RNAs.” In some embodiments, the TRBC1 guide RNA directs an RNA-guided DNA binding agent to a human TRBC1 genomic target sequence. In some embodiments, such guide RNAs direct an RNA-guided DNA binding agent to a TRBC2 genomic target sequence and may be referred herein as “TRBC2 guide RNAs.” In some embodiments, the TRBC2 guide RNA directs an RNA-guided DNA binding agent to a human TRBC2 genomic target sequence. In some embodiments, such guide RNAs direct an RNA-guided DNA binding agent to a TRBC1 genomic target sequence and to a TRBC2 genomic target sequence and may be referred herein as “TRBC1/2 guide RNAs.” In some embodiments, the TRBC1/2 guide RNA directs an RNA-guided DNA binding agent to a human TRBC1 genomic target sequence and to a human TRBC2 genomic target sequence. In some embodiments, a TRBC1 guide RNA may contain a mismatch to a TRBC2 genomic target sequence, but the TRBC1 guide RNA may still direct an RNA-guided DNA binding agent to a TRBC2 genomic target sequence. In some embodiments, a TRBC2 guide RNA may contain a mismatch to a TRBC1 genomic target sequence, but the TRBC2 guide RNA may still direct an RNA-guided DNA binding agent to a TRBC1 genomic target sequence.

[0506] In some embodiments, the methods and compositions disclosed herein comprise a TRBC1 guide RNA comprising a guide sequence that targets a TRBC1 genomic target sequence comprising at least 10 nucleotides within the genomic coordinates chr7:142791862-142793149. In some embodiments, the method and composition disclosed herein comprise a TRBC1 guide RNA comprising a guide sequence that targets a TRBC1 genomic target sequence comprising at least one nucleotide within the genomic coordinates chr7:142791862-142793149.

[0507] In some embodiments, the methods and compositions disclosed herein comprise a TRBC2 guide RNA comprising a guide sequence that targets a TRBC2 genomic target sequence comprising at least 10 nucleotides within the genomic coordinates chr7:142801104-142802543. In some embodiments, the method and composition disclosed herein comprise a TRBC2 guide RNA comprising a guide sequence that targets a TRBC2 genomic target sequence comprising at least one nucleotide within the genomic coordinates chr7:142801104-142802543.

[0508] In some embodiments, the methods and compositions disclosed herein comprise a TRBC1 guide RNA comprising a guide sequence that directs an RNA-guided DNA binding agent to induce a double stranded break (DSB) or a single-stranded break (SSB) in a TRBC1 gene, wherein the TRBC1 guide RNA targets and TRBC1 genomic target sequence comprising at least 10 contiguous nucleotides within the genomic coordinates chr7:142791862-142793149. In some embodiments, the methods and compositions disclosed herein comprise a TRBC1 guide RNA comprising a guide sequence that directs an RNA-guided DNA binding agent to induce a double stranded break (DSB) or a single-stranded break (SSB) in a TRBC1 gene, wherein the TRBC1 guide RNA targets a TRBC1 genomic target sequence comprising at least one nucleotide within the genomic coordinates chr7:142791862-142793149.

[0509] In some embodiments, the methods and compositions disclosed herein comprise a TRBC2 guide RNA comprising a guide sequence that directs an RNA-guided DNA binding agent to induce a double stranded break (DSB) or a single-stranded break (SSB) in a TRBC2 gene, wherein the TRBC2 guide RNA targets and TRBC2 genomic target sequence comprising at least 10 contiguous nucleotides within the genomic coordinates chr7:142801104-142802543. In some embodiments, the methods and compositions disclosed herein comprise a TRBC2 guide RNA comprising a guide sequence that directs an RNA-guided DNA binding agent to induce a double stranded break (DSB) or a single-stranded break (SSB) in a TRBC2 gene, wherein the TRBC2 guide RNA targets a TRBC2 genomic target sequence comprising at least one nucleotide within the genomic coordinates chr7:142801104-142802543.

[0510] In some embodiments, the methods and compositions disclose a TRBC1 guide RNA that directs an RNA-guided DNA binding agent to induce a double stranded break (DSB) or a single-stranded break (SSB) in a TRBC1 or TRBC2 genomic target sequence. In some embodiments, the methods and compositions disclose a TRBC1 or TRBC2 guide RNA that directs an RNA-guided DNA binding agent to make a cut in a TRBC1 or TRBC2 genomic target sequence. In embodiments wherein the RNA-guided DNA cutting agent is Cas9, the cut or “cut site” occurs at the third base from the protospacer adjacent motif (PAM) sequence.

[0511] In some embodiments, a composition is provided comprising a TRBC guide RNA described herein and an RNA-guided DNA binding agent or a nucleic acid encoding an RNA-guided DNA binding agent.

[0512] In some embodiments, a composition is provided comprising a TRBC1 single-guide RNA (sgRNA) comprising a guide sequence that targets a genomic target comprising at least 10 contiguous nucleotides within the genomic coordinates chr7:142791862-142793149. In some embodiments, a composition is provided comprising a TRBC1 sgRNA described herein and an RNA-guided DNA binding agent or a nucleic acid encoding an RNA-guided DNA binding agent.

[0513] In some embodiments, a composition is provided comprising a TRBC2 single-guide RNA (sgRNA) comprising a guide sequence that targets a genomic target comprising at least 10 contiguous nucleotides within the genomic coordinates chr7:142801104-142802543. In some embodiments, a composition is provided comprising a TRBC2 sgRNA described herein and an RNA-guided DNA binding agent or a nucleic acid encoding an RNA-guided DNA binding agent.

[0514] In some embodiments, a composition is provided comprising a TRBC1 dual-guide RNA (dgRNA) comprising a guide sequence that targets a genomic target comprising at least 10 contiguous nucleotides within the genomic coordinates chr7:142791862-142793149. In some embodiments, a composition is provided comprising a TRBC1 dgRNA described herein and an RNA-guided DNA binding agent or a nucleic acid encoding an RNA-guided DNA binding agent.

[0515] In some embodiments, a composition is provided comprising a TRBC2 dual-guide RNA (dgRNA) comprising a guide sequence that targets a genomic target comprising at least 10 contiguous nucleotides within the genomic coordinates chr7:142801104-142802543. In some embodiments, a composition is provided comprising a TRBC2 dgRNA described herein and an RNA-guided DNA binding agent or a nucleic acid encoding an RNA-guided DNA binding agent.

[0516] In some embodiments, the TRBC gRNA comprises a guide sequence selected from any one of SEQ ID NOs: 201-265. Exemplary TRBC guide sequences are shown below in Table 3 (SEQ ID NOs: 201-265) with corresponding guide RNA sequences 201-265.

TABLE 3
Exemplary TRBC1 and TRBC2 guide sequences.

| | | | | | Exemplary | |
|---|---|---|---|---|---|---|
| | | | | | Guide RNA | |
| | SEQ ID | | | | Modified | |
| | NO to | | | Exemplary Guide RNA | Sequence | Genomic |
| Guide | the Guide | | Guide | Full Sequence (SEQ | (SEQ ID NOs: | Coordinates |
| ID | Sequence | Target | Sequence | ID NOs: 1201-1265) | 2201-2265) | (hg38) |
| G028952 | 201 | TRBC1 | CACGGAC | CACGGACCCGCAGCCCCUC | mC*mA*mC* | chr7: |
| | | | CCGCAGC | AAGGAGUUGUAGCUCCCUG | mGmGACmCm | 142791862- |
| | | | CCCUCAA | AAACCGUUGCUACAAUAAG | CGmCAmGCC | 142791886 |
| | | | GGA | GCCGUCGAAAGAUGUGCCG | CCmUCAAmG | |
| | | | | CAACGCUCUGCCUUCUGGC | GAmGUUGmU | |
| | | | | AUCGUU | mAmGmCUCC | |
| | | | | | CmUmGmAmA | |
| | | | | | mAmCmCGUU | |
| | | | | | mGmCUAmCA | |
| | | | | | AU*AAGmGm | |
| | | | | | CCmGmUmCm | |
| | | | | | GmAmAmAmG | |
| | | | | | mAmUGUGCm | |
| | | | | | CGmCAAmCG | |
| | | | | | CUCUmGmCC | |
| | | | | | mUmUmCmUG | |
| | | | | | GCAUCG*mU | |
| | | | | | *mU | |
| G028953 | 202 | TRBC1 | ACGGACC | ACGGACCCGCAGCCCCUCA | mA*mC*mG* | chr7: |
| | | | CGCAGCC | AGGAGGUUGUAGCUCCCUG | mGmACCmCm | 142791863- |
| | | | CCUCAAG | AAACCGUUGCUACAAUAAG | GCmAGmCCC | 142791887 |
| | | | GAG | GCCGUCGAAAGAUGUGCCG | CUmCAAGmG | |
| | | | | CAACGCUCUGCCUUCUGGC | AGmGUUGmU | |
| | | | | AUCGUU | mAmGmCUCC | |
| | | | | | CmUmGmAmA | |
| | | | | | mAmCmCGUU | |
| | | | | | mGmCUAmCA | |
| | | | | | AU*AAGmGm | |
| | | | | | CCmGmUmCm | |
| | | | | | GmAmAmAmG | |
| | | | | | mAmUGUGCm | |
| | | | | | CGmCAAmCG | |
| | | | | | CUCUmGmCC | |
| | | | | | mUmUmCmUG | |
| | | | | | GCAUCG*mU | |
| | | | | | *mU | |
| G028968 | 203 | TRBC1 | GACGAGU | GACGAGUGGACCCAGGAUA | mG*mA*mC* | chr7: |
| | | | GGACCCA | GGGCCGUUGUAGCUCCCUG | mGmAGUmGm | 142792010- |
| | | | GGAUAGG | AAACCGUUGCUACAAUAAG | GAmCCmCAG | 142792034 |
| | | | GCC | GCCGUCGAAAGAUGUGCCG | GAmUAGGmG | |
| | | | | CAACGCUCUGCCUUCUGGC | CCmGUUGmU | |
| | | | | AUCGUU | mAmGmCUCC | |
| | | | | | CmUmGmAmA | |
| | | | | | mAmCmCGUU | |
| | | | | | mGmCUAmCA | |
| | | | | | AU*AAGmGm | |
| | | | | | CCmGmUmCm | |
| | | | | | GmAmAmAmG | |
| | | | | | mAmUGUGCm | |
| | | | | | CGmCAAmCG | |
| | | | | | CUCUmGmCC | |
| | | | | | mUmUmCmUG | |
| | | | | | GCAUCG*mU | |
| | | | | | *mU | |
| G028969 | 204 | TRBC1 | UGGACCC | UGGACCCAGGAUAGGGCCA | mU*mG*mG* | chr7: |
| | | | AGGAUAG | AACCCGUUGUAGCUCCCUG | mAmCCCmAm | 142792016- |
| | | | GGCCAAA | AAACCGUUGCUACAAUAAG | GGmAUmAGG | 142792040 |
| | | | CCC | GCCGUCGAAAGAUGUGCCG | GCmCAAAmC | |
| | | | | CAACGCUCUGCCUUCUGGC | CCmGUUGmU | |
| | | | | AUCGUU | mAmGmCUCC | |
| | | | | | CmUmGmAmA | |
| | | | | | mAmCmCGUU | |
| | | | | | mGmCUAmCA | |
| | | | | | AU*AAGmGm | |
| | | | | | CCmGmUmCm | |
| | | | | | GmAmAmAmG | |
| | | | | | mAmUGUGCm | |
| | | | | | CGmCAAmCG | |
| | | | | | CUCUmGmCC | |
| | | | | | mUmUmCmUG | |
| | | | | | GCAUCG*mU | |
| | | | | | *mU | |
| G028970 | 205 | TRBC1 | GGACCCA | GGACCCAGGAUAGGGCCAA | mG*mG*mA* | chr7: |
| | | | GGAUAGG | ACCCGGUUGUAGCUCCCUG | mCmCCAmGm | 142792017- |
| | | | GCCAAAC | AAACCGUUGCUACAAUAAG | GAmUAmGGG | 142792041 |
| | | | CCG | GCCGUCGAAAGAUGUGCCG | CCmAAACmC | |
| | | | | CAACGCUCUGCCUUCUGGC | CGmGUUGmU | |
| | | | | AUCGUU | mAmGmCUCC | |
| | | | | | CmUmGmAmA | |
| | | | | | mAmCmCGUU | |
| | | | | | mGmCUAmCA | |
| | | | | | AU*AAGmGm | |
| | | | | | CCmGmUmCm | |
| | | | | | GmAmAmAmG | |
| | | | | | mAmUGUGCm | |
| | | | | | CGmCAAmCG | |
| | | | | | CUCUmGmCC | |
| | | | | | mUmUmCmUG | |
| | | | | | GCAUCG*mU | |
| | | | | | *mU | |
| G028977 | 206 | TRBC1 | CCCUGCU | CCCUGCUUUCUUUCAGACU | mC*mC*mC* | chr7: |
| | | | UUCUUUC | GUGGCGUUGUAGCUCCCUG | mUmGCUmUm | 142792505- |
| | | | AGACUGU | AAACCGUUGCUACAAUAAG | UCmUUmUCA | 142792529 |
| | | | GGC | GCCGUCGAAAGAUGUGCCG | GAmCUGUmG | |
| | | | | CAACGCUCUGCCUUCUGGC | GCmGUUGmU | |
| | | | | AUCGUU | mAmGmCUCC | |
| | | | | | CmUmGmAmA | |
| | | | | | mAmCmCGUU | |
| | | | | | mGmCUAmCA | |
| | | | | | AU*AAGmGm | |
| | | | | | CCmGmUmCm | |
| | | | | | GmAmAmAmG | |
| | | | | | mAmUGUGCm | |
| | | | | | CGmCAAmCG | |
| | | | | | CUCUmGmCC | |
| | | | | | mUmUmCmUG | |
| | | | | | GCAUCG*mU | |
| | | | | | *mU | |
| G028978 | 207 | TRBC1 | GACUGUG | GACUGUGGCUUUACCUCGG | mG*mA*mC* | chr7: |
| | | | GCUUUAC | GUAAGGUUGUAGCUCCCUG | mUmGUGmGm | 142792520- |
| | | | CUCGGGU | AAACCGUUGCUACAAUAAG | CUmUUmACC | 142792544 |
| | | | AAG | GCCGUCGAAAGAUGUGCCG | UCmGGGUmA | |
| | | | | CAACGCUCUGCCUUCUGGC | AGmGUUGmU | |
| | | | | AUCGUU | mAmGmCUCC | |
| | | | | | CmUmGmAmA | |
| | | | | | mAmCmCGUU | |
| | | | | | mGmCUAmCA | |
| | | | | | AU*AAGmGm | |
| | | | | | CCmGmUmCm | |
| | | | | | GmAmAmAmG | |
| | | | | | mAmUGUGCm | |
| | | | | | CGmCAAmCG | |
| | | | | | CUCUmGmCC | |
| | | | | | mUmUmCmUG | |
| | | | | | GCAUCG*mU | |
| | | | | | *mU | |
| G028979 | 208 | TRBC1 | ACUGUGG | ACUGUGGCUUUACCUCGGG | mA*mC*mU* | chr7: |
| | | | CUUUACC | UAAGUGUUGUAGCUCCCUG | mGmUGGmCm | 142792521- |
| | | | UCGGGUA | AAACCGUUGCUACAAUAAG | UUmUAmCCU | 142792545 |
| | | | AGU | GCCGUCGAAAGAUGUGCCG | CGmGGUAmA | |
| | | | | CAACGCUCUGCCUUCUGGC | GUmGUUGmU | |
| | | | | AUCGUU | mAmGmCUCC | |
| | | | | | CmUmGmAmA | |
| | | | | | mAmCmCGUU | |
| | | | | | mGmCUAmCA | |
| | | | | | AU*AAGmGm | |
| | | | | | CCmGmUmCm | |
| | | | | | GmAmAmAmG | |
| | | | | | mAmUGUGCm | |
| | | | | | CGmCAAmCG | |
| | | | | | CUCUmGmCC | |
| | | | | | mUmUmCmUG | |
| | | | | | GCAUCG*mU | |
| | | | | | *mU | |
| G028980 | 209 | TRBC1 | UGGCUUU | UGGCUUUACCUCGGGUAAG | mU*mG*mG* | chr7: |
| | | | ACCUCGG | UAAGCGUUGUAGCUCCCUG | mCmUUUmAm | 142792525- |
| | | | GUAAGUA | AAACCGUUGCUACAAUAAG | CCmUCmGGG | 142792549 |
| | | | AGC | GCCGUCGAAAGAUGUGCCG | UAmAGUAmA | |
| | | | | CAACGCUCUGCCUUCUGGC | GCmGUUGmU | |
| | | | | AUCGUU | mAmGmCUCC | |
| | | | | | CmUmGmAmA | |
| | | | | | mAmCmCGUU | |
| | | | | | mGmCUAmCA | |
| | | | | | AU*AAGmGm | |
| | | | | | CCmGmUmCm | |
| | | | | | GmAmAmAmG | |
| | | | | | mAmUGUGCm | |
| | | | | | CGmCAAmCG | |
| | | | | | CUCUmGmCC | |
| | | | | | mUmUmCmUG | |
| | | | | | GCAUCG*mU | |
| | | | | | *mU | |
| G028981 | 210 | TRBC1 | UACCUCG | UACCUCGGGUAAGUAAGCC | mU*mA*mC* | chr7: |
| | | | GGUAAGU | CUUCCGUUGUAGCUCCCUG | mCmUCGmGm | 142792531- |
| | | | AAGCCCU | AAACCGUUGCUACAAUAAG | GUmAAmGUA | 142792555 |
| | | | UCC | GCCGUCGAAAGAUGUGCCG | AGmCCCUmU | |
| | | | | CAACGCUCUGCCUUCUGGC | CCmGUUGmU | |
| | | | | AUCGUU | mAmGmCUCC | |
| | | | | | CmUmGmAmA | |
| | | | | | mAmCmCGUU | |
| | | | | | mGmCUAmCA | |
| | | | | | AU*AAGmGm | |
| | | | | | CCmGmUmCm | |
| | | | | | GmAmAmAmG | |
| | | | | | mAmUGUGCm | |
| | | | | | CGmCAAmCG | |
| | | | | | CUCUmGmCC | |
| | | | | | mUmUmCmUG | |
| | | | | | GCAUCG*mU | |
| | | | | | *mU | |
| G028982 | 211 | TRBC1 | AGGAAGG | AGGAAGGGCUUACUUACCC | mA*mG*mG* | chr7: |
| | | | GCUUACU | GAGGUGUUGUAGCUCCCUG | mAmAGGmGm | 142792532- |
| | | | UACCCGA | AAACCGUUGCUACAAUAAG | CUmUAmCUU | 142792556 |
| | | | GGU | GCCGUCGAAAGAUGUGCCG | ACmCCGAmG | |
| | | | | CAACGCUCUGCCUUCUGGC | GUmGUUGmU | |
| | | | | AUCGUU | mAmGmCUCC | |
| | | | | | CmUmGmAmA | |
| | | | | | mAmCmCGUU | |
| | | | | | mGmCUAmCA | |
| | | | | | AU*AAGmGm | |
| | | | | | CCmGmUmCm | |
| | | | | | GmAmAmAmG | |
| | | | | | mAmUGUGCm | |
| | | | | | CGmCAAmCG | |
| | | | | | CUCUmGmCC | |
| | | | | | mUmUmCmUG | |
| | | | | | GCAUCG*mU | |
| | | | | | *mU | |
| G028983 | 212 | TRBC1 | CGGGUAA | CGGGUAAGUAAGCCCUUCC | mC*mG*mG* | chr7: |
| | | | GUAAGCC | UUUUCGUUGUAGCUCCCUG | mGmUAAmGm | 142792536- |
| | | | CUUCCUU | AAACCGUUGCUACAAUAAG | UAmAGmCCC | 142792560 |
| | | | UUC | GCCGUCGAAAGAUGUGCCG | UUmCCUUmU | |
| | | | | CAACGCUCUGCCUUCUGGC | UCmGUUGmU | |
| | | | | AUCGUU | mAmGmCUCC | |
| | | | | | CmUmGmAmA | |
| | | | | | mAmCmCGUU | |
| | | | | | mGmCUAmCA | |
| | | | | | AU*AAGmGm | |
| | | | | | CCmGmUmCm | |
| | | | | | GmAmAmAmG | |
| | | | | | mAmUGUGCm | |
| | | | | | CGmCAAmCG | |
| | | | | | CUCUmGmCC | |
| | | | | | mUmUmCmUG | |
| | | | | | GCAUCG*mU | |
| | | | | | *mU | |
| G028984 | 213 | TRBC1 | GGGUAAG | GGGUAAGUAAGCCCUUCCU | mG*mG*mG* | chr7: |
| | | | UAAGCCC | UUUCCGUUGUAGCUCCCUG | mUmAAGmUm | 142792537- |
| | | | UUCCUUU | AAACCGUUGCUACAAUAAG | AAmGCmCCU | 142792561 |
| | | | UCC | GCCGUCGAAAGAUGUGCCG | UCmCUUUmU | |
| | | | | CAACGCUCUGCCUUCUGGC | CCmGUUGmU | |
| | | | | AUCGUU | mAmGmCUCC | |
| | | | | | CmUmGmAmA | |
| | | | | | mAmCmCGUU | |
| | | | | | mGmCUAmCA | |
| | | | | | AU*AAGmGm | |
| | | | | | CCmGmUmCm | |
| | | | | | GmAmAmAmG | |
| | | | | | mAmUGUGCm | |
| | | | | | CGmCAAmCG | |
| | | | | | CUCUmGmCC | |
| | | | | | mUmUmCmUG | |
| | | | | | GCAUCG*mU | |
| | | | | | *mU | |
| G028985 | 214 | TRBC1 | UGCCAAC | UGCCAACAGUGUCCUACCA | mU*mG*mC* | chr7: |
| | | | AGUGUCC | GCAAGGUUGUAGCUCCCUG | mCmAACmAm | 142792682- |
| | | | UACCAGC | AAACCGUUGCUACAAUAAG | GUmGUmCCU | 142792706 |
| | | | AAG | GCCGUCGAAAGAUGUGCCG | ACmCAGCmA | |
| | | | | CAACGCUCUGCCUUCUGGC | AGmGUUGmU | |
| | | | | AUCGUU | mAmGmCUCC | |
| | | | | | CmUmGmAmA | |
| | | | | | mAmCmCGUU | |
| | | | | | mGmCUAmCA | |
| | | | | | AU*AAGmGm | |
| | | | | | CCmGmUmCm | |
| | | | | | GmAmAmAmG | |
| | | | | | mAmUGUGCm | |
| | | | | | CGmCAAmCG | |
| | | | | | CUCUmGmCC | |
| | | | | | mUmUmCmUG | |
| | | | | | GCAUCG*mU | |
| | | | | | *mU | |
| G028986 | 215 | TRBC1 | GUGUCCU | GUGUCCUACCAGCAAGGGG | mG*mU*mG* | chr7: |
| | | | ACCAGCA | UCCUGGUUGUAGCUCCCUG | mUmCCUmAm | 142792690- |
| | | | AGGGGUC | AAACCGUUGCUACAAUAAG | CCmAGmCAA | 142792714 |
| | | | CUG | GCCGUCGAAAGAUGUGCCG | GGmGGUCmC | |
| | | | | CAACGCUCUGCCUUCUGGC | UGmGUUGmU | |
| | | | | AUCGUU | mAmGmCUCC | |
| | | | | | CmUmGmAmA | |
| | | | | | mAmCmCGUU | |
| | | | | | mGmCUAmCA | |
| | | | | | AU*AAGmGm | |
| | | | | | CCmGmUmCm | |
| | | | | | GmAmAmAmG | |
| | | | | | mAmUGUGCm | |
| | | | | | CGmCAAmCG | |
| | | | | | CUCUmGmCC | |
| | | | | | mUmUmCmUG | |
| | | | | | GCAUCG*mU | |
| | | | | | *mU | |
| G028987 | 216 | TRBC1 | UCCUACC | UCCUACCAGCAAGGGGUCC | mU*mC*mC* | chr7: |
| | | | AGCAAGG | UGUCUGUUGUAGCUCCCUG | mUmACCmAm | 142792693- |
| | | | GGUCCUG | AAACCGUUGCUACAAUAAG | GCmAAmGGG | 142792717 |
| | | | UCU | GCCGUCGAAAGAUGUGCCG | GUmCCUGmU | |
| | | | | CAACGCUCUGCCUUCUGGC | CUmGUUGmU | |
| | | | | AUCGUU | mAmGmCUCC | |
| | | | | | CmUmGmAmA | |
| | | | | | mAmCmCGUU | |
| | | | | | mGmCUAmCA | |
| | | | | | AU*AAGmGm | |
| | | | | | CCmGmUmCm | |
| | | | | | GmAmAmAmG | |
| | | | | | mAmUGUGCm | |
| | | | | | CGmCAAmCG | |
| | | | | | CUCUmGmCC | |
| | | | | | mUmUmCmUG | |
| | | | | | GCAUCG*mU | |
| | | | | | *mU | |
| G028989 | 217 | TRBC1 | ACCAUGG | ACCAUGGCCAUCAACACAA | mA*mC*mC* | chr7: |
| | | | CCAUCAA | GGGCGGUUGUAGCUCCCUG | mAmUGGmCm | 142792776- |
| | | | CACAAGG | AAACCGUUGCUACAAUAAG | CAmUCmAAC | 142792800 |
| | | | GCG | GCCGUCGAAAGAUGUGCCG | ACmAAGGmG | |
| | | | | CAACGCUCUGCCUUCUGGC | CGmGUUGmU | |
| | | | | AUCGUU | mAmGmCUCC | |
| | | | | | CmUmGmAmA | |
| | | | | | mAmCmCGUU | |
| | | | | | mGmCUAmCA | |
| | | | | | AU*AAGmGm | |
| | | | | | CCmGmUmCm | |
| | | | | | GmAmAmAmG | |
| | | | | | mAmUGUGCm | |
| | | | | | CGmCAAmCG | |
| | | | | | CUCUmGmCC | |
| | | | | | mUmUmCmUG | |
| | | | | | GCAUCG*mU | |
| | | | | | *mU | |
| G028990 | 218 | TRBC1 | CCAUGGU | CCAUGGUAAGCAGGAGGGC | mC*mC*mA* | chr7: |
| | | | AAGCAGG | AGGAUGUUGUAGCUCCCUG | mUmGGUmAm | 142792793- |
| | | | AGGGCAG | AAACCGUUGCUACAAUAAG | AGmCAmGGA | 142792817 |
| | | | GAU | GCCGUCGAAAGAUGUGCCG | GGmGCAGmG | |
| | | | | CAACGCUCUGCCUUCUGGC | AUmGUUGmU | |
| | | | | AUCGUU | mAmGmCUCC | |
| | | | | | CmUmGmAmA | |
| | | | | | mAmCmCGUU | |
| | | | | | mGmCUAmCA | |
| | | | | | AU*AAGmGm | |
| | | | | | CCmGmUmCm | |
| | | | | | GmAmAmAmG | |
| | | | | | mAmUGUGCm | |
| | | | | | CGmCAAmCG | |
| | | | | | CUCUmGmCC | |
| | | | | | mUmUmCmUG | |
| | | | | | GCAUCG*mU | |
| | | | | | *mU | |
| G028991 | 219 | TRBC1 | GGUCAAG | GGUCAAGAGAAAGGAUUUC | mG*mG*mU* | chr7: |
| | | | AGAAAGG | UGAAGGUUGUAGCUCCCUG | mCmAAGmAm | 142793119- |
| | | | AUUUCUG | AAACCGUUGCUACAAUAAG | GAmAAmGGA | 142793143 |
| | | | AAG | GCCGUCGAAAGAUGUGCCG | UUmUCUGmA | |
| | | | | CAACGCUCUGCCUUCUGGC | AGmGUUGmU | |
| | | | | AUCGUU | mAmGmCUCC | |
| | | | | | CmUmGmAmA | |
| | | | | | mAmCmCGUU | |
| | | | | | mGmCUAmCA | |
| | | | | | AU*AAGmGm | |
| | | | | | CCmGmUmCm | |
| | | | | | GmAmAmAmG | |
| | | | | | mAmUGUGCm | |
| | | | | | CGmCAAmCG | |
| | | | | | CUCUmGmCC | |
| | | | | | mUmUmCmUG | |
| | | | | | GCAUCG*mU | |
| | | | | | *mU | |
| G028992 | 220 | TRBC1 | GUCAAGA | GUCAAGAGAAAGGAUUUCU | mG*mU*mC* | chr7: |
| | | | GAAAGGA | GAAGGGUUGUAGCUCCCUG | mAmAGAmGm | 142793120- |
| | | | UUUCUGA | AAACCGUUGCUACAAUAAG | AAmAGmGAU | 142793144 |
| | | | AGG | GCCGUCGAAAGAUGUGCCG | UUmCUGAmA | |
| | | | | CAACGCUCUGCCUUCUGGC | GGmGUUGmU | |
| | | | | AUCGUU | mAmGmCUCC | |
| | | | | | CmUmGmAmA | |
| | | | | | mAmCmCGUU | |
| | | | | | mGmCUAmCA | |
| | | | | | AU*AAGmGm | |
| | | | | | CCmGmUmCm | |
| | | | | | GmAmAmAmG | |
| | | | | | mAmUGUGCm | |
| | | | | | CGmCAAmCG | |
| | | | | | CUCUmGmCC | |
| | | | | | mUmUmCmUG | |
| | | | | | GCAUCG*mU | |
| | | | | | *mU | |
| G028993 | 221 | TRBC1 | GGCUGCC | GGCUGCCUUCAGAAAUCCU | mG*mG*mC* | chr7: |
| | | | UUCAGAA | UUCUCGUUGUAGCUCCCUG | mUmGCCmUm | 142793125- |
| | | | AUCCUUU | AAACCGUUGCUACAAUAAG | UCmAGmAAA | 142793149 |
| | | | CUC | GCCGUCGAAAGAUGUGCCG | UCmCUUUmC | |
| | | | | CAACGCUCUGCCUUCUGGC | UCmGUUGmU | |
| | | | | AUCGUU | mAmGmCUCC | |
| | | | | | CmUmGmAmA | |
| | | | | | mAmCmCGUU | |
| | | | | | mGmCUAmCA | |
| | | | | | AU*AAGmGm | |
| | | | | | CCmGmUmCm | |
| | | | | | GmAmAmAmG | |
| | | | | | mAmUGUGCm | |
| | | | | | CGmCAAmCG | |
| | | | | | CUCUmGmCC | |
| | | | | | mUmUmCmUG | |
| | | | | | GCAUCG*mU | |
| | | | | | *mU | |
| G028949 | 222 | TRBC1/2 | CCCACAC | CCCACACCCAAAAGGCCAC | mC*mC*mC* | chr7: |
| | | | CCAAAAG | ACUGGGUUGUAGCUCCCUG | mAmCACmCm | 142791756- |
| | | | GCCACAC | AAACCGUUGCUACAAUAAG | CAmAAmAGG | 142791780 |
| | | | UGG | GCCGUCGAAAGAUGUGCCG | CCmACACmU | |
| | | | | CAACGCUCUGCCUUCUGGC | GGmGUUGmU | |
| | | | | AUCGUU | mAmGmCUCC | |
| | | | | | CmUmGmAmA | |
| | | | | | mAmCmCGUU | |
| | | | | | mGmCUAmCA | |
| | | | | | AU*AAGmGm | |
| | | | | | CCmGmUmCm | |
| | | | | | GmAmAmAmG | |
| | | | | | mAmUGUGCm | |
| | | | | | CGmCAAmCG | |
| | | | | | CUCUmGmCC | |
| | | | | | mUmUmCmUG | |
| | | | | | GCAUCG*mU | |
| | | | | | *mU | |
| G028950 | 223 | TRBC1/2 | ACCCAAA | ACCCAAAAGGCCACACUGG | mA*mC*mC* | chr7: |
| | | | AGGCCAC | UGUGCGUUGUAGCUCCCUG | mCmAAAmAm | 142791761- |
| | | | ACUGGUG | AAACCGUUGCUACAAUAAG | GGmCCmACA | 142791785 |
| | | | UGC | GCCGUCGAAAGAUGUGCCG | CUmGGUGmU | |
| | | | | CAACGCUCUGCCUUCUGGC | GCmGUUGmU | |
| | | | | AUCGUU | mAmGmCUCC | |
| | | | | | CmUmGmAmA | |
| | | | | | mAmCmCGUU | |
| | | | | | mGmCUAmCA | |
| | | | | | AU*AAGmGm | |
| | | | | | CCmGmUmCm | |
| | | | | | GmAmAmAmG | |
| | | | | | mAmUGUGCm | |
| | | | | | CGmCAAmCG | |
| | | | | | CUCUmGmCC | |
| | | | | | mUmUmCmUG | |
| | | | | | GCAUCG*mU | |
| | | | | | *mU | |
| G028951 | 224 | TRBC1/2 | UCCUUCC | UCCUUCCCAUUCACCCACC | mU*mC*mC* | chr7: |
| | | | CAUUCAC | AGCUCGUUGUAGCUCCCUG | mUmUCCmCm | 142791820- |
| | | | CCACCAG | AAACCGUUGCUACAAUAAG | AUmUCmACC | 142791844 |
| | | | CUC | GCCGUCGAAAGAUGUGCCG | CAmCCAGmC | |
| | | | | CAACGCUCUGCCUUCUGGC | UCmGUUGmU | |
| | | | | AUCGUU | mAmGmCUCC | |
| | | | | | CmUmGmAmA | |
| | | | | | mAmCmCGUU | |
| | | | | | mGmCUAmCA | |
| | | | | | AU*AAGmGm | |
| | | | | | CCmGmUmCm | |
| | | | | | GmAmAmAmG | |
| | | | | | mAmUGUGCm | |
| | | | | | CGmCAAmCG | |
| | | | | | CUCUmGmCC | |
| | | | | | mUmUmCmUG | |
| | | | | | GCAUCG*mU | |
| | | | | | *mU | |
| G028954 | 225 | TRBC1/2 | GACCCGC | GACCCGCAGCCCCUCAAGG | mG*mA*mC* | chr7: |
| | | | AGCCCCU | AGCAGGUUGUAGCUCCCUG | mCmCGCmAm | 142791866- |
| | | | CAAGGAG | AAACCGUUGCUACAAUAAG | GCmCCmCUC | 142791890 |
| | | | CAG | GCCGUCGAAAGAUGUGCCG | AAmGGAGmC | |
| | | | | CAACGCUCUGCCUUCUGGC | AGmGUUGmU | |
| | | | | AUCGUU | mAmGmCUCC | |
| | | | | | CmUmGmAmA | |
| | | | | | mAmCmCGUU | |
| | | | | | mGmCUAmCA | |
| | | | | | AU*AAGmGm | |
| | | | | | CCmGmUmCm | |
| | | | | | GmAmAmAmG | |
| | | | | | mAmUGUGCm | |
| | | | | | CGmCAAmCG | |
| | | | | | CUCUmGmCC | |
| | | | | | mUmUmCmUG | |
| | | | | | GCAUCG*mU | |
| | | | | | *mU | |
| G028955 | 226 | TRBC1/2 | ACCCGCA | ACCCGCAGCCCCUCAAGGA | mA*mC*mC* | chr7: |
| | | | GCCCCUC | GCAGCGUUGUAGCUCCCUG | mCmGCAmGm | 142791867- |
| | | | AAGGAGC | AAACCGUUGCUACAAUAAG | CCmCCmUCA | 142791891 |
| | | | AGC | GCCGUCGAAAGAUGUGCCG | AGmGAGCmA | |
| | | | | CAACGCUCUGCCUUCUGGC | GCmGUUGmU | |
| | | | | AUCGUU | mAmGmCUCC | |
| | | | | | CmUmGmAmA | |
| | | | | | mAmCmCGUU | |
| | | | | | mGmCUAmCA | |
| | | | | | AU*AAGmGm | |
| | | | | | CCmGmUmCm | |
| | | | | | GmAmAmAmG | |
| | | | | | mAmUGUGCm | |
| | | | | | CGmCAAmCG | |
| | | | | | CUCUmGmCC | |
| | | | | | mUmUmCmUG | |
| | | | | | GCAUCG*mU | |
| | | | | | *mU | |
| G028956 | 227 | TRBC1/2 | CUCAAGG | CUCAAGGAGCAGCCCGCCC | mC*mU*mC* | chr7: |
| | | | AGCAGCC | UCAAUGUUGUAGCUCCCUG | mAmAGGmAm | 142791878- |
| | | | CGCCCUC | AAACCGUUGCUACAAUAAG | GCmAGmCCC | 142791902 |
| | | | AAU | GCCGUCGAAAGAUGUGCCG | GCmCCUCmA | |
| | | | | CAACGCUCUGCCUUCUGGC | AUmGUUGmU | |
| | | | | AUCGUU | mAmGmCUCC | |
| | | | | | CmUmGmAmA | |
| | | | | | mAmCmCGUU | |
| | | | | | mGmCUAmCA | |
| | | | | | AU*AAGmGm | |
| | | | | | CCmGmUmCm | |
| | | | | | GmAmAmAmG | |
| | | | | | mAmUGUGCm | |
| | | | | | CGmCAAmCG | |
| | | | | | CUCUmGmCC | |
| | | | | | mUmUmCmUG | |
| | | | | | GCAUCG*mU | |
| | | | | | *mU | |
| G028957 | 228 | TRBC1/2 | AGCCCGC | AGCCCGCCCUCAAUGACUC | mA*mG*mC* | chr7: |
| | | | CCUCAAU | CAGAUGUUGUAGCUCCCUG | mCmCGCmCm | 142791888- |
| | | | GACUCCA | AAACCGUUGCUACAAUAAG | CUmCAmAUG | 142791912 |
| | | | GAU | GCCGUCGAAAGAUGUGCCG | ACmUCCAmG | |
| | | | | CAACGCUCUGCCUUCUGGC | AUmGUUGmU | |
| | | | | AUCGUU | mAmGmCUCC | |
| | | | | | CmUmGmAmA | |
| | | | | | mAmCmCGUU | |
| | | | | | mGmCUAmCA | |
| | | | | | AU*AAGmGm | |
| | | | | | CCmGmUmCm | |
| | | | | | GmAmAmAmG | |
| | | | | | mAmUGUGCm | |
| | | | | | CGmCAAmCG | |
| | | | | | CUCUmGmCC | |
| | | | | | mUmUmCmUG | |
| | | | | | GCAUCG*mU | |
| | | | | | *mU | |
| G028958 | 229 | TRBC1/2 | CGGCCAC | CGGCCACCUUCUGGCAGAA | mC*mG*mG* | chr7: |
| | | | CUUCUGG | CCCCCGUUGUAGCUCCCUG | mCmCACmCm | 142791939- |
| | | | CAGAACC | AAACCGUUGCUACAAUAAG | UUmCUmGGC | 142791963 |
| | | | CCC | GCCGUCGAAAGAUGUGCCG | AGmAACCmC | |
| | | | | CAACGCUCUGCCUUCUGGC | CCmGUUGmU | |
| | | | | AUCGUU | mAmGmCUCC | |
| | | | | | CmUmGmAmA | |
| | | | | | mAmCmCGUU | |
| | | | | | mGmCUAmCA | |
| | | | | | AU*AAGmGm | |
| | | | | | CCmGmUmCm | |
| | | | | | GmAmAmAmG | |
| | | | | | mAmUGUGCm | |
| | | | | | CGmCAAmCG | |
| | | | | | CUCUmGmCC | |
| | | | | | mUmUmCmUG | |
| | | | | | GCAUCG*mU | |
| | | | | | *mU | |
| G028959 | 230 | TRBC1/2 | GGGGGUU | GGGGGUUCUGCCAGAAGGU | mG*mG*mG* | chr7: |
| | | | CUGCCAG | GGCCGGUUGUAGCUCCCUG | mGmGUUmCm | 142791939- |
| | | | AAGGUGG | AAACCGUUGCUACAAUAAG | UGmCCmAGA | 142791963 |
| | | | CCG | GCCGUCGAAAGAUGUGCCG | AGmGUGGmC | |
| | | | | CAACGCUCUGCCUUCUGGC | CGmGUUGmU | |
| | | | | AUCGUU | mAmGmCUCC | |
| | | | | | CmUmGmAmA | |
| | | | | | mAmCmCGUU | |
| | | | | | mGmCUAmCA | |
| | | | | | AU*AAGmGm | |
| | | | | | CCmGmUmCm | |
| | | | | | GmAmAmAmG | |
| | | | | | mAmUGUGCm | |
| | | | | | CGmCAAmCG | |
| | | | | | CUCUmGmCC | |
| | | | | | mUmUmCmUG | |
| | | | | | GCAUCG*mU | |
| | | | | | *mU | |
| G028960 | 231 | TRBC1/2 | CGGGGGU | CGGGGGUUCUGCCAGAAGG | mC*mG*mG* | chr7: |
| | | | UCUGCCA | UGGCCGUUGUAGCUCCCUG | mGmGGUmUm | 142791940- |
| | | | GAAGGUG | AAACCGUUGCUACAAUAAG | CUmGCmCAG | 142791964 |
| | | | GCC | GCCGUCGAAAGAUGUGCCG | AAmGGUGmG | |
| | | | | CAACGCUCUGCCUUCUGGC | CCmGUUGmU | |
| | | | | AUCGUU | mAmGmCUCC | |
| | | | | | CmUmGmAmA | |
| | | | | | mAmCmCGUU | |
| | | | | | mGmCUAmCA | |
| | | | | | AU*AAGmGm | |
| | | | | | CCmGmUmCm | |
| | | | | | GmAmAmAmG | |
| | | | | | mAmUGUGCm | |
| | | | | | CGmCAAmCG | |
| | | | | | CUCUmGmCC | |
| | | | | | mUmUmCmUG | |
| | | | | | GCAUCG*mU | |
| | | | | | *mU | |
| G028961 | 232 | TRBC1/2 | CCUUCUG | CCUUCUGGCAGAACCCCCG | mC*mC*mU* | chr7: |
| | | | GCAGAAC | CAACCGUUGUAGCUCCCUG | mUmCUGmGm | 142791945- |
| | | | CCCCGCA | AAACCGUUGCUACAAUAAG | CAmGAmACC | 142791969 |
| | | | ACC | GCCGUCGAAAGAUGUGCCG | CCmCGCAmA | |
| | | | | CAACGCUCUGCCUUCUGGC | CCmGUUGmU | |
| | | | | AUCGUU | mAmGmCUCC | |
| | | | | | CmUmGmAmA | |
| | | | | | mAmCmCGUU | |
| | | | | | mGmCUAmCA | |
| | | | | | AU*AAGmGm | |
| | | | | | CCmGmUmCm | |
| | | | | | GmAmAmAmG | |
| | | | | | mAmUGUGCm | |
| | | | | | CGmCAAmCG | |
| | | | | | CUCUmGmCC | |
| | | | | | mUmUmCmUG | |
| | | | | | GCAUCG*mU | |
| | | | | | *mU | |
| G028962 | 233 | TRBC1/2 | UGGUUGC | UGGUUGCGGGGGUUCUGCC | mU*mG*mG* | chr7: |
| | | | GGGGGUU | AGAAGGUUGUAGCUCCCUG | mUmUGCmGm | 142791946- |
| | | | CUGCCAG | AAACCGUUGCUACAAUAAG | GGmGGmUUC | 142791970 |
| | | | AAG | GCCGUCGAAAGAUGUGCCG | UGmCCAGmA | |
| | | | | CAACGCUCUGCCUUCUGGC | AGmGUUGmU | |
| | | | | AUCGUU | mAmGmCUCC | |
| | | | | | CmUmGmAmA | |
| | | | | | mAmCmCGUU | |
| | | | | | mGmCUAmCA | |
| | | | | | AU*AAGmGm | |
| | | | | | CCmGmUmCm | |
| | | | | | GmAmAmAmG | |
| | | | | | mAmUGUGCm | |
| | | | | | CGmCAAmCG | |
| | | | | | CUCUmGmCC | |
| | | | | | mUmUmCmUG | |
| | | | | | GCAUCG*mU | |
| | | | | | *mU | |
| G028963 | 234 | TRBC1/2 | CUGGGUC | CUGGGUCCACUCGUCAUUC | mC*mU*mG* | chr7: |
| | | | CACUCGU | UCCGAGUUGUAGCUCCCUG | mGmGUCmCm | 142792001- |
| | | | CAUUCUC | AAACCGUUGCUACAAUAAG | ACmUCmGUC | 142792025 |
| | | | CGA | GCCGUCGAAAGAUGUGCCG | AUmUCUCmC | |
| | | | | CAACGCUCUGCCUUCUGGC | GAmGUUGmU | |
| | | | | AUCGUU | mAmGmCUCC | |
| | | | | | CmUmGmAmA | |
| | | | | | mAmCmCGUU | |
| | | | | | mGmCUAmCA | |
| | | | | | AU*AAGmGm | |
| | | | | | CCmGmUmCm | |
| | | | | | GmAmAmAmG | |
| | | | | | mAmUGUGCm | |
| | | | | | CGmCAAmCG | |
| | | | | | CUCUmGmCC | |
| | | | | | mUmUmCmUG | |
| | | | | | GCAUCG*mU | |
| | | | | | *mU | |
| G028964 | 235 | TRBC1/2 | CCUGGGU | CCUGGGUCCACUCGUCAUU | mC*mC*mU* | chr7: |
| | | | CCACUCG | CUCCGGUUGUAGCUCCCUG | mGmGGUmCm | 142792002- |
| | | | UCAUUCU | AAACCGUUGCUACAAUAAG | CAmCUmCGU | 142792026 |
| | | | CCG | GCCGUCGAAAGAUGUGCCG | CAmUUCUmC | |
| | | | | CAACGCUCUGCCUUCUGGC | CGmGUUGmU | |
| | | | | AUCGUU | mAmGmCUCC | |
| | | | | | CmUmGmAmA | |
| | | | | | mAmCmCGUU | |
| | | | | | mGmCUAmCA | |
| | | | | | AU*AAGmGm | |
| | | | | | CCmGmUmCm | |
| | | | | | GmAmAmAmG | |
| | | | | | mAmUGUGCm | |
| | | | | | CGmCAAmCG | |
| | | | | | CUCUmGmCC | |
| | | | | | mUmUmCmUG | |
| | | | | | GCAUCG*mU | |
| | | | | | *mU | |
| G028965 | 236 | TRBC1/2 | GAGAAUG | GAGAAUGACGAGUGGACCC | mG*mA*mG* | chr7: |
| | | | ACGAGUG | AGGAUGUUGUAGCUCCCUG | mAmAUGmAm | 142792004- |
| | | | GACCCAG | AAACCGUUGCUACAAUAAG | CGmAGmUGG | 142792028 |
| | | | GAU | GCCGUCGAAAGAUGUGCCG | ACmCCAGmG | |
| | | | | CAACGCUCUGCCUUCUGGC | AUmGUUGmU | |
| | | | | AUCGUU | mAmGmCUCC | |
| | | | | | CmUmGmAmA | |
| | | | | | mAmCmCGUU | |
| | | | | | mGmCUAmCA | |
| | | | | | AU*AAGmGm | |
| | | | | | CCmGmUmCm | |
| | | | | | GmAmAmAmG | |
| | | | | | mAmUGUGCm | |
| | | | | | CGmCAAmCG | |
| | | | | | CUCUmGmCC | |
| | | | | | mUmUmCmUG | |
| | | | | | GCAUCG*mU | |
| | | | | | *mU | |
| G028966 | 237 | TRBC1/2 | UGACGAG | UGACGAGUGGACCCAGGAU | mU*mG*mA* | chr7: |
| | | | UGGACCC | AGGGCGUUGUAGCUCCCUG | mCmGAGmUm | 142792009- |
| | | | AGGAUAG | AAACCGUUGCUACAAUAAG | GGmACmCCA | 142792033 |
| | | | GGC | GCCGUCGAAAGAUGUGCCG | GGmAUAGmG | |
| | | | | CAACGCUCUGCCUUCUGGC | GCmGUUGmU | |
| | | | | AUCGUU | mAmGmCUCC | |
| | | | | | CmUmGmAmA | |
| | | | | | mAmCmCGUU | |
| | | | | | mGmCUAmCA | |
| | | | | | AU*AAGmGm | |
| | | | | | CCmGmUmCm | |
| | | | | | GmAmAmAmG | |
| | | | | | mAmUGUGCm | |
| | | | | | CGmCAAmCG | |
| | | | | | CUCUmGmCC | |
| | | | | | mUmUmCmUG | |
| | | | | | GCAUCG*mU | |
| | | | | | *mU | |
| G028967 | 238 | TRBC1/2 | GCCCUAU | GCCCUAUCCUGGGUCCACU | mG*mC*mC* | chr7: |
| | | | CCUGGGU | CGUCAGUUGUAGCUCCCUG | mCmUAUmCm | 142792009- |
| | | | CCACUCG | AAACCGUUGCUACAAUAAG | CUmGGmGUC | 142792033 |
| | | | UCA | GCCGUCGAAAGAUGUGCCG | CAmCUCGmU | |
| | | | | CAACGCUCUGCCUUCUGGC | CAmGUUGmU | |
| | | | | AUCGUU | mAmGmCUCC | |
| | | | | | CmUmGmAmA | |
| | | | | | mAmCmCGUU | |
| | | | | | mGmCUAmCA | |
| | | | | | AU*AAGmGm | |
| | | | | | CCmGmUmCm | |
| | | | | | GmAmAmAmG | |
| | | | | | mAmUGUGCm | |
| | | | | | CGmCAAmCG | |
| | | | | | CUCUmGmCC | |
| | | | | | mUmUmCmUG | |
| | | | | | GCAUCG*mU | |
| | | | | | *mU | |
| G028971 | 239 | TRBC1/2 | AGGCCUG | AGGCCUGGGGUAGAGCAGG | mA*mG*mG* | chr7: |
| | | | GGGUAGA | UGAGUGUUGUAGCUCCCUG | mCmCUGmGm | 142792062- |
| | | | GCAGGUG | AAACCGUUGCUACAAUAAG | GGmUAmGAG | 142792086 |
| | | | AGU | GCCGUCGAAAGAUGUGCCG | CAmGGUGmA | |
| | | | | CAACGCUCUGCCUUCUGGC | GUmGUUGmU | |
| | | | | AUCGUU | mAmGmCUCC | |
| | | | | | CmUmGmAmA | |
| | | | | | mAmCmCGUU | |
| | | | | | mGmCUAmCA | |
| | | | | | AU*AAGmGm | |
| | | | | | CCmGmUmCm | |
| | | | | | GmAmAmAmG | |
| | | | | | mAmUGUGCm | |
| | | | | | CGmCAAmCG | |
| | | | | | CUCUmGmCC | |
| | | | | | mUmUmCmUG | |
| | | | | | GCAUCG*mU | |
| | | | | | *mU | |
| G028972 | 240 | TRBC1/2 | AGGCCCC | AGGCCCCACUCACCUGCUC | mA*mG*mG* | chr7: |
| | | | ACUCACC | UACCCGUUGUAGCUCCCUG | mCmCCCmAm | 142792069- |
| | | | UGCUCUA | AAACCGUUGCUACAAUAAG | CUmCAmCCU | 142792093 |
| | | | CCC | GCCGUCGAAAGAUGUGCCG | GCmUCUAmC | |
| | | | | CAACGCUCUGCCUUCUGGC | CCmGUUGmU | |
| | | | | AUCGUU | mAmGmCUCC | |
| | | | | | CmUmGmAmA | |
| | | | | | mAmCmCGUU | |
| | | | | | mGmCUAmCA | |
| | | | | | AU*AAGmGm | |
| | | | | | CCmGmUmCm | |
| | | | | | GmAmAmAmG | |
| | | | | | mAmUGUGCm | |
| | | | | | CGmCAAmCG | |
| | | | | | CUCUmGmCC | |
| | | | | | mUmUmCmUG | |
| | | | | | GCAUCG*mU | |
| | | | | | *mU | |
| G028973 | 241 | TRBC1/2 | GAGCAGG | GAGCAGGUGAGUGGGGCCU | mG*mA*mG* | chr7: |
| | | | UGAGUGG | GGGGAGUUGUAGCUCCCUG | mCmAGGmUm | 142792074- |
| | | | GGCCUGG | AAACCGUUGCUACAAUAAG | GAmGUmGGG | 142792098 |
| | | | GGA | GCCGUCGAAAGAUGUGCCG | GCmCUGGmG | |
| | | | | CAACGCUCUGCCUUCUGGC | GAmGUUGmU | |
| | | | | AUCGUU | mAmGmCUCC | |
| | | | | | CmUmGmAmA | |
| | | | | | mAmCmCGUU | |
| | | | | | mGmCUAmCA | |
| | | | | | AU*AAGmGm | |
| | | | | | CCmGmUmCm | |
| | | | | | GmAmAmAmG | |
| | | | | | mAmUGUGCm | |
| | | | | | CGmCAAmCG | |
| | | | | | CUCUmGmCC | |
| | | | | | mUmUmCmUG | |
| | | | | | GCAUCG*mU | |
| | | | | | *mU | |
| G028974 | 242 | TRBC1/2 | UCCCCAG | UCCCCAGGCCCCACUCACC | mU*mC*mC* | chr7: |
| | | | GCCCCAC | UGCUCGUUGUAGCUCCCUG | mCmCAGmGm | 142792074- |
| | | | UCACCUG | AAACCGUUGCUACAAUAAG | CCmCCmACU | 142792098 |
| | | | CUC | GCCGUCGAAAGAUGUGCCG | CAmCCUGmC | |
| | | | | CAACGCUCUGCCUUCUGGC | UCmGUUGmU | |
| | | | | AUCGUU | mAmGmCUCC | |
| | | | | | CmUmGmAmA | |
| | | | | | mAmCmCGUU | |
| | | | | | mGmCUAmCA | |
| | | | | | AU*AAGmGm | |
| | | | | | CCmGmUmCm | |
| | | | | | GmAmAmAmG | |
| | | | | | mAmUGUGCm | |
| | | | | | CGmCAAmCG | |
| | | | | | CUCUmGmCC | |
| | | | | | mUmUmCmUG | |
| | | | | | GCAUCG*mU | |
| | | | | | *mU | |
| G028975 | 243 | TRBC1/2 | CUCCCCA | CUCCCCAGGCCCCACUCAC | mC*mU*mC* | chr7: |
| | | | GGCCCCA | CUGCUGUUGUAGCUCCCUG | mCmCCAmGm | 142792075- |
| | | | CUCACCU | AAACCGUUGCUACAAUAAG | GCmCCmCAC | 142792099 |
| | | | GCU | GCCGUCGAAAGAUGUGCCG | UCmACCUmG | |
| | | | | CAACGCUCUGCCUUCUGGC | CUmGUUGmU | |
| | | | | AUCGUU | mAmGmCUCC | |
| | | | | | CmUmGmAmA | |
| | | | | | mAmCmCGUU | |
| | | | | | mGmCUAmCA | |
| | | | | | AU*AAGmGm | |
| | | | | | CCmGmUmCm | |
| | | | | | GmAmAmAmG | |
| | | | | | mAmUGUGCm | |
| | | | | | CGmCAAmCG | |
| | | | | | CUCUmGmCC | |
| | | | | | mUmUmCmUG | |
| | | | | | GCAUCG*mU | |
| | | | | | *mU | |
| G028976 | 244 | TRBC1/2 | UCUCCCC | UCUCCCCAGGCCCCACUCA | mU*mC*mU* | chr7: |
| | | | AGGCCCC | CCUGCGUUGUAGCUCCCUG | mCmCCCmAm | 142792076- |
| | | | ACUCACC | AAACCGUUGCUACAAUAAG | GGmCCmCCA | 142792100 |
| | | | UGC | GCCGUCGAAAGAUGUGCCG | CUmCACCmU | |
| | | | | CAACGCUCUGCCUUCUGGC | GCmGUUGmU | |
| | | | | AUCGUU | mAmGmCUCC | |
| | | | | | CmUmGmAmA | |
| | | | | | mAmCmCGUU | |
| | | | | | mGmCUAmCA | |
| | | | | | AU*AAGmGm | |
| | | | | | CCmGmUmCm | |
| | | | | | GmAmAmAmG | |
| | | | | | mAmUGUGCm | |
| | | | | | CGmCAAmCG | |
| | | | | | CUCUmGmCC | |
| | | | | | mUmUmCmUG | |
| | | | | | GCAUCG*mU | |
| | | | | | *mU | |
| G028988 | 245 | TRBC1/2 | ACCAGCA | ACCAGCAAGGGGUCCUGUC | mA*mC*mC* | chr7: |
| | | | AGGGGUC | UGCCAGUUGUAGCUCCCUG | mAmGCAmAm | 142792697- |
| | | | CUGUCUG | AAACCGUUGCUACAAUAAG | GGmGGmUCC | 142792721 |
| | | | CCA | GCCGUCGAAAGAUGUGCCG | UGmUCUGmC | |
| | | | | CAACGCUCUGCCUUCUGGC | CAmGUUGmU | |
| | | | | AUCGUU | mAmGmCUCC | |
| | | | | | CmUmGmAmA | |
| | | | | | mAmCmCGUU | |
| | | | | | mGmCUAmCA | |
| | | | | | AU*AAGmGm | |
| | | | | | CCmGmUmCm | |
| | | | | | GmAmAmAmG | |
| | | | | | mAmUGUGCm | |
| | | | | | CGmCAAmCG | |
| | | | | | CUCUmGmCC | |
| | | | | | mUmUmCmUG | |
| | | | | | GCAUCG*mU | |
| | | | | | *mU | |
| G027904 | 246 | TRBC2 | CCACACC | CCACACCCAAAAGGCCACA | mC*mC*mA* | chr7: |
| | | | CAAAAGG | CGUUUUAGAGCUAGAAAUA | CACCCAAAA | 142801104- |
| | | | CCACAC | GCAAGUUAAAAUAAGGCUA | GGCCACACG | 142801124 |
| | | | | GUCCGUUAUCACGAAAGGG | UUUUAGAmG | |
| | | | | CACCGAGUCGGUGCU | mCmUmAmGm | |
| | | | | | AmAmAmUmA | |
| | | | | | mGmCAAGUU | |
| | | | | | AAAAUAAGG | |
| | | | | | CUAGUCCGU | |
| | | | | | UAUCACGAA | |
| | | | | | AGGGCACCG | |
| | | | | | AGUCGGmU* | |
| | | | | | mG*mC*mU | |
| G028994 | 247 | TRBC2 | CACAGAC | CACAGACCCGCAGCCCCUC | mC*mA*mC* | chr7: |
| | | | CCGCAGC | AAGGAGUUGUAGCUCCCUG | mAmGACmCm | 142801209- |
| | | | CCCUCAA | AAACCGUUGCUACAAUAAG | CGmCAmGCC | 142801233 |
| | | | GGA | GCCGUCGAAAGAUGUGCCG | CCmUCAAmG | |
| | | | | CAACGCUCUGCCUUCUGGC | GAmGUUGmU | |
| | | | | AUCGUU | mAmGmCUCC | |
| | | | | | CmUmGmAmA | |
| | | | | | mAmCmCGUU | |
| | | | | | mGmCUAmCA | |
| | | | | | AU*AAGmGm | |
| | | | | | CCmGmUmCm | |
| | | | | | GmAmAmAmG | |
| | | | | | mAmUGUGCm | |
| | | | | | CGmCAAmCG | |
| | | | | | CUCUmGmCC | |
| | | | | | mUmUmCmUG | |
| | | | | | GCAUCG*mU | |
| | | | | | *mU | |
| G028995 | 248 | TRBC2 | ACAGACC | ACAGACCCGCAGCCCCUCA | mA*mC*mA* | chr7: |
| | | | CGCAGCC | AGGAGGUUGUAGCUCCCUG | mGmACCmCm | 142801210- |
| | | | CCUCAAG | AAACCGUUGCUACAAUAAG | GCmAGmCCC | 142801234 |
| | | | GAG | GCCGUCGAAAGAUGUGCCG | CUmCAAGmG | |
| | | | | CAACGCUCUGCCUUCUGGC | AGmGUUGmU | |
| | | | | AUCGUU | mAmGmCUCC | |
| | | | | | CmUmGmAmA | |
| | | | | | mAmCmCGUU | |
| | | | | | mGmCUAmCA | |
| | | | | | AU*AAGmGm | |
| | | | | | CCmGmUmCm | |
| | | | | | GmAmAmAmG | |
| | | | | | mAmUGUGCm | |
| | | | | | CGmCAAmCG | |
| | | | | | CUCUmGmCC | |
| | | | | | mUmUmCmUG | |
| | | | | | GCAUCG*mU | |
| | | | | | *mU | |
| G028996 | 249 | TRBC2 | UGGACCC | UGGACCCAGGAUAGGGCCA | mU*mG*mG* | chr7: |
| | | | AGGAUAG | AACCUGUUGUAGCUCCCUG | mAmCCCmAm | 142801363- |
| | | | GGCCAAA | AAACCGUUGCUACAAUAAG | GGmAUmAGG | 142801387 |
| | | | CCU | GCCGUCGAAAGAUGUGCCG | GCmCAAAmC | |
| | | | | CAACGCUCUGCCUUCUGGC | CUmGUUGmU | |
| | | | | AUCGUU | mAmGmCUCC | |
| | | | | | CmUmGmAmA | |
| | | | | | mAmCmCGUU | |
| | | | | | mGmCUAmCA | |
| | | | | | AU*AAGmGm | |
| | | | | | CCmGmUmCm | |
| | | | | | GmAmAmAmG | |
| | | | | | mAmUGUGCm | |
| | | | | | CGmCAAmCG | |
| | | | | | CUCUmGmCC | |
| | | | | | mUmUmCmUG | |
| | | | | | GCAUCG*mU | |
| | | | | | *mU | |
| G028997 | 250 | TRBC2 | GGACCCA | GGACCCAGGAUAGGGCCAA | mG*mG*mA* | chr7: |
| | | | GGAUAGG | ACCUGGUUGUAGCUCCCUG | mCmCCAmGm | 142801364- |
| | | | GCCAAAC | AAACCGUUGCUACAAUAAG | GAmUAmGGG | 142801388 |
| | | | CUG | GCCGUCGAAAGAUGUGCCG | CCmAAACmC | |
| | | | | CAACGCUCUGCCUUCUGGC | UGmGUUGmU | |
| | | | | AUCGUU | mAmGmCUCC | |
| | | | | | CmUmGmAmA | |
| | | | | | mAmCmCGUU | |
| | | | | | mGmCUAmCA | |
| | | | | | AU*AAGmGm | |
| | | | | | CCmGmUmCm | |
| | | | | | GmAmAmAmG | |
| | | | | | mAmUGUGCm | |
| | | | | | CGmCAAmCG | |
| | | | | | CUCUmGmCC | |
| | | | | | mUmUmCmUG | |
| | | | | | GCAUCG*mU | |
| | | | | | *mU | |
| G028998 | 251 | TRBC2 | GCCAAAC | GCCAAACCUGUCACCCAGA | mG*mC*mC* | chr7: |
| | | | CUGUCAC | UCGUCGUUGUAGCUCCCUG | mAmAACmCm | 142801378- |
| | | | CCAGAUC | AAACCGUUGCUACAAUAAG | UGmUCmACC | 142801402 |
| | | | GUC | GCCGUCGAAAGAUGUGCCG | CAmGAUCmG | |
| | | | | CAACGCUCUGCCUUCUGGC | UCmGUUGmU | |
| | | | | AUCGUU | mAmGmCUCC | |
| | | | | | CmUmGmAmA | |
| | | | | | mAmCmCGUU | |
| | | | | | mGmCUAmCA | |
| | | | | | AU*AAGmGm | |
| | | | | | CCmGmUmCm | |
| | | | | | GmAmAmAmG | |
| | | | | | mAmUGUGCm | |
| | | | | | CGmCAAmCG | |
| | | | | | CUCUmGmCC | |
| | | | | | mUmUmCmUG | |
| | | | | | GCAUCG*mU | |
| | | | | | *mU | |
| G028999 | 252 | TRBC2 | CCUGUCA | CCUGUCACCCAGAUCGUCA | mC*mC*mU* | chr7: |
| | | | CCCAGAU | GCGCCGUUGUAGCUCCCUG | mGmUCAmCm | 142801384- |
| | | | CGUCAGC | AAACCGUUGCUACAAUAAG | CCmAGmAUC | 142801408 |
| | | | GCC | GCCGUCGAAAGAUGUGCCG | GUmCAGCmG | |
| | | | | CAACGCUCUGCCUUCUGGC | CCmGUUGmU | |
| | | | | AUCGUU | mAmGmCUCC | |
| | | | | | CmUmGmAmA | |
| | | | | | mAmCmCGUU | |
| | | | | | mGmCUAmCA | |
| | | | | | AU*AAGmGm | |
| | | | | | CCmGmUmCm | |
| | | | | | GmAmAmAmG | |
| | | | | | mAmUGUGCm | |
| | | | | | CGmCAAmCG | |
| | | | | | CUCUmGmCC | |
| | | | | | mUmUmCmUG | |
| | | | | | GCAUCG*mU | |
| | | | | | *mU | |
| G029000 | 253 | TRBC2 | CCCUGUU | CCCUGUUUUCUUUCAGACU | mC*mC*mC* | chr7: |
| | | | UUCUUUC | GUGGCGUUGUAGCUCCCUG | mUmGUUmUm | 142801927- |
| | | | AGACUGU | AAACCGUUGCUACAAUAAG | UCmUUmUCA | 142801951 |
| | | | GGC | GCCGUCGAAAGAUGUGCCG | GAmCUGUmG | |
| | | | | CAACGCUCUGCCUUCUGGC | GCmGUUGmU | |
| | | | | AUCGUU | mAmGmCUCC | |
| | | | | | CmUmGmAmA | |
| | | | | | mAmCmCGUU | |
| | | | | | mGmCUAmCA | |
| | | | | | AU*AAGmGm | |
| | | | | | CCmGmUmCm | |
| | | | | | GmAmAmAmG | |
| | | | | | mAmUGUGCm | |
| | | | | | CGmCAAmCG | |
| | | | | | CUCUmGmCC | |
| | | | | | mUmUmCmUG | |
| | | | | | GCAUCG*mU | |
| | | | | | *mU | |
| G029001 | 254 | TRBC2 | UGUUUUC | UGUUUUCUUUCAGACUGUG | mU*mG*mU* | chr7: |
| | | | UUUCAGA | GCUUCGUUGUAGCUCCCUG | mUmUUCmUm | 142801930- |
| | | | CUGUGGC | AAACCGUUGCUACAAUAAG | UUmCAmGAC | 142801954 |
| | | | UUC | GCCGUCGAAAGAUGUGCCG | UGmUGGCmU | |
| | | | | CAACGCUCUGCCUUCUGGC | UCmGUUGmU | |
| | | | | AUCGUU | mAmGmCUCC | |
| | | | | | CmUmGmAmA | |
| | | | | | mAmCmCGUU | |
| | | | | | mGmCUAmCA | |
| | | | | | AU*AAGmGm | |
| | | | | | CCmGmUmCm | |
| | | | | | GmAmAmAmG | |
| | | | | | mAmUGUGCm | |
| | | | | | CGmCAAmCG | |
| | | | | | CUCUmGmCC | |
| | | | | | mUmUmCmUG | |
| | | | | | GCAUCG*mU | |
| | | | | | *mU | |
| G029002 | 255 | TRBC2 | UGGCUUC | UGGCUUCACCUCCGGUAAG | mU*mG*mG* | chr7: |
| | | | ACCUCCG | UGAGUGUUGUAGCUCCCUG | mCmUUCmAm | 142801947- |
| | | | GUAAGUG | AAACCGUUGCUACAAUAAG | CCmUCmCGG | 142801971 |
| | | | AGU | GCCGUCGAAAGAUGUGCCG | UAmAGUGmA | |
| | | | | CAACGCUCUGCCUUCUGGC | GUmGUUGmU | |
| | | | | AUCGUU | mAmGmCUCC | |
| | | | | | CmUmGmAmA | |
| | | | | | mAmCmCGUU | |
| | | | | | mGmCUAmCA | |
| | | | | | AU*AAGmGm | |
| | | | | | CCmGmUmCm | |
| | | | | | GmAmAmAmG | |
| | | | | | mAmUGUGCm | |
| | | | | | CGmCAAmCG | |
| | | | | | CUCUmGmCC | |
| | | | | | mUmUmCmUG | |
| | | | | | GCAUCG*mU | |
| | | | | | *mU | |
| G029003 | 256 | TRBC2 | AGGAGAG | AGGAGAGACUCACUUACCG | mA*mG*mG* | chr7: |
| | | | ACUCACU | GAGGUGUUGUAGCUCCCUG | mAmGAGmAm | 142801954- |
| | | | UACCGGA | AAACCGUUGCUACAAUAAG | CUmCAmCUU | 142801978 |
| | | | GGU | GCCGUCGAAAGAUGUGCCG | ACmCGGAmG | |
| | | | | CAACGCUCUGCCUUCUGGC | GUmGUUGmU | |
| | | | | AUCGUU | mAmGmCUCC | |
| | | | | | CmUmGmAmA | |
| | | | | | mAmCmCGUU | |
| | | | | | mGmCUAmCA | |
| | | | | | AU*AAGmGm | |
| | | | | | CCmGmUmCm | |
| | | | | | GmAmAmAmG | |
| | | | | | mAmUGUGCm | |
| | | | | | CGmCAAmCG | |
| | | | | | CUCUmGmCC | |
| | | | | | mUmUmCmUG | |
| | | | | | GCAUCG*mU | |
| | | | | | *mU | |
| G029004 | 257 | TRBC2 | CUGUUGA | CUGUUGACAAGAACAGAGC | mC*mU*mG* | chr7: |
| | | | CAAGAAC | AUGUAGUUGUAGCUCCCUG | mUmUGAmCm | 142802080- |
| | | | AGAGCAU | AAACCGUUGCUACAAUAAG | AAmGAmACA | 142802104 |
| | | | GUA | GCCGUCGAAAGAUGUGCCG | GAmGCAUmG | |
| | | | | CAACGCUCUGCCUUCUGGC | UAmGUUGmU | |
| | | | | AUCGUU | mAmGmCUCC | |
| | | | | | CmUmGmAmA | |
| | | | | | mAmCmCGUU | |
| | | | | | mGmCUAmCA | |
| | | | | | AU*AAGmGm | |
| | | | | | CCmGmUmCm | |
| | | | | | GmAmAmAmG | |
| | | | | | mAmUGUGCm | |
| | | | | | CGmCAAmCG | |
| | | | | | CUCUmGmCC | |
| | | | | | mUmUmCmUG | |
| | | | | | GCAUCG*mU | |
| | | | | | *mU | |
| G029005 | 258 | TRBC2 | UGUCAAC | UGUCAACAGAGUCUUACCA | mU*mG*mU* | chr7: |
| | | | AGAGUCU | GCAAGGUUGUAGCUCCCUG | mCmAACmAm | 142802095- |
| | | | UACCAGC | AAACCGUUGCUACAAUAAG | GAmGUmCUU | 142802119 |
| | | | AAG | GCCGUCGAAAGAUGUGCCG | ACmCAGCmA | |
| | | | | CAACGCUCUGCCUUCUGGC | AGmGUUGmU | |
| | | | | AUCGUU | mAmGmCUCC | |
| | | | | | CmUmGmAmA | |
| | | | | | mAmCmCGUU | |
| | | | | | mGmCUAmCA | |
| | | | | | AU*AAGmGm | |
| | | | | | CCmGmUmCm | |
| | | | | | GmAmAmAmG | |
| | | | | | mAmUGUGCm | |
| | | | | | CGmCAAmCG | |
| | | | | | CUCUmGmCC | |
| | | | | | mUmUmCmUG | |
| | | | | | GCAUCG*mU | |
| | | | | | *mU | |
| G029006 | 259 | TRBC2 | GAGUCUU | GAGUCUUACCAGCAAGGGG | mG*mA*mG* | chr7: |
| | | | ACCAGCA | UCCUGGUUGUAGCUCCCUG | mUmCUUmAm | 142802103- |
| | | | AGGGGUC | AAACCGUUGCUACAAUAAG | CCmAGmCAA | 142802127 |
| | | | CUG | GCCGUCGAAAGAUGUGCCG | GGmGGUCmC | |
| | | | | CAACGCUCUGCCUUCUGGC | UGmGUUGmU | |
| | | | | AUCGUU | mAmGmCUCC | |
| | | | | | CmUmGmAmA | |
| | | | | | mAmCmCGUU | |
| | | | | | mGmCUAmCA | |
| | | | | | AU*AAGmGm | |
| | | | | | CCmGmUmCm | |
| | | | | | GmAmAmAmG | |
| | | | | | mAmUGUGCm | |
| | | | | | CGmCAAmCG | |
| | | | | | CUCUmGmCC | |
| | | | | | mUmUmCmUG | |
| | | | | | GCAUCG*mU | |
| | | | | | *mU | |
| G029007 | 260 | TRBC2 | UCUUACC | UCUUACCAGCAAGGGGUCC | mU*mC*mU* | chr7: |
| | | | AGCAAGG | UGUCUGUUGUAGCUCCCUG | mUmACCmAm | 142802106- |
| | | | GGUCCUG | AAACCGUUGCUACAAUAAG | GCmAAmGGG | 142802130 |
| | | | UCU | GCCGUCGAAAGAUGUGCCG | GUmCCUGmU | |
| | | | | CAACGCUCUGCCUUCUGGC | CUmGUUGmU | |
| | | | | AUCGUU | mAmGmCUCC | |
| | | | | | CmUmGmAmA | |
| | | | | | mAmCmCGUU | |
| | | | | | mGmCUAmCA | |
| | | | | | AU*AAGmGm | |
| | | | | | CCmGmUmCm | |
| | | | | | GmAmAmAmG | |
| | | | | | mAmUGUGCm | |
| | | | | | CGmCAAmCG | |
| | | | | | CUCUmGmCC | |
| | | | | | mUmUmCmUG | |
| | | | | | GCAUCG*mU | |
| | | | | | *mU | |
| G029008 | 261 | TRBC2 | ACCAUGG | ACCAUGGCCAUCAGCACGA | mA*mC*mC* | chr7: |
| | | | CCAUCAG | GGGCAGUUGUAGCUCCCUG | mAmUGGmCm | 142802189- |
| | | | CACGAGG | AAACCGUUGCUACAAUAAG | CAmUCmAGC | 142802213 |
| | | | GCA | GCCGUCGAAAGAUGUGCCG | ACmGAGGmG | |
| | | | | CAACGCUCUGCCUUCUGGC | CAmGUUGmU | |
| | | | | AUCGUU | mAmGmCUCC | |
| | | | | | CmUmGmAmA | |
| | | | | | mAmCmCGUU | |
| | | | | | mGmCUAmCA | |
| | | | | | AU*AAGmGm | |
| | | | | | CCmGmUmCm | |
| | | | | | GmAmAmAmG | |
| | | | | | mAmUGUGCm | |
| | | | | | CGmCAAmCG | |
| | | | | | CUCUmGmCC | |
| | | | | | mUmUmCmUG | |
| | | | | | GCAUCG*mU | |
| | | | | | *mU | |
| G029009 | 262 | TRBC2 | UCUCUUC | UCUCUUCCACAGGUCAAGA | mU*mC*mU* | chr7: |
| | | | CACAGGU | GAAAGGUUGUAGCUCCCUG | mCmUUCmCm | 142802490- |
| | | | CAAGAGA | AAACCGUUGCUACAAUAAG | ACmAGmGUC | 142802514 |
| | | | AAG | GCCGUCGAAAGAUGUGCCG | AAmGAGAmA | |
| | | | | CAACGCUCUGCCUUCUGGC | AGmGUUGmU | |
| | | | | AUCGUU | mAmGmCUCC | |
| | | | | | CmUmGmAmA | |
| | | | | | mAmCmCGUU | |
| | | | | | mGmCUAmCA | |
| | | | | | AU*AAGmGm | |
| | | | | | CCmGmUmCm | |
| | | | | | GmAmAmAmG | |
| | | | | | mAmUGUGCm | |
| | | | | | CGmCAAmCG | |
| | | | | | CUCUmGmCC | |
| | | | | | mUmUmCmUG | |
| | | | | | GCAUCG*mU | |
| | | | | | *mU | |
| G029010 | 263 | TRBC2 | UCAAGAG | UCAAGAGAAAGGAUUCCAG | mU*mC*mA* | chr7: |
| | | | AAAGGAU | AGGCUGUUGUAGCUCCCUG | mAmGAGmAm | 142802503- |
| | | | UCCAGAG | AAACCGUUGCUACAAUAAG | AAmGGmAUU | 142802527 |
| | | | GCU | GCCGUCGAAAGAUGUGCCG | CCmAGAGmG | |
| | | | | CAACGCUCUGCCUUCUGGC | CUmGUUGmU | |
| | | | | AUCGUU | mAmGmCUCC | |
| | | | | | CmUmGmAmA | |
| | | | | | mAmCmCGUU | |
| | | | | | mGmCUAmCA | |
| | | | | | AU*AAGmGm | |
| | | | | | CCmGmUmCm | |
| | | | | | GmAmAmAmG | |
| | | | | | mAmUGUGCm | |
| | | | | | CGmCAAmCG | |
| | | | | | CUCUmGmCC | |
| | | | | | mUmUmCmUG | |
| | | | | | GCAUCG*mU | |
| | | | | | *mU | |
| G029011 | 264 | TRBC2 | AGCUAGC | AGCUAGCCUCUGGAAUCCU | mA*mG*mC* | chr7: |
| | | | CUCUGGA | UUCUCGUUGUAGCUCCCUG | mUmAGCmCm | 142802507- |
| | | | AUCCUUU | AAACCGUUGCUACAAUAAG | UCmUGmGAA | 142802531 |
| | | | CUC | GCCGUCGAAAGAUGUGCCG | UCmCUUUmC | |
| | | | | CAACGCUCUGCCUUCUGGC | UCmGUUGmU | |
| | | | | AUCGUU | mAmGmCUCC | |
| | | | | | CmUmGmAmA | |
| | | | | | mAmCmCGUU | |
| | | | | | mGmCUAmCA | |
| | | | | | AU*AAGmGm | |
| | | | | | CCmGmUmCm | |
| | | | | | GmAmAmAmG | |
| | | | | | mAmUGUGCm | |
| | | | | | CGmCAAmCG | |
| | | | | | CUCUmGmCC | |
| | | | | | mUmUmCmUG | |
| | | | | | GCAUCG*mU | |
| | | | | | *mU | |
| G029012 | 265 | TRBC2 | GGAUGGU | GGAUGGUUUUGGAGCUAGC | mG*mG*mA* | chr7: |
| | | | UUUGGAG | CUCUGGUUGUAGCUCCCUG | mUmGGUmUm | 142802519- |
| | | | CUAGCCU | AAACCGUUGCUACAAUAAG | UUmGGmAGC | 142802543 |
| | | | CUG | GCCGUCGAAAGAUGUGCCG | UAmGCCUmC | |
| | | | | CAACGCUCUGCCUUCUGGC | UGmGUUGmU | |
| | | | | AUCGUU | mAmGmCUCC | |
| | | | | | CmUmGmAmA | |
| | | | | | mAmCmCGUU | |
| | | | | | mGmCUAmCA | |
| | | | | | AU*AAGmGm | |
| | | | | | CCmGmUmCm | |
| | | | | | GmAmAmAmG | |
| | | | | | mAmUGUGCm | |
| | | | | | CGmCAAmCG | |
| | | | | | CUCUmGmCC | |
| | | | | | mUmUmCmUG | |
| | | | | | GCAUCG*mU | |
| | | | | | *mU | |

[0517] The terms “mA,” “mC,” “mU,” or “mG” may be used to denote a nucleotide that has been modified with 2′—O-Me. The terms A*, C*, U*, or G* may be used to denote a nucleotide that is linked to the next (e.g., 3′) nucleotide with a phosphorothioate (PS) bond.

[0518] In some embodiments, the TRBC guide RNA comprises a guide sequence selected from SEQ ID NOs: 201-265. In some embodiments, the TRBC guide RNA comprises a guide sequence that is at least 19, 20, 21, 22, 23, or 24 contiguous nucleotides of a sequence selected from SEQ ID NOs: 201-265. In some embodiments, the TRBC guide RNA comprises a guide sequence that is at least 95%, 90%, or 85% identical to a sequence selected from SEQ ID NOs: 201-265. In some embodiments, the TRBC guide RNA comprises a guide sequence that is at least 95% identical to a sequence selected from SEQ ID NOs: 201-265.

[0519] In some embodiments, the TRBC guide RNA comprises a guide sequence that comprises at least 10 contiguous nucleotides±10 nucleotides of a genomic coordinate listed in Table 3. As used herein, at least 10 contiguous nucleotides±10 nucleotides of a genomic coordinate means, for example, at least 10 contiguous nucleotides within the genomic coordinates wherein the genomic coordinates include 10 nucleotides in the 5′ direction and 10 nucleotides in the 3′ direction from the ranges listed in Table 3. For example, a TRBC guide RNA may comprise 10 contiguous nucleotides within the genomic coordinates chosen from: (a) chr7:142792690-142792714 and chr7:142792693-142792717; or (b) chr7:142791761-142791785; chr7:142791820-142791844; and chr7:142791939-142791963; chr7:142791756-142791780; or (c) chr7:142801104-142801124; chr7:142802103-142802127; and chr7:142802106-142802130; including the boundary nucleotides of these ranges. In some embodiments, the TRBC guide RNA comprises a guide sequence that is at least 19, 20, 21, 22, 23, or 24 contiguous nucleotides of a sequence that comprises 10 contiguous nucleotides±10 nucleotides of a genomic coordinate listed in Table 3. In some embodiments, the TRBC guide RNA comprises a guide sequence that is at least 95%, 90%, or 85% identical to a sequence selected from a sequence that is 19, 20, 21, 22, 23, or 24 contiguous nucleotides of a sequence that comprises 10 contiguous nucleotides±10 nucleotides of a genomic coordinate listed in Table 3.

[0520] In some embodiments, the TRBC guide RNA comprises a guide sequence that comprises at least 15 contiguous nucleotides±10 nucleotides of a genomic coordinate listed in Table 3. In some embodiments, the TRAC guide RNA comprises a guide sequence that comprises at least 24 contiguous nucleotides±10 nucleotides of a genomic coordinate listed in Table 3.

[0521] In some embodiments, the TRBC1 guide RNA comprises SEQ ID NO: 201. In some embodiments, the TRBC1 guide RNA comprises SEQ ID NO: 202. In some embodiments, the TRBC1 guide RNA comprises SEQ ID NO: 203. In some embodiments, the TRBC1 guide RNA comprises SEQ ID NO: 204. In some embodiments, the TRBC1 guide RNA comprises SEQ ID NO: 205. In some embodiments, the TRBC1 guide RNA comprises SEQ ID NO: 206. In some embodiments, the TRBC1 guide RNA comprises SEQ ID NO: 207. In some embodiments, the TRBC1 guide RNA comprises SEQ ID NO: 208. In some embodiments, the TRBC1 guide RNA comprises SEQ ID NO: 209. In some embodiments, the TRBC1 guide RNA comprises SEQ ID NO: 210. In some embodiments, the TRBC1 guide RNA comprises SEQ ID NO: 211. In some embodiments, the TRBC1 guide RNA comprises SEQ ID NO: 212. In some embodiments, the TRBC1 guide RNA comprises SEQ ID NO: 213. In some embodiments, the TRBC1 guide RNA comprises SEQ ID NO: 214. In some embodiments, the TRBC1 guide RNA comprises SEQ ID NO: 215. In some embodiments, the TRBC1 guide RNA comprises SEQ ID NO: 216. In some embodiments, the TRBC1 guide RNA comprises SEQ ID NO: 217. In some embodiments, the TRBC1 guide RNA comprises SEQ ID NO: 218. In some embodiments, the TRBC1 guide RNA comprises SEQ ID NO: 219. In some embodiments, the TRBC1 guide RNA comprises SEQ ID NO: 220. In some embodiments, the TRBC1 guide RNA comprises SEQ ID NO: 221.

[0522] In some embodiments, the TRBC guide RNA comprises SEQ ID NO. 222. In some embodiments, the TRBC guide RNA comprises SEQ ID NO. 223. In some embodiments, the TRBC guide RNA comprises SEQ ID NO. 224. In some embodiments, the TRBC guide RNA comprises SEQ ID NO. 225. In some embodiments, the TRBC guide RNA comprises SEQ ID NO. 226. In some embodiments, the TRBC guide RNA comprises SEQ ID NO. 227. In some embodiments, the TRBC guide RNA comprises SEQ ID NO. 228. In some embodiments, the TRBC guide RNA comprises SEQ ID NO. 229. In some embodiments, the TRBC guide RNA comprises SEQ ID NO. 230. In some embodiments, the TRBC guide RNA comprises SEQ ID NO. 231. In some embodiments, the TRBC guide RNA comprises SEQ ID NO. 232. In some embodiments, the TRBC guide RNA comprises SEQ ID NO. 233. In some embodiments, the TRBC guide RNA comprises SEQ ID NO. 234. In some embodiments, the TRBC guide RNA comprises SEQ ID NO. 235. In some embodiments, the TRBC guide RNA comprises SEQ ID NO. 236. In some embodiments, the TRBC guide RNA comprises SEQ ID NO. 237. In some embodiments, the TRBC guide RNA comprises SEQ ID NO. 238. In some embodiments, the TRBC guide RNA comprises SEQ ID NO. 239. In some embodiments, the TRBC guide RNA comprises SEQ ID NO. 240. In some embodiments, the TRBC guide RNA comprises SEQ ID NO. 241. In some embodiments, the TRBC guide RNA comprises SEQ ID NO. 242. In some embodiments, the TRBC guide RNA comprises SEQ ID NO. 243. In some embodiments, the TRBC guide RNA comprises SEQ ID NO. 244. In some embodiments, the TRBC guide RNA comprises SEQ ID NO. 245.

[0523] In some embodiments, the TRBC2 guide RNA comprises SEQ ID NO. 246. In some embodiments, the TRBC2 guide RNA comprises SEQ ID NO. 247. In some embodiments, the TRBC2 guide RNA comprises SEQ ID NO. 248. In some embodiments, the TRBC2 guide RNA comprises SEQ ID NO. 249. In some embodiments, the TRBC2 guide RNA comprises SEQ ID NO. 250. In some embodiments, the TRBC2 guide RNA comprises SEQ ID NO. 251. In some embodiments, the TRBC2 guide RNA comprises SEQ ID NO. 252. In some embodiments, the TRBC2 guide RNA comprises SEQ ID NO. 253. In some embodiments, the TRBC2 guide RNA comprises SEQ ID NO. 254. In some embodiments, the TRBC2 guide RNA comprises SEQ ID NO. 255. In some embodiments, the TRBC2 guide RNA comprises SEQ ID NO. 256. In some embodiments, the TRBC2 guide RNA comprises SEQ ID NO. 257. In some embodiments, the TRBC2 guide RNA comprises SEQ ID NO. 258. In some embodiments, the TRBC2 guide RNA comprises SEQ ID NO. 259. In some embodiments, the TRBC2 guide RNA comprises SEQ ID NO. 260. In some embodiments, the TRBC2 guide RNA comprises SEQ ID NO. 261. In some embodiments, the TRBC2 guide RNA comprises SEQ ID NO. 262. In some embodiments, the TRBC2 guide RNA comprises SEQ ID NO. 263. In some embodiments, the TRBC2 guide RNA comprises SEQ ID NO. 264. In some embodiments, the TRBC2 guide RNA comprises SEQ ID NO. 265.

[0524] In some embodiments, the TRBC1 guide RNA comprises a guide sequence of any one of: SEQ ID NOs: 215-216.

[0525] In some embodiments, the TRBC guide RNA comprises a nucleotide chosen form SEQ ID NOs: 223-224 and 229-230.

[0526] In some embodiments, the TRBC2 guide RNA comprises a guide sequence of any one of SEQ ID NOs: 246 and 259-260.

[0527] In some embodiments, the TRBC guide RNA comprises a guide sequence of any one of SEQ ID NOs: 215, 259, and 260.

[0528] In some embodiments, the TRBC guide RNA comprises a sequence listed in Table 3. In some embodiments, the TRBC guide RNA comprises a sequence of any one of SEQ ID NOs: 201-265. In some embodiments, the TRBC guide RNA comprises a sequence of SEQ ID NO: 215. In some embodiments, the TRBC guide RNA comprises a guide sequence comprising a sequence of any one of SEQ ID NOs: 201-265. In some embodiments, the TRBC guide RNA comprises a guide sequence comprising a sequence of SEQ ID NO: 215.

[0529] In some embodiments, the TRBC guide RNA comprises a sequence of any one of SEQ ID NOs: 1201-1265. In some embodiments, the TRBC guide RNA comprises a sequence of SEQ ID NO: 1215. In some embodiments, the TRBC guide RNA comprises a sequence of any one of SEQ ID NOs: 2201-2265 and 3005. In some embodiments, the TRBC guide RNA comprises a sequence of SEQ ID NO: 2215 or 3005. In some embodiments, the TRBC guide RNA comprises a sequence of SEQ ID NO: 2215. In some embodiments, the TRBC guide RNA comprises a sequence of SEQ ID NO: 3005.

[0530] In some embodiments, the TRBC guide RNA is a single guide RNA (sgRNA) comprising a sequence of any one of the sgRNA sequences listed in Table 3.

[0531] Additional embodiments of TRBC guide RNAs are provided herein, including e.g., exemplary modifications to the guide RNA.

### 1. Genetic Modifications to TRBC

[0532] In some embodiments, the methods and compositions disclosed herein genetically modify at least one nucleotide of the TRBC1 gene in a cell. In some embodiments, the genetic modification to TRBC1 reduces or eliminates the expression of TRBC1 protein on the surface of the genetically modified cell (or engineered cell). Genetic modifications encompass the population of modifications that results from contact with a genomic editing system (e.g., the population of edits that result from Cas9 and a TRBC1 guide RNA, or the population of edits that result from BC22 and a TRBC1 guide RNA).

[0533] In some embodiments, the methods and compositions disclosed herein genetically modify at least one nucleotide of the TRBC2 gene in a cell. In some embodiments, the genetic modification to TRBC2 reduces or eliminates the expression of TRBC2 protein on the surface of the genetically modified cell (or engineered cell). Genetic modifications encompass the population of modifications that results from contact with a genomic editing system (e.g., the population of edits that result from Cas9 and a TRBC2 guide RNA, or the population of edits that result from BC22 and a TRBC2 guide RNA).

[0534] In some embodiments, the genetic modification comprises at least one nucleotide within the genomic coordinates chosen from: (a) chr7:142791862-142793149 or (b) chr7:142801104-142802543. In some embodiments, the genetic modification comprises at least one nucleotide within the genomic coordinates chosen from any of the genomic coordinates listed in Table 3.

[0535] In some embodiments, the genetic modification comprises at least one nucleotide within the genomic coordinates chosen from: chr7:142792690-142792714 and chr7:142792693-142792717. In some embodiments, the genetic modification comprises at least 5 contiguous nucleotides within the genomic coordinates chosen from: chr7:142792690-142792714 and chr7:142792693-142792717. In some embodiments, the genetic modification comprises at least 10 contiguous nucleotides within the genomic coordinates chosen from: chr7:142792690-142792714 and chr7:142792693-142792717.

[0536] In some embodiments, the genetic modification comprises at least one nucleotide within the genomic coordinates chosen from: chr7:142791761-142791785; chr7:142791820-142791844; chr7:142791939-142791963; and chr7:142791756-142791780. In some embodiments, the genetic modification comprises at least 5 contiguous nucleotides within the genomic coordinates chosen from: chr7:142791761-142791785; chr7:142791820-142791844; chr7:142791939-142791963; and chr7:142791756-142791780. In some embodiments, the genetic modification comprises at least 10 contiguous nucleotides within the genomic coordinates chosen from: chr7:142791761-142791785; chr7:142791820-142791844; chr7:142791939-142791963; and chr7:142791756-142791780.

[0537] In some embodiments, the genetic modification comprises at least one nucleotide within the genomic coordinates chosen from: chr7:142801104-142801124; chr7:142802103-142802127; and chr7:142802106-142802130. In some embodiments, the genetic modification comprises at least 5 contiguous nucleotides within the genomic coordinates chosen from: chr7:142801104-142801124; chr7:142802103-142802127; and chr7:142802106-142802130. In some embodiments, the genetic modification comprises at least 10 contiguous nucleotides within the genomic coordinates chosen from chr7:142801104-142801124; chr7:142802103-142802127; and chr7:142802106-142802130.

[0538] In some embodiments, the genetic modification comprises at least one nucleotide within the genomic coordinates chosen from: chr7:142792690-142792714; chr7:142802103-142802127; and chr7:142802106-14280213. In some embodiments, the genetic modification comprises at least 5 contiguous nucleotides within the genomic coordinates chosen from: chr7:142792690-142792714; chr7:142802103-142802127; and chr7:142802106-14280213. In some embodiments, the genetic modification comprises at least 10 contiguous nucleotides within the genomic coordinates chosen from chr7:142792690-142792714; chr7:142802103-142802127; and chr7:142802106-14280213.

[0539] In some embodiments, the genetic modification comprises at least one indel, at least one C to T substitution, or at least one A to G substitution within the genomic coordinates chosen from: (a) chr7:142792690-142792714 and chr7:142792693-142792717; (b) chr7:142791761-142791785; chr7:142791820-142791844; chr7:142791939-142791963; and chr7:142791756-142791780; or (c) chr7:142801104-142801124; chr7:142802103-142802127; and chr7:142802106-142802130.

[0540] In some embodiments, the genetic modification comprises at least one indel, at least one C to T substitution, or at least one A to G substitution within the genomic coordinates chosen from: chr7:142792690-142792714; chr7:142802103-142802127; and chr7:142802106-14280213.

[0541] In some embodiments, the modification to TRBC comprises any one or more of an insertion, deletion, substitution, or deamination of at least one nucleotide in a target sequence. In some embodiments, the modification to TRBC comprises an insertion of 1, 2, 3, 4 or 5 or more nucleotides in a target sequence. In some embodiments, the modification to TRBC comprises a deletion of 1, 2, 3, 4 or 5 or more nucleotides in a target sequence. In other embodiments, the modification to TRBC comprises an insertion of 1, 2, 3, 4, 5, 6, 7, 8, 9, 10, 15, 20 or 25 or more nucleotides in a target sequence. In other embodiments, the modification to TRBC comprises a deletion of 1, 2, 3, 4, 5, 6, 7, 8, 9, 10, 15, 20 or 25 or more nucleotides in a target sequence. In some embodiments, the modification to TRBC comprises an indel, which is generally defined in the art as an insertion or deletion of less than 1000 base pairs (bp). In some embodiments, the modification to TRBC comprises an indel which results in a frameshift mutation in a target sequence. In some embodiments, the modification to TRBC comprises a substitution of 1, 2, 3, 4, 5, 6, 7, 8, 9, 10, 15, 20 or 25 or more nucleotides in a target sequence. In some embodiments, the modification to TRBC comprises one or more of an insertion, deletion, or substitution of nucleotides resulting from the incorporation of a template nucleic acid. In some embodiments, the modification to TRBC is not transient.

[0542] In some embodiments, the methods and compositions disclosed herein modify the TRBC gene in a cell using an RNA-guided DNA binding agent (e.g., a Cas enzyme). In some embodiments, the RNA-guided DNA binding agent is Cas9. In some embodiments, the RNA-guided DNA binding agent cuts within the TRBC1 gene, wherein the TRBC1 guide RNA targets a TRBC1 genomic target sequence comprising at least 10 contiguous nucleotides chr7:142791862-142793149. In some embodiments, the RNA-guided DNA binding agent cuts within the TRBC2 gene, wherein the TRBC3 guide RNA targets a TRBC2 genomic target sequence comprising at least 10 contiguous nucleotides within chr7:142801104-142802543.

[0543] In some embodiments, the genetic modification to TRBC results in utilization of an out-of-frame stop codon. In some embodiments, the genetic modification to TRBC results in exon skipping during splicing. In some embodiments, the genetic modification to TRBC1 results in reduced or eliminated TRBC1 protein expression by the cell. In some embodiments, the modification to the TRBC1 gene results in reduced or eliminated TRBC1 protein expression on the surface of the cell. In some embodiments, the genetic modification to TRBC2 results in reduced or eliminated TRBC2 protein expression by the cell. In some embodiments, the modification to the TRBC2 gene results in eliminated TRBC2 protein expression on the surface of the cell.

[0544] In some embodiments, TRBC1 expression on the surface of a cell is reduced as a result of the genetic modification to TRBC1. In some embodiments, TRBC1 expression on the surface of a cell is absent as a result of the genetic modification to TRBC1.

[0545] In some embodiments, TRBC2 expression on the surface of a cell is reduced as a result of the genetic modification to TRBC2. In some embodiments, TRBC2 expression on the surface of a cell is absent as a result of the genetic modification to TRBC2.

### 2. Efficacy of TRBC Guide RNAs

[0546] In some embodiments, the efficacy of a TRBC gRNA is determined when delivered or expressed together with other components forming an RNP. In some embodiments, the TRBC gRNA is expressed together with an RNA-guided DNA binding agent, such as a Cas protein, e.g. Cas9. In some embodiments, the TRBC gRNA is delivered to or expressed in a cell line that already stably expresses an RNA-guided DNA nuclease, such as a Cas nuclease or nickase, e.g. Cas9 nuclease or nickase. In some embodiments the TRBC gRNA is delivered to a cell as part of an RNP. In some embodiments, the TRBC gRNA is delivered to a cell along with a mRNA encoding an RNA-guided DNA nuclease, such as a Cas nuclease or nickase, e.g. Cas9 nuclease or nickase.

[0547] As described herein, use of an RNA-guided DNA nuclease and a TRBC guide RNA disclosed herein can lead to double-stranded breaks in the DNA which can produce errors in the form of insertion/deletion (indel) mutations upon repair by cellular machinery. Many mutations due to indels alter the reading frame or introduce premature stop codons and, therefore, produce a non-functional protein.

[0548] In some embodiments, the efficacy of particular TRBC gRNAs is determined based on in vitro models. In some embodiments, the in vitro model is HEK293 cells stably expressing Cas9 (HEK293_Cas9). In some embodiments the in vitro model is a peripheral blood mononuclear cell (PBMC). In some embodiments, the in vitro model is a T cell, such as primary human T cells. With respect to using primary cells, commercially available primary cells can be used to provide greater consistency between experiments. In some embodiments, the number of off-target sites at which a deletion or insertion occurs in an in vitro model (e.g., in T cell) is determined, e.g., by analyzing genomic DNA from transfected cells in vitro with Cas9 mRNA and the guide RNA. In some embodiments, such a determination comprises analyzing genomic DNA from the cells transfected in vitro with Cas9 mRNA, the TRBC guide RNA, and a donor oligonucleotide. Exemplary procedures for such determinations are provided in the working examples in which HEK293 cells, PBMCs, and human CD3+ T cells are used.

[0549] In some embodiments, the efficacy of particular TRBC gRNAs is determined across multiple in vitro cell models for a gRNA selection process. In some embodiments, a cell line comparison of data with selected TRBC gRNAs is performed. In some embodiments, cross screening in multiple cell models is performed.

[0550] In some embodiments, the efficacy of a TRBC guide RNA is measured by percent indels of TRBC. In some embodiments, the percent editing of TRBC is compared to the percent indels necessary to achieve knockdown of the TRBC protein products

[0551] In some embodiments, the efficacy of a guide RNA is measured by reduced or eliminated expression of a component of the T-cell receptor (TCR). In embodiments, the reduced or eliminated expression of a component of the T-cell receptor (TCR) includes reduced or eliminated expression of TRBC. In some embodiments, said reduced or eliminated expression of said component of the TCR is the result of introduction of one or more, e.g., one or two, e.g., one TRBC gRNA molecule described herein to said component of the TCR into said cell. In embodiments, said reduced or eliminated expression of a component of the TCR is as measured by flow cytometry, e.g., as described herein.

[0552] In some embodiments, the efficacy of a TRBC guide RNA is measured by the number and/or frequency of indels at off-target sequences within the genome of the target cell type, such as a T cell. In some embodiments, efficacious guide RNAs are provided which produce indels at off target sites at very low frequencies (e.g., <5%) in a cell population and/or relative to the frequency of indel creation at the target site. Thus, the disclosure provides for guide RNAs which do not exhibit off-target indel formation in the target cell type (e.g., a T cell), or which produce a frequency of off-target indel formation of <5% in a cell population and/or relative to the frequency of indel creation at the target site. In some embodiments, the disclosure provides guide RNAs which do not exhibit any off target indel formation in the target cell type (e.g., T cell). In some embodiments, guide RNAs are provided which produce indels at less than 5 off-target sites, e.g., as evaluated by one or more methods described herein. In some embodiments, guide RNAs are provided which produce indels at less than or equal to 4, 3, 2, or 1 off-target site(s) e.g., as evaluated by one or more methods described herein. In some embodiments, the off-target site(s) does not occur in a protein coding region in the target cell (e.g., hepatocyte) genome.

[0553] In some embodiments, detecting gene editing events, such as the formation of insertion/deletion (“indel”) mutations and homology directed repair (HDR) events in target DNA utilize linear amplification with a tagged primer and isolating the tagged amplification products (herein after referred to as “LAM-PCR,” or “Linear Amplification (LA)” method).

[0554] In some embodiments, the efficacy of a guide RNA is measured by the levels of functional protein complexes comprising the expressed protein product of the gene. In some embodiments, the efficacy of a guide RNA is measured by flow cytometric analysis of TCR expression by which the live population of edited cells is analyzed for loss of the TCR.

### F. CIITA Guide RNAs

[0555] The methods and compositions provided herein disclose CIITA guide RNAs useful for reducing the expression of MHC class II protein on the surface of a cell. In some embodiments, such guide RNAs direct an RNA-guided DNA binding agent to a CIITA genomic target sequence and may be referred to herein as “CIITA guide RNAs.” In some embodiments, the CIITA guide RNA directs an RNA-guided DNA binding agent to a human CIITA genomic target sequence. In some embodiments, the CIITA guide RNA comprises a guide sequence selected from SEQ ID NOs: 301, 302, 304-576.

[0556] In some embodiments, the methods and compositions disclosed herein comprise a CIITA guide RNA comprising a guide sequence that targets a CIITA genomic target sequence comprising at least 10 contiguous nucleotides within the genomic coordinates chosen from: (a) chr16:10877363-10907788 or (b) chr16:10906515-10908136. In some embodiments, the methods and compositions disclosed herein comprise a CIITA guide RNA comprising a guide sequence that targets a CIITA genomic target sequence comprising at least one nucleotide within the genomic coordinates chosen from: (a) chr16:10877363-10907788 or (b) chr16:10906515-10908136.

[0557] In some embodiments, the methods and compositions disclosed herein comprise a CIITA guide RNA comprising a guide sequence that directs an RNA-guided DNA binding agent to make cut in a CIITA gene, wherein the CIITA guide RNA targets a CIITA genomic target sequence comprising at least 10 contiguous nucleotides within the genomic coordinates chosen from: (a) chr16:10877363-10907788 or (b) chr16:10906515-10908136. In some embodiments, the methods and compositions disclosed herein comprise a CIITA guide RNA comprising a guide sequence that directs an RNA-guided DNA binding agent to make cut in a CIITA gene, wherein the CIITA guide RNA targets a CIITA genomic target sequence comprising at least one nucleotide within the genomic coordinates chosen from: (a) chr16:10877363-10907788 or (b) chr16:10906515-10908136.

[0558] In some embodiments, the methods and compositions disclose a CIITA guide RNA that directs an RNA-guided DNA binding agent to induce a double stranded break (DSB) or a single-stranded break (SSB) in a CIITA genomic target sequence. In some embodiments, the methods and compositions disclose a CIITA guide RNA that directs an RNA-guided DNA binding agent to make a cut in a CIITA genomic target sequence. In embodiments wherein the RNA-guided DNA cutting agent is Cas9, the cut or “cut site” occurs at the third base from the protospacer adjacent motif (PAM) sequence.

[0559] In some embodiments, a composition is provided comprising a CIITA guide RNA described herein and an RNA-guided DNA binding agent or a nucleic acid encoding an RNA-guided DNA binding agent.

[0560] In some embodiments, a composition is provided comprising a CIITA single-guide RNA (sgRNA) comprising a guide sequence that targets a genomic target comprising at least 10 contiguous nucleotides within the genomic coordinates chosen from: (a) chr16:10877363-10907788 or (b) chr16:10906515-10908136. In some embodiments, a composition is provided comprising a CIITA sgRNA described herein and an RNA-guided DNA binding agent or a nucleic acid encoding an RNA-guided DNA binding agent.

[0561] In some embodiments, a composition is provided comprising a CIITA dual-guide RNA (dgRNA) comprising a guide sequence that targets a genomic target comprising at least 10 contiguous nucleotides within the genomic coordinates chosen from: (a) chr16:10877363-10907788 or (b) chr16:10906515-10908136. In some embodiments, a composition is provided comprising a CIITA dgRNA described herein and an RNA-guided DNA binding agent or a nucleic acid encoding an RNA-guided DNA binding agent.

[0562] Exemplary CIITA guide sequences are shown below in Table 4.

TABLE 4
Exemplary CIITA guide sequences.

| | | | Exemplary | Exemplary Guide | | |
|---|---|---|---|---|---|---|
| | | | Guide RNA | RNA Modified | | |
| | SEQ ID | | Full Sequence | Sequence (SEQ ID | | |
| | NO to | | (SEQ ID NOS: | Nos: 2301, 2302, | | Genomic |
| Guide | the Guide | Guide | 1301, 1302, | 2304-2576 and | SEQ ID | Coordinates |
| ID | Sequence | Sequence | 1304-1576) | 3016-3205) | NOS | (hg38) |
| G026584 | 301 | UCAAAGUA | UCAAAGUACCCUA | mU*mC*mA*mAmAGUm | 2301 | chr16: |
| | | CCCUACAG | CAGGAGGACCAGU | AmCCmCUmACAGGmAG | | 10907504- |
| | | GAGGACCA | UGUAGCUCCCUGA | GAmCCAmGUUGmUmAm | | 10907528 |
| | | | AACCGUUGCUACA | GmCUCCCmUmGmAmAm | | |
| | | | AUAAGGCCGUCGA | AmCmCGUUmGmCUAmC | | |
| | | | AAGAUGUGCCGCA | AAU*AAGmGmCCmGmU | | |
| | | | ACGCUCUGCCUUC | mCmGmAmAmAmGmAmU | | |
| | | | UGGCAUCGUU | GUGCmCGmCAAmCGCU | | |
| | | | | CUmGmCCmUmUmCmUG | | |
| | | | | GCAUCG*mU*mU | | |
| G026585 | 302 | AGUACCCU | AGUACCCUACAGG | mA*mG*mU*mAmCCCm | 2302 | chr16: |
| | | ACAGGAGG | AGGACCAGUUCGU | UmACmAGmGAGGAmCC | | 10907508- |
| | | ACCAGUUC | UGUAGCUCCCUGA | AGmUUCmGUUGmUmAm | | 10907532 |
| | | | AACCGUUGCUACA | GmCUCCCmUmGmAmAm | | |
| | | | AUAAGGCCGUCGA | AmCmCGUUmGmCUAmC | | |
| | | | AAGAUGUGCCGCA | AAU*AAGmGmCCmGmU | | |
| | | | ACGCUCUGCCUUC | mCmGmAmAmAmGmAmU | | |
| | | | UGGCAUCGUU | GUGCmCGmCAAmCGCU | | |
| | | | | CUmGmCCmUmUmCmUG | | |
| | | | | GCAUCG*mU*mU | | |
| G029013 | 304 | UACCUGUC | UACCUGUCAGAGC | mU*mA*mC*mCmUGUm | 2304 | chr16: |
| | | AGAGCCCC | CCCAAGGUAAAGU | CmAGmAGmCCCCAmAG | | 10877363- |
| | | AAGGUAAA | UGUAGCUCCCUGA | GUmAAAmGUUGmUmAm | | 10877387 |
| | | | AACCGUUGCUACA | GmCUCCCmUmGmAmAm | | |
| | | | AUAAGGCCGUCGA | AmCmCGUUmGmCUAmC | | |
| | | | AAGAUGUGCCGCA | AAU*AAGmGmCCmGmU | | |
| | | | ACGCUCUGCCUUC | mCmGmAmAmAmGmAmU | | |
| | | | UGGCAUCGUU | GUGCmCGmCAAmCGCU | | |
| | | | | CUmGmCCmUmUmCmUG | | |
| | | | | GCAUCG*mU*mU | | |
| G029014 | 305 | UUUACCUU | UUUACCUUGGGGC | mU*mU*mU*mAmCCUm | 2305 | chr16: |
| | | GGGGCUCU | UCUGACAGGUAGU | UmGGmGGmCUCUGmAC | | 10877363- |
| | | GACAGGUA | UGUAGCUCCCUGA | AGmGUAmGUUGmUmAm | | 10877387 |
| | | | AACCGUUGCUACA | GmCUCCCmUmGmAmAm | | |
| | | | AUAAGGCCGUCGA | AmCmCGUUmGmCUAmC | | |
| | | | AAGAUGUGCCGCA | AAU*AAGmGmCCmGmU | | |
| | | | ACGCUCUGCCUUC | mCmGmAmAmAmGmAmU | | |
| | | | UGGCAUCGUU | GUGCmCGmCAAmCGCU | | |
| | | | | CUmGmCCmUmUmCmUG | | |
| | | | | GCAUCG*mU*mU | | |
| G029015 | 306 | UUUUACCU | UUUUACCUUGGGG | mU*mU*mU*mUmACCm | 2306 | chr16: |
| | | UGGGGCUC | CUCUGACAGGUGU | UmUGmGGmGCUCUmGA | | 10877364- |
| | | UGACAGGU | UGUAGCUCCCUGA | CAmGGUmGUUGmUmAm | | 10877388 |
| | | | AACCGUUGCUACA | GmCUCCCmUmGmAmAm | | |
| | | | AUAAGGCCGUCGA | AmCmCGUUmGmCUAmC | | |
| | | | AAGAUGUGCCGCA | AAU*AAGmGmCCmGmU | | |
| | | | ACGCUCUGCCUUC | mCmGmAmAmAmGmAmU | | |
| | | | UGGCAUCGUU | GUGCmCGmCAAmCGCU | | |
| | | | | CUmGmCCmUmUmCmUG | | |
| | | | | GCAUCG*mU*mU | | |
| G029016 | 307 | GCCUGGGA | GCCUGGGAGGGAA | mG*mC*mC*mUmGGGm | 2307 | chr16: |
| | | GGGAAGAC | GACAAUGCUCAGU | AmGGmGAmAGACAmAU | | 10895259- |
| | | AAUGCUCA | UGUAGCUCCCUGA | GCmUCAmGUUGmUmAm | | 10895283 |
| | | | AACCGUUGCUACA | GmCUCCCmUmGmAmAm | | |
| | | | AUAAGGCCGUCGA | AmCmCGUUmGmCUAmC | | |
| | | | AAGAUGUGCCGCA | AAU*AAGmGmCCmGmU | | |
| | | | ACGCUCUGCCUUC | mCmGmAmAmAmGmAmU | | |
| | | | UGGCAUCGUU | GUGCmCGmCAAmCGCU | | |
| | | | | CUmGmCCmUmUmCmUG | | |
| | | | | GCAUCG*mU*mU | | |
| G029017 | 308 | UCUUCCCU | UCUUCCCUCCCAG | mU*mC*mU*mUmCCCm | 2308 | chr16: |
| | | CCCAGGCA | GCAGCUCACAGGU | UmCCmCAmGGCAGmCU | | 10895268- |
| | | GCUCACAG | UGUAGCUCCCUGA | CAmCAGmGUUGmUmAm | | 10895292 |
| | | | AACCGUUGCUACA | GmCUCCCmUmGmAmAm | | |
| | | | AUAAGGCCGUCGA | AmCmCGUUmGmCUAmC | | |
| | | | AAGAUGUGCCGCA | AAU*AAGmGmCCmGmU | | |
| | | | ACGCUCUGCCUUC | mCmGmAmAmAmGmAmU | | |
| | | | UGGCAUCGUU | GUGCmCGmCAAmCGCU | | |
| | | | | CUmGmCCmUmUmCmUG | | |
| | | | | GCAUCG*mU*mU | | |
| G029018 | 309 | UCCCUCCC | UCCCUCCCAGGCA | mU*mC*mC*mCmUCCm | 2309 | chr16: |
| | | AGGCAGCU | GCUCACAGUGUGU | CmAGmGCmAGCUCmAC | | 10895271- |
| | | CACAGUGU | UGUAGCUCCCUGA | AGmUGUmGUUGmUmAm | | 10895295 |
| | | | AACCGUUGCUACA | GmCUCCCmUmGmAmAm | | |
| | | | AUAAGGCCGUCGA | AmCmCGUUmGmCUAmC | | |
| | | | AAGAUGUGCCGCA | AAU*AAGmGmCCmGmU | | |
| | | | ACGCUCUGCCUUC | mCmGmAmAmAmGmAmU | | |
| | | | UGGCAUCGUU | GUGCmCGmCAAmCGCU | | |
| | | | | CUmGmCCmUmUmCmUG | | |
| | | | | GCAUCG*mU*mU | | |
| G029019 | 310 | CUCACAGU | CUCACAGUGUGCC | mC*mU*mC*mAmCAGm | 2310 | chr16: |
| | | GUGCCACC | ACCAUGGAGUUGU | UmGUmGCmCACCAmUG | | 10895285- |
| | | AUGGAGUU | UGUAGCUCCCUGA | GAmGUUmGUUGmUmAm | | 10895309 |
| | | | AACCGUUGCUACA | GmCUCCCmUmGmAmAm | | |
| | | | AUAAGGCCGUCGA | AmCmCGUUmGmCUAmC | | |
| | | | AAGAUGUGCCGCA | AAU*AAGmGmCCmGmU | | |
| | | | ACGCUCUGCCUUC | mCmGmAmAmAmGmAmU | | |
| | | | UGGCAUCGUU | GUGCmCGmCAAmCGCU | | |
| | | | | CUmGmCCmUmUmCmUG | | |
| | | | | GCAUCG*mU*mU | | |
| G029020 | 311 | UCACAGUG | UCACAGUGUGCCA | mU*mC*mA*mCmAGUm | 2311 | chr16: |
| | | UGCCACCA | CCAUGGAGUUGGU | GmUGmCCmACCAUmGG | | 10895286- |
| | | UGGAGUUG | UGUAGCUCCCUGA | AGmUUGmGUUGmUmAm | | 10895310 |
| | | | AACCGUUGCUACA | GmCUCCCmUmGmAmAm | | |
| | | | AUAAGGCCGUCGA | AmCmCGUUmGmCUAmC | | |
| | | | AAGAUGUGCCGCA | AAU*AAGmGmCCmGmU | | |
| | | | ACGCUCUGCCUUC | mCmGmAmAmAmGmAmU | | |
| | | | UGGCAUCGUU | GUGCmCGmCAAmCGCU | | |
| | | | | CUmGmCCmUmUmCmUG | | |
| | | | | GCAUCG*mU*mU | | |
| G029021 | 312 | CACAGUGU | CACAGUGUGCCAC | mC*mA*mC*mAmGUGm | 2312 | chr16: |
| | | GCCACCAU | CAUGGAGUUGGGU | UmGCmCAmCCAUGmGA | | 10895287- |
| | | GGAGUUGG | UGUAGCUCCCUGA | GUmUGGmGUUGmUmAm | | 10895311 |
| | | | AACCGUUGCUACA | GmCUCCCmUmGmAmAm | | |
| | | | AUAAGGCCGUCGA | AmCmCGUUmGmCUAmC | | |
| | | | AAGAUGUGCCGCA | AAU*AAGmGmCCmGmU | | |
| | | | ACGCUCUGCCUUC | mCmGmAmAmAmGmAmU | | |
| | | | UGGCAUCGUU | GUGCmCGmCAAmCGCU | | |
| | | | | CUmGmCCmUmUmCmUG | | |
| | | | | GCAUCG*mU*mU | | |
| G029022 | 313 | GAAGAGAU | GAAGAGAUUGAGC | mG*mA*mA*mGmAGAm | 2313 | chr16: |
| | | UGAGCUCU | UCUACUCAGGUGU | UmUGmAGmCUCUAmCU | | 10895406- |
| | | ACUCAGGU | UGUAGCUCCCUGA | CAmGGUmGUUGmUmAm | | 10895430 |
| | | | AACCGUUGCUACA | GmCUCCCmUmGmAmAm | | |
| | | | AUAAGGCCGUCGA | AmCmCGUUmGmCUAmC | | |
| | | | AAGAUGUGCCGCA | AAU*AAGmGmCCmGmU | | |
| | | | ACGCUCUGCCUUC | mCmGmAmAmAmGmAmU | | |
| | | | UGGCAUCGUU | GUGCmCGmCAAmCGCU | | |
| | | | | CUmGmCCmUmUmCmUG | | |
| | | | | GCAUCG*mU*mU | | |
| G029023 | 314 | ACCUGAGU | ACCUGAGUAGAGC | mA*mC*mC*mUmGAGm | 2314 | chr16: |
| | | AGAGCUCA | UCAAUCUCUUCGU | UmAGmAGmCUCAAmUC | | 10895406- |
| | | AUCUCUUC | UGUAGCUCCCUGA | UCmUUCmGUUGmUmAm | | 10895430 |
| | | | AACCGUUGCUACA | GmCUCCCmUmGmAmAm | | |
| | | | AUAAGGCCGUCGA | AmCmCGUUmGmCUAmC | | |
| | | | AAGAUGUGCCGCA | AAU*AAGmGmCCmGmU | | |
| | | | ACGCUCUGCCUUC | mCmGmAmAmAmGmAmU | | |
| | | | UGGCAUCGUU | GUGCmCGmCAAmCGCU | | |
| | | | | CUmGmCCmUmUmCmUG | | |
| | | | | GCAUCG*mU*mU | | |
| G029024 | 315 | GAGAUUGA | GAGAUUGAGCUCU | mG*mA*mG*mAmUUGm | 2315 | chr16: |
| | | GCUCUACU | ACUCAGGUGGGGU | AmGCmUCmUACUCmAG | | 10895409- |
| | | CAGGUGGG | UGUAGCUCCCUGA | GUmGGGmGUUGmUmAm | | 10895433 |
| | | | AACCGUUGCUACA | GmCUCCCmUmGmAmAm | | |
| | | | AUAAGGCCGUCGA | AmCmCGUUmGmCUAmC | | |
| | | | AAGAUGUGCCGCA | AAU*AAGmGmCCmGmU | | |
| | | | ACGCUCUGCCUUC | mCmGmAmAmAmGmAmU | | |
| | | | UGGCAUCGUU | GUGCmCGmCAAmCGCU | | |
| | | | | CUmGmCCmUmUmCmUG | | |
| | | | | GCAUCG*mU*mU | | |
| G029025 | 316 | AUUGAGCU | AUUGAGCUCUACU | mA*mU*mU*mGmAGCm | 2316 | chr16: |
| | | CUACUCAG | CAGGUGGGCCCGU | UmCUmACmUCAGGmUG | | 10895412- |
| | | GUGGGCCC | UGUAGCUCCCUGA | GGmCCCmGUUGmUmAm | | 10895436 |
| | | | AACCGUUGCUACA | GmCUCCCmUmGmAmAm | | |
| | | | AUAAGGCCGUCGA | AmCmCGUUmGmCUAmC | | |
| | | | AAGAUGUGCCGCA | AAU*AAGmGmCCmGmU | | |
| | | | ACGCUCUGCCUUC | mCmGmAmAmAmGmAmU | | |
| | | | UGGCAUCGUU | GUGCmCGmCAAmCGCU | | |
| | | | | CUmGmCCmUmUmCmUG | | |
| | | | | GCAUCG*mU*mU | | |
| G029026 | 317 | UUGAGCUC | UUGAGCUCUACUC | mU*mU*mG*mAmGCUm | 2317 | chr16: |
| | | UACUCAGG | AGGUGGGCCCUGU | CmUAmCUmCAGGUmGG | | 10895413- |
| | | UGGGCCCU | UGUAGCUCCCUGA | GCmCCUmGUUGmUmAm | | 10895437 |
| | | | AACCGUUGCUACA | GmCUCCCmUmGmAmAm | | |
| | | | AUAAGGCCGUCGA | AmCmCGUUmGmCUAmC | | |
| | | | AAGAUGUGCCGCA | AAU*AAGmGmCCmGmU | | |
| | | | ACGCUCUGCCUUC | mCmGmAmAmAmGmAmU | | |
| | | | UGGCAUCGUU | GUGCmCGmCAAmCGCU | | |
| | | | | CUmGmCCmUmUmCmUG | | |
| | | | | GCAUCG*mU*mU | | |
| G029027 | 318 | AGGUGGGC | AGGUGGGCCCUCC | mA*mG*mG*mUmGGGm | 2318 | chr16: |
| | | CCUCCUCC | UCCCUCUGGUCGU | CmCCmUCmCUCCCmUC | | 10895426- |
| | | CUCUGGUC | UGUAGCUCCCUGA | UGmGUCmGUUGmUmAm | | 10895450 |
| | | | AACCGUUGCUACA | GmCUCCCmUmGmAmAm | | |
| | | | AUAAGGCCGUCGA | AmCmCGUUmGmCUAmC | | |
| | | | AAGAUGUGCCGCA | AAU*AAGmGmCCmGmU | | |
| | | | ACGCUCUGCCUUC | mCmGmAmAmAmGmAmU | | |
| | | | UGGCAUCGUU | GUGCmCGmCAAmCGCU | | |
| | | | | CUmGmCCmUmUmCmUG | | |
| | | | | GCAUCG*mU*mU | | |
| G029028 | 319 | CUUUUCCU | CUUUUCCUCCCAG | mC*mU*mU*mUmUCCm | 2319 | chr16: |
| | | CCCAGAAC | AACCCGACACAGU | UmCCmCAmGAACCmCG | | 10895655- |
| | | CCGACACA | UGUAGCUCCCUGA | ACmACAmGUUGmUmAm | | 10895679 |
| | | | AACCGUUGCUACA | GmCUCCCmUmGmAmAm | | |
| | | | AUAAGGCCGUCGA | AmCmCGUUmGmCUAmC | | |
| | | | AAGAUGUGCCGCA | AAU*AAGmGmCCmGmU | | |
| | | | ACGCUCUGCCUUC | mCmGmAmAmAmGmAmU | | |
| | | | UGGCAUCGUU | GUGCmCGmCAAmCGCU | | |
| | | | | CUmGmCCmUmUmCmUG | | |
| | | | | GCAUCG*mU*mU | | |
| G029029 | 320 | GUCUGUGU | GUCUGUGUCGGGU | mG*mU*mC*mUmGUGm | 2320 | chr16: |
| | | CGGGUUCU | UCUGGGAGGAAGU | UmCGmGGmUUCUGmGG | | 10895658- |
| | | GGGAGGAA | UGUAGCUCCCUGA | AGmGAAmGUUGmUmAm | | 10895682 |
| | | | AACCGUUGCUACA | GmCUCCCmUmGmAmAm | | |
| | | | AUAAGGCCGUCGA | AmCmCGUUmGmCUAmC | | |
| | | | AAGAUGUGCCGCA | AAU*AAGmGmCCmGmU | | |
| | | | ACGCUCUGCCUUC | mCmGmAmAmAmGmAmU | | |
| | | | UGGCAUCGUU | GUGCmCGmCAAmCGCU | | |
| | | | | CUmGmCCmUmUmCmUG | | |
| | | | | GCAUCG*mU*mU | | |
| G029030 | 321 | AACCCGAC | AACCCGACACAGA | mA*mA*mC*mCmCGAm | 2321 | chr16: |
| | | ACAGACAC | CACCAUCAACUGU | CmACmAGmACACCmAU | | 10895668- |
| | | CAUCAACU | UGUAGCUCCCUGA | CAmACUmGUUGmUmAm | | 10895692 |
| | | | AACCGUUGCUACA | GmCUCCCmUmGmAmAm | | |
| | | | AUAAGGCCGUCGA | AmCmCGUUmGmCUAmC | | |
| | | | AAGAUGUGCCGCA | AAU*AAGmGmCCmGmU | | |
| | | | ACGCUCUGCCUUC | mCmGmAmAmAmGmAmU | | |
| | | | UGGCAUCGUU | GUGCmCGmCAAmCGCU | | |
| | | | | CUmGmCCmUmUmCmUG | | |
| | | | | GCAUCG*mU*mU | | |
| G029031 | 322 | GGCUUAUG | GGCUUAUGCCAAU | mG*mG*mC*mUmUAUm | 2322 | chr16: |
| | | CCAAUAUC | AUCGGUGAGGAGU | GmCCmAAmUAUCGmGU | | 10895747- |
| | | GGUGAGGA | UGUAGCUCCCUGA | GAmGGAmGUUGmUmAm | | 10895771 |
| | | | AACCGUUGCUACA | GmCUCCCmUmGmAmAm | | |
| | | | AUAAGGCCGUCGA | AmCmCGUUmGmCUAmC | | |
| | | | AAGAUGUGCCGCA | AAU*AAGmGmCCmGmU | | |
| | | | ACGCUCUGCCUUC | mCmGmAmAmAmGmAmU | | |
| | | | UGGCAUCGUU | GUGCmCGmCAAmCGCU | | |
| | | | | CUmGmCCmUmUmCmUG | | |
| | | | | GCAUCG*mU*mU | | |
| G029032 | 323 | CUUCCUCA | CUUCCUCACCGAU | mC*mU*mU*mCmCUCm | 2323 | chr16: |
| | | CCGAUAUU | AUUGGCAUAAGGU | AmCCmGAmUAUUGmGC | | 10895749- |
| | | GGCAUAAG | UGUAGCUCCCUGA | AUmAAGmGUUGmUmAm | | 10895773 |
| | | | AACCGUUGCUACA | GmCUCCCmUmGmAmAm | | |
| | | | AUAAGGCCGUCGA | AmCmCGUUmGmCUAmC | | |
| | | | AAGAUGUGCCGCA | AAU*AAGmGmCCmGmU | | |
| | | | ACGCUCUGCCUUC | mCmGmAmAmAmGmAmU | | |
| | | | UGGCAUCGUU | GUGCmCGmCAAmCGCU | | |
| | | | | CUmGmCCmUmUmCmUG | | |
| | | | | GCAUCG*mU*mU | | |
| G029033 | 324 | GCUUCCUC | GCUUCCUCACCGA | mG*mC*mU*mUmCCUm | 2324 | chr16: |
| | | ACCGAUAU | UAUUGGCAUAAGU | CmACmCGmAUAUUmGG | | 10895750- |
| | | UGGCAUAA | UGUAGCUCCCUGA | CAmUAAmGUUGmUmAm | | 10895774 |
| | | | AACCGUUGCUACA | GmCUCCCmUmGmAmAm | | |
| | | | AUAAGGCCGUCGA | AmCmCGUUmGmCUAmC | | |
| | | | AAGAUGUGCCGCA | AAU*AAGmGmCCmGmU | | |
| | | | ACGCUCUGCCUUC | mCmGmAmAmAmGmAmU | | |
| | | | UGGCAUCGUU | GUGCmCGmCAAmCGCU | | |
| | | | | CUmGmCCmUmUmCmUG | | |
| | | | | GCAUCG*mU*mU | | |
| G029034 | 325 | UGCCAAUA | UGCCAAUAUCGGU | mU*mG*mC*mCmAAUm | 2325 | chr16: |
| | | UCGGUGAG | GAGGAAGCACCGU | AmUCmGGmUGAGGmAA | | 10895753- |
| | | GAAGCACC | UGUAGCUCCCUGA | GCmACCmGUUGmUmAm | | 10895777 |
| | | | AACCGUUGCUACA | GmCUCCCmUmGmAmAm | | |
| | | | AUAAGGCCGUCGA | AmCmCGUUmGmCUAmC | | |
| | | | AAGAUGUGCCGCA | AAU*AAGmGmCCmGmU | | |
| | | | ACGCUCUGCCUUC | mCmGmAmAmAmGmAmU | | |
| | | | UGGCAUCGUU | GUGCmCGmCAAmCGCU | | |
| | | | | CUmGmCCmUmUmCmUG | | |
| | | | | GCAUCG*mU*mU | | |
| G029035 | 326 | GGUGCUUC | GGUGCUUCCUCAC | mG*mG*mU*mGmCUUm | 2326 | chr16: |
| | | CUCACCGA | CGAUAUUGGCAGU | CmCUmCAmCCGAUmAU | | 10895753- |
| | | UAUUGGCA | UGUAGCUCCCUGA | UGmGCAmGUUGmUmAm | | 10895777 |
| | | | AACCGUUGCUACA | GmCUCCCmUmGmAmAm | | |
| | | | AUAAGGCCGUCGA | AmCmCGUUmGmCUAmC | | |
| | | | AAGAUGUGCCGCA | AAU*AAGmGmCCmGmU | | |
| | | | ACGCUCUGCCUUC | mCmGmAmAmAmGmAmU | | |
| | | | UGGCAUCGUU | GUGCmCGmCAAmCGCU | | |
| | | | | CUmGmCCmUmUmCmUG | | |
| | | | | GCAUCG*mU*mU | | |
| G029036 | 327 | GCCAAUAU | GCCAAUAUCGGUG | mG*mC*mC*mAmAUAm | 2327 | chr16: |
| | | CGGUGAGG | AGGAAGCACCUGU | UmCGmGUmGAGGAmAG | | 10895754- |
| | | AAGCACCU | UGUAGCUCCCUGA | CAmCCUmGUUGmUmAm | | 10895778 |
| | | | AACCGUUGCUACA | GmCUCCCmUmGmAmAm | | |
| | | | AUAAGGCCGUCGA | AmCmCGUUmGmCUAmC | | |
| | | | AAGAUGUGCCGCA | AAU*AAGmGmCCmGmU | | |
| | | | ACGCUCUGCCUUC | mCmGmAmAmAmGmAmU | | |
| | | | UGGCAUCGUU | GUGCmCGmCAAmCGCU | | |
| | | | | CUmGmCCmUmUmCmUG | | |
| | | | | GCAUCG*mU*mU | | |
| G029037 | 328 | UUUUCCUU | UUUUCCUUGUCUG | mU*mU*mU*mUmCCUm | 2328 | chr16: |
| | | GUCUGGGC | GGCAGCGGAACGU | UmGUmCUmGGGCAmGC | | 10898651- |
| | | AGCGGAAC | UGUAGCUCCCUGA | GGmAACmGUUGmUmAm | | 10898675 |
| | | | AACCGUUGCUACA | GmCUCCCmUmGmAmAm | | |
| | | | AUAAGGCCGUCGA | AmCmCGUUmGmCUAmC | | |
| | | | AAGAUGUGCCGCA | AAU*AAGmGmCCmGmU | | |
| | | | ACGCUCUGCCUUC | mCmGmAmAmAmGmAmU | | |
| | | | UGGCAUCGUU | GUGCmCGmCAAmCGCU | | |
| | | | | CUmGmCCmUmUmCmUG | | |
| | | | | GCAUCG*mU*mU | | |
| G029038 | 329 | GGGCAGCG | GGGCAGCGGAACU | mG*mG*mG*mCmAGCm | 2329 | chr16: |
| | | GAACUGGA | GGACCAGUAUGGU | GmGAmACmUGGACmCA | | 10898663- |
| | | CCAGUAUG | UGUAGCUCCCUGA | GUmAUGmGUUGmUmAm | | 10898687 |
| | | | AACCGUUGCUACA | GmCUCCCmUmGmAmAm | | |
| | | | AUAAGGCCGUCGA | AmCmCGUUmGmCUAmC | | |
| | | | AAGAUGUGCCGCA | AAU*AAGmGmCCmGmU | | |
| | | | ACGCUCUGCCUUC | mCmGmAmAmAmGmAmU | | |
| | | | UGGCAUCGUU | GUGCmCGmCAAmCGCU | | |
| | | | | CUmGmCCmUmUmCmUG | | |
| | | | | GCAUCG*mU*mU | | |
| G029039 | 330 | GAACUGGA | GAACUGGACCAGU | mG*mA*mA*mCmUGGm | 2330 | chr16: |
| | | CCAGUAUG | AUGUCUUCCAGGU | AmCCmAGmUAUGUmCU | | 10898671- |
| | | UCUUCCAG | UGUAGCUCCCUGA | UCmCAGmGUUGmUmAm | | 10898695 |
| | | | AACCGUUGCUACA | GmCUCCCmUmGmAmAm | | |
| | | | AUAAGGCCGUCGA | AmCmCGUUmGmCUAmC | | |
| | | | AAGAUGUGCCGCA | AAU*AAGmGmCCmGmU | | |
| | | | ACGCUCUGCCUUC | mCmGmAmAmAmGmAmU | | |
| | | | UGGCAUCGUU | GUGCmCGmCAAmCGCU | | |
| | | | | CUmGmCCmUmUmCmUG | | |
| | | | | GCAUCG*mU*mU | | |
| G029040 | 331 | AACUGGAC | AACUGGACCAGUA | mA*mA*mC*mUmGGAm | 2331 | chr16: |
| | | CAGUAUGU | UGUCUUCCAGGGU | CmCAmGUmAUGUCmUU | | 10898672- |
| | | CUUCCAGG | UGUAGCUCCCUGA | CCmAGGmGUUGmUmAm | | 10898696 |
| | | | AACCGUUGCUACA | GmCUCCCmUmGmAmAm | | |
| | | | AUAAGGCCGUCGA | AmCmCGUUmGmCUAmC | | |
| | | | AAGAUGUGCCGCA | AAU*AAGmGmCCmGmU | | |
| | | | ACGCUCUGCCUUC | mCmGmAmAmAmGmAmU | | |
| | | | UGGCAUCGUU | GUGCmCGmCAAmCGCU | | |
| | | | | CUmGmCCmUmUmCmUG | | |
| | | | | GCAUCG*mU*mU | | |
| G029041 | 332 | AUGUCUUC | AUGUCUUCCAGGA | mA*mU*mG*mUmCUUm | 2332 | chr16: |
| | | CAGGACUC | CUCCCAGCUGGGU | CmCAmGGmACUCCmCA | | 10898684- |
| | | CCAGCUGG | UGUAGCUCCCUGA | GCmUGGmGUUGmUmAm | | 10898708 |
| | | | AACCGUUGCUACA | GmCUCCCmUmGmAmAm | | |
| | | | AUAAGGCCGUCGA | AmCmCGUUmGmCUAmC | | |
| | | | AAGAUGUGCCGCA | AAU*AAGmGmCCmGmU | | |
| | | | ACGCUCUGCCUUC | mCmGmAmAmAmGmAmU | | |
| | | | UGGCAUCGUU | GUGCmCGmCAAmCGCU | | |
| | | | | CUmGmCCmUmUmCmUG | | |
| | | | | GCAUCG*mU*mU | | |
| G029042 | 333 | UUACUGAA | UUACUGAAAAUGU | mU*mU*mA*mCmUGAm | 2333 | chr16: |
| | | AAUGUCCU | CCUUGCUCAGGGU | AmAAmUGmUCCUUmGC | | 10898712- |
| | | UGCUCAGG | UGUAGCUCCCUGA | UCmAGGmGUUGmUmAm | | 10898736 |
| | | | AACCGUUGCUACA | GmCUCCCmUmGmAmAm | | |
| | | | AUAAGGCCGUCGA | AmCmCGUUmGmCUAmC | | |
| | | | AAGAUGUGCCGCA | AAU*AAGmGmCCmGmU | | |
| | | | ACGCUCUGCCUUC | mCmGmAmAmAmGmAmU | | |
| | | | UGGCAUCGUU | GUGCmCGmCAAmCGCU | | |
| | | | | CUmGmCCmUmUmCmUG | | |
| | | | | GCAUCG*mU*mU | | |
| G029043 | 334 | AACUUACU | AACUUACUGAAAA | mA*mA*mC*mUmUACm | 2334 | chr16: |
| | | GAAAAUGU | UGUCCUUGCUCGU | UmGAmAAmAUGUCmCU | | 10898715- |
| | | CCUUGCUC | UGUAGCUCCCUGA | UGmCUCmGUUGmUmAm | | 10898739 |
| | | | AACCGUUGCUACA | GmCUCCCmUmGmAmAm | | |
| | | | AUAAGGCCGUCGA | AmCmCGUUmGmCUAmC | | |
| | | | AAGAUGUGCCGCA | AAU*AAGmGmCCmGmU | | |
| | | | ACGCUCUGCCUUC | mCmGmAmAmAmGmAmU | | |
| | | | UGGCAUCGUU | GUGCmCGmCAAmCGCU | | |
| | | | | CUmGmCCmUmUmCmUG | | |
| | | | | GCAUCG*mU*mU | | |
| G029044 | 335 | AAACUUAC | AAACUUACUGAAA | mA*mA*mA*mCmUUAm | 2335 | chr16: |
| | | UGAAAAUG | AUGUCCUUGCUGU | CmUGmAAmAAUGUmCC | | 10898716- |
| | | UCCUUGCU | UGUAGCUCCCUGA | UUmGCUmGUUGmUmAm | | 10898740 |
| | | | AACCGUUGCUACA | GmCUCCCmUmGmAmAm | | |
| | | | AUAAGGCCGUCGA | AmCmCGUUmGmCUAmC | | |
| | | | AAGAUGUGCCGCA | AAU*AAGmGmCCmGmU | | |
| | | | ACGCUCUGCCUUC | mCmGmAmAmAmGmAmU | | |
| | | | UGGCAUCGUU | GUGCmCGmCAAmCGCU | | |
| | | | | CUmGmCCmUmUmCmUG | | |
| | | | | GCAUCG*mU*mU | | |
| G029045 | 336 | CCACCCAC | CCACCCACCACAA | mC*mC*mA*mCmCCAm | 2336 | chr16: |
| | | CACAAACU | ACUUACUGAAAGU | CmCAmCAmAACUUmAC | | 10898727- |
| | | UACUGAAA | UGUAGCUCCCUGA | UGmAAAmGUUGmUmAm | | 10898751 |
| | | | AACCGUUGCUACA | GmCUCCCmUmGmAmAm | | |
| | | | AUAAGGCCGUCGA | AmCmCGUUmGmCUAmC | | |
| | | | AAGAUGUGCCGCA | AAU*AAGmGmCCmGmU | | |
| | | | ACGCUCUGCCUUC | mCmGmAmAmAmGmAmU | | |
| | | | UGGCAUCGUU | GUGCmCGmCAAmCGCU | | |
| | | | | CUmGmCCmUmUmCmUG | | |
| | | | | GCAUCG*mU*mU | | |
| G029046 | 337 | UGUGCUCU | UGUGCUCUACUUU | mU*mG*mU*mGmCUCm | 2337 | chr16: |
| | | ACUUUGAG | GAGAAAAACCAGU | UmACmUUmUGAGAmAA | | 10898906- |
| | | AAAAACCA | UGUAGCUCCCUGA | AAmCCAmGUUGmUmAm | | 10898930 |
| | | | AACCGUUGCUACA | GmCUCCCmUmGmAmAm | | |
| | | | AUAAGGCCGUCGA | AmCmCGUUmGmCUAmC | | |
| | | | AAGAUGUGCCGCA | AAU*AAGmGmCCmGmU | | |
| | | | ACGCUCUGCCUUC | mCmGmAmAmAmGmAmU | | |
| | | | UGGCAUCGUU | GUGCmCGmCAAmCGCU | | |
| | | | | CUmGmCCmUmUmCmUG | | |
| | | | | GCAUCG*mU*mU | | |
| G029047 | 338 | GGUUUUUC | GGUUUUUCUCAAA | mG*mG*mU*mUmUUUm | 2338 | chr16: |
| | | UCAAAGUA | GUAGAGCACAUGU | CmUCmAAmAGUAGmAG | | 10898907- |
| | | GAGCACAU | UGUAGCUCCCUGA | CAmCAUmGUUGmUmAm | | 10898931 |
| | | | AACCGUUGCUACA | GmCUCCCmUmGmAmAm | | |
| | | | AUAAGGCCGUCGA | AmCmCGUUmGmCUAmC | | |
| | | | AAGAUGUGCCGCA | AAU*AAGmGmCCmGmU | | |
| | | | ACGCUCUGCCUUC | mCmGmAmAmAmGmAmU | | |
| | | | UGGCAUCGUU | GUGCmCGmCAAmCGCU | | |
| | | | | CUmGmCCmUmUmCmUG | | |
| | | | | GCAUCG*mU*mU | | |
| G029048 | 339 | GGUCCUAU | GGUCCUAUGUGCU | mG*mG*mU*mCmCUAm | 2339 | chr16: |
| | | GUGCUCUA | CUACUUUGAGAGU | UmGUmGCmUCUACmUU | | 10898913- |
| | | CUUUGAGA | UGUAGCUCCCUGA | UGmAGAmGUUGmUmAm | | 10898937 |
| | | | AACCGUUGCUACA | GmCUCCCmUmGmAmAm | | |
| | | | AUAAGGCCGUCGA | AmCmCGUUmGmCUAmC | | |
| | | | AAGAUGUGCCGCA | AAU*AAGmGmCCmGmU | | |
| | | | ACGCUCUGCCUUC | mCmGmAmAmAmGmAmU | | |
| | | | UGGCAUCGUU | GUGCmCGmCAAmCGCU | | |
| | | | | CUmGmCCmUmUmCmUG | | |
| | | | | GCAUCG*mU*mU | | |
| G029049 | 340 | CAGAAAAG | CAGAAAAGUCAGA | mC*mA*mG*mAmAAAm | 2340 | chr16: |
| | | UCAGAAAA | AAAGACGUGAGGU | GmUCmAGmAAAAGmAC | | 10898983- |
| | | GACGUGAG | UGUAGCUCCCUGA | GUmGAGmGUUGmUmAm | | 10899007 |
| | | | AACCGUUGCUACA | GmCUCCCmUmGmAmAm | | |
| | | | AUAAGGCCGUCGA | AmCmCGUUmGmCUAmC | | |
| | | | AAGAUGUGCCGCA | AAU*AAGmGmCCmGmU | | |
| | | | ACGCUCUGCCUUC | mCmGmAmAmAmGmAmU | | |
| | | | UGGCAUCGUU | GUGCmCGmCAAmCGCU | | |
| | | | | CUmGmCCmUmUmCmUG | | |
| | | | | GCAUCG*mU*mU | | |
| G029050 | 341 | AGAAAAGU | AGAAAAGUCAGAA | mA*mG*mA*mAmAAGm | 2341 | chr16: |
| | | CAGAAAAG | AAGACGUGAGUGU | UmCAmGAmAAAGAmCG | | 10898984- |
| | | ACGUGAGU | UGUAGCUCCCUGA | UGmAGUmGUUGmUmAm | | 10899008 |
| | | | AACCGUUGCUACA | GmCUCCCmUmGmAmAm | | |
| | | | AUAAGGCCGUCGA | AmCmCGUUmGmCUAmC | | |
| | | | AAGAUGUGCCGCA | AAU*AAGmGmCCmGmU | | |
| | | | ACGCUCUGCCUUC | mCmGmAmAmAmGmAmU | | |
| | | | UGGCAUCGUU | GUGCmCGmCAAmCGCU | | |
| | | | | CUmGmCCmUmUmCmUG | | |
| | | | | GCAUCG*mU*mU | | |
| G029051 | 342 | GAAAAGUC | GAAAAGUCAGAAA | mG*mA*mA*mAmAGUm | 2342 | chr16: |
| | | AGAAAAGA | AGACGUGAGUGGU | CmAGmAAmAAGACmGU | | 10898985- |
| | | CGUGAGUG | UGUAGCUCCCUGA | GAmGUGmGUUGmUmAm | | 10899009 |
| | | | AACCGUUGCUACA | GmCUCCCmUmGmAmAm | | |
| | | | AUAAGGCCGUCGA | AmCmCGUUmGmCUAmC | | |
| | | | AAGAUGUGCCGCA | AAU*AAGmGmCCmGmU | | |
| | | | ACGCUCUGCCUUC | mCmGmAmAmAmGmAmU | | |
| | | | UGGCAUCGUU | GUGCmCGmCAAmCGCU | | |
| | | | | CUmGmCCmUmUmCmUG | | |
| | | | | GCAUCG*mU*mU | | |
| G029052 | 343 | UCACUCAC | UCACUCACGUCUU | mU*mC*mA*mCmUCAm | 2343 | chr16: |
| | | GUCUUUUC | UUCUGACUUUUGU | CmGUmCUmUUUCUmGA | | 10898986- |
| | | UGACUUUU | UGUAGCUCCCUGA | CUmUUUmGUUGmUmAm | | 10899010 |
| | | | AACCGUUGCUACA | GmCUCCCmUmGmAmAm | | |
| | | | AUAAGGCCGUCGA | AmCmCGUUmGmCUAmC | | |
| | | | AAGAUGUGCCGCA | AAU*AAGmGmCCmGmU | | |
| | | | ACGCUCUGCCUUC | mCmGmAmAmAmGmAmU | | |
| | | | UGGCAUCGUU | GUGCmCGmCAAmCGCU | | |
| | | | | CUmGmCCmUmUmCmUG | | |
| | | | | GCAUCG*mU*mU | | |
| G029053 | 344 | CUCACUCA | CUCACUCACGUCU | mC*mU*mC*mAmCUCm | 2344 | chr16: |
| | | CGUCUUUU | UUUCUGACUUUGU | AmCGmUCmUUUUCmUG | | 10898987- |
| | | CUGACUUU | UGUAGCUCCCUGA | ACmUUUmGUUGmUmAm | | 10899011 |
| | | | AACCGUUGCUACA | GmCUCCCmUmGmAmAm | | |
| | | | AUAAGGCCGUCGA | AmCmCGUUmGmCUAmC | | |
| | | | AAGAUGUGCCGCA | AAU*AAGmGmCCmGmU | | |
| | | | ACGCUCUGCCUUC | mCmGmAmAmAmGmAmU | | |
| | | | UGGCAUCGUU | GUGCmCGmCAAmCGCU | | |
| | | | | CUmGmCCmUmUmCmUG | | |
| | | | | GCAUCG*mU*mU | | |
| G029054 | 345 | AAGUCAGA | AAGUCAGAAAAGA | mA*mA*mG*mUmCAGm | 2345 | chr16: |
| | | AAAGACGU | CGUGAGUGAGCGU | AmAAmAGmACGUGmAG | | 10898988- |
| | | GAGUGAGC | UGUAGCUCCCUGA | UGmAGCmGUUGmUmAm | | 10899012 |
| | | | AACCGUUGCUACA | GmCUCCCmUmGmAmAm | | |
| | | | AUAAGGCCGUCGA | AmCmCGUUmGmCUAmC | | |
| | | | AAGAUGUGCCGCA | AAU*AAGmGmCCmGmU | | |
| | | | ACGCUCUGCCUUC | mCmGmAmAmAmGmAmU | | |
| | | | UGGCAUCGUU | GUGCmCGmCAAmCGCU | | |
| | | | | CUmGmCCmUmUmCmUG | | |
| | | | | GCAUCG*mU*mU | | |
| G029055 | 346 | AGUCAGAA | AGUCAGAAAAGAC | mA*mG*mU*mCmAGAm | 2346 | chr16: |
| | | AAGACGUG | GUGAGUGAGCCGU | AmAAmGAmCGUGAmGU | | 10898989- |
| | | AGUGAGCC | UGUAGCUCCCUGA | GAmGCCmGUUGmUmAm | | 10899013 |
| | | | AACCGUUGCUACA | GmCUCCCmUmGmAmAm | | |
| | | | AUAAGGCCGUCGA | AmCmCGUUmGmCUAmC | | |
| | | | AAGAUGUGCCGCA | AAU*AAGmGmCCmGmU | | |
| | | | ACGCUCUGCCUUC | mCmGmAmAmAmGmAmU | | |
| | | | UGGCAUCGUU | GUGCmCGmCAAmCGCU | | |
| | | | | CUmGmCCmUmUmCmUG | | |
| | | | | GCAUCG*mU*mU | | |
| G029056 | 347 | AAAAGACG | AAAAGACGUGAGU | mA*mA*mA*mAmGACm | 2347 | chr16: |
| | | UGAGUGAG | GAGCCCCUCCCGU | GmUGmAGmUGAGCmCC | | 10898995- |
| | | CCCCUCCC | UGUAGCUCCCUGA | CUmCCCmGUUGmUmAm | | 10899019 |
| | | | AACCGUUGCUACA | GmCUCCCmUmGmAmAm | | |
| | | | AUAAGGCCGUCGA | AmCmCGUUmGmCUAmC | | |
| | | | AAGAUGUGCCGCA | AAU*AAGmGmCCmGmU | | |
| | | | ACGCUCUGCCUUC | mCmGmAmAmAmGmAmU | | |
| | | | UGGCAUCGUU | GUGCmCGmCAAmCGCU | | |
| | | | | CUmGmCCmUmUmCmUG | | |
| | | | | GCAUCG*mU*mU | | |
| G029057 | 348 | GACGUGAG | GACGUGAGUGAGC | mG*mA*mC*mGmUGAm | 2348 | chr16: |
| | | UGAGCCCC | CCCUCCCUGAUGU | GmUGmAGmCCCCUmCC | | 10898999- |
| | | UCCCUGAU | UGUAGCUCCCUGA | CUmGAUmGUUGmUmAm | | 10899023 |
| | | | AACCGUUGCUACA | GmCUCCCmUmGmAmAm | | |
| | | | AUAAGGCCGUCGA | AmCmCGUUmGmCUAmC | | |
| | | | AAGAUGUGCCGCA | AAU*AAGmGmCCmGmU | | |
| | | | ACGCUCUGCCUUC | mCmGmAmAmAmGmAmU | | |
| | | | UGGCAUCGUU | GUGCmCGmCAAmCGCU | | |
| | | | | CUmGmCCmUmUmCmUG | | |
| | | | | GCAUCG*mU*mU | | |
| G029058 | 349 | CUGCAGAG | CUGCAGAGAAAAC | mC*mU*mG*mCmAGAm | 2349 | chr16: |
| | | AAAACAUG | AUGUGAUCAGCGU | GmAAmAAmCAUGUmGA | | 10901489- |
| | | UGAUCAGC | UGUAGCUCCCUGA | UCmAGCmGUUGmUmAm | | 10901513 |
| | | | AACCGUUGCUACA | GmCUCCCmUmGmAmAm | | |
| | | | AUAAGGCCGUCGA | AmCmCGUUmGmCUAmC | | |
| | | | AAGAUGUGCCGCA | AAU*AAGmGmCCmGmU | | |
| | | | ACGCUCUGCCUUC | mCmGmAmAmAmGmAmU | | |
| | | | UGGCAUCGUU | GUGCmCGmCAAmCGCU | | |
| | | | | CUmGmCCmUmUmCmUG | | |
| | | | | GCAUCG*mU*mU | | |
| G029059 | 350 | GCUGCAGA | GCUGCAGAGAAAA | mG*mC*mU*mGmCAGm | 2350 | chr16: |
| | | GAAAACAU | CAUGUGAUCAGGU | AmGAmAAmACAUGmUG | | 10901490- |
| | | GUGAUCAG | UGUAGCUCCCUGA | AUmCAGmGUUGmUmAm | | 10901514 |
| | | | AACCGUUGCUACA | GmCUCCCmUmGmAmAm | | |
| | | | AUAAGGCCGUCGA | AmCmCGUUmGmCUAmC | | |
| | | | AAGAUGUGCCGCA | AAU*AAGmGmCCmGmU | | |
| | | | ACGCUCUGCCUUC | mCmGmAmAmAmGmAmU | | |
| | | | UGGCAUCGUU | GUGCmCGmCAAmCGCU | | |
| | | | | CUmGmCCmUmUmCmUG | | |
| | | | | GCAUCG*mU*mU | | |
| G029060 | 351 | GGCUGCAG | GGCUGCAGAGAAA | mG*mG*mC*mUmGCAm | 2351 | chr16: |
| | | AGAAAACA | ACAUGUGAUCAGU | GmAGmAAmAACAUmGU | | 10901491- |
| | | UGUGAUCA | UGUAGCUCCCUGA | GAmUCAmGUUGmUmAm | | 10901515 |
| | | | AACCGUUGCUACA | GmCUCCCmUmGmAmAm | | |
| | | | AUAAGGCCGUCGA | AmCmCGUUmGmCUAmC | | |
| | | | AAGAUGUGCCGCA | AAU*AAGmGmCCmGmU | | |
| | | | ACGCUCUGCCUUC | mCmGmAmAmAmGmAmU | | |
| | | | UGGCAUCGUU | GUGCmCGmCAAmCGCU | | |
| | | | | CUmGmCCmUmUmCmUG | | |
| | | | | GCAUCG*mU*mU | | |
| G029061 | 352 | UUUCUCUG | UUUCUCUGCAGCC | mU*mU*mU*mCmUCUm | 2352 | chr16: |
| | | CAGCCUUC | UUCCCAGAGGAGU | GmCAmGCmCUUCCmCA | | 10901502- |
| | | CCAGAGGA | UGUAGCUCCCUGA | GAmGGAmGUUGmUmAm | | 10901526 |
| | | | AACCGUUGCUACA | GmCUCCCmUmGmAmAm | | |
| | | | AUAAGGCCGUCGA | AmCmCGUUmGmCUAmC | | |
| | | | AAGAUGUGCCGCA | AAU*AAGmGmCCmGmU | | |
| | | | ACGCUCUGCCUUC | mCmGmAmAmAmGmAmU | | |
| | | | UGGCAUCGUU | GUGCmCGmCAAmCGCU | | |
| | | | | CUmGmCCmUmUmCmUG | | |
| | | | | GCAUCG*mU*mU | | |
| G029062 | 353 | CAGCCUUC | CAGCCUUCCCAGA | mC*mA*mG*mCmCUUm | 2353 | chr16: |
| | | CCAGAGGA | GGAGCUUCCGGGU | CmCCmAGmAGGAGmCU | | 10901510- |
| | | GCUUCCGG | UGUAGCUCCCUGA | UCmCGGmGUUGmUmAm | | 10901534 |
| | | | AACCGUUGCUACA | GmCUCCCmUmGmAmAm | | |
| | | | AUAAGGCCGUCGA | AmCmCGUUmGmCUAmC | | |
| | | | AAGAUGUGCCGCA | AAU*AAGmGmCCmGmU | | |
| | | | ACGCUCUGCCUUC | mCmGmAmAmAmGmAmU | | |
| | | | UGGCAUCGUU | GUGCmCGmCAAmCGCU | | |
| | | | | CUmGmCCmUmUmCmUG | | |
| | | | | GCAUCG*mU*mU | | |
| G029063 | 354 | UUCCAGUG | UUCCAGUGCUUCA | mU*mU*mC*mCmAGUm | 2354 | chr16: |
| | | CUUCAGGU | GGUCUGCCGGAGU | GmCUmUCmAGGUCmUG | | 10901529- |
| | | CUGCCGGA | UGUAGCUCCCUGA | CCmGGAmGUUGmUmAm | | 10901553 |
| | | | AACCGUUGCUACA | GmCUCCCmUmGmAmAm | | |
| | | | AUAAGGCCGUCGA | AmCmCGUUmGmCUAmC | | |
| | | | AAGAUGUGCCGCA | AAU*AAGmGmCCmGmU | | |
| | | | ACGCUCUGCCUUC | mCmGmAmAmAmGmAmU | | |
| | | | UGGCAUCGUU | GUGCmCGmCAAmCGCU | | |
| | | | | CUmGmCCmUmUmCmUG | | |
| | | | | GCAUCG*mU*mU | | |
| G029064 | 355 | ACACCUGG | ACACCUGGCUUCC | mA*mC*mA*mCmCUGm | 2355 | chr16: |
| | | CUUCCAGU | AGUGCUUCAGGGU | GmCUmUCmCAGUGmCU | | 10901538- |
| | | GCUUCAGG | UGUAGCUCCCUGA | UCmAGGmGUUGmUmAm | | 10901562 |
| | | | AACCGUUGCUACA | GmCUCCCmUmGmAmAm | | |
| | | | AUAAGGCCGUCGA | AmCmCGUUmGmCUAmC | | |
| | | | AAGAUGUGCCGCA | AAU*AAGmGmCCmGmU | | |
| | | | ACGCUCUGCCUUC | mCmGmAmAmAmGmAmU | | |
| | | | UGGCAUCGUU | GUGCmCGmCAAmCGCU | | |
| | | | | CUmGmCCmUmUmCmUG | | |
| | | | | GCAUCG*mU*mU | | |
| G029065 | 356 | CAGCCCAC | CAGCCCACCUGCC | mC*mA*mG*mCmCCAm | 2356 | chr16: |
| | | CUGCCCUG | CUGCACACCUGGU | CmCUmGCmCCUGCmAC | | 10901555- |
| | | CACACCUG | UGUAGCUCCCUGA | ACmCUGmGUUGmUmAm | | 10901579 |
| | | | AACCGUUGCUACA | GmCUCCCmUmGmAmAm | | |
| | | | AUAAGGCCGUCGA | AmCmCGUUmGmCUAmC | | |
| | | | AAGAUGUGCCGCA | AAU*AAGmGmCCmGmU | | |
| | | | ACGCUCUGCCUUC | mCmGmAmAmAmGmAmU | | |
| | | | UGGCAUCGUU | GUGCmCGmCAAmCGCU | | |
| | | | | CUmGmCCmUmUmCmUG | | |
| | | | | GCAUCG*mU*mU | | |
| G029066 | 357 | CACAGCCC | CACAGCCCACUUC | mC*mA*mC*mAmGCCm | 2357 | chr16: |
| | | ACUUCCUC | CUCACAGCUGAGU | CmACmUUmCCUCAmCA | | 10902017- |
| | | ACAGCUGA | UGUAGCUCCCUGA | GCmUGAmGUUGmUmAm | | 10902041 |
| | | | AACCGUUGCUACA | GmCUCCCmUmGmAmAm | | |
| | | | AUAAGGCCGUCGA | AmCmCGUUmGmCUAmC | | |
| | | | AAGAUGUGCCGCA | AAU*AAGmGmCCmGmU | | |
| | | | ACGCUCUGCCUUC | mCmGmAmAmAmGmAmU | | |
| | | | UGGCAUCGUU | GUGCmCGmCAAmCGCU | | |
| | | | | CUmGmCCmUmUmCmUG | | |
| | | | | GCAUCG*mU*mU | | |
| G029067 | 358 | ACAGCCCA | ACAGCCCACUUCC | mA*mC*mA*mGmCCCm | 2358 | chr16: |
| | | CUUCCUCA | UCACAGCUGAGGU | AmCUmUCmCUCACmAG | | 10902018- |
| | | CAGCUGAG | UGUAGCUCCCUGA | CUmGAGmGUUGmUmAm | | 10902042 |
| | | | AACCGUUGCUACA | GmCUCCCmUmGmAmAm | | |
| | | | AUAAGGCCGUCGA | AmCmCGUUmGmCUAmC | | |
| | | | AAGAUGUGCCGCA | AAU*AAGmGmCCmGmU | | |
| | | | ACGCUCUGCCUUC | mCmGmAmAmAmGmAmU | | |
| | | | UGGCAUCGUU | GUGCmCGmCAAmCGCU | | |
| | | | | CUmGmCCmUmUmCmUG | | |
| | | | | GCAUCG*mU*mU | | |
| G029068 | 359 | CUGCCUGC | CUGCCUGCGCUGU | mC*mU*mG*mCmCUGm | 2359 | chr16: |
| | | GCUGUUCA | UCAACCAGGAGGU | CmGCmUGmUUCAAmCC | | 10902114- |
| | | ACCAGGAG | UGUAGCUCCCUGA | AGmGAGmGUUGmUmAm | | 10902138 |
| | | | AACCGUUGCUACA | GmCUCCCmUmGmAmAm | | |
| | | | AUAAGGCCGUCGA | AmCmCGUUmGmCUAmC | | |
| | | | AAGAUGUGCCGCA | AAU*AAGmGmCCmGmU | | |
| | | | ACGCUCUGCCUUC | mCmGmAmAmAmGmAmU | | |
| | | | UGGCAUCGUU | GUGCmCGmCAAmCGCU | | |
| | | | | CUmGmCCmUmUmCmUG | | |
| | | | | GCAUCG*mU*mU | | |
| G029069 | 360 | CCUGCGCU | CCUGCGCUGUUCA | mC*mC*mU*mGmCGCm | 2360 | chr16: |
| | | GUUCAACC | ACCAGGAGCCAGU | UmGUmUCmAACCAmGG | | 10902117- |
| | | AGGAGCCA | UGUAGCUCCCUGA | AGmCCAmGUUGmUmAm | | 10902141 |
| | | | AACCGUUGCUACA | GmCUCCCmUmGmAmAm | | |
| | | | AUAAGGCCGUCGA | AmCmCGUUmGmCUAmC | | |
| | | | AAGAUGUGCCGCA | AAU*AAGmGmCCmGmU | | |
| | | | ACGCUCUGCCUUC | mCmGmAmAmAmGmAmU | | |
| | | | UGGCAUCGUU | GUGCmCGmCAAmCGCU | | |
| | | | | CUmGmCCmUmUmCmUG | | |
| | | | | GCAUCG*mU*mU | | |
| G029070 | 361 | CGCUGUUC | CGCUGUUCAACCA | mC*mG*mC*mUmGUUm | 2361 | chr16: |
| | | AACCAGGA | GGAGCCAGCCUGU | CmAAmCCmAGGAGmCC | | 10902121- |
| | | GCCAGCCU | UGUAGCUCCCUGA | AGmCCUmGUUGmUmAm | | 10902145 |
| | | | AACCGUUGCUACA | GmCUCCCmUmGmAmAm | | |
| | | | AUAAGGCCGUCGA | AmCmCGUUmGmCUAmC | | |
| | | | AAGAUGUGCCGCA | AAU*AAGmGmCCmGmU | | |
| | | | ACGCUCUGCCUUC | mCmGmAmAmAmGmAmU | | |
| | | | UGGCAUCGUU | GUGCmCGmCAAmCGCU | | |
| | | | | CUmGmCCmUmUmCmUG | | |
| | | | | GCAUCG*mU*mU | | |
| G029071 | 362 | ACCAGGAG | ACCAGGAGCCAGC | mA*mC*mC*mAmGGAm | 2362 | chr16: |
| | | CCAGCCUC | CUCCGGCCAGAGU | GmCCmAGmCCUCCmGG | | 10902130- |
| | | CGGCCAGA | UGUAGCUCCCUGA | CCmAGAmGUUGmUmAm | | 10902154 |
| | | | AACCGUUGCUACA | GmCUCCCmUmGmAmAm | | |
| | | | AUAAGGCCGUCGA | AmCmCGUUmGmCUAmC | | |
| | | | AAGAUGUGCCGCA | AAU*AAGmGmCCmGmU | | |
| | | | ACGCUCUGCCUUC | mCmGmAmAmAmGmAmU | | |
| | | | UGGCAUCGUU | GUGCmCGmCAAmCGCU | | |
| | | | | CUmGmCCmUmUmCmUG | | |
| | | | | GCAUCG*mU*mU | | |
| G029072 | 363 | GCCUCCGG | GCCUCCGGCCAGA | mG*mC*mC*mUmCCGm | 2363 | chr16: |
| | | CCAGAUGC | UGCGCCUGGAGGU | GmCCmAGmAUGCGmCC | | 10902141- |
| | | GCCUGGAG | UGUAGCUCCCUGA | UGmGAGmGUUGmUmAm | | 10902165 |
| | | | AACCGUUGCUACA | GmCUCCCmUmGmAmAm | | |
| | | | AUAAGGCCGUCGA | AmCmCGUUmGmCUAmC | | |
| | | | AAGAUGUGCCGCA | AAU*AAGmGmCCmGmU | | |
| | | | ACGCUCUGCCUUC | mCmGmAmAmAmGmAmU | | |
| | | | UGGCAUCGUU | GUGCmCGmCAAmCGCU | | |
| | | | | CUmGmCCmUmUmCmUG | | |
| | | | | GCAUCG*mU*mU | | |
| G029073 | 364 | CCGGCCAG | CCGGCCAGAUGCG | mC*mC*mG*mGmCCAm | 2364 | chr16: |
| | | AUGCGCCU | CCUGGAGAAAAGU | GmAUmGCmGCCUGmGA | | 10902145- |
| | | GGAGAAAA | UGUAGCUCCCUGA | GAmAAAmGUUGmUmAm | | 10902169 |
| | | | AACCGUUGCUACA | GmCUCCCmUmGmAmAm | | |
| | | | AUAAGGCCGUCGA | AmCmCGUUmGmCUAmC | | |
| | | | AAGAUGUGCCGCA | AAU*AAGmGmCCmGmU | | |
| | | | ACGCUCUGCCUUC | mCmGmAmAmAmGmAmU | | |
| | | | UGGCAUCGUU | GUGCmCGmCAAmCGCU | | |
| | | | | CUmGmCCmUmUmCmUG | | |
| | | | | GCAUCG*mU*mU | | |
| G029074 | 365 | AACAUACU | AACAUACUGGGAA | mA*mA*mC*mAmUACm | 2365 | chr16: |
| | | GGGAAUCU | UCUGGUCGGUUGU | UmGGmGAmAUCUGmGU | | 10902167- |
| | | GGUCGGUU | UGUAGCUCCCUGA | CGmGUUmGUUGmUmAm | | 10902191 |
| | | | AACCGUUGCUACA | GmCUCCCmUmGmAmAm | | |
| | | | AUAAGGCCGUCGA | AmCmCGUUmGmCUAmC | | |
| | | | AAGAUGUGCCGCA | AAU*AAGmGmCCmGmU | | |
| | | | ACGCUCUGCCUUC | mCmGmAmAmAmGmAmU | | |
| | | | UGGCAUCGUU | GUGCmCGmCAAmCGCU | | |
| | | | | CUmGmCCmUmUmCmUG | | |
| | | | | GCAUCG*mU*mU | | |
| G029075 | 366 | CUGCCUUU | CUGCCUUUGUCUC | mC*mU*mG*mCmCUUm | 2366 | chr16: |
| | | GUCUCUUG | UUGCAGUGCCUGU | UmGUmCUmCUUGCmAG | | 10902638- |
| | | CAGUGCCU | UGUAGCUCCCUGA | UGmCCUmGUUGmUmAm | | 10902662 |
| | | | AACCGUUGCUACA | GmCUCCCmUmGmAmAm | | |
| | | | AUAAGGCCGUCGA | AmCmCGUUmGmCUAmC | | |
| | | | AAGAUGUGCCGCA | AAU*AAGmGmCCmGmU | | |
| | | | ACGCUCUGCCUUC | mCmGmAmAmAmGmAmU | | |
| | | | UGGCAUCGUU | GUGCmCGmCAAmCGCU | | |
| | | | | CUmGmCCmUmUmCmUG | | |
| | | | | GCAUCG*mU*mU | | |
| G029076 | 367 | UUGUCUCU | UUGUCUCUUGCAG | mU*mU*mG*mUmCUCm | 2367 | chr16: |
| | | UGCAGUGC | UGCCUUUCUCCGU | UmUGmCAmGUGCCmUU | | 10902644- |
| | | CUUUCUCC | UGUAGCUCCCUGA | UCmUCCmGUUGmUmAm | | 10902668 |
| | | | AACCGUUGCUACA | GmCUCCCmUmGmAmAm | | |
| | | | AUAAGGCCGUCGA | AmCmCGUUmGmCUAmC | | |
| | | | AAGAUGUGCCGCA | AAU*AAGmGmCCmGmU | | |
| | | | ACGCUCUGCCUUC | mCmGmAmAmAmGmAmU | | |
| | | | UGGCAUCGUU | GUGCmCGmCAAmCGCU | | |
| | | | | CUmGmCCmUmUmCmUG | | |
| | | | | GCAUCG*mU*mU | | |
| G029077 | 368 | UGCCUUUC | UGCCUUUCUCCAG | mU*mG*mC*mCmUUUm | 2368 | chr16: |
| | | UCCAGUUC | UUCCUCGUUGAGU | CmUCmCAmGUUCCmUC | | 10902657- |
| | | CUCGUUGA | UGUAGCUCCCUGA | GUmUGAmGUUGmUmAm | | 10902681 |
| | | | AACCGUUGCUACA | GmCUCCCmUmGmAmAm | | |
| | | | AUAAGGCCGUCGA | AmCmCGUUmGmCUAmC | | |
| | | | AAGAUGUGCCGCA | AAU*AAGmGmCCmGmU | | |
| | | | ACGCUCUGCCUUC | mCmGmAmAmAmGmAmU | | |
| | | | UGGCAUCGUU | GUGCmCGmCAAmCGCU | | |
| | | | | CUmGmCCmUmUmCmUG | | |
| | | | | GCAUCG*mU*mU | | |
| G029078 | 369 | UCUCCCUG | UCUCCCUGAGGGA | mU*mC*mU*mCmCCUm | 2369 | chr16: |
| | | AGGGACCC | CCCAUCCAGUUGU | GmAGmGGmACCCAmUC | | 10902691- |
| | | AUCCAGUU | UGUAGCUCCCUGA | CAmGUUmGUUGmUmAm | | 10902715 |
| | | | AACCGUUGCUACA | GmCUCCCmUmGmAmAm | | |
| | | | AUAAGGCCGUCGA | AmCmCGUUmGmCUAmC | | |
| | | | AAGAUGUGCCGCA | AAU*AAGmGmCCmGmU | | |
| | | | ACGCUCUGCCUUC | mCmGmAmAmAmGmAmU | | |
| | | | UGGCAUCGUU | GUGCmCGmCAAmCGCU | | |
| | | | | CUmGmCCmUmUmCmUG | | |
| | | | | GCAUCG*mU*mU | | |
| G029079 | 370 | CUCCCUGA | CUCCCUGAGGGAC | mC*mU*mC*mCmCUGm | 2370 | chr16: |
| | | GGGACCCA | CCAUCCAGUUUGU | AmGGmGAmCCCAUmCC | | 10902692- |
| | | UCCAGUUU | UGUAGCUCCCUGA | AGmUUUmGUUGmUmAm | | 10902716 |
| | | | AACCGUUGCUACA | GmCUCCCmUmGmAmAm | | |
| | | | AUAAGGCCGUCGA | AmCmCGUUmGmCUAmC | | |
| | | | AAGAUGUGCCGCA | AAU*AAGmGmCCmGmU | | |
| | | | ACGCUCUGCCUUC | mCmGmAmAmAmGmAmU | | |
| | | | UGGCAUCGUU | GUGCmCGmCAAmCGCU | | |
| | | | | CUmGmCCmUmUmCmUG | | |
| | | | | GCAUCG*mU*mU | | |
| G029080 | 371 | CCUGAGGG | CCUGAGGGACCCA | mC*mC*mU*mGmAGGm | 2371 | chr16: |
| | | ACCCAUCC | UCCAGUUUGUCGU | GmACmCCmAUCCAmGU | | 10902695- |
| | | AGUUUGUC | UGUAGCUCCCUGA | UUmGUCmGUUGmUmAm | | 10902719 |
| | | | AACCGUUGCUACA | GmCUCCCmUmGmAmAm | | |
| | | | AUAAGGCCGUCGA | AmCmCGUUmGmCUAmC | | |
| | | | AAGAUGUGCCGCA | AAU*AAGmGmCCmGmU | | |
| | | | ACGCUCUGCCUUC | mCmGmAmAmAmGmAmU | | |
| | | | UGGCAUCGUU | GUGCmCGmCAAmCGCU | | |
| | | | | CUmGmCCmUmUmCmUG | | |
| | | | | GCAUCG*mU*mU | | |
| G029081 | 372 | GGACCCAU | GGACCCAUCCAGU | mG*mG*mA*mCmCCAm | 2372 | chr16: |
| | | CCAGUUUG | UUGUCCCCACCGU | UmCCmAGmUUUGUmCC | | 10902701- |
| | | UCCCCACC | UGUAGCUCCCUGA | CCmACCmGUUGmUmAm | | 10902725 |
| | | | AACCGUUGCUACA | GmCUCCCmUmGmAmAm | | |
| | | | AUAAGGCCGUCGA | AmCmCGUUmGmCUAmC | | |
| | | | AAGAUGUGCCGCA | AAU*AAGmGmCCmGmU | | |
| | | | ACGCUCUGCCUUC | mCmGmAmAmAmGmAmU | | |
| | | | UGGCAUCGUU | GUGCmCGmCAAmCGCU | | |
| | | | | CUmGmCCmUmUmCmUG | | |
| | | | | GCAUCG*mU*mU | | |
| G029082 | 373 | CCAGUUUG | CCAGUUUGUCCCC | mC*mC*mA*mGmUUUm | 2373 | chr16: |
| | | UCCCCACC | ACCAUCUCCACGU | GmUCmCCmCACCAmUC | | 10902709- |
| | | AUCUCCAC | UGUAGCUCCCUGA | UCmCACmGUUGmUmAm | | 10902733 |
| | | | AACCGUUGCUACA | GmCUCCCmUmGmAmAm | | |
| | | | AUAAGGCCGUCGA | AmCmCGUUmGmCUAmC | | |
| | | | AAGAUGUGCCGCA | AAU*AAGmGmCCmGmU | | |
| | | | ACGCUCUGCCUUC | mCmGmAmAmAmGmAmU | | |
| | | | UGGCAUCGUU | GUGCmCGmCAAmCGCU | | |
| | | | | CUmGmCCmUmUmCmUG | | |
| | | | | GCAUCG*mU*mU | | |
| G029083 | 374 | CAGUUUGU | CAGUUUGUCCCCA | mC*mA*mG*mUmUUGm | 2374 | chr16: |
| | | CCCCACCA | CCAUCUCCACUGU | UmCCmCCmACCAUmCU | | 10902710- |
| | | UCUCCACU | UGUAGCUCCCUGA | CCmACUmGUUGmUmAm | | 10902734 |
| | | | AACCGUUGCUACA | GmCUCCCmUmGmAmAm | | |
| | | | AUAAGGCCGUCGA | AmCmCGUUmGmCUAmC | | |
| | | | AAGAUGUGCCGCA | AAU*AAGmGmCCmGmU | | |
| | | | ACGCUCUGCCUUC | mCmGmAmAmAmGmAmU | | |
| | | | UGGCAUCGUU | GUGCmCGmCAAmCGCU | | |
| | | | | CUmGmCCmUmUmCmUG | | |
| | | | | GCAUCG*mU*mU | | |
| G029084 | 375 | AGUUUGUC | AGUUUGUCCCCAC | mA*mG*mU*mUmUGUm | 2375 | chr16: |
| | | CCCACCAU | CAUCUCCACUCGU | CmCCmCAmCCAUCmUC | | 10902711- |
| | | CUCCACUC | UGUAGCUCCCUGA | CAmCUCmGUUGmUmAm | | 10902735 |
| | | | AACCGUUGCUACA | GmCUCCCmUmGmAmAm | | |
| | | | AUAAGGCCGUCGA | AmCmCGUUmGmCUAmC | | |
| | | | AAGAUGUGCCGCA | AAU*AAGmGmCCmGmU | | |
| | | | ACGCUCUGCCUUC | mCmGmAmAmAmGmAmU | | |
| | | | UGGCAUCGUU | GUGCmCGmCAAmCGCU | | |
| | | | | CUmGmCCmUmUmCmUG | | |
| | | | | GCAUCG*mU*mU | | |
| G029085 | 376 | CAAAUCUC | CAAAUCUCUGAGG | mC*mA*mA*mAmUCUm | 2376 | chr16: |
| | | UGAGGCUG | CUGGAACAGGGGU | CmUGmAGmGCUGGmAA | | 10902752- |
| | | GAACAGGG | UGUAGCUCCCUGA | CAmGGGmGUUGmUmAm | | 10902776 |
| | | | AACCGUUGCUACA | GmCUCCCmUmGmAmAm | | |
| | | | AUAAGGCCGUCGA | AmCmCGUUmGmCUAmC | | |
| | | | AAGAUGUGCCGCA | AAU*AAGmGmCCmGmU | | |
| | | | ACGCUCUGCCUUC | mCmGmAmAmAmGmAmU | | |
| | | | UGGCAUCGUU | GUGCmCGmCAAmCGCU | | |
| | | | | CUmGmCCmUmUmCmUG | | |
| | | | | GCAUCG*mU*mU | | |
| G029086 | 377 | ACCAUGGU | ACCAUGGUAGAUG | mA*mC*mC*mAmUGGm | 2377 | chr16: |
| | | AGAUGAAU | AAUAUACUGGAGU | UmAGmAUmGAAUAmUA | | 10902779- |
| | | AUACUGGA | UGUAGCUCCCUGA | CUmGGAmGUUGmUmAm | | 10902803 |
| | | | AACCGUUGCUACA | GmCUCCCmUmGmAmAm | | |
| | | | AUAAGGCCGUCGA | AmCmCGUUmGmCUAmC | | |
| | | | AAGAUGUGCCGCA | AAU*AAGmGmCCmGmU | | |
| | | | ACGCUCUGCCUUC | mCmGmAmAmAmGmAmU | | |
| | | | UGGCAUCGUU | GUGCmCGmCAAmCGCU | | |
| | | | | CUmGmCCmUmUmCmUG | | |
| | | | | GCAUCG*mU*mU | | |
| G029087 | 378 | CACCAUGG | CACCAUGGUAGAU | mC*mA*mC*mCmAUGm | 2378 | chr16: |
| | | UAGAUGAA | GAAUAUACUGGGU | GmUAmGAmUGAAUmAU | | 10902780- |
| | | UAUACUGG | UGUAGCUCCCUGA | ACmUGGmGUUGmUmAm | | 10902804 |
| | | | AACCGUUGCUACA | GmCUCCCmUmGmAmAm | | |
| | | | AUAAGGCCGUCGA | AmCmCGUUmGmCUAmC | | |
| | | | AAGAUGUGCCGCA | AAU*AAGmGmCCmGmU | | |
| | | | ACGCUCUGCCUUC | mCmGmAmAmAmGmAmU | | |
| | | | UGGCAUCGUU | GUGCmCGmCAAmCGCU | | |
| | | | | CUmGmCCmUmUmCmUG | | |
| | | | | GCAUCG*mU*mU | | |
| G029088 | 379 | UCACCAUG | UCACCAUGGUAGA | mU*mC*mA*mCmCAUm | 2379 | chr16: |
| | | GUAGAUGA | UGAAUAUACUGGU | GmGUmAGmAUGAAmUA | | 10902781- |
| | | AUAUACUG | UGUAGCUCCCUGA | UAmCUGmGUUGmUmAm | | 10902805 |
| | | | AACCGUUGCUACA | GmCUCCCmUmGmAmAm | | |
| | | | AUAAGGCCGUCGA | AmCmCGUUmGmCUAmC | | |
| | | | AAGAUGUGCCGCA | AAU*AAGmGmCCmGmU | | |
| | | | ACGCUCUGCCUUC | mCmGmAmAmAmGmAmU | | |
| | | | UGGCAUCGUU | GUGCmCGmCAAmCGCU | | |
| | | | | CUmGmCCmUmUmCmUG | | |
| | | | | GCAUCG*mU*mU | | |
| G029089 | 380 | UCUACCAU | UCUACCAUGGUGA | mU*mC*mU*mAmCCAm | 2380 | chr16: |
| | | GGUGAGUG | GUGCGGGGCCUGU | UmGGmUGmAGUGCmGG | | 10902792- |
| | | CGGGGCCU | UGUAGCUCCCUGA | GGmCCUmGUUGmUmAm | | 10902816 |
| | | | AACCGUUGCUACA | GmCUCCCmUmGmAmAm | | |
| | | | AUAAGGCCGUCGA | AmCmCGUUmGmCUAmC | | |
| | | | AAGAUGUGCCGCA | AAU*AAGmGmCCmGmU | | |
| | | | ACGCUCUGCCUUC | mCmGmAmAmAmGmAmU | | |
| | | | UGGCAUCGUU | GUGCmCGmCAAmCGCU | | |
| | | | | CUmGmCCmUmUmCmUG | | |
| | | | | GCAUCG*mU*mU | | |
| G029090 | 381 | CUACCAUG | CUACCAUGGUGAG | mC*mU*mA*mCmCAUm | 2381 | chr16: |
| | | GUGAGUGC | UGCGGGGCCUGGU | GmGUmGAmGUGCGmGG | | 10902793- |
| | | GGGGCCUG | UGUAGCUCCCUGA | GCmCUGmGUUGmUmAm | | 10902817 |
| | | | AACCGUUGCUACA | GmCUCCCmUmGmAmAm | | |
| | | | AUAAGGCCGUCGA | AmCmCGUUmGmCUAmC | | |
| | | | AAGAUGUGCCGCA | AAU*AAGmGmCCmGmU | | |
| | | | ACGCUCUGCCUUC | mCmGmAmAmAmGmAmU | | |
| | | | UGGCAUCGUU | GUGCmCGmCAAmCGCU | | |
| | | | | CUmGmCCmUmUmCmUG | | |
| | | | | GCAUCG*mU*mU | | |
| G029091 | 382 | UACCAUGG | UACCAUGGUGAGU | mU*mA*mC*mCmAUGm | 2382 | chr16: |
| | | UGAGUGCG | GCGGGGCCUGGGU | GmUGmAGmUGCGGmGG | | 10902794- |
| | | GGGCCUGG | UGUAGCUCCCUGA | CCmUGGmGUUGmUmAm | | 10902818 |
| | | | AACCGUUGCUACA | GmCUCCCmUmGmAmAm | | |
| | | | AUAAGGCCGUCGA | AmCmCGUUmGmCUAmC | | |
| | | | AAGAUGUGCCGCA | AAU*AAGmGmCCmGmU | | |
| | | | ACGCUCUGCCUUC | mCmGmAmAmAmGmAmU | | |
| | | | UGGCAUCGUU | GUGCmCGmCAAmCGCU | | |
| | | | | CUmGmCCmUmUmCmUG | | |
| | | | | GCAUCG*mU*mU | | |
| G029092 | 383 | AUGGUGAG | AUGGUGAGUGCGG | mA*mU*mG*mGmUGAm | 2383 | chr16: |
| | | UGCGGGGC | GGCCUGGCUCCGU | GmUGmCGmGGGCCmUG | | 10902798- |
| | | CUGGCUCC | UGUAGCUCCCUGA | GCmUCCmGUUGmUmAm | | 10902822 |
| | | | AACCGUUGCUACA | GmCUCCCmUmGmAmAm | | |
| | | | AUAAGGCCGUCGA | AmCmCGUUmGmCUAmC | | |
| | | | AAGAUGUGCCGCA | AAU*AAGmGmCCmGmU | | |
| | | | ACGCUCUGCCUUC | mCmGmAmAmAmGmAmU | | |
| | | | UGGCAUCGUU | GUGCmCGmCAAmCGCU | | |
| | | | | CUmGmCCmUmUmCmUG | | |
| | | | | GCAUCG*mU*mU | | |
| G029093 | 384 | GUGAGUGC | GUGAGUGCGGGGC | mG*mU*mG*mAmGUGm | 2384 | chr16: |
| | | GGGGCCUG | CUGGCUCCCCGGU | CmGGmGGmCCUGGmCU | | 10902801- |
| | | GCUCCCCG | UGUAGCUCCCUGA | CCmCCGmGUUGmUmAm | | 10902825 |
| | | | AACCGUUGCUACA | GmCUCCCmUmGmAmAm | | |
| | | | AUAAGGCCGUCGA | AmCmCGUUmGmCUAmC | | |
| | | | AAGAUGUGCCGCA | AAU*AAGmGmCCmGmU | | |
| | | | ACGCUCUGCCUUC | mCmGmAmAmAmGmAmU | | |
| | | | UGGCAUCGUU | GUGCmCGmCAAmCGCU | | |
| | | | | CUmGmCCmUmUmCmUG | | |
| | | | | GCAUCG*mU*mU | | |
| G029094 | 385 | ACUCUCCA | ACUCUCCACCCCC | mA*mC*mU*mCmUCCm | 2385 | chr16: |
| | | CCCCCAAU | AAUGUAGGUGAGU | AmCCmCCmCAAUGmUA | | 10903710- |
| | | GUAGGUGA | UGUAGCUCCCUGA | GGmUGAmGUUGmUmAm | | 10903734 |
| | | | AACCGUUGCUACA | GmCUCCCmUmGmAmAm | | |
| | | | AUAAGGCCGUCGA | AmCmCGUUmGmCUAmC | | |
| | | | AAGAUGUGCCGCA | AAU*AAGmGmCCmGmU | | |
| | | | ACGCUCUGCCUUC | mCmGmAmAmAmGmAmU | | |
| | | | UGGCAUCGUU | GUGCmCGmCAAmCGCU | | |
| | | | | CUmGmCCmUmUmCmUG | | |
| | | | | GCAUCG*mU*mU | | |
| G029095 | 386 | CUCUCCAC | CUCUCCACCCCCA | mC*mU*mC*mUmCCAm | 2386 | chr16: |
| | | CCCCAAUG | AUGUAGGUGAGGU | CmCCmCCmAAUGUmAG | | 10903711- |
| | | UAGGUGAG | UGUAGCUCCCUGA | GUmGAGmGUUGmUmAm | | 10903735 |
| | | | AACCGUUGCUACA | GmCUCCCmUmGmAmAm | | |
| | | | AUAAGGCCGUCGA | AmCmCGUUmGmCUAmC | | |
| | | | AAGAUGUGCCGCA | AAU*AAGmGmCCmGmU | | |
| | | | ACGCUCUGCCUUC | mCmGmAmAmAmGmAmU | | |
| | | | UGGCAUCGUU | GUGCmCGmCAAmCGCU | | |
| | | | | CUmGmCCmUmUmCmUG | | |
| | | | | GCAUCG*mU*mU | | |
| G029096 | 387 | UCUCCACC | UCUCCACCCCCAA | mU*mC*mU*mCmCACm | 2387 | chr16: |
| | | CCCAAUGU | UGUAGGUGAGGGU | CmCCmCAmAUGUAmGG | | 10903712- |
| | | AGGUGAGG | UGUAGCUCCCUGA | UGmAGGmGUUGmUmAm | | 10903736 |
| | | | AACCGUUGCUACA | GmCUCCCmUmGmAmAm | | |
| | | | AUAAGGCCGUCGA | AmCmCGUUmGmCUAmC | | |
| | | | AAGAUGUGCCGCA | AAU*AAGmGmCCmGmU | | |
| | | | ACGCUCUGCCUUC | mCmGmAmAmAmGmAmU | | |
| | | | UGGCAUCGUU | GUGCmCGmCAAmCGCU | | |
| | | | | CUmGmCCmUmUmCmUG | | |
| | | | | GCAUCG*mU*mU | | |
| G029097 | 388 | ACCCCCAA | ACCCCCAAUGUAG | mA*mC*mC*mCmCCAm | 2388 | chr16: |
| | | UGUAGGUG | GUGAGGUGCCCGU | AmUGmUAmGGUGAmGG | | 10903717- |
| | | AGGUGCCC | UGUAGCUCCCUGA | UGmCCCmGUUGmUmAm | | 10903741 |
| | | | AACCGUUGCUACA | GmCUCCCmUmGmAmAm | | |
| | | | AUAAGGCCGUCGA | AmCmCGUUmGmCUAmC | | |
| | | | AAGAUGUGCCGCA | AAU*AAGmGmCCmGmU | | |
| | | | ACGCUCUGCCUUC | mCmGmAmAmAmGmAmU | | |
| | | | UGGCAUCGUU | GUGCmCGmCAAmCGCU | | |
| | | | | CUmGmCCmUmUmCmUG | | |
| | | | | GCAUCG*mU*mU | | |
| G029098 | 389 | CCAAUGUA | CCAAUGUAGGUGA | mC*mC*mA*mAmUGUm | 2389 | chr16: |
| | | GGUGAGGU | GGUGCCCCAGGGU | AmGGmUGmAGGUGmCC | | 10903721- |
| | | GCCCCAGG | UGUAGCUCCCUGA | CCmAGGmGUUGmUmAm | | 10903745 |
| | | | AACCGUUGCUACA | GmCUCCCmUmGmAmAm | | |
| | | | AUAAGGCCGUCGA | AmCmCGUUmGmCUAmC | | |
| | | | AAGAUGUGCCGCA | AAU*AAGmGmCCmGmU | | |
| | | | ACGCUCUGCCUUC | mCmGmAmAmAmGmAmU | | |
| | | | UGGCAUCGUU | GUGCmCGmCAAmCGCU | | |
| | | | | CUmGmCCmUmUmCmUG | | |
| | | | | GCAUCG*mU*mU | | |
| G029099 | 390 | AGGUGAGG | AGGUGAGGUGCCC | mA*mG*mG*mUmGAGm | 2390 | chr16: |
| | | UGCCCCAG | CAGGCCAGCCAGU | GmUGmCCmCCAGGmCC | | 10903728- |
| | | GCCAGCCA | UGUAGCUCCCUGA | AGmCCAmGUUGmUmAm | | 10903752 |
| | | | AACCGUUGCUACA | GmCUCCCmUmGmAmAm | | |
| | | | AUAAGGCCGUCGA | AmCmCGUUmGmCUAmC | | |
| | | | AAGAUGUGCCGCA | AAU*AAGmGmCCmGmU | | |
| | | | ACGCUCUGCCUUC | mCmGmAmAmAmGmAmU | | |
| | | | UGGCAUCGUU | GUGCmCGmCAAmCGCU | | |
| | | | | CUmGmCCmUmUmCmUG | | |
| | | | | GCAUCG*mU*mU | | |
| G029100 | 391 | GGUGAGGU | GGUGAGGUGCCCC | mG*mG*mU*mGmAGGm | 2391 | chr16: |
| | | GCCCCAGG | AGGCCAGCCAAGU | UmGCmCCmCAGGCmCA | | 10903729- |
| | | CCAGCCAA | UGUAGCUCCCUGA | GCmCAAmGUUGmUmAm | | 10903753 |
| | | | AACCGUUGCUACA | GmCUCCCmUmGmAmAm | | |
| | | | AUAAGGCCGUCGA | AmCmCGUUmGmCUAmC | | |
| | | | AAGAUGUGCCGCA | AAU*AAGmGmCCmGmU | | |
| | | | ACGCUCUGCCUUC | mCmGmAmAmAmGmAmU | | |
| | | | UGGCAUCGUU | GUGCmCGmCAAmCGCU | | |
| | | | | CUmGmCCmUmUmCmUG | | |
| | | | | GCAUCG*mU*mU | | |
| G029101 | 392 | GUGAGGUG | GUGAGGUGCCCCA | mG*mU*mG*mAmGGUm | 2392 | chr16: |
| | | CCCCAGGC | GGCCAGCCAAGGU | GmCCmCCmAGGCCmAG | | 10903730- |
| | | CAGCCAAG | UGUAGCUCCCUGA | CCmAAGmGUUGmUmAm | | 10903754 |
| | | | AACCGUUGCUACA | GmCUCCCmUmGmAmAm | | |
| | | | AUAAGGCCGUCGA | AmCmCGUUmGmCUAmC | | |
| | | | AAGAUGUGCCGCA | AAU*AAGmGmCCmGmU | | |
| | | | ACGCUCUGCCUUC | mCmGmAmAmAmGmAmU | | |
| | | | UGGCAUCGUU | GUGCmCGmCAAmCGCU | | |
| | | | | CUmGmCCmUmUmCmUG | | |
| | | | | GCAUCG*mU*mU | | |
| G029102 | 393 | UGAGGUGC | UGAGGUGCCCCAG | mU*mG*mA*mGmGUGm | 2393 | chr16: |
| | | CCCAGGCC | GCCAGCCAAGUGU | CmCCmCAmGGCCAmGC | | 10903731- |
| | | AGCCAAGU | UGUAGCUCCCUGA | CAmAGUmGUUGmUmAm | | 10903755 |
| | | | AACCGUUGCUACA | GmCUCCCmUmGmAmAm | | |
| | | | AUAAGGCCGUCGA | AmCmCGUUmGmCUAmC | | |
| | | | AAGAUGUGCCGCA | AAU*AAGmGmCCmGmU | | |
| | | | ACGCUCUGCCUUC | mCmGmAmAmAmGmAmU | | |
| | | | UGGCAUCGUU | GUGCmCGmCAAmCGCU | | |
| | | | | CUmGmCCmUmUmCmUG | | |
| | | | | GCAUCG*mU*mU | | |
| G029103 | 394 | GGUGCCCC | GGUGCCCCAGGCC | mG*mG*mU*mGmCCCm | 2394 | chr16: |
| | | AGGCCAGC | AGCCAAGUACCGU | CmAGmGCmCAGCCmAA | | 10903734- |
| | | CAAGUACC | UGUAGCUCCCUGA | GUmACCmGUUGmUmAm | | 10903758 |
| | | | AACCGUUGCUACA | GmCUCCCmUmGmAmAm | | |
| | | | AUAAGGCCGUCGA | AmCmCGUUmGmCUAmC | | |
| | | | AAGAUGUGCCGCA | AAU*AAGmGmCCmGmU | | |
| | | | ACGCUCUGCCUUC | mCmGmAmAmAmGmAmU | | |
| | | | UGGCAUCGUU | GUGCmCGmCAAmCGCU | | |
| | | | | CUmGmCCmUmUmCmUG | | |
| | | | | GCAUCG*mU*mU | | |
| G029104 | 395 | GUGCCCCA | GUGCCCCAGGCCA | mG*mU*mG*mCmCCCm | 2395 | chr16: |
| | | GGCCAGCC | GCCAAGUACCCGU | AmGGmCCmAGCCAmAG | | 10903735- |
| | | AAGUACCC | UGUAGCUCCCUGA | UAmCCCmGUUGmUmAm | | 10903759 |
| | | | AACCGUUGCUACA | GmCUCCCmUmGmAmAm | | |
| | | | AUAAGGCCGUCGA | AmCmCGUUmGmCUAmC | | |
| | | | AAGAUGUGCCGCA | AAU*AAGmGmCCmGmU | | |
| | | | ACGCUCUGCCUUC | mCmGmAmAmAmGmAmU | | |
| | | | UGGCAUCGUU | GUGCmCGmCAAmCGCU | | |
| | | | | CUmGmCCmUmUmCmUG | | |
| | | | | GCAUCG*mU*mU | | |
| G029105 | 396 | AAGUACCC | AAGUACCCCCUCC | mA*mA*mG*mUmACCm | 2396 | chr16: |
| | | CCUCCCAG | CAGUGGAUUCAGU | CmCCmUCmCCAGUmGG | | 10903751- |
| | | UGGAUUCA | UGUAGCUCCCUGA | AUmUCAmGUUGmUmAm | | 10903775 |
| | | | AACCGUUGCUACA | GmCUCCCmUmGmAmAm | | |
| | | | AUAAGGCCGUCGA | AmCmCGUUmGmCUAmC | | |
| | | | AAGAUGUGCCGCA | AAU*AAGmGmCCmGmU | | |
| | | | ACGCUCUGCCUUC | mCmGmAmAmAmGmAmU | | |
| | | | UGGCAUCGUU | GUGCmCGmCAAmCGCU | | |
| | | | | CUmGmCCmUmUmCmUG | | |
| | | | | GCAUCG*mU*mU | | |
| G029106 | 397 | CCUCCCGA | CCUCCCGAGCAAA | mC*mC*mU*mCmCCGm | 2397 | chr16: |
| | | GCAAACAU | CAUGACAGGUAGU | AmGCmAAmACAUGmAC | | 10903874- |
| | | GACAGGUA | UGUAGCUCCCUGA | AGmGUAmGUUGmUmAm | | 10903898 |
| | | | AACCGUUGCUACA | GmCUCCCmUmGmAmAm | | |
| | | | AUAAGGCCGUCGA | AmCmCGUUmGmCUAmC | | |
| | | | AAGAUGUGCCGCA | AAU*AAGmGmCCmGmU | | |
| | | | ACGCUCUGCCUUC | mCmGmAmAmAmGmAmU | | |
| | | | UGGCAUCGUU | GUGCmCGmCAAmCGCU | | |
| | | | | CUmGmCCmUmUmCmUG | | |
| | | | | GCAUCG*mU*mU | | |
| G029107 | 398 | CUCCCGAG | CUCCCGAGCAAAC | mC*mU*mC*mCmCGAm | 2398 | chr16: |
| | | CAAACAUG | AUGACAGGUAAGU | GmCAmAAmCAUGAmCA | | 10903875- |
| | | ACAGGUAA | UGUAGCUCCCUGA | GGmUAAmGUUGmUmAm | | 10903899 |
| | | | AACCGUUGCUACA | GmCUCCCmUmGmAmAm | | |
| | | | AUAAGGCCGUCGA | AmCmCGUUmGmCUAmC | | |
| | | | AAGAUGUGCCGCA | AAU*AAGmGmCCmGmU | | |
| | | | ACGCUCUGCCUUC | mCmGmAmAmAmGmAmU | | |
| | | | UGGCAUCGUU | GUGCmCGmCAAmCGCU | | |
| | | | | CUmGmCCmUmUmCmUG | | |
| | | | | GCAUCG*mU*mU | | |
| G029108 | 399 | CAAACAUG | CAAACAUGACAGG | mC*mA*mA*mAmCAUm | 2399 | chr16: |
| | | ACAGGUAA | UAAGGACCCUUGU | GmACmAGmGUAAGmGA | | 10903883- |
| | | GGACCCUU | UGUAGCUCCCUGA | CCmCUUmGUUGmUmAm | | 10903907 |
| | | | AACCGUUGCUACA | GmCUCCCmUmGmAmAm | | |
| | | | AUAAGGCCGUCGA | AmCmCGUUmGmCUAmC | | |
| | | | AAGAUGUGCCGCA | AAU*AAGmGmCCmGmU | | |
| | | | ACGCUCUGCCUUC | mCmGmAmAmAmGmAmU | | |
| | | | UGGCAUCGUU | GUGCmCGmCAAmCGCU | | |
| | | | | CUmGmCCmUmUmCmUG | | |
| | | | | GCAUCG*mU*mU | | |
| G029109 | 400 | UUGUGCUC | UUGUGCUCUGGAG | mU*mU*mG*mUmGCUm | 2400 | chr16: |
| | | UGGAGAUG | AUGGAGAAGCAGU | CmUGmGAmGAUGGmAG | | 10904726- |
| | | GAGAAGCA | UGUAGCUCCCUGA | AAmGCAmGUUGmUmAm | | 10904750 |
| | | | AACCGUUGCUACA | GmCUCCCmUmGmAmAm | | |
| | | | AUAAGGCCGUCGA | AmCmCGUUmGmCUAmC | | |
| | | | AAGAUGUGCCGCA | AAU*AAGmGmCCmGmU | | |
| | | | ACGCUCUGCCUUC | mCmGmAmAmAmGmAmU | | |
| | | | UGGCAUCGUU | GUGCmCGmCAAmCGCU | | |
| | | | | CUmGmCCmUmUmCmUG | | |
| | | | | GCAUCG*mU*mU | | |
| G029110 | 401 | GCUUCUCC | GCUUCUCCAUCUC | mG*mC*mU*mUmCUCm | 2401 | chr16: |
| | | AUCUCCAG | CAGAGCACAAGGU | CmAUmCUmCCAGAmGC | | 10904727- |
| | | AGCACAAG | UGUAGCUCCCUGA | ACmAAGmGUUGmUmAm | | 10904751 |
| | | | AACCGUUGCUACA | GmCUCCCmUmGmAmAm | | |
| | | | AUAAGGCCGUCGA | AmCmCGUUmGmCUAmC | | |
| | | | AAGAUGUGCCGCA | AAU*AAGmGmCCmGmU | | |
| | | | ACGCUCUGCCUUC | mCmGmAmAmAmGmAmU | | |
| | | | UGGCAUCGUU | GUGCmCGmCAAmCGCU | | |
| | | | | CUmGmCCmUmUmCmUG | | |
| | | | | GCAUCG*mU*mU | | |
| G029111 | 402 | CUUCUCCA | CUUCUCCAUCUCC | mC*mU*mU*mCmUCCm | 2402 | chr16: |
| | | UCUCCAGA | AGAGCACAAGAGU | AmUCmUCmCAGAGmCA | | 10904728- |
| | | GCACAAGA | UGUAGCUCCCUGA | CAmAGAmGUUGmUmAm | | 10904752 |
| | | | AACCGUUGCUACA | GmCUCCCmUmGmAmAm | | |
| | | | AUAAGGCCGUCGA | AmCmCGUUmGmCUAmC | | |
| | | | AAGAUGUGCCGCA | AAU*AAGmGmCCmGmU | | |
| | | | ACGCUCUGCCUUC | mCmGmAmAmAmGmAmU | | |
| | | | UGGCAUCGUU | GUGCmCGmCAAmCGCU | | |
| | | | | CUmGmCCmUmUmCmUG | | |
| | | | | GCAUCG*mU*mU | | |
| G029112 | 403 | UUCUCCAU | UUCUCCAUCUCCA | mU*mU*mC*mUmCCAm | 2403 | chr16: |
| | | CUCCAGAG | GAGCACAAGACGU | UmCUmCCmAGAGCmAC | | 10904729- |
| | | CACAAGAC | UGUAGCUCCCUGA | AAmGACmGUUGmUmAm | | 10904753 |
| | | | AACCGUUGCUACA | GmCUCCCmUmGmAmAm | | |
| | | | AUAAGGCCGUCGA | AmCmCGUUmGmCUAmC | | |
| | | | AAGAUGUGCCGCA | AAU*AAGmGmCCmGmU | | |
| | | | ACGCUCUGCCUUC | mCmGmAmAmAmGmAmU | | |
| | | | UGGCAUCGUU | GUGCmCGmCAAmCGCU | | |
| | | | | CUmGmCCmUmUmCmUG | | |
| | | | | GCAUCG*mU*mU | | |
| G029113 | 404 | UCUCCAUC | UCUCCAUCUCCAG | mU*mC*mU*mCmCAUm | 2404 | chr16: |
| | | UCCAGAGC | AGCACAAGACGGU | CmUCmCAmGAGCAmCA | | 10904730- |
| | | ACAAGACG | UGUAGCUCCCUGA | AGmACGmGUUGmUmAm | | 10904754 |
| | | | AACCGUUGCUACA | GmCUCCCmUmGmAmAm | | |
| | | | AUAAGGCCGUCGA | AmCmCGUUmGmCUAmC | | |
| | | | AAGAUGUGCCGCA | AAU*AAGmGmCCmGmU | | |
| | | | ACGCUCUGCCUUC | mCmGmAmAmAmGmAmU | | |
| | | | UGGCAUCGUU | GUGCmCGmCAAmCGCU | | |
| | | | | CUmGmCCmUmUmCmUG | | |
| | | | | GCAUCG*mU*mU | | |
| G029114 | 405 | CCAUCUCC | CCAUCUCCAGAGC | mC*mC*mA*mUmCUCm | 2405 | chr16: |
| | | AGAGCACA | ACAAGACGUCCGU | CmAGmAGmCACAAmGA | | 10904733- |
| | | AGACGUCC | UGUAGCUCCCUGA | CGmUCCmGUUGmUmAm | | 10904757 |
| | | | AACCGUUGCUACA | GmCUCCCmUmGmAmAm | | |
| | | | AUAAGGCCGUCGA | AmCmCGUUmGmCUAmC | | |
| | | | AAGAUGUGCCGCA | AAU*AAGmGmCCmGmU | | |
| | | | ACGCUCUGCCUUC | mCmGmAmAmAmGmAmU | | |
| | | | UGGCAUCGUU | GUGCmCGmCAAmCGCU | | |
| | | | | CUmGmCCmUmUmCmUG | | |
| | | | | GCAUCG*mU*mU | | |
| G029115 | 406 | CAUCUCCA | CAUCUCCAGAGCA | mC*mA*mU*mCmUCCm | 2406 | chr16: |
| | | GAGCACAA | CAAGACGUCCCGU | AmGAmGCmACAAGmAC | | 10904734- |
| | | GACGUCCC | UGUAGCUCCCUGA | GUmCCCmGUUGmUmAm | | 10904758 |
| | | | AACCGUUGCUACA | GmCUCCCmUmGmAmAm | | |
| | | | AUAAGGCCGUCGA | AmCmCGUUmGmCUAmC | | |
| | | | AAGAUGUGCCGCA | AAU*AAGmGmCCmGmU | | |
| | | | ACGCUCUGCCUUC | mCmGmAmAmAmGmAmU | | |
| | | | UGGCAUCGUU | GUGCmCGmCAAmCGCU | | |
| | | | | CUmGmCCmUmUmCmUG | | |
| | | | | GCAUCG*mU*mU | | |
| G029116 | 407 | AGAGCACA | AGAGCACAAGACG | mA*mG*mA*mGmCACm | 2407 | chr16: |
| | | AGACGUCC | UCCCCCACCCAGU | AmAGmACmGUCCCmCC | | 10904741- |
| | | CCCACCCA | UGUAGCUCCCUGA | ACmCCAmGUUGmUmAm | | 10904765 |
| | | | AACCGUUGCUACA | GmCUCCCmUmGmAmAm | | |
| | | | AUAAGGCCGUCGA | AmCmCGUUmGmCUAmC | | |
| | | | AAGAUGUGCCGCA | AAU*AAGmGmCCmGmU | | |
| | | | ACGCUCUGCCUUC | mCmGmAmAmAmGmAmU | | |
| | | | UGGCAUCGUU | GUGCmCGmCAAmCGCU | | |
| | | | | CUmGmCCmUmUmCmUG | | |
| | | | | GCAUCG*mU*mU | | |
| G029117 | 408 | ACCCAAUG | ACCCAAUGCCCGG | mA*mC*mC*mCmAAUm | 2408 | chr16: |
| | | CCCGGCAG | CAGCUGGAGAGGU | GmCCmCGmGCAGCmUG | | 10904760- |
| | | CUGGAGAG | UGUAGCUCCCUGA | GAmGAGmGUUGmUmAm | | 10904784 |
| | | | AACCGUUGCUACA | GmCUCCCmUmGmAmAm | | |
| | | | AUAAGGCCGUCGA | AmCmCGUUmGmCUAmC | | |
| | | | AAGAUGUGCCGCA | AAU*AAGmGmCCmGmU | | |
| | | | ACGCUCUGCCUUC | mCmGmAmAmAmGmAmU | | |
| | | | UGGCAUCGUU | GUGCmCGmCAAmCGCU | | |
| | | | | CUmGmCCmUmUmCmUG | | |
| | | | | GCAUCG*mU*mU | | |
| G029118 | 409 | CCAUUUUG | CCAUUUUGGAAGC | mC*mC*mA*mUmUUUm | 2409 | chr16: |
| | | GAAGCUUG | UUGUUGGAGACGU | GmGAmAGmCUUGUmUG | | 10904784- |
| | | UUGGAGAC | UGUAGCUCCCUGA | GAmGACmGUUGmUmAm | | 10904808 |
| | | | AACCGUUGCUACA | GmCUCCCmUmGmAmAm | | |
| | | | AUAAGGCCGUCGA | AmCmCGUUmGmCUAmC | | |
| | | | AAGAUGUGCCGCA | AAU*AAGmGmCCmGmU | | |
| | | | ACGCUCUGCCUUC | mCmGmAmAmAmGmAmU | | |
| | | | UGGCAUCGUU | GUGCmCGmCAAmCGCU | | |
| | | | | CUmGmCCmUmUmCmUG | | |
| | | | | GCAUCG*mU*mU | | |
| G029119 | 410 | CCAGGCCA | CCAGGCCAUUUUG | mC*mC*mA*mGmGCCm | 2410 | chr16: |
| | | UUUUGGAA | GAAGCUUGUUGGU | AmUUmUUmGGAAGmCU | | 10904789- |
| | | GCUUGUUG | UGUAGCUCCCUGA | UGmUUGmGUUGmUmAm | | 10904813 |
| | | | AACCGUUGCUACA | GmCUCCCmUmGmAmAm | | |
| | | | AUAAGGCCGUCGA | AmCmCGUUmGmCUAmC | | |
| | | | AAGAUGUGCCGCA | AAU*AAGmGmCCmGmU | | |
| | | | ACGCUCUGCCUUC | mCmGmAmAmAmGmAmU | | |
| | | | UGGCAUCGUU | GUGCmCGmCAAmCGCU | | |
| | | | | CUmGmCCmUmUmCmUG | | |
| | | | | GCAUCG*mU*mU | | |
| G029120 | 411 | GCCUGGUG | GCCUGGUGAGUGA | mG*mC*mC*mUmGGUm | 2411 | chr16: |
| | | AGUGAUGC | UGCGGGAUCUCGU | GmAGmUGmAUGCGmGG | | 10904807- |
| | | GGGAUCUC | UGUAGCUCCCUGA | AUmCUCmGUUGmUmAm | | 10904831 |
| | | | AACCGUUGCUACA | GmCUCCCmUmGmAmAm | | |
| | | | AUAAGGCCGUCGA | AmCmCGUUmGmCUAmC | | |
| | | | AAGAUGUGCCGCA | AAU*AAGmGmCCmGmU | | |
| | | | ACGCUCUGCCUUC | mCmGmAmAmAmGmAmU | | |
| | | | UGGCAUCGUU | GUGCmCGmCAAmCGCU | | |
| | | | | CUmGmCCmUmUmCmUG | | |
| | | | | GCAUCG*mU*mU | | |
| G029121 | 412 | CCUGGUGA | CCUGGUGAGUGAU | mC*mC*mU*mGmGUGm | 2412 | chr16: |
| | | GUGAUGCG | GCGGGAUCUCUGU | AmGUmGAmUGCGGmGA | | 10904808- |
| | | GGAUCUCU | UGUAGCUCCCUGA | UCmUCUmGUUGmUmAm | | 10904832 |
| | | | AACCGUUGCUACA | GmCUCCCmUmGmAmAm | | |
| | | | AUAAGGCCGUCGA | AmCmCGUUmGmCUAmC | | |
| | | | AAGAUGUGCCGCA | AAU*AAGmGmCCmGmU | | |
| | | | ACGCUCUGCCUUC | mCmGmAmAmAmGmAmU | | |
| | | | UGGCAUCGUU | GUGCmCGmCAAmCGCU | | |
| | | | | CUmGmCCmUmUmCmUG | | |
| | | | | GCAUCG*mU*mU | | |
| G029122 | 413 | CCUUUGCA | CCUUUGCAGAGCC | mC*mC*mU*mUmUGCm | 2413 | chr16: |
| | | GAGCCGGU | GGUGGAGCAGUGU | AmGAmGCmCGGUGmGA | | 10906489- |
| | | GGAGCAGU | UGUAGCUCCCUGA | GCmAGUmGUUGmUmAm | | 10906513 |
| | | | AACCGUUGCUACA | GmCUCCCmUmGmAmAm | | |
| | | | AUAAGGCCGUCGA | AmCmCGUUmGmCUAmC | | |
| | | | AAGAUGUGCCGCA | AAU*AAGmGmCCmGmU | | |
| | | | ACGCUCUGCCUUC | mCmGmAmAmAmGmAmU | | |
| | | | UGGCAUCGUU | GUGCmCGmCAAmCGCU | | |
| | | | | CUmGmCCmUmUmCmUG | | |
| | | | | GCAUCG*mU*mU | | |
| G029123 | 414 | UAGAACUG | UAGAACUGCUCCA | mU*mA*mG*mAmACUm | 2414 | chr16: |
| | | CUCCACCG | CCGGCUCUGCAGU | GmCUmCCmACCGGmCU | | 10906493- |
| | | GCUCUGCA | UGUAGCUCCCUGA | CUmGCAmGUUGmUmAm | | 10906517 |
| | | | AACCGUUGCUACA | GmCUCCCmUmGmAmAm | | |
| | | | AUAAGGCCGUCGA | AmCmCGUUmGmCUAmC | | |
| | | | AAGAUGUGCCGCA | AAU*AAGmGmCCmGmU | | |
| | | | ACGCUCUGCCUUC | mCmGmAmAmAmGmAmU | | |
| | | | UGGCAUCGUU | GUGCmCGmCAAmCGCU | | |
| | | | | CUmGmCCmUmUmCmUG | | |
| | | | | GCAUCG*mU*mU | | |
| G029124 | 415 | UACCGCUC | UACCGCUCACUGC | mU*mA*mC*mCmGCUm | 2415 | chr16: |
| | | ACUGCAGG | AGGACACGUAUGU | CmACmUGmCAGGAmCA | | 10906515- |
| | | ACACGUAU | UGUAGCUCCCUGA | CGmUAUmGUUGmUmAm | | 10906539 |
| | | | AACCGUUGCUACA | GmCUCCCmUmGmAmAm | | |
| | | | AUAAGGCCGUCGA | AmCmCGUUmGmCUAmC | | |
| | | | AAGAUGUGCCGCA | AAU*AAGmGmCCmGmU | | |
| | | | ACGCUCUGCCUUC | mCmGmAmAmAmGmAmU | | |
| | | | UGGCAUCGUU | GUGCmCGmCAAmCGCU | | |
| | | | | CUmGmCCmUmUmCmUG | | |
| | | | | GCAUCG*mU*mU | | |
| G029125 | 416 | CUCACUGC | CUCACUGCAGGAC | mC*mU*mC*mAmCUGm | 2416 | chr16: |
| | | AGGACACG | ACGUAUGGUGCGU | CmAGmGAmCACGUmAU | | 10906520- |
| | | UAUGGUGC | UGUAGCUCCCUGA | GGmUGCmGUUGmUmAm | | 10906544 |
| | | | AACCGUUGCUACA | GmCUCCCmUmGmAmAm | | |
| | | | AUAAGGCCGUCGA | AmCmCGUUmGmCUAmC | | |
| | | | AAGAUGUGCCGCA | AAU*AAGmGmCCmGmU | | |
| | | | ACGCUCUGCCUUC | mCmGmAmAmAmGmAmU | | |
| | | | UGGCAUCGUU | GUGCmCGmCAAmCGCU | | |
| | | | | CUmGmCCmUmUmCmUG | | |
| | | | | GCAUCG*mU*mU | | |
| G029126 | 417 | UCACUGCA | UCACUGCAGGACA | mU*mC*mA*mCmUGCm | 2417 | chr16: |
| | | GGACACGU | CGUAUGGUGCCGU | AmGGmACmACGUAmUG | | 10906521- |
| | | AUGGUGCC | UGUAGCUCCCUGA | GUmGCCmGUUGmUmAm | | 10906545 |
| | | | AACCGUUGCUACA | GmCUCCCmUmGmAmAm | | |
| | | | AUAAGGCCGUCGA | AmCmCGUUmGmCUAmC | | |
| | | | AAGAUGUGCCGCA | AAU*AAGmGmCCmGmU | | |
| | | | ACGCUCUGCCUUC | mCmGmAmAmAmGmAmU | | |
| | | | UGGCAUCGUU | GUGCmCGmCAAmCGCU | | |
| | | | | CUmGmCCmUmUmCmUG | | |
| | | | | GCAUCG*mU*mU | | |
| G029127 | 418 | AGGACACG | AGGACACGUAUGG | mA*mG*mG*mAmCACm | 2418 | chr16: |
| | | UAUGGUGC | UGCCGAGCCCGGU | GmUAmUGmGUGCCmGA | | 10906528- |
| | | CGAGCCCG | UGUAGCUCCCUGA | GCmCCGmGUUGmUmAm | | 10906552 |
| | | | AACCGUUGCUACA | GmCUCCCmUmGmAmAm | | |
| | | | AUAAGGCCGUCGA | AmCmCGUUmGmCUAmC | | |
| | | | AAGAUGUGCCGCA | AAU*AAGmGmCCmGmU | | |
| | | | ACGCUCUGCCUUC | mCmGmAmAmAmGmAmU | | |
| | | | UGGCAUCGUU | GUGCmCGmCAAmCGCU | | |
| | | | | CUmGmCCmUmUmCmUG | | |
| | | | | GCAUCG*mU*mU | | |
| G029128 | 419 | GCCCAGUC | GCCCAGUCCGGGG | mG*mC*mC*mCmAGUm | 2419 | chr16: |
| | | CGGGGUGG | UGGCCAGUUCCGU | CmCGmGGmGUGGCmCA | | 10906631- |
| | | CCAGUUCC | UGUAGCUCCCUGA | GUmUCCmGUUGmUmAm | | 10906655 |
| | | | AACCGUUGCUACA | GmCUCCCmUmGmAmAm | | |
| | | | AUAAGGCCGUCGA | AmCmCGUUmGmCUAmC | | |
| | | | AAGAUGUGCCGCA | AAU*AAGmGmCCmGmU | | |
| | | | ACGCUCUGCCUUC | mCmGmAmAmAmGmAmU | | |
| | | | UGGCAUCGUU | GUGCmCGmCAAmCGCU | | |
| | | | | CUmGmCCmUmUmCmUG | | |
| | | | | GCAUCG*mU*mU | | |
| G029129 | 420 | GUUCUGCO | GUUCUGCCCAGUC | mG*mU*mU*mCmUGCm | 2420 | chr16: |
| | | CAGUCCGG | CGGGGUGGCCAGU | CmCAmGUmCCGGGmGU | | 10906636- |
| | | GGUGGCCA | UGUAGCUCCCUGA | GGmCCAmGUUGmUmAm | | 10906660 |
| | | | AACCGUUGCUACA | GmCUCCCmUmGmAmAm | | |
| | | | AUAAGGCCGUCGA | AmCmCGUUmGmCUAmC | | |
| | | | AAGAUGUGCCGCA | AAU*AAGmGmCCmGmU | | |
| | | | ACGCUCUGCCUUC | mCmGmAmAmAmGmAmU | | |
| | | | UGGCAUCGUU | GUGCmCGmCAAmCGCU | | |
| | | | | CUmGmCCmUmUmCmUG | | |
| | | | | GCAUCG*mU*mU | | |
| G029130 | 421 | CGUUCUGC | CGUUCUGCCCAGU | mC*mG*mU*mUmCUGm | 2421 | chr16: |
| | | CCAGUCCG | CCGGGGUGGCCGU | CmCCmAGmUCCGGmGG | | 10906637- |
| | | GGGUGGCC | UGUAGCUCCCUGA | UGmGCCmGUUGmUmAm | | 10906661 |
| | | | AACCGUUGCUACA | GmCUCCCmUmGmAmAm | | |
| | | | AUAAGGCCGUCGA | AmCmCGUUmGmCUAmC | | |
| | | | AAGAUGUGCCGCA | AAU*AAGmGmCCmGmU | | |
| | | | ACGCUCUGCCUUC | mCmGmAmAmAmGmAmU | | |
| | | | UGGCAUCGUU | GUGCmCGmCAAmCGCU | | |
| | | | | CUmGmCCmUmUmCmUG | | |
| | | | | GCAUCG*mU*mU | | |
| G029131 | 422 | AGCUGCCG | AGCUGCCGUUCUG | mA*mG*mC*mUmGCCm | 2422 | chr16: |
| | | UUCUGCCC | CCCAGUCCGGGGU | GmUUmCUmGCCCAmGU | | 10906643- |
| | | AGUCCGGG | UGUAGCUCCCUGA | CCmGGGmGUUGmUmAm | | 10906667 |
| | | | AACCGUUGCUACA | GmCUCCCmUmGmAmAm | | |
| | | | AUAAGGCCGUCGA | AmCmCGUUmGmCUAmC | | |
| | | | AAGAUGUGCCGCA | AAU*AAGmGmCCmGmU | | |
| | | | ACGCUCUGCCUUC | mCmGmAmAmAmGmAmU | | |
| | | | UGGCAUCGUU | GUGCmCGmCAAmCGCU | | |
| | | | | CUmGmCCmUmUmCmUG | | |
| | | | | GCAUCG*mU*mU | | |
| G029132 | 423 | GGGCAGAA | GGGCAGAACGGCA | mG*mG*mG*mCmAGAm | 2423 | chr16: |
| | | CGGCAGCU | GCUGGCCCAAGGU | AmCGmGCmAGCUGmGC | | 10906651- |
| | | GGCCCAAG | UGUAGCUCCCUGA | CCmAAGmGUUGmUmAm | | 10906675 |
| | | | AACCGUUGCUACA | GmCUCCCmUmGmAmAm | | |
| | | | AUAAGGCCGUCGA | AmCmCGUUmGmCUAmC | | |
| | | | AAGAUGUGCCGCA | AAU*AAGmGmCCmGmU | | |
| | | | ACGCUCUGCCUUC | mCmGmAmAmAmGmAmU | | |
| | | | UGGCAUCGUU | GUGCmCGmCAAmCGCU | | |
| | | | | CUmGmCCmUmUmCmUG | | |
| | | | | GCAUCG*mU*mU | | |
| G029133 | 424 | CAAUAGCU | CAAUAGCUCUUGC | mC*mA*mA*mUmAGCm | 2424 | chr16: |
| | | CUUGCCCU | CCUGACCAGCUGU | UmCUmUGmCCCUGmAC | | 10906754- |
| | | GACCAGCU | UGUAGCUCCCUGA | CAmGCUmGUUGmUmAm | | 10906778 |
| | | | AACCGUUGCUACA | GmCUCCCmUmGmAmAm | | |
| | | | AUAAGGCCGUCGA | AmCmCGUUmGmCUAmC | | |
| | | | AAGAUGUGCCGCA | AAU*AAGmGmCCmGmU | | |
| | | | ACGCUCUGCCUUC | mCmGmAmAmAmGmAmU | | |
| | | | UGGCAUCGUU | GUGCmCGmCAAmCGCU | | |
| | | | | CUmGmCCmUmUmCmUG | | |
| | | | | GCAUCG*mU*mU | | |
| G029134 | 425 | CCAAUAGC | CCAAUAGCUCUUG | mC*mC*mA*mAmUAGm | 2425 | chr16: |
| | | UCUUGCCC | CCCUGACCAGCGU | CmUCmUUmGCCCUmGA | | 10906755- |
| | | UGACCAGC | UGUAGCUCCCUGA | CCmAGCmGUUGmUmAm | | 10906779 |
| | | | AACCGUUGCUACA | GmCUCCCmUmGmAmAm | | |
| | | | AUAAGGCCGUCGA | AmCmCGUUmGmCUAmC | | |
| | | | AAGAUGUGCCGCA | AAU*AAGmGmCCmGmU | | |
| | | | ACGCUCUGCCUUC | mCmGmAmAmAmGmAmU | | |
| | | | UGGCAUCGUU | GUGCmCGmCAAmCGCU | | |
| | | | | CUmGmCCmUmUmCmUG | | |
| | | | | GCAUCG*mU*mU | | |
| G029135 | 426 | UGCCCCAG | UGCCCCAGCCCAA | mU*mG*mC*mCmCCAm | 2426 | chr16: |
| | | CCCAAUAG | UAGCUCUUGCCGU | GmCCmCAmAUAGCmUC | | 10906764- |
| | | CUCUUGCC | UGUAGCUCCCUGA | UUmGCCmGUUGmUmAm | | 10906788 |
| | | | AACCGUUGCUACA | GmCUCCCmUmGmAmAm | | |
| | | | AUAAGGCCGUCGA | AmCmCGUUmGmCUAmC | | |
| | | | AAGAUGUGCCGCA | AAU*AAGmGmCCmGmU | | |
| | | | ACGCUCUGCCUUC | mCmGmAmAmAmGmAmU | | |
| | | | UGGCAUCGUU | GUGCmCGmCAAmCGCU | | |
| | | | | CUmGmCCmUmUmCmUG | | |
| | | | | GCAUCG*mU*mU | | |
| G029136 | 427 | CUCACUGC | CUCACUGCCCCAG | mC*mU*mC*mAmCUGm | 2427 | chr16: |
| | | CCCAGCCC | CCCAAUAGCUCGU | CmCCmCAmGCCCAmAU | | 10906769- |
| | | AAUAGCUC | UGUAGCUCCCUGA | AGmCUCmGUUGmUmAm | | 10906793 |
| | | | AACCGUUGCUACA | GmCUCCCmUmGmAmAm | | |
| | | | AUAAGGCCGUCGA | AmCmCGUUmGmCUAmC | | |
| | | | AAGAUGUGCCGCA | AAU*AAGmGmCCmGmU | | |
| | | | ACGCUCUGCCUUC | mCmGmAmAmAmGmAmU | | |
| | | | UGGCAUCGUU | GUGCmCGmCAAmCGCU | | |
| | | | | CUmGmCCmUmUmCmUG | | |
| | | | | GCAUCG*mU*mU | | |
| G029137 | 428 | GCUCACUG | GCUCACUGCCCCA | mG*mC*mU*mCmACUm | 2428 | chr16: |
| | | CCCCAGCC | GCCCAAUAGCUGU | GmCCmCCmAGCCCmAA | | 10906770- |
| | | CAAUAGCU | UGUAGCUCCCUGA | UAmGCUmGUUGmUmAm | | 10906794 |
| | | | AACCGUUGCUACA | GmCUCCCmUmGmAmAm | | |
| | | | AUAAGGCCGUCGA | AmCmCGUUmGmCUAmC | | |
| | | | AAGAUGUGCCGCA | AAU*AAGmGmCCmGmU | | |
| | | | ACGCUCUGCCUUC | mCmGmAmAmAmGmAmU | | |
| | | | UGGCAUCGUU | GUGCmCGmCAAmCGCU | | |
| | | | | CUmGmCCmUmUmCmUG | | |
| | | | | GCAUCG*mU*mU | | |
| G029138 | 429 | AAGCCCAG | AAGCCCAGGCCCG | mA*mA*mG*mCmCCAm | 2429 | chr16: |
| | | GCCCGGCU | GCUCACUGCCCGU | GmGCmCCmGGCUCmAC | | 91006783- |
| | | CACUGCCC | UGUAGCUCCCUGA | UGmCCCmGUUGmUmAm | | 10906807 |
| | | | AACCGUUGCUACA | GmCUCCCmUmGmAmAm | | |
| | | | AUAAGGCCGUCGA | AmCmCGUUmGmCUAmC | | |
| | | | AAGAUGUGCCGCA | AAU*AAGmGmCCmGmU | | |
| | | | ACGCUCUGCCUUC | mCmGmAmAmAmGmAmU | | |
| | | | UGGCAUCGUU | GUGCmCGmCAAmCGCU | | |
| | | | | CUmGmCCmUmUmCmUG | | |
| | | | | GCAUCG*mU*mU | | |
| G029139 | 430 | CAAGCCCA | CAAGCCCAGGCCC | mC*mA*mA*mGmCCCm | 2430 | chr16: |
| | | GGCCCGGC | GGCUCACUGCCGU | AmGGmCCmCGGCUmCA | | 10906784- |
| | | UCACUGCC | UGUAGCUCCCUGA | CUmGCCmGUUGmUmAm | | 10906808 |
| | | | AACCGUUGCUACA | GmCUCCCmUmGmAmAm | | |
| | | | AUAAGGCCGUCGA | AmCmCGUUmGmCUAmC | | |
| | | | AAGAUGUGCCGCA | AAU*AAGmGmCCmGmU | | |
| | | | ACGCUCUGCCUUC | mCmGmAmAmAmGmAmU | | |
| | | | UGGCAUCGUU | GUGCmCGmCAAmCGCU | | |
| | | | | CUmGmCCmUmUmCmUG | | |
| | | | | GCAUCG*mU*mU | | |
| G029140 | 431 | GCCACAAG | GCCACAAGCCCAG | mG*mC*mC*mAmCAAm | 2431 | chr16: |
| | | CCCAGGCC | GCCCGGCUCACGU | GmCCmCAmGGCCCmGG | | 10906788- |
| | | CGGCUCAC | UGUAGCUCCCUGA | CUmCACmGUUGmUmAm | | 10906812 |
| | | | AACCGUUGCUACA | GmCUCCCmUmGmAmAm | | |
| | | | AUAAGGCCGUCGA | AmCmCGUUmGmCUAmC | | |
| | | | AAGAUGUGCCGCA | AAU*AAGmGmCCmGmU | | |
| | | | ACGCUCUGCCUUC | mCmGmAmAmAmGmAmU | | |
| | | | UGGCAUCGUU | GUGCmCGmCAAmCGCU | | |
| | | | | CUmGmCCmUmUmCmUG | | |
| | | | | GCAUCG*mU*mU | | |
| G029141 | 432 | GGCCACAA | GGCCACAAGCCCA | mG*mG*mC*mCmACAm | 2432 | chr16: |
| | | GCCCAGGC | GGCCCGGCUCAGU | AmGCmCCmAGGCCmCG | | 10906789- |
| | | CCGGCUCA | UGUAGCUCCCUGA | GCmUCAmGUUGmUmAm | | 10906813 |
| | | | AACCGUUGCUACA | GmCUCCCmUmGmAmAm | | |
| | | | AUAAGGCCGUCGA | AmCmCGUUmGmCUAmC | | |
| | | | AAGAUGUGCCGCA | AAU*AAGmGmCCmGmU | | |
| | | | ACGCUCUGCCUUC | mCmGmAmAmAmGmAmU | | |
| | | | UGGCAUCGUU | GUGCmCGmCAAmCGCU | | |
| | | | | CUmGmCCmUmUmCmUG | | |
| | | | | GCAUCG*mU*mU | | |
| G029142 | 433 | CGGCCACA | CGGCCACAAGCCC | mC*mG*mG*mCmCACm | 2433 | chr16: |
| | | AGCCCAGG | AGGCCCGGCUCGU | AmAGmCCmCAGGCmCC | | 10906790- |
| | | CCCGGCUC | UGUAGCUCCCUGA | GGmCUCmGUUGmUmAm | | 10906814 |
| | | | AACCGUUGCUACA | GmCUCCCmUmGmAmAm | | |
| | | | AUAAGGCCGUCGA | AmCmCGUUmGmCUAmC | | |
| | | | AAGAUGUGCCGCA | AAU*AAGmGmCCmGmU | | |
| | | | ACGCUCUGCCUUC | mCmGmAmAmAmGmAmU | | |
| | | | UGGCAUCGUU | GUGCmCGmCAAmCGCU | | |
| | | | | CUmGmCCmUmUmCmUG | | |
| | | | | GCAUCG*mU*mU | | |
| G029143 | 434 | UUCCCCAG | UUCCCCAGUACGA | mU*mU*mC*mCmCCAm | 2434 | chr16: |
| | | UACGACUU | CUUUGUCUUCUGU | GmUAmCGmACUUUmGU | | 10906816- |
| | | UGUCUUCU | UGUAGCUCCCUGA | CUmUCUmGUUGmUmAm | | 10906840 |
| | | | AACCGUUGCUACA | GmCUCCCmUmGmAmAm | | |
| | | | AUAAGGCCGUCGA | AmCmCGUUmGmCUAmC | | |
| | | | AAGAUGUGCCGCA | AAU*AAGmGmCCmGmU | | |
| | | | ACGCUCUGCCUUC | mCmGmAmAmAmGmAmU | | |
| | | | UGGCAUCGUU | GUGCmCGmCAAmCGCU | | |
| | | | | CUmGmCCmUmUmCmUG | | |
| | | | | GCAUCG*mU*mU | | |
| G029144 | 435 | UCCCCAGU | UCCCCAGUACGAC | mU*mC*mC*mCmCAGm | 2435 | chr16: |
| | | ACGACUUU | UUUGUCUUCUCGU | UmACmGAmCUUUGmUC | | 10906817- |
| | | GUCUUCUC | UGUAGCUCCCUGA | UUmCUCmGUUGmUmAm | | 10906841 |
| | | | AACCGUUGCUACA | GmCUCCCmUmGmAmAm | | |
| | | | AUAAGGCCGUCGA | AmCmCGUUmGmCUAmC | | |
| | | | AAGAUGUGCCGCA | AAU*AAGmGmCCmGmU | | |
| | | | ACGCUCUGCCUUC | mCmGmAmAmAmGmAmU | | |
| | | | UGGCAUCGUU | GUGCmCGmCAAmCGCU | | |
| | | | | CUmGmCCmUmUmCmUG | | |
| | | | | GCAUCG*mU*mU | | |
| G029145 | 436 | CCCCAGUA | CCCCAGUACGACU | mC*mC*mC*mCmAGUm | 2436 | chr16: |
| | | CGACUUUG | UUGUCUUCUCUGU | AmCGmACmUUUGUmCU | | 10906818- |
| | | UCUUCUCU | UGUAGCUCCCUGA | UCmUCUmGUUGmUmAm | | 10906842 |
| | | | AACCGUUGCUACA | GmCUCCCmUmGmAmAm | | |
| | | | AUAAGGCCGUCGA | AmCmCGUUmGmCUAmC | | |
| | | | AAGAUGUGCCGCA | AAU*AAGmGmCCmGmU | | |
| | | | ACGCUCUGCCUUC | mCmGmAmAmAmGmAmU | | |
| | | | UGGCAUCGUU | GUGCmCGmCAAmCGCU | | |
| | | | | CUmGmCCmUmUmCmUG | | |
| | | | | GCAUCG*mU*mU | | |
| G029146 | 437 | AGUACGAC | AGUACGACUUUGU | mA*mG*mU*mAmCGAm | 2437 | chr16: |
| | | UUUGUCUU | CUUCUCUGUCCGU | CmUUmUGmUCUUCmUC | | 10906822- |
| | | CUCUGUCC | UGUAGCUCCCUGA | UGmUCCmGUUGmUmAm | | 10906846 |
| | | | AACCGUUGCUACA | GmCUCCCmUmGmAmAm | | |
| | | | AUAAGGCCGUCGA | AmCmCGUUmGmCUAmC | | |
| | | | AAGAUGUGCCGCA | AAU*AAGmGmCCmGmU | | |
| | | | ACGCUCUGCCUUC | mCmGmAmAmAmGmAmU | | |
| | | | UGGCAUCGUU | GUGCmCGmCAAmCGCU | | |
| | | | | CUmGmCCmUmUmCmUG | | |
| | | | | GCAUCG*mU*mU | | |
| G029147 | 438 | GCCUAUGG | GCCUAUGGCCUGC | mG*mC*mC*mUmAUGm | 2438 | chr16: |
| | | CCUGCAGG | AGGAUCUGCUCGU | GmCCmUGmCAGGAmUC | | 10906875- |
| | | AUCUGCUC | UGUAGCUCCCUGA | UGmCUCmGUUGmUmAm | | 10906899 |
| | | | AACCGUUGCUACA | GmCUCCCmUmGmAmAm | | |
| | | | AUAAGGCCGUCGA | AmCmCGUUmGmCUAmC | | |
| | | | AAGAUGUGCCGCA | AAU*AAGmGmCCmGmU | | |
| | | | ACGCUCUGCCUUC | mCmGmAmAmAmGmAmU | | |
| | | | UGGCAUCGUU | GUGCmCGmCAAmCGCU | | |
| | | | | CUmGmCCmUmUmCmUG | | |
| | | | | GCAUCG*mU*mU | | |
| G029148 | 439 | CCUAUGGC | CCUAUGGCCUGCA | mC*mC*mU*mAmUGGm | 2439 | chr16: |
| | | CUGCAGGA | GGAUCUGCUCUGU | CmCUmGCmAGGAUmCU | | 10906876- |
| | | UCUGCUCU | UGUAGCUCCCUGA | GCmUCUmGUUGmUmAm | | 10906900 |
| | | | AACCGUUGCUACA | GmCUCCCmUmGmAmAm | | |
| | | | AUAAGGCCGUCGA | AmCmCGUUmGmCUAmC | | |
| | | | AAGAUGUGCCGCA | AAU*AAGmGmCCmGmU | | |
| | | | ACGCUCUGCCUUC | mCmGmAmAmAmGmAmU | | |
| | | | UGGCAUCGUU | GUGCmCGmCAAmCGCU | | |
| | | | | CUmGmCCmUmUmCmUG | | |
| | | | | GCAUCG*mU*mU | | |
| G029149 | 440 | GCCUGCAG | GCCUGCAGGAUCU | mG*mC*mC*mUmGCAm | 2440 | chr16: |
| | | GAUCUGCU | GCUCUUCUCCCGU | GmGAmUCmUGCUCmUU | | 10906882- |
| | | CUUCUCCC | UGUAGCUCCCUGA | CUmCCCmGUUGmUmAm | | 10906906 |
| | | | AACCGUUGCUACA | GmCUCCCmUmGmAmAm | | |
| | | | AUAAGGCCGUCGA | AmCmCGUUmGmCUAmC | | |
| | | | AAGAUGUGCCGCA | AAU*AAGmGmCCmGmU | | |
| | | | ACGCUCUGCCUUC | mCmGmAmAmAmGmAmU | | |
| | | | UGGCAUCGUU | GUGCmCGmCAAmCGCU | | |
| | | | | CUmGmCCmUmUmCmUG | | |
| | | | | GCAUCG*mU*mU | | |
| G029150 | 441 | CCUGCAGG | CCUGCAGGAUCUG | mC*mC*mU*mGmCAGm | 2441 | chr16: |
| | | AUCUGCUC | CUCUUCUCCCUGU | GmAUmCUmGCUCUmUC | | 10906883- |
| | | UUCUCCCU | UGUAGCUCCCUGA | UCmCCUmGUUGmUmAm | | 10906907 |
| | | | AACCGUUGCUACA | GmCUCCCmUmGmAmAm | | |
| | | | AUAAGGCCGUCGA | AmCmCGUUmGmCUAmC | | |
| | | | AAGAUGUGCCGCA | AAU*AAGmGmCCmGmU | | |
| | | | ACGCUCUGCCUUC | mCmGmAmAmAmGmAmU | | |
| | | | UGGCAUCGUU | GUGCmCGmCAAmCGCU | | |
| | | | | CUmGmCCmUmUmCmUG | | |
| | | | | GCAUCG*mU*mU | | |
| G029151 | 442 | UCCCUGGG | UCCCUGGGCCCAC | mU*mC*mC*mCmUGGm | 2442 | chr16: |
| | | CCCACAGC | AGCCACUCGUGGU | GmCCmCAmCAGCCmAC | | 10906902- |
| | | CACUCGUG | UGUAGCUCCCUGA | UCmGUGmGUUGmUmAm | | 10906926 |
| | | | AACCGUUGCUACA | GmCUCCCmUmGmAmAm | | |
| | | | AUAAGGCCGUCGA | AmCmCGUUmGmCUAmC | | |
| | | | AAGAUGUGCCGCA | AAU*AAGmGmCCmGmU | | |
| | | | ACGCUCUGCCUUC | mCmGmAmAmAmGmAmU | | |
| | | | UGGCAUCGUU | GUGCmCGmCAAmCGCU | | |
| | | | | CUmGmCCmUmUmCmUG | | |
| | | | | GCAUCG*mU*mU | | |
| G029152 | 443 | UCGAGGAG | UCGAGGAGCUGGA | mU*mC*mG*mAmGGAm | 2443 | chr16: |
| | | CUGGAAGC | AGCGCAAGAUGGU | GmCUmGGmAAGCGmCA | | 10906993- |
| | | GCAAGAUG | UGUAGCUCCCUGA | AGmAUGmGUUGmUmAm | | 10907017 |
| | | | AACCGUUGCUACA | GmCUCCCmUmGmAmAm | | |
| | | | AUAAGGCCGUCGA | AmCmCGUUmGmCUAmC | | |
| | | | AAGAUGUGCCGCA | AAU*AAGmGmCCmGmU | | |
| | | | ACGCUCUGCCUUC | mCmGmAmAmAmGmAmU | | |
| | | | UGGCAUCGUU | GUGCmCGmCAAmCGCU | | |
| | | | | CUmGmCCmUmUmCmUG | | |
| | | | | GCAUCG*mU*mU | | |
| G029153 | 444 | UGGCCGGC | UGGCCGGCCUUUU | mU*mG*mG*mCmCGGm | 2444 | chr16: |
| | | CUUUUCCA | CCAGAAGAAGCGU | CmCUmUUmUCCAGmAA | | 10907077- |
| | | GAAGAAGC | UGUAGCUCCCUGA | GAmAGCmGUUGmUmAm | | 10907101 |
| | | | AACCGUUGCUACA | GmCUCCCmUmGmAmAm | | |
| | | | AUAAGGCCGUCGA | AmCmCGUUmGmCUAmC | | |
| | | | AAGAUGUGCCGCA | AAU*AAGmGmCCmGmU | | |
| | | | ACGCUCUGCCUUC | mCmGmAmAmAmGmAmU | | |
| | | | UGGCAUCGUU | GUGCmCGmCAAmCGCU | | |
| | | | | CUmGmCCmUmUmCmUG | | |
| | | | | GCAUCG*mU*mU | | |
| G029154 | 445 | UUCCAGAA | UUCCAGAAGAAGC | mU*mU*mC*mCmAGAm | 2445 | chr16: |
| | | GAAGCUGC | UGCUCCGAGGUGU | AmGAmAGmCUGCUmCC | | 10907088- |
| | | UCCGAGGU | UGUAGCUCCCUGA | GAmGGUmGUUGmUmAm | | 10907112 |
| | | | AACCGUUGCUACA | GmCUCCCmUmGmAmAm | | |
| | | | AUAAGGCCGUCGA | AmCmCGUUmGmCUAmC | | |
| | | | AAGAUGUGCCGCA | AAU*AAGmGmCCmGmU | | |
| | | | ACGCUCUGCCUUC | mCmGmAmAmAmGmAmU | | |
| | | | UGGCAUCGUU | GUGCmCGmCAAmCGCU | | |
| | | | | CUmGmCCmUmUmCmUG | | |
| | | | | GCAUCG*mU*mU | | |
| G029155 | 446 | UCCAGAAG | UCCAGAAGAAGCU | mU*mC*mC*mAmGAAm | 2446 | chr16: |
| | | AAGCUGCU | GCUCCGAGGUUGU | GmAAmGCmUGCUCmCG | | 10907089- |
| | | CCGAGGUU | UGUAGCUCCCUGA | AGmGUUmGUUGmUmAm | | 10907113 |
| | | | AACCGUUGCUACA | GmCUCCCmUmGmAmAm | | |
| | | | AUAAGGCCGUCGA | AmCmCGUUmGmCUAmC | | |
| | | | AAGAUGUGCCGCA | AAU*AAGmGmCCmGmU | | |
| | | | ACGCUCUGCCUUC | mCmGmAmAmAmGmAmU | | |
| | | | UGGCAUCGUU | GUGCmCGmCAAmCGCU | | |
| | | | | CUmGmCCmUmUmCmUG | | |
| | | | | GCAUCG*mU*mU | | |
| G029156 | 447 | AGAAGAAG | AGAAGAAGCUGCU | mA*mG*mA*mAmGAAm | 2447 | chr16: |
| | | CUGCUCCG | CCGAGGUUGCAGU | GmCUmGCmUCCGAmGG | | 10907092- |
| | | AGGUUGCA | UGUAGCUCCCUGA | UUmGCAmGUUGmUmAm | | 10907116 |
| | | | AACCGUUGCUACA | GmCUCCCmUmGmAmAm | | |
| | | | AUAAGGCCGUCGA | AmCmCGUUmGmCUAmC | | |
| | | | AAGAUGUGCCGCA | AAU*AAGmGmCCmGmU | | |
| | | | ACGCUCUGCCUUC | mCmGmAmAmAmGmAmU | | |
| | | | UGGCAUCGUU | GUGCmCGmCAAmCGCU | | |
| | | | | CUmGmCCmUmUmCmUG | | |
| | | | | GCAUCG*mU*mU | | |
| G029157 | 448 | AGAAGCUG | AGAAGCUGCUCCG | mA*mG*mA*mAmGCUm | 2448 | chr16: |
| | | CUCCGAGG | AGGUUGCACCCGU | GmCUmCCmGAGGUmUG | | 10907095- |
| | | UUGCACCC | UGUAGCUCCCUGA | CAmCCCmGUUGmUmAm | | 10907119 |
| | | | AACCGUUGCUACA | GmCUCCCmUmGmAmAm | | |
| | | | AUAAGGCCGUCGA | AmCmCGUUmGmCUAmC | | |
| | | | AAGAUGUGCCGCA | AAU*AAGmGmCCmGmU | | |
| | | | ACGCUCUGCCUUC | mCmGmAmAmAmGmAmU | | |
| | | | UGGCAUCGUU | GUGCmCGmCAAmCGCU | | |
| | | | | CUmGmCCmUmUmCmUG | | |
| | | | | GCAUCG*mU*mU | | |
| G029158 | 449 | CUCCGAGG | CUCCGAGGUUGCA | mC*mU*mC*mCmGAGm | 2449 | chr16: |
| | | UUGCACCC | CCCUCCUCCUCGU | GmUUmGCmACCCUmCC | | 10907103- |
| | | UCCUCCUC | UGUAGCUCCCUGA | UCmCUCmGUUGmUmAm | | 10907127 |
| | | | AACCGUUGCUACA | GmCUCCCmUmGmAmAm | | |
| | | | AUAAGGCCGUCGA | AmCmCGUUmGmCUAmC | | |
| | | | AAGAUGUGCCGCA | AAU*AAGmGmCCmGmU | | |
| | | | ACGCUCUGCCUUC | mCmGmAmAmAmGmAmU | | |
| | | | UGGCAUCGUU | GUGCmCGmCAAmCGCU | | |
| | | | | CUmGmCCmUmUmCmUG | | |
| | | | | GCAUCG*mU*mU | | |
| G029159 | 450 | UCCGAGGU | UCCGAGGUUGCAC | mU*mC*mC*mGmAGGm | 2450 | chr16: |
| | | UGCACCCU | CCUCCUCCUCAGU | UmUGmCAmCCCUCmCU | | 10907104- |
| | | CCUCCUCA | UGUAGCUCCCUGA | CCmUCAmGUUGmUmAm | | 10907128 |
| | | | AACCGUUGCUACA | GmCUCCCmUmGmAmAm | | |
| | | | AUAAGGCCGUCGA | AmCmCGUUmGmCUAmC | | |
| | | | AAGAUGUGCCGCA | AAU*AAGmGmCCmGmU | | |
| | | | ACGCUCUGCCUUC | mCmGmAmAmAmGmAmU | | |
| | | | UGGCAUCGUU | GUGCmCGmCAAmCGCU | | |
| | | | | CUmGmCCmUmUmCmUG | | |
| | | | | GCAUCG*mU*mU | | |
| G029160 | 451 | CUGGUCCA | CUGGUCCAGAGCC | mC*mU*mG*mGmUCCm | 2451 | chr16: |
| | | GAGCCUGA | UGAGCAAGGCCGU | AmGAmGCmCUGAGmCA | | 10907148- |
| | | GCAAGGCC | UGUAGCUCCCUGA | AGmGCCmGUUGmUmAm | | 10907172 |
| | | | AACCGUUGCUACA | GmCUCCCmUmGmAmAm | | |
| | | | AUAAGGCCGUCGA | AmCmCGUUmGmCUAmC | | |
| | | | AAGAUGUGCCGCA | AAU*AAGmGmCCmGmU | | |
| | | | ACGCUCUGCCUUC | mCmGmAmAmAmGmAmU | | |
| | | | UGGCAUCGUU | GUGCmCGmCAAmCGCU | | |
| | | | | CUmGmCCmUmUmCmUG | | |
| | | | | GCAUCG*mU*mU | | |
| G029161 | 452 | UGGUCCAG | UGGUCCAGAGCCU | mU*mG*mG*mUmCCAm | 2452 | chr16: |
| | | AGCCUGAG | GAGCAAGGCCGGU | GmAGmCCmUGAGCmAA | | 10907149- |
| | | CAAGGCCG | UGUAGCUCCCUGA | GGmCCGmGUUGmUmAm | | 10907173 |
| | | | AACCGUUGCUACA | GmCUCCCmUmGmAmAm | | |
| | | | AUAAGGCCGUCGA | AmCmCGUUmGmCUAmC | | |
| | | | AAGAUGUGCCGCA | AAU*AAGmGmCCmGmU | | |
| | | | ACGCUCUGCCUUC | mCmGmAmAmAmGmAmU | | |
| | | | UGGCAUCGUU | GUGCmCGmCAAmCGCU | | |
| | | | | CUmGmCCmUmUmCmUG | | |
| | | | | GCAUCG*mU*mU | | |
| G029162 | 453 | UCAGGGAU | UCAGGGAUGACAG | mU*mC*mA*mGmGGAm | 2453 | chr16: |
| | | GACAGAGC | AGCACCAAGACGU | UmGAmCAmGAGCAmCC | | 10907244- |
| | | ACCAAGAC | UGUAGCUCCCUGA | AAmGACmGUUGmUmAm | | 10907268 |
| | | | AACCGUUGCUACA | GmCUCCCmUmGmAmAm | | |
| | | | AUAAGGCCGUCGA | AmCmCGUUmGmCUAmC | | |
| | | | AAGAUGUGCCGCA | AAU*AAGmGmCCmGmU | | |
| | | | ACGCUCUGCCUUC | mCmGmAmAmAmGmAmU | | |
| | | | UGGCAUCGUU | GUGCmCGmCAAmCGCU | | |
| | | | | CUmGmCCmUmUmCmUG | | |
| | | | | GCAUCG*mU*mU | | |
| G029163 | 454 | CAGGGAUG | CAGGGAUGACAGA | mC*mA*mG*mGmGAUm | 2454 | chr16: |
| | | ACAGAGCA | GCACCAAGACAGU | GmACmAGmAGCACmCA | | 10907245- |
| | | CCAAGACA | UGUAGCUCCCUGA | AGmACAmGUUGmUmAm | | 10907269 |
| | | | AACCGUUGCUACA | GmCUCCCmUmGmAmAm | | |
| | | | AUAAGGCCGUCGA | AmCmCGUUmGmCUAmC | | |
| | | | AAGAUGUGCCGCA | AAU*AAGmGmCCmGmU | | |
| | | | ACGCUCUGCCUUC | mCmGmAmAmAmGmAmU | | |
| | | | UGGCAUCGUU | GUGCmCGmCAAmCGCU | | |
| | | | | CUmGmCCmUmUmCmUG | | |
| | | | | GCAUCG*mU*mU | | |
| G029164 | 455 | CAGAGCAC | CAGAGCACCAAGA | mC*mA*mG*mAmGCAm | 2455 | chr16: |
| | | CAAGACAG | CAGAGCCCUGAGU | CmCAmAGmACAGAmGC | | 10907254- |
| | | AGCCCUGA | UGUAGCUCCCUGA | CCmUGAmGUUGmUmAm | | 10907278 |
| | | | AACCGUUGCUACA | GmCUCCCmUmGmAmAm | | |
| | | | AUAAGGCCGUCGA | AmCmCGUUmGmCUAmC | | |
| | | | AAGAUGUGCCGCA | AAU*AAGmGmCCmGmU | | |
| | | | ACGCUCUGCCUUC | mCmGmAmAmAmGmAmU | | |
| | | | UGGCAUCGUU | GUGCmCGmCAAmCGCU | | |
| | | | | CUmGmCCmUmUmCmUG | | |
| | | | | GCAUCG*mU*mU | | |
| G029165 | 456 | AGCACCAA | AGCACCAAGACAG | mA*mG*mC*mAmCCAm | 2456 | chr16: |
| | | GACAGAGC | AGCCCUGACGCGU | AmGAmCAmGAGCCmCU | | 10907257- |
| | | CCUGACGC | UGUAGCUCCCUGA | GAmCGCmGUUGmUmAm | | 10907281 |
| | | | AACCGUUGCUACA | GmCUCCCmUmGmAmAm | | |
| | | | AUAAGGCCGUCGA | AmCmCGUUmGmCUAmC | | |
| | | | AAGAUGUGCCGCA | AAU*AAGmGmCCmGmU | | |
| | | | ACGCUCUGCCUUC | mCmGmAmAmAmGmAmU | | |
| | | | UGGCAUCGUU | GUGCmCGmCAAmCGCU | | |
| | | | | CUmGmCCmUmUmCmUG | | |
| | | | | GCAUCG*mU*mU | | |
| G029166 | 457 | AAGACAGA | AAGACAGAGCCCU | mA*mA*mG*mAmCAGm | 2457 | chr16: |
| | | GCCCUGAC | GACGCUCCUCCGU | AmGCmCCmUGACGmCU | | 10907263- |
| | | GCUCCUCC | UGUAGCUCCCUGA | CCmUCCmGUUGmUmAm | | 10907287 |
| | | | AACCGUUGCUACA | GmCUCCCmUmGmAmAm | | |
| | | | AUAAGGCCGUCGA | AmCmCGUUmGmCUAmC | | |
| | | | AAGAUGUGCCGCA | AAU*AAGmGmCCmGmU | | |
| | | | ACGCUCUGCCUUC | mCmGmAmAmAmGmAmU | | |
| | | | UGGCAUCGUU | GUGCmCGmCAAmCGCU | | |
| | | | | CUmGmCCmUmUmCmUG | | |
| | | | | GCAUCG*mU*mU | | |
| G029167 | 458 | UGCCGGGC | UGCCGGGCAGUGU | mU*mG*mC*mCmGGGm | 2458 | chr16: |
| | | AGUGUGCC | GCCAGCUCUCAGU | CmAGmUGmUGCCAmGC | | 10907331- |
| | | AGCUCUCA | UGUAGCUCCCUGA | UCmUCAmGUUGmUmAm | | 10907355 |
| | | | AACCGUUGCUACA | GmCUCCCmUmGmAmAm | | |
| | | | AUAAGGCCGUCGA | AmCmCGUUmGmCUAmC | | |
| | | | AAGAUGUGCCGCA | AAU*AAGmGmCCmGmU | | |
| | | | ACGCUCUGCCUUC | mCmGmAmAmAmGmAmU | | |
| | | | UGGCAUCGUU | GUGCmCGmCAAmCGCU | | |
| | | | | CUmGmCCmUmUmCmUG | | |
| | | | | GCAUCG*mU*mU | | |
| G029168 | 459 | GCCGGGCA | GCCGGGCAGUGUG | mG*mC*mC*mGmGGCm | 2459 | chr16: |
| | | GUGUGCCA | CCAGCUCUCAGGU | AmGUmGUmGCCAGmCU | | 10907332- |
| | | GCUCUCAG | UGUAGCUCCCUGA | CUmCAGmGUUGmUmAm | | 10907356 |
| | | | AACCGUUGCUACA | GmCUCCCmUmGmAmAm | | |
| | | | AUAAGGCCGUCGA | AmCmCGUUmGmCUAmC | | |
| | | | AAGAUGUGCCGCA | AAU*AAGmGmCCmGmU | | |
| | | | ACGCUCUGCCUUC | mCmGmAmAmAmGmAmU | | |
| | | | UGGCAUCGUU | GUGCmCGmCAAmCGCU | | |
| | | | | CUmGmCCmUmUmCmUG | | |
| | | | | GCAUCG*mU*mU | | |
| G029169 | 460 | CAGGCCAG | CAGGCCAGCUUGG | mC*mA*mG*mGmCCAm | 2460 | chr16: |
| | | CUUGGCCA | CCAGCUCUGCCGU | GmCUmUGmGCCAGmCU | | 10907462- |
| | | GCUCUGCC | UGUAGCUCCCUGA | CUmGCCmGUUGmUmAm | | 10907486 |
| | | | AACCGUUGCUACA | GmCUCCCmUmGmAmAm | | |
| | | | AUAAGGCCGUCGA | AmCmCGUUmGmCUAmC | | |
| | | | AAGAUGUGCCGCA | AAU*AAGmGmCCmGmU | | |
| | | | ACGCUCUGCCUUC | mCmGmAmAmAmGmAmU | | |
| | | | UGGCAUCGUU | GUGCmCGmCAAmCGCU | | |
| | | | | CUmGmCCmUmUmCmUG | | |
| | | | | GCAUCG*mU*mU | | |
| G029170 | 461 | AGCUCCCA | AGCUCCCAGGCCA | mA*mG*mC*mUmCCCm | 2461 | chr16: |
| | | GGCCAGCU | GCUUGGCCAGCGU | AmGGmCCmAGCUUmGG | | 10907468- |
| | | UGGCCAGC | UGUAGCUCCCUGA | CCmAGCmGUUGmUmAm | | 10907492 |
| | | | AACCGUUGCUACA | GmCUCCCmUmGmAmAm | | |
| | | | AUAAGGCCGUCGA | AmCmCGUUmGmCUAmC | | |
| | | | AAGAUGUGCCGCA | AAU*AAGmGmCCmGmU | | |
| | | | ACGCUCUGCCUUC | mCmGmAmAmAmGmAmU | | |
| | | | UGGCAUCGUU | GUGCmCGmCAAmCGCU | | |
| | | | | CUmGmCCmUmUmCmUG | | |
| | | | | GCAUCG*mU*mU | | |
| G029171 | 462 | CUGCGGCC | CUGCGGCCCAGCU | mC*mU*mG*mCmGGCm | 2462 | chr16: |
| | | CAGCUCCC | CCCAGGCCAGCGU | CmCAmGCmUCCCAmGG | | 10907477- |
| | | AGGCCAGC | UGUAGCUCCCUGA | CCmAGCmGUUGmUmAm | | 10907501 |
| | | | AACCGUUGCUACA | GmCUCCCmUmGmAmAm | | |
| | | | AUAAGGCCGUCGA | AmCmCGUUmGmCUAmC | | |
| | | | AAGAUGUGCCGCA | AAU*AAGmGmCCmGmU | | |
| | | | ACGCUCUGCCUUC | mCmGmAmAmAmGmAmU | | |
| | | | UGGCAUCGUU | GUGCmCGmCAAmCGCU | | |
| | | | | CUmGmCCmUmUmCmUG | | |
| | | | | GCAUCG*mU*mU | | |
| G029172 | 463 | GCAGACAU | GCAGACAUCAAAG | mG*mC*mA*mGmACAm | 2463 | chr16: |
| | | CAAAGUAC | UACCCUACAGGGU | UmCAmAAmGUACCmCU | | 10907497- |
| | | CCUACAGG | UGUAGCUCCCUGA | ACmAGGmGUUGmUmAm | | 10907521 |
| | | | AACCGUUGCUACA | GmCUCCCmUmGmAmAm | | |
| | | | AUAAGGCCGUCGA | AmCmCGUUmGmCUAmC | | |
| | | | AAGAUGUGCCGCA | AAU*AAGmGmCCmGmU | | |
| | | | ACGCUCUGCCUUC | mCmGmAmAmAmGmAmU | | |
| | | | UGGCAUCGUU | GUGCmCGmCAAmCGCU | | |
| | | | | CUmGmCCmUmUmCmUG | | |
| | | | | GCAUCG*mU*mU | | |
| G029173 | 464 | AUCAAAGU | AUCAAAGUACCCU | mA*mU*mC*mAmAAGm | 2464 | chr16: |
| | | ACCCUACA | ACAGGAGGACCGU | UmACmCCmUACAGmGA | | 10907503- |
| | | GGAGGACC | UGUAGCUCCCUGA | GGmACCmGUUGmUmAm | | 10907527 |
| | | | AACCGUUGCUACA | GmCUCCCmUmGmAmAm | | |
| | | | AUAAGGCCGUCGA | AmCmCGUUmGmCUAmC | | |
| | | | AAGAUGUGCCGCA | AAU*AAGmGmCCmGmU | | |
| | | | ACGCUCUGCCUUC | mCmGmAmAmAmGmAmU | | |
| | | | UGGCAUCGUU | GUGCmCGmCAAmCGCU | | |
| | | | | CUmGmCCmUmUmCmUG | | |
| | | | | GCAUCG*mU*mU | | |
| G029174 | 465 | GACCAGUU | GACCAGUUCCCAU | mG*mA*mC*mCmAGUm | 2465 | chr16: |
| | | CCCAUCCG | CCGCAGACGUGGU | UmCCmCAmUCCGCmAG | | 10907523- |
| | | CAGACGUG | UGUAGCUCCCUGA | ACmGUGmGUUGmUmAm | | 10907547 |
| | | | AACCGUUGCUACA | GmCUCCCmUmGmAmAm | | |
| | | | AUAAGGCCGUCGA | AmCmCGUUmGmCUAmC | | |
| | | | AAGAUGUGCCGCA | AAU*AAGmGmCCmGmU | | |
| | | | ACGCUCUGCCUUC | mCmGmAmAmAmGmAmU | | |
| | | | UGGCAUCGUU | GUGCmCGmCAAmCGCU | | |
| | | | | CUmGmCCmUmUmCmUG | | |
| | | | | GCAUCG*mU*mU | | |
| G029175 | 466 | GAUGGCCA | GAUGGCCAAAGGC | mG*mA*mU*mGmGCCm | 2466 | chr16: |
| | | AAGGCUUA | UUAGUCCAACAGU | AmAAmGGmCUUAGmUC | | 91007558- |
| | | GUCCAACA | UGUAGCUCCCUGA | CAmACAmGUUGmUmAm | | 10907582 |
| | | | AACCGUUGCUACA | GmCUCCCmUmGmAmAm | | |
| | | | AUAAGGCCGUCGA | AmCmCGUUmGmCUAmC | | |
| | | | AAGAUGUGCCGCA | AAU*AAGmGmCCmGmU | | |
| | | | ACGCUCUGCCUUC | mCmGmAmAmAmGmAmU | | |
| | | | UGGCAUCGUU | GUGCmCGmCAAmCGCU | | |
| | | | | CUmGmCCmUmUmCmUG | | |
| | | | | GCAUCG*mU*mU | | |
| G029176 | 467 | AAAGGCUU | AAAGGCUUAGUCC | mA*mA*mA*mGmGCUm | 2467 | chr16: |
| | | AGUCCAAC | AACACCCACCGGU | UmAGmUCmCAACAmCC | | 10907565- |
| | | ACCCACCG | UGUAGCUCCCUGA | CAmCCGmGUUGmUmAm | | 10907589 |
| | | | AACCGUUGCUACA | GmCUCCCmUmGmAmAm | | |
| | | | AUAAGGCCGUCGA | AmCmCGUUmGmCUAmC | | |
| | | | AAGAUGUGCCGCA | AAU*AAGmGmCCmGmU | | |
| | | | ACGCUCUGCCUUC | mCmGmAmAmAmGmAmU | | |
| | | | UGGCAUCGUU | GUGCmCGmCAAmCGCU | | |
| | | | | CUmGmCCmUmUmCmUG | | |
| | | | | GCAUCG*mU*mU | | |
| G029177 | 468 | GUCCAACA | GUCCAACACCCAC | mG*mU*mC*mCmAACm | 2468 | chr16: |
| | | CCCACCGC | CGCGGGCCGCAGU | AmCCmCAmCCGCGmGG | | 10907574- |
| | | GGGCCGCA | UGUAGCUCCCUGA | CCmGCAmGUUGmUmAm | | 10907598 |
| | | | AACCGUUGCUACA | GmCUCCCmUmGmAmAm | | |
| | | | AUAAGGCCGUCGA | AmCmCGUUmGmCUAmC | | |
| | | | AAGAUGUGCCGCA | AAU*AAGmGmCCmGmU | | |
| | | | ACGCUCUGCCUUC | mCmGmAmAmAmGmAmU | | |
| | | | UGGCAUCGUU | GUGCmCGmCAAmCGCU | | |
| | | | | CUmGmCCmUmUmCmUG | | |
| | | | | GCAUCG*mU*mU | | |
| G029178 | 469 | AGCUUCCU | AGCUUCCUCCUGC | mA*mG*mC*mUmUCCm | 2469 | chr16: |
| | | CCUGCAAU | AAUGCUUCCUGGU | UmCCmUGmCAAUGmCU | | 10907619- |
| | | GCUUCCUG | UGUAGCUCCCUGA | UCmCUGmGUUGmUmAm | | 10907643 |
| | | | AACCGUUGCUACA | GmCUCCCmUmGmAmAm | | |
| | | | AUAAGGCCGUCGA | AmCmCGUUmGmCUAmC | | |
| | | | AAGAUGUGCCGCA | AAU*AAGmGmCCmGmU | | |
| | | | ACGCUCUGCCUUC | mCmGmAmAmAmGmAmU | | |
| | | | UGGCAUCGUU | GUGCmCGmCAAmCGCU | | |
| | | | | CUmGmCCmUmUmCmUG | | |
| | | | | GCAUCG*mU*mU | | |
| G029179 | 470 | GCUUCCUC | GCUUCCUCCUGCA | mG*mC*mU*mUmCCUm | 2470 | chr16: |
| | | CUGCAAUG | AUGCUUCCUGGGU | CmCUmGCmAAUGCmUU | | 10907620- |
| | | CUUCCUGG | UGUAGCUCCCUGA | CCmUGGmGUUGmUmAm | | 10907644 |
| | | | AACCGUUGCUACA | GmCUCCCmUmGmAmAm | | |
| | | | AUAAGGCCGUCGA | AmCmCGUUmGmCUAmC | | |
| | | | AAGAUGUGCCGCA | AAU*AAGmGmCCmGmU | | |
| | | | ACGCUCUGCCUUC | mCmGmAmAmAmGmAmU | | |
| | | | UGGCAUCGUU | GUGCmCGmCAAmCGCU | | |
| | | | | CUmGmCCmUmUmCmUG | | |
| | | | | GCAUCG*mU*mU | | |
| G029180 | 471 | UCGCCACU | UCGCCACUCAGAG | mU*mC*mG*mCmCACm | 2471 | chr16: |
| | | CAGAGCCA | CCAGCCACAGGGU | UmCAmGAmGCCAGmCC | | 10907648- |
| | | GCCACAGG | UGUAGCUCCCUGA | ACmAGGmGUUGmUmAm | | 10907672 |
| | | | AACCGUUGCUACA | GmCUCCCmUmGmAmAm | | |
| | | | AUAAGGCCGUCGA | AmCmCGUUmGmCUAmC | | |
| | | | AAGAUGUGCCGCA | AAU*AAGmGmCCmGmU | | |
| | | | ACGCUCUGCCUUC | mCmGmAmAmAmGmAmU | | |
| | | | UGGCAUCGUU | GUGCmCGmCAAmCGCU | | |
| | | | | CUmGmCCmUmUmCmUG | | |
| | | | | GCAUCG*mU*mU | | |
| G029181 | 472 | UUCGCCAC | UUCGCCACUCAGA | mU*mU*mC*mGmCCAm | 2472 | chr16: |
| | | UCAGAGCC | GCCAGCCACAGGU | CmUCmAGmAGCCAmGC | | 10907649- |
| | | AGCCACAG | UGUAGCUCCCUGA | CAmCAGmGUUGmUmAm | | 10907673 |
| | | | AACCGUUGCUACA | GmCUCCCmUmGmAmAm | | |
| | | | AUAAGGCCGUCGA | AmCmCGUUmGmCUAmC | | |
| | | | AAGAUGUGCCGCA | AAU*AAGmGmCCmGmU | | |
| | | | ACGCUCUGCCUUC | mCmGmAmAmAmGmAmU | | |
| | | | UGGCAUCGUU | GUGCmCGmCAAmCGCU | | |
| | | | | CUmGmCCmUmUmCmUG | | |
| | | | | GCAUCG*mU*mU | | |
| G029182 | 473 | UUUCGCCA | UUUCGCCACUCAG | mU*mU*mU*mCmGCCm | 2473 | chr16: |
| | | CUCAGAGC | AGCCAGCCACAGU | AmCUmCAmGAGCCmAG | | 10907650- |
| | | CAGCCACA | UGUAGCUCCCUGA | CCmACAmGUUGmUmAm | | 10907674 |
| | | | AACCGUUGCUACA | GmCUCCCmUmGmAmAm | | |
| | | | AUAAGGCCGUCGA | AmCmCGUUmGmCUAmC | | |
| | | | AAGAUGUGCCGCA | AAU*AAGmGmCCmGmU | | |
| | | | ACGCUCUGCCUUC | mCmGmAmAmAmGmAmU | | |
| | | | UGGCAUCGUU | GUGCmCGmCAAmCGCU | | |
| | | | | CUmGmCCmUmUmCmUG | | |
| | | | | GCAUCG*mU*mU | | |
| G029183 | 474 | AUUUCGCC | AUUUCGCCACUCA | mA*mU*mU*mUmCGCm | 2474 | chr16: |
| | | ACUCAGAG | GAGCCAGCCACGU | CmACmUCmAGAGCmCA | | 10907651- |
| | | CCAGCCAC | UGUAGCUCCCUGA | GCmCACmGUUGmUmAm | | 10907675 |
| | | | AACCGUUGCUACA | GmCUCCCmUmGmAmAm | | |
| | | | AUAAGGCCGUCGA | AmCmCGUUmGmCUAmC | | |
| | | | AAGAUGUGCCGCA | AAU*AAGmGmCCmGmU | | |
| | | | ACGCUCUGCCUUC | mCmGmAmAmAmGmAmU | | |
| | | | UGGCAUCGUU | GUGCmCGmCAAmCGCU | | |
| | | | | CUmGmCCmUmUmCmUG | | |
| | | | | GCAUCG*mU*mU | | |
| G029184 | 475 | AAGGAGCU | AAGGAGCUCCCGC | mA*mA*mG*mGmAGCm | 2475 | chr16: |
| | | CCCGCAGU | AGUACCUAGCAGU | UmCCmCGmCAGUAmCC | | 10907682- |
| | | ACCUAGCA | UGUAGCUCCCUGA | UAmGCAmGUUGmUmAm | | 10907706 |
| | | | AACCGUUGCUACA | GmCUCCCmUmGmAmAm | | |
| | | | AUAAGGCCGUCGA | AmCmCGUUmGmCUAmC | | |
| | | | AAGAUGUGCCGCA | AAU*AAGmGmCCmGmU | | |
| | | | ACGCUCUGCCUUC | mCmGmAmAmAmGmAmU | | |
| | | | UGGCAUCGUU | GUGCmCGmCAAmCGCU | | |
| | | | | CUmGmCCmUmUmCmUG | | |
| | | | | GCAUCG*mU*mU | | |
| G029185 | 476 | AGGAGCUC | AGGAGCUCCCGCA | mA*mG*mG*mAmGCUm | 2476 | chr16: |
| | | CCGCAGUA | GUACCUAGCAUGU | CmCCmGCmAGUACmCU | | 10907683- |
| | | CCUAGCAU | UGUAGCUCCCUGA | AGmCAUmGUUGmUmAm | | 10907707 |
| | | | AACCGUUGCUACA | GmCUCCCmUmGmAmAm | | |
| | | | AUAAGGCCGUCGA | AmCmCGUUmGmCUAmC | | |
| | | | AAGAUGUGCCGCA | AAU*AAGmGmCCmGmU | | |
| | | | ACGCUCUGCCUUC | mCmGmAmAmAmGmAmU | | |
| | | | UGGCAUCGUU | GUGCmCGmCAAmCGCU | | |
| | | | | CUmGmCCmUmUmCmUG | | |
| | | | | GCAUCG*mU*mU | | |
| G029186 | 477 | GGAGCUCC | GGAGCUCCCGCAG | mG*mG*mA*mGmCUCm | 2477 | chr16: |
| | | CGCAGUAC | UACCUAGCAUUGU | CmCGmCAmGUACCmUA | | 10907684- |
| | | CUAGCAUU | UGUAGCUCCCUGA | GCmAUUmGUUGmUmAm | | 10907708 |
| | | | AACCGUUGCUACA | GmCUCCCmUmGmAmAm | | |
| | | | AUAAGGCCGUCGA | AmCmCGUUmGmCUAmC | | |
| | | | AAGAUGUGCCGCA | AAU*AAGmGmCCmGmU | | |
| | | | ACGCUCUGCCUUC | mCmGmAmAmAmGmAmU | | |
| | | | UGGCAUCGUU | GUGCmCGmCAAmCGCU | | |
| | | | | CUmGmCCmUmUmCmUG | | |
| | | | | GCAUCG*mU*mU | | |
| G029187 | 478 | CCAGCCAG | CCAGCCAGUUGUC | mC*mC*mA*mGmCCAm | 2478 | chr16: |
| | | UUGUCAUA | AUAGGGCCUCUGU | GmUUmGUmCAUAGmGG | | 10907722- |
| | | GGGCCUCU | UGUAGCUCCCUGA | CCmUCUmGUUGmUmAm | | 10907746 |
| | | | AACCGUUGCUACA | GmCUCCCmUmGmAmAm | | |
| | | | AUAAGGCCGUCGA | AmCmCGUUmGmCUAmC | | |
| | | | AAGAUGUGCCGCA | AAU*AAGmGmCCmGmU | | |
| | | | ACGCUCUGCCUUC | mCmGmAmAmAmGmAmU | | |
| | | | UGGCAUCGUU | GUGCmCGmCAAmCGCU | | |
| | | | | CUmGmCCmUmUmCmUG | | |
| | | | | GCAUCG*mU*mU | | |
| G029188 | 479 | GCACGCCC | GCACGCCCUCCAG | mG*mC*mA*mCmGCCm | 2479 | chr16: |
| | | UCCAGCCA | CCAGUUGUCAUGU | CmUCmCAmGCCAGmUU | | 10907731- |
| | | GUUGUCAU | UGUAGCUCCCUGA | GUmCAUmGUUGmUmAm | | 10907755 |
| | | | AACCGUUGCUACA | GmCUCCCmUmGmAmAm | | |
| | | | AUAAGGCCGUCGA | AmCmCGUUmGmCUAmC | | |
| | | | AAGAUGUGCCGCA | AAU*AAGmGmCCmGmU | | |
| | | | ACGCUCUGCCUUC | mCmGmAmAmAmGmAmU | | |
| | | | UGGCAUCGUU | GUGCmCGmCAAmCGCU | | |
| | | | | CUmGmCCmUmUmCmUG | | |
| | | | | GCAUCG*mU*mU | | |
| G029189 | 480 | CUGGCUGG | CUGGCUGGGCUGA | mC*mU*mG*mGmCUGm | 2480 | chr16: |
| | | GCUGAUCU | UCUUCCAGCCUGU | GmGCmUGmAUCUUmCC | | 91007763- |
| | | UCCAGCCU | UGUAGCUCCCUGA | AGmCCUmGUUGmUmAm | | 10907787 |
| | | | AACCGUUGCUACA | GmCUCCCmUmGmAmAm | | |
| | | | AUAAGGCCGUCGA | AmCmCGUUmGmCUAmC | | |
| | | | AAGAUGUGCCGCA | AAU*AAGmGmCCmGmU | | |
| | | | ACGCUCUGCCUUC | mCmGmAmAmAmGmAmU | | |
| | | | UGGCAUCGUU | GUGCmCGmCAAmCGCU | | |
| | | | | CUmGmCCmUmUmCmUG | | |
| | | | | GCAUCG*mU*mU | | |
| G029190 | 481 | UGGCUGGG | UGGCUGGGCUGAU | mU*mG*mG*mCmUGGm | 2481 | chr16: |
| | | CUGAUCUU | CUUCCAGCCUCGU | GmCUmGAmUCUUCmCA | | 10907764- |
| | | CCAGCCUC | UGUAGCUCCCUGA | GCmCUCmGUUGmUmAm | | 10907788 |
| | | | AACCGUUGCUACA | GmCUCCCmUmGmAmAm | | |
| | | | AUAAGGCCGUCGA | AmCmCGUUmGmCUAmC | | |
| | | | AAGAUGUGCCGCA | AAU*AAGmGmCCmGmU | | |
| | | | ACGCUCUGCCUUC | mCmGmAmAmAmGmAmU | | |
| | | | UGGCAUCGUU | GUGCmCGmCAAmCGCU | | |
| | | | | CUmGmCCmUmUmCmUG | | |
| | | | | GCAUCG*mU*mU | | |
| G023421 | 482 | UACCGCUC | UACCGCUCACUGC | mU*mA*mC*mCmGCUm | 2482, | chr16: |
| | | ACUGCAGG | AGGACACGUAUGU | CmACmUGmCAGGAmCA | 3016 | 10906515- |
| | | ACACGUAU | UGUAGCUCCCUCC | CGmUAUmGUUGmUmAm | and | 10906539 |
| | | | GUUGCUACAAUAA | GmCUCCCmU(L1)mCm | 3111 | |
| | | | GGCCGUCGAUGUG | CGUUmGmCUAmCAAU* | | |
| | | | CCGCAACGCUCUG | AAGmGmCCmGmUmC(L | | |
| | | | CCGGCAUCGUU | 1)mGmAmUGUGCmCGm | | |
| | | | | CAAmCGCUCUmGmCC( | | |
| | | | | L1)GGCAUCGmU*mU | | |
| G023422 | 483 | CUCACUGC | CUCACUGCAGGAC | mC*mU*mC*mAmCUGm | 2483, | chr16: |
| | | AGGACACG | ACGUAUGGUGCGU | CmAGmGAmCACGUmAU | 3017 | 10906520- |
| | | UAUGGUGC | UGUAGCUCCCUCC | GGmUGCmGUUGmUmAm | and | 10906544 |
| | | | GUUGCUACAAUAA | GmCUCCCmU(L1)mCm | 3112 | |
| | | | GGCCGUCGAUGUG | CGUUmGmCUAmCAAU* | | |
| | | | CCGCAACGCUCUG | AAGmGmCCmGmUmC(L | | |
| | | | CCGGCAUCGUU | 1)mGmAmUGUGCmCGm | | |
| | | | | CAAmCGCUCUmGmCC( | | |
| | | | | L1)GGCAUCGmU*mU | | |
| G023423 | 484 | UCACUGCA | UCACUGCAGGACA | mU*mC*mA*mCmUGCm | 2484, | chr16: |
| | | GGACACGU | CGUAUGGUGCCGU | AmGGmACmACGUAmUG | 3018 | 10906521- |
| | | AUGGUGCC | UGUAGCUCCCUCC | GUmGCCmGUUGmUmAm | and | 10906545 |
| | | | GUUGCUACAAUAA | GmCUCCCmU(L1)mCm | 3113 | |
| | | | GGCCGUCGAUGUG | CGUUmGmCUAmCAAU* | | |
| | | | CCGCAACGCUCUG | AAGmGmCCmGmUmC(L | | |
| | | | CCGGCAUCGUU | 1)mGmAmUGUGCmCGm | | |
| | | | | CAAmCGCUCUmGmCC( | | |
| | | | | L1)GGCAUCGmU*mU | | |
| G023424 | 485 | AGGACACG | AGGACACGUAUGG | mA*mG*mG*mAmCACm | 2485, | chr16: |
| | | UAUGGUGC | UGCCGAGCCCGGU | GmUAmUGmGUGCCmGA | 3019 | 10906528- |
| | | CGAGCCCG | UGUAGCUCCCUCC | GCmCCGmGUUGmUmAm | and | 10906552 |
| | | | GUUGCUACAAUAA | GmCUCCCmU(L1)mCm | 3114 | |
| | | | GGCCGUCGAUGUG | CGUUmGmCUAmCAAU* | | |
| | | | CCGCAACGCUCUG | AAGmGmCCmGmUmC(L | | |
| | | | CCGGCAUCGUU | 1)mGmAmUGUGCmCGm | | |
| | | | | CAAmCGCUCUmGmCC( | | |
| | | | | L1)GGCAUCGmU*mU | | |
| G023425 | 486 | GGACACGU | GGACACGUAUGGU | mG*mG*mA*mCmACGm | 2486, | chr16: |
| | | AUGGUGCC | GCCGAGCCCGCGU | UmAUmGGmUGCCGmAG | 3020 | 10906529- |
| | | GAGCCCGC | UGUAGCUCCCUCC | CCmCGCmGUUGmUmAm | and | 10906553 |
| | | | GUUGCUACAAUAA | GmCUCCCmU(L1)mCm | 3115 | |
| | | | GGCCGUCGAUGUG | CGUUmGmCUAmCAAU* | | |
| | | | CCGCAACGCUCUG | AAGmGmCCmGmUmC(L | | |
| | | | CCGGCAUCGUU | 1)mGmAmUGUGCmCGm | | |
| | | | | CAAmCGCUCUmGmCC( | | |
| | | | | L1)GGCAUCGmU*mU | | |
| G023426 | 487 | AUCCUAGU | AUCCUAGUGGAGG | mA*mU*mC*mCmUAGm | 2487, | chr16: |
| | | GGAGGUGG | UGGAUCUGGUGGU | UmGGmAGmGUGGAmUC | 3021 | 10906566- |
| | | AUCUGGUG | UGUAGCUCCCUCC | UGmGUGmGUUGmUmAm | and | 10906590 |
| | | | GUUGCUACAAUAA | GmCUCCCmU(L1)mCm | 3116 | |
| | | | GGCCGUCGAUGUG | CGUUmGmCUAmCAAU* | | |
| | | | CCGCAACGCUCUG | AAGmGmCCmGmUmC(L | | |
| | | | CCGGCAUCGUU | 1)mGmAmUGUGCmCGm | | |
| | | | | CAAmCGCUCUmGmCC( | | |
| | | | | L1)GGCAUCGmU*mU | | |
| G023427 | 488 | GCAAGAGC | GCAAGAGCCUGGA | mG*mC*mA*mAmGAGm | 2488, | chr16: |
| | | CUGGAGCG | GCGGGAACUGGGU | CmCUmGGmAGCGGmGA | 3022 | 10906615- |
| | | GGAACUGG | UGUAGCUCCCUCC | ACmUGGmGUUGmUmAm | and | 10906639 |
| | | | GUUGCUACAAUAA | GmCUCCCmU(L1)mCm | 3117 | |
| | | | GGCCGUCGAUGUG | CGUUmGmCUAmCAAU* | | |
| | | | CCGCAACGCUCUG | AAGmGmCCmGmUmC(L | | |
| | | | CCGGCAUCGUU | 1)mGmAmUGUGCmCGm | | |
| | | | | CAAmCGCUCUmGmCC( | | |
| | | | | L1)GGCAUCGmU*mU | | |
| G023428 | 489 | CAAGAGCC | CAAGAGCCUGGAG | mC*mA*mA*mGmAGCm | 2489, | chr16: |
| | | UGGAGCGG | CGGGAACUGGCGU | CmUGmGAmGCGGGmAA | 3023 | 10906616- |
| | | GAACUGGC | UGUAGCUCCCUCC | CUmGGCmGUUGmUmAm | and | 10906640 |
| | | | GUUGCUACAAUAA | GmCUCCCmU(L1)mCm | 3118 | |
| | | | GGCCGUCGAUGUG | CGUUmGmCUAmCAAU* | | |
| | | | CCGCAACGCUCUG | AAGmGmCCmGmUmC(L | | |
| | | | CCGGCAUCGUU | 1)mGmAmUGUGCmCGm | | |
| | | | | CAAmCGCUCUmGmCC( | | |
| | | | | L1)GGCAUCGmU*mU | | |
| G023429 | 490 | GGGCAGAA | GGGCAGAACGGCA | mG*mG*mG*mCmAGAm | 2490, | chr16: |
| | | CGGCAGCU | GCUGGCCCAAGGU | AmCGmGCmAGCUGmGC | 3024 | 10906651- |
| | | GGCCCAAG | UGUAGCUCCCUCC | CCmAAGmGUUGmUmAm | and | 10906675 |
| | | | GUUGCUACAAUAA | GmCUCCCmU(L1)mCm | 3119 | |
| | | | GGCCGUCGAUGUG | CGUUmGmCUAmCAAU* | | |
| | | | CCGCAACGCUCUG | AAGmGmCCmGmUmC(L | | |
| | | | CCGGCAUCGUU | 1)mGmAmUGUGCmCGm | | |
| | | | | CAAmCGCUCUmGmCC( | | |
| | | | | L1)GGCAUCGmU*mU | | |
| G023430 | 491 | GCACAGCA | GCACAGCAAUCAC | mG*mC*mA*mCmAGCm | 2491, | chr16: |
| | | AUCACUCG | UCGUGUCUCACGU | AmAUmCAmCUCGUmGU | 3025 | 10906723- |
| | | UGUCUCAC | UGUAGCUCCCUCC | CUmCACmGUUGmUmAm | and | 10906747 |
| | | | GUUGCUACAAUAA | GmCUCCCmU(L1)mCm | 3120 | |
| | | | GGCCGUCGAUGUG | CGUUmGmCUAmCAAU* | | |
| | | | CCGCAACGCUCUG | AAGmGmCCmGmUmC(L | | |
| | | | CCGGCAUCGUU | 1)mGmAmUGUGCmCGm | | |
| | | | | CAAmCGCUCUmGmCC( | | |
| | | | | L1)GGCAUCGmU*mU | | |
| G023431 | 492 | CAAUAGCU | CAAUAGCUCUUGC | mC*mA*mA*mUmAGCm | 2492, | chr16: |
| | | CUUGCCCU | CCUGACCAGCUGU | UmCUmUGmCCCUGmAC | 3026 | 10906754- |
| | | GACCAGCU | UGUAGCUCCCUCC | CAmGCUmGUUGmUmAm | and | 10906778 |
| | | | GUUGCUACAAUAA | GmCUCCCmU(L1)mCm | 3121 | |
| | | | GGCCGUCGAUGUG | CGUUmGmCUAmCAAU* | | |
| | | | CCGCAACGCUCUG | AAGmGmCCmGmUmC(L | | |
| | | | CCGGCAUCGUU | 1)mGmAmUGUGCmCGm | | |
| | | | | CAAmCGCUCUmGmCC( | | |
| | | | | L1)GGCAUCGmU*mU | | |
| G023432 | 493 | CCAAUAGC | CCAAUAGCUCUUG | mC*mC*mA*mAmUAGm | 2493, | chr16: |
| | | UCUUGCCC | CCCUGACCAGCGU | CmUCmUUmGCCCUmGA | 3027 | 10906755- |
| | | UGACCAGC | UGUAGCUCCCUCC | CCmAGCmGUUGmUmAm | and | 10906779 |
| | | | GUUGCUACAAUAA | GmCUCCCmU(L1)mCm | 3122 | |
| | | | GGCCGUCGAUGUG | CGUUmGmCUAmCAAU* | | |
| | | | CCGCAACGCUCUG | AAGmGmCCmGmUmC(L | | |
| | | | CCGGCAUCGUU | 1)mGmAmUGUGCmCGm | | |
| | | | | CAAmCGCUCUmGmCC( | | |
| | | | | L1)GGCAUCGmU*mU | | |
| G023433 | 494 | AGCCGGGC | AGCCGGGCCUGGG | mA*mG*mC*mCmGGGm | 2494, | chr16: |
| | | CUGGGCUU | CUUGUGGCCGGGU | CmCUmGGmGCUUGmUG | 3028 | 10906791- |
| | | GUGGCCGG | UGUAGCUCCCUCC | GCmCGGmGUUGmUmAm | and | 10906815 |
| | | | GUUGCUACAAUAA | GmCUCCCmU(L1)mCm | 3123 | |
| | | | GGCCGUCGAUGUG | CGUUmGmCUAmCAAU* | | |
| | | | CCGCAACGCUCUG | AAGmGmCCmGmUmC(L | | |
| | | | CCGGCAUCGUU | 1)mGmAmUGUGCmCGm | | |
| | | | | CAAmCGCUCUmGmCC( | | |
| | | | | L1)GGCAUCGmU*mU | | |
| G023434 | 495 | CAGAGAAG | CAGAGAAGACAAA | mC*mA*mG*mAmGAAm | 2495, | chr16: |
| | | ACAAAGUC | GUCGUACUGGGGU | GmACmAAmAGUCGmUA | 3029 | 10906819- |
| | | GUACUGGG | UGUAGCUCCCUCC | CUmGGGmGUUGmUmAm | and | 10906843 |
| | | | GUUGCUACAAUAA | GmCUCCCmU(L1)mCm | 3124 | |
| | | | GGCCGUCGAUGUG | CGUUmGmCUAmCAAU* | | |
| | | | CCGCAACGCUCUG | AAGmGmCCmGmUmC(L | | |
| | | | CCGGCAUCGUU | 1)mGmAmUGUGCmCGm | | |
| | | | | CAAmCGCUCUmGmCC( | | |
| | | | | L1)GGCAUCGmU*mU | | |
| G023435 | 496 | AGUACGAC | AGUACGACUUUGU | mA*mG*mU*mAmCGAm | 2496, | chr16: |
| | | UUUGUCUU | CUUCUCUGUCCGU | CmUUmUGmUCUUCmUC | 3030 | 10906822- |
| | | CUCUGUCC | UGUAGCUCCCUCC | UGmUCCmGUUGmUmAm | and | 10906846 |
| | | | GUUGCUACAAUAA | GmCUCCCmU(L1)mCm | 3125 | |
| | | | GGCCGUCGAUGUG | CGUUmGmCUAmCAAU* | | |
| | | | CCGCAACGCUCUG | AAGmGmCCmGmUmC(L | | |
| | | | CCGGCAUCGUU | 1)mGmAmUGUGCmCGm | | |
| | | | | CAAmCGCUCUmGmCC( | | |
| | | | | L1)GGCAUCGmU*mU | | |
| G023436 | 497 | AGCAGAUC | AGCAGAUCCUGCA | mA*mG*mC*mAmGAUm | 2497, | chr16: |
| | | CUGCAGGC | GGCCAUAGGCAGU | CmCUmGCmAGGCCmAU | 3031 | 10906874- |
| | | CAUAGGCA | UGUAGCUCCCUCC | AGmGCAmGUUGmUmAm | and | 10906898 |
| | | | GUUGCUACAAUAA | GmCUCCCmU(L1)mCm | 3126 | |
| | | | GGCCGUCGAUGUG | CGUUmGmCUAmCAAU* | | |
| | | | CCGCAACGCUCUG | AAGmGmCCmGmUmC(L | | |
| | | | CCGGCAUCGUU | 1)mGmAmUGUGCmCGm | | |
| | | | | CAAmCGCUCUmGmCC( | | |
| | | | | L1)GGCAUCGmU*mU | | |
| G023437 | 498 | GCCUAUGG | GCCUAUGGCCUGC | mG*mC*mC*mUmAUGm | 2498, | chr16: |
| | | CCUGCAGG | AGGAUCUGCUCGU | GmCCmUGmCAGGAmUC | 3032 | 10906875- |
| | | AUCUGCUC | UGUAGCUCCCUCC | UGmCUCmGUUGmUmAm | and | 10906899 |
| | | | GUUGCUACAAUAA | GmCUCCCmU(L1)mCm | 3127 | |
| | | | GGCCGUCGAUGUG | CGUUmGmCUAmCAAU* | | |
| | | | CCGCAACGCUCUG | AAGmGmCCmGmUmC(L | | |
| | | | CCGGCAUCGUU | 1)mGmAmUGUGCmCGm | | |
| | | | | CAAmCGCUCUmGmCC( | | |
| | | | | L1)GGCAUCGmU*mU | | |
| G023438 | 499 | GAGCAGAU | GAGCAGAUCCUGC | mG*mA*mG*mCmAGAm | 2499, | chr16: |
| | | CCUGCAGG | AGGCCAUAGGCGU | UmCCmUGmCAGGCmCA | 3033 | 10906875- |
| | | CCAUAGGC | UGUAGCUCCCUCC | UAmGGCmGUUGmUmAm | and | 10906899 |
| | | | GUUGCUACAAUAA | GmCUCCCmU(L1)mCm | 3128 | |
| | | | GGCCGUCGAUGUG | CGUUmGmCUAmCAAU* | | |
| | | | CCGCAACGCUCUG | AAGmGmCCmGmUmC(L | | |
| | | | CCGGCAUCGUU | 1)mGmAmUGUGCmCGm | | |
| | | | | CAAmCGCUCUmGmCC( | | |
| | | | | L1)GGCAUCGmU*mU | | |
| G023439 | 500 | CCUAUGGC | CCUAUGGCCUGCA | mC*mC*mU*mAmUGGm | 2500, | chr16: |
| | | CUGCAGGA | GGAUCUGCUCUGU | CmCUmGCmAGGAUmCU | 3034 | 10906876- |
| | | UCUGCUCU | UGUAGCUCCCUCC | GCmUCUmGUUGmUmAm | and | 10906900 |
| | | | GUUGCUACAAUAA | GmCUCCCmU(L1)mCm | 3129 | |
| | | | GGCCGUCGAUGUG | CGUUmGmCUAmCAAU* | | |
| | | | CCGCAACGCUCUG | AAGmGmCCmGmUmC(L | | |
| | | | CCGGCAUCGUU | 1)mGmAmUGUGCmCGm | | |
| | | | | CAAmCGCUCUmGmCC( | | |
| | | | | L1)GGCAUCGmU*mU | | |
| G023440 | 501 | AGAGCAGA | AGAGCAGAUCCUG | mA*mG*mA*mGmCAGm | 2501, | chr16: |
| | | UCCUGCAG | CAGGCCAUAGGGU | AmUCmCUmGCAGGmCC | 3035 | 10906876- |
| | | GCCAUAGG | UGUAGCUCCCUCC | AUmAGGmGUUGmUmAm | and | 10906900 |
| | | | GUUGCUACAAUAA | GmCUCCCmU(L1)mCm | 3130 | |
| | | | GGCCGUCGAUGUG | CGUUmGmCUAmCAAU* | | |
| | | | CCGCAACGCUCUG | AAGmGmCCmGmUmC(L | | |
| | | | CCGGCAUCGUU | 1)mGmAmUGUGCmCGm | | |
| | | | | CAAmCGCUCUmGmCC( | | |
| | | | | L1)GGCAUCGmU*mU | | |
| G023441 | 502 | AAGAGCAG | AAGAGCAGAUCCU | mA*mA*mG*mAmGCAm | 2502, | chr16: |
| | | AUCCUGCA | GCAGGCCAUAGGU | GmAUmCCmUGCAGmGC | 3036 | 10906877- |
| | | GGCCAUAG | UGUAGCUCCCUCC | CAmUAGmGUUGmUmAm | and | 10906901 |
| | | | GUUGCUACAAUAA | GmCUCCCmU(L1)mCm | 3131 | |
| | | | GGCCGUCGAUGUG | CGUUmGmCUAmCAAU* | | |
| | | | CCGCAACGCUCUG | AAGmGmCCmGmUmC(L | | |
| | | | CCGGCAUCGUU | 1)mGmAmUGUGCmCGm | | |
| | | | | CAAmCGCUCUmGmCC( | | |
| | | | | L1)GGCAUCGmU*mU | | |
| G023442 | 503 | GCCUGCAG | GCCUGCAGGAUCU | mG*mC*mC*mUmGCAm | 2503, | chr16: |
| | | GAUCUGCU | GCUCUUCUCCCGU | GmGAmUCmUGCUCmUU | 3037 | 10906882- |
| | | CUUCUCCC | UGUAGCUCCCUCC | CUmCCCmGUUGmUmAm | and | 10906906 |
| | | | GUUGCUACAAUAA | GmCUCCCmU(L1)mCm | 3132 | |
| | | | GGCCGUCGAUGUG | CGUUmGmCUAmCAAU* | | |
| | | | CCGCAACGCUCUG | AAGmGmCCmGmUmC(L | | |
| | | | CCGGCAUCGUU | 1)mGmAmUGUGCmCGm | | |
| | | | | CAAmCGCUCUmGmCC( | | |
| | | | | L1)GGCAUCGmU*mU | | |
| G023443 | 504 | GGAUCUGC | GGAUCUGCUCUUC | mG*mG*mA*mUmCUGm | 2504, | chr16: |
| | | UCUUCUCC | UCCCUGGGCCCGU | CmUCmUUmCUCCCmUG | 3038 | 10906889- |
| | | CUGGGCCC | UGUAGCUCCCUCC | GGmCCCmGUUGmUmAm | and | 10906913 |
| | | | GUUGCUACAAUAA | GmCUCCCmU(L1)mCm | 3133 | |
| | | | GGCCGUCGAUGUG | CGUUmGmCUAmCAAU* | | |
| | | | CCGCAACGCUCUG | AAGmGmCCmGmUmC(L | | |
| | | | CCGGCAUCGUU | 1)mGmAmUGUGCmCGm | | |
| | | | | CAAmCGCUCUmGmCC( | | |
| | | | | L1)GGCAUCGmU*mU | | |
| G023444 | 505 | CACUCGUG | CACUCGUGGCGGC | mC*mA*mC*mUmCGUm | 2505, | chr16: |
| | | GCGGCCGA | CGAUGAGGUUUGU | GmGCmGGmCCGAUmGA | 3039 | 10906918- |
| | | UGAGGUUU | UGUAGCUCCCUCC | GGmUUUmGUUGmUmAm | and | 10906942 |
| | | | GUUGCUACAAUAA | GmCUCCCmU(L1)mCm | 3134 | |
| | | | GGCCGUCGAUGUG | CGUUmGmCUAmCAAU* | | |
| | | | CCGCAACGCUCUG | AAGmGmCCmGmUmC(L | | |
| | | | CCGGCAUCGUU | 1)mGmAmUGUGCmCGm | | |
| | | | | CAAmCGCUCUmGmCC( | | |
| | | | | L1)GGCAUCGmU*mU | | |
| G023445 | 506 | UGAGGUUU | UGAGGUUUUCAGC | mU*mG*mA*mGmGUUm | 2506, | chr16: |
| | | UCAGCCAC | CACAUCUUGAAGU | UmUCmAGmCCACAmUC | 3040 | 10906934- |
| | | AUCUUGAA | UGUAGCUCCCUCC | UUmGAAmGUUGmUmAm | and | 10906958 |
| | | | GUUGCUACAAUAA | GmCUCCCmU(L1)mCm | 3135 | |
| | | | GGCCGUCGAUGUG | CGUUmGmCUAmCAAU* | | |
| | | | CCGCAACGCUCUG | AAGmGmCCmGmUmC(L | | |
| | | | CCGGCAUCGUU | 1)mGmAmUGUGCmCGm | | |
| | | | | CAAmCGCUCUmGmCC( | | |
| | | | | L1)GGCAUCGmU*mU | | |
| G023446 | 507 | UGAAGAGA | UGAAGAGACCUGA | mU*mG*mA*mAmGAGm | 2507, | chr16: |
| | | CCUGACCG | CCGCGUUCUGCGU | AmCCmUGmACCGCmGU | 3041 | 10906954- |
| | | CGUUCUGC | UGUAGCUCCCUCC | UCmUGCmGUUGmUmAm | and | 10906978 |
| | | | GUUGCUACAAUAA | GmCUCCCmU(L1)mCm | 3136 | |
| | | | GGCCGUCGAUGUG | CGUUmGmCUAmCAAU* | | |
| | | | CCGCAACGCUCUG | AAGmGmCCmGmUmC(L | | |
| | | | CCGGCAUCGUU | 1)mGmAmUGUGCmCGm | | |
| | | | | CAAmCGCUCUmGmCC( | | |
| | | | | L1)GGCAUCGmU*mU | | |
| G023447 | 508 | UCGAGGAG | UCGAGGAGCUGGA | mU*mC*mG*mAmGGAm | 2508, | chr16: |
| | | CUGGAAGC | AGCGCAAGAUGGU | GmCUmGGmAAGCGmCA | 3042 | 10906993- |
| | | GCAAGAUG | UGUAGCUCCCUCC | AGmAUGmGUUGmUmAm | and | 10907017 |
| | | | GUUGCUACAAUAA | GmCUCCCmU(L1)mCm | 3137 | |
| | | | GGCCGUCGAUGUG | CGUUmGmCUAmCAAU* | | |
| | | | CCGCAACGCUCUG | AAGmGmCCmGmUmC(L | | |
| | | | CCGGCAUCGUU | 1)mGmAmUGUGCmCGm | | |
| | | | | CAAmCGCUCUmGmCC( | | |
| | | | | L1)GGCAUCGmU*mU | | |
| G023448 | 509 | AGAUGGCU | AGAUGGCUUCCUG | mA*mG*mA*mUmGGCm | 2509, | chr16: |
| | | UCCUGCAC | CACAGCACGUGGU | UmUCmCUmGCACAmGC | 3043 | 10907012- |
| | | AGCACGUG | UGUAGCUCCCUCC | ACmGUGmGUUGmUmAm | and | 10907036 |
| | | | GUUGCUACAAUAA | GmCUCCCmU(L1)mCm | 3138 | |
| | | | GGCCGUCGAUGUG | CGUUmGmCUAmCAAU* | | |
| | | | CCGCAACGCUCUG | AAGmGmCCmGmUmC(L | | |
| | | | CCGGCAUCGUU | 1)mGmAmUGUGCmCGm | | |
| | | | | CAAmCGCUCUmGmCC( | | |
| | | | | L1)GGCAUCGmU*mU | | |
| G023449 | 510 | UGGCCGGC | UGGCCGGCCUUUU | mU*mG*mG*mCmCGGm | 2510, | chr16: |
| | | CUUUUCCA | CCAGAAGAAGCGU | CmCUmUUmUCCAGmAA | 3044 | 10907077- |
| | | GAAGAAGC | UGUAGCUCCCUCC | GAmAGCmGUUGmUmAm | and | 10907101 |
| | | | GUUGCUACAAUAA | GmCUCCCmU(L1)mCm | 3139 | |
| | | | GGCCGUCGAUGUG | CGUUmGmCUAmCAAU* | | |
| | | | CCGCAACGCUCUG | AAGmGmCCmGmUmC(L | | |
| | | | CCGGCAUCGUU | 1)mGmAmUGUGCmCGm | | |
| | | | | CAAmCGCUCUmGmCC( | | |
| | | | | L1)GGCAUCGmU*mU | | |
| G023450 | 511 | UUCCAGAA | UUCCAGAAGAAGC | mU*mU*mC*mCmAGAm | 2511, | chr16: |
| | | GAAGCUGC | UGCUCCGAGGUGU | AmGAmAGmCUGCUmCC | 3045 | 10907088- |
| | | UCCGAGGU | UGUAGCUCCCUCC | GAmGGUmGUUGmUmAm | and | 10907112 |
| | | | GUUGCUACAAUAA | GmCUCCCmU(L1)mCm | 3140 | |
| | | | GGCCGUCGAUGUG | CGUUmGmCUAmCAAU* | | |
| | | | CCGCAACGCUCUG | AAGmGmCCmGmUmC(L | | |
| | | | CCGGCAUCGUU | 1)mGmAmUGUGCmCGm | | |
| | | | | CAAmCGCUCUmGmCC( | | |
| | | | | L1)GGCAUCGmU*mU | | |
| G023451 | 512 | UCCAGAAG | UCCAGAAGAAGCU | mU*mC*mC*mAmGAAm | 2512, | chr16: |
| | | AAGCUGCU | GCUCCGAGGUUGU | GmAAmGCmUGCUCmCG | 3046 | 10907089- |
| | | CCGAGGUU | UGUAGCUCCCUCC | AGmGUUmGUUGmUmAm | and | 10907113 |
| | | | GUUGCUACAAUAA | GmCUCCCmU(L1)mCm | 3141 | |
| | | | GGCCGUCGAUGUG | CGUUmGmCUAmCAAU* | | |
| | | | CCGCAACGCUCUG | AAGmGmCCmGmUmC(L | | |
| | | | CCGGCAUCGUU | 1)mGmAmUGUGCmCGm | | |
| | | | | CAAmCGCUCUmGmCC( | | |
| | | | | L1)GGCAUCGmU*mU | | |
| G023452 | 513 | AGAAGAAG | AGAAGAAGCUGCU | mA*mG*mA*mAmGAAm | 2513, | chr16: |
| | | CUGCUCCG | CCGAGGUUGCAGU | GmCUmGCmUCCGAmGG | 3047 | 10907092- |
| | | AGGUUGCA | UGUAGCUCCCUCC | UUmGCAmGUUGmUmAm | and | 10907116 |
| | | | GUUGCUACAAUAA | GmCUCCCmU(L1)mCm | 3142 | |
| | | | GGCCGUCGAUGUG | CGUUmGmCUAmCAAU* | | |
| | | | CCGCAACGCUCUG | AAGmGmCCmGmUmC(L | | |
| | | | CCGGCAUCGUU | 1)mGmAmUGUGCmCGm | | |
| | | | | CAAmCGCUCUmGmCC( | | |
| | | | | L1)GGCAUCGmU*mU | | |
| G023453 | 514 | AGAAGCUG | AGAAGCUGCUCCG | mA*mG*mA*mAmGCUm | 2514, | chr16: |
| | | CUCCGAGG | AGGUUGCACCCGU | GmCUmCCmGAGGUmUG | 3048 | 10907095- |
| | | UUGCACCC | UGUAGCUCCCUCC | CAmCCCmGUUGmUmAm | and | 10907119 |
| | | | GUUGCUACAAUAA | GmCUCCCmU(L1)mCm | 3143 | |
| | | | GGCCGUCGAUGUG | CGUUmGmCUAmCAAU* | | |
| | | | CCGCAACGCUCUG | AAGmGmCCmGmUmC(L | | |
| | | | CCGGCAUCGUU | 1)mGmAmUGUGCmCGm | | |
| | | | | CAAmCGCUCUmGmCC( | | |
| | | | | L1)GGCAUCGmU*mU | | |
| G023454 | 515 | CUCCGAGG | CUCCGAGGUUGCA | mC*mU*mC*mCmGAGm | 2515, | chr16: |
| | | UUGCACCC | CCCUCCUCCUCGU | GmUUmGCmACCCUmCC | 3049 | 10907103- |
| | | UCCUCCUC | UGUAGCUCCCUCC | UCmCUCmGUUGmUmAm | and | 10907127 |
| | | | GUUGCUACAAUAA | GmCUCCCmU(L1)mCm | 3144 | |
| | | | GGCCGUCGAUGUG | CGUUmGmCUAmCAAU* | | |
| | | | CCGCAACGCUCUG | AAGmGmCCmGmUmC(L | | |
| | | | CCGGCAUCGUU | 1)mGmAmUGUGCmCGm | | |
| | | | | CAAmCGCUCUmGmCC( | | |
| | | | | L1)GGCAUCGmU*mU | | |
| G023455 | 516 | AGGUUGCA | AGGUUGCACCCUC | mA*mG*mG*mUmUGCm | 2516, | chr16: |
| | | CCCUCCUC | CUCCUCACAGCGU | AmCCmCUmCCUCCmUC | 3050 | 10907108- |
| | | CUCACAGC | UGUAGCUCCCUCC | ACmAGCmGUUGmUmAm | and | 10907132 |
| | | | GUUGCUACAAUAA | GmCUCCCmU(L1)mCm | 3145 | |
| | | | GGCCGUCGAUGUG | CGUUmGmCUAmCAAU* | | |
| | | | CCGCAACGCUCUG | AAGmGmCCmGmUmC(L | | |
| | | | CCGGCAUCGUU | 1)mGmAmUGUGCmCGm | | |
| | | | | CAAmCGCUCUmGmCC( | | |
| | | | | L1)GGCAUCGmU*mU | | |
| G023456 | 517 | CUGGUCCA | CUGGUCCAGAGCC | mC*mU*mG*mGmUCCm | 2517, | chr16: |
| | | GAGCCUGA | UGAGCAAGGCCGU | AmGAmGCmCUGAGmCA | 3051 | 10907148- |
| | | GCAAGGCC | UGUAGCUCCCUCC | AGmGCCmGUUGmUmAm | and | 10907172 |
| | | | GUUGCUACAAUAA | GmCUCCCmU(L1)mCm | 3146 | |
| | | | GGCCGUCGAUGUG | CGUUmGmCUAmCAAU* | | |
| | | | CCGCAACGCUCUG | AAGmGmCCmGmUmC(L | | |
| | | | CCGGCAUCGUU | 1)mGmAmUGUGCmCGm | | |
| | | | | CAAmCGCUCUmGmCC( | | |
| | | | | L1)GGCAUCGmU*mU | | |
| G023457 | 518 | UGGUCCAG | UGGUCCAGAGCCU | mU*mG*mG*mUmCCAm | 2518, | chr16: |
| | | AGCCUGAG | GAGCAAGGCCGGU | GmAGmCCmUGAGCmAA | 3052 | 10907149- |
| | | CAAGGCCG | UGUAGCUCCCUCC | GGmCCGmGUUGmUmAm | and | 10907173 |
| | | | GUUGCUACAAUAA | GmCUCCCmU(L1)mCm | 3147 | |
| | | | GGCCGUCGAUGUG | CGUUmGmCUAmCAAU* | | |
| | | | CCGCAACGCUCUG | AAGmGmCCmGmUmC(L | | |
| | | | CCGGCAUCGUU | 1)mGmAmUGUGCmCGm | | |
| | | | | CAAmCGCUCUmGmCC( | | |
| | | | | L1)GGCAUCGmU*mU | | |
| G023458 | 519 | AGCAAGGC | AGCAAGGCCGACG | mA*mG*mC*mAmAGGm | 2519, | chr16: |
| | | CGACGCCC | CCCUAUUUGAGGU | CmCGmACmGCCCUmAU | 3053 | 10907163- |
| | | UAUUUGAG | UGUAGCUCCCUCC | UUmGAGmGUUGmUmAm | and | 10907187 |
| | | | GUUGCUACAAUAA | GmCUCCCmU(L1)mCm | 3148 | |
| | | | GGCCGUCGAUGUG | CGUUmGmCUAmCAAU* | | |
| | | | CCGCAACGCUCUG | AAGmGmCCmGmUmC(L | | |
| | | | CCGGCAUCGUU | 1)mGmAmUGUGCmCGm | | |
| | | | | CAAmCGCUCUmGmCC( | | |
| | | | | L1)GGCAUCGmU*mU | | |
| G023459 | 520 | GACGCCCU | GACGCCCUAUUUG | mG*mA*mC*mGmCCCm | 2520, | chr16: |
| | | AUUUGAGC | AGCUGUCCGGCGU | UmAUmUUmGAGCUmGU | 3054 | 10907172- |
| | | UGUCCGGC | UGUAGCUCCCUCC | CCmGGCmGUUGmUmAm | and | 10907196 |
| | | | GUUGCUACAAUAA | GmCUCCCmU(L1)mCm | 3149 | |
| | | | GGCCGUCGAUGUG | CGUUmGmCUAmCAAU* | | |
| | | | CCGCAACGCUCUG | AAGmGmCCmGmUmC(L | | |
| | | | CCGGCAUCGUU | 1)mGmAmUGUGCmCGm | | |
| | | | | CAAmCGCUCUmGmCC( | | |
| | | | | L1)GGCAUCGmU*mU | | |
| G023460 | 521 | AAGCCGGA | AAGCCGGACAGCU | mA*mA*mG*mCmCGGm | 2521, | chr16: |
| | | CAGCUCAA | CAAAUAGGGCGGU | AmCAmGCmUCAAAmUA | 3055 | 10907174- |
| | | AUAGGGCG | UGUAGCUCCCUCC | GGmGCGmGUUGmUmAm | and | 10907198 |
| | | | GUUGCUACAAUAA | GmCUCCCmU(L1)mCm | 3150 | |
| | | | GGCCGUCGAUGUG | CGUUmGmCUAmCAAU* | | |
| | | | CCGCAACGCUCUG | AAGmGmCCmGmUmC(L | | |
| | | | CCGGCAUCGUU | 1)mGmAmUGUGCmCGm | | |
| | | | | CAAmCGCUCUmGmCC( | | |
| | | | | L1)GGCAUCGmU*mU | | |
| G023461 | 522 | GAGCUGUC | GAGCUGUCCGGCU | mG*mA*mG*mCmUGUm | 2522, | chr16: |
| | | CGGCUUCU | UCUCCAUGGAGGU | CmCGmGCmUUCUCmCA | 3056 | 10907184- |
| | | CCAUGGAG | UGUAGCUCCCUCC | UGmGAGmGUUGmUmAm | and | 10907208 |
| | | | GUUGCUACAAUAA | GmCUCCCmU(L1)mCm | 3151 | |
| | | | GGCCGUCGAUGUG | CGUUmGmCUAmCAAU* | | |
| | | | CCGCAACGCUCUG | AAGmGmCCmGmUmC(L | | |
| | | | CCGGCAUCGUU | 1)mGmAmUGUGCmCGm | | |
| | | | | CAAmCGCUCUmGmCC( | | |
| | | | | L1)GGCAUCGmU*mU | | |
| G023462 | 523 | AGCUGUCC | AGCUGUCCGGCUU | mA*mG*mC*mUmGUCm | 2523, | chr16: |
| | | GGCUUCUC | CUCCAUGGAGCGU | CmGGmCUmUCUCCmAU | 3057 | 10907185- |
| | | CAUGGAGC | UGUAGCUCCCUCC | GGmAGCmGUUGmUmAm | and | 10907209 |
| | | | GUUGCUACAAUAA | GmCUCCCmU(L1)mCm | 3152 | |
| | | | GGCCGUCGAUGUG | CGUUmGmCUAmCAAU* | | |
| | | | CCGCAACGCUCUG | AAGmGmCCmGmUmC(L | | |
| | | | CCGGCAUCGUU | 1)mGmAmUGUGCmCGm | | |
| | | | | CAAmCGCUCUmGmCC( | | |
| | | | | L1)GGCAUCGmU*mU | | |
| G023463 | 524 | UCAGGGAU | UCAGGGAUGACAG | mU*mC*mA*mGmGGAm | 2524, | chr16: |
| | | GACAGAGC | AGCACCAAGACGU | UmGAmCAmGAGCAmCC | 3058 | 10907244- |
| | | ACCAAGAC | UGUAGCUCCCUCC | AAmGACmGUUGmUmAm | and | 10907268 |
| | | | GUUGCUACAAUAA | GmCUCCCmU(L1)mCm | 3153 | |
| | | | GGCCGUCGAUGUG | CGUUmGmCUAmCAAU* | | |
| | | | CCGCAACGCUCUG | AAGmGmCCmGmUmC(L | | |
| | | | CCGGCAUCGUU | 1)mGmAmUGUGCmCGm | | |
| | | | | CAAmCGCUCUmGmCC( | | |
| | | | | L1)GGCAUCGmU*mU | | |
| G023464 | 525 | CAGAGCAC | CAGAGCACCAAGA | mC*mA*mG*mAmGCAm | 2525, | chr16: |
| | | CAAGACAG | CAGAGCCCUGAGU | CmCAmAGmACAGAmGC | 3059 | 10907254- |
| | | AGCCCUGA | UGUAGCUCCCUCC | CCmUGAmGUUGmUmAm | and | 10907278 |
| | | | GUUGCUACAAUAA | GmCUCCCmU(L1)mCm | 3154 | |
| | | | GGCCGUCGAUGUG | CGUUmGmCUAmCAAU* | | |
| | | | CCGCAACGCUCUG | AAGmGmCCmGmUmC(L | | |
| | | | CCGGCAUCGUU | 1)mGmAmUGUGCmCGm | | |
| | | | | CAAmCGCUCUmGmCC( | | |
| | | | | L1)GGCAUCGmU*mU | | |
| G023465 | 526 | AGCACCAA | AGCACCAAGACAG | mA*mG*mC*mAmCCAm | 2526, | chr16: |
| | | GACAGAGC | AGCCCUGACGCGU | AmGAmCAmGAGCCmCU | 3060 | 10907257- |
| | | CCUGACGC | UGUAGCUCCCUCC | GAmCGCmGUUGmUmAm | and | 10907281 |
| | | | GUUGCUACAAUAA | GmCUCCCmU(L1)mCm | 3155 | |
| | | | GGCCGUCGAUGUG | CGUUmGmCUAmCAAU* | | |
| | | | CCGCAACGCUCUG | AAGmGmCCmGmUmC(L | | |
| | | | CCGGCAUCGUU | 1)mGmAmUGUGCmCGm | | |
| | | | | CAAmCGCUCUmGmCC( | | |
| | | | | L1)GGCAUCGmU*mU | | |
| G023466 | 527 | GGGACCGG | GGGACCGGCCACU | mG*mG*mG*mAmCCGm | 2527, | chr16: |
| | | CCACUUCU | UCUUCUCAGUCGU | GmCCmACmUUCUUmCU | 3061 | 10907287- |
| | | UCUCAGUC | UGUAGCUCCCUCC | CAmGUCmGUUGmUmAm | and | 10907311 |
| | | | GUUGCUACAAUAA | GmCUCCCmU(L1)mCm | 3156 | |
| | | | GGCCGUCGAUGUG | CGUUmGmCUAmCAAU* | | |
| | | | CCGCAACGCUCUG | AAGmGmCCmGmUmC(L | | |
| | | | CCGGCAUCGUU | 1)mGmAmUGUGCmCGm | | |
| | | | | CAAmCGCUCUmGmCC( | | |
| | | | | L1)GGCAUCGmU*mU | | |
| G023467 | 528 | GGCCACUU | GGCCACUUCUUCU | mG*mG*mC*mCmACUm | 2528 | chr16: |
| | | CUUCUCAG | CAGUCACAGCCGU | UmCUmUCmUCAGUmCA | 3062 | 10907293- |
| | | UCACAGCC | UGUAGCUCCCUCC | CAmGCCmGUUGmUmAm | and | 10907317 |
| | | | GUUGCUACAAUAA | GmCUCCCmU(L1)mCm | 3157 | |
| | | | GGCCGUCGAUGUG | CGUUmGmCUAmCAAU* | | |
| | | | CCGCAACGCUCUG | AAGmGmCCmGmUmC(L | | |
| | | | CCGGCAUCGUU | 1)mGmAmUGUGCmCGm | | |
| | | | | CAAmCGCUCUmGmCC( | | |
| | | | | L1)GGCAUCGmU*mU | | |
| G023468 | 529 | ACAGCCCU | ACAGCCCUACUUU | mA*mC*mA*mGmCCCm | 2529 | chr16: |
| | | ACUUUGUG | GUGCCGGGCAGGU | UmACmUUmUGUGCmCG | 3063 | 10907317- |
| | | CCGGGCAG | UGUAGCUCCCUCC | GGmCAGmGUUGmUmAm | and | 10907341 |
| | | | GUUGCUACAAUAA | GmCUCCCmU(L1)mCm | 3158 | |
| | | | GGCCGUCGAUGUG | CGUUmGmCUAmCAAU* | | |
| | | | CCGCAACGCUCUG | AAGmGmCCmGmUmC(L | | |
| | | | CCGGCAUCGUU | 1)mGmAmUGUGCmCGm | | |
| | | | | CAAmCGCUCUmGmCC( | | |
| | | | | L1)GGCAUCGmU*mU | | |
| G023469 | 530 | UGCCGGGC | UGCCGGGCAGUGU | mU*mG*mC*mCmGGGm | 2530, | chr16: |
| | | AGUGUGCC | GCCAGCUCUCAGU | CmAGmUGmUGCCAmGC | 3064 | 10907331- |
| | | AGCUCUCA | UGUAGCUCCCUCC | UCmUCAmGUUGmUmAm | and | 10907355 |
| | | | GUUGCUACAAUAA | GmCUCCCmU(L1)mCm | 3159 | |
| | | | GGCCGUCGAUGUG | CGUUmGmCUAmCAAU* | | |
| | | | CCGCAACGCUCUG | AAGmGmCCmGmUmC(L | | |
| | | | CCGGCAUCGUU | 1)mGmAmUGUGCmCGm | | |
| | | | | CAAmCGCUCUmGmCC( | | |
| | | | | L1)GGCAUCGmU*mU | | |
| G023470 | 531 | GCCGGGCA | GCCGGGCAGUGUG | mG*mC*mC*mGmGGCm | 2531, | chr16: |
| | | GUGUGCCA | CCAGCUCUCAGGU | AmGUmGUmGCCAGmCU | 3065 | 10907332- |
| | | GCUCUCAG | UGUAGCUCCCUCC | CUmCAGmGUUGmUmAm | and | 10907356 |
| | | | GUUGCUACAAUAA | GmCUCCCmU(L1)mCm | 3160 | |
| | | | GGCCGUCGAUGUG | CGUUmGmCUAmCAAU* | | |
| | | | CCGCAACGCUCUG | AAGmGmCCmGmUmC(L | | |
| | | | CCGGCAUCGUU | 1)mGmAmUGUGCmCGm | | |
| | | | | CAAmCGCUCUmGmCC( | | |
| | | | | L1)GGCAUCGmU*mU | | |
| G023471 | 532 | CCUCCACG | CCUCCACGCUCAC | mC*mC*mU*mCmCACm | 2532, | chr16: |
| | | CUCACGGG | GGGACUCUAUGGU | GmCUmCAmCGGGAmCU | 3066 | 10907392- |
| | | ACUCUAUG | UGUAGCUCCCUCC | CUmAUGmGUUGmUmAm | and | 10907416 |
| | | | GUUGCUACAAUAA | GmCUCCCmU(L1)mCm | 3161 | |
| | | | GGCCGUCGAUGUG | CGUUmGmCUAmCAAU* | | |
| | | | CCGCAACGCUCUG | AAGmGmCCmGmUmC(L | | |
| | | | CCGGCAUCGUU | 1)mGmAmUGUGCmCGm | | |
| | | | | CAAmCGCUCUmGmCC( | | |
| | | | | L1)GGCAUCGmU*mU | | |
| G023472 | 533 | UCACGGGA | UCACGGGACUCUA | mU*mC*mA*mCmGGGm | 2533, | chr16: |
| | | CUCUAUGU | UGUCGGCCUGCGU | AmCUmCUmAUGUCmGG | 3067 | 10907401- |
| | | CGGCCUGC | UGUAGCUCCCUCC | CCmUGCmGUUGmUmAm | and | 10907425 |
| | | | GUUGCUACAAUAA | GmCUCCCmU(L1)mCm | 3162 | |
| | | | GGCCGUCGAUGUG | CGUUmGmCUAmCAAU* | | |
| | | | CCGCAACGCUCUG | AAGmGmCCmGmUmC(L | | |
| | | | CCGGCAUCGUU | 1)mGmAmUGUGCmCGm | | |
| | | | | CAAmCGCUCUmGmCC( | | |
| | | | | L1)GGCAUCGmU*mU | | |
| G023473 | 534 | UGGGAGCU | UGGGAGCUGGGCC | mU*mG*mG*mGmAGCm | 2534, | chr16: |
| | | GGGCCGCA | GCAGACAUCAAGU | UmGGmGCmCGCAGmAC | 3068 | 10907484- |
| | | GACAUCAA | UGUAGCUCCCUCC | AUmCAAmGUUGmUmAm | and | 10907508 |
| | | | GUUGCUACAAUAA | GmCUCCCmU(L1)mCm | 3163 | |
| | | | GGCCGUCGAUGUG | CGUUmGmCUAmCAAU* | | |
| | | | CCGCAACGCUCUG | AAGmGmCCmGmUmC(L | | |
| | | | CCGGCAUCGUU | 1)mGmAmUGUGCmCGm | | |
| | | | | CAAmCGCUCUmGmCC( | | |
| | | | | L1)GGCAUCGmU*mU | | |
| G023474 | 535 | GGGAGCUG | GGGAGCUGGGCCG | mG*mG*mG*mAmGCUm | 2535, | chr16: |
| | | GGCCGCAG | CAGACAUCAAAGU | GmGGmCCmGCAGAmCA | 3069 | 91007485- |
| | | ACAUCAAA | UGUAGCUCCCUCC | UCmAAAmGUUGmUmAm | and | 10907509 |
| | | | GUUGCUACAAUAA | GmCUCCCmU(L1)mCm | 3164 | |
| | | | GGCCGUCGAUGUG | CGUUmGmCUAmCAAU* | | |
| | | | CCGCAACGCUCUG | AAGmGmCCmGmUmC(L | | |
| | | | CCGGCAUCGUU | 1)mGmAmUGUGCmCGm | | |
| | | | | CAAmCGCUCUmGmCC( | | |
| | | | | L1)GGCAUCGmU*mU | | |
| G023475 | 536 | GCAGACAU | GCAGACAUCAAAG | mG*mC*mA*mGmACAm | 2536, | chr16: |
| | | CAAAGUAC | UACCCUACAGGGU | UmCAmAAmGUACCmCU | 3070 | 10907497- |
| | | CCUACAGG | UGUAGCUCCCUCC | ACmAGGmGUUGmUmAm | and | 10907521 |
| | | | GUUGCUACAAUAA | GmCUCCCmU(L1)mCm | 3165 | |
| | | | GGCCGUCGAUGUG | CGUUmGmCUAmCAAU* | | |
| | | | CCGCAACGCUCUG | AAGmGmCCmGmUmC(L | | |
| | | | CCGGCAUCGUU | 1)mGmAmUGUGCmCGm | | |
| | | | | CAAmCGCUCUmGmCC( | | |
| | | | | L1)GGCAUCGmU*mU | | |
| G023476 | 537 | AUCAAAGU | AUCAAAGUACCCU | mA*mU*mC*mAmAAGm | 2537, | chr16: |
| | | ACCCUACA | ACAGGAGGACCGU | UmACmCCmUACAGmGA | 3071 | 10907503- |
| | | GGAGGACC | UGUAGCUCCCUCC | GGmACCmGUUGmUmAm | and | 10907527 |
| | | | GUUGCUACAAUAA | GmCUCCCmU(L1)mCm | 3166 | |
| | | | GGCCGUCGAUGUG | CGUUmGmCUAmCAAU* | | |
| | | | CCGCAACGCUCUG | AAGmGmCCmGmUmC(L | | |
| | | | CCGGCAUCGUU | 1)mGmAmUGUGCmCGm | | |
| | | | | CAAmCGCUCUmGmCC( | | |
| | | | | L1)GGCAUCGmU*mU | | |
| G023477 | 538 | UCAAAGUA | UCAAAGUACCCUA | mU*mC*mA*mAmAGUm | 2538, | chr16: |
| | | CCCUACAG | CAGGAGGACCAGU | AmCCmCUmACAGGmAG | 3072 | 10907504- |
| | | GAGGACCA | UGUAGCUCCCUCC | GAmCCAmGUUGmUmAm | and | 10907528 |
| | | | GUUGCUACAAUAA | GmCUCCCmU(L1)mCm | 3167 | |
| | | | GGCCGUCGAUGUG | CGUUmGmCUAmCAAU* | | |
| | | | CCGCAACGCUCUG | AAGmGmCCmGmUmC(L | | |
| | | | CCGGCAUCGUU | 1)mGmAmUGUGCmCGm | | |
| | | | | CAAmCGCUCUmGmCC( | | |
| | | | | L1)GGCAUCGmU*mU | | |
| G023478 | 539 | AGUACCCU | AGUACCCUACAGG | mA*mG*mU*mAmCCCm | 2539, | chr16: |
| | | ACAGGAGG | AGGACCAGUUCGU | UmACmAGmGAGGAmCC | 3073 | 10907508- |
| | | ACCAGUUC | UGUAGCUCCCUCC | AGmUUCmGUUGmUmAm | and | 10907532 |
| | | | GUUGCUACAAUAA | GmCUCCCmU(L1)mCm | 3168 | |
| | | | GGCCGUCGAUGUG | CGUUmGmCUAmCAAU* | | |
| | | | CCGCAACGCUCUG | AAGmGmCCmGmUmC(L | | |
| | | | CCGGCAUCGUU | 1)mGmAmUGUGCmCGm | | |
| | | | | CAAmCGCUCUmGmCC( | | |
| | | | | L1)GGCAUCGmU*mU | | |
| G023479 | 540 | UCCGCAGA | UCCGCAGACGUGA | mU*mC*mC*mGmCAGm | 2540, | chr16: |
| | | CGUGAGGA | GGACCUGGGCGGU | AmCGmUGmAGGACmCU | 3074 | 10907535- |
| | | CCUGGGCG | UGUAGCUCCCUCC | GGmGCGmGUUGmUmAm | and | 10907559 |
| | | | GUUGCUACAAUAA | GmCUCCCmU(L1)mCm | 3169 | |
| | | | GGCCGUCGAUGUG | CGUUmGmCUAmCAAU* | | |
| | | | CCGCAACGCUCUG | AAGmGmCCmGmUmC(L | | |
| | | | CCGGCAUCGUU | 1)mGmAmUGUGCmCGm | | |
| | | | | CAAmCGCUCUmGmCC( | | |
| | | | | L1)GGCAUCGmU*mU | | |
| G023480 | 541 | GGACCUGG | GGACCUGGGCGAU | mG*mG*mA*mCmCUGm | 2541, | chr16: |
| | | GCGAUGGC | GGCCAAAGGCUGU | GmGCmGAmUGGCCmAA | 3075 | 10907548- |
| | | CAAAGGCU | UGUAGCUCCCUCC | AGmGCUmGUUGmUmAm | and | 10907572 |
| | | | GUUGCUACAAUAA | GmCUCCCmU(L1)mCm | 3170 | |
| | | | GGCCGUCGAUGUG | CGUUmGmCUAmCAAU* | | |
| | | | CCGCAACGCUCUG | AAGmGmCCmGmUmC(L | | |
| | | | CCGGCAUCGUU | 1)mGmAmUGUGCmCGm | | |
| | | | | CAAmCGCUCUmGmCC( | | |
| | | | | L1)GGCAUCGmU*mU | | |
| G023481 | 542 | GGGCGAUG | GGGCGAUGGCCAA | mG*mG*mG*mCmGAUm | 2542, | chr16: |
| | | GCCAAAGG | AGGCUUAGUCCGU | GmGCmCAmAAGGCmUU | 3076 | 10907554- |
| | | CUUAGUCC | UGUAGCUCCCUCC | AGmUCCmGUUGmUmAm | and | 10907578 |
| | | | GUUGCUACAAUAA | GmCUCCCmU(L1)mCm | 3171 | |
| | | | GGCCGUCGAUGUG | CGUUmGmCUAmCAAU* | | |
| | | | CCGCAACGCUCUG | AAGmGmCCmGmUmC(L | | |
| | | | CCGGCAUCGUU | 1)mGmAmUGUGCmCGm | | |
| | | | | CAAmCGCUCUmGmCC( | | |
| | | | | L1)GGCAUCGmU*mU | | |
| G023482 | 543 | GGCGAUGG | GGCGAUGGCCAAA | mG*mG*mC*mGmAUGm | 2543, | chr16: |
| | | CCAAAGGC | GGCUUAGUCCAGU | GmCCmAAmAGGCUmUA | 3077 | 10907555- |
| | | UUAGUCCA | UGUAGCUCCCUCC | GUmCCAmGUUGmUmAm | and | 10907579 |
| | | | GUUGCUACAAUAA | GmCUCCCmU(L1)mCm | 3172 | |
| | | | GGCCGUCGAUGUG | CGUUmGmCUAmCAAU* | | |
| | | | CCGCAACGCUCUG | AAGmGmCCmGmUmC(L | | |
| | | | CCGGCAUCGUU | 1)mGmAmUGUGCmCGm | | |
| | | | | CAAmCGCUCUmGmCC( | | |
| | | | | L1)GGCAUCGmU*mU | | |
| G023483 | 544 | CGCGGGCC | CGCGGGCCGCAGA | mC*mG*mC*mGmGGCm | 2544, | chr16: |
| | | GCAGAGUC | GUCCGAGCUGGGU | CmGCmAGmAGUCCmGA | 3078 | 10907587- |
| | | CGAGCUGG | UGUAGCUCCCUCC | GCmUGGmGUUGmUmAm | and | 10907611 |
| | | | GUUGCUACAAUAA | GmCUCCCmU(L1)mCm | 3173 | |
| | | | GGCCGUCGAUGUG | CGUUmGmCUAmCAAU* | | |
| | | | CCGCAACGCUCUG | AAGmGmCCmGmUmC(L | | |
| | | | CCGGCAUCGUU | 1)mGmAmUGUGCmCGm | | |
| | | | | CAAmCGCUCUmGmCC( | | |
| | | | | L1)GGCAUCGmU*mU | | |
| G023484 | 545 | GCGGGCCG | GCGGGCCGCAGAG | mG*mC*mG*mGmGCCm | 2545, | chr16: |
| | | CAGAGUCC | UCCGAGCUGGCGU | GmCAmGAmGUCCGmAG | 3079 | 10907588- |
| | | GAGCUGGC | UGUAGCUCCCUCC | CUmGGCmGUUGmUmAm | and | 10907612 |
| | | | GUUGCUACAAUAA | GmCUCCCmU(L1)mCm | 3174 | |
| | | | GGCCGUCGAUGUG | CGUUmGmCUAmCAAU* | | |
| | | | CCGCAACGCUCUG | AAGmGmCCmGmUmC(L | | |
| | | | CCGGCAUCGUU | 1)mGmAmUGUGCmCGm | | |
| | | | | CAAmCGCUCUmGmCC( | | |
| | | | | L1)GGCAUCGmU*mU | | |
| G023485 | 546 | CGGGCCGC | CGGGCCGCAGAGU | mC*mG*mG*mGmCCGm | 2546, | chr16: |
| | | AGAGUCCG | CCGAGCUGGCCGU | CmAGmAGmUCCGAmGC | 3080 | 10907589- |
| | | AGCUGGCC | UGUAGCUCCCUCC | UGmGCCmGUUGmUmAm | and | 10907613 |
| | | | GUUGCUACAAUAA | GmCUCCCmU(L1)mCm | 3175 | |
| | | | GGCCGUCGAUGUG | CGUUmGmCUAmCAAU* | | |
| | | | CCGCAACGCUCUG | AAGmGmCCmGmUmC(L | | |
| | | | CCGGCAUCGUU | 1)mGmAmUGUGCmCGm | | |
| | | | | CAAmCGCUCUmGmCC( | | |
| | | | | L1)GGCAUCGmU*mU | | |
| G023486 | 547 | UGAGUGGC | UGAGUGGCGAAAU | mU*mG*mA*mGmUGGm | 2547, | chr16: |
| | | GAAAUCAA | CAAGGACAAGGGU | CmGAmAAmUCAAGmGA | 3081 | 10907662- |
| | | GGACAAGG | UGUAGCUCCCUCC | CAmAGGmGUUGmUmAm | and | 10907686 |
| | | | GUUGCUACAAUAA | GmCUCCCmU(L1)mCm | 3176 | |
| | | | GGCCGUCGAUGUG | CGUUmGmCUAmCAAU* | | |
| | | | CCGCAACGCUCUG | AAGmGmCCmGmUmC(L | | |
| | | | CCGGCAUCGUU | 1)mGmAmUGUGCmCGm | | |
| | | | | CAAmCGCUCUmGmCC( | | |
| | | | | L1)GGCAUCGmU*mU | | |
| G023487 | 548 | GAGUGGCG | GAGUGGCGAAAUC | mG*mA*mG*mUmGGCm | 2548, | chr16: |
| | | AAAUCAAG | AAGGACAAGGAGU | GmAAmAUmCAAGGmAC | 3082 | 10907663- |
| | | GACAAGGA | UGUAGCUCCCUCC | AAmGGAmGUUGmUmAm | and | 10907687 |
| | | | GUUGCUACAAUAA | GmCUCCCmU(L1)mCm | 3177 | |
| | | | GGCCGUCGAUGUG | CGUUmGmCUAmCAAU* | | |
| | | | CCGCAACGCUCUG | AAGmGmCCmGmUmC(L | | |
| | | | CCGGCAUCGUU | 1)mGmAmUGUGCmCGm | | |
| | | | | CAAmCGCUCUmGmCC( | | |
| | | | | L1)GGCAUCGmU*mU | | |
| G023488 | 549 | AAAUCAAG | AAAUCAAGGACAA | mA*mA*mA*mUmCAAm | 2549, | chr16: |
| | | GACAAGGA | GGAGCUCCCGCGU | GmGAmCAmAGGAGmCU | 3083 | 10907671- |
| | | GCUCCCGC | UGUAGCUCCCUCC | CCmCGCmGUUGmUmAm | and | 10907695 |
| | | | GUUGCUACAAUAA | GmCUCCCmU(L1)mCm | 3178 | |
| | | | GGCCGUCGAUGUG | CGUUmGmCUAmCAAU* | | |
| | | | CCGCAACGCUCUG | AAGmGmCCmGmUmC(L | | |
| | | | CCGGCAUCGUU | 1)mGmAmUGUGCmCGm | | |
| | | | | CAAmCGCUCUmGmCC( | | |
| | | | | L1)GGCAUCGmU*mU | | |
| G023489 | 550 | AAGGAGCU | AAGGAGCUCCCGC | mA*mA*mG*mGmAGCm | 2550, | chr16: |
| | | CCCGCAGU | AGUACCUAGCAGU | UmCCmCGmCAGUAmCC | 3084 | 10907682- |
| | | ACCUAGCA | UGUAGCUCCCUCC | UAmGCAmGUUGmUmAm | and | 10907706 |
| | | | GUUGCUACAAUAA | GmCUCCCmU(L1)mCm | 3179 | |
| | | | GGCCGUCGAUGUG | CGUUmGmCUAmCAAU* | | |
| | | | CCGCAACGCUCUG | AAGmGmCCmGmUmC(L | | |
| | | | CCGGCAUCGUU | 1)mGmAmUGUGCmCGm | | |
| | | | | CAAmCGCUCUmGmCC( | | |
| | | | | L1)GGCAUCGmU*mU | | |
| G023490 | 551 | AGGAGCUC | AGGAGCUCCCGCA | mA*mG*mG*mAmGCUm | 2551, | chr16: |
| | | CCGCAGUA | GUACCUAGCAUGU | CmCCmGCmAGUACmCU | 3085 | 10907683- |
| | | CCUAGCAU | UGUAGCUCCCUCC | AGmCAUmGUUGmUmAm | and | 10907707 |
| | | | GUUGCUACAAUAA | GmCUCCCmU(L1)mCm | 3180 | |
| | | | GGCCGUCGAUGUG | CGUUmGmCUAmCAAU* | | |
| | | | CCGCAACGCUCUG | AAGmGmCCmGmUmC(L | | |
| | | | CCGGCAUCGUU | 1)mGmAmUGUGCmCGm | | |
| | | | | CAAmCGCUCUmGmCC( | | |
| | | | | L1)GGCAUCGmU*mU | | |
| G023491 | 552 | GGAGCUCC | GGAGCUCCCGCAG | mG*mG*mA*mGmCUCm | 2552, | chr16: |
| | | CGCAGUAC | UACCUAGCAUUGU | CmCGmCAmGUACCmUA | 3086 | 10907684- |
| | | CUAGCAUU | UGUAGCUCCCUCC | GCmAUUmGUUGmUmAm | and | 10907708 |
| | | | GUUGCUACAAUAA | GmCUCCCmU(L1)mCm | 3181 | |
| | | | GGCCGUCGAUGUG | CGUUmGmCUAmCAAU* | | |
| | | | CCGCAACGCUCUG | AAGmGmCCmGmUmC(L | | |
| | | | CCGGCAUCGUU | 1)mGmAmUGUGCmCGm | | |
| | | | | CAAmCGCUCUmGmCC( | | |
| | | | | L1)GGCAUCGmU*mU | | |
| G023492 | 553 | GCCCUAUG | GCCCUAUGACAAC | mG*mC*mC*mCmUAUm | 2553, | chr16: |
| | | ACAACUGG | UGGCUGGAGGGGU | GmACmAAmCUGGCmUG | 3087 | 10907726- |
| | | CUGGAGGG | UGUAGCUCCCUCC | GAmGGGmGUUGmUmAm | and | 10907750 |
| | | | GUUGCUACAAUAA | GmCUCCCmU(L1)mCm | 3182 | |
| | | | GGCCGUCGAUGUG | CGUUmGmCUAmCAAU* | | |
| | | | CCGCAACGCUCUG | AAGmGmCCmGmUmC(L | | |
| | | | CCGGCAUCGUU | 1)mGmAmUGUGCmCGm | | |
| | | | | CAAmCGCUCUmGmCC( | | |
| | | | | L1)GGCAUCGmU*mU | | |
| G023493 | 554 | UGCCACGC | UGCCACGCUUUCU | mU*mG*mC*mCmACGm | 2554, | chr16: |
| | | UUUCUGGC | GGCUGGGCUGAGU | CmUUmUCmUGGCUmGG | 3088 | 10907752- |
| | | UGGGCUGA | UGUAGCUCCCUCC | GCmUGAmGUUGmUmAm | and | 10907776 |
| | | | GUUGCUACAAUAA | GmCUCCCmU(L1)mCm | 3183 | |
| | | | GGCCGUCGAUGUG | CGUUmGmCUAmCAAU* | | |
| | | | CCGCAACGCUCUG | AAGmGmCCmGmUmC(L | | |
| | | | CCGGCAUCGUU | 1)mGmAmUGUGCmCGm | | |
| | | | | CAAmCGCUCUmGmCC( | | |
| | | | | L1)GGCAUCGmU*mU | | |
| G023494 | 555 | ACGCUUUC | ACGCUUUCUGGCU | mA*mC*mG*mCmUUUm | 2555, | chr16: |
| | | UGGCUGGG | GGGCUGAUCUUGU | CmUGmGCmUGGGCmUG | 3089 | 10907756- |
| | | CUGAUCUU | UGUAGCUCCCUCC | AUmCUUmGUUGmUmAm | and | 10907780 |
| | | | GUUGCUACAAUAA | GmCUCCCmU(L1)mCm | 3184 | |
| | | | GGCCGUCGAUGUG | CGUUmGmCUAmCAAU* | | |
| | | | CCGCAACGCUCUG | AAGmGmCCmGmUmC(L | | |
| | | | CCGGCAUCGUU | 1)mGmAmUGUGCmCGm | | |
| | | | | CAAmCGCUCUmGmCC( | | |
| | | | | L1)GGCAUCGmU*mU | | |
| G023495 | 556 | CUUUCUGG | CUUUCUGGCUGGG | mC*mU*mU*mUmCUGm | 2556 | chr16: |
| | | CUGGGCUG | CUGAUCUUCCAGU | GmCUmGGmGCUGAmUC | 3090 | 10907759- |
| | | AUCUUCCA | UGUAGCUCCCUCC | UUmCCAmGUUGmUmAm | and | 10907783 |
| | | | GUUGCUACAAUAA | GmCUCCCmU(L1)mCm | 3185 | |
| | | | GGCCGUCGAUGUG | CGUUmGmCUAmCAAU* | | |
| | | | CCGCAACGCUCUG | AAGmGmCCmGmUmC(L | | |
| | | | CCGGCAUCGUU | 1)mGmAmUGUGCmCGm | | |
| | | | | CAAmCGCUCUmGmCC( | | |
| | | | | L1)GGCAUCGmU*mU | | |
| G023496 | 557 | CUGGCUGG | CUGGCUGGGCUGA | mC*mU*mG*mGmCUGm | 2557, | chr16: |
| | | GCUGAUCU | UCUUCCAGCCUGU | GmGCmUGmAUCUUmCC | 3091 | 10907763- |
| | | UCCAGCCU | UGUAGCUCCCUCC | AGmCCUmGUUGmUmAm | and | 10907787 |
| | | | GUUGCUACAAUAA | GmCUCCCmU(L1)mCm | 3186 | |
| | | | GGCCGUCGAUGUG | CGUUmGmCUAmCAAU* | | |
| | | | CCGCAACGCUCUG | AAGmGmCCmGmUmC(L | | |
| | | | CCGGCAUCGUU | 1)mGmAmUGUGCmCGm | | |
| | | | | CAAmCGCUCUmGmCC( | | |
| | | | | L1)GGCAUCGmU*mU | | |
| G023497 | 558 | UGGCUGGG | UGGCUGGGCUGAU | mU*mG*mG*mCmUGGm | 2558, | chr16: |
| | | CUGAUCUU | CUUCCAGCCUCGU | GmCUmGAmUCUUCmCA | 3092 | 10907764- |
| | | CCAGCCUC | UGUAGCUCCCUCC | GCmCUCmGUUGmUmAm | and | 10907788 |
| | | | GUUGCUACAAUAA | GmCUCCCmU(L1)mCm | 3187 | |
| | | | GGCCGUCGAUGUG | CGUUmGmCUAmCAAU* | | |
| | | | CCGCAACGCUCUG | AAGmGmCCmGmUmC(L | | |
| | | | CCGGCAUCGUU | 1)mGmAmUGUGCmCGm | | |
| | | | | CAAmCGCUCUmGmCC( | | |
| | | | | L1)GGCAUCGmU*mU | | |
| G023498 | 559 | GGAGCCCU | GGAGCCCUACUCG | mG*mG*mA*mGmCCCm | 2559, | chr16: |
| | | ACUCGGGC | GGCCAUCGGCGGU | UmACmUCmGGGCCmAU | 3093 | 10907802- |
| | | CAUCGGCG | UGUAGCUCCCUCC | CGmGCGmGUUGmUmAm | and | 10907826 |
| | | | GUUGCUACAAUAA | GmCUCCCmU(L1)mCm | 3188 | |
| | | | GGCCGUCGAUGUG | CGUUmGmCUAmCAAU* | | |
| | | | CCGCAACGCUCUG | AAGmGmCCmGmUmC(L | | |
| | | | CCGGCAUCGUU | 1)mGmAmUGUGCmCGm | | |
| | | | | CAAmCGCUCUmGmCC( | | |
| | | | | L1)GGCAUCGmU*mU | | |
| G023499 | 560 | ACAGGAAG | ACAGGAAGCAGAA | mA*mC*mA*mGmGAAm | 2560, | chr16: |
| | | CAGAAGGU | GGUGCUUGCGAGU | GmCAmGAmAGGUGmCU | 3094 | 10907839- |
| | | GCUUGCGA | UGUAGCUCCCUCC | UGmCGAmGUUGmUmAm | and | 10907863 |
| | | | GUUGCUACAAUAA | GmCUCCCmU(L1)mCm | 3189 | |
| | | | GGCCGUCGAUGUG | CGUUmGmCUAmCAAU* | | |
| | | | CCGCAACGCUCUG | AAGmGmCCmGmUmC(L | | |
| | | | CCGGCAUCGUU | 1)mGmAmUGUGCmCGm | | |
| | | | | CAAmCGCUCUmGmCC( | | |
| | | | | L1)GGCAUCGmU*mU | | |
| G023500 | 561 | GCUUGCGA | GCUUGCGAGGUAC | mG*mC*mU*mUmGCGm | 2561, | chr16: |
| | | GGUACCUG | CUGAAGCGGCUGU | AmGGmUAmCCUGAmAG | 3095 | 10907855- |
| | | AAGCGGCU | UGUAGCUCCCUCC | CGmGCUmGUUGmUmAm | and | 10907879 |
| | | | GUUGCUACAAUAA | GmCUCCCmU(L1)mCm | 3190 | |
| | | | GGCCGUCGAUGUG | CGUUmGmCUAmCAAU* | | |
| | | | CCGCAACGCUCUG | AAGmGmCCmGmUmC(L | | |
| | | | CCGGCAUCGUU | 1)mGmAmUGUGCmCGm | | |
| | | | | CAAmCGCUCUmGmCC( | | |
| | | | | L1)GGCAUCGmU*mU | | |
| G023501 | 562 | GAAUUUGG | GAAUUUGGCAGCA | mG*mA*mA*mUmUUGm | 2562, | chr16: |
| | | CAGCACGU | CGUGGUACAGGGU | GmCAmGCmACGUGmGU | 3096 | 10907950- |
| | | GGUACAGG | UGUAGCUCCCUCC | ACmAGGmGUUGmUmAm | and | 10907974 |
| | | | GUUGCUACAAUAA | GmCUCCCmU(L1)mCm | 3191 | |
| | | | GGCCGUCGAUGUG | CGUUmGmCUAmCAAU* | | |
| | | | CCGCAACGCUCUG | AAGmGmCCmGmUmC(L | | |
| | | | CCGGCAUCGUU | 1)mGmAmUGUGCmCGm | | |
| | | | | CAAmCGCUCUmGmCC( | | |
| | | | | L1)GGCAUCGmU*mU | | |
| G023502 | 563 | AAUUUGGC | AAUUUGGCAGCAC | mA*mA*mU*mUmUGGm | 2563, | chr16: |
| | | AGCACGUG | GUGGUACAGGAGU | CmAGmCAmCGUGGmUA | 3097 | 10907951- |
| | | GUACAGGA | UGUAGCUCCCUCC | CAmGGAmGUUGmUmAm | and | 10907975 |
| | | | GUUGCUACAAUAA | GmCUCCCmU(L1)mCm | 3192 | |
| | | | GGCCGUCGAUGUG | CGUUmGmCUAmCAAU* | | |
| | | | CCGCAACGCUCUG | AAGmGmCCmGmUmC(L | | |
| | | | CCGGCAUCGUU | 1)mGmAmUGUGCmCGm | | |
| | | | | CAAmCGCUCUmGmCC( | | |
| | | | | L1)GGCAUCGmU*mU | | |
| G023503 | 564 | AUUUGGCA | AUUUGGCAGCACG | mA*mU*mU*mUmGGCm | 2564, | chr16: |
| | | GCACGUGG | UGGUACAGGAGGU | AmGCmACmGUGGUmAC | 3098 | 10907952- |
| | | UACAGGAG | UGUAGCUCCCUCC | AGmGAGmGUUGmUmAm | and | 10907976 |
| | | | GUUGCUACAAUAA | GmCUCCCmU(L1)mCm | 3193 | |
| | | | GGCCGUCGAUGUG | CGUUmGmCUAmCAAU* | | |
| | | | CCGCAACGCUCUG | AAGmGmCCmGmUmC(L | | |
| | | | CCGGCAUCGUU | 1)mGmAmUGUGCmCGm | | |
| | | | | CAAmCGCUCUmGmCC( | | |
| | | | | L1)GGCAUCGmU*mU | | |
| G023504 | 565 | CCGGCCGC | CCGGCCGCCUCUC | mC*mC*mG*mGmCCGm | 2565, | chr16: |
| | | CUCUCUUU | UUUUCUGGGCAGU | CmCUmCUmCUUUUmCU | 3099 | 10907980- |
| | | UCUGGGCA | UGUAGCUCCCUCC | GGmGCAmGUUGmUmAm | and | 10908004 |
| | | | GUUGCUACAAUAA | GmCUCCCmU(L1)mCm | 3194 | |
| | | | GGCCGUCGAUGUG | CGUUmGmCUAmCAAU* | | |
| | | | CCGCAACGCUCUG | AAGmGmCCmGmUmC(L | | |
| | | | CCGGCAUCGUU | 1)mGmAmUGUGCmCGm | | |
| | | | | CAAmCGCUCUmGmCC( | | |
| | | | | L1)GGCAUCGmU*mU | | |
| G023505 | 566 | CCUCUCUU | CCUCUCUUUUCUG | mC*mC*mU*mCmUCUm | 2566, | chr16: |
| | | UUCUGGGC | GGCACCCGCCUGU | UmUUmCUmGGGCAmCC | 3100 | 10907987- |
| | | ACCCGCCU | UGUAGCUCCCUCC | CGmCCUmGUUGmUmAm | and | 10908011 |
| | | | GUUGCUACAAUAA | GmCUCCCmU(L1)mCm | 3195 | |
| | | | GGCCGUCGAUGUG | CGUUmGmCUAmCAAU* | | |
| | | | CCGCAACGCUCUG | AAGmGmCCmGmUmC(L | | |
| | | | CCGGCAUCGUU | 1)mGmAmUGUGCmCGm | | |
| | | | | CAAmCGCUCUmGmCC( | | |
| | | | | L1)GGCAUCGmU*mU | | |
| G023506 | 567 | CCUCCUGA | CCUCCUGAUGCAC | mC*mC*mU*mCmCUGm | 2567, | chr16: |
| | | UGCACAUG | AUGUACUGGGCGU | AmUGmCAmCAUGUmAC | 3101 | 10908015- |
| | | UACUGGGC | UGUAGCUCCCUCC | UGmGGCmGUUGmUmAm | and | 10908039 |
| | | | GUUGCUACAAUAA | GmCUCCCmU(L1)mCm | 3196 | |
| | | | GGCCGUCGAUGUG | CGUUmGmCUAmCAAU* | | |
| | | | CCGCAACGCUCUG | AAGmGmCCmGmUmC(L | | |
| | | | CCGGCAUCGUU | 1)mGmAmUGUGCmCGm | | |
| | | | | CAAmCGCUCUmGmCC( | | |
| | | | | L1)GGCAUCGmU*mU | | |
| G023507 | 568 | GCCUUGGA | GCCUUGGAGGCGG | mG*mC*mC*mUmUGGm | 2568, | chr16: |
| | | GGCGGCGG | CGGGCCAAGACGU | AmGGmCGmGCGGGmCC | 3102 | 10908042- |
| | | GCCAAGAC | UGUAGCUCCCUCC | AAmGACmGUUGmUmAm | and | 10908066 |
| | | | GUUGCUACAAUAA | GmCUCCCmU(L1)mCm | 3197 | |
| | | | GGCCGUCGAUGUG | CGUUmGmCUAmCAAU* | | |
| | | | CCGCAACGCUCUG | AAGmGmCCmGmUmC(L | | |
| | | | CCGGCAUCGUU | 1)mGmAmUGUGCmCGm | | |
| | | | | CAAmCGCUCUmGmCC( | | |
| | | | | L1)GGCAUCGmU*mU | | |
| G023508 | 569 | CCUUGGAG | CCUUGGAGGCGGC | mC*mC*mU*mUmGGAm | 2569, | chr16: |
| | | GCGGCGGG | GGGCCAAGACUGU | GmGCmGGmCGGGCmCA | 3103 | 10908043- |
| | | CCAAGACU | UGUAGCUCCCUCC | AGmACUmGUUGmUmAm | and | 10908067 |
| | | | GUUGCUACAAUAA | GmCUCCCmU(L1)mCm | 3198 | |
| | | | GGCCGUCGAUGUG | CGUUmGmCUAmCAAU* | | |
| | | | CCGCAACGCUCUG | AAGmGmCCmGmUmC(L | | |
| | | | CCGGCAUCGUU | 1)mGmAmUGUGCmCGm | | |
| | | | | CAAmCGCUCUmGmCC( | | |
| | | | | L1)GGCAUCGmU*mU | | |
| G023509 | 570 | AGGCGGCG | AGGCGGCGGGCCA | mA*mG*mG*mCmGGCm | 2570, | chr16: |
| | | GGCCAAGA | AGACUUCUCCCGU | GmGGmCCmAAGACmUU | 3104 | 10908049- |
| | | CUUCUCCC | UGUAGCUCCCUCC | CUmCCCmGUUGmUmAm | and | 10908073 |
| | | | GUUGCUACAAUAA | GmCUCCCmU(L1)mCm | 3199 | |
| | | | GGCCGUCGAUGUG | CGUUmGmCUAmCAAU* | | |
| | | | CCGCAACGCUCUG | AAGmGmCCmGmUmC(L | | |
| | | | CCGGCAUCGUU | 1)mGmAmUGUGCmCGm | | |
| | | | | CAAmCGCUCUmGmCC( | | |
| | | | | L1)GGCAUCGmU*mU | | |
| G023510 | 571 | CGGCGGGC | CGGCGGGCCAAGA | mC*mG*mG*mCmGGGm | 2571, | chr16: |
| | | CAAGACUU | CUUCUCCCUGGGU | CmCAmAGmACUUCmUC | 3105 | 10908052- |
| | | CUCCCUGG | UGUAGCUCCCUCC | CCmUGGmGUUGmUmAm | and | 10908076 |
| | | | GUUGCUACAAUAA | GmCUCCCmU(L1)mCm | 3200 | |
| | | | GGCCGUCGAUGUG | CGUUmGmCUAmCAAU* | | |
| | | | CCGCAACGCUCUG | AAGmGmCCmGmUmC(L | | |
| | | | CCGGCAUCGUU | 1)mGmAmUGUGCmCGm | | |
| | | | | CAAmCGCUCUmGmCC( | | |
| | | | | L1)GGCAUCGmU*mU | | |
| G023511 | 572 | CCCUGGAC | CCCUGGACCUCCG | mC*mC*mC*mUmGGAm | 2572, | chr16: |
| | | CUCCGCAG | CAGCACUGGCAGU | CmCUmCCmGCAGCmAC | 3106 | 10908070- |
| | | CACUGGCA | UGUAGCUCCCUCC | UGmGCAmGUUGmUmAm | and | 10908094 |
| | | | GUUGCUACAAUAA | GmCUCCCmU(L1)mCm | 3201 | |
| | | | GGCCGUCGAUGUG | CGUUmGmCUAmCAAU* | | |
| | | | CCGCAACGCUCUG | AAGmGmCCmGmUmC(L | | |
| | | | CCGGCAUCGUU | 1)mGmAmUGUGCmCGm | | |
| | | | | CAAmCGCUCUmGmCC( | | |
| | | | | L1)GGCAUCGmU*mU | | |
| G023512 | 573 | CCUGGACC | CCUGGACCUCCGC | mC*mC*mU*mGmGACm | 2573, | chr16: |
| | | UCCGCAGC | AGCACUGGCAUGU | CmUCmCGmCAGCAmCU | 3107 | 10908071- |
| | | ACUGGCAU | UGUAGCUCCCUCC | GGmCAUmGUUGmUmAm | and | 10908095 |
| | | | GUUGCUACAAUAA | GmCUCCCmU(L1)mCm | 3202 | |
| | | | GGCCGUCGAUGUG | CGUUmGmCUAmCAAU* | | |
| | | | CCGCAACGCUCUG | AAGmGmCCmGmUmC(L | | |
| | | | CCGGCAUCGUU | 1)mGmAmUGUGCmCGm | | |
| | | | | CAAmCGCUCUmGmCC( | | |
| | | | | L1)GGCAUCGmU*mU | | |
| G023513 | 574 | CUGGACCU | CUGGACCUCCGCA | mC*mU*mG*mGmACCm | 2574, | chr16: |
| | | CCGCAGCA | GCACUGGCAUUGU | UmCCmGCmAGCACmUG | 3108 | 10908072- |
| | | CUGGCAUU | UGUAGCUCCCUCC | GCmAUUmGUUGmUmAm | and | 10908096 |
| | | | GUUGCUACAAUAA | GmCUCCCmU(L1)mCm | 3203 | |
| | | | GGCCGUCGAUGUG | CGUUmGmCUAmCAAU* | | |
| | | | CCGCAACGCUCUG | AAGmGmCCmGmUmC(L | | |
| | | | CCGGCAUCGUU | 1)mGmAmUGUGCmCGm | | |
| | | | | CAAmCGCUCUmGmCC( | | |
| | | | | L1)GGCAUCGmU*mU | | |
| G023514 | 575 | GGGAGCCU | GGGAGCCUCGUGG | mG*mG*mG*mAmGCCm | 2575, | chr16: |
| | | CGUGGGAC | GACUCAGCUGUGU | UmCGmUGmGGACUmCA | 3109 | 10908111- |
| | | UCAGCUGU | UGUAGCUCCCUCC | GCmUGUmGUUGmUmAm | and | 10908135 |
| | | | GUUGCUACAAUAA | GmCUCCCmU(L1)mCm | 3204 | |
| | | | GGCCGUCGAUGUG | CGUUmGmCUAmCAAU* | | |
| | | | CCGCAACGCUCUG | AAGmGmCCmGmUmC(L | | |
| | | | CCGGCAUCGUU | 1)mGmAmUGUGCmCGm | | |
| | | | | CAAmCGCUCUmGmCC( | | |
| | | | | L1)GGCAUCGmU*mU | | |
| G023515 | 576 | GGAGCCUC | GGAGCCUCGUGGG | mG*mG*mA*mGmCCUm | 2576, | chr16: |
| | | GUGGGACU | ACUCAGCUGUGGU | CmGUmGGmGACUCmAG | 3110 | 10908112- |
| | | CAGCUGUG | UGUAGCUCCCUCC | CUmGUGmGUUGmUmAm | and | 10908136 |
| | | | GUUGCUACAAUAA | GmCUCCCmU(L1)mCm | 3205 | |
| | | | GGCCGUCGAUGUG | CGUUmGmCUAmCAAU* | | |
| | | | CCGCAACGCUCUG | AAGmGmCCmGmUmC(L | | |
| | | | CCGGCAUCGUU | 1)mGmAmUGUGCmCGm | | |
| | | | | CAAmCGCUCUmGmCC( | | |
| | | | | L1)GGCAUCGmU*mU | | |

[0563] The terms “mA,” “mC,” “mU,” or “mG” may be used to denote a nucleotide that has been modified with 2′—O-Me. The terms A*, C*, U*, or G* may be used to denote a nucleotide that is linked to the next (e.g., 3′) nucleotide with a phosphorothioate (PS) bond. As used herein, the “(L1)” refers to an internal linker having a bridging length of about 15-21 atoms (e.g., about 18 atoms) as described below, e.g., see Table 28.

[0564] In some embodiments, the CIITA guide RNA comprises a guide sequence selected from SEQ TD NOs: 301, 302, 304-576. In some embodiments, the CIITA guide RNA comprises a guide sequence that is at least 19, 20, 21, 22, 23, or 24 contiguous nucleotides of a sequence selected from SEQ ID NOs: 301, 302, 304-576. In some embodiments, the CIITA guide RNA comprises a guide sequence that is at least 95%, 90%, or 85% identical to a sequence selected from SEQ ID NOs: 301, 302, 304-576. In some embodiments, the CIITA guide RNA comprises a guide sequence that is at least 95% identical to a sequence selected from SEQ ID NOs: 301, 302, 304-576.

[0565] In some embodiments, the CIITA guide RNA comprises a guide sequence that comprises at least 10 contiguous nucleotides±10 nucleotides of a genomic coordinate listed in Table 4. As used herein, at least 10 contiguous nucleotides±10 nucleotides of a genomic coordinate means, for example, at least 10 contiguous nucleotides within the genomic coordinates wherein the genomic coordinates include 10 nucleotides in the 5′ direction and 10 nucleotides in the 3′ direction from the ranges listed in Table 4. For example, a CIITA guide RNA may comprise 10 contiguous nucleotides within the genomic coordinates chosen from: (a) chr16:10907504-10907528; chr16:10907508-10907532; chr16:10907539-10907559; chr16:10895658-10895682; chr16:10895668-10895692; chr16:10895750-10895774; chr16:10895753-10895777; chr16:10895754-10895778; chr16:10898684-10898708; chr16:10901529-10901553; chr16:10902121-10902145; chr16:10902701-10902725; chr16:10904726-10904750; chr16:10904760-10904784; chr16:10906493-10906517; chr16:10906515-10906539; chr16:10906631-10906655; chr16:10906636-10906660; chr16:10906643-10906667; chr16:10906770-10906794; chr16:10906788-10906812; chr16:10906789-10906813; chr16:10906816-10906840; chr16:10907148-10907172; chr16:10907254-10907278; chr16:10907331-10907355; chr16:10907477-10907501; chr16:10907497-10907521; chr16:10907503-10907527; and chr16:10907574-10907598; or (b) chr16:10906889-10906913; and chr16:10907504-10907528; including the boundary nucleotides of these ranges. In some embodiments, the CIITA guide RNA comprises a guide sequence that is at least 19, 20, 21, 22, 23, or 24 contiguous nucleotides of a sequence that comprises 10 contiguous nucleotides±10 nucleotides of a genomic coordinate listed in Table 4. In some embodiments, the CIITA guide RNA comprises a guide sequence that is at least 95%, 90%, or 85% identical to a sequence selected from a sequence that is 19, 20, 21, 22, 23, or 24 contiguous nucleotides of a sequence that comprises 10 contiguous nucleotides±10 nucleotides of a genomic coordinate listed in Table 4.

[0566] In some embodiments, the CIITA guide RNA comprises a guide sequence that comprises at least 15 contiguous nucleotides±10 nucleotides of a genomic coordinate listed in Table 4. In some embodiments, the CIITA guide RNA comprises a guide sequence that comprises at least 24 contiguous nucleotides±10 nucleotides of a genomic coordinate listed in Table 4.

[0567] In some embodiments, the CIITA guide RNA comprises SEQ ID NO: 301. In some embodiments, the CIITA guide RNA comprises SEQ ID NO: 302. In some embodiments, the CIITA guide RNA comprises SEQ ID NO: 304. In some embodiments, the CIITA guide RNA comprises SEQ ID NO: 305. In some embodiments, the CIITA guide RNA comprises SEQ ID NO: 306. In some embodiments, the CIITA guide RNA comprises SEQ ID NO: 307. In some embodiments, the CIITA guide RNA comprises SEQ ID NO: 308. In some embodiments, the CIITA guide RNA comprises SEQ ID NO: 309. In some embodiments, the CIITA guide RNA comprises SEQ ID NO: 310. In some embodiments, the CIITA guide RNA comprises SEQ ID NO: 311. In some embodiments, the CIITA guide RNA comprises SEQ ID NO: 312. In some embodiments, the CIITA guide RNA comprises SEQ ID NO: 313. In some embodiments, the CIITA guide RNA comprises SEQ ID NO: 314. In some embodiments, the CIITA guide RNA comprises SEQ ID NO: 315. In some embodiments, the CIITA guide RNA comprises SEQ ID NO: 316. In some embodiments, the CIITA guide RNA comprises SEQ ID NO: 317. In some embodiments, the CIITA guide RNA comprises SEQ ID NO: 318. In some embodiments, the CIITA guide RNA comprises SEQ ID NO: 319. In some embodiments, the CIITA guide RNA comprises SEQ ID NO: 320. In some embodiments, the CIITA guide RNA comprises SEQ ID NO: 321. In some embodiments, the CIITA guide RNA comprises SEQ ID NO: 322. In some embodiments, the CIITA guide RNA comprises SEQ ID NO: 323. In some embodiments, the CIITA guide RNA comprises SEQ ID NO: 324. In some embodiments, the CIITA guide RNA comprises SEQ ID NO: 325. In some embodiments, the CIITA guide RNA comprises SEQ ID NO: 326. In some embodiments, the CIITA guide RNA comprises SEQ ID NO: 327. In some embodiments, the CIITA guide RNA comprises SEQ ID NO: 328. In some embodiments, the CIITA guide RNA comprises SEQ ID NO: 329. In some embodiments, the CIITA guide RNA comprises SEQ ID NO: 330. In some embodiments, the CIITA guide RNA comprises SEQ ID NO: 331. In some embodiments, the CIITA guide RNA comprises SEQ ID NO: 332. In some embodiments, the CIITA guide RNA comprises SEQ ID NO: 333. In some embodiments, the CIITA guide RNA comprises SEQ ID NO: 334. In some embodiments, the CIITA guide RNA comprises SEQ ID NO: 335. In some embodiments, the CIITA guide RNA comprises SEQ ID NO: 336. In some embodiments, the CIITA guide RNA comprises SEQ ID NO: 337. In some embodiments, the CIITA guide RNA comprises SEQ ID NO: 338. In some embodiments, the CIITA guide RNA comprises SEQ ID NO: 339. In some embodiments, the CIITA guide RNA comprises SEQ ID NO: 340. In some embodiments, the CIITA guide RNA comprises SEQ ID NO: 341. In some embodiments, the CIITA guide RNA comprises SEQ ID NO: 342. In some embodiments, the CIITA guide RNA comprises SEQ ID NO: 343. In some embodiments, the CIITA guide RNA comprises SEQ ID NO: 344. In some embodiments, the CIITA guide RNA comprises SEQ ID NO: 345. In some embodiments, the CIITA guide RNA comprises SEQ ID NO: 346. In some embodiments, the CIITA guide RNA comprises SEQ ID NO: 347. In some embodiments, the CIITA guide RNA comprises SEQ ID NO: 348. In some embodiments, the CIITA guide RNA comprises SEQ ID NO: 349. In some embodiments, the CIITA guide RNA comprises SEQ ID NO: 350. In some embodiments, the CIITA guide RNA comprises SEQ ID NO: 351. In some embodiments, the CIITA guide RNA comprises SEQ ID NO: 352. In some embodiments, the CIITA guide RNA comprises SEQ ID NO: 353. In some embodiments, the CIITA guide RNA comprises SEQ ID NO: 354. In some embodiments, the CIITA guide RNA comprises SEQ ID NO: 355. In some embodiments, the CIITA guide RNA comprises SEQ ID NO: 356. In some embodiments, the CIITA guide RNA comprises SEQ ID NO: 357. In some embodiments, the CIITA guide RNA comprises SEQ ID NO: 358. In some embodiments, the CIITA guide RNA comprises SEQ ID NO: 359. In some embodiments, the CIITA guide RNA comprises SEQ ID NO: 360. In some embodiments, the CIITA guide RNA comprises SEQ ID NO: 361. In some embodiments, the CIITA guide RNA comprises SEQ ID NO: 362. In some embodiments, the CIITA guide RNA comprises SEQ ID NO: 363. In some embodiments, the CIITA guide RNA comprises SEQ ID NO: 364. In some embodiments, the CIITA guide RNA comprises SEQ ID NO: 365. In some embodiments, the CIITA guide RNA comprises SEQ ID NO: 366. In some embodiments, the CIITA guide RNA comprises SEQ ID NO: 367. In some embodiments, the CIITA guide RNA comprises SEQ ID NO: 368. In some embodiments, the CIITA guide RNA comprises SEQ ID NO: 369. In some embodiments, the CIITA guide RNA comprises SEQ ID NO: 370. In some embodiments, the CIITA guide RNA comprises SEQ ID NO: 371. In some embodiments, the CIITA guide RNA comprises SEQ ID NO: 372. In some embodiments, the CIITA guide RNA comprises SEQ ID NO: 373. In some embodiments, the CIITA guide RNA comprises SEQ ID NO: 374. In some embodiments, the CIITA guide RNA comprises SEQ ID NO: 375. In some embodiments, the CIITA guide RNA comprises SEQ ID NO: 376. In some embodiments, the CIITA guide RNA comprises SEQ ID NO: 377. In some embodiments, the CIITA guide RNA comprises SEQ ID NO: 378. In some embodiments, the CIITA guide RNA comprises SEQ ID NO: 379. In some embodiments, the CIITA guide RNA comprises SEQ ID NO: 380. In some embodiments, the CIITA guide RNA comprises SEQ ID NO: 381. In some embodiments, the CIITA guide RNA comprises SEQ ID NO: 382. In some embodiments, the CIITA guide RNA comprises SEQ ID NO: 383. In some embodiments, the CIITA guide RNA comprises SEQ ID NO: 384. In some embodiments, the CIITA guide RNA comprises SEQ ID NO: 385. In some embodiments, the CIITA guide RNA comprises SEQ ID NO: 386. In some embodiments, the CIITA guide RNA comprises SEQ ID NO: 387. In some embodiments, the CIITA guide RNA comprises SEQ ID NO: 388. In some embodiments, the CIITA guide RNA comprises SEQ ID NO: 389. In some embodiments, the CIITA guide RNA comprises SEQ ID NO: 390. In some embodiments, the CIITA guide RNA comprises SEQ ID NO: 391. In some embodiments, the CIITA guide RNA comprises SEQ ID NO: 392. In some embodiments, the CIITA guide RNA comprises SEQ ID NO: 393. In some embodiments, the CIITA guide RNA comprises SEQ ID NO: 394. In some embodiments, the CIITA guide RNA comprises SEQ ID NO: 395. In some embodiments, the CIITA guide RNA comprises SEQ ID NO: 396. In some embodiments, the CIITA guide RNA comprises SEQ ID NO: 397. In some embodiments, the CIITA guide RNA comprises SEQ ID NO: 398. In some embodiments, the CIITA guide RNA comprises SEQ ID NO: 399. In some embodiments, the CIITA guide RNA comprises SEQ ID NO: 400. In some embodiments, the CIITA guide RNA comprises SEQ ID NO: 401. In some embodiments, the CIITA guide RNA comprises SEQ ID NO: 402. In some embodiments, the CIITA guide RNA comprises SEQ ID NO: 403. In some embodiments, the CIITA guide RNA comprises SEQ ID NO: 404. In some embodiments, the CIITA guide RNA comprises SEQ ID NO: 405. In some embodiments, the CIITA guide RNA comprises SEQ ID NO: 406. In some embodiments, the CIITA guide RNA comprises SEQ ID NO: 407. In some embodiments, the CIITA guide RNA comprises SEQ ID NO: 408. In some embodiments, the CIITA guide RNA comprises SEQ ID NO: 409. In some embodiments, the CIITA guide RNA comprises SEQ ID NO: 410. In some embodiments, the CIITA guide RNA comprises SEQ ID NO: 411. In some embodiments, the CIITA guide RNA comprises SEQ ID NO: 412. In some embodiments, the CIITA guide RNA comprises SEQ ID NO: 413. In some embodiments, the CIITA guide RNA comprises SEQ ID NO: 414. In some embodiments, the CIITA guide RNA comprises SEQ ID NO: 415. In some embodiments, the CIITA guide RNA comprises SEQ ID NO: 416. In some embodiments, the CIITA guide RNA comprises SEQ ID NO: 417. In some embodiments, the CIITA guide RNA comprises SEQ ID NO: 418. In some embodiments, the CIITA guide RNA comprises SEQ ID NO: 419. In some embodiments, the CIITA guide RNA comprises SEQ ID NO: 420. In some embodiments, the CIITA guide RNA comprises SEQ ID NO: 421. In some embodiments, the CIITA guide RNA comprises SEQ ID NO: 422. In some embodiments, the CIITA guide RNA comprises SEQ ID NO: 423. In some embodiments, the CIITA guide RNA comprises SEQ ID NO: 424. In some embodiments, the CIITA guide RNA comprises SEQ ID NO: 425. In some embodiments, the CIITA guide RNA comprises SEQ ID NO: 426. In some embodiments, the CIITA guide RNA comprises SEQ ID NO: 427. In some embodiments, the CIITA guide RNA comprises SEQ ID NO: 428. In some embodiments, the CIITA guide RNA comprises SEQ ID NO: 429. In some embodiments, the CIITA guide RNA comprises SEQ ID NO: 430. In some embodiments, the CIITA guide RNA comprises SEQ ID NO: 431. In some embodiments, the CIITA guide RNA comprises SEQ ID NO: 432. In some embodiments, the CIITA guide RNA comprises SEQ ID NO: 433. In some embodiments, the CIITA guide RNA comprises SEQ ID NO: 434. In some embodiments, the CIITA guide RNA comprises SEQ ID NO: 435. In some embodiments, the CIITA guide RNA comprises SEQ ID NO: 436. In some embodiments, the CIITA guide RNA comprises SEQ ID NO: 437. In some embodiments, the CIITA guide RNA comprises SEQ ID NO: 438. In some embodiments, the CIITA guide RNA comprises SEQ ID NO: 439. In some embodiments, the CIITA guide RNA comprises SEQ ID NO: 440. In some embodiments, the CIITA guide RNA comprises SEQ ID NO: 441. In some embodiments, the CIITA guide RNA comprises SEQ ID NO: 442. In some embodiments, the CIITA guide RNA comprises SEQ ID NO: 443. In some embodiments, the CIITA guide RNA comprises SEQ ID NO: 444. In some embodiments, the CIITA guide RNA comprises SEQ ID NO: 445. In some embodiments, the CIITA guide RNA comprises SEQ ID NO: 446. In some embodiments, the CIITA guide RNA comprises SEQ ID NO: 447. In some embodiments, the CIITA guide RNA comprises SEQ ID NO: 448. In some embodiments, the CIITA guide RNA comprises SEQ ID NO: 449. In some embodiments, the CIITA guide RNA comprises SEQ ID NO: 450. In some embodiments, the CIITA guide RNA comprises SEQ ID NO: 451. In some embodiments, the CIITA guide RNA comprises SEQ ID NO: 452. In some embodiments, the CIITA guide RNA comprises SEQ ID NO: 453. In some embodiments, the CIITA guide RNA comprises SEQ ID NO: 454. In some embodiments, the CIITA guide RNA comprises SEQ ID NO: 455. In some embodiments, the CIITA guide RNA comprises SEQ ID NO: 456. In some embodiments, the CIITA guide RNA comprises SEQ ID NO: 457. In some embodiments, the CIITA guide RNA comprises SEQ ID NO: 458. In some embodiments, the CIITA guide RNA comprises SEQ ID NO: 459. In some embodiments, the CIITA guide RNA comprises SEQ ID NO: 460. In some embodiments, the CIITA guide RNA comprises SEQ ID NO: 461. In some embodiments, the CIITA guide RNA comprises SEQ ID NO: 462. In some embodiments, the CIITA guide RNA comprises SEQ ID NO: 463. In some embodiments, the CIITA guide RNA comprises SEQ ID NO: 464. In some embodiments, the CIITA guide RNA comprises SEQ ID NO: 465. In some embodiments, the CIITA guide RNA comprises SEQ ID NO: 466. In some embodiments, the CIITA guide RNA comprises SEQ ID NO: 467. In some embodiments, the CIITA guide RNA comprises SEQ ID NO: 468. In some embodiments, the CIITA guide RNA comprises SEQ ID NO: 469. In some embodiments, the CIITA guide RNA comprises SEQ ID NO: 470. In some embodiments, the CIITA guide RNA comprises SEQ ID NO: 471. In some embodiments, the CIITA guide RNA comprises SEQ ID NO: 472. In some embodiments, the CIITA guide RNA comprises SEQ ID NO: 473. In some embodiments, the CIITA guide RNA comprises SEQ ID NO: 474. In some embodiments, the CIITA guide RNA comprises SEQ ID NO: 475. In some embodiments, the CIITA guide RNA comprises SEQ ID NO: 476. In some embodiments, the CIITA guide RNA comprises SEQ ID NO: 477. In some embodiments, the CIITA guide RNA comprises SEQ ID NO: 478. In some embodiments, the CIITA guide RNA comprises SEQ ID NO: 479. In some embodiments, the CIITA guide RNA comprises SEQ ID NO: 480. In some embodiments, the CIITA guide RNA comprises SEQ ID NO: 481. In some embodiments, the CIITA guide RNA comprises SEQ ID NO: 482. In some embodiments, the CIITA guide RNA comprises SEQ ID NO: 483. In some embodiments, the CIITA guide RNA comprises SEQ ID NO: 484. In some embodiments, the CIITA guide RNA comprises SEQ ID NO: 485. In some embodiments, the CIITA guide RNA comprises SEQ ID NO: 486. In some embodiments, the CIITA guide RNA comprises SEQ ID NO: 487. In some embodiments, the CIITA guide RNA comprises SEQ ID NO: 488. In some embodiments, the CIITA guide RNA comprises SEQ ID NO: 489. In some embodiments, the CIITA guide RNA comprises SEQ ID NO: 490. In some embodiments, the CIITA guide RNA comprises SEQ ID NO: 491. In some embodiments, the CIITA guide RNA comprises SEQ ID NO: 492. In some embodiments, the CIITA guide RNA comprises SEQ ID NO: 493. In some embodiments, the CIITA guide RNA comprises SEQ ID NO: 494. In some embodiments, the CIITA guide RNA comprises SEQ ID NO: 495. In some embodiments, the CIITA guide RNA comprises SEQ ID NO: 496. In some embodiments, the CIITA guide RNA comprises SEQ ID NO: 497. In some embodiments, the CIITA guide RNA comprises SEQ ID NO: 498. In some embodiments, the CIITA guide RNA comprises SEQ ID NO: 499. In some embodiments, the CIITA guide RNA comprises SEQ ID NO: 500. In some embodiments, the CIITA guide RNA comprises SEQ ID NO: 501. In some embodiments, the CIITA guide RNA comprises SEQ ID NO: 502. In some embodiments, the CIITA guide RNA comprises SEQ ID NO: 503. In some embodiments, the CIITA guide RNA comprises SEQ ID NO: 504. In some embodiments, the CIITA guide RNA comprises SEQ ID NO: 505. In some embodiments, the CIITA guide RNA comprises SEQ ID NO: 506. In some embodiments, the CIITA guide RNA comprises SEQ ID NO: 507. In some embodiments, the CIITA guide RNA comprises SEQ ID NO: 508. In some embodiments, the CIITA guide RNA comprises SEQ ID NO: 509. In some embodiments, the CIITA guide RNA comprises SEQ ID NO: 510. In some embodiments, the CIITA guide RNA comprises SEQ ID NO: 511. In some embodiments, the CIITA guide RNA comprises SEQ ID NO: 512. In some embodiments, the CIITA guide RNA comprises SEQ ID NO: 513. In some embodiments, the CIITA guide RNA comprises SEQ ID NO: 514. In some embodiments, the CIITA guide RNA comprises SEQ ID NO: 515. In some embodiments, the CIITA guide RNA comprises SEQ ID NO: 516. In some embodiments, the CIITA guide RNA comprises SEQ ID NO: 517. In some embodiments, the CIITA guide RNA comprises SEQ ID NO: 518. In some embodiments, the CIITA guide RNA comprises SEQ ID NO: 519. In some embodiments, the CIITA guide RNA comprises SEQ ID NO: 520. In some embodiments, the CIITA guide RNA comprises SEQ ID NO: 521. In some embodiments, the CIITA guide RNA comprises SEQ ID NO: 522. In some embodiments, the CIITA guide RNA comprises SEQ ID NO: 523. In some embodiments, the CIITA guide RNA comprises SEQ ID NO: 524. In some embodiments, the CIITA guide RNA comprises SEQ ID NO: 525. In some embodiments, the CIITA guide RNA comprises SEQ ID NO: 526. In some embodiments, the CIITA guide RNA comprises SEQ ID NO: 527. In some embodiments, the CIITA guide RNA comprises SEQ ID NO: 528. In some embodiments, the CIITA guide RNA comprises SEQ ID NO: 529. In some embodiments, the CIITA guide RNA comprises SEQ ID NO: 530. In some embodiments, the CIITA guide RNA comprises SEQ ID NO: 531. In some embodiments, the CIITA guide RNA comprises SEQ ID NO: 532. In some embodiments, the CIITA guide RNA comprises SEQ ID NO: 533. In some embodiments, the CIITA guide RNA comprises SEQ ID NO: 534. In some embodiments, the CIITA guide RNA comprises SEQ ID NO: 535. In some embodiments, the CIITA guide RNA comprises SEQ ID NO: 536. In some embodiments, the CIITA guide RNA comprises SEQ ID NO: 537. In some embodiments, the CIITA guide RNA comprises SEQ ID NO: 538. In some embodiments, the CIITA guide RNA comprises SEQ ID NO: 539. In some embodiments, the CIITA guide RNA comprises SEQ ID NO: 540. In some embodiments, the CIITA guide RNA comprises SEQ ID NO: 541. In some embodiments, the CIITA guide RNA comprises SEQ ID NO: 542. In some embodiments, the CIITA guide RNA comprises SEQ ID NO: 543. In some embodiments, the CIITA guide RNA comprises SEQ ID NO: 544. In some embodiments, the CIITA guide RNA comprises SEQ ID NO: 545. In some embodiments, the CIITA guide RNA comprises SEQ ID NO: 546. In some embodiments, the CIITA guide RNA comprises SEQ ID NO: 547. In some embodiments, the CIITA guide RNA comprises SEQ ID NO: 548. In some embodiments, the CIITA guide RNA comprises SEQ ID NO: 549. In some embodiments, the CIITA guide RNA comprises SEQ ID NO: 550. In some embodiments, the CIITA guide RNA comprises SEQ ID NO: 551. In some embodiments, the CIITA guide RNA comprises SEQ ID NO: 552. In some embodiments, the CIITA guide RNA comprises SEQ ID NO: 553. In some embodiments, the CIITA guide RNA comprises SEQ ID NO: 554. In some embodiments, the CIITA guide RNA comprises SEQ ID NO: 555. In some embodiments, the CIITA guide RNA comprises SEQ ID NO: 556. In some embodiments, the CIITA guide RNA comprises SEQ ID NO: 557. In some embodiments, the CIITA guide RNA comprises SEQ ID NO: 558. In some embodiments, the CIITA guide RNA comprises SEQ ID NO: 559. In some embodiments, the CIITA guide RNA comprises SEQ ID NO: 560. In some embodiments, the CIITA guide RNA comprises SEQ ID NO: 561. In some embodiments, the CIITA guide RNA comprises SEQ ID NO: 562. In some embodiments, the CIITA guide RNA comprises SEQ ID NO: 563. In some embodiments, the CIITA guide RNA comprises SEQ ID NO: 564. In some embodiments, the CIITA guide RNA comprises SEQ ID NO: 565. In some embodiments, the CIITA guide RNA comprises SEQ ID NO: 566. In some embodiments, the CIITA guide RNA comprises SEQ ID NO: 567. In some embodiments, the CIITA guide RNA comprises SEQ ID NO: 568. In some embodiments, the CIITA guide RNA comprises SEQ ID NO: 569. In some embodiments, the CIITA guide RNA comprises SEQ ID NO: 570. In some embodiments, the CIITA guide RNA comprises SEQ ID NO: 571. In some embodiments, the CIITA guide RNA comprises SEQ ID NO: 572. In some embodiments, the CIITA guide RNA comprises SEQ ID NO: 573. In some embodiments, the CIITA guide RNA comprises SEQ ID NO: 574. In some embodiments, the CIITA guide RNA comprises SEQ ID NO: 575. In some embodiments, the CIITA guide RNA comprises SEQ ID NO: 576.

[0568] In some embodiments, the CIITA guide RNA comprises a guide sequence of any one of: SEQ ID NOs: 301-302, 320-321, 324, 326-327, 332, 354, 361, 372, 400, 408, 414-415, 419-420, 422, 428, 431-432, 434, 451, 455, 458, 462-464, 468, 504, and 538.

[0569] In some embodiments, the CIITA guide RNA comprises a guide sequence of any one of SEQ ID NOs: 301-302, 320, 372, 414, 419, 422, and 462-463.

[0570] In some embodiments, the CIITA guide RNA comprises a sequence listed in Table 4. In some embodiments, the CIITA guide RNA comprises a sequence of any one of SEQ ID NOs: 301, 302, 304-576. In some embodiments, the CIITA guide RNA comprises a sequence of SEQ ID NO: 301 or 422. In some embodiments, the CIITA guide RNA comprises a sequence of SEQ ID NO: 301. In some embodiments, the CIITA guide RNA comprises a sequence of SEQ ID NO: 422. In some embodiments, the CIITA guide RNA comprises a guide sequence comprising a sequence of any one of SEQ ID NOs: 301, 302, 304-576. In some embodiments, the CIITA guide RNA comprises a guide sequence comprising a sequence of SEQ ID NO: 301 or 422. In some embodiments, the CIITA guide RNA comprises a guide sequence comprising a sequence of SEQ ID NO: 301. In some embodiments, the CIITA guide RNA comprises a guide sequence comprising a sequence of SEQ ID NO: 422. In some embodiments, the CIITA guide RNA comprises a sequence of any one of SEQ ID NOs: 1301, 1302, 1304-1576. In some embodiments, the CIITA guide RNA comprises a sequence of SEQ ID NO: 1301 or 1422. In some embodiments, the CIITA guide RNA comprises a sequence of SEQ ID NO: 1301. In some embodiments, the CIITA guide RNA comprises a sequence of SEQ ID NO: 1422. In some embodiments, the CIITA guide RNA comprises a sequence of any one of SEQ ID NOs: 2301, 2302, 2304-2576, 3006, and 3007. In some embodiments, the CIITA guide RNA comprises a sequence of any one of SEQ ID NOs: 2301, 2422, 3006, and 3007. In some embodiments, the CIITA guide RNA comprises a sequence of SEQ ID NO: 2301. In some embodiments, the CIITA guide RNA comprises a sequence of SEQ ID NO: 2422. In some embodiments, the CIITA guide RNA comprises a sequence of SEQ ID NO: 3006. In some embodiments, the CIITA guide RNA comprises a sequence of SEQ ID NO: 3007.

[0571] In some embodiments, the CIITA guide RNA is a single guide RNA (sgRNA) comprising a sequence of any one of the sgRNA sequences listed in Table 4.

[0572] Additional embodiments of CIITA guide RNAs are provided herein, including e.g., exemplary modifications to the guide RNA.

### 1. Genetic Modifications to CIITA

[0573] In some embodiments, the methods and compositions disclosed herein genetically modify at least one nucleotide of the CIITA locus in a cell. Because CIITA protein regulates expression of MHC class II, in some embodiments, the genetic modification to CIITA alters the production of CIITA protein, and thereby reduces the expression of MHC class II protein on the surface of the genetically modified cell (or engineered cell). Genetic modifications encompass the population of modifications that results from contact with a genomic editing system (e.g., the population of edits that result from Cas9 and a CIITA guide RNA, or the population of edits that result from BC22 and a CIITA guide RNA).

[0574] In some embodiments, the genetic modification comprises at least one nucleotide within the genomic coordinates chosen from: (a) chr16:10877363-10907788 or (b) chr16:10906515-10908136. In some embodiments, the genetic modification comprises at least one nucleotide within the genomic coordinates chosen from any of the genomic coordinates listed in Table 4.

[0575] In some embodiments, the genetic modification comprises at least one nucleotide within the genomic coordinates chosen from: chr16:10907504-10907528; chr16:10907508-10907532; chr16:10907539-10907559; chr16:10895658-10895682; chr16:10895668-10895692; chr16:10895750-10895774; chr16:10895753-10895777; chr16:10895754-10895778; chr16:10898684-10898708; chr16:10901529-10901553; chr16:10902121-10902145; chr16:10902701-10902725; chr16:10904726-10904750; chr16:10904760-10904784; chr16:10906493-10906517; chr16:10906515-10906539; chr16:10906631-10906655; chr16:10906636-10906660; chr16:10906643-10906667; chr16:10906770-10906794; chr16:10906788-10906812; chr16:10906789-10906813; chr16:10906816-10906840; chr16:10907148-10907172; chr16:10907254-10907278; chr16:10907331-10907355; chr16:10907477-10907501; chr16:10907497-10907521; chr16:10907503-10907527; and chr16:10907574-10907598.

[0576] In some embodiments, the genetic modification comprises at least one nucleotide within the genomic coordinates chosen from: chr16:10895658-10895682; chr16:10902701-10902725; chr16:10906493-10906517; chr16:10906631-10906655; chr16:10906643-10906667; chr16:10907477-10907501; and chr16:10907497-10907521; chr16:10907504-10907528; and chr16:10907508-10907532.

[0577] In some embodiments, the genetic modification comprises at least one nucleotide within the genomic coordinates chosen from: chr16:10906889-10906913; and chr16:10907504-10907528.

[0578] In some embodiments, the genetic modification comprises at least 5 contiguous nucleotides within the genomic coordinates chosen from: chr16:10907504-10907528; chr16:10907508-10907532; chr16:10907539-10907559; chr16:10895658-10895682; chr16:10895668-10895692; chr16:10895750-10895774; chr16:10895753-10895777; chr16:10895754-10895778; chr16:10898684-10898708; chr16:10901529-10901553; chr16:10902121-10902145; chr16:10902701-10902725; chr16:10904726-10904750; chr16:10904760-10904784; chr16:10906493-10906517; chr16:10906515-10906539; chr16:10906631-10906655; chr16:10906636-10906660; chr16:10906643-10906667; chr16:10906770-10906794; chr16:10906788-10906812; chr16:10906789-10906813; chr16:10906816-10906840; chr16:10907148-10907172; chr16:10907254-10907278; chr16:10907331-10907355; chr16:10907477-10907501; chr16:10907497-10907521; chr16:10907503-10907527; and chr16:10907574-10907598. In some embodiments, the genetic modification comprises at least 10 contiguous nucleotides within the genomic coordinates chosen from: chr16:10907504-10907528; chr16:10907508-10907532; chr16:10907539-10907559; chr16:10895658-10895682; chr16:10895668-10895692; chr16:10895750-10895774; chr16:10895753-10895777; chr16:10895754-10895778; chr16:10898684-10898708; chr16:10901529-10901553; chr16:10902121-10902145; chr16:10902701-10902725; chr16:10904726-10904750; chr16:10904760-10904784; chr16:10906493-10906517; chr16:10906515-10906539; chr16:10906631-10906655; chr16:10906636-10906660; chr16:10906643-10906667; chr16:10906770-10906794; chr16:10906788-10906812; chr16:10906789-10906813; chr16:10906816-10906840; chr16:10907148-10907172; chr16:10907254-10907278; chr16:10907331-10907355; chr16:10907477-10907501; chr16:10907497-10907521; chr16:10907503-10907527; and chr16:10907574-10907598. In some embodiments, the genetic modification comprises at least one indel, at least one C to T substitution, or at least one A to G substitution within the genomic coordinates chosen from: chr16:10907504-10907528; chr16:10907508-10907532; chr16:10907539-10907559; chr16:10895658-10895682; chr16:10895668-10895692; chr16:10895750-10895774; chr16:10895753-10895777; chr16:10895754-10895778; chr16:10898684-10898708; chr16:10901529-10901553; chr16:10902121-10902145; chr16:10902701-10902725; chr16:10904726-10904750; chr16:10904760-10904784; chr16:10906493-10906517; chr16:10906515-10906539; chr16:10906631-10906655; chr16:10906636-10906660; chr16:10906643-10906667; chr16:10906770-10906794; chr16:10906788-10906812; chr16:10906789-10906813; chr16:10906816-10906840; chr16:10907148-10907172; chr16:10907254-10907278; chr16:10907331-10907355; chr16:10907477-10907501; chr16:10907497-10907521; chr16:10907503-10907527; and chr16:10907574-10907598.

[0579] In some embodiments, the genetic modification comprises at least 5 contiguous nucleotides within the genomic coordinates chosen from: chr16:10895658-10895682; chr16:10902701-10902725; chr16:10906493-10906517; chr16:10906631-10906655; chr16:10906643-10906667; chr16:10907477-10907501; and chr16:10907497-10907521; chr16:10907504-10907528; and chr16:10907508-10907532. In some embodiments, the genetic modification comprises at least 10 contiguous nucleotides within the genomic coordinates chosen from: chr16:10895658-10895682; chr16:10902701-10902725; chr16:10906493-10906517; chr16:10906631-10906655; chr16:10906643-10906667; chr16:10907477-10907501; and chr16:10907497-10907521; chr16:10907504-10907528; and chr16:10907508-10907532. In some embodiments, the genetic modification comprises at least one indel, at least one C to T substitution, or at least one A to G substitution within the genomic coordinates chosen from: chr16:10895658-10895682; chr16:10902701-10902725; chr16:10906493-10906517; chr16:10906631-10906655; chr16:10906643-10906667; chr16:10907477-10907501; and chr16:10907497-10907521; chr16:10907504-10907528; and chr16:10907508-10907532.

[0580] In some embodiments, the genetic modification comprises at least 5 contiguous nucleotides within the genomic coordinates chosen from: chr16:10906889-10906913; and chr16:10907504-10907528. In some embodiments, the genetic modification comprises at least 10 contiguous nucleotides within the genomic coordinates chosen from: chr16:10906889-10906913; and chr16:10907504-10907528. In some embodiments, the genetic modification comprises at least one indel, at least one C to T substitution, or at least one A to G substitution within the genomic coordinates chosen from: chr16:10906889-10906913; and chr16:10907504-10907528.

[0581] In some embodiments, the methods and compositions disclosed herein modify the CIITA locus in a cell, wherein the modification to CIITA comprises an insertion of an exogenous nucleic acid. In some embodiments, the exogenous nucleic acid is a protein-coding gene. The protein encoded by the exogenous nucleic acid may be expressed by the cell.

[0582] In some embodiments, the modification to CIITA comprises any one or more of an insertion, deletion, substitution or deamination of at least one nucleotide in a target sequence. In some embodiments, the modification to CIITA comprises an insertion of 1, 2, 3, 4 or 5 or more nucleotides in a target sequence. In some embodiments, the modification to CIITA comprises a deletion of 1, 2, 3, 4 or 5 or more nucleotides in a target sequence. In other embodiments, the modification to CIITA comprises an insertion of 1, 2, 3, 4, 5, 6, 7, 8, 9, 10, 15, 20 or 25 or more nucleotides in a target sequence. In other embodiments, the modification to CIITA comprises a deletion of 1, 2, 3, 4, 5, 6, 7, 8, 9, 10, 15, 20 or 25 or more nucleotides in a target sequence. In some embodiments, the modification to CIITA comprises an indel, which is generally defined in the art as an insertion or deletion of less than 1000 base pairs (bp). In some embodiments, the modification to CIITA comprises an indel which results in a frameshift mutation in a target sequence. In some embodiments, the modification to CIITA comprises a substitution of 1, 2, 3, 4, 5, 6, 7, 8, 9, 10, 15, 20 or 25 or more nucleotides in a target sequence. In some embodiments, the modification to CIITA comprises one or more of an insertion, deletion, or substitution of nucleotides resulting from the incorporation of a template nucleic acid. In some embodiments, the modification to CIITA comprises an insertion of a donor nucleic acid in a target sequence. In some embodiments, the modification to CIITA is not transient.

[0583] In some embodiments, the methods and compositions disclosed herein modify the CIITA locus in a cell using an RNA-guided DNA binding agent (e.g., a Cas enzyme). In some embodiments, the RNA-guided DNA binding agent is Cas9. In some embodiments, the RNA-guided DNA binding agent cuts within the CIITA gene, wherein the CIITA guide RNA targets a CIITA genomic target sequence comprising at least 10 contiguous nucleotides within the genomic coordinates chosen from: (a) chr16:10877363-10907788 and (b) chr16:10906515-10908136.

[0584] In some embodiments, the genetic modification to CIITA results in a truncated form of the CIITA protein. In some embodiments, the truncated CIITA protein does not bind to GTP. In some embodiments, the truncated CIITA protein does not localize to the nucleus. In some embodiments, the CIITA protein (e.g., a truncated form of the CIITA protein) has impaired activity as compared to the wildtype CIITA protein's activity relating to regulating MHC class II expression. In some embodiments, MHC class II expression on the surface of a cell is reduced as a result of impaired CIITA protein activity. In some embodiments, MHC class II expression on the surface of a cell is absent as a result of impaired CIITA protein activity.

### 2. Efficacy of CIITA Guide RNAs

[0585] The efficacy of a CIITA guide RNA may be determined by techniques available in the art that assess the editing efficiency of a guide RNA, the levels of CIITA protein or mRNA, or the levels of MHC class II in a target cell. In some embodiments, the reduction or elimination of MHC class II protein on the surface of a cell may be determined by comparison to an unmodified cell (or “relative to an unmodified cell”). An engineered cell or cell population may also be compared to a population of unmodified cells.

[0586] In some embodiments, the efficacy of a CIITA guide RNA is determined by measuring levels of CIITA protein in a cell. The levels of CIITA protein may be detected by, e.g., cell lysate and western blot with an anti-CIITA antibody. In some embodiments, the efficacy of a CIITA guide RNA is determined by measuring levels of CIITA protein in the cell nucleus. In some embodiments, the efficacy of a CIITA guide RNA is determined by measuring levels of CIITA mRNA in a cell. The levels of CIITA mRNA may be detected by e.g., RT-PCR. In some embodiments, a decrease in the levels CIITA protein or CIITA mRNA in the target cell as compared to an unmodified cell is indicative of an effective CIITA guide RNA.

[0587] An “unmodified cell” (or “unmodified cells”) refers to a control cell (or cells) of the same type of cell in an experiment or test, wherein the “unmodified” control cell has not been contacted with a CIITA guide (i.e., a non-engineered cell). Therefore, an unmodified cell (or cells) may be a cell that has not been contacted with a guide RNA, or a cell that has been contacted with a guide RNA that does not target CIITA.

[0588] In some embodiments, the efficacy of a CIITA guide RNA is determined by measuring the reduction or elimination of MHC class II protein expression by the target cells. The CIITA protein functions as a transactivator, activating the MHC class II promoter, and is essential for the expression of MHC class II protein. In some embodiments, MHC class II protein expression may be detected on the surface of the target cells. In some embodiments, MHC class II protein expression is measured by flow cytometry. In some embodiments, an antibody against MHC class II protein (e.g., anti-HLA-DR, -DQ, -DP) may be used to detect MHC class II protein expression e.g., by flow cytometry. In some embodiments, a reduction or elimination in MHC class II protein on the surface of a cell (or population of cells) as compared to an unmodified cell (or population of unmodified cells) is indicative of an effective CIITA guide RNA. In some embodiments, a cell (or population of cells) that has been contacted with a particular CIITA guide RNA and RNA-guided DNA binding agent that is negative for MHC class II protein by flow cytometry is indicative of an effective CIITA guide RNA.

[0589] In some embodiments, the MHC class II protein expression is reduced or eliminated in a population of cells using the methods and compositions disclosed herein. In some embodiments, the population of cells is enriched (e.g., by FACS or MACS) and is at least 65%, 70%, 80%, 90%, 91%, 92%, 93%, or 94% MHC class II negative as measured by flow cytometry relative to a population of unmodified cells. In some embodiments, the population of cells is not enriched (e.g., by FACS or MACS) and is at least 65%, 70%, 80%, 90%, 91%, 92%, 93%, or 94% MHC class II negative as measured by flow cytometry relative to a population of unmodified cells.

[0590] In some embodiments, the population of cells is at least 65% MHC class II negative as measured by flow cytometry relative to a population of unmodified cells. In some embodiments, the population of cells is at least 70% MHC class II negative as measured by flow cytometry relative to a population of unmodified cells. In some embodiments, the population of cells is at least 80% MHC class II negative as measured by flow cytometry relative to a population of unmodified cells. In some embodiments, the population of cells is at least 90% MHC class II negative as measured by flow cytometry relative to a population of unmodified cells. In some embodiments, the population of cells is at least 91% MHC class II negative as measured by flow cytometry relative to a population of unmodified cells. In some embodiments, the population of cells is at least 92% MHC class II negative as measured by flow cytometry relative to a population of unmodified cells. In some embodiments, the population of cells is at least 93% MHC class II negative as measured by flow cytometry relative to a population of unmodified cells. In some embodiments, the population of cells is at least 94% MHC class II negative as measured by flow cytometry relative to a population of unmodified cells.

[0591] In some embodiments, an effective CIITA guide RNA may be determined by measuring the response of immune cells in vitro or in vivo (e.g., CD4+ T cells) to the genetically modified target cell. A CD4+ T cell response may be evaluated by an assay that measures the activation response of CD4+ T cells e.g., CD4+ T cell proliferation, expression of activation markers, or cytokine production (IL-2, IL-12, IFN-7) (e.g., flow cytometry, ELISA). The response of CD4+ T cells may be evaluated in in vitro cell culture assays in which the genetically modified cell is co-cultured with cells comprising CD4+ T cells. For example, the genetically modified cell may be co-cultured e.g., with PBMCs, purified CD3+ T cells comprising CD4+ T cells, purified CD4+ T cells, or a CD4+ T cell line. The CD4+ T cell response elicited from the genetically modified cell may be compared to the response elicited from an unmodified cell. A reduced response from CD4+ T cells is indicative of an effective CIITA guide RNA.

[0592] The efficacy of a CIITA guide RNA may also be assessed by the survival of the cell post-editing. In some embodiments, the cell survives post editing for at least one week to six weeks. In some embodiments, the cell survives post editing for at least one week to twelve weeks. In some embodiments, the cell survives post editing for at least two weeks. In some embodiments, the cell survives post editing for at least three weeks. In some embodiments, the cell survives post editing for at least four weeks. In some embodiments, the cell survives post editing for at least five weeks. In some embodiments, the cell survives post editing for at least six weeks. The viability of a genetically modified cell may be measured using standard techniques, including e.g., by measures of cell death, by flow cytometry live/dead staining, or cell proliferation.

### G. AAVS1 Guide RNAs

[0593] The methods and compositions provided herein disclose AAVS1 guide RNAs useful for creating insertion sites within the AAVS1 locus. In some embodiments, such guide RNAs direct an RNA-guided DNA binding agent to am AAVS1 genomic target sequence and may be referred to herein as “AAVS1 guide RNAs.” In some embodiments, the AAVS1 guide RNA directs an RNA-guided DNA binding agent to a human AAVS1 genomic target sequence. In some embodiments, the AAVS1 guide RNA comprises a guide sequence selected from SEQ ID NO: 601-774.

[0594] In some embodiments, the methods and compositions disclosed herein comprise an AAVS1 guide RNA comprising a guide sequence that targets an AAVS1 genomic target sequence comprising at least 10 contiguous nucleotides within the genomic coordinates chr19: 55115151-55116209. In some embodiments, the methods and compositions disclosed herein comprise a AAVS1 guide RNA comprising a guide sequence that targets an AAVS1 genomic target sequence comprising at least one nucleotide within the genomic coordinates chr19: 55115151-55116209.

[0595] In some embodiments, the methods and compositions disclosed herein comprise a AAVS1 guide RNA comprising a guide sequence that directs an RNA-guided DNA binding agent to make cut in an AAVS1 gene, wherein the AAVS1 guide RNA targets an AAVS1 genomic target sequence comprising at least 10 contiguous nucleotides within the genomic coordinates chr19: 55115151-55116209. In some embodiments, the methods and compositions disclosed herein comprise an AAVS1 guide RNA comprising a guide sequence that directs an RNA-guided DNA binding agent to make cut in an AAVS1 gene, wherein the AAVS1 guide RNA targets an AAVS1 genomic target sequence comprising at least one nucleotide within the genomic coordinates chr19: 55115151-55116209.

[0596] In some embodiments, the methods and compositions disclose an AAVS1 guide RNA that directs an RNA-guided DNA binding agent to induce a double stranded break (DSB) or a single-stranded break (SSB) in an AAVS1 genomic target sequence. In some embodiments, the methods and compositions disclose an AAVS1 guide RNA that directs an RNA-guided DNA binding agent to make a cut in an AAVS1 genomic target sequence. In embodiments wherein the RNA-guided DNA cutting agent is Cas9, the cut or “cut site” occurs at the third base from the protospacer adjacent motif (PAM) sequence.

[0597] In some embodiments, a composition is provided comprising an AAVS1 guide RNA described herein and an RNA-guided DNA binding agent or a nucleic acid encoding an RNA-guided DNA binding agent.

[0598] In some embodiments, a composition is provided comprising an AAVS1 single-guide RNA (sgRNA) comprising a guide sequence that targets a genomic target comprising at least 10 contiguous nucleotides within the genomic coordinates chr19: 55115151-55116209. In some embodiments, a composition is provided comprising an AAVS1 sgRNA described herein and an RNA-guided DNA binding agent or a nucleic acid encoding an RNA-guided DNA binding agent.

[0599] In some embodiments, a composition is provided comprising an AAVS1 dual-guide RNA (dgRNA) comprising a guide sequence that targets a genomic target comprising at least 10 contiguous nucleotides within the genomic coordinates chr19: 55115151-55116209. In some embodiments, a composition is provided comprising an AAVS1 dgRNA described herein and an RNA-guided DNA binding agent or a nucleic acid encoding an RNA-guided DNA binding agent.

[0600] In some embodiments, the AAVS1 gRNA comprises a guide sequence selected from any one of SEQ ID NOs: 601-774. Exemplary AAVS1 guide sequences are shown below in Table 5.

TABLE 5
Exemplary AAVS1 guide sequences.

| | | | Exemplary | | |
|---|---|---|---|---|---|
| | SEQ ID | | Guide RNA | Exemplary Guide | |
| | NO to | | Full Sequence | RNA Modified | |
| Guide | the Guide | Guide | (SEQ ID NOs: | Sequence (SEQ ID | Genomic |
| ID | Sequence | Sequence | 1601-1774) | Nos: 2601-2774) | Coordinates (hg38) |
| G025808 | 601 | AUAUCCAGAAC | AUAUCCAGAAC | mA*mU*mA*mUmCCAm | chr14: 22547505- |
| | | CCUGACCCUGC | CCUGACCCUGC | GmAAmCCmCUGACmCC | 22547529 |
| | | CG | CGGUUGUAGCU | UGmCCGmGUUGmUmAm | |
| | | | CCCUGAAACCG | GmCUCCCmUmGmAmAm | |
| | | | UUGCUACAAUA | AmCmCGUUmGmCUAmC | |
| | | | AGGCCGUCGAA | AAU*AAGmGmCCmGmU | |
| | | | AGAUGUGCCGC | mCmGmAmAmAmGmAmU | |
| | | | AACGCUCUGCC | GUGCmCGmCAAmCGCU | |
| | | | UUCUGGCAUCG | CUmGmCCmUmUmCmUG | |
| | | | UU | GCAUCG*mU*mU | |
| G025809 | 602 | CCCACAGAUAU | CCCACAGAUAU | mC*mC*mC*mAmCAGm | chr14: 22547498- |
| | | CCAGAACCCUG | CCAGAACCCUG | AmUAmUCmCAGAAmCC | 22547522 |
| | | AC | ACGUUGUAGCU | CUmGACmGUUGmUmAm | |
| | | | CCCUGAAACCG | GmCUCCCmUmGmAmAm | |
| | | | UUGCUACAAUA | AmCmCGUUmGmCUAmC | |
| | | | AGGCCGUCGAA | AAU*AAGmGmCCmGmU | |
| | | | AGAUGUGCCGC | mCmGmAmAmAmGmAmU | |
| | | | AACGCUCUGCC | GUGCmCGmCAAmCGCU | |
| | | | UUCUGGCAUCG | CUmGmCCmUmUmCmUG | |
| | | | UU | GCAUCG*mU*mU | |
| G025810 | 603 | UUGUCCCACAG | UUGUCCCACAG | mU*mU*mG*mUmCCCm | chr14: 22547494- |
| | | AUAUCCAGAAC | AUAUCCAGAAC | AmCAmGAmUAUCCmAG | 22547518 |
| | | CC | CCGUUGUAGCU | AAmCCCmGUUGmUmAm | |
| | | | CCCUGAAACCG | GmCUCCCmUmGmAmAm | |
| | | | UUGCUACAAUA | AmCmCGUUmGmCUAmC | |
| | | | AGGCCGUCGAA | AAU*AAGmGmCCmGmU | |
| | | | AGAUGUGCCGC | mCmGmAmAmAmGmAmU | |
| | | | AACGCUCUGCC | GUGCmCGmCAAmCGCU | |
| | | | UUCUGGCAUCG | CUmGmCCmUmUmCmUG | |
| | | | UU | GCAUCG*mU*mU | |
| G025811 | 604 | CUUGUCCCACA | CUUGUCCCACA | mC*mU*mU*mGmUCCm | chr14: 22547493- |
| | | GAUAUCCAGAA | GAUAUCCAGAA | CmACmAGmAUAUCmCA | 22547517 |
| | | CC | CCGUUGUAGCU | GAmACCmGUUGmUmAm | |
| | | | CCCUGAAACCG | GmCUCCCmUmGmAmAm | |
| | | | UUGCUACAAUA | AmCmCGUUmGmCUAmC | |
| | | | AGGCCGUCGAA | AAU*AAGmGmCCmGmU | |
| | | | AGAUGUGCCGC | mCmGmAmAmAmGmAmU | |
| | | | AACGCUCUGCC | GUGCmCGmCAAmCGCU | |
| | | | UUCUGGCAUCG | CUmGmCCmUmUmCmUG | |
| | | | UU | GCAUCG*mU*mU | |
| G025812 | 605 | AUCCUCUUGUC | AUCCUCUUGUC | mA*mU*mC*mCmUCUm | chr14: 22547488- |
| | | CCACAGAUAUC | CCACAGAUAUC | UmGUmCCmCACAGmAU | 22547512 |
| | | CA | CAGUUGUAGCU | AUmCCAmGUUGmUmAm | |
| | | | CCCUGAAACCG | GmCUCCCmUmGmAmAm | |
| | | | UUGCUACAAUA | AmCmCGUUmGmCUAmC | |
| | | | AGGCCGUCGAA | AAU*AAGmGmCCmGmU | |
| | | | AGAUGUGCCGC | mCmGmAmAmAmGmAmU | |
| | | | AACGCUCUGCC | GUGCmCGmCAAmCGCU | |
| | | | UUCUGGCAUCG | CUmGmCCmUmUmCmUG | |
| | | | UU | GCAUCG*mU*mU | |
| G025813 | 606 | GAUCCUCUUGU | GAUCCUCUUGU | mG*mA*mU*mCmCUCm | chr14: 22547487- |
| | | CCCACAGAUAU | CCCACAGAUAU | UmUGmUCmCCACAmGA | 22547511 |
| | | CC | CCGUUGUAGCU | UAmUCCmGUUGmUmAm | |
| | | | CCCUGAAACCG | GmCUCCCmUmGmAmAm | |
| | | | UUGCUACAAUA | AmCmCGUUmGmCUAmC | |
| | | | AGGCCGUCGAA | AAU*AAGmGmCCmGmU | |
| | | | AGAUGUGCCGC | mCmGmAmAmAmGmAmU | |
| | | | AACGCUCUGCC | GUGCmCGmCAAmCGCU | |
| | | | UUCUGGCAUCG | CUmGmCCmUmUmCmUG | |
| | | | UU | GCAUCG*mU*mU | |
| G025814 | 607 | AACCCUGAUCC | AACCCUGAUCC | mA*mA*mC*mCmCUGm | chr14: 22547481- |
| | | UCUUGUCCCAC | UCUUGUCCCAC | AmUCmCUmCUUGUmCC | 22547505 |
| | | AG | AGGUUGUAGCU | CAmCAGmGUUGmUmAm | |
| | | | CCCUGAAACCG | GmCUCCCmUmGmAmAm | |
| | | | UUGCUACAAUA | AmCmCGUUmGmCUAmC | |
| | | | AGGCCGUCGAA | AAU*AAGmGmCCmGmU | |
| | | | AGAUGUGCCGC | mCmGmAmAmAmGmAmU | |
| | | | AACGCUCUGCC | GUGCmCGmCAAmCGCU | |
| | | | UUCUGGCAUCG | CUmGmCCmUmUmCmUG | |
| | | | UU | GCAUCG*mU*mU | |
| G025815 | 608 | GCCGUGUACCA | GCCGUGUACCA | mG*mC*mC*mGmUGUm | chr14: 22547525- |
| | | GCUGAGAGACU | GCUGAGAGACU | AmCCmAGmCUGAGmAG | 22547549 |
| | | CU | CUGUUGUAGCU | ACmUCUmGUUGmUmAm | |
| | | | CCCUGAAACCG | GmCUCCCmUmGmAmAm | |
| | | | UUGCUACAAUA | AmCmCGUUmGmCUAmC | |
| | | | AGGCCGUCGAA | AAU*AAGmGmCCmGmU | |
| | | | AGAUGUGCCGC | mCmGmAmAmAmGmAmU | |
| | | | AACGCUCUGCC | GUGCmCGmCAAmCGCU | |
| | | | UUCUGGCAUCG | CUmGmCCmUmUmCmUG | |
| | | | UU | GCAUCG*mU*mU | |
| G025816* | 609 | AAGAGAAAGGG | AAGAGAAAGGG | mA*mA*mG*mAmGAAm | chr19: 55115151- |
| | | AGUAGAGGCGG | AGUAGAGGCGG | AmGGmGAmGUAGAmGG | 55115175 |
| | | CC | CCGUUGUAGCU | CGmGCCmGUUGmUmAm | |
| | | | CCCUGAAACCG | GmCUCCCmUmGmAmAm | |
| | | | UUGCUACAAUA | AmCmCGUUmGmCUAmC | |
| | | | AGGCCGUCGAA | AAU*AAGmGmCCmGmU | |
| | | | AGAUGUGCCGC | mCmGmAmAmAmGmAmU | |
| | | | AACGCUCUGCC | GUGCmCGmCAAmCGCU | |
| | | | UUCUGGCAUCG | CUmGmCCmUmUmCmUG | |
| | | | UU | GCAUCG*mU*mU | |
| G025817 | 610 | AGUAGAGGCGG | AGUAGAGGCGG | mA*mG*mU*mAmGAGm | chr19: 55115162- |
| | | CCACGACCUGG | CCACGACCUGG | GmCGmGCmCACGAmCC | 55115186 |
| | | UG | UGGUUGUAGCU | UGmGUGmGUUGmUmAm | |
| | | | CCCUGAAACCG | GmCUCCCmUmGmAmAm | |
| | | | UUGCUACAAUA | AmCmCGUUmGmCUAmC | |
| | | | AGGCCGUCGAA | AAU*AAGmGmCCmGmU | |
| | | | AGAUGUGCCGC | mCmGmAmAmAmGmAmU | |
| | | | AACGCUCUGCC | GUGCmCGmCAAmCGCU | |
| | | | UUCUGGCAUCG | CUmGmCCmUmUmCmUG | |
| | | | UU | GCAUCG*mU*mU | |
| G025818 | 611 | CCACGACCUGG | CCACGACCUGG | mC*mC*mA*mCmGACm | chr19: 55115173- |
| | | UGAACACCUAG | UGAACACCUAG | CmUGmGUmGAACAmCC | 55115197 |
| | | GA | GAGUUGUAGCU | UAmGGAmGUUGmUmAm | |
| | | | CCCUGAAACCG | GmCUCCCmUmGmAmAm | |
| | | | UUGCUACAAUA | AmCmCGUUmGmCUAmC | |
| | | | AGGCCGUCGAA | AAU*AAGmGmCCmGmU | |
| | | | AGAUGUGCCGC | mCmGmAmAmAmGmAmU | |
| | | | AACGCUCUGCC | GUGCmCGmCAAmCGCU | |
| | | | UUCUGGCAUCG | CUmGmCCmUmUmCmUG | |
| | | | UU | GCAUCG*mU*mU | |
| G025819 | 612 | GACGCACCAUU | GACGCACCAUU | mG*mA*mC*mGmCACm | chr19: 55115195- |
| | | CUCACAAAGGG | CUCACAAAGGG | CmAUmUCmUCACAmAA | 55115219 |
| | | AG | AGGUUGUAGCU | GGmGAGmGUUGmUmAm | |
| | | | CCCUGAAACCG | GmCUCCCmUmGmAmAm | |
| | | | UUGCUACAAUA | AmCmCGUUmGmCUAmC | |
| | | | AGGCCGUCGAA | AAU*AAGmGmCCmGmU | |
| | | | AGAUGUGCCGC | mCmGmAmAmAmGmAmU | |
| | | | AACGCUCUGCC | GUGCmCGmCAAmCGCU | |
| | | | UUCUGGCAUCG | CUmGmCCmUmUmCmUG | |
| | | | UU | GCAUCG*mU*mU | |
| G025820 | 613 | CUCACAAAGGG | CUCACAAAGGG | mC*mU*mC*mAmCAAm | chr19: 55115206- |
| | | AGUUUUCCACA | AGUUUUCCACA | AmGGmGAmGUUUUmCC | 55115230 |
| | | CG | CGGUUGUAGCU | ACmACGmGUUGmUmAm | |
| | | | CCCUGAAACCG | GmCUCCCmUmGmAmAm | |
| | | | UUGCUACAAUA | AmCmCGUUmGmCUAmC | |
| | | | AGGCCGUCGAA | AAU*AAGmGmCCmGmU | |
| | | | AGAUGUGCCGC | mCmGmAmAmAmGmAmU | |
| | | | AACGCUCUGCC | GUGCmCGmCAAmCGCU | |
| | | | UUCUGGCAUCG | CUmGmCCmUmUmCmUG | |
| | | | UU | GCAUCG*mU*mU | |
| G025821 | 614 | UCACAAAGGGA | UCACAAAGGGA | mU*mC*mA*mCmAAAm | chr19: 55115207- |
| | | GUUUUCCACAC | GUUUUCCACAC | GmGGmAGmUUUUCmCA | 55115231 |
| | | GG | GGGUUGUAGCU | CAmCGGmGUUGmUmAm | |
| | | | CCCUGAAACCG | GmCUCCCmUmGmAmAm | |
| | | | UUGCUACAAUA | AmCmCGUUmGmCUAmC | |
| | | | AGGCCGUCGAA | AAU*AAGmGmCCmGmU | |
| | | | AGAUGUGCCGC | mCmGmAmAmAmGmAmU | |
| | | | AACGCUCUGCC | GUGCmCGmCAAmCGCU | |
| | | | UUCUGGCAUCG | CUmGmCCmUmUmCmUG | |
| | | | UU | GCAUCG*mU*mU | |
| G025822 | 615 | CACAAAGGGAG | CACAAAGGGAG | mC*mA*mC*mAmAAGm | chr19: 55115208- |
| | | UUUUCCACACG | UUUUCCACACG | GmGAmGUmUUUCCmAC | 55115232 |
| | | GA | GAGUUGUAGCU | ACmGGAmGUUGmUmAm | |
| | | | CCCUGAAACCG | GmCUCCCmUmGmAmAm | |
| | | | UUGCUACAAUA | AmCmCGUUmGmCUAmC | |
| | | | AGGCCGUCGAA | AAU*AAGmGmCCmGmU | |
| | | | AGAUGUGCCGC | mCmGmAmAmAmGmAmU | |
| | | | AACGCUCUGCC | GUGCmCGmCAAmCGCU | |
| | | | UUCUGGCAUCG | CUmGmCCmUmUmCmUG | |
| | | | UU | GCAUCG*mU*mU | |
| G025823 | 616 | ACAAAGGGAGU | ACAAAGGGAGU | mA*mC*mA*mAmAGGm | chr19: 55115209- |
| | | UUUCCACACGG | UUUCCACACGG | GmAGmUUmUUCCAmCA | 55115233 |
| | | AC | ACGUUGUAGCU | CGmGACmGUUGmUmAm | |
| | | | CCCUGAAACCG | GmCUCCCmUmGmAmAm | |
| | | | UUGCUACAAUA | AmCmCGUUmGmCUAmC | |
| | | | AGGCCGUCGAA | AAU*AAGmGmCCmGmU | |
| | | | AGAUGUGCCGC | mCmGmAmAmAmGmAmU | |
| | | | AACGCUCUGCC | GUGCmCGmCAAmCGCU | |
| | | | UUCUGGCAUCG | CUmGmCCmUmUmCmUG | |
| | | | UU | GCAUCG*mU*mU | |
| G025824 | 617 | CAAAGGGAGUU | CAAAGGGAGUU | mC*mA*mA*mAmGGGm | chr19: 55115210- |
| | | UUCCACACGGA | UUCCACACGGA | AmGUmUUmUCCACmAC | 55115234 |
| | | CA | CAGUUGUAGCU | GGmACAmGUUGmUmAm | |
| | | | CCCUGAAACCG | GmCUCCCmUmGmAmAm | |
| | | | UUGCUACAAUA | AmCmCGUUmGmCUAmC | |
| | | | AGGCCGUCGAA | AAU*AAGmGmCCmGmU | |
| | | | AGAUGUGCCGC | mCmGmAmAmAmGmAmU | |
| | | | AACGCUCUGCC | GUGCmCGmCAAmCGCU | |
| | | | UUCUGGCAUCG | CUmGmCCmUmUmCmUG | |
| | | | UU | GCAUCG*mU*mU | |
| G025825 | 618 | AGGGAGUUUUC | AGGGAGUUUUC | mA*mG*mG*mGmAGUm | chr19: 55115213- |
| | | CACACGGACAC | CACACGGACAC | UmUUmCCmACACGmGA | 55115237 |
| | | CC | CCGUUGUAGCU | CAmCCCmGUUGmUmAm | |
| | | | CCCUGAAACCG | GmCUCCCmUmGmAmAm | |
| | | | UUGCUACAAUA | AmCmCGUUmGmCUAmC | |
| | | | AGGCCGUCGAA | AAU*AAGmGmCCmGmU | |
| | | | AGAUGUGCCGC | mCmGmAmAmAmGmAmU | |
| | | | AACGCUCUGCC | GUGCmCGmCAAmCGCU | |
| | | | UUCUGGCAUCG | CUmGmCCmUmUmCmUG | |
| | | | UU | GCAUCG*mU*mU | |
| G025826 | 619 | GUUUUCCACAC | GUUUUCCACAC | mG*mU*mU*mUmUCCm | chr19: 55115218- |
| | | GGACACCCCCC | GGACACCCCCC | AmCAmCGmGACACmCC | 55115242 |
| | | UC | UCGUUGUAGCU | CCmCUCmGUUGmUmAm | |
| | | | CCCUGAAACCG | GmCUCCCmUmGmAmAm | |
| | | | UUGCUACAAUA | AmCmCGUUmGmCUAmC | |
| | | | AGGCCGUCGAA | AAU*AAGmGmCCmGmU | |
| | | | AGAUGUGCCGC | mCmGmAmAmAmGmAmU | |
| | | | AACGCUCUGCC | GUGCmCGmCAAmCGCU | |
| | | | UUCUGGCAUCG | CUmGmCCmUmUmCmUG | |
| | | | UU | GCAUCG*mU*mU | |
| G025827 | 620 | CACACGGACAC | CACACGGACAC | mC*mA*mC*mAmCGGm | chr19: 55115224- |
| | | CCCCCUCCUCA | CCCCCUCCUCA | AmCAmCCmCCCCUmCC | 55115248 |
| | | CC | CCGUUGUAGCU | UCmACCmGUUGmUmAm | |
| | | | CCCUGAAACCG | GmCUCCCmUmGmAmAm | |
| | | | UUGCUACAAUA | AmCmCGUUmGmCUAmC | |
| | | | AGGCCGUCGAA | AAU*AAGmGmCCmGmU | |
| | | | AGAUGUGCCGC | mCmGmAmAmAmGmAmU | |
| | | | AACGCUCUGCC | GUGCmCGmCAAmCGCU | |
| | | | UUCUGGCAUCG | CUmGmCCmUmUmCmUG | |
| | | | UU | GCAUCG*mU*mU | |
| G025828 | 621 | ACACGGACACC | ACACGGACACC | mA*mC*mA*mCmGGAm | chr19: 55115225- |
| | | CCCCUCCUCAC | CCCCUCCUCAC | CmACmCCmCCCUCmCU | 55115249 |
| | | CA | CAGUUGUAGCU | CAmCCAmGUUGmUmAm | |
| | | | CCCUGAAACCG | GmCUCCCmUmGmAmAm | |
| | | | UUGCUACAAUA | AmCmCGUUmGmCUAmC | |
| | | | AGGCCGUCGAA | AAU*AAGmGmCCmGmU | |
| | | | AGAUGUGCCGC | mCmGmAmAmAmGmAmU | |
| | | | AACGCUCUGCC | GUGCmCGmCAAmCGCU | |
| | | | UUCUGGCAUCG | CUmGmCCmUmUmCmUG | |
| | | | UU | GCAUCG*mU*mU | |
| G025829 | 622 | GGACACCCCCC | GGACACCCCCC | mG*mG*mA*mCmACCm | chr19: 55115229- |
| | | UCCUCACCACA | UCCUCACCACA | CmCCmCUmCCUCAmCC | 55115253 |
| | | GC | GCGUUGUAGCU | ACmAGCmGUUGmUmAm | |
| | | | CCCUGAAACCG | GmCUCCCmUmGmAmAm | |
| | | | UUGCUACAAUA | AmCmCGUUmGmCUAmC | |
| | | | AGGCCGUCGAA | AAU*AAGmGmCCmGmU | |
| | | | AGAUGUGCCGC | mCmGmAmAmAmGmAmU | |
| | | | AACGCUCUGCC | GUGCmCGmCAAmCGCU | |
| | | | UUCUGGCAUCG | CUmGmCCmUmUmCmUG | |
| | | | UU | GCAUCG*mU*mU | |
| G025830 | 623 | GCCCUGCCAGG | GCCCUGCCAGG | mG*mC*mC*mCmUGCm | chr19: 55115251- |
| | | ACGGGGCUGGC | ACGGGGCUGGC | CmAGmGAmCGGGGmCU | 55115275 |
| | | UA | UAGUUGUAGCU | GGmCUAmGUUGmUmAm | |
| | | | CCCUGAAACCG | GmCUCCCmUmGmAmAm | |
| | | | UUGCUACAAUA | AmCmCGUUmGmCUAmC | |
| | | | AGGCCGUCGAA | AAU*AAGmGmCCmGmU | |
| | | | AGAUGUGCCGC | mCmGmAmAmAmGmAmU | |
| | | | AACGCUCUGCC | GUGCmCGmCAAmCGCU | |
| | | | UUCUGGCAUCG | CUmGmCCmUmUmCmUG | |
| | | | UU | GCAUCG*mU*mU | |
| G025831 | 624 | GGUGAAGAGCC | GGUGAAGAGCC | mG*mG*mU*mGmAAGm | chr19: 55115337- |
| | | AAAGUUAGAAC | AAAGUUAGAAC | AmGCmCAmAAGUUmAG | 55115361 |
| | | UC | UCGUUGUAGCU | AAmCUCmGUUGmUmAm | |
| | | | CCCUGAAACCG | GmCUCCCmUmGmAmAm | |
| | | | UUGCUACAAUA | AmCmCGUUmGmCUAmC | |
| | | | AGGCCGUCGAA | AAU*AAGmGmCCmGmU | |
| | | | AGAUGUGCCGC | mCmGmAmAmAmGmAmU | |
| | | | AACGCUCUGCC | GUGCmCGmCAAmCGCU | |
| | | | UUCUGGCAUCG | CUmGmCCmUmUmCmUG | |
| | | | UU | GCAUCG*mU*mU | |
| G025832* | 625 | UCUUGGGAAGU | UCUUGGGAAGU | mU*mC*mU*mUmGGGm | chr19: 55115404- |
| | | GUAAGGAAGCU | GUAAGGAAGCU | AmAGmUGmUAAGGmAA | 55115428 |
| | | GC | GCGUUGUAGCU | GCmUGCmGUUGmUmAm | |
| | | | CCCUGAAACCG | GmCUCCCmUmGmAmAm | |
| | | | UUGCUACAAUA | AmCmCGUUmGmCUAmC | |
| | | | AGGCCGUCGAA | AAU*AAGmGmCCmGmU | |
| | | | AGAUGUGCCGC | mCmGmAmAmAmGmAmU | |
| | | | AACGCUCUGCC | GUGCmCGmCAAmCGCU | |
| | | | UUCUGGCAUCG | CUmGmCCmUmUmCmUG | |
| | | | UU | GCAUCG*mU*mU | |
| G025833 | 626 | GCUGCAGCACC | GCUGCAGCACC | mG*mC*mU*mGmCAGm | chr19: 55115423- |
| | | AGGAUCAGUGA | AGGAUCAGUGA | CmACmCAmGGAUCmAG | 55115447 |
| | | AA | AAGUUGUAGCU | UGmAAAmGUUGmUmAm | |
| | | | CCCUGAAACCG | GmCUCCCmUmGmAmAm | |
| | | | UUGCUACAAUA | AmCmCGUUmGmCUAmC | |
| | | | AGGCCGUCGAA | AAU*AAGmGmCCmGmU | |
| | | | AGAUGUGCCGC | mCmGmAmAmAmGmAmU | |
| | | | AACGCUCUGCC | GUGCmCGmCAAmCGCU | |
| | | | UUCUGGCAUCG | CUmGmCCmUmUmCmUG | |
| | | | UU | GCAUCG*mU*mU | |
| G025834 | 627 | ACCAGGAUCAG | ACCAGGAUCAG | mA*mC*mC*mAmGGAm | chr19: 55115431- |
| | | UGAAACGCACC | UGAAACGCACC | UmCAmGUmGAAACmGC | 55115455 |
| | | AG | AGGUUGUAGCU | ACmCAGmGUUGmUmAm | |
| | | | CCCUGAAACCG | GmCUCCCmUmGmAmAm | |
| | | | UUGCUACAAUA | AmCmCGUUmGmCUAmC | |
| | | | AGGCCGUCGAA | AAU*AAGmGmCCmGmU | |
| | | | AGAUGUGCCGC | mCmGmAmAmAmGmAmU | |
| | | | AACGCUCUGCC | GUGCmCGmCAAmCGCU | |
| | | | UUCUGGCAUCG | CUmGmCCmUmUmCmUG | |
| | | | UU | GCAUCG*mU*mU | |
| G025835 | 628 | GGUUCUGGGAG | GGUUCUGGGAG | mG*mG*mU*mUmCUGm | chr19: 55115477- |
| | | AGGGUAGCGCA | AGGGUAGCGCA | GmGAmGAmGGGUAmGC | 55115501 |
| | | GG | GGGUUGUAGCU | GCmAGGmGUUGmUmAm | |
| | | | CCCUGAAACCG | GmCUCCCmUmGmAmAm | |
| | | | UUGCUACAAUA | AmCmCGUUmGmCUAmC | |
| | | | AGGCCGUCGAA | AAU*AAGmGmCCmGmU | |
| | | | AGAUGUGCCGC | mCmGmAmAmAmGmAmU | |
| | | | AACGCUCUGCC | GUGCmCGmCAAmCGCU | |
| | | | UUCUGGCAUCG | CUmGmCCmUmUmCmUG | |
| | | | UU | GCAUCG*mU*mU | |
| G025836 | 629 | GAGGGUAGCGC | GAGGGUAGCGC | mG*mA*mG*mGmGUAm | chr19: 55115487- |
| | | AGGGUGGCCAC | AGGGUGGCCAC | GmCGmCAmGGGUGmGC | 55115511 |
| | | UG | UGGUUGUAGCU | CAmCUGmGUUGmUmAm | |
| | | | CCCUGAAACCG | GmCUCCCmUmGmAmAm | |
| | | | UUGCUACAAUA | AmCmCGUUmGmCUAmC | |
| | | | AGGCCGUCGAA | AAU*AAGmGmCCmGmU | |
| | | | AGAUGUGCCGC | mCmGmAmAmAmGmAmU | |
| | | | AACGCUCUGCC | GUGCmCGmCAAmCGCU | |
| | | | UUCUGGCAUCG | CUmGmCCmUmUmCmUG | |
| | | | UU | GCAUCG*mU*mU | |
| G025837 | 630 | GCCACUGAGAA | GCCACUGAGAA | mG*mC*mC*mAmCUGm | chr19: 55115504- |
| | | CCGGGCAGGUC | CCGGGCAGGUC | AmGAmACmCGGGCmAG | 55115528 |
| | | AC | ACGUUGUAGCU | GUmCACmGUUGmUmAm | |
| | | | CCCUGAAACCG | GmCUCCCmUmGmAmAm | |
| | | | UUGCUACAAUA | AmCmCGUUmGmCUAmC | |
| | | | AGGCCGUCGAA | AAU*AAGmGmCCmGmU | |
| | | | AGAUGUGCCGC | mCmGmAmAmAmGmAmU | |
| | | | AACGCUCUGCC | GUGCmCGmCAAmCGCU | |
| | | | UUCUGGCAUCG | CUmGmCCmUmUmCmUG | |
| | | | UU | GCAUCG*mU*mU | |
| G025838 | 631 | CCACUGAGAAC | CCACUGAGAAC | mC*mC*mA*mCmUGAm | chr19: 55115505- |
| | | CGGGCAGGUCA | CGGGCAGGUCA | GmAAmCCmGGGCAmGG | 55115529 |
| | | CG | CGGUUGUAGCU | UCmACGmGUUGmUmAm | |
| | | | CCCUGAAACCG | GmCUCCCmUmGmAmAm | |
| | | | UUGCUACAAUA | AmCmCGUUmGmCUAmC | |
| | | | AGGCCGUCGAA | AAU*AAGmGmCCmGmU | |
| | | | AGAUGUGCCGC | mCmGmAmAmAmGmAmU | |
| | | | AACGCUCUGCC | GUGCmCGmCAAmCGCU | |
| | | | UUCUGGCAUCG | CUmGmCCmUmUmCmUG | |
| | | | UU | GCAUCG*mU*mU | |
| G025839 | 632 | CACUGAGAACC | CACUGAGAACC | mC*mA*mC*mUmGAGm | chr19: 55115506- |
| | | GGGCAGGUCAC | GGGCAGGUCAC | AmACmCGmGGCAGmGU | 55115530 |
| | | GC | GCGUUGUAGCU | CAmCGCmGUUGmUmAm | |
| | | | CCCUGAAACCG | GmCUCCCmUmGmAmAm | |
| | | | UUGCUACAAUA | AmCmCGUUmGmCUAmC | |
| | | | AGGCCGUCGAA | AAU*AAGmGmCCmGmU | |
| | | | AGAUGUGCCGC | mCmGmAmAmAmGmAmU | |
| | | | AACGCUCUGCC | GUGCmCGmCAAmCGCU | |
| | | | UUCUGGCAUCG | CUmGmCCmUmUmCmUG | |
| | | | UU | GCAUCG*mU*mU | |
| G025840* | 633 | ACUGAGAACCG | ACUGAGAACCG | mA*mC*mU*mGmAGAm | chr19: 55115507- |
| | | GGCAGGUCACG | GGCAGGUCACG | AmCCmGGmGCAGGmUC | 55115531 |
| | | CA | CAGUUGUAGCU | ACmGCAmGUUGmUmAm | |
| | | | CCCUGAAACCG | GmCUCCCmUmGmAmAm | |
| | | | UUGCUACAAUA | AmCmCGUUmGmCUAmC | |
| | | | AGGCCGUCGAA | AAU*AAGmGmCCmGmU | |
| | | | AGAUGUGCCGC | mCmGmAmAmAmGmAmU | |
| | | | AACGCUCUGCC | GUGCmCGmCAAmCGCU | |
| | | | UUCUGGCAUCG | CUmGmCCmUmUmCmUG | |
| | | | UU | GCAUCG*mU*mU | |
| G025841* | 634 | AACCGGGCAGG | AACCGGGCAGG | mA*mA*mC*mCmGGGm | chr19: 55115513- |
| | | UCACGCAUCCC | UCACGCAUCCC | CmAGmGUmCACGCmAU | 55115537 |
| | | CC | CCGUUGUAGCU | CCmCCCmGUUGmUmAm | |
| | | | CCCUGAAACCG | GmCUCCCmUmGmAmAm | |
| | | | UUGCUACAAUA | AmCmCGUUmGmCUAmC | |
| | | | AGGCCGUCGAA | AAU*AAGmGmCCmGmU | |
| | | | AGAUGUGCCGC | mCmGmAmAmAmGmAmU | |
| | | | AACGCUCUGCC | GUGCmCGmCAAmCGCU | |
| | | | UUCUGGCAUCG | CUmGmCCmUmUmCmUG | |
| | | | UU | GCAUCG*mU*mU | |
| G025842 | 635 | ACCGGGCAGGU | ACCGGGCAGGU | mA*mC*mC*mGmGGCm | chr19: 55115514- |
| | | CACGCAUCCCC | CACGCAUCCCC | AmGGmUCmACGCAmUC | 55115538 |
| | | CC | CCGUUGUAGCU | CCmCCCmGUUGmUmAm | |
| | | | CCCUGAAACCG | GmCUCCCmUmGmAmAm | |
| | | | UUGCUACAAUA | AmCmCGUUmGmCUAmC | |
| | | | AGGCCGUCGAA | AAU*AAGmGmCCmGmU | |
| | | | AGAUGUGCCGC | mCmGmAmAmAmGmAmU | |
| | | | AACGCUCUGCC | GUGCmCGmCAAmCGCU | |
| | | | UUCUGGCAUCG | CUmGmCCmUmUmCmUG | |
| | | | UU | GCAUCG*mU*mU | |
| G025843 | 636 | GGGCAGGUCAC | GGGCAGGUCAC | mG*mG*mG*mCmAGGm | chr19: 55115517- |
| | | GCAUCCCCCCC | GCAUCCCCCCC | UmCAmCGmCAUCCmCC | 55115541 |
| | | UU | UUGUUGUAGCU | CCmCUUmGUUGmUmAm | |
| | | | CCCUGAAACCG | GmCUCCCmUmGmAmAm | |
| | | | UUGCUACAAUA | AmCmCGUUmGmCUAmC | |
| | | | AGGCCGUCGAA | AAU*AAGmGmCCmGmU | |
| | | | AGAUGUGCCGC | mCmGmAmAmAmGmAmU | |
| | | | AACGCUCUGCC | GUGCmCGmCAAmCGCU | |
| | | | UUCUGGCAUCG | CUmGmCCmUmUmCmUG | |
| | | | UU | GCAUCG*mU*mU | |
| G025844 | 637 | GGCAGGUCACG | GGCAGGUCACG | mG*mG*mC*mAmGGUm | chr19: 55115518- |
| | | CAUCCCCCCCU | CAUCCCCCCCU | CmACmGCmAUCCCmCC | 55115542 |
| | | UC | UCGUUGUAGCU | CCmUUCmGUUGmUmAm | |
| | | | CCCUGAAACCG | GmCUCCCmUmGmAmAm | |
| | | | UUGCUACAAUA | AmCmCGUUmGmCUAmC | |
| | | | AGGCCGUCGAA | AAU*AAGmGmCCmGmU | |
| | | | AGAUGUGCCGC | mCmGmAmAmAmGmAmU | |
| | | | AACGCUCUGCC | GUGCmCGmCAAmCGCU | |
| | | | UUCUGGCAUCG | CUmGmCCmUmUmCmUG | |
| | | | UU | GCAUCG*mU*mU | |
| G025845 | 638 | CCUUCCCUCCC | CCUUCCCUCCC | mC*mC*mU*mUmCCCm | chr19: 55115537- |
| | | ACCCCCUGCCA | ACCCCCUGCCA | UmCCmCAmCCCCCmUG | 55115561 |
| | | AG | AGGUUGUAGCU | CCmAAGmGUUGmUmAm | |
| | | | CCCUGAAACCG | GmCUCCCmUmGmAmAm | |
| | | | UUGCUACAAUA | AmCmCGUUmGmCUAmC | |
| | | | AGGCCGUCGAA | AAU*AAGmGmCCmGmU | |
| | | | AGAUGUGCCGC | mCmGmAmAmAmGmAmU | |
| | | | AACGCUCUGCC | GUGCmCGmCAAmCGCU | |
| | | | UUCUGGCAUCG | CUmGmCCmUmUmCmUG | |
| | | | UU | GCAUCG*mU*mU | |
| G025846 | 639 | CUUCCCUCCCA | CUUCCCUCCCA | mC*mU*mU*mCmCCUm | chr19: 55115538- |
| | | CCCCCUGCCAA | CCCCCUGCCAA | CmCCmACmCCCCUmGC | 55115562 |
| | | GC | GCGUUGUAGCU | CAmAGCmGUUGmUmAm | |
| | | | CCCUGAAACCG | GmCUCCCmUmGmAmAm | |
| | | | UUGCUACAAUA | AmCmCGUUmGmCUAmC | |
| | | | AGGCCGUCGAA | AAU*AAGmGmCCmGmU | |
| | | | AGAUGUGCCGC | mCmGmAmAmAmGmAmU | |
| | | | AACGCUCUGCC | GUGCmCGmCAAmCGCU | |
| | | | UUCUGGCAUCG | CUmGmCCmUmUmCmUG | |
| | | | UU | GCAUCG*mU*mU | |
| G025847 | 640 | CCCCCUGCCAA | CCCCCUGCCAA | mC*mC*mC*mCmCUGm | chr19: 55115549- |
| | | GCUCUCCCUCC | GCUCUCCCUCC | CmCAmAGmCUCUCmCC | 55115573 |
| | | CA | CAGUUGUAGCU | UCmCCAmGUUGmUmAm | |
| | | | CCCUGAAACCG | GmCUCCCmUmGmAmAm | |
| | | | UUGCUACAAUA | AmCmCGUUmGmCUAmC | |
| | | | AGGCCGUCGAA | AAU*AAGmGmCCmGmU | |
| | | | AGAUGUGCCGC | mCmGmAmAmAmGmAmU | |
| | | | AACGCUCUGCC | GUGCmCGmCAAmCGCU | |
| | | | UUCUGGCAUCG | CUmGmCCmUmUmCmUG | |
| | | | UU | GCAUCG*mU*mU | |
| G025848 | 641 | GAUCCUCUCUG | GAUCCUCUCUG | mG*mA*mU*mCmCUCm | chr19: 55115574- |
| | | GCUCCAUCGUA | GCUCCAUCGUA | UmCUmGGmCUCCAmUC | 55115598 |
| | | AG | AGGUUGUAGCU | GUmAAGmGUUGmUmAm | |
| | | | CCCUGAAACCG | GmCUCCCmUmGmAmAm | |
| | | | UUGCUACAAUA | AmCmCGUUmGmCUAmC | |
| | | | AGGCCGUCGAA | AAU*AAGmGmCCmGmU | |
| | | | AGAUGUGCCGC | mCmGmAmAmAmGmAmU | |
| | | | AACGCUCUGCC | GUGCmCGmCAAmCGCU | |
| | | | UUCUGGCAUCG | CUmGmCCmUmUmCmUG | |
| | | | UU | GCAUCG*mU*mU | |
| G025849 | 642 | AGAGGUUCUGG | AGAGGUUCUGG | mA*mG*mA*mGmGUUm | chr19: 55115606- |
| | | CAAGGAGAGAG | CAAGGAGAGAG | CmUGmGCmAAGGAmGA | 55115630 |
| | | AU | AUGUUGUAGCU | GAmGAUmGUUGmUmAm | |
| | | | CCCUGAAACCG | GmCUCCCmUmGmAmAm | |
| | | | UUGCUACAAUA | AmCmCGUUmGmCUAmC | |
| | | | AGGCCGUCGAA | AAU*AAGmGmCCmGmU | |
| | | | AGAUGUGCCGC | mCmGmAmAmAmGmAmU | |
| | | | AACGCUCUGCC | GUGCmCGmCAAmCGCU | |
| | | | UUCUGGCAUCG | CUmGmCCmUmUmCmUG | |
| | | | UU | GCAUCG*mU*mU | |
| G025850 | 643 | GGGGGUGUGUC | GGGGGUGUGUC | mG*mG*mG*mGmGUGm | chr19: 55115643- |
| | | ACCAGAUAAGG | ACCAGAUAAGG | UmGUmCAmCCAGAmUA | 55115667 |
| | | AA | AAGUUGUAGCU | AGmGAAmGUUGmUmAm | |
| | | | CCCUGAAACCG | GmCUCCCmUmGmAmAm | |
| | | | UUGCUACAAUA | AmCmCGUUmGmCUAmC | |
| | | | AGGCCGUCGAA | AAU*AAGmGmCCmGmU | |
| | | | AGAUGUGCCGC | mCmGmAmAmAmGmAmU | |
| | | | AACGCUCUGCC | GUGCmCGmCAAmCGCU | |
| | | | UUCUGGCAUCG | CUmGmCCmUmUmCmUG | |
| | | | UU | GCAUCG*mU*mU | |
| G025851 | 644 | CAAUAUCAGGA | CAAUAUCAGGA | mC*mA*mA*mUmAUCm | chr19: 55115696- |
| | | GACUAGGAAGG | GACUAGGAAGG | AmGGmAGmACUAGmGA | 55115720 |
| | | AG | AGGUUGUAGCU | AGmGAGmGUUGmUmAm | |
| | | | CCCUGAAACCG | GmCUCCCmUmGmAmAm | |
| | | | UUGCUACAAUA | AmCmCGUUmGmCUAmC | |
| | | | AGGCCGUCGAA | AAU*AAGmGmCCmGmU | |
| | | | AGAUGUGCCGC | mCmGmAmAmAmGmAmU | |
| | | | AACGCUCUGCC | GUGCmCGmCAAmCGCU | |
| | | | UUCUGGCAUCG | CUmGmCCmUmUmCmUG | |
| | | | UU | GCAUCG*mU*mU | |
| G025852 | 645 | AUGGGGCUUUU | AUGGGGCUUUU | mA*mU*mG*mGmGGCm | chr19: 55115731- |
| | | CUGUCACCAAU | CUGUCACCAAU | UmUUmUCmUGUCAmCC | 55115755 |
| | | CC | CCGUUGUAGCU | AAmUCCmGUUGmUmAm | |
| | | | CCCUGAAACCG | GmCUCCCmUmGmAmAm | |
| | | | UUGCUACAAUA | AmCmCGUUmGmCUAmC | |
| | | | AGGCCGUCGAA | AAU*AAGmGmCCmGmU | |
| | | | AGAUGUGCCGC | mCmGmAmAmAmGmAmU | |
| | | | AACGCUCUGCC | GUGCmCGmCAAmCGCU | |
| | | | UUCUGGCAUCG | CUmGmCCmUmUmCmUG | |
| | | | UU | GCAUCG*mU*mU | |
| G025853 | 646 | UUUCUGUCACC | UUUCUGUCACC | mU*mU*mU*mCmUGUm | chr19: 55115739- |
| | | AAUCCUGUCCC | AAUCCUGUCCC | CmACmCAmAUCCUmGU | 55115763 |
| | | UA | UAGUUGUAGCU | CCmCUAmGUUGmUmAm | |
| | | | CCCUGAAACCG | GmCUCCCmUmGmAmAm | |
| | | | UUGCUACAAUA | AmCmCGUUmGmCUAmC | |
| | | | AGGCCGUCGAA | AAU*AAGmGmCCmGmU | |
| | | | AGAUGUGCCGC | mCmGmAmAmAmGmAmU | |
| | | | AACGCUCUGCC | GUGCmCGmCAAmCGCU | |
| | | | UUCUGGCAUCG | CUmGmCCmUmUmCmUG | |
| | | | UU | GCAUCG*mU*mU | |
| G025854 | 647 | UUCUGUCACCA | UUCUGUCACCA | mU*mU*mC*mUmGUCm | chr19: 55115740- |
| | | AUCCUGUCCCU | AUCCUGUCCCU | AmCCmAAmUCCUGmUC | 55115764 |
| | | AG | AGGUUGUAGCU | CCmUAGmGUUGmUmAm | |
| | | | CCCUGAAACCG | GmCUCCCmUmGmAmAm | |
| | | | UUGCUACAAUA | AmCmCGUUmGmCUAmC | |
| | | | AGGCCGUCGAA | AAU*AAGmGmCCmGmU | |
| | | | AGAUGUGCCGC | mCmGmAmAmAmGmAmU | |
| | | | AACGCUCUGCC | GUGCmCGmCAAmCGCU | |
| | | | UUCUGGCAUCG | CUmGmCCmUmUmCmUG | |
| | | | UU | GCAUCG*mU*mU | |
| G025855 | 648 | UCUGUCACCAA | UCUGUCACCAA | mU*mC*mU*mGmUCAm | chr19: 55115741- |
| | | UCCUGUCCCUA | UCCUGUCCCUA | CmCAmAUmCCUGUmCC | 55115765 |
| | | GU | GUGUUGUAGCU | CUmAGUmGUUGmUmAm | |
| | | | CCCUGAAACCG | GmCUCCCmUmGmAmAm | |
| | | | UUGCUACAAUA | AmCmCGUUmGmCUAmC | |
| | | | AGGCCGUCGAA | AAU*AAGmGmCCmGmU | |
| | | | AGAUGUGCCGC | mCmGmAmAmAmGmAmU | |
| | | | AACGCUCUGCC | GUGCmCGmCAAmCGCU | |
| | | | UUCUGGCAUCG | CUmGmCCmUmUmCmUG | |
| | | | UU | GCAUCG*mU*mU | |
| G025856 | 649 | GUGGGGUGGAG | GUGGGGUGGAG | mG*mU*mG*mGmGGUm | chr19: 55115774- |
| | | GGGACAGAUAA | GGGACAGAUAA | GmGAmGGmGGACAmGA | 55115798 |
| | | AA | AAGUUGUAGCU | UAmAAAmGUUGmUmAm | |
| | | | CCCUGAAACCG | GmCUCCCmUmGmAmAm | |
| | | | UUGCUACAAUA | AmCmCGUUmGmCUAmC | |
| | | | AGGCCGUCGAA | AAU*AAGmGmCCmGmU | |
| | | | AGAUGUGCCGC | mCmGmAmAmAmGmAmU | |
| | | | AACGCUCUGCC | GUGCmCGmCAAmCGCU | |
| | | | UUCUGGCAUCG | CUmGmCCmUmUmCmUG | |
| | | | UU | GCAUCG*mU*mU | |
| G025857 | 650 | UGGAGGGGACA | UGGAGGGGACA | mU*mG*mG*mAmGGGm | chr19 : 55115780- |
| | | GAUAAAAGUAC | GAUAAAAGUAC | GmACmAGmAUAAAmAG | 55115804 |
| | | CC | CCGUUGUAGCU | UAmCCCmGUUGmUmAm | |
| | | | CCCUGAAACCG | GmCUCCCmUmGmAmAm | |
| | | | UUGCUACAAUA | AmCmCGUUmGmCUAmC | |
| | | | AGGCCGUCGAA | AAU*AAGmGmCCmGmU | |
| | | | AGAUGUGCCGC | mCmGmAmAmAmGmAmU | |
| | | | AACGCUCUGCC | GUGCmCGmCAAmCGCU | |
| | | | UUCUGGCAUCG | CUmGmCCmUmUmCmUG | |
| | | | UU | GCAUCG*mU*mU | |
| G025858 | 651 | GGACAGAUAAA | GGACAGAUAAA | mG*mG*mA*mCmAGAm | chr19: 55115786- |
| | | AGUACCCAGAA | AGUACCCAGAA | UmAAmAAmGUACCmCA | 55115810 |
| | | CC | CCGUUGUAGCU | GAmACCmGUUGmUmAm | |
| | | | CCCUGAAACCG | GmCUCCCmUmGmAmAm | |
| | | | UUGCUACAAUA | AmCmCGUUmGmCUAmC | |
| | | | AGGCCGUCGAA | AAU*AAGmGmCCmGmU | |
| | | | AGAUGUGCCGC | mCmGmAmAmAmGmAmU | |
| | | | AACGCUCUGCC | GUGCmCGmCAAmCGCU | |
| | | | UUCUGGCAUCG | CUmGmCCmUmUmCmUG | |
| | | | UU | GCAUCG*mU*mU | |
| G025859 | 652 | AAAGUACCCAG | AAAGUACCCAG | mA*mA*mA*mGmUACm | chr19: 55115795- |
| | | AACCAGAGCCA | AACCAGAGCCA | CmCAmGAmACCAGmAG | 55115819 |
| | | CA | CAGUUGUAGCU | CCmACAmGUUGmUmAm | |
| | | | CCCUGAAACCG | GmCUCCCmUmGmAmAm | |
| | | | UUGCUACAAUA | AmCmCGUUmGmCUAmC | |
| | | | AGGCCGUCGAA | AAU*AAGmGmCCmGmU | |
| | | | AGAUGUGCCGC | mCmGmAmAmAmGmAmU | |
| | | | AACGCUCUGCC | GUGCmCGmCAAmCGCU | |
| | | | UUCUGGCAUCG | CUmGmCCmUmUmCmUG | |
| | | | UU | GCAUCG*mU*mU | |
| G025860 | 653 | UACCCAGAACC | UACCCAGAACC | mU*mA*mC*mCmCAGm | chr19: 55115799- |
| | | AGAGCCACAUU | AGAGCCACAUU | AmACmCAmGAGCCmAC | 55115823 |
| | | AA | AAGUUGUAGCU | AUmUAAmGUUGmUmAm | |
| | | | CCCUGAAACCG | GmCUCCCmUmGmAmAm | |
| | | | UUGCUACAAUA | AmCmCGUUmGmCUAmC | |
| | | | AGGCCGUCGAA | AAU*AAGmGmCCmGmU | |
| | | | AGAUGUGCCGC | mCmGmAmAmAmGmAmU | |
| | | | AACGCUCUGCC | GUGCmCGmCAAmCGCU | |
| | | | UUCUGGCAUCG | CUmGmCCmUmUmCmUG | |
| | | | UU | GCAUCG*mU*mU | |
| G025861 | 654 | ACCCAGAACCA | ACCCAGAACCA | mA*mC*mC*mCmAGAm | chr19: 55115800- |
| | | GAGCCACAUUA | GAGCCACAUUA | AmCCmAGmAGCCAmCA | 55115824 |
| | | AC | ACGUUGUAGCU | UUmAACmGUUGmUmAm | |
| | | | CCCUGAAACCG | GmCUCCCmUmGmAmAm | |
| | | | UUGCUACAAUA | AmCmCGUUmGmCUAmC | |
| | | | AGGCCGUCGAA | AAU*AAGmGmCCmGmU | |
| | | | AGAUGUGCCGC | mCmGmAmAmAmGmAmU | |
| | | | AACGCUCUGCC | GUGCmCGmCAAmCGCU | |
| | | | UUCUGGCAUCG | CUmGmCCmUmUmCmUG | |
| | | | UU | GCAUCG*mU*mU | |
| G025862 | 655 | UUAACCGGCCC | UUAACCGGCCC | mU*mU*mA*mAmCCGm | chr19: 55115819- |
| | | UGGGAAUAUAA | UGGGAAUAUAA | GmCCmCUmGGGAAmUA | 55115843 |
| | | GG | GGGUUGUAGCU | UAmAGGmGUUGmUmAm | |
| | | | CCCUGAAACCG | GmCUCCCmUmGmAmAm | |
| | | | UUGCUACAAUA | AmCmCGUUmGmCUAmC | |
| | | | AGGCCGUCGAA | AAU*AAGmGmCCmGmU | |
| | | | AGAUGUGCCGC | mCmGmAmAmAmGmAmU | |
| | | | AACGCUCUGCC | GUGCmCGmCAAmCGCU | |
| | | | UUCUGGCAUCG | CUmGmCCmUmUmCmUG | |
| | | | UU | GCAUCG*mU*mU | |
| G025863 | 656 | UAACCGGCCCU | UAACCGGCCCU | mU*mA*mA*mCmCGGm | chr19: 55115820- |
| | | GGGAAUAUAAG | GGGAAUAUAAG | CmCCmUGmGGAAUmAU | 55115844 |
| | | GU | GUGUUGUAGCU | AAmGGUmGUUGmUmAm | |
| | | | CCCUGAAACCG | GmCUCCCmUmGmAmAm | |
| | | | UUGCUACAAUA | AmCmCGUUmGmCUAmC | |
| | | | AGGCCGUCGAA | AAU*AAGmGmCCmGmU | |
| | | | AGAUGUGCCGC | mCmGmAmAmAmGmAmU | |
| | | | AACGCUCUGCC | GUGCmCGmCAAmCGCU | |
| | | | UUCUGGCAUCG | CUmGmCCmUmUmCmUG | |
| | | | UU | GCAUCG*mU*mU | |
| G025864 | 657 | AGGUGGUCCCA | AGGUGGUCCCA | mA*mG*mG*mUmGGUm | chr19: 55115840- |
| | | GCUCGGGGACA | GCUCGGGGACA | CmCCmAGmCUCGGmGG | 55115864 |
| | | CA | CAGUUGUAGCU | ACmACAmGUUGmUmAm | |
| | | | CCCUGAAACCG | GmCUCCCmUmGmAmAm | |
| | | | UUGCUACAAUA | AmCmCGUUmGmCUAmC | |
| | | | AGGCCGUCGAA | AAU*AAGmGmCCmGmU | |
| | | | AGAUGUGCCGC | mCmGmAmAmAmGmAmU | |
| | | | AACGCUCUGCC | GUGCmCGmCAAmCGCU | |
| | | | UUCUGGCAUCG | CUmGmCCmUmUmCmUG | |
| | | | UU | GCAUCG*mU*mU | |
| G025865 | 658 | GGAUCCCUGGA | GGAUCCCUGGA | mG*mG*mA*mUmCCCm | chr19: 55115864- |
| | | GGCAGCAAACA | GGCAGCAAACA | UmGGmAGmGCAGCmAA | 55115888 |
| | | UG | UGGUUGUAGCU | ACmAUGmGUUGmUmAm | |
| | | | CCCUGAAACCG | GmCUCCCmUmGmAmAm | |
| | | | UUGCUACAAUA | AmCmCGUUmGmCUAmC | |
| | | | AGGCCGUCGAA | AAU*AAGmGmCCmGmU | |
| | | | AGAUGUGCCGC | mCmGmAmAmAmGmAmU | |
| | | | AACGCUCUGCC | GUGCmCGmCAAmCGCU | |
| | | | UUCUGGCAUCG | CUmGmCCmUmUmCmUG | |
| | | | UU | GCAUCG*mU*mU | |
| G025866 | 659 | ACAUGCUGUCC | ACAUGCUGUCC | mA*mC*mA*mUmGCUm | chr19: 55115883- |
| | | UGAAGUGGACA | UGAAGUGGACA | GmUCmCUmGAAGUmGG | 55115907 |
| | | UA | UAGUUGUAGCU | ACmAUAmGUUGmUmAm | |
| | | | CCCUGAAACCG | GmCUCCCmUmGmAmAm | |
| | | | UUGCUACAAUA | AmCmCGUUmGmCUAmC | |
| | | | AGGCCGUCGAA | AAU*AAGmGmCCmGmU | |
| | | | AGAUGUGCCGC | mCmGmAmAmAmGmAmU | |
| | | | AACGCUCUGCC | GUGCmCGmCAAmCGCU | |
| | | | UUCUGGCAUCG | CUmGmCCmUmUmCmUG | |
| | | | UU | GCAUCG*mU*mU | |
| G025867 | 660 | CAUGCUGUCCU | CAUGCUGUCCU | mC*mA*mU*mGmCUGm | chr19: 55115884- |
| | | GAAGUGGACAU | GAAGUGGACAU | UmCCmUGmAAGUGmGA | 55115908 |
| | | AG | AGGUUGUAGCU | CAmUAGmGUUGmUmAm | |
| | | | CCCUGAAACCG | GmCUCCCmUmGmAmAm | |
| | | | UUGCUACAAUA | AmCmCGUUmGmCUAmC | |
| | | | AGGCCGUCGAA | AAU*AAGmGmCCmGmU | |
| | | | AGAUGUGCCGC | mCmGmAmAmAmGmAmU | |
| | | | AACGCUCUGCC | GUGCmCGmCAAmCGCU | |
| | | | UUCUGGCAUCG | CUmGmCCmUmUmCmUG | |
| | | | UU | GCAUCG*mU*mU | |
| G025868 | 661 | GAGGAAGAAGA | GAGGAAGAAGA | mG*mA*mG*mGmAAGm | chr19: 55115920- |
| | | CUAGCUGAGCU | CUAGCUGAGCU | AmAGmACmUAGCUmGA | 55115944 |
| | | CU | CUGUUGUAGCU | GCmUCUmGUUGmUmAm | |
| | | | CCCUGAAACCG | GmCUCCCmUmGmAmAm | |
| | | | UUGCUACAAUA | AmCmCGUUmGmCUAmC | |
| | | | AGGCCGUCGAA | AAU*AAGmGmCCmGmU | |
| | | | AGAUGUGCCGC | mCmGmAmAmAmGmAmU | |
| | | | AACGCUCUGCC | GUGCmCGmCAAmCGCU | |
| | | | UUCUGGCAUCG | CUmGmCCmUmUmCmUG | |
| | | | UU | GCAUCG*mU*mU | |
| G025869 | 662 | AGGAAGAAGAC | AGGAAGAAGAC | mA*mG*mG*mAmAGAm | chr19: 55115921- |
| | | UAGCUGAGCUC | UAGCUGAGCUC | AmGAmCUmAGCUGmAG | 55115945 |
| | | UC | UCGUUGUAGCU | CUmCUCmGUUGmUmAm | |
| | | | CCCUGAAACCG | GmCUCCCmUmGmAmAm | |
| | | | UUGCUACAAUA | AmCmCGUUmGmCUAmC | |
| | | | AGGCCGUCGAA | AAU*AAGmGmCCmGmU | |
| | | | AGAUGUGCCGC | mCmGmAmAmAmGmAmU | |
| | | | AACGCUCUGCC | GUGCmCGmCAAmCGCU | |
| | | | UUCUGGCAUCG | CUmGmCCmUmUmCmUG | |
| | | | UU | GCAUCG*mU*mU | |
| G025870 | 663 | GGAAGAAGACU | GGAAGAAGACU | mG*mG*mA*mAmGAAm | chr19: 55115922- |
| | | AGCUGAGCUCU | AGCUGAGCUCU | GmACmUAmGCUGAmGC | 55115946 |
| | | CG | CGGUUGUAGCU | UCmUCGmGUUGmUmAm | |
| | | | CCCUGAAACCG | GmCUCCCmUmGmAmAm | |
| | | | UUGCUACAAUA | AmCmCGUUmGmCUAmC | |
| | | | AGGCCGUCGAA | AAU*AAGmGmCCmGmU | |
| | | | AGAUGUGCCGC | mCmGmAmAmAmGmAmU | |
| | | | AACGCUCUGCC | GUGCmCGmCAAmCGCU | |
| | | | UUCUGGCAUCG | CUmGmCCmUmUmCmUG | |
| | | | UU | GCAUCG*mU*mU | |
| G025871 | 664 | AGCUGAGCUCU | AGCUGAGCUCU | mA*mG*mC*mUmGAGm | chr19: 55115933- |
| | | CGGACCCCUGG | CGGACCCCUGG | CmUCmUCmGGACCmCC | 55115957 |
| | | AA | AAGUUGUAGCU | UGmGAAmGUUGmUmAm | |
| | | | CCCUGAAACCG | GmCUCCCmUmGmAmAm | |
| | | | UUGCUACAAUA | AmCmCGUUmGmCUAmC | |
| | | | AGGCCGUCGAA | AAU*AAGmGmCCmGmU | |
| | | | AGAUGUGCCGC | mCmGmAmAmAmGmAmU | |
| | | | AACGCUCUGCC | GUGCmCGmCAAmCGCU | |
| | | | UUCUGGCAUCG | CUmGmCCmUmUmCmUG | |
| | | | UU | GCAUCG*mU*mU | |
| G025872 | 665 | CUGCCCAAAUG | CUGCCCAAAUG | mC*mU*mG*mCmCCAm | chr19: 55116019- |
| | | AAAGGAGUGAG | AAAGGAGUGAG | AmAUmGAmAAGGAmGU | 55116043 |
| | | AG | AGGUUGUAGCU | GAmGAGmGUUGmUmAm | |
| | | | CCCUGAAACCG | GmCUCCCmUmGmAmAm | |
| | | | UUGCUACAAUA | AmCmCGUUmGmCUAmC | |
| | | | AGGCCGUCGAA | AAU*AAGmGmCCmGmU | |
| | | | AGAUGUGCCGC | mCmGmAmAmAmGmAmU | |
| | | | AACGCUCUGCC | GUGCmCGmCAAmCGCU | |
| | | | UUCUGGCAUCG | CUmGmCCmUmUmCmUG | |
| | | | UU | GCAUCG*mU*mU | |
| G025873 | 666 | UGCCCAAAUGA | UGCCCAAAUGA | mU*mG*mC*mCmCAAm | chr19: 55116020- |
| | | AAGGAGUGAGA | AAGGAGUGAGA | AmUGmAAmAGGAGmUG | 55116044 |
| | | GG | GGGUUGUAGCU | AGmAGGmGUUGmUmAm | |
| | | | CCCUGAAACCG | GmCUCCCmUmGmAmAm | |
| | | | UUGCUACAAUA | AmCmCGUUmGmCUAmC | |
| | | | AGGCCGUCGAA | AAU*AAGmGmCCmGmU | |
| | | | AGAUGUGCCGC | mCmGmAmAmAmGmAmU | |
| | | | AACGCUCUGCC | GUGCmCGmCAAmCGCU | |
| | | | UUCUGGCAUCG | CUmGmCCmUmUmCmUG | |
| | | | UU | GCAUCG*mU*mU | |
| G025874 | 667 | AAUGAAAGGAG | AAUGAAAGGAG | mA*mA*mU*mGmAAAm | chr19: 55116026- |
| | | UGAGAGGUGAC | UGAGAGGUGAC | GmGAmGUmGAGAGmGU | 55116050 |
| | | CC | CCGUUGUAGCU | GAmCCCmGUUGmUmAm | |
| | | | CCCUGAAACCG | GmCUCCCmUmGmAmAm | |
| | | | UUGCUACAAUA | AmCmCGUUmGmCUAmC | |
| | | | AGGCCGUCGAA | AAU*AAGmGmCCmGmU | |
| | | | AGAUGUGCCGC | mCmGmAmAmAmGmAmU | |
| | | | AACGCUCUGCC | GUGCmCGmCAAmCGCU | |
| | | | UUCUGGCAUCG | CUmGmCCmUmUmCmUG | |
| | | | UU | GCAUCG*mU*mU | |
| G025875 | 668 | GACCCGAAUCC | GACCCGAAUCC | mG*mA*mC*mCmCGAm | chr19: 55116045- |
| | | ACAGGAGAACG | ACAGGAGAACG | AmUCmCAmCAGGAmGA | 55116069 |
| | | GG | GGGUUGUAGCU | ACmGGGmGUUGmUmAm | |
| | | | CCCUGAAACCG | GmCUCCCmUmGmAmAm | |
| | | | UUGCUACAAUA | AmCmCGUUmGmCUAmC | |
| | | | AGGCCGUCGAA | AAU*AAGmGmCCmGmU | |
| | | | AGAUGUGCCGC | mCmGmAmAmAmGmAmU | |
| | | | AACGCUCUGCC | GUGCmCGmCAAmCGCU | |
| | | | UUCUGGCAUCG | CUmGmCCmUmUmCmUG | |
| | | | UU | GCAUCG*mU*mU | |
| G025876* | 669 | AAGCAAGAGGA | AAGCAAGAGGA | mA*mA*mG*mCmAAGm | chr19: 55116084- |
| | | UGGAGAGGUGG | UGGAGAGGUGG | AmGGmAUmGGAGAmGG | 55116108 |
| | | CU | CUGUUGUAGCU | UGmGCUmGUUGmUmAm | |
| | | | CCCUGAAACCG | GmCUCCCmUmGmAmAm | |
| | | | UUGCUACAAUA | AmCmCGUUmGmCUAmC | |
| | | | AGGCCGUCGAA | AAU*AAGmGmCCmGmU | |
| | | | AGAUGUGCCGC | mCmGmAmAmAmGmAmU | |
| | | | AACGCUCUGCC | GUGCmCGmCAAmCGCU | |
| | | | UUCUGGCAUCG | CUmGmCCmUmUmCmUG | |
| | | | UU | GCAUCG*mU*mU | |
| G025877 | 670 | UUGUCCAGAAA | UUGUCCAGAAA | mU*mU*mG*mUmCCAm | chr19: 55116136- |
| | | AACGGUGAUGA | AACGGUGAUGA | GmAAmAAmACGGUmGA | 55116160 |
| | | UG | UGGUUGUAGCU | UGmAUGmGUUGmUmAm | |
| | | | CCCUGAAACCG | GmCUCCCmUmGmAmAm | |
| | | | UUGCUACAAUA | AmCmCGUUmGmCUAmC | |
| | | | AGGCCGUCGAA | AAU*AAGmGmCCmGmU | |
| | | | AGAUGUGCCGC | mCmGmAmAmAmGmAmU | |
| | | | AACGCUCUGCC | GUGCmCGmCAAmCGCU | |
| | | | UUCUGGCAUCG | CUmGmCCmUmUmCmUG | |
| | | | UU | GCAUCG*mU*mU | |
| G025878 | 671 | UGGCCGCCUCU | UGGCCGCCUCU | mU*mG*mG*mCmCGCm | chr19: 55115152- |
| | | ACUCCCUUUCU | ACUCCCUUUCU | CmUCmUAmCUCCCmUU | 55115176 |
| | | CU | CUGUUGUAGCU | UCmUCUmGUUGmUmAm | |
| | | | CCCUGAAACCG | GmCUCCCmUmGmAmAm | |
| | | | UUGCUACAAUA | AmCmCGUUmGmCUAmC | |
| | | | AGGCCGUCGAA | AAU*AAGmGmCCmGmU | |
| | | | AGAUGUGCCGC | mCmGmAmAmAmGmAmU | |
| | | | AACGCUCUGCC | GUGCmCGmCAAmCGCU | |
| | | | UUCUGGCAUCG | CUmGmCCmUmUmCmUG | |
| | | | UU | GCAUCG*mU*mU | |
| G025879 | 672 | GUUCACCAGGU | GUUCACCAGGU | mG*mU*mU*mCmACCm | chr19: 55115165- |
| | | CGUGGCCGCCU | CGUGGCCGCCU | AmGGmUCmGUGGCmCG | 55115189 |
| | | CU | CUGUUGUAGCU | CCmUCUmGUUGmUmAm | |
| | | | CCCUGAAACCG | GmCUCCCmUmGmAmAm | |
| | | | UUGCUACAAUA | AmCmCGUUmGmCUAmC | |
| | | | AGGCCGUCGAA | AAU*AAGmGmCCmGmU | |
| | | | AGAUGUGCCGC | mCmGmAmAmAmGmAmU | |
| | | | AACGCUCUGCC | GUGCmCGmCAAmCGCU | |
| | | | UUCUGGCAUCG | CUmGmCCmUmUmCmUG | |
| | | | UU | GCAUCG*mU*mU | |
| G025880 | 673 | UGUUCACCAGG | UGUUCACCAGG | mU*mG*mU*mUmCACm | chr19: 55115166- |
| | | UCGUGGCCGCC | UCGUGGCCGCC | CmAGmGUmCGUGGmCC | 55115190 |
| | | UC | UCGUUGUAGCU | GCmCUCmGUUGmUmAm | |
| | | | CCCUGAAACCG | GmCUCCCmUmGmAmAm | |
| | | | UUGCUACAAUA | AmCmCGUUmGmCUAmC | |
| | | | AGGCCGUCGAA | AAU*AAGmGmCCmGmU | |
| | | | AGAUGUGCCGC | mCmGmAmAmAmGmAmU | |
| | | | AACGCUCUGCC | GUGCmCGmCAAmCGCU | |
| | | | UUCUGGCAUCG | CUmGmCCmUmUmCmUG | |
| | | | UU | GCAUCG*mU*mU | |
| G025881 | 674 | GUCCUAGGUGU | GUCCUAGGUGU | mG*mU*mC*mCmUAGm | chr19: 55115174- |
| | | UCACCAGGUCG | UCACCAGGUCG | GmUGmUUmCACCAmGG | 55115198 |
| | | UG | UGGUUGUAGCU | UCmGUGmGUUGmUmAm | |
| | | | CCCUGAAACCG | GmCUCCCmUmGmAmAm | |
| | | | UUGCUACAAUA | AmCmCGUUmGmCUAmC | |
| | | | AGGCCGUCGAA | AAU*AAGmGmCCmGmU | |
| | | | AGAUGUGCCGC | mCmGmAmAmAmGmAmU | |
| | | | AACGCUCUGCC | GUGCmCGmCAAmCGCU | |
| | | | UUCUGGCAUCG | CUmGmCCmUmUmCmUG | |
| | | | UU | GCAUCG*mU*mU | |
| G025882 | 675 | UGCGUCCUAGG | UGCGUCCUAGG | mU*mG*mC*mGmUCCm | chr19: 55115177- |
| | | UGUUCACCAGG | UGUUCACCAGG | UmAGmGUmGUUCAmCC | 55115201 |
| | | UC | UCGUUGUAGCU | AGmGUCmGUUGmUmAm | |
| | | | CCCUGAAACCG | GmCUCCCmUmGmAmAm | |
| | | | UUGCUACAAUA | AmCmCGUUmGmCUAmC | |
| | | | AGGCCGUCGAA | AAU*AAGmGmCCmGmU | |
| | | | AGAUGUGCCGC | mCmGmAmAmAmGmAmU | |
| | | | AACGCUCUGCC | GUGCmCGmCAAmCGCU | |
| | | | UUCUGGCAUCG | CUmGmCCmUmUmCmUG | |
| | | | UU | GCAUCG*mU*mU | |
| G025883 | 676 | UGUGAGAAUGG | UGUGAGAAUGG | mU*mG*mU*mGmAGAm | chr19: 55115188- |
| | | UGCGUCCUAGG | UGCGUCCUAGG | AmUGmGUmGCGUCmCU | 55115212 |
| | | UG | UGGUUGUAGCU | AGmGUGmGUUGmUmAm | |
| | | | CCCUGAAACCG | GmCUCCCmUmGmAmAm | |
| | | | UUGCUACAAUA | AmCmCGUUmGmCUAmC | |
| | | | AGGCCGUCGAA | AAU*AAGmGmCCmGmU | |
| | | | AGAUGUGCCGC | mCmGmAmAmAmGmAmU | |
| | | | AACGCUCUGCC | GUGCmCGmCAAmCGCU | |
| | | | UUCUGGCAUCG | CUmGmCCmUmUmCmUG | |
| | | | UU | GCAUCG*mU*mU | |
| G025884 | 677 | GAAAACUCCCU | GAAAACUCCCU | mG*mA*mA*mAmACUm | chr19: 55115200- |
| | | UUGUGAGAAUG | UUGUGAGAAUG | CmCCmUUmUGUGAmGA | 55115224 |
| | | GU | GUGUUGUAGCU | AUmGGUmGUUGmUmAm | |
| | | | CCCUGAAACCG | GmCUCCCmUmGmAmAm | |
| | | | UUGCUACAAUA | AmCmCGUUmGmCUAmC | |
| | | | AGGCCGUCGAA | AAU*AAGmGmCCmGmU | |
| | | | AGAUGUGCCGC | mCmGmAmAmAmGmAmU | |
| | | | AACGCUCUGCC | GUGCmCGmCAAmCGCU | |
| | | | UUCUGGCAUCG | CUmGmCCmUmUmCmUG | |
| | | | UU | GCAUCG*mU*mU | |
| G025885 | 678 | ACCUGUGAGAU | ACCUGUGAGAU | mA*mC*mC*mUmGUGm | chr19: 55115270- |
| | | AAGGCCAGUAG | AAGGCCAGUAG | AmGAmUAmAGGCCmAG | 55115294 |
| | | CC | CCGUUGUAGCU | UAmGCCmGUUGmUmAm | |
| | | | CCCUGAAACCG | GmCUCCCmUmGmAmAm | |
| | | | UUGCUACAAUA | AmCmCGUUmGmCUAmC | |
| | | | AGGCCGUCGAA | AAU*AAGmGmCCmGmU | |
| | | | AGAUGUGCCGC | mCmGmAmAmAmGmAmU | |
| | | | AACGCUCUGCC | GUGCmCGmCAAmCGCU | |
| | | | UUCUGGCAUCG | CUmGmCCmUmUmCmUG | |
| | | | UU | GCAUCG*mU*mU | |
| G025886 | 679 | UACCUGUGAGA | UACCUGUGAGA | mU*mA*mC*mCmUGUm | chr19: 55115271- |
| | | UAAGGCCAGUA | UAAGGCCAGUA | GmAGmAUmAAGGCmCA | 55115295 |
| | | GC | GCGUUGUAGCU | GUmAGCmGUUGmUmAm | |
| | | | CCCUGAAACCG | GmCUCCCmUmGmAmAm | |
| | | | UUGCUACAAUA | AmCmCGUUmGmCUAmC | |
| | | | AGGCCGUCGAA | AAU*AAGmGmCCmGmU | |
| | | | AGAUGUGCCGC | mCmGmAmAmAmGmAmU | |
| | | | AACGCUCUGCC | GUGCmCGmCAAmCGCU | |
| | | | UUCUGGCAUCG | CUmGmCCmUmUmCmUG | |
| | | | UU | GCAUCG*mU*mU | |
| G025887 | 680 | UUACCUGUGAG | UUACCUGUGAG | mU*mU*mA*mCmCUGm | chr19: 55115272- |
| | | AUAAGGCCAGU | AUAAGGCCAGU | UmGAmGAmUAAGGmCC | 55115296 |
| | | AG | AGGUUGUAGCU | AGmUAGmGUUGmUmAm | |
| | | | CCCUGAAACCG | GmCUCCCmUmGmAmAm | |
| | | | UUGCUACAAUA | AmCmCGUUmGmCUAmC | |
| | | | AGGCCGUCGAA | AAU*AAGmGmCCmGmU | |
| | | | AGAUGUGCCGC | mCmGmAmAmAmGmAmU | |
| | | | AACGCUCUGCC | GUGCmCGmCAAmCGCU | |
| | | | UUCUGGCAUCG | CUmGmCCmUmUmCmUG | |
| | | | UU | GCAUCG*mU*mU | |
| G025888* | 681 | AGUUUUACCUG | AGUUUUACCUG | mA*mG*mU*mUmUUAm | chr19: 55115276- |
| | | UGAGAUAAGGC | UGAGAUAAGGC | CmCUmGUmGAGAUmAA | 55115300 |
| | | CA | CAGUUGUAGCU | GGmCCAmGUUGmUmAm | |
| | | | CCCUGAAACCG | GmCUCCCmUmGmAmAm | |
| | | | UUGCUACAAUA | AmCmCGUUmGmCUAmC | |
| | | | AGGCCGUCGAA | AAU*AAGmGmCCmGmU | |
| | | | AGAUGUGCCGC | mCmGmAmAmAmGmAmU | |
| | | | AACGCUCUGCC | GUGCmCGmCAAmCGCU | |
| | | | UUCUGGCAUCG | CUmGmCCmUmUmCmUG | |
| | | | UU | GCAUCG*mU*mU | |
| G025889 | 682 | GUGCGUCAGUU | GUGCGUCAGUU | mG*mU*mG*mCmGUCm | chr19: 55115283- |
| | | UUACCUGUGAG | UUACCUGUGAG | AmGUmUUmUACCUmGU | 55115307 |
| | | AU | AUGUUGUAGCU | GAmGAUmGUUGmUmAm | |
| | | | CCCUGAAACCG | GmCUCCCmUmGmAmAm | |
| | | | UUGCUACAAUA | AmCmCGUUmGmCUAmC | |
| | | | AGGCCGUCGAA | AAU*AAGmGmCCmGmU | |
| | | | AGAUGUGCCGC | mCmGmAmAmAmGmAmU | |
| | | | AACGCUCUGCC | GUGCmCGmCAAmCGCU | |
| | | | UUCUGGCAUCG | CUmGmCCmUmUmCmUG | |
| | | | UU | GCAUCG*mU*mU | |
| G025890 | 683 | UAUAUUGUUCC | UAUAUUGUUCC | mU*mA*mU*mAmUUGm | chr19: 55115297- |
| | | UCCGUGCGUCA | UCCGUGCGUCA | UmUCmCUmCCGUGmCG | 55115321 |
| | | GU | GUGUUGUAGCU | UCmAGUmGUUGmUmAm | |
| | | | CCCUGAAACCG | GmCUCCCmUmGmAmAm | |
| | | | UUGCUACAAUA | AmCmCGUUmGmCUAmC | |
| | | | AGGCCGUCGAA | AAU*AAGmGmCCmGmU | |
| | | | AGAUGUGCCGC | mCmGmAmAmAmGmAmU | |
| | | | AACGCUCUGCC | GUGCmCGmCAAmCGCU | |
| | | | UUCUGGCAUCG | CUmGmCCmUmUmCmUG | |
| | | | UU | GCAUCG*mU*mU | |
| G025891 | 684 | UAACUUUGGCU | UAACUUUGGCU | mU*mA*mA*mCmUUUm | chr19: 55115331- |
| | | CUUCACCUUUC | CUUCACCUUUC | GmGCmUCmUUCACmCU | 55115355 |
| | | UA | UAGUUGUAGCU | UUmCUAmGUUGmUmAm | |
| | | | CCCUGAAACCG | GmCUCCCmUmGmAmAm | |
| | | | UUGCUACAAUA | AmCmCGUUmGmCUAmC | |
| | | | AGGCCGUCGAA | AAU*AAGmGmCCmGmU | |
| | | | AGAUGUGCCGC | mCmGmAmAmAmGmAmU | |
| | | | AACGCUCUGCC | GUGCmCGmCAAmCGCU | |
| | | | UUCUGGCAUCG | CUmGmCCmUmUmCmUG | |
| | | | UU | GCAUCG*mU*mU | |
| G025892 | 685 | CUAACUUUGGC | CUAACUUUGGC | mC*mU*mA*mAmCUUm | chr19: 55115332- |
| | | UCUUCACCUUU | UCUUCACCUUU | UmGGmCUmCUUCAmCC | 55115356 |
| | | CU | CUGUUGUAGCU | UUmUCUmGUUGmUmAm | |
| | | | CCCUGAAACCG | GmCUCCCmUmGmAmAm | |
| | | | UUGCUACAAUA | AmCmCGUUmGmCUAmC | |
| | | | AGGCCGUCGAA | AAU*AAGmGmCCmGmU | |
| | | | AGAUGUGCCGC | mCmGmAmAmAmGmAmU | |
| | | | AACGCUCUGCC | GUGCmCGmCAAmCGCU | |
| | | | UUCUGGCAUCG | CUmGmCCmUmUmCmUG | |
| | | | UU | GCAUCG*mU*mU | |
| G025893 | 686 | UCUAACUUUGG | UCUAACUUUGG | mU*mC*mU*mAmACUm | chr19: 55115333- |
| | | CUCUUCACCUU | CUCUUCACCUU | UmUGmGCmUCUUCmAC | 55115357 |
| | | UC | UCGUUGUAGCU | CUmUUCmGUUGmUmAm | |
| | | | CCCUGAAACCG | GmCUCCCmUmGmAmAm | |
| | | | UUGCUACAAUA | AmCmCGUUmGmCUAmC | |
| | | | AGGCCGUCGAA | AAU*AAGmGmCCmGmU | |
| | | | AGAUGUGCCGC | mCmGmAmAmAmGmAmU | |
| | | | AACGCUCUGCC | GUGCmCGmCAAmCGCU | |
| | | | UUCUGGCAUCG | CUmGmCCmUmUmCmUG | |
| | | | UU | GCAUCG*mU*mU | |
| G025894 | 687 | GGUCCUGAGUU | GGUCCUGAGUU | mG*mG*mU*mCmCUGm | chr19: 55115343- |
| | | CUAACUUUGGC | CUAACUUUGGC | AmGUmUCmUAACUmUU | 55115367 |
| | | UC | UCGUUGUAGCU | GGmCUCmGUUGmUmAm | |
| | | | CCCUGAAACCG | GmCUCCCmUmGmAmAm | |
| | | | UUGCUACAAUA | AmCmCGUUmGmCUAmC | |
| | | | AGGCCGUCGAA | AAU*AAGmGmCCmGmU | |
| | | | AGAUGUGCCGC | mCmGmAmAmAmGmAmU | |
| | | | AACGCUCUGCC | GUGCmCGmCAAmCGCU | |
| | | | UUCUGGCAUCG | CUmGmCCmUmUmCmUG | |
| | | | UU | GCAUCG*mU*mU | |
| G025895 | 688 | UCCUGGUGCUG | UCCUGGUGCUG | mU*mC*mC*mUmGGUm | chr19: 55115414- |
| | | CAGCUUCCUUA | CAGCUUCCUUA | GmCUmGCmAGCUUmCC | 55115438 |
| | | CA | CAGUUGUAGCU | UUmACAmGUUGmUmAm | |
| | | | CCCUGAAACCG | GmCUCCCmUmGmAmAm | |
| | | | UUGCUACAAUA | AmCmCGUUmGmCUAmC | |
| | | | AGGCCGUCGAA | AAU*AAGmGmCCmGmU | |
| | | | AGAUGUGCCGC | mCmGmAmAmAmGmAmU | |
| | | | AACGCUCUGCC | GUGCmCGmCAAmCGCU | |
| | | | UUCUGGCAUCG | CUmGmCCmUmUmCmUG | |
| | | | UU | GCAUCG*mU*mU | |
| G021566 | 689 | CAGCUAGUCUU | CAGCUAGUCUU | mC*mA*mG*mCmUAGm | chr19: 55115914- |
| | | CUUCCUCCAAC | CUUCCUCCAAC | UmCUmUCmUUCCUmCC | 55115938 |
| | | CC | CCGUUGUAGCU | AAmCCCmGUUGmUmAm | |
| | | | CCCUGAAACCG | GmCUCCCmUmGmAmAm | |
| | | | UUGCUACAAUA | AmCmCGUUmGmCUAmC | |
| | | | AGGCCGUCGAA | AAU*AAGmGmCCmGmU | |
| | | | AGAUGUGCCGC | mCmGmAmAmAmGmAmU | |
| | | | AACGCUCUGCC | GUGCmCGmCAAmCGCU | |
| | | | UUCUGGCAUCG | CUmGmCCmUmUmCmUG | |
| | | | UU | GCAUCG*mU*mU | |
| G025896 | 690 | GCGUGACCUGC | GCGUGACCUGC | mG*mC*mG*mUmGACm | chr19: 55115506- |
| | | CCGGUUCUCAG | CCGGUUCUCAG | CmUGmCCmCGGUUmCU | 55115530 |
| | | UG | UGGUUGUAGCU | CAmGUGmGUUGmUmAm | |
| | | | CCCUGAAACCG | GmCUCCCmUmGmAmAm | |
| | | | UUGCUACAAUA | AmCmCGUUmGmCUAmC | |
| | | | AGGCCGUCGAA | AAU*AAGmGmCCmGmU | |
| | | | AGAUGUGCCGC | mCmGmAmAmAmGmAmU | |
| | | | AACGCUCUGCC | GUGCmCGmCAAmCGCU | |
| | | | UUCUGGCAUCG | CUmGmCCmUmUmCmUG | |
| | | | UU | GCAUCG*mU*mU | |
| G025897 | 691 | GAUGCGUGACC | GAUGCGUGACC | mG*mA*mU*mGmCGUm | chr19: 55115509- |
| | | UGCCCGGUUCU | UGCCCGGUUCU | GmACmCUmGCCCGmGU | 55115533 |
| | | CA | CAGUUGUAGCU | UCmUCAmGUUGmUmAm | |
| | | | CCCUGAAACCG | GmCUCCCmUmGmAmAm | |
| | | | UUGCUACAAUA | AmCmCGUUmGmCUAmC | |
| | | | AGGCCGUCGAA | AAU*AAGmGmCCmGmU | |
| | | | AGAUGUGCCGC | mCmGmAmAmAmGmAmU | |
| | | | AACGCUCUGCC | GUGCmCGmCAAmCGCU | |
| | | | UUCUGGCAUCG | CUmGmCCmUmUmCmUG | |
| | | | UU | GCAUCG*mU*mU | |
| G025898 | 692 | GUUUGCUUACG | GUUUGCUUACG | mG*mU*mU*mUmGCUm | chr19: 55115579- |
| | | AUGGAGCCAGA | AUGGAGCCAGA | UmACmGAmUGGAGmCC | 55115603 |
| | | GA | GAGUUGUAGCU | AGmAGAmGUUGmUmAm | |
| | | | CCCUGAAACCG | GmCUCCCmUmGmAmAm | |
| | | | UUGCUACAAUA | AmCmCGUUmGmCUAmC | |
| | | | AGGCCGUCGAA | AAU*AAGmGmCCmGmU | |
| | | | AGAUGUGCCGC | mCmGmAmAmAmGmAmU | |
| | | | AACGCUCUGCC | GUGCmCGmCAAmCGCU | |
| | | | UUCUGGCAUCG | CUmGmCCmUmUmCmUG | |
| | | | UU | GCAUCG*mU*mU | |
| G025899 | 693 | GAACCUCUAAG | GAACCUCUAAG | mG*mA*mA*mCmCUCm | chr19: 55115590- |
| | | GUUUGCUUACG | GUUUGCUUACG | UmAAmGGmUUUGCmUU | 55115614 |
| | | AU | AUGUUGUAGCU | ACmGAUmGUUGmUmAm | |
| | | | CCCUGAAACCG | GmCUCCCmUmGmAmAm | |
| | | | UUGCUACAAUA | AmCmCGUUmGmCUAmC | |
| | | | AGGCCGUCGAA | AAU*AAGmGmCCmGmU | |
| | | | AGAUGUGCCGC | mCmGmAmAmAmGmAmU | |
| | | | AACGCUCUGCC | GUGCmCGmCAAmCGCU | |
| | | | UUCUGGCAUCG | CUmGmCCmUmUmCmUG | |
| | | | UU | GCAUCG*mU*mU | |
| G025900* | 694 | CCUGGAGCCAU | CCUGGAGCCAU | mC*mC*mU*mGmGAGm | chr19: 55115615- |
| | | CUCUCUCCUUG | CUCUCUCCUUG | CmCAmUCmUCUCUmCC | 55115639 |
| | | CC | CCGUUGUAGCU | UUmGCCmGUUGmUmAm | |
| | | | CCCUGAAACCG | GmCUCCCmUmGmAmAm | |
| | | | UUGCUACAAUA | AmCmCGUUmGmCUAmC | |
| | | | AGGCCGUCGAA | AAU*AAGmGmCCmGmU | |
| | | | AGAUGUGCCGC | mCmGmAmAmAmGmAmU | |
| | | | AACGCUCUGCC | GUGCmCGmCAAmCGCU | |
| | | | UUCUGGCAUCG | CUmGmCCmUmUmCmUG | |
| | | | UU | GCAUCG*mU*mU | |
| G025901 | 695 | CACCCCCAUUU | CACCCCCAUUU | mC*mA*mC*mCmCCCm | chr19: 55115626- |
| | | CCUGGAGCCAU | CCUGGAGCCAU | AmUUmUCmCUGGAmGC | 55115650 |
| | | CU | CUGUUGUAGCU | CAmUCUmGUUGmUmAm | |
| | | | CCCUGAAACCG | GmCUCCCmUmGmAmAm | |
| | | | UUGCUACAAUA | AmCmCGUUmGmCUAmC | |
| | | | AGGCCGUCGAA | AAU*AAGmGmCCmGmU | |
| | | | AGAUGUGCCGC | mCmGmAmAmAmGmAmU | |
| | | | AACGCUCUGCC | GUGCmCGmCAAmCGCU | |
| | | | UUCUGGCAUCG | CUmGmCCmUmUmCmUG | |
| | | | UU | GCAUCG*mU*mU | |
| G025902* | 696 | UCUGGUGACAC | UCUGGUGACAC | mU*mC*mU*mGmGUGm | chr19: 55115636- |
| | | ACCCCCAUUUC | ACCCCCAUUUC | AmCAmCAmCCCCCmAU | 55115660 |
| | | CU | CUGUUGUAGCU | UUmCCUmGUUGmUmAm | |
| | | | CCCUGAAACCG | GmCUCCCmUmGmAmAm | |
| | | | UUGCUACAAUA | AmCmCGUUmGmCUAmC | |
| | | | AGGCCGUCGAA | AAU*AAGmGmCCmGmU | |
| | | | AGAUGUGCCGC | mCmGmAmAmAmGmAmU | |
| | | | AACGCUCUGCC | GUGCmCGmCAAmCGCU | |
| | | | UUCUGGCAUCG | CUmGmCCmUmUmCmUG | |
| | | | UU | GCAUCG*mU*mU | |
| G025903 | 697 | UUCCUUAUCUG | UUCCUUAUCUG | mU*mU*mC*mCmUUAm | chr19: 55115643- |
| | | GUGACACACCC | GUGACACACCC | UmCUmGGmUGACAmCA | 55115667 |
| | | CC | CCGUUGUAGCU | CCmCCCmGUUGmUmAm | |
| | | | CCCUGAAACCG | GmCUCCCmUmGmAmAm | |
| | | | UUGCUACAAUA | AmCmCGUUmGmCUAmC | |
| | | | AGGCCGUCGAA | AAU*AAGmGmCCmGmU | |
| | | | AGAUGUGCCGC | mCmGmAmAmAmGmAmU | |
| | | | AACGCUCUGCC | GUGCmCGmCAAmCGCU | |
| | | | UUCUGGCAUCG | CUmGmCCmUmUmCmUG | |
| | | | UU | GCAUCG*mU*mU | |
| G025904 | 698 | GGCAGAUUCCU | GGCAGAUUCCU | mG*mG*mC*mAmGAUm | chr19: 55115649- |
| | | UAUCUGGUGAC | UAUCUGGUGAC | UmCCmUUmAUCUGmGU | 55115673 |
| | | AC | ACGUUGUAGCU | GAmCACmGUUGmUmAm | |
| | | | CCCUGAAACCG | GmCUCCCmUmGmAmAm | |
| | | | UUGCUACAAUA | AmCmCGUUmGmCUAmC | |
| | | | AGGCCGUCGAA | AAU*AAGmGmCCmGmU | |
| | | | AGAUGUGCCGC | mCmGmAmAmAmGmAmU | |
| | | | AACGCUCUGCC | GUGCmCGmCAAmCGCU | |
| | | | UUCUGGCAUCG | CUmGmCCmUmUmCmUG | |
| | | | UU | GCAUCG*mU*mU | |
| G025905 | 699 | AGGCAGAUUCC | AGGCAGAUUCC | mA*mG*mG*mCmAGAm | chr19: 55115650- |
| | | UUAUCUGGUGA | UUAUCUGGUGA | UmUCmCUmUAUCUmGG | 55115674 |
| | | CA | CAGUUGUAGCU | UGmACAmGUUGmUmAm | |
| | | | CCCUGAAACCG | GmCUCCCmUmGmAmAm | |
| | | | UUGCUACAAUA | AmCmCGUUmGmCUAmC | |
| | | | AGGCCGUCGAA | AAU*AAGmGmCCmGmU | |
| | | | AGAUGUGCCGC | mCmGmAmAmAmGmAmU | |
| | | | AACGCUCUGCC | GUGCmCGmCAAmCGCU | |
| | | | UUCUGGCAUCG | CUmGmCCmUmUmCmUG | |
| | | | UU | GCAUCG*mU*mU | |
| G025906 | 700 | UAGGCAGAUUC | UAGGCAGAUUC | mU*mA*mG*mGmCAGm | chr19: 55115651- |
| | | CUUAUCUGGUG | CUUAUCUGGUG | AmUUmCCmUUAUCmUG | 55115675 |
| | | AC | ACGUUGUAGCU | GUmGACmGUUGmUmAm | |
| | | | CCCUGAAACCG | GmCUCCCmUmGmAmAm | |
| | | | UUGCUACAAUA | AmCmCGUUmGmCUAmC | |
| | | | AGGCCGUCGAA | AAU*AAGmGmCCmGmU | |
| | | | AGAUGUGCCGC | mCmGmAmAmAmGmAmU | |
| | | | AACGCUCUGCC | GUGCmCGmCAAmCGCU | |
| | | | UUCUGGCAUCG | CUmGmCCmUmUmCmUG | |
| | | | UU | GCAUCG*mU*mU | |
| G025907 | 701 | UUAGGCAGAUU | UUAGGCAGAUU | mU*mU*mA*mGmGCAm | chr19: 55115652- |
| | | CCUUAUCUGGU | CCUUAUCUGGU | GmAUmUCmCUUAUmCU | 55115676 |
| | | GA | GAGUUGUAGCU | GGmUGAmGUUGmUmAm | |
| | | | CCCUGAAACCG | GmCUCCCmUmGmAmAm | |
| | | | UUGCUACAAUA | AmCmCGUUmGmCUAmC | |
| | | | AGGCCGUCGAA | AAU*AAGmGmCCmGmU | |
| | | | AGAUGUGCCGC | mCmGmAmAmAmGmAmU | |
| | | | AACGCUCUGCC | GUGCmCGmCAAmCGCU | |
| | | | UUCUGGCAUCG | CUmGmCCmUmUmCmUG | |
| | | | UU | GCAUCG*mU*mU | |
| G025908 | 702 | CUAACCCCCAC | CUAACCCCCAC | mC*mU*mA*mAmCCCm | chr19: 55115669- |
| | | CUCCUGUUAGG | CUCCUGUUAGG | CmCAmCCmUCCUGmUU | 55115693 |
| | | CA | CAGUUGUAGCU | AGmGCAmGUUGmUmAm | |
| | | | CCCUGAAACCG | GmCUCCCmUmGmAmAm | |
| | | | UUGCUACAAUA | AmCmCGUUmGmCUAmC | |
| | | | AGGCCGUCGAA | AAU*AAGmGmCCmGmU | |
| | | | AGAUGUGCCGC | mCmGmAmAmAmGmAmU | |
| | | | AACGCUCUGCC | GUGCmCGmCAAmCGCU | |
| | | | UUCUGGCAUCG | CUmGmCCmUmUmCmUG | |
| | | | UU | GCAUCG*mU*mU | |
| G025909 | 703 | CUCCUGAUAUU | CUCCUGAUAUU | mC*mU*mC*mCmUGAm | chr19: 55115684- |
| | | GGGUCUAACCC | GGGUCUAACCC | UmAUmUGmGGUCUmAA | 55115708 |
| | | CC | CCGUUGUAGCU | CCmCCCmGUUGmUmAm | |
| | | | CCCUGAAACCG | GmCUCCCmUmGmAmAm | |
| | | | UUGCUACAAUA | AmCmCGUUmGmCUAmC | |
| | | | AGGCCGUCGAA | AAU*AAGmGmCCmGmU | |
| | | | AGAUGUGCCGC | mCmGmAmAmAmGmAmU | |
| | | | AACGCUCUGCC | GUGCmCGmCAAmCGCU | |
| | | | UUCUGGCAUCG | CUmGmCCmUmUmCmUG | |
| | | | UU | GCAUCG*mU*mU | |
| G025910 | 704 | AGUCUCCUGAU | AGUCUCCUGAU | mA*mG*mU*mCmUCCm | chr19: 55115687- |
| | | AUUGGGUCUAA | AUUGGGUCUAA | UmGAmUAmUUGGGmUC | 55115711 |
| | | CC | CCGUUGUAGCU | UAmACCmGUUGmUmAm | |
| | | | CCCUGAAACCG | GmCUCCCmUmGmAmAm | |
| | | | UUGCUACAAUA | AmCmCGUUmGmCUAmC | |
| | | | AGGCCGUCGAA | AAU*AAGmGmCCmGmU | |
| | | | AGAUGUGCCGC | mCmGmAmAmAmGmAmU | |
| | | | AACGCUCUGCC | GUGCmCGmCAAmCGCU | |
| | | | UUCUGGCAUCG | CUmGmCCmUmUmCmUG | |
| | | | UU | GCAUCG*mU*mU | |
| G025911 | 705 | CCUAGUCUCCU | CCUAGUCUCCU | mC*mC*mU*mAmGUCm | chr19: 55115690- |
| | | GAUAUUGGGUC | GAUAUUGGGUC | UmCCmUGmAUAUUmGG | 55115714 |
| | | UA | UAGUUGUAGCU | GUmCUAmGUUGmUmAm | |
| | | | CCCUGAAACCG | GmCUCCCmUmGmAmAm | |
| | | | UUGCUACAAUA | AmCmCGUUmGmCUAmC | |
| | | | AGGCCGUCGAA | AAU*AAGmGmCCmGmU | |
| | | | AGAUGUGCCGC | mCmGmAmAmAmGmAmU | |
| | | | AACGCUCUGCC | GUGCmCGmCAAmCGCU | |
| | | | UUCUGGCAUCG | CUmGmCCmUmUmCmUG | |
| | | | UU | GCAUCG*mU*mU | |
| G025912 | 706 | UCCUAGUCUCC | UCCUAGUCUCC | mU*mC*mC*mUmAGUm | chr19: 55115691- |
| | | UGAUAUUGGGU | UGAUAUUGGGU | CmUCmCUmGAUAUmUG | 55115715 |
| | | CU | CUGUUGUAGCU | GGmUCUmGUUGmUmAm | |
| | | | CCCUGAAACCG | GmCUCCCmUmGmAmAm | |
| | | | UUGCUACAAUA | AmCmCGUUmGmCUAmC | |
| | | | AGGCCGUCGAA | AAU*AAGmGmCCmGmU | |
| | | | AGAUGUGCCGC | mCmGmAmAmAmGmAmU | |
| | | | AACGCUCUGCC | GUGCmCGmCAAmCGCU | |
| | | | UUCUGGCAUCG | CUmGmCCmUmUmCmUG | |
| | | | UU | GCAUCG*mU*mU | |
| G025913 | 707 | UUCCUAGUCUC | UUCCUAGUCUC | mU*mU*mC*mCmUAGm | chr19: 55115692- |
| | | CUGAUAUUGGG | CUGAUAUUGGG | UmCUmCCmUGAUAmUU | 55115716 |
| | | UC | UCGUUGUAGCU | GGmGUCmGUUGmUmAm | |
| | | | CCCUGAAACCG | GmCUCCCmUmGmAmAm | |
| | | | UUGCUACAAUA | AmCmCGUUmGmCUAmC | |
| | | | AGGCCGUCGAA | AAU*AAGmGmCCmGmU | |
| | | | AGAUGUGCCGC | mCmGmAmAmAmGmAmU | |
| | | | AACGCUCUGCC | GUGCmCGmCAAmCGCU | |
| | | | UUCUGGCAUCG | CUmGmCCmUmUmCmUG | |
| | | | UU | GCAUCG*mU*mU | |
| G025914 | 708 | CUUCCUAGUCU | CUUCCUAGUCU | mC*mU*mU*mCmCUAm | chr19: 55115693- |
| | | CCUGAUAUUGG | CCUGAUAUUGG | GmUCmUCmCUGAUmAU | 55115717 |
| | | GU | GUGUUGUAGCU | UGmGGUmGUUGmUmAm | |
| | | | CCCUGAAACCG | GmCUCCCmUmGmAmAm | |
| | | | UUGCUACAAUA | AmCmCGUUmGmCUAmC | |
| | | | AGGCCGUCGAA | AAU*AAGmGmCCmGmU | |
| | | | AGAUGUGCCGC | mCmGmAmAmAmGmAmU | |
| | | | AACGCUCUGCC | GUGCmCGmCAAmCGCU | |
| | | | UUCUGGCAUCG | CUmGmCCmUmUmCmUG | |
| | | | UU | GCAUCG*mU*mU | |
| G025915 | 709 | CAUCCUUAGGC | CAUCCUUAGGC | mC*mA*mU*mCmCUUm | chr19: 55115710- |
| | | CUCCUCCUUCC | CUCCUCCUUCC | AmGGmCCmUCCUCmCU | 55115734 |
| | | UA | UAGUUGUAGCU | UCmCUAmGUUGmUmAm | |
| | | | CCCUGAAACCG | GmCUCCCmUmGmAmAm | |
| | | | UUGCUACAAUA | AmCmCGUUmGmCUAmC | |
| | | | AGGCCGUCGAA | AAU*AAGmGmCCmGmU | |
| | | | AGAUGUGCCGC | mCmGmAmAmAmGmAmU | |
| | | | AACGCUCUGCC | GUGCmCGmCAAmCGCU | |
| | | | UUCUGGCAUCG | CUmGmCCmUmUmCmUG | |
| | | | UU | GCAUCG*mU*mU | |
| G025916 | 710 | AAAAGCCCCAU | AAAAGCCCCAU | mA*mA*mA*mAmGCCm | chr19: 55115718- |
| | | CCUUAGGCCUC | CCUUAGGCCUC | CmCAmUCmCUUAGmGC | 55115742 |
| | | CU | CUGUUGUAGCU | CUmCCUmGUUGmUmAm | |
| | | | CCCUGAAACCG | GmCUCCCmUmGmAmAm | |
| | | | UUGCUACAAUA | AmCmCGUUmGmCUAmC | |
| | | | AGGCCGUCGAA | AAU*AAGmGmCCmGmU | |
| | | | AGAUGUGCCGC | mCmGmAmAmAmGmAmU | |
| | | | AACGCUCUGCC | GUGCmCGmCAAmCGCU | |
| | | | UUCUGGCAUCG | CUmGmCCmUmUmCmUG | |
| | | | UU | GCAUCG*mU*mU | |
| G025917 | 711 | GUGACAGAAAA | GUGACAGAAAA | mG*mU*mG*mAmCAGm | chr19: 55115725- |
| | | GCCCCAUCCUU | GCCCCAUCCUU | AmAAmAGmCCCCAmUC | 55115749 |
| | | AG | AGGUUGUAGCU | CUmUAGmGUUGmUmAm | |
| | | | CCCUGAAACCG | GmCUCCCmUmGmAmAm | |
| | | | UUGCUACAAUA | AmCmCGUUmGmCUAmC | |
| | | | AGGCCGUCGAA | AAU*AAGmGmCCmGmU | |
| | | | AGAUGUGCCGC | mCmGmAmAmAmGmAmU | |
| | | | AACGCUCUGCC | GUGCmCGmCAAmCGCU | |
| | | | UUCUGGCAUCG | CUmGmCCmUmUmCmUG | |
| | | | UU | GCAUCG*mU*mU | |
| G025918 | 712 | UUGGUGACAGA | UUGGUGACAGA | mU*mU*mG*mGmUGAm | chr19: 55115728- |
| | | AAAGCCCCAUC | AAAGCCCCAUC | CmAGmAAmAAGCCmCC | 55115752 |
| | | CU | CUGUUGUAGCU | AUmCCUmGUUGmUmAm | |
| | | | CCCUGAAACCG | GmCUCCCmUmGmAmAm | |
| | | | UUGCUACAAUA | AmCmCGUUmGmCUAmC | |
| | | | AGGCCGUCGAA | AAU*AAGmGmCCmGmU | |
| | | | AGAUGUGCCGC | mCmGmAmAmAmGmAmU | |
| | | | AACGCUCUGCC | GUGCmCGmCAAmCGCU | |
| | | | UUCUGGCAUCG | CUmGmCCmUmUmCmUG | |
| | | | UU | GCAUCG*mU*mU | |
| G025919 | 713 | GACAGGAUUGG | GACAGGAUUGG | mG*mA*mC*mAmGGAm | chr19: 55115735- |
| | | UGACAGAAAAG | UGACAGAAAAG | UmUGmGUmGACAGmAA | 55115759 |
| | | CC | CCGUUGUAGCU | AAmGCCmGUUGmUmAm | |
| | | | CCCUGAAACCG | GmCUCCCmUmGmAmAm | |
| | | | UUGCUACAAUA | AmCmCGUUmGmCUAmC | |
| | | | AGGCCGUCGAA | AAU*AAGmGmCCmGmU | |
| | | | AGAUGUGCCGC | mCmGmAmAmAmGmAmU | |
| | | | AACGCUCUGCC | GUGCmCGmCAAmCGCU | |
| | | | UUCUGGCAUCG | CUmGmCCmUmUmCmUG | |
| | | | UU | GCAUCG*mU*mU | |
| G025920 | 714 | UAGGGACAGGA | UAGGGACAGGA | mU*mA*mG*mGmGACm | chr19: 55115739- |
| | | UUGGUGACAGA | UUGGUGACAGA | AmGGmAUmUGGUGmAC | 55115763 |
| | | AA | AAGUUGUAGCU | AGmAAAmGUUGmUmAm | |
| | | | CCCUGAAACCG | GmCUCCCmUmGmAmAm | |
| | | | UUGCUACAAUA | AmCmCGUUmGmCUAmC | |
| | | | AGGCCGUCGAA | AAU*AAGmGmCCmGmU | |
| | | | AGAUGUGCCGC | mCmGmAmAmAmGmAmU | |
| | | | AACGCUCUGCC | GUGCmCGmCAAmCGCU | |
| | | | UUCUGGCAUCG | CUmGmCCmUmUmCmUG | |
| | | | UU | GCAUCG*mU*mU | |
| G025921 | 715 | CUAGGGACAGG | CUAGGGACAGG | mC*mU*mA*mGmGGAm | chr19: 55115740- |
| | | AUUGGUGACAG | AUUGGUGACAG | CmAGmGAmUUGGUmGA | 55115764 |
| | | AA | AAGUUGUAGCU | CAmGAAmGUUGmUmAm | |
| | | | CCCUGAAACCG | GmCUCCCmUmGmAmAm | |
| | | | UUGCUACAAUA | AmCmCGUUmGmCUAmC | |
| | | | AGGCCGUCGAA | AAU*AAGmGmCCmGmU | |
| | | | AGAUGUGCCGC | mCmGmAmAmAmGmAmU | |
| | | | AACGCUCUGCC | GUGCmCGmCAAmCGCU | |
| | | | UUCUGGCAUCG | CUmGmCCmUmUmCmUG | |
| | | | UU | GCAUCG*mU*mU | |
| G025922 | 716 | ACUAGGGACAG | ACUAGGGACAG | mA*mC*mU*mAmGGGm | chr19: 55115741- |
| | | GAUUGGUGACA | GAUUGGUGACA | AmCAmGGmAUUGGmUG | 55115765 |
| | | GA | GAGUUGUAGCU | ACmAGAmGUUGmUmAm | |
| | | | CCCUGAAACCG | GmCUCCCmUmGmAmAm | |
| | | | UUGCUACAAUA | AmCmCGUUmGmCUAmC | |
| | | | AGGCCGUCGAA | AAU*AAGmGmCCmGmU | |
| | | | AGAUGUGCCGC | mCmGmAmAmAmGmAmU | |
| | | | AACGCUCUGCC | GUGCmCGmCAAmCGCU | |
| | | | UUCUGGCAUCG | CUmGmCCmUmUmCmUG | |
| | | | UU | GCAUCG*mU*mU | |
| G025923 | 717 | CUGGGUACUUU | CUGGGUACUUU | mC*mU*mG*mGmGUAm | chr19: 55115782- |
| | | UAUCUGUCCCC | UAUCUGUCCCC | CmUUmUUmAUCUGmUC | 55115806 |
| | | UC | UCGUUGUAGCU | CCmCUCmGUUGmUmAm | |
| | | | CCCUGAAACCG | GmCUCCCmUmGmAmAm | |
| | | | UUGCUACAAUA | AmCmCGUUmGmCUAmC | |
| | | | AGGCCGUCGAA | AAU*AAGmGmCCmGmU | |
| | | | AGAUGUGCCGC | mCmGmAmAmAmGmAmU | |
| | | | AACGCUCUGCC | GUGCmCGmCAAmCGCU | |
| | | | UUCUGGCAUCG | CUmGmCCmUmUmCmUG | |
| | | | UU | GCAUCG*mU*mU | |
| G025924 | 718 | UCUGGGUACUU | UCUGGGUACUU | mU*mC*mU*mGmGGUm | chr19: 55115783- |
| | | UUAUCUGUCCC | UUAUCUGUCCC | AmCUmUUmUAUCUmGU | 55115807 |
| | | CU | CUGUUGUAGCU | CCmCCUmGUUGmUmAm | |
| | | | CCCUGAAACCG | GmCUCCCmUmGmAmAm | |
| | | | UUGCUACAAUA | AmCmCGUUmGmCUAmC | |
| | | | AGGCCGUCGAA | AAU*AAGmGmCCmGmU | |
| | | | AGAUGUGCCGC | mCmGmAmAmAmGmAmU | |
| | | | AACGCUCUGCC | GUGCmCGmCAAmCGCU | |
| | | | UUCUGGCAUCG | CUmGmCCmUmUmCmUG | |
| | | | UU | GCAUCG*mU*mU | |
| G025925 | 719 | UUCUGGGUACU | UUCUGGGUACU | mU*mU*mC*mUmGGGm | chr19: 55115784- |
| | | UUUAUCUGUCC | UUUAUCUGUCC | UmACmUUmUUAUCmUG | 55115808 |
| | | CC | CCGUUGUAGCU | UCmCCCmGUUGmUmAm | |
| | | | CCCUGAAACCG | GmCUCCCmUmGmAmAm | |
| | | | UUGCUACAAUA | AmCmCGUUmGmCUAmC | |
| | | | AGGCCGUCGAA | AAU*AAGmGmCCmGmU | |
| | | | AGAUGUGCCGC | mCmGmAmAmAmGmAmU | |
| | | | AACGCUCUGCC | GUGCmCGmCAAmCGCU | |
| | | | UUCUGGCAUCG | CUmGmCCmUmUmCmUG | |
| | | | UU | GCAUCG*mU*mU | |
| G025926 | 720 | UGGUUCUGGGU | UGGUUCUGGGU | mU*mG*mG*mUmUCUm | chr19: 55115787- |
| | | ACUUUUAUCUG | ACUUUUAUCUG | GmGGmUAmCUUUUmAU | 55115811 |
| | | UC | UCGUUGUAGCU | CUmGUCmGUUGmUmAm | |
| | | | CCCUGAAACCG | GmCUCCCmUmGmAmAm | |
| | | | UUGCUACAAUA | AmCmCGUUmGmCUAmC | |
| | | | AGGCCGUCGAA | AAU*AAGmGmCCmGmU | |
| | | | AGAUGUGCCGC | mCmGmAmAmAmGmAmU | |
| | | | AACGCUCUGCC | GUGCmCGmCAAmCGCU | |
| | | | UUCUGGCAUCG | CUmGmCCmUmUmCmUG | |
| | | | UU | GCAUCG*mU*mU | |
| G025927 | 721 | CUCUGGUUCUG | CUCUGGUUCUG | mC*mU*mC*mUmGGUm | chr19: 55115790- |
| | | GGUACUUUUAU | GGUACUUUUAU | UmCUmGGmGUACUmUU | 55115814 |
| | | CU | CUGUUGUAGCU | UAmUCUmGUUGmUmAm | |
| | | | CCCUGAAACCG | GmCUCCCmUmGmAmAm | |
| | | | UUGCUACAAUA | AmCmCGUUmGmCUAmC | |
| | | | AGGCCGUCGAA | AAU*AAGmGmCCmGmU | |
| | | | AGAUGUGCCGC | mCmGmAmAmAmGmAmU | |
| | | | AACGCUCUGCC | GUGCmCGmCAAmCGCU | |
| | | | UUCUGGCAUCG | CUmGmCCmUmUmCmUG | |
| | | | UU | GCAUCG*mU*mU | |
| G025928 | 722 | GCUCUGGUUCU | GCUCUGGUUCU | mG*mC*mU*mCmUGGm | chr19: 55115791- |
| | | GGGUACUUUUA | GGGUACUUUUA | UmUCmUGmGGUACmUU | 55115815 |
| | | UC | UCGUUGUAGCU | UUmAUCmGUUGmUmAm | |
| | | | CCCUGAAACCG | GmCUCCCmUmGmAmAm | |
| | | | UUGCUACAAUA | AmCmCGUUmGmCUAmC | |
| | | | AGGCCGUCGAA | AAU*AAGmGmCCmGmU | |
| | | | AGAUGUGCCGC | mCmGmAmAmAmGmAmU | |
| | | | AACGCUCUGCC | GUGCmCGmCAAmCGCU | |
| | | | UUCUGGCAUCG | CUmGmCCmUmUmCmUG | |
| | | | UU | GCAUCG*mU*mU | |
| G025929 | 723 | GGCUCUGGUUC | GGCUCUGGUUC | mG*mG*mC*mUmCUGm | chr19: 55115792- |
| | | UGGGUACUUUU | UGGGUACUUUU | GmUUmCUmGGGUAmCU | 55115816 |
| | | AU | AUGUUGUAGCU | UUmUAUmGUUGmUmAm | |
| | | | CCCUGAAACCG | GmCUCCCmUmGmAmAm | |
| | | | UUGCUACAAUA | AmCmCGUUmGmCUAmC | |
| | | | AGGCCGUCGAA | AAU*AAGmGmCCmGmU | |
| | | | AGAUGUGCCGC | mCmGmAmAmAmGmAmU | |
| | | | AACGCUCUGCC | GUGCmCGmCAAmCGCU | |
| | | | UUCUGGCAUCG | CUmGmCCmUmUmCmUG | |
| | | | UU | GCAUCG*mU*mU | |
| G025930 | 724 | GAGCUGGGACC | GAGCUGGGACC | mG*mA*mG*mCmUGGm | chr19: 55115831- |
| | | ACCUUAUAUUC | ACCUUAUAUUC | GmACmCAmCCUUAmUA | 55115855 |
| | | CC | CCGUUGUAGCU | UUmCCCmGUUGmUmAm | |
| | | | CCCUGAAACCG | GmCUCCCmUmGmAmAm | |
| | | | UUGCUACAAUA | AmCmCGUUmGmCUAmC | |
| | | | AGGCCGUCGAA | AAU*AAGmGmCCmGmU | |
| | | | AGAUGUGCCGC | mCmGmAmAmAmGmAmU | |
| | | | AACGCUCUGCC | GUGCmCGmCAAmCGCU | |
| | | | UUCUGGCAUCG | CUmGmCCmUmUmCmUG | |
| | | | UU | GCAUCG*mU*mU | |
| G025931 | 725 | GUCCCCGAGCU | GUCCCCGAGCU | mG*mU*mC*mCmCCGm | chr19: 55115837- |
| | | GGGACCACCUU | GGGACCACCUU | AmGCmUGmGGACCmAC | 55115861 |
| | | AU | AUGUUGUAGCU | CUmUAUmGUUGmUmAm | |
| | | | CCCUGAAACCG | GmCUCCCmUmGmAmAm | |
| | | | UUGCUACAAUA | AmCmCGUUmGmCUAmC | |
| | | | AGGCCGUCGAA | AAU*AAGmGmCCmGmU | |
| | | | AGAUGUGCCGC | mCmGmAmAmAmGmAmU | |
| | | | AACGCUCUGCC | GUGCmCGmCAAmCGCU | |
| | | | UUCUGGCAUCG | CUmGmCCmUmUmCmUG | |
| | | | UU | GCAUCG*mU*mU | |
| G025932 | 726 | UGUCCCCGAGC | UGUCCCCGAGC | mU*mG*mU*mCmCCCm | chr19: 55115838- |
| | | UGGGACCACCU | UGGGACCACCU | GmAGmCUmGGGACmCA | 55115862 |
| | | UA | UAGUUGUAGCU | CCmUUAmGUUGmUmAm | |
| | | | CCCUGAAACCG | GmCUCCCmUmGmAmAm | |
| | | | UUGCUACAAUA | AmCmCGUUmGmCUAmC | |
| | | | AGGCCGUCGAA | AAU*AAGmGmCCmGmU | |
| | | | AGAUGUGCCGC | mCmGmAmAmAmGmAmU | |
| | | | AACGCUCUGCC | GUGCmCGmCAAmCGCU | |
| | | | UUCUGGCAUCG | CUmGmCCmUmUmCmUG | |
| | | | UU | GCAUCG*mU*mU | |
| G025933 | 727 | CCAGGGAUCCU | CCAGGGAUCCU | mC*mC*mA*mGmGGAm | chr19: 55115850- |
| | | GUGUCCCCGAG | GUGUCCCCGAG | UmCCmUGmUGUCCmCC | 55115874 |
| | | CU | CUGUUGUAGCU | GAmGCUmGUUGmUmAm | |
| | | | CCCUGAAACCG | GmCUCCCmUmGmAmAm | |
| | | | UUGCUACAAUA | AmCmCGUUmGmCUAmC | |
| | | | AGGCCGUCGAA | AAU*AAGmGmCCmGmU | |
| | | | AGAUGUGCCGC | mCmGmAmAmAmGmAmU | |
| | | | AACGCUCUGCC | GUGCmCGmCAAmCGCU | |
| | | | UUCUGGCAUCG | CUmGmCCmUmUmCmUG | |
| | | | UU | GCAUCG*mU*mU | |
| G025934 | 728 | GUUUGCUGCCU | GUUUGCUGCCU | mG*mU*mU*mUmGCUm | chr19: 55115861- |
| | | CCAGGGAUCCU | CCAGGGAUCCU | GmCCmUCmCAGGGmAU | 55115885 |
| | | GU | GUGUUGUAGCU | CCmUGUmGUUGmUmAm | |
| | | | CCCUGAAACCG | GmCUCCCmUmGmAmAm | |
| | | | UUGCUACAAUA | AmCmCGUUmGmCUAmC | |
| | | | AGGCCGUCGAA | AAU*AAGmGmCCmGmU | |
| | | | AGAUGUGCCGC | mCmGmAmAmAmGmAmU | |
| | | | AACGCUCUGCC | GUGCmCGmCAAmCGCU | |
| | | | UUCUGGCAUCG | CUmGmCCmUmUmCmUG | |
| | | | UU | GCAUCG*mU*mU | |
| G025935 | 729 | UGUUUGCUGCC | UGUUUGCUGCC | mU*mG*mU*mUmUGCm | chr19: 55115862- |
| | | UCCAGGGAUCC | UCCAGGGAUCC | UmGCmCUmCCAGGmGA | 55115886 |
| | | UG | UGGUUGUAGCU | UCmCUGmGUUGmUmAm | |
| | | | CCCUGAAACCG | GmCUCCCmUmGmAmAm | |
| | | | UUGCUACAAUA | AmCmCGUUmGmCUAmC | |
| | | | AGGCCGUCGAA | AAU*AAGmGmCCmGmU | |
| | | | AGAUGUGCCGC | mCmGmAmAmAmGmAmU | |
| | | | AACGCUCUGCC | GUGCmCGmCAAmCGCU | |
| | | | UUCUGGCAUCG | CUmGmCCmUmUmCmUG | |
| | | | UU | GCAUCG*mU*mU | |
| G025936 | 730 | AUGUUUGCUGC | AUGUUUGCUGC | mA*mU*mG*mUmUUGm | chr19: 55115863- |
| | | CUCCAGGGAUC | CUCCAGGGAUC | CmUGmCCmUCCAGmGG | 55115887 |
| | | CU | CUGUUGUAGCU | AUmCCUmGUUGmUmAm | |
| | | | CCCUGAAACCG | GmCUCCCmUmGmAmAm | |
| | | | UUGCUACAAUA | AmCmCGUUmGmCUAmC | |
| | | | AGGCCGUCGAA | AAU*AAGmGmCCmGmU | |
| | | | AGAUGUGCCGC | mCmGmAmAmAmGmAmU | |
| | | | AACGCUCUGCC | GUGCmCGmCAAmCGCU | |
| | | | UUCUGGCAUCG | CUmGmCCmUmUmCmUG | |
| | | | UU | GCAUCG*mU*mU | |
| G025937 | 731 | GGACAGCAUGU | GGACAGCAUGU | mG*mG*mA*mCmAGCm | chr19: 55115870- |
| | | UUGCUGCCUCC | UUGCUGCCUCC | AmUGmUUmUGCUGmCC | 55115894 |
| | | AG | AGGUUGUAGCU | UCmCAGmGUUGmUmAm | |
| | | | CCCUGAAACCG | GmCUCCCmUmGmAmAm | |
| | | | UUGCUACAAUA | AmCmCGUUmGmCUAmC | |
| | | | AGGCCGUCGAA | AAU*AAGmGmCCmGmU | |
| | | | AGAUGUGCCGC | mCmGmAmAmAmGmAmU | |
| | | | AACGCUCUGCC | GUGCmCGmCAAmCGCU | |
| | | | UUCUGGCAUCG | CUmGmCCmUmUmCmUG | |
| | | | UU | GCAUCG*mU*mU | |
| G025938 | 732 | CCACUUCAGGA | CCACUUCAGGA | mC*mC*mA*mCmUUCm | chr19: 55115878- |
| | | CAGCAUGUUUG | CAGCAUGUUUG | AmGGmACmAGCAUmGU | 55115902 |
| | | CU | CUGUUGUAGCU | UUmGCUmGUUGmUmAm | |
| | | | CCCUGAAACCG | GmCUCCCmUmGmAmAm | |
| | | | UUGCUACAAUA | AmCmCGUUmGmCUAmC | |
| | | | AGGCCGUCGAA | AAU*AAGmGmCCmGmU | |
| | | | AGAUGUGCCGC | mCmGmAmAmAmGmAmU | |
| | | | AACGCUCUGCC | GUGCmCGmCAAmCGCU | |
| | | | UUCUGGCAUCG | CUmGmCCmUmUmCmUG | |
| | | | UU | GCAUCG*mU*mU | |
| G025939 | 733 | UGUCCACUUCA | UGUCCACUUCA | mU*mG*mU*mCmCACm | chr19: 55115881- |
| | | GGACAGCAUGU | GGACAGCAUGU | UmUCmAGmGACAGmCA | 55115905 |
| | | UU | UUGUUGUAGCU | UGmUUUmGUUGmUmAm | |
| | | | CCCUGAAACCG | GmCUCCCmUmGmAmAm | |
| | | | UUGCUACAAUA | AmCmCGUUmGmCUAmC | |
| | | | AGGCCGUCGAA | AAU*AAGmGmCCmGmU | |
| | | | AGAUGUGCCGC | mCmGmAmAmAmGmAmU | |
| | | | AACGCUCUGCC | GUGCmCGmCAAmCGCU | |
| | | | UUCUGGCAUCG | CUmGmCCmUmUmCmUG | |
| | | | UU | GCAUCG*mU*mU | |
| G025940 | 734 | CUUCUUCCUCC | CUUCUUCCUCC | mC*mU*mU*mCmUUCm | chr19: 55115906- |
| | | AACCCGGGCCC | AACCCGGGCCC | CmUCmCAmACCCGmGG | 55115930 |
| | | CU | CUGUUGUAGCU | CCmCCUmGUUGmUmAm | |
| | | | CCCUGAAACCG | GmCUCCCmUmGmAmAm | |
| | | | UUGCUACAAUA | AmCmCGUUmGmCUAmC | |
| | | | AGGCCGUCGAA | AAU*AAGmGmCCmGmU | |
| | | | AGAUGUGCCGC | mCmGmAmAmAmGmAmU | |
| | | | AACGCUCUGCC | GUGCmCGmCAAmCGCU | |
| | | | UUCUGGCAUCG | CUmGmCCmUmUmCmUG | |
| | | | UU | GCAUCG*mU*mU | |
| G025941 | 735 | UCAGCUAGUCU | UCAGCUAGUCU | mU*mC*mA*mGmCUAm | chr19: 55115915- |
| | | UCUUCCUCCAA | UCUUCCUCCAA | GmUCmUUmCUUCCmUC | 55115939 |
| | | CC | CCGUUGUAGCU | CAmACCmGUUGmUmAm | |
| | | | CCCUGAAACCG | GmCUCCCmUmGmAmAm | |
| | | | UUGCUACAAUA | AmCmCGUUmGmCUAmC | |
| | | | AGGCCGUCGAA | AAU*AAGmGmCCmGmU | |
| | | | AGAUGUGCCGC | mCmGmAmAmAmGmAmU | |
| | | | AACGCUCUGCC | GUGCmCGmCAAmCGCU | |
| | | | UUCUGGCAUCG | CUmGmCCmUmUmCmUG | |
| | | | UU | GCAUCG*mU*mU | |
| G025942 | 736 | AGAGCUCAGCU | AGAGCUCAGCU | mA*mG*mA*mGmCUCm | chr19: 55115920- |
| | | AGUCUUCUUCC | AGUCUUCUUCC | AmGCmUAmGUCUUmCU | 55115944 |
| | | UC | UCGUUGUAGCU | UCmCUCmGUUGmUmAm | |
| | | | CCCUGAAACCG | GmCUCCCmUmGmAmAm | |
| | | | UUGCUACAAUA | AmCmCGUUmGmCUAmC | |
| | | | AGGCCGUCGAA | AAU*AAGmGmCCmGmU | |
| | | | AGAUGUGCCGC | mCmGmAmAmAmGmAmU | |
| | | | AACGCUCUGCC | GUGCmCGmCAAmCGCU | |
| | | | UUCUGGCAUCG | CUmGmCCmUmUmCmUG | |
| | | | UU | GCAUCG*mU*mU | |
| G025943 | 737 | GAGAGCUCAGC | GAGAGCUCAGC | mG*mA*mG*mAmGCUm | chr19: 55115921- |
| | | UAGUCUUCUUC | UAGUCUUCUUC | CmAGmCUmAGUCUmUC | 55115945 |
| | | CU | CUGUUGUAGCU | UUmCCUmGUUGmUmAm | |
| | | | CCCUGAAACCG | GmCUCCCmUmGmAmAm | |
| | | | UUGCUACAAUA | AmCmCGUUmGmCUAmC | |
| | | | AGGCCGUCGAA | AAU*AAGmGmCCmGmU | |
| | | | AGAUGUGCCGC | mCmGmAmAmAmGmAmU | |
| | | | AACGCUCUGCC | GUGCmCGmCAAmCGCU | |
| | | | UUCUGGCAUCG | CUmGmCCmUmUmCmUG | |
| | | | UU | GCAUCG*mU*mU | |
| G025944 | 738 | GUCCGAGAGCU | GUCCGAGAGCU | mG*mU*mC*mCmGAGm | chr19: 55115925- |
| | | CAGCUAGUCUU | CAGCUAGUCUU | AmGCmUCmAGCUAmGU | 55115949 |
| | | CU | CUGUUGUAGCU | CUmUCUmGUUGmUmAm | |
| | | | CCCUGAAACCG | GmCUCCCmUmGmAmAm | |
| | | | UUGCUACAAUA | AmCmCGUUmGmCUAmC | |
| | | | AGGCCGUCGAA | AAU*AAGmGmCCmGmU | |
| | | | AGAUGUGCCGC | mCmGmAmAmAmGmAmU | |
| | | | AACGCUCUGCC | GUGCmCGmCAAmCGCU | |
| | | | UUCUGGCAUCG | CUmGmCCmUmUmCmUG | |
| | | | UU | GCAUCG*mU*mU | |
| G025945 | 739 | GCCCCCUGUCA | GCCCCCUGUCA | mG*mC*mC*mCmCCUm | chr19: 55115951- |
| | | UGGCAUCUUCC | UGGCAUCUUCC | GmUCmAUmGGCAUmCU | 55115975 |
| | | AG | AGGUUGUAGCU | UCmCAGmGUUGmUmAm | |
| | | | CCCUGAAACCG | GmCUCCCmUmGmAmAm | |
| | | | UUGCUACAAUA | AmCmCGUUmGmCUAmC | |
| | | | AGGCCGUCGAA | AAU*AAGmGmCCmGmU | |
| | | | AGAUGUGCCGC | mCmGmAmAmAmGmAmU | |
| | | | AACGCUCUGCC | GUGCmCGmCAAmCGCU | |
| | | | UUCUGGCAUCG | CUmGmCCmUmUmCmUG | |
| | | | UU | GCAUCG*mU*mU | |
| G025946 | 740 | CUCUUCCAGCC | CUCUUCCAGCC | mC*mU*mC*mUmUCCm | chr19: 55115959- |
| | | CCCUGUCAUGG | CCCUGUCAUGG | AmGCmCCmCCUGUmCA | 55115983 |
| | | CA | CAGUUGUAGCU | UGmGCAmGUUGmUmAm | |
| | | | CCCUGAAACCG | GmCUCCCmUmGmAmAm | |
| | | | UUGCUACAAUA | AmCmCGUUmGmCUAmC | |
| | | | AGGCCGUCGAA | AAU*AAGmGmCCmGmU | |
| | | | AGAUGUGCCGC | mCmGmAmAmAmGmAmU | |
| | | | AACGCUCUGCC | GUGCmCGmCAAmCGCU | |
| | | | UUCUGGCAUCG | CUmGmCCmUmUmCmUG | |
| | | | UU | GCAUCG*mU*mU | |
| G025947 | 741 | CUCUAGUCUGU | CUCUAGUCUGU | mC*mU*mC*mUmAGUm | chr19: 55115975- |
| | | GCUAGCUCUUC | GCUAGCUCUUC | CmUGmUGmCUAGCmUC | 55115999 |
| | | CA | CAGUUGUAGCU | UUmCCAmGUUGmUmAm | |
| | | | CCCUGAAACCG | GmCUCCCmUmGmAmAm | |
| | | | UUGCUACAAUA | AmCmCGUUmGmCUAmC | |
| | | | AGGCCGUCGAA | AAU*AAGmGmCCmGmU | |
| | | | AGAUGUGCCGC | mCmGmAmAmAmGmAmU | |
| | | | AACGCUCUGCC | GUGCmCGmCAAmCGCU | |
| | | | UUCUGGCAUCG | CUmGmCCmUmUmCmUG | |
| | | | UU | GCAUCG*mU*mU | |
| G025948 | 742 | UCUCUAGUCUG | UCUCUAGUCUG | mU*mC*mU*mCmUAGm | chr19: 55115976- |
| | | UGCUAGCUCUU | UGCUAGCUCUU | UmCUmGUmGCUAGmCU | 55116000 |
| | | CC | CCGUUGUAGCU | CUmUCCmGUUGmUmAm | |
| | | | CCCUGAAACCG | GmCUCCCmUmGmAmAm | |
| | | | UUGCUACAAUA | AmCmCGUUmGmCUAmC | |
| | | | AGGCCGUCGAA | AAU*AAGmGmCCmGmU | |
| | | | AGAUGUGCCGC | mCmGmAmAmAmGmAmU | |
| | | | AACGCUCUGCC | GUGCmCGmCAAmCGCU | |
| | | | UUCUGGCAUCG | CUmGmCCmUmUmCmUG | |
| | | | UU | GCAUCG*mU*mU | |
| G025949 | 743 | CUCUCUAGUCU | CUCUCUAGUCU | mC*mU*mC*mUmCUAm | chr19: 55115977- |
| | | GUGCUAGCUCU | GUGCUAGCUCU | GmUCmUGmUGCUAmGC | 55116001 |
| | | UC | UCGUUGUAGCU | UCmUUCmGUUGmUmAm | |
| | | | CCCUGAAACCG | GmCUCCCmUmGmAmAm | |
| | | | UUGCUACAAUA | AmCmCGUUmGmCUAmC | |
| | | | AGGCCGUCGAA | AAU*AAGmGmCCmGmU | |
| | | | AGAUGUGCCGC | mCmGmAmAmAmGmAmU | |
| | | | AACGCUCUGCC | GUGCmCGmCAAmCGCU | |
| | | | UUCUGGCAUCG | CUmGmCCmUmUmCmUG | |
| | | | UU | GCAUCG*mU*mU | |
| G025950 | 744 | CCUCUCUAGUC | CCUCUCUAGUC | mC*mC*mU*mCmUCUm | chr19: 55115978- |
| | | UGUGCUAGCUC | UGUGCUAGCUC | AmGUmCUmGUGCUmAG | 55116002 |
| | | UU | UUGUUGUAGCU | CUmCUUmGUUGmUmAm | |
| | | | CCCUGAAACCG | GmCUCCCmUmGmAmAm | |
| | | | UUGCUACAAUA | AmCmCGUUmGmCUAmC | |
| | | | AGGCCGUCGAA | AAU*AAGmGmCCmGmU | |
| | | | AGAUGUGCCGC | mCmGmAmAmAmGmAmU | |
| | | | AACGCUCUGCC | GUGCmCGmCAAmCGCU | |
| | | | UUCUGGCAUCG | CUmGmCCmUmUmCmUG | |
| | | | UU | GCAUCG*mU*mU | |
| G025951 | 745 | CUUACCUCUCU | CUUACCUCUCU | mC*mU*mU*mAmCCUm | chr19: 55115982- |
| | | AGUCUGUGCUA | AGUCUGUGCUA | CmUCmUAmGUCUGmUG | 55116006 |
| | | GC | GCGUUGUAGCU | CUmAGCmGUUGmUmAm | |
| | | | CCCUGAAACCG | GmCUCCCmUmGmAmAm | |
| | | | UUGCUACAAUA | AmCmCGUUmGmCUAmC | |
| | | | AGGCCGUCGAA | AAU*AAGmGmCCmGmU | |
| | | | AGAUGUGCCGC | mCmGmAmAmAmGmAmU | |
| | | | AACGCUCUGCC | GUGCmCGmCAAmCGCU | |
| | | | UUCUGGCAUCG | CUmGmCCmUmUmCmUG | |
| | | | UU | GCAUCG*mU*mU | |
| G025952 | 746 | CAUUUGGGCAG | CAUUUGGGCAG | mC*mA*mU*mUmUGGm | chr19: 55116006- |
| | | CUCCCCUACCC | CUCCCCUACCC | GmCAmGCmUCCCCmUA | 55116030 |
| | | CC | CCGUUGUAGCU | CCmCCCmGUUGmUmAm | |
| | | | CCCUGAAACCG | GmCUCCCmUmGmAmAm | |
| | | | UUGCUACAAUA | AmCmCGUUmGmCUAmC | |
| | | | AGGCCGUCGAA | AAU*AAGmGmCCmGmU | |
| | | | AGAUGUGCCGC | mCmGmAmAmAmGmAmU | |
| | | | AACGCUCUGCC | GUGCmCGmCAAmCGCU | |
| | | | UUCUGGCAUCG | CUmGmCCmUmUmCmUG | |
| | | | UU | GCAUCG*mU*mU | |
| G025953 | 747 | CUCCUUUCAUU | CUCCUUUCAUU | mC*mU*mC*mCmUUUm | chr19: 55116013- |
| | | UGGGCAGCUCC | UGGGCAGCUCC | CmAUmUUmGGGCAmGC | 55116037 |
| | | CC | CCGUUGUAGCU | UCmCCCmGUUGmUmAm | |
| | | | CCCUGAAACCG | GmCUCCCmUmGmAmAm | |
| | | | UUGCUACAAUA | AmCmCGUUmGmCUAmC | |
| | | | AGGCCGUCGAA | AAU*AAGmGmCCmGmU | |
| | | | AGAUGUGCCGC | mCmGmAmAmAmGmAmU | |
| | | | AACGCUCUGCC | GUGCmCGmCAAmCGCU | |
| | | | UUCUGGCAUCG | CUmGmCCmUmUmCmUG | |
| | | | UU | GCAUCG*mU*mU | |
| G025954 | 748 | ACUCCUUUCAU | ACUCCUUUCAU | mA*mC*mU*mCmCUUm | chr19: 55116014- |
| | | UUGGGCAGCUC | UUGGGCAGCUC | UmCAmUUmUGGGCmAG | 55116038 |
| | | CC | CCGUUGUAGCU | CUmCCCmGUUGmUmAm | |
| | | | CCCUGAAACCG | GmCUCCCmUmGmAmAm | |
| | | | UUGCUACAAUA | AmCmCGUUmGmCUAmC | |
| | | | AGGCCGUCGAA | AAU*AAGmGmCCmGmU | |
| | | | AGAUGUGCCGC | mCmGmAmAmAmGmAmU | |
| | | | AACGCUCUGCC | GUGCmCGmCAAmCGCU | |
| | | | UUCUGGCAUCG | CUmGmCCmUmUmCmUG | |
| | | | UU | GCAUCG*mU*mU | |
| G025955 | 749 | CACUCCUUUCA | CACUCCUUUCA | mC*mA*mC*mUmCCUm | chr19: 55116015- |
| | | UUUGGGCAGCU | UUUGGGCAGCU | UmUCmAUmUUGGGmCA | 55116039 |
| | | CC | CCGUUGUAGCU | GCmUCCmGUUGmUmAm | |
| | | | CCCUGAAACCG | GmCUCCCmUmGmAmAm | |
| | | | UUGCUACAAUA | AmCmCGUUmGmCUAmC | |
| | | | AGGCCGUCGAA | AAU*AAGmGmCCmGmU | |
| | | | AGAUGUGCCGC | mCmGmAmAmAmGmAmU | |
| | | | AACGCUCUGCC | GUGCmCGmCAAmCGCU | |
| | | | UUCUGGCAUCG | CUmGmCCmUmUmCmUG | |
| | | | UU | GCAUCG*mU*mU | |
| G025956 | 750 | CUCUCACUCCU | CUCUCACUCCU | mC*mU*mC*mUmCACm | chr19: 55116019- |
| | | UUCAUUUGGGC | UUCAUUUGGGC | UmCCmUUmUCAUUmUG | 55116043 |
| | | AG | AGGUUGUAGCU | GGmCAGmGUUGmUmAm | |
| | | | CCCUGAAACCG | GmCUCCCmUmGmAmAm | |
| | | | UUGCUACAAUA | AmCmCGUUmGmCUAmC | |
| | | | AGGCCGUCGAA | AAU*AAGmGmCCmGmU | |
| | | | AGAUGUGCCGC | mCmGmAmAmAmGmAmU | |
| | | | AACGCUCUGCC | GUGCmCGmCAAmCGCU | |
| | | | UUCUGGCAUCG | CUmGmCCmUmUmCmUG | |
| | | | UU | GCAUCG*mU*mU | |
| G025957 | 751 | CCUCUCACUCC | CCUCUCACUCC | mC*mC*mU*mCmUCAm | chr19: 55116020- |
| | | UUUCAUUUGGG | UUUCAUUUGGG | CmUCmCUmUUCAUmUU | 55116044 |
| | | CA | CAGUUGUAGCU | GGmGCAmGUUGmUmAm | |
| | | | CCCUGAAACCG | GmCUCCCmUmGmAmAm | |
| | | | UUGCUACAAUA | AmCmCGUUmGmCUAmC | |
| | | | AGGCCGUCGAA | AAU*AAGmGmCCmGmU | |
| | | | AGAUGUGCCGC | mCmGmAmAmAmGmAmU | |
| | | | AACGCUCUGCC | GUGCmCGmCAAmCGCU | |
| | | | UUCUGGCAUCG | CUmGmCCmUmUmCmUG | |
| | | | UU | GCAUCG*mU*mU | |
| G025958 | 752 | ACCUCUCACUC | ACCUCUCACUC | mA*mC*mC*mUmCUCm | chr19: 55116021- |
| | | CUUUCAUUUGG | CUUUCAUUUGG | AmCUmCCmUUUCAmUU | 55116045 |
| | | GC | GCGUUGUAGCU | UGmGGCmGUUGmUmAm | |
| | | | CCCUGAAACCG | GmCUCCCmUmGmAmAm | |
| | | | UUGCUACAAUA | AmCmCGUUmGmCUAmC | |
| | | | AGGCCGUCGAA | AAU*AAGmGmCCmGmU | |
| | | | AGAUGUGCCGC | mCmGmAmAmAmGmAmU | |
| | | | AACGCUCUGCC | GUGCmCGmCAAmCGCU | |
| | | | UUCUGGCAUCG | CUmGmCCmUmUmCmUG | |
| | | | UU | GCAUCG*mU*mU | |
| G025959 | 753 | CUCCUGUGGAU | CUCCUGUGGAU | mC*mU*mC*mCmUGUm | chr19: 55116039- |
| | | UCGGGUCACCU | UCGGGUCACCU | GmGAmUUmCGGGUmCA | 55116063 |
| | | CU | CUGUUGUAGCU | CCmUCUmGUUGmUmAm | |
| | | | CCCUGAAACCG | GmCUCCCmUmGmAmAm | |
| | | | UUGCUACAAUA | AmCmCGUUmGmCUAmC | |
| | | | AGGCCGUCGAA | AAU*AAGmGmCCmGmU | |
| | | | AGAUGUGCCGC | mCmGmAmAmAmGmAmU | |
| | | | AACGCUCUGCC | GUGCmCGmCAAmCGCU | |
| | | | UUCUGGCAUCG | CUmGmCCmUmUmCmUG | |
| | | | UU | GCAUCG*mU*mU | |
| G025960 | 754 | CACCCCGUUCU | CACCCCGUUCU | mC*mA*mC*mCmCCGm | chr19: 55116048- |
| | | CCUGUGGAUUC | CCUGUGGAUUC | UmUCmUCmCUGUGmGA | 55116072 |
| | | GG | GGGUUGUAGCU | UUmCGGmGUUGmUmAm | |
| | | | CCCUGAAACCG | GmCUCCCmUmGmAmAm | |
| | | | UUGCUACAAUA | AmCmCGUUmGmCUAmC | |
| | | | AGGCCGUCGAA | AAU*AAGmGmCCmGmU | |
| | | | AGAUGUGCCGC | mCmGmAmAmAmGmAmU | |
| | | | AACGCUCUGCC | GUGCmCGmCAAmCGCU | |
| | | | UUCUGGCAUCG | CUmGmCCmUmUmCmUG | |
| | | | UU | GCAUCG*mU*mU | |
| G025961 | 755 | UGCUUUCUUUG | UGCUUUCUUUG | mU*mG*mC*mUmUUCm | chr19: 55116065- |
| | | CCUGGACACCC | CCUGGACACCC | UmUUmGCmCUGGAmCA | 55116089 |
| | | CG | CGGUUGUAGCU | CCmCCGmGUUGmUmAm | |
| | | | CCCUGAAACCG | GmCUCCCmUmGmAmAm | |
| | | | UUGCUACAAUA | AmCmCGUUmGmCUAmC | |
| | | | AGGCCGUCGAA | AAU*AAGmGmCCmGmU | |
| | | | AGAUGUGCCGC | mCmGmAmAmAmGmAmU | |
| | | | AACGCUCUGCC | GUGCmCGmCAAmCGCU | |
| | | | UUCUGGCAUCG | CUmGmCCmUmUmCmUG | |
| | | | UU | GCAUCG*mU*mU | |
| G025962 | 756 | AUCCUCUUGCU | AUCCUCUUGCU | mA*mU*mC*mCmUCUm | chr19: 55116072- |
| | | UUCUUUGCCUG | UUCUUUGCCUG | UmGCmUUmUCUUUmGC | 55116096 |
| | | GA | GAGUUGUAGCU | CUmGGAmGUUGmUmAm | |
| | | | CCCUGAAACCG | GmCUCCCmUmGmAmAm | |
| | | | UUGCUACAAUA | AmCmCGUUmGmCUAmC | |
| | | | AGGCCGUCGAA | AAU*AAGmGmCCmGmU | |
| | | | AGAUGUGCCGC | mCmGmAmAmAmGmAmU | |
| | | | AACGCUCUGCC | GUGCmCGmCAAmCGCU | |
| | | | UUCUGGCAUCG | CUmGmCCmUmUmCmUG | |
| | | | UU | GCAUCG*mU*mU | |
| G025963 | 757 | CAUCCUCUUGC | CAUCCUCUUGC | mC*mA*mU*mCmCUCm | chr19: 55116073- |
| | | UUUCUUUGCCU | UUUCUUUGCCU | UmUGmCUmUUCUUmUG | 55116097 |
| | | GG | GGGUUGUAGCU | CCmUGGmGUUGmUmAm | |
| | | | CCCUGAAACCG | GmCUCCCmUmGmAmAm | |
| | | | UUGCUACAAUA | AmCmCGUUmGmCUAmC | |
| | | | AGGCCGUCGAA | AAU*AAGmGmCCmGmU | |
| | | | AGAUGUGCCGC | mCmGmAmAmAmGmAmU | |
| | | | AACGCUCUGCC | GUGCmCGmCAAmCGCU | |
| | | | UUCUGGCAUCG | CUmGmCCmUmUmCmUG | |
| | | | UU | GCAUCG*mU*mU | |
| G025964 | 758 | CCAUCCUCUUG | CCAUCCUCUUG | mC*mC*mA*mUmCCUm | chr19: 55116074- |
| | | CUUUCUUUGCC | CUUUCUUUGCC | CmUUmGCmUUUCUmUU | 55116098 |
| | | UG | UGGUUGUAGCU | GCmCUGmGUUGmUmAm | |
| | | | CCCUGAAACCG | GmCUCCCmUmGmAmAm | |
| | | | UUGCUACAAUA | AmCmCGUUmGmCUAmC | |
| | | | AGGCCGUCGAA | AAU*AAGmGmCCmGmU | |
| | | | AGAUGUGCCGC | mCmGmAmAmAmGmAmU | |
| | | | AACGCUCUGCC | GUGCmCGmCAAmCGCU | |
| | | | UUCUGGCAUCG | CUmGmCCmUmUmCmUG | |
| | | | UU | GCAUCG*mU*mU | |
| G025965 | 759 | CCACCUCUCCA | CCACCUCUCCA | mC*mC*mA*mCmCUCm | chr19: 55116082- |
| | | UCCUCUUGCUU | UCCUCUUGCUU | UmCCmAUmCCUCUmUG | 55116106 |
| | | UC | UCGUUGUAGCU | CUmUUCmGUUGmUmAm | |
| | | | CCCUGAAACCG | GmCUCCCmUmGmAmAm | |
| | | | UUGCUACAAUA | AmCmCGUUmGmCUAmC | |
| | | | AGGCCGUCGAA | AAU*AAGmGmCCmGmU | |
| | | | AGAUGUGCCGC | mCmGmAmAmAmGmAmU | |
| | | | AACGCUCUGCC | GUGCmCGmCAAmCGCU | |
| | | | UUCUGGCAUCG | CUmGmCCmUmUmCmUG | |
| | | | UU | GCAUCG*mU*mU | |
| G025966 | 760 | GUCUCCCUGGC | GUCUCCCUGGC | mG*mU*mC*mUmCCCm | chr19: 55116098- |
| | | UUUAGCCACCU | UUUAGCCACCU | UmGGmCUmUUAGCmCA | 55116122 |
| | | CU | CUGUUGUAGCU | CCmUCUmGUUGmUmAm | |
| | | | CCCUGAAACCG | GmCUCCCmUmGmAmAm | |
| | | | UUGCUACAAUA | AmCmCGUUmGmCUAmC | |
| | | | AGGCCGUCGAA | AAU*AAGmGmCCmGmU | |
| | | | AGAUGUGCCGC | mCmGmAmAmAmGmAmU | |
| | | | AACGCUCUGCC | GUGCmCGmCAAmCGCU | |
| | | | UUCUGGCAUCG | CUmGmCCmUmUmCmUG | |
| | | | UU | GCAUCG*mU*mU | |
| G025967 | 76 | CCCCGUCUCCC | CCCCGUCUCCC | mC*mC*mC*mCmGUCm | chr19: 55116102- |
| | | UGGCUUUAGCC | UGGCUUUAGCC | UmCCmCUmGGCUUmUA | 55116126 |
| | | AC | ACGUUGUAGCU | GCmCACmGUUGmUmAm | |
| | | | CCCUGAAACCG | GmCUCCCmUmGmAmAm | |
| | | | UUGCUACAAUA | AmCmCGUUmGmCUAmC | |
| | | | AGGCCGUCGAA | AAU*AAGmGmCCmGmU | |
| | | | AGAUGUGCCGC | mCmGmAmAmAmGmAmU | |
| | | | AACGCUCUGCC | GUGCmCGmCAAmCGCU | |
| | | | UUCUGGCAUCG | CUmGmCCmUmUmCmUG | |
| | | | UU | GCAUCG*mU*mU | |
| G025968 | 762 | AAGUACCCCGU | AAGUACCCCGU | mA*mA*mG*mUmACCm | chr19: 55116107- |
| | | CUCCCUGGCUU | CUCCCUGGCUU | CmCGmUCmUCCCUmGG | 55116131 |
| | | UA | UAGUUGUAGCU | CUmUUAmGUUGmUmAm | |
| | | | CCCUGAAACCG | GmCUCCCmUmGmAmAm | |
| | | | UUGCUACAAUA | AmCmCGUUmGmCUAmC | |
| | | | AGGCCGUCGAA | AAU*AAGmGmCCmGmU | |
| | | | AGAUGUGCCGC | mCmGmAmAmAmGmAmU | |
| | | | AACGCUCUGCC | GUGCmCGmCAAmCGCU | |
| | | | UUCUGGCAUCG | CUmGmCCmUmUmCmUG | |
| | | | UU | GCAUCG*mU*mU | |
| G025969 | 763 | CCAAAGUACCC | CCAAAGUACCC | mC*mC*mA*mAmAGUm | chr19: 55116110- |
| | | CGUCUCCCUGG | CGUCUCCCUGG | AmCCmCCmGUCUCmCC | 55116134 |
| | | CU | CUGUUGUAGCU | UGmGCUmGUUGmUmAm | |
| | | | CCCUGAAACCG | GmCUCCCmUmGmAmAm | |
| | | | UUGCUACAAUA | AmCmCGUUmGmCUAmC | |
| | | | AGGCCGUCGAA | AAU*AAGmGmCCmGmU | |
| | | | AGAUGUGCCGC | mCmGmAmAmAmGmAmU | |
| | | | AACGCUCUGCC | GUGCmCGmCAAmCGCU | |
| | | | UUCUGGCAUCG | CUmGmCCmUmUmCmUG | |
| | | | UU | GCAUCG*mU*mU | |
| G025970 | 764 | UCUGGACAACC | UCUGGACAACC | mU*mC*mU*mGmGACm | chr19: 55116121- |
| | | CCAAAGUACCC | CCAAAGUACCC | AmACmCCmCAAAGmUA | 55116145 |
| | | CG | CGGUUGUAGCU | CCmCCGmGUUGmUmAm | |
| | | | CCCUGAAACCG | GmCUCCCmUmGmAmAm | |
| | | | UUGCUACAAUA | AmCmCGUUmGmCUAmC | |
| | | | AGGCCGUCGAA | AAU*AAGmGmCCmGmU | |
| | | | AGAUGUGCCGC | mCmGmAmAmAmGmAmU | |
| | | | AACGCUCUGCC | GUGCmCGmCAAmCGCU | |
| | | | UUCUGGCAUCG | CUmGmCCmUmUmCmUG | |
| | | | UU | GCAUCG*mU*mU | |
| G025971 | 765 | UUCUGGACAAC | UUCUGGACAAC | mU*mU*mC*mUmGGAm | chr19: 55116122- |
| | | CCCAAAGUACC | CCCAAAGUACC | CmAAmCCmCCAAAmGU | 55116146 |
| | | CC | CCGUUGUAGCU | ACmCCCmGUUGmUmAm | |
| | | | CCCUGAAACCG | GmCUCCCmUmGmAmAm | |
| | | | UUGCUACAAUA | AmCmCGUUmGmCUAmC | |
| | | | AGGCCGUCGAA | AAU*AAGmGmCCmGmU | |
| | | | AGAUGUGCCGC | mCmGmAmAmAmGmAmU | |
| | | | AACGCUCUGCC | GUGCmCGmCAAmCGCU | |
| | | | UUCUGGCAUCG | CUmGmCCmUmUmCmUG | |
| | | | UU | GCAUCG*mU*mU | |
| G025972 | 766 | CCGUUUUUCUG | CCGUUUUUCUG | mC*mC*mG*mUmUUUm | chr19: 55116128- |
| | | GACAACCCCAA | GACAACCCCAA | UmCUmGGmACAACmCC | 55116152 |
| | | AG | AGGUUGUAGCU | CAmAAGmGUUGmUmAm | |
| | | | CCCUGAAACCG | GmCUCCCmUmGmAmAm | |
| | | | UUGCUACAAUA | AmCmCGUUmGmCUAmC | |
| | | | AGGCCGUCGAA | AAU*AAGmGmCCmGmU | |
| | | | AGAUGUGCCGC | mCmGmAmAmAmGmAmU | |
| | | | AACGCUCUGCC | GUGCmCGmCAAmCGCU | |
| | | | UUCUGGCAUCG | CUmGmCCmUmUmCmUG | |
| | | | UU | GCAUCG*mU*mU | |
| G025973 | 767 | ACCGUUUUUCU | ACCGUUUUUCU | mA*mC*mC*mGmUUUm | chr19: 55116129- |
| | | GGACAACCCCA | GGACAACCCCA | UmUCmUGmGACAAmCC | 55116153 |
| | | AA | AAGUUGUAGCU | CCmAAAmGUUGmUmAm | |
| | | | CCCUGAAACCG | GmCUCCCmUmGmAmAm | |
| | | | UUGCUACAAUA | AmCmCGUUmGmCUAmC | |
| | | | AGGCCGUCGAA | AAU*AAGmGmCCmGmU | |
| | | | AGAUGUGCCGC | mCmGmAmAmAmGmAmU | |
| | | | AACGCUCUGCC | GUGCmCGmCAAmCGCU | |
| | | | UUCUGGCAUCG | CUmGmCCmUmUmCmUG | |
| | | | UU | GCAUCG*mU*mU | |
| G025974 | 768 | CACCGUUUUUC | CACCGUUUUUC | mC*mA*mC*mCmGUUm | chr19: 55116130- |
| | | UGGACAACCCC | UGGACAACCCC | UmUUmCUmGGACAmAC | 55116154 |
| | | AA | AAGUUGUAGCU | CCmCAAmGUUGmUmAm | |
| | | | CCCUGAAACCG | GmCUCCCmUmGmAmAm | |
| | | | UUGCUACAAUA | AmCmCGUUmGmCUAmC | |
| | | | AGGCCGUCGAA | AAU*AAGmGmCCmGmU | |
| | | | AGAUGUGCCGC | mCmGmAmAmAmGmAmU | |
| | | | AACGCUCUGCC | GUGCmCGmCAAmCGCU | |
| | | | UUCUGGCAUCG | CUmGmCCmUmUmCmUG | |
| | | | UU | GCAUCG*mU*mU | |
| G025975 | 769 | UGCAUCAUCAC | UGCAUCAUCAC | mU*mG*mC*mAmUCAm | chr19: 55116138- |
| | | CGUUUUUCUGG | CGUUUUUCUGG | UmCAmCCmGUUUUmUC | 55116162 |
| | | AC | ACGUUGUAGCU | UGmGACmGUUGmUmAm | |
| | | | CCCUGAAACCG | GmCUCCCmUmGmAmAm | |
| | | | UUGCUACAAUA | AmCmCGUUmGmCUAmC | |
| | | | AGGCCGUCGAA | AAU*AAGmGmCCmGmU | |
| | | | AGAUGUGCCGC | mCmGmAmAmAmGmAmU | |
| | | | AACGCUCUGCC | GUGCmCGmCAAmCGCU | |
| | | | UUCUGGCAUCG | CUmGmCCmUmUmCmUG | |
| | | | UU | GCAUCG*mU*mU | |
| G025976 | 770 | CUGCAUCAUCA | CUGCAUCAUCA | mC*mU*mG*mCmAUCm | chr19: 55116139- |
| | | CCGUUUUUCUG | CCGUUUUUCUG | AmUCmACmCGUUUmUU | 55116163 |
| | | GA | GAGUUGUAGCU | CUmGGAmGUUGmUmAm | |
| | | | CCCUGAAACCG | GmCUCCCmUmGmAmAm | |
| | | | UUGCUACAAUA | AmCmCGUUmGmCUAmC | |
| | | | AGGCCGUCGAA | AAU*AAGmGmCCmGmU | |
| | | | AGAUGUGCCGC | mCmGmAmAmAmGmAmU | |
| | | | AACGCUCUGCC | GUGCmCGmCAAmCGCU | |
| | | | UUCUGGCAUCG | CUmGmCCmUmUmCmUG | |
| | | | UU | GCAUCG*mU*mU | |
| G025977 | 771 | CCUGCAUCAUC | CCUGCAUCAUC | mC*mC*mU*mGmCAUm | chr19: 55116140- |
| | | ACCGUUUUUCU | ACCGUUUUUCU | CmAUmCAmCCGUUmUU | 55116164 |
| | | GG | GGGUUGUAGCU | UCmUGGmGUUGmUmAm | |
| | | | CCCUGAAACCG | GmCUCCCmUmGmAmAm | |
| | | | UUGCUACAAUA | AmCmCGUUmGmCUAmC | |
| | | | AGGCCGUCGAA | AAU*AAGmGmCCmGmU | |
| | | | AGAUGUGCCGC | mCmGmAmAmAmGmAmU | |
| | | | AACGCUCUGCC | GUGCmCGmCAAmCGCU | |
| | | | UUCUGGCAUCG | CUmGmCCmUmUmCmUG | |
| | | | UU | GCAUCG*mU*mU | |
| G025978 | 772 | CUCCCCUUCUU | CUCCCCUUCUU | mC*mU*mC*mCmCCUm | chr19: 55116156- |
| | | GUAGGCCUGCA | GUAGGCCUGCA | UmCUmUGmUAGGCmCU | 55116180 |
| | | UC | UCGUUGUAGCU | GCmAUCmGUUGmUmAm | |
| | | | CCCUGAAACCG | GmCUCCCmUmGmAmAm | |
| | | | UUGCUACAAUA | AmCmCGUUmGmCUAmC | |
| | | | AGGCCGUCGAA | AAU*AAGmGmCCmGmU | |
| | | | AGAUGUGCCGC | mCmGmAmAmAmGmAmU | |
| | | | AACGCUCUGCC | GUGCmCGmCAAmCGCU | |
| | | | UUCUGGCAUCG | CUmGmCCmUmUmCmUG | |
| | | | UU | GCAUCG*mU*mU | |
| G025979 | 773 | CUUGCGUCCCG | CUUGCGUCCCG | mC*mU*mU*mGmCGUm | chr19: 55116168- |
| | | CCUCCCCUUCU | CCUCCCCUUCU | CmCCmGCmCUCCCmCU | 55116192 |
| | | UG | UGGUUGUAGCU | UCmUUGmGUUGmUmAm | |
| | | | CCCUGAAACCG | GmCUCCCmUmGmAmAm | |
| | | | UUGCUACAAUA | AmCmCGUUmGmCUAmC | |
| | | | AGGCCGUCGAA | AAU*AAGmGmCCmGmU | |
| | | | AGAUGUGCCGC | mCmGmAmAmAmGmAmU | |
| | | | AACGCUCUGCC | GUGCmCGmCAAmCGCU | |
| | | | UUCUGGCAUCG | CUmGmCCmUmUmCmUG | |
| | | | UU | GCAUCG*mU*mU | |
| G025980 | 774 | CUCCGACGGAU | CUCCGACGGAU | mC*mU*mC*mCmGACm | chr19: 55116185- |
| | | GUCUCCCUUGC | GUCUCCCUUGC | GmGAmUGmUCUCCmCU | 55116209 |
| | | GU | GUGUUGUAGCU | UGmCGUmGUUGmUmAm | |
| | | | CCCUGAAACCG | GmCUCCCmUmGmAmAm | |
| | | | UUGCUACAAUA | AmCmCGUUmGmCUAmC | |
| | | | AGGCCGUCGAA | AAU*AAGmGmCCmGmU | |
| | | | AGAUGUGCCGC | mCmGmAmAmAmGmAmU | |
| | | | AACGCUCUGCC | GUGCmCGmCAAmCGCU | |
| | | | UUCUGGCAUCG | CUmGmCCmUmUmCmUG | |
| | | | UU | GCAUCG*mU*mU | |

[0601] The terms “mA,” “mc,” “mU,” or “mG” may be used to denote a nucleotide that has been modified with 2′—O-Me.

[0602] In some embodiments, the AAVS1 guide RNA comprises a guide sequence selected from SEQ TD NOs: 601-774. In some embodiments, the AAVS1 guide RNA comprises a guide sequence that is at least 19, 20, 21, 22, 23, or 24 contiguous nucleotides of a sequence selected from SEQ ID NOs: 601-774. In some embodiments, the AAVS1 guide RNA comprises a guide sequence that is at least 95%, 90%, or 85% identical to a sequence selected from SEQ ID NOs: 601-774. In some embodiments, the AAVS1 guide RNA comprises a guide sequence that is at least 95% identical to a sequence selected from SEQ ID NOs: 601-774.

[0603] In some embodiments, the AAVS1 guide RNA comprises a guide sequence that comprises at least 10 contiguous nucleotides±10 nucleotides of a genomic coordinate listed in Table 5. As used herein, at least 10 contiguous nucleotides±10 nucleotides of a genomic coordinate means, for example, at least 10 contiguous nucleotides within the genomic coordinates wherein the genomic coordinates include 10 nucleotides in the 5′ direction and 10 nucleotides in the 3′ direction from the ranges listed in Table 5. For example, an AAVS1 guide RNA may comprise 10 contiguous nucleotides within the genomic coordinates chosen from: chr19:55115218-55115242; chr19:55115477-55115501; chr19:55115504-55115528; chr19:55115513-55115537; chr19:55115514-55115538; chr19:55115517-55115541; chr19:55115518-55115542; chr19:55115549-55115573; chr19:55115574-55115598; chr19:55115606-55115630; chr19:55115933-55115957; chr19:55116026-55116050; chr19:55116045-55116069; chr19:55116084-55116108; chr19:55115276-55115300; chr19:55115509-55115533; chr19:55115579-55115603; chr19:55115863-55115887; chr19:55115906-55115930; or chr19:55116006-55116030; including the boundary nucleotides of these ranges. In some embodiments, the AAVS1 guide RNA comprises a guide sequence that is at least 19, 20, 21, 22, 23, or 24 contiguous nucleotides of a sequence that comprises 10 contiguous nucleotides±10 nucleotides of a genomic coordinate listed in Table 5. In some embodiments, the AAVS1 guide RNA comprises a guide sequence that is at least 95%, 90%, or 85% identical to a sequence selected from a sequence that is 19, 20, 21, 22, 23, or 24 contiguous nucleotides of a sequence that comprises 10 contiguous nucleotides±10 nucleotides of a genomic coordinate listed in Table 5.

[0604] In some embodiments, the AAVS1 guide RNA comprises a guide sequence that comprises at least 15 contiguous nucleotides±10 nucleotides of a genomic coordinate listed in Table 5. In some embodiments, the AAVS1 guide RNA comprises a guide sequence that comprises at least 24 contiguous nucleotides±10 nucleotides of a genomic coordinate listed in Table 5.

[0605] In some embodiments, the AAVS1 guide RNA comprises SEQ ID NO: 601. In some embodiments, the AAVS1 guide RNA comprises SEQ ID NO: 602. In some embodiments, the AAVS1 guide RNA comprises SEQ ID NO: 603. In some embodiments, the AAVS1 guide RNA comprises SEQ ID NO: 604. In some embodiments, the AAVS1 guide RNA comprises SEQ ID NO: 605. In some embodiments, the AAVS1 guide RNA comprises SEQ ID NO: 606. In some embodiments, the AAVS1 guide RNA comprises SEQ ID NO: 607. In some embodiments, the AAVS1 guide RNA comprises SEQ ID NO: 608. In some embodiments, the AAVS1 guide RNA comprises SEQ ID NO: 609. In some embodiments, the AAVS1 guide RNA comprises SEQ ID NO: 610. In some embodiments, the AAVS1 guide RNA comprises SEQ ID NO: 611. In some embodiments, the AAVS1 guide RNA comprises SEQ ID NO: 612. In some embodiments, the AAVS1 guide RNA comprises SEQ ID NO: 613. In some embodiments, the AAVS1 guide RNA comprises SEQ ID NO: 614. In some embodiments, the AAVS1 guide RNA comprises SEQ ID NO: 615. In some embodiments, the AAVS1 guide RNA comprises SEQ ID NO: 616. In some embodiments, the AAVS1 guide RNA comprises SEQ ID NO: 617. In some embodiments, the AAVS1 guide RNA comprises SEQ ID NO: 618. In some embodiments, the AAVS1 guide RNA comprises SEQ ID NO: 619. In some embodiments, the AAVS1 guide RNA comprises SEQ ID NO: 620. In some embodiments, the AAVS1 guide RNA comprises SEQ ID NO: 621. In some embodiments, the AAVS1 guide RNA comprises SEQ ID NO: 622. In some embodiments, the AAVS1 guide RNA comprises SEQ ID NO: 623. In some embodiments, the AAVS1 guide RNA comprises SEQ ID NO: 624. In some embodiments, the AAVS1 guide RNA comprises SEQ ID NO: 625. In some embodiments, the AAVS1 guide RNA comprises SEQ ID NO: 626. In some embodiments, the AAVS1 guide RNA comprises SEQ ID NO: 627. In some embodiments, the AAVS1 guide RNA comprises SEQ ID NO: 628. In some embodiments, the AAVS1 guide RNA comprises SEQ ID NO: 629. In some embodiments, the AAVS1 guide RNA comprises SEQ ID NO: 630. In some embodiments, the AAVS1 guide RNA comprises SEQ ID NO: 631. In some embodiments, the AAVS1 guide RNA comprises SEQ ID NO: 632. In some embodiments, the AAVS1 guide RNA comprises SEQ ID NO: 633. In some embodiments, the AAVS1 guide RNA comprises SEQ ID NO: 634. In some embodiments, the AAVS1 guide RNA comprises SEQ ID NO: 635. In some embodiments, the AAVS1 guide RNA comprises SEQ ID NO: 636. In some embodiments, the AAVS1 guide RNA comprises SEQ ID NO: 637. In some embodiments, the AAVS1 guide RNA comprises SEQ ID NO: 638. In some embodiments, the AAVS1 guide RNA comprises SEQ ID NO: 639. In some embodiments, the AAVS1 guide RNA comprises SEQ ID NO: 640. In some embodiments, the AAVS1 guide RNA comprises SEQ ID NO: 641. In some embodiments, the AAVS1 guide RNA comprises SEQ ID NO: 642. In some embodiments, the AAVS1 guide RNA comprises SEQ ID NO: 643. In some embodiments, the AAVS1 guide RNA comprises SEQ ID NO: 644. In some embodiments, the AAVS1 guide RNA comprises SEQ ID NO: 645. In some embodiments, the AAVS1 guide RNA comprises SEQ ID NO: 646. In some embodiments, the AAVS1 guide RNA comprises SEQ ID NO: 647. In some embodiments, the AAVS1 guide RNA comprises SEQ ID NO: 648. In some embodiments, the AAVS1 guide RNA comprises SEQ ID NO: 649. In some embodiments, the AAVS1 guide RNA comprises SEQ ID NO: 650. In some embodiments, the AAVS1 guide RNA comprises SEQ ID NO: 651. In some embodiments, the AAVS1 guide RNA comprises SEQ ID NO: 652. In some embodiments, the AAVS1 guide RNA comprises SEQ ID NO: 653. In some embodiments, the AAVS1 guide RNA comprises SEQ ID NO: 654. In some embodiments, the AAVS1 guide RNA comprises SEQ ID NO: 655. In some embodiments, the AAVS1 guide RNA comprises SEQ ID NO: 656. In some embodiments, the AAVS1 guide RNA comprises SEQ ID NO: 657. In some embodiments, the AAVS1 guide RNA comprises SEQ ID NO: 658. In some embodiments, the AAVS1 guide RNA comprises SEQ ID NO: 659. In some embodiments, the AAVS1 guide RNA comprises SEQ ID NO: 660. In some embodiments, the AAVS1 guide RNA comprises SEQ ID NO: 661. In some embodiments, the AAVS1 guide RNA comprises SEQ ID NO: 662. In some embodiments, the AAVS1 guide RNA comprises SEQ ID NO: 663. In some embodiments, the AAVS1 guide RNA comprises SEQ ID NO: 664. In some embodiments, the AAVS1 guide RNA comprises SEQ ID NO: 665. In some embodiments, the AAVS1 guide RNA comprises SEQ ID NO: 666. In some embodiments, the AAVS1 guide RNA comprises SEQ ID NO: 667. In some embodiments, the AAVS1 guide RNA comprises SEQ ID NO: 668. In some embodiments, the AAVS1 guide RNA comprises SEQ ID NO: 669. In some embodiments, the AAVS1 guide RNA comprises SEQ ID NO: 670. In some embodiments, the AAVS1 guide RNA comprises SEQ ID NO: 671. In some embodiments, the AAVS1 guide RNA comprises SEQ ID NO: 672. In some embodiments, the AAVS1 guide RNA comprises SEQ ID NO: 673. In some embodiments, the AAVS1 guide RNA comprises SEQ ID NO: 674. In some embodiments, the AAVS1 guide RNA comprises SEQ ID NO: 675. In some embodiments, the AAVS1 guide RNA comprises SEQ ID NO: 676. In some embodiments, the AAVS1 guide RNA comprises SEQ ID NO: 677. In some embodiments, the AAVS1 guide RNA comprises SEQ ID NO: 678. In some embodiments, the AAVS1 guide RNA comprises SEQ ID NO: 679. In some embodiments, the AAVS1 guide RNA comprises SEQ ID NO: 680. In some embodiments, the AAVS1 guide RNA comprises SEQ ID NO: 681. In some embodiments, the AAVS1 guide RNA comprises SEQ ID NO: 682. In some embodiments, the AAVS1 guide RNA comprises SEQ ID NO: 683. In some embodiments, the AAVS1 guide RNA comprises SEQ ID NO: 684. In some embodiments, the AAVS1 guide RNA comprises SEQ ID NO: 685. In some embodiments, the AAVS1 guide RNA comprises SEQ ID NO: 686. In some embodiments, the AAVS1 guide RNA comprises SEQ ID NO: 687. In some embodiments, the AAVS1 guide RNA comprises SEQ ID NO: 688. In some embodiments, the AAVS1 guide RNA comprises SEQ ID NO: 689. In some embodiments, the AAVS1 guide RNA comprises SEQ ID NO: 690. In some embodiments, the AAVS1 guide RNA comprises SEQ ID NO: 691. In some embodiments, the AAVS1 guide RNA comprises SEQ ID NO: 692. In some embodiments, the AAVS1 guide RNA comprises SEQ ID NO: 693. In some embodiments, the AAVS1 guide RNA comprises SEQ ID NO: 694. In some embodiments, the AAVS1 guide RNA comprises SEQ ID NO: 695. In some embodiments, the AAVS1 guide RNA comprises SEQ ID NO: 696. In some embodiments, the AAVS1 guide RNA comprises SEQ ID NO: 697. In some embodiments, the AAVS1 guide RNA comprises SEQ ID NO: 698. In some embodiments, the AAVS1 guide RNA comprises SEQ ID NO: 699. In some embodiments, the AAVS1 guide RNA comprises SEQ ID NO: 700. In some embodiments, the AAVS1 guide RNA comprises SEQ ID NO: 701. In some embodiments, the AAVS1 guide RNA comprises SEQ ID NO: 702. In some embodiments, the AAVS1 guide RNA comprises SEQ ID NO: 703. In some embodiments, the AAVS1 guide RNA comprises SEQ ID NO: 704. In some embodiments, the AAVS1 guide RNA comprises SEQ ID NO: 705. In some embodiments, the AAVS1 guide RNA comprises SEQ ID NO: 706. In some embodiments, the AAVS1 guide RNA comprises SEQ ID NO: 707. In some embodiments, the AAVS1 guide RNA comprises SEQ ID NO: 708. In some embodiments, the AAVS1 guide RNA comprises SEQ ID NO: 709. In some embodiments, the AAVS1 guide RNA comprises SEQ ID NO: 710. In some embodiments, the AAVS1 guide RNA comprises SEQ ID NO: 711. In some embodiments, the AAVS1 guide RNA comprises SEQ ID NO: 712. In some embodiments, the AAVS1 guide RNA comprises SEQ ID NO: 713. In some embodiments, the AAVS1 guide RNA comprises SEQ ID NO: 714. In some embodiments, the AAVS1 guide RNA comprises SEQ ID NO: 715. In some embodiments, the AAVS1 guide RNA comprises SEQ ID NO: 716. In some embodiments, the AAVS1 guide RNA comprises SEQ ID NO: 717. In some embodiments, the AAVS1 guide RNA comprises SEQ ID NO: 718. In some embodiments, the AAVS1 guide RNA comprises SEQ ID NO: 719. In some embodiments, the AAVS1 guide RNA comprises SEQ ID NO: 720. In some embodiments, the AAVS1 guide RNA comprises SEQ ID NO: 721. In some embodiments, the AAVS1 guide RNA comprises SEQ ID NO: 722. In some embodiments, the AAVS1 guide RNA comprises SEQ ID NO: 723. In some embodiments, the AAVS1 guide RNA comprises SEQ ID NO: 724. In some embodiments, the AAVS1 guide RNA comprises SEQ ID NO: 725. In some embodiments, the AAVS1 guide RNA comprises SEQ ID NO: 726. In some embodiments, the AAVS1 guide RNA comprises SEQ ID NO: 727. In some embodiments, the AAVS1 guide RNA comprises SEQ ID NO: 728. In some embodiments, the AAVS1 guide RNA comprises SEQ ID NO: 729. In some embodiments, the AAVS1 guide RNA comprises SEQ ID NO: 730. In some embodiments, the AAVS1 guide RNA comprises SEQ ID NO: 731. In some embodiments, the AAVS1 guide RNA comprises SEQ ID NO: 732. In some embodiments, the AAVS1 guide RNA comprises SEQ ID NO: 733. In some embodiments, the AAVS1 guide RNA comprises SEQ ID NO: 734. In some embodiments, the AAVS1 guide RNA comprises SEQ ID NO: 735. In some embodiments, the AAVS1 guide RNA comprises SEQ ID NO: 736. In some embodiments, the AAVS1 guide RNA comprises SEQ ID NO: 737. In some embodiments, the AAVS1 guide RNA comprises SEQ ID NO: 738. In some embodiments, the AAVS1 guide RNA comprises SEQ ID NO: 739. In some embodiments, the AAVS1 guide RNA comprises SEQ ID NO: 740. In some embodiments, the AAVS1 guide RNA comprises SEQ ID NO: 741. In some embodiments, the AAVS1 guide RNA comprises SEQ ID NO: 742. In some embodiments, the AAVS1 guide RNA comprises SEQ ID NO: 743. In some embodiments, the AAVS1 guide RNA comprises SEQ ID NO: 744. In some embodiments, the AAVS1 guide RNA comprises SEQ ID NO: 745. In some embodiments, the AAVS1 guide RNA comprises SEQ ID NO: 746. In some embodiments, the AAVS1 guide RNA comprises SEQ ID NO: 747. In some embodiments, the AAVS1 guide RNA comprises SEQ ID NO: 748. In some embodiments, the AAVS1 guide RNA comprises SEQ ID NO: 749. In some embodiments, the AAVS1 guide RNA comprises SEQ ID NO: 750. In some embodiments, the AAVS1 guide RNA comprises SEQ ID NO: 751. In some embodiments, the AAVS1 guide RNA comprises SEQ ID NO: 752. In some embodiments, the AAVS1 guide RNA comprises SEQ ID NO: 753. In some embodiments, the AAVS1 guide RNA comprises SEQ ID NO: 754. In some embodiments, the AAVS1 guide RNA comprises SEQ ID NO: 755. In some embodiments, the AAVS1 guide RNA comprises SEQ ID NO: 756. In some embodiments, the AAVS1 guide RNA comprises SEQ ID NO: 757. In some embodiments, the AAVS1 guide RNA comprises SEQ ID NO: 758. In some embodiments, the AAVS1 guide RNA comprises SEQ ID NO: 759. In some embodiments, the AAVS1 guide RNA comprises SEQ ID NO: 760. In some embodiments, the AAVS1 guide RNA comprises SEQ ID NO: 761. In some embodiments, the AAVS1 guide RNA comprises SEQ ID NO: 762. In some embodiments, the AAVS1 guide RNA comprises SEQ ID NO: 763. In some embodiments, the AAVS1 guide RNA comprises SEQ ID NO: 764. In some embodiments, the AAVS1 guide RNA comprises SEQ ID NO: 765. In some embodiments, the AAVS1 guide RNA comprises SEQ ID NO: 766. In some embodiments, the AAVS1 guide RNA comprises SEQ ID NO: 767. In some embodiments, the AAVS1 guide RNA comprises SEQ ID NO: 768. In some embodiments, the AAVS1 guide RNA comprises SEQ ID NO: 769. In some embodiments, the AAVS1 guide RNA comprises SEQ ID NO: 770. In some embodiments, the AAVS1 guide RNA comprises SEQ ID NO: 771. In some embodiments, the AAVS1 guide RNA comprises SEQ ID NO: 772. In some embodiments, the AAVS1 guide RNA comprises SEQ ID NO: 773. In some embodiments, the AAVS1 guide RNA comprises SEQ ID NO: 774.

[0606] In some embodiments, the AAVS1 guide RNA comprises a guide sequence of any one of: SEQ ID NOs: 611, 620, 622, 626-629, 632-634, 656, 659-661, 673, 691-692, 730, 734, and 746.

[0607] In some embodiments, the AAVS1 guide RNA comprises a guide sequence of any one of: SEQ ID NOs: 611, 620, 622, 627-629, 636, 656, 659-661, and 673,

[0608] In some embodiments, the AAVS1 guide RNA comprises a guide sequence of any one of: SEQ ID NOs: 692, 709, 730, 734, 746, 748, 760-761, and 763.

[0609] Additional embodiments of AAVS1 guide RNAs are provided herein, including e.g., exemplary modifications to the guide RNA.

### 1. Genetic Modifications to AAVS1

[0610] In some embodiments, the methods and compositions disclosed herein genetically modify at least one nucleotide of the AAVS1 locus in a cell. Genetic modifications encompass the population of modifications that results from contact with a genomic editing system (e.g., the population of edits that result from Cas9 and an AAVS1 guide RNA, or the population of edits that result from BC22 and an AAVS1 guide RNA).

[0611] In some embodiments, the genetic modification comprises at least one nucleotide within the genomic coordinates chr19:55115151-55116209. In some embodiments, the genetic modification comprises at least one nucleotide within the genomic coordinates chosen from any of the genomic coordinates listed in Table 5.

[0612] In some embodiments, the genetic modification comprises at least one nucleotide within the genomic coordinates chosen from: chr19:55115218-55115242; chr19:55115477-55115501; chr19:55115504-55115528; chr19:55115513-55115537; chr19:55115514-55115538; chr19:55115517-55115541; chr19:55115518-55115542; chr19:55115549-55115573; chr19:55115574-55115598; chr19:55115606-55115630; chr19:55115933-55115957; chr19:55116026-55116050; chr19:55116045-55116069; chr19:55116084-55116108; chr19:55115276-55115300; chr19:55115509-55115533; chr19:55115579-55115603; chr19:55115863-55115887; chr19:55115906-55115930; and chr19:55116006-55116030. In some embodiments, the genetic modification comprises at least 5 contiguous nucleotides within the genomic coordinates chosen from: chr19:55115218-55115242; chr19:55115477-55115501; chr19:55115504-55115528; chr19:55115513-55115537; chr19:55115514-55115538; chr19:55115517-55115541; chr19:55115518-55115542; chr19:55115549-55115573; chr19:55115574-55115598; chr19:55115606-55115630; chr19:55115933-55115957; chr19:55116026-55116050; chr19:55116045-55116069; chr19:55116084-55116108; chr19:55115276-55115300; chr19:55115509-55115533; chr19:55115579-55115603; chr19:55115863-55115887; chr19:55115906-55115930; and chr19:55116006-55116030. In some embodiments, the genetic modification comprises at least 10 contiguous nucleotides within the genomic coordinates chosen from: chr19:55115218-55115242; chr19:55115477-55115501; chr19:55115504-55115528; chr19:55115513-55115537; chr19:55115514-55115538; chr19:55115517-55115541; chr19:55115518-55115542; chr19:55115549-55115573; chr19:55115574-55115598; chr19:55115606-55115630; chr19:55115933-55115957; chr19:55116026-55116050; chr19:55116045-55116069; chr19:55116084-55116108; chr19:55115276-55115300; chr19:55115509-55115533; chr19:55115579-55115603; chr19:55115863-55115887; chr19:55115906-55115930; and chr19:55116006-55116030.

[0613] In some embodiments, the genetic modification comprises at least one nucleotide within the genomic coordinates chosen from: (a) chr19:55115518-55115542; chr19:55115517-55115541; chr19:55115504-55115528; chr19:55115514-55115538; chr19:55115477-55115501; chr19:55115276-55115300; chr19:55116026-55116050; chr19:55116084-55116108; chr19:55116045-55116069; chr19:55115933-55115957; chr19:55115218-55115242; and chr19:55115696-55115720; or (b) chr19:55115579-55115603; chr19:55116006-55116030; chr19:55115863-55115887; chr19:55116098-55116122; chr19:55115710-55115734; and chr19:55116014-55116038. In some embodiments, the genetic modification comprises at least 5 contiguous nucleotides within the genomic coordinates chosen from: (a) chr19:55115518-55115542; chr19:55115517-55115541; chr19:55115504-55115528; chr19:55115514-55115538; chr19:55115477-55115501; chr19:55115276-55115300; chr19:55116026-55116050; chr19:55116084-55116108; chr19:55116045-55116069; chr19:55115933-55115957; chr19:55115218-55115242; and chr19:55115696-55115720; or (b) chr19:55115579-55115603; chr19:55116006-55116030; chr19:55115863-55115887; chr19:55116098-55116122; chr19:55115710-55115734; and chr19:55116014-55116038. In some embodiments, the genetic modification comprises at least 10 contiguous nucleotides within the genomic coordinates chosen from: (a) chr19:55115518-55115542; chr19:55115517-55115541; chr19:55115504-55115528; chr19:55115514-55115538; chr19:55115477-55115501; chr19:55115276-55115300; chr19:55116026-55116050; chr19:55116084-55116108; chr19:55116045-55116069; chr19:55115933-55115957; chr19:55115218-55115242; and chr19:55115696-55115720; or (b) chr19:55115579-55115603; chr19:55116006-55116030; chr19:55115863-55115887; chr19:55116098-55116122; chr19:55115710-55115734; and chr19:55116014-55116038.

[0614] In some embodiments, the genetic modification comprises at least one indel, at least one C to T substitution, or at least one A to G substitution within the genomic coordinates chosen from: chr19:55115218-55115242; chr19:55115477-55115501; chr19:55115504-55115528; chr19:55115513-55115537; chr19:55115514-55115538; chr19:55115517-55115541; chr19:55115518-55115542; chr19:55115549-55115573; chr19:55115574-55115598; chr19:55115606-55115630; chr19:55115933-55115957; chr19:55116026-55116050; chr19:55116045-55116069; chr19:55116084-55116108; chr19:55115276-55115300; chr19:55115509-55115533; chr19:55115579-55115603; chr19:55115863-55115887; chr19:55115906-55115930; and chr19:55116006-55116030.

[0615] In some embodiments, the genetic modification comprises at least one indel, at least one C to T substitution, or at least one A to G substitution within the genomic coordinates chosen from: (a) chr19:55115518-55115542; chr19:55115517-55115541; chr19:55115504-55115528; chr19:55115514-55115538; chr19:55115477-55115501; chr19:55115276-55115300; chr19:55116026-55116050; chr19:55116084-55116108; chr19:55116045-55116069; chr19:55115933-55115957; chr19:55115218-55115242; and chr19:55115696-55115720; or (b) chr19:55115579-55115603; chr19:55116006-55116030; chr19:55115863-55115887; chr19:55116098-55116122; chr19:55115710-55115734; and chr19:55116014-55116038.

[0616] In some embodiments, the modification to AAVS1 comprises any one or more of an insertion, deletion, substitution, or deamination of at least one nucleotide in a target sequence. In some embodiments, the modification to AAVS1 comprises an insertion of 1, 2, 3, 4 or 5 or more nucleotides in a target sequence. In some embodiments, the modification to AAVS1 comprises a deletion of 1, 2, 3, 4 or 5 or more nucleotides in a target sequence. In other embodiments, the modification to AAVS1 comprises an insertion of 1, 2, 3, 4, 5, 6, 7, 8, 9, 10, 15, 20 or 25 or more nucleotides in a target sequence. In other embodiments, the modification to AAVS1 comprises a deletion of 1, 2, 3, 4, 5, 6, 7, 8, 9, 10, 15, 20 or 25 or more nucleotides in a target sequence. In some embodiments, the modification to AAVS1 comprises an indel, which is generally defined in the art as an insertion or deletion of less than 1000 base pairs (bp). In some embodiments, the modification to AAVS1 comprises an insertion of a donor nucleic acid in a target sequence. In some embodiments, the modification to AAVS1 is not transient.

[0617] In some embodiments, the methods and compositions disclosed herein modify the AAVS1 locus in a cell using an RNA-guided DNA binding agent (e.g., a Cas enzyme). In some embodiments, the RNA-guided DNA binding agent is Cas9. In some embodiments, the RNA-guided DNA binding agent cuts within the AAVS1 gene, wherein the AAVS1 guide RNA targets an AAVS1 genomic target sequence comprising at least 10 contiguous nucleotides chr19:55115151-55116209.

[0618] In some embodiments, the methods and compositions disclosed herein modify the AAVS1 locus in a cell, wherein the modification to AAVS1 comprises an insertion of an exogenous nucleic acid. In some embodiments, the exogenous nucleic acid is a protein-coding gene. The protein encoded by the exogenous nucleic acid may be expressed by the cell.

### H. Exemplary Cell Types

[0619] In some embodiments, methods and compositions disclosed herein genetically modify a cell. In some embodiments, the cell is an allogeneic cell. In some embodiments the cell is a human cell. In some embodiments the genetically modified cell is referred to as an engineered cell. An engineered cell refers to a cell (or progeny of a cell) comprising an engineered genetic modification, e.g. that has been contacted with a genomic editing system and genetically modified by the genomic editing system. The terms “engineered cell” and “genetically modified cell” are used interchangeably throughout. The engineered cell may be any of the exemplary cell types disclosed herein.

[0620] In some embodiments, the cell is an immune cell. As used herein, “immune cell” refers to a cell of the immune system, including e.g., a lymphocyte (e.g., T cell, B cell, natural killer cell (“NK cell”, and NKT cell, or iNKT cell)), monocyte, macrophage, mast cell, dendritic cell, or granulocyte (e.g., neutrophil, eosinophil, and basophil). In some embodiments, the cell is a primary immune cell. In some embodiments, the immune system cell may be selected from CD3+, CD4+ and CD8+ T cells, regulatory T cells (Tregs), B cells, NK cells, and dendritic cells (DC). In some embodiments, the immune cell is allogeneic.

[0621] In some embodiments, the cell is a lymphocyte. In some embodiments, the cell is an adaptive immune cell. In some embodiments, the cell is a T cell. In some embodiments, the cell is a B cell. In some embodiments, the cell is a NK cell. In some embodiments, the lymphocyte is allogeneic.

[0622] As used herein, a T cell can be defined as a cell that expresses a T cell receptor (“TCR” or “ap TCR” or “76 TCR”), however in some embodiments, the TCR of a T cell may be genetically modified to reduce its expression (e.g., by genetic modification to the TRAC or TRBC genes), therefore expression of the protein CD3 may be used as a marker to identify a T cell by standard flow cytometry methods. CD3 is a multi-subunit signaling complex that associates with the TCR. Thus, a T cell may be referred to as CD3+. In some embodiments, a T cell is a cell that expresses a CD3+ marker and either a CD4+ or CD8+ marker. In some embodiments, the T cell is allogeneic.

[0623] In some embodiments, the T cell expresses the glycoprotein CD8 and therefore is CD8+ by standard flow cytometry methods and may be referred to as a “cytotoxic” T cell. In some embodiments, the T cell expresses the glycoprotein CD4 and therefore is CD4+ by standard flow cytometry methods and may be referred to as a “helper” T cell. CD4+ T cells can differentiate into subsets and may be referred to as a Th1 cell, Th2 cell, Th9 cell, Th17 cell, Th22 cell, T regulatory (“Treg”) cell, or T follicular helper cells (“Tfh”). Each CD4+ subset releases specific cytokines that can have either proinflammatory or anti-inflammatory functions, survival or protective functions. A T cell may be isolated from a subject by CD4+ or CD8+ selection methods.

[0624] In some embodiments, the T cell is a memory T cell. In the body, a memory T cell has encountered antigen. A memory T cell can be located in the secondary lymphoid organs (central memory T cells) or in recently infected tissue (effector memory T cells). A memory T cell may be a CD8+ T cell. A memory T cell may be a CD4+ T cell.

[0625] As used herein, a “central memory T cell” can be defined as an antigen-experienced T cell, and for example, may expresses CD62L and CD45RO. A central memory T cell may be detected as CD62L+ and CD45RO+ by Central memory T cells also express CCR7, therefore may be detected as CCR7+ by standard flow cytometry methods.

[0626] As used herein, an “early stem-cell memory T cell” (or “Tscm”) can be defined as a T cell that expresses CD27 and CD45RA, and therefore is CD27+ and CD45RA+ by standard flow cytometry methods. A Tscm does not express the CD45 isoform CD45RO, therefore a Tscm will further be CD45RO− if stained for this isoform by standard flow cytometry methods. A CD45RO-CD27+ cell is therefore also an early stem-cell memory T cell. Tscm cells further express CD62L and CCR7, therefore may be detected as CD62L+ and CCR7+ by standard flow cytometry methods. Early stem-cell memory T cells have been shown to correlate with increased persistence and therapeutic efficacy of cell therapy products.

[0627] In some embodiments, the cell is a B cell. As used herein, a “B cell” can be defined as a cell that expresses CD19 or CD20, or B cell mature antigen (“BCMA”), and therefore a B cell is CD19+, or CD20+, or BCMA+ by standard flow cytometry methods. A B cell is further negative for CD3 and CD56 by standard flow cytometry methods. The B cell may be a plasma cell. The B cell may be a memory B cell. The B cell may be a naïve B cell. The B cell may be IgM+, or has a class-switched B cell receptor (e.g., IgG+, or IgA+). In some embodiments, the B cell is allogeneic.

[0628] In some embodiments, the cell is a mononuclear cell, such as from bone marrow or peripheral blood. In some embodiments, the cell is a peripheral blood mononuclear cell (“PBMC”). In some embodiments, the cell is a PBMC, e.g. a lymphocyte or monocyte. In some embodiments, the cell is a peripheral blood lymphocyte (“PBL”). In some embodiments, the mononuclear cell is allogeneic.

[0629] Cells used in ACT or tissue regenerative therapy are included, such as stem cells, progenitor cells, and primary cells. Stem cells, for example, include pluripotent stem cells (PSCs); induced pluripotent stem cells (iPSCs); embryonic stem cells (ESCs); mesenchymal stem cells (MSCs, e.g., isolated from bone marrow (BM), peripheral blood (PB), placenta, umbilical cord (UC) or adipose); hematopoietic stem cells (HSCs; e.g. isolated from BM or UC); neural stem cells (NSCs); tissue specific progenitor stem cells (TSPSCs); and limbal stem cells (LSCs). Progenitor and primary cells include mononuclear cells (MNCs, e.g., isolated from BM or PB); endothelial progenitor cells (EPCs, e.g. isolated from BM, PB, and UC); neural progenitor cells (NPCs); and tissue-specific primary cells or cells derived therefrom (TSCs) including chondrocytes, myocytes, and keratinocytes. Cells for organ or tissue transplantations such as islet cells, cardiomyocytes, thyroid cells, thymocytes, neuronal cells, skin cells, and retinal cells are also included.

[0630] In some embodiments, the cell is a human cell, such as a cell isolated from a human subject. In some embodiments, the cell is isolated from human donor PBMCs or leukopaks. In some embodiments, the cell is from a subject with a condition, disorder, or disease. In some embodiments, the cell is from a human donor with Epstein Barr Virus (“EBV”).

[0631] In some embodiments, the methods are carried out ex vivo. As used herein, “ex vivo” refers to an in vitro method wherein the cell is capable of being transferred into a subject, e.g. as an ACT therapy. In some embodiments, an ex vivo method is an in vitro method involving an ACT therapy cell or cell population.

[0632] In some embodiments, the cell is from a cell line. In some embodiments, the cell line is derived from a human subject. In some embodiments, the cell line is a lymphoblastoid cell line (“LCL”). The cell may be cryopreserved and thawed. The cell may not have been previously cryopreserved.

[0633] In some embodiments, the cell is from a cell bank. In some embodiments, the cell is genetically modified and then transferred into a cell bank. In some embodiments the cell is removed from a subject, genetically modified ex vivo, and transferred into a cell bank. In some embodiments, a genetically modified population of cells is transferred into a cell bank. In some embodiments, a genetically modified population of immune cells is transferred into a cell bank. In some embodiments, a genetically modified population of immune cells comprising a first and second subpopulations, wherein the first and second sub-populations have at least one common genetic modification and at least one different genetic modification are transferred into a cell bank.

### III. Details of the Genomic Editing Systems

[0634] In some embodiments, the genomic editing system is a CRISPR/Cas system, including e.g., a CRISPR guide RNA comprising a guide sequence and RNA-guided DNA binding agent, and described further herein. Further description of the CRISPR/Cas system methods and compositions for use therein are known in the art. See e.g., PCT/US2021/062922 filed Dec. 10, 2021, and U.S. Provisional Application No. 63/275,425 filed Nov. 3, 2021, the contents of each of which are hereby incorporated in their entireties.

### A. CRISPR Guide RNA

[0635] Provided herein are guide sequences useful for modifying a target sequence, e.g., using a guide RNA comprising a disclosed guide sequence with an RNA-guided DNA binding agent (e.g., a CRISPR/Cas system). Guide sequences targeting the HLA-A, TRAC, TRBC, and CIITA are shown in Tables 1-5 (SEQ ID NOs: 2-80, 101-120, 201-265, 301, 302, 304-576, and 601-774), as are the genomic coordinates that these guide RNAs target.

[0636] In some embodiments, a gRNA provided herein comprises a guide region (guide sequence) and a conserved region comprising a repeat/anti-repeat region, a hairpin 1 region, and a hairpin 2 region, wherein one or more of the repeat/anti-repeat region, the hairpin 1 region, and the hairpin 2 region are shortened. In some embodiments, the gRNA is an N. meningitidis Cas9 (NmeCas9) gRNA.

[0637] In some embodiments, the guide RNA comprises a modified sgRNA. In some embodiments, the sgRNA comprises any one of the modification pattern of the modified sgRNA sequences provided in Tables 1-5, 6, 7, and 7A-7B. In some embodiments, the conserved region comprises any one of modified conserved region Nme guide RNA motifs in Table 7B, and wherein the conserved region is 3′ of the guide region (guide sequence). In some embodiments, the conserved region comprises a modified sequence comprising any one of SEQ ID NOs: 1081-1089, and wherein the conserved region is 3′ of the guide region (guide sequence). In some embodiments, the guide RNA comprises a nucleotide sequence selected from any one of SEQ ID NOs: 904-909, 911, and 995-997, where the N's represent collectively any guide sequence disclosed herein, including the guide sequences provided in Tables 1-5. In certain embodiments, the N's represent collectively a guide sequence that is at least 80%, 85%, 90%, 95%, or 100% identical to or complementary to any one of the guide sequences provided in Tables 1-5. In certain embodiments, the N's represent collectively any one of the guide sequences provided in Tables 1-5. In certain embodiments, when the N's represent collectively a guide sequence, within (N)₂₀₋₂₅, each N of the (N)₂₀₋₂₅ may be independently modified, e.g., modified with a 2′—OMe modification, optionally further with a PS modification, particularly at 1, 2, or 3 terminal nucleotides. In certain embodiments, the (N)₂₀₋₂₅ has the following sequence and modification pattern: mN*mN*mN*mNmNNNmNmNNmNNmNNNNNmNNNNmNNN.

[0638] An exemplary conserved region of an NmeCas9 single guide RNA (Nme sgRNA) is shown in Table 6 (SEQ ID NO: 900). The first row shows the numbering of the nucleotides; the second row shows an exemplary sequence; and the third (and fourth) rows show the regions. “Shortened” with respect to an sgRNA means that its conserved region lacks at least one nucleotide shown in Table 6, as discussed in detail below.

[0639] In some embodiments, the guide RNA is a Nme sgRNA comprising a conserved portion comprising a repeat/anti-repeat region, a hairpin 1 region, and a hairpin 2 region, wherein one or more of the repeat/anti-repeat region, the hairpin 1 region, and the hairpin 2 region are shortened. In some embodiments, the sgRNA described herein further comprises a guide region and a conserved region, wherein the conserved region comprises one or more of: (a) a shortened repeat/anti-repeat region, wherein the shortened repeat/anti-repeat region lacks 2-24 nucleotides, wherein (i) one or more of nucleotides 37-48 and 53-64 is deleted and optionally one or more of nucleotides 37-64 is substituted relative to SEQ ID NO: 900; and (ii) nucleotide 36 is linked to nucleotide 65 by at least 2 nucleotides; or (b) a shortened hairpin 1 region, wherein the shortened hairpin 1 lacks 2-10, optionally 2-8 nucleotides, wherein one or more of nucleotides 82-86 and 91-95 is deleted and optionally one or more of positions 82-96 is substituted relative to SEQ ID NO: 900; and nucleotide 81 is linked to nucleotide 96 by at least 4 nucleotides; or (c) a shortened hairpin 2 region, wherein the shortened hairpin 2 lacks 2-18, optionally 2-16 nucleotides, wherein (i) one or more of nucleotides 113-121 and 126-134 is deleted and optionally one or more of nucleotides 113-134 is substituted relative to SEQ ID NO: 900; and (ii) nucleotide 112 is linked to nucleotide 135 by at least 4 nucleotides; wherein one or both nucleotides 144-145 are optionally deleted relative to SEQ ID NO: 900; and wherein at least 10 nucleotides are modified nucleotides.

[0640] In some embodiment, the gRNA disclosed herein is a sgRNA.

[0641] In some embodiments, in the guide sequence, nucleotides 1-4 are modified nucleotides. In some embodiments, in the guide sequence, nucleotides 5, 8, 9, 11, 13, 18, and 22 are modified nucleotides. In some embodiments, in the guide sequence, nucleotides 1-5, 8, 9, 11, 13, 18, and 22 are modified nucleotides. In some embodiments, the modified nucleotides are 2′—O-methyl (2′—O-Me) modified nucleotides. In some embodiments, in the guide sequence, nucleotide 1 is linked to nucleotide 2 by a phosphorothioate (PS) linkage, nucleotide 2 is linked to nucleotide 3 by a PS linkage, and/or nucleotide 3 is linked to nucleotide 4 by a PS linkage.

[0642] In some embodiments, one or both nucleotides 144-145 are deleted relative to SEQ ID NO: 900.

[0643] In some embodiments, at least 10 nucleotides of the conserved region are modified nucleotides.

[0644] In some embodiments, a repeat/anti-repeat region of a gRNA is a shortened repeat/anti-repeat region lacking 2-24 nucleotides, e.g., any of the repeat/anti-repeat regions indicated in the numbered embodiments above or Tables 1-6 or described elsewhere herein, which may be combined with any of the shortened hairpin 1 region or hairpin 2 region described herein, including but not limited to combinations indicated in the numbered embodiments above and represented in the sequences of Tables 1-6 or described elsewhere herein. In some embodiments, one or more of positions 49-52, 87-90, or 122-125 is substituted relative to SEQ ID NO: 900. In some embodiments, all of positions 49-52, 87-90, or 122-125 are substituted relative to SEQ ID NO: 900. In some embodiments, the 3′ tail provided in Tables 1-6 or described herein is deleted.

[0645] In some embodiments, the shortened repeat/anti-repeat region of the gRNA lacks 18 nucleotides. In some embodiments, the shortened repeat/anti-repeat region of the gRNA lacks 22 nucleotides.

[0646] In some embodiments, in the shortened repeat/anti-repeat region of the gRNA, nucleotide 36 is linked to nucleotide 65 by 6 nucleotides. In some embodiments, in the shortened repeat/anti-repeat region of the gRNA, nucleotide 36 is linked to nucleotide 65 by 7 nucleotides. In some embodiments, in the shortened repeat/anti-repeat region of the gRNA, nucleotide 36 is linked to nucleotide 65 by 8 nucleotides. In some embodiments, in the shortened repeat/anti-repeat region of the gRNA, nucleotide 36 is linked to nucleotide 65 by 9 nucleotides. In some embodiments, in the shortened repeat/anti-repeat region of the gRNA, nucleotide 36 is linked to nucleotide 65 by 10 nucleotides.

[0647] In some embodiments, in the shortened repeat/anti-repeat region of the gRNA, nucleotides 38-48 and 53-63 are deleted relative to SEQ ID NO: 900. In some embodiments, in the shortened repeat/anti-repeat region of the gRNA, nucleotides 38, 41-48, 53-60, and 63 are deleted relative to SEQ ID NO: 900.

[0648] In some embodiments, in the shortened repeat/anti-repeat region of the gRNA, nucleotide 36 is linked to nucleotide 65 by 6 nucleotides. In some embodiments, in the shortened repeat/anti-repeat region of the gRNA, nucleotides 38-48 and 53-63 are deleted relative to SEQ ID NO: 700, and nucleotide 36 is linked to nucleotide 65 by nucleotides 37, 49-52, and 64.

[0649] In some embodiments, in the shortened repeat/anti-repeat region of the gRNA, nucleotide 36 is linked to nucleotide 65 by 10 nucleotides. In some embodiments, in the shortened repeat/anti-repeat region of the gRNA, nucleotides 38, 41-48, 53-60, and 63 are deleted relative to SEQ ID NO: 900, and nucleotide 36 is linked to nucleotide 65 by nucleotides 37, 39, 40, 49-52, 61, 62, and 64.

[0650] In some embodiments, all of nucleotides 38-48 and nucleotides 53-63 of the upper stem of the shortened repeat/anti-repeat region are deleted relative to SEQ ID NO: 900.

[0651] In some embodiments, all of nucleotides 39-48 and nucleotides 53-62 of the upper stem of the shortened repeat/anti-repeat region are deleted relative to SEQ ID NO: 900, and nucleotides 38 and 63 is substituted.

[0652] In some embodiments, the shortened repeat/anti-repeat region has 14 modified nucleotides. In some embodiments, the shortened repeat/anti-repeat region has 15 modified nucleotides. In some embodiments, the shortened repeat/anti-repeat region has 16 modified nucleotides. In some embodiments, the shortened repeat/anti-repeat region has 17 modified nucleotides. In some embodiments, the shortened repeat/anti-repeat region has 18 modified nucleotides. In some embodiments, the shortened repeat/anti-repeat region has 19 modified nucleotides. In some embodiments, the shortened repeat/anti-repeat region has 20 modified nucleotides. In some embodiments, in the shortened repeat/anti-repeat region, nucleotides 25, 29, 30, 31, 32, 37, 49-52, 64, 65, 69, 70, and 73 are modified nucleotides. In some embodiments, the modified nucleotides are 2′—O-Me modified nucleotides.

[0653] In some embodiments, between the shortened repeat/anti-repeat region and the shortened hairpin 1 region, nucleotide 76 is linked to nucleotide 77 by a PS linkage.

[0654] In some embodiments, the shortened hairpin 1 region lacks 2 nucleotides. In some embodiments, the shortened hairpin 1 region lacks 21 nucleotides. In some embodiments, the shortened hairpin 1 region lacks 2 nucleotides, and nucleotides 86 and 91 are deleted relative to SEQ ID NO: 900. In some embodiments, the shortened hairpin 1 region lacks 2 nucleotides, and nucleotides 85 and 92 are deleted relative to SEQ ID NO: 900. In some embodiments, in the shortened hairpin 1 region, nucleotide 81 is linked to nucleotide 96 by 12 nucleotides. In some embodiments, in the shortened hairpin 1 region, nucleotide 81 is linked to nucleotide 96 by 12 nucleotides. In some embodiments, in the shortened hairpin 1 region, nucleotides 86 and 91 are deleted relative to SEQ ID NO: 900, and nucleotide 81 is linked to nucleotide 96 by nucleotides 82-85, 87-90, and 92-95. In some embodiments, in the shortened hairpin 1 region, nucleotides 85 and 92 are deleted relative to SEQ ID NO: 900, and nucleotide 81 is linked to nucleotide 96 by nucleotides 82-84, 86-91, and 93-95.

[0655] In some embodiments, the shortened hairpin 1 region has a duplex portion of 7 base paired nucleotides in length. In some embodiments, the shortened hairpin 1 region has a duplex portion of 8 base paired nucleotides in length.

[0656] In the stem of the shortened hairpin 1 region is seven base paired nucleotides in length. In some embodiments, nucleotides 85-86 and nucleotides 91-92 of the shortened hairpin 1 region are deleted.

[0657] In some embodiments, the shortened hairpin 1 region has 13 modified nucleotides. In some embodiments, in the shortened hairpin 1 region, nucleotides 80, 81, 83, 84, 85, 87-90, 92-94, and 99 are modified nucleotides. In some embodiments, the modified nucleotides are 2′—O-Me modified nucleotides.

[0658] In some embodiments, between the shortened hairpin 1 region and the shortened hairpin 2 region, nucleotide 101 is a modified nucleotide. In some embodiments, the modified nucleotide is a 2′—O-Me modified nucleotide.

[0659] In some embodiments, the shortened hairpin 2 lacks 18 nucleotides. In some embodiments, the shortened hairpin 2 has 24 nucleotides. In some embodiments, in the shortened hairpin 2 nucleotides 113-121 and 126-134 are deleted relative to SEQ ID NO: 900. In some embodiments, the shortened hairpin 2 lacks 18 nucleotides, and nucleotides 113-121 and 126-134 are deleted relative to SEQ ID NO: 900. In some embodiments, in the shortened hairpin 2 region, nucleotide 112 is linked to nucleotide 135 by 4 nucleotides. In some embodiments, in the shortened hairpin 2 region, nucleotides 113-121 and 126-134 are deleted relative to SEQ ID NO: 900 and nucleotide 112 is linked to nucleotide 135 by nucleotides 122-125. In some embodiments, in the shortened hairpin 2 region, nucleotides 112-120 and 127-135 are deleted relative to SEQ ID NO: 900. In some embodiments, the shortened hairpin 2 region lacks 18 nucleotides, and nucleotides 112-120 and 127-135 are deleted relative to SEQ ID NO: 900.

[0660] In some embodiments, the shortened repeat/anti-repeat region has a length of 28 nucleotides. In some embodiments, the shortened repeat/anti-repeat region has a length of 32 nucleotides.

[0661] In some embodiments, the upper stem of the shortened repeat/anti-repeat region comprises no more than one base pair. In some embodiments, the upper stem of the shortened repeat/anti-repeat region comprises no more than three base pairs.

[0662] In some embodiments, the shortened hairpin 2 region has 8 modified nucleotides. In some embodiments, the shortened hairpin 2 region has 9 modified nucleotides. In some embodiments, the shortened hairpin 2 region has 13 modified nucleotides. In some embodiments, in the shortened hairpin 2 region, nucleotides 104, 110, 111, 122-125, 142, and 143 are modified nucleotides. In some embodiments, in the shortened hairpin 2 region, nucleotides 104, 106-111, 122-125, 142, and 143 are modified nucleotides. In some embodiments, the modified nucleotides are 2′—O-Me modified nucleotides.

[0663] In some embodiments, in the shortened hairpin 2 region, nucleotide 141 is linked to nucleotide 142 by a PS linkage, and/or nucleotide 142 is linked to nucleotide 143 by a PS linkage.

[0664] In some embodiments, a guide RNA (gRNA) comprises a guide region and a conserved region, the conserved region comprising:
[0665] (a) a shortened repeat/anti-repeat region, wherein the shortened repeat/anti-repeat region lacks 18-22 nucleotides relative to SEQ ID NO: 900, wherein
   [0666] (i) nucleotides 38-48 and 53-63 are deleted; and
   [0667] (ii) nucleotide 36 is linked to nucleotide 65 by 6-10 nucleotides;
[0668] (b) a shortened hairpin 1 region, wherein the shortened hairpin 1 lacks 2 nucleotides, wherein nucleotides 86 and 91 are deleted or nucleotides 85 and 92 are deleted relative to SEQ ID NO: 900; and
[0669] (c) a shortened hairpin 2 region, wherein the shortened hairpin 2 lacks 18 nucleotides, wherein nucleotides 113-121 and 126-134 are deleted relative to SEQ ID NO: 900; and wherein nucleotides 144-145 are deleted relative to SEQ ID NO: 900; wherein at least 10 nucleotides are modified nucleotides.

[0670] In some embodiments, a guide RNA (gRNA) comprises a guide region and a conserved region, the conserved region comprising:
[0671] (a) a shortened repeat/anti-repeat region, wherein the shortened repeat/anti-repeat region lacks 18-22 nucleotides relative to SEQ ID NO: 900, wherein
   [0672] (i) nucleotides 38, 41-48, 53-60, and 63 are deleted; and
   [0673] (ii) nucleotide 36 is linked to nucleotide 65 by 6-10 nucleotides;
[0674] (b) a shortened hairpin 1 region, wherein the shortened hairpin 1 lacks 2 nucleotides, wherein nucleotides 86 and 91 are deleted or nucleotides 85 and 92 are deleted relative to SEQ ID NO: 700;
[0675] (c) a shortened hairpin 2 region, wherein the shortened hairpin 2 lacks 18 nucleotides, wherein nucleotides 113-121 and 126-134 are deleted relative to SEQ ID NO: 900; and wherein nucleotides 144-145 are deleted relative to SEQ ID NO: 900; wherein at least 10 nucleotides are modified nucleotides.

[0676] In some embodiments, a guide RNA (gRNA) is provided, the gRNA comprising a guide region and a conserved region, the conserved region comprising one or more of:
[0677] (a) a shortened repeat/anti-repeat region, wherein the shortened repeat/anti-repeat region lacks 18-22 nucleotides relative to SEQ ID NO: 900, wherein
   [0678] (i) nucleotides 37-48 and 53-64 are deleted; and
   [0679] (ii) nucleotide 36 is linked to nucleotide 65 by 6-10 nucleotides; or
[0680] (b) a shortened hairpin 1 region, wherein the shortened hairpin 1 lacks 2 nucleotides, wherein nucleotides 86 and 91 are deleted or nucleotides 85 and 92 are deleted relative to SEQ ID NO: 900; or
[0681] (c) a shortened hairpin 2 region, wherein the shortened hairpin 2 lacks 18 nucleotides, wherein nucleotides 113-121 and 126-134 are deleted relative to SEQ ID NO: 900; and
[0682] wherein nucleotides 144-145 are deleted relative to SEQ ID NO: 900;
[0683] wherein at least 10 nucleotides are modified nucleotides.

[0684] In further embodiments, the shortened repeat/anti-repeat region, wherein the shortened repeat/anti-repeat region lacks 22 nucleotides relative to SEQ ID NO: 900. In further embodiments, nucleotide 36 is linked to nucleotide 65 by a sequence comprising the nucleotide sequence UGAAAC. In further embodiments, the nucleotide 36 is linked to nucleotide 65 by 10 nucleotides. In further embodiments, the nucleotide 36 is linked to nucleotide 65 by a sequence comprising the nucleotide sequence UUCGAAAGAC (SEQ ID NO: 3011).

[0685] In some embodiments, the guide RNA (gRNA) of the previous embodiment comprising a guide region and a conserved region, the conserved region comprising:
[0686] (a) a shortened repeat/anti-repeat region, wherein the shortened repeat/anti-repeat region lacks 18-22 nucleotides, wherein
   [0687] (i) nucleotides 37-48 and 53-64 are deleted relative to SEQ ID NO: 900; and
   [0688] (ii) nucleotide 36 is linked to nucleotide 65 by 6-10 nucleotides;
[0689] (b) a shortened hairpin 1 region, wherein the shortened hairpin 1 lacks 2 nucleotides relative to SEQ ID NO: 900, wherein nucleotides 86 and 91 are deleted or nucleotides 85 and 92 are deleted;
[0690] (c) a shortened hairpin 2 region, wherein the shortened hairpin 2 lacks 18 nucleotides, wherein nucleotides 113-121 and 126-134 are deleted relative to SEQ ID NO: 900; and
[0691] (d) wherein nucleotides 144-145 are deleted relative to SEQ ID NO: 900; wherein at least 10 nucleotides are modified nucleotides.

[0692] In further embodiments, the shortened repeat/anti-repeat region, wherein the shortened repeat/anti-repeat region lacks 22 nucleotides relative to SEQ ID NO: 900. In further embodiments, nucleotide 36 is linked to nucleotide 65 by a sequence comprising the nucleotide sequence UGAAAC. In further embodiments, the nucleotide 36 is linked to nucleotide 65 by 10 nucleotides. In further embodiments, the nucleotide 36 is linked to nucleotide 65 by a sequence comprising the nucleotide sequence UUCGAAAGAC (SEQ ID NO: 3011).

[0693] In some embodiments, a guide RNA (gRNA) is provided, the gRNA comprising: a guide sequence comprising:
[0694] 2′—O-Me modified nucleotides at the first four nucleotides 1-4;
[0695] PS linkages between nucleotides 1-2, 2-3, and 3-4; and
[0696] 2′—O-Me modified nucleotides at nucleotides 5, 8, 9, 11, 13, 18, and 22 of the guide sequence;
   a shortened repeat/anti-repeat region, wherein nucleotides 38-48 and 53-63 are deleted relative to SEQ ID NO: 900, comprising:
[0697] 2′—O-Me modified nucleotides at nucleotides 25, 29, 30, 31, 32, 37, 49-52, 64, 65, 69, 70, and 73;
   a PS linkage between nucleotides 76-77 between the shortened repeat/anti-repeat region and the shortened hairpin 1 region;
   a shortened hairpin 1 region, wherein nucleotides 86 and 91 are deleted relative to SEQ ID NO: 900, comprising:
[0698] 2′—O-Me modified nucleotides at nucleotides 80, 81, 83, 84, 85, 87-90, 92-94, and 99; 2′—O-Me modified nucleotide at nucleotide 101 between the shortened hairpin 1 region and the shortened hairpin 2 region;
   a shortened hairpin 2 region, wherein nucleotides 112-120 and 127-135 are deleted relative to SEQ ID NO: 900, comprising:
[0699] 2′—O-Me modified nucleotides at nucleotides 104, 110, 111, 122-125, 142, and 143,
[0700] PS linkages between nucleotides 141-142 and 142-143,
   wherein one or both nucleotides 144-145 are optionally deleted relative to SEQ ID NO: 900.

[0701] In some embodiments, a guide RNA (gRNA) is provided, the gRNA comprising: a guide sequence comprising:
[0702] 2′—O-Me modified nucleotides at the first four nucleotides 1-4;
[0703] PS linkages between nucleotides 1-2, 2-3, and 3-4; and
[0704] 2′—O-Me modified nucleotides at nucleotides 5, 8, 9, 11, 13, 18, and 22 of the guide sequence;
   a shortened repeat/anti-repeat region, wherein nucleotides 38-48 and 53-63 are deleted relative to SEQ ID NO: 900, comprising:
[0705] 2′—O-Me modified nucleotides at nucleotides 25, 29, 30, 31, 32, 37, 49-52, 64, 65, 69, 70, and 73;
   a shortened hairpin 1 region, wherein nucleotides 86 and 91 are deleted relative to SEQ ID NO: 900, comprising:
[0706] 2′—O-Me modified nucleotides at nucleotides 80, 81, 83, 84, 85, 87-90, 92-94, and 99;
   2′—O-Me modified nucleotide at nucleotide 101 between the shortened hairpin 1 region and the shortened hairpin 2 region;
   a shortened hairpin 2 region, wherein nucleotides 112-120 and 127-135 are deleted relative to SEQ ID NO: 900, comprising:
[0707] 2′—O-Me modified nucleotides at nucleotides 104, 110, 111, 122-125, 142, and 143,
[0708] PS linkages between nucleotides 141-142 and 142-143,
   wherein one or both nucleotides 144-145 are optionally deleted relative to SEQ ID NO: 900.

[0709] In some embodiments, a guide RNA (gRNA) is provided, the gRNA comprising: a guide sequence comprising:
[0710] 2′—O-Me modified nucleotides at the first four nucleotides 1-4;
[0711] PS linkages between nucleotides 1-2, 2-3, and 3-4; and
[0712] 2′—O-Me modified nucleotides at nucleotides 5, 8, 9, 11, 13, 18, and 22 of the guide sequence;
   a shortened repeat/anti-repeat region, wherein nucleotides 38-48 and 53-63 are deleted relative to SEQ ID NO: 900, comprising:
[0713] 2′—O-Me modified nucleotides at nucleotides 25, 29, 30, 31, 32, 37, 49-52, 64, 65, 69, 70, and 73;
   a PS linkage between nucleotides 76-77 between the shortened repeat/anti-repeat region and the shortened hairpin 1 region;
   a shortened hairpin 1 region, wherein nucleotides 86 and 91 are deleted relative to SEQ ID NO: 900, comprising:
[0714] 2′—O-Me modified nucleotides at nucleotides 80, 81, 83, 84, 85, 87-90, 92-94, and 99;
   2′—O-Me modified nucleotide at nucleotide 101 between the shortened hairpin 1 region and the shortened hairpin 2 region;
   a shortened hairpin 2 region, wherein nucleotides 112-120 and 127-135 are deleted relative to SEQ ID NO: 900, comprising:
[0715] 2′—O-Me modified nucleotides at nucleotides 104, 106-111, 122-125, 142, and 143,
[0716] PS linkages between nucleotides 141-142 and 142-143,
   wherein one or both nucleotides 144-145 are optionally deleted relative to SEQ ID NO: 900.

[0717] In some embodiments, a guide RNA (gRNA) is provided, the gRNA comprising: a guide sequence comprising:
[0718] 2′—O-Me modified nucleotides at the first four nucleotides 1-4;
[0719] PS linkages between nucleotides 1-2, 2-3, and 3-4; and
[0720] 2′—O-Me modified nucleotides at nucleotides 5, 8, 9, 11, 13, 18, and 22 of the guide sequence;
   a shortened repeat/anti-repeat region, wherein nucleotides 38-48 and 53-63 are deleted relative to SEQ ID NO: 900, comprising:
[0721] 2′—O-Me modified nucleotides at nucleotides 25, 29, 30, 31, 32, 37, 49-52, 64, 65, 69, 70, and 73;
   a shortened hairpin 1 region, wherein nucleotides 86 and 91 are deleted relative to SEQ ID NO: 900, comprising:
[0722] 2′—O-Me modified nucleotides at nucleotides 80, 81, 83, 84, 85, 87-90, 92-94, and 99;
   2′—O-Me modified nucleotide at nucleotide 101 between the shortened hairpin 1 region and the shortened hairpin 2 region;
   a shortened hairpin 2 region, wherein nucleotides 112-120 and 127-135 are deleted relative to SEQ ID NO: 900, comprising:
[0723] 2′—O-Me modified nucleotides at nucleotides 104, 106-111, 122-125, 142, and 143,
[0724] PS linkages between nucleotides 141-142 and 142-143,
   wherein one or both nucleotides 144-145 are optionally deleted relative to SEQ ID NO: 900.

[0725] In some embodiments, the NmeCas9 sgRNA comprises any one of the Nme Cas9 guide sequences disclosed herein and additional nucleotides to form a crRNA, e.g., with the following exemplary scaffold nucleotide sequence following the guide sequence at its 3′ end:

(SEQ ID NO: 899)
GUUGUAGCUCCCUUUCUCAUUUCGGAAACGAAAUGAGAACCGUUGCUACA
AUAAGGCCGUCUGAAAAGAUGUGCCGCAACGCUCUGCCCCUUAAAGCUUC
UGCUUUAAGGGGCAUCGUUUA.

[0726] In some embodiments, the NmeCas9 sgRNA comprises any one of the guide sequences disclosed herein and additional nucleotides to form a crRNA with the following nucleotide sequence following the guide sequence at its 3′ end:

(SEQ ID NO: 901)
(N)₂₀₋₂₅GUUGUAGCUCCCUGAAACCGUUGCUACAAUAAGGCCGUCGAA
AAGAUGUGCCGCAACGCUCUGCCUUCUGGCAUCGUU;
(SEQ ID NO: 902)
(N)₂₀₋₂₅GUUGUAGCUCCCUGAAACCGUUGCUACAAUAAGGCCGUCGAA
AGAUGUGCCGCAACGCUCUGCCUUCUGGCAUCGUUUAUU;
(SEQ ID NO: 903)
(N)₂₀₋₂₅GUUGUAGCUCCCUGGAAACCCGUUGCUACAAUAAGGCCGUCG
AAAGAUGUGCCGCAACGCUCUGCCUUCUGGCAUCGUUUAUU

where A, C, G, U, and N are adenine, cytosine, guanine, uracil, and any ribonucleotide, respectively, unless otherwise indicated. In some embodiments, N equals 24. In some embodiments, N equals 25.

[0727] In some embodiments, the sgRNA comprises a conserved region comprising one of the following sequences in 5′ to 3′ orientation:

(SEQ ID NO: 906)
GUUGmUmAmGmCUCCCmUmGmAmAmAmCmCGUUmGmCUAmCAAU*AAGmG
mCCmGmUmCmGmAmAmAmGmAmUGUGCmCGCmAmAmCmGCUCUmGmCCmU
mUmCmUGmGCmAmUC*mG*mU*mU;
or
(SEQ ID NO: 1082)
mGUUGmUmAmGmCUCCCmUmGmAmAmAmCmCGUUmGmCUAmCAAU*AAGm
GmCCmGmUmCmGmAmAmAmGmAmUGUGCmCGmCAAmCGCUCUmGmCCmUm
UmCmUGGCAUCG*mU*mU;

or any one of SEQ ID NOs: 1081-1089, where A, C, G, U, and N are adenine, cytosine, guanine, uracil, and any ribonucleotide, respectively, unless otherwise indicated. An m is indicative of a 2′O-methyl modification, and an * is indicative of a phosphorothioate linkage between the nucleotides.

[0728] In certain embodiments, the guide sequence is 20-25 nucleotides in length ((N)20-25), wherein each nucleotide may be independently modified. In certain embodiments, each of nucleotides 1-3 of the 5′ end of the guide is independently modified. In certain embodiments, each of nucleotides 1-3 of the 5′ end of the guide is independently modified with a 2′—OMe modification. In certain embodiments, each of nucleotides 1-3 of the 5′ end of the guide is independently modified with a phosphorothioate linkage to the adjacent nucleotide residue. In certain embodiments, each of nucleotides 1-3 of the 5′ end of the guide is independently modified with a 2′—OMe modification and a phosphorothioate linkage to the adjacent nucleotide residue.

[0729] In certain embodiments, sgRNA, such as an sgRNA comprising Exemplary NmeCas9 sgRNA, further includes a 3′ tail, e.g., a 3′ tail of 1, 2, 3, 4, or more nucleotides. In certain embodiments, the tail includes one or more modified nucleotides. In certain embodiments, the modified nucleotide is selected from a 2′—O-methyl (2′—OMe) modified nucleotide, a 2′—O-(2-methoxyethyl) (2′—O-moe) modified nucleotide, a 2′-fluoro (2′-F) modified nucleotide, a phosphorothioate (PS) linkage between nucleotides, and an inverted abasic modified nucleotide, or a combination thereof. In certain embodiments, the modified nucleotide includes a 2′—OMe modified nucleotide. In certain embodiments, the modified nucleotide includes a PS linkage between nucleotides. In certain embodiments, the modified nucleotide includes a 2′—OMe modified nucleotide and a PS linkage between nucleotides.

[0730] In some embodiments, the guide RNA is a chemically modified guide RNA. In some embodiments, the guide RNA is a chemically modified single guide RNA. The chemically modified guide RNAs may comprise one or more of the modifications as shown in Tables 1-5. The chemically modified guide RNAs may comprise one or more of modified nucleotides of any one of SEQ ID NOs: 904-909, 911, 995-997, and 1081-1089.

[0731] In some embodiments, the guide RNA is a sgRNA comprising the modification pattern shown in any one of SEQ ID NO: 904-909, 911, 995-997, and 1081-1089.

[0732] In some embodiments, the guide RNA comprises a sgRNA comprising the modification pattern shown in SEQ ID NO: 907. In some embodiments, the guide RNA comprises a sgRNA comprising the modified nucleotides of SEQ ID NO: 907, including a guide sequence disclosed herein. In some embodiments, the guide RNA is a sgRNA comprising a sequence of SEQ ID NO: 907 or a sequence that is at least 99%, 98%, 97%, 96%, 95%, 94%, 93%, 92%, 91%, or 90% identical to SEQ ID NO: 907. In some embodiments, the guide RNA comprises a sgRNA comprising the modification pattern shown in SEQ ID NO: 995. In some embodiments, the guide RNA comprises a sgRNA comprising the modified nucleotides of SEQ ID NO: 995, including a guide sequence disclosed herein. In some embodiments, the guide RNA is a sgRNA comprising a sequence of SEQ ID NO: 995 or a sequence that is at least 99%, 98%, 97%, 96%, 95%, 94%, 93%, 92%, 91%, or 90% identical to SEQ ID NO: 995. In some embodiments, the guide RNA comprises a sgRNA comprising the modification pattern shown in SEQ ID NO: 996. In some embodiments, the guide RNA comprises a sgRNA comprising the modified nucleotides of SEQ ID NO: 996, including a guide sequence disclosed herein. In some embodiments, the guide RNA is a sgRNA comprising a sequence of SEQ ID NO: 996 or a sequence that is at least 99%, 98%, 97%, 96%, 95%, 94%, 93%, 92%, 91%, or 90% identical to SEQ ID NO: 996. In some embodiments, the guide RNA comprises a sgRNA comprising the modification pattern shown in SEQ ID NO: 997. In some embodiments, the guide RNA comprises a sgRNA comprising the modified nucleotides of SEQ ID NO: 997, including a guide sequence disclosed herein. In some embodiments, the guide RNA is a sgRNA comprising a sequence of SEQ ID NO: 997 or a sequence that is at least 99%, 98%, 97%, 96%, 95%, 94%, 93%, 92%, 91%, or 90% identical to SEQ ID NO: 997.

[0733] In some embodiments, the guide RNA comprises a sgRNA comprising the modification pattern shown in SEQ ID NO: 1082. In some embodiments, the guide RNA comprises a sgRNA comprising the modified nucleotides of SEQ ID NO: 1082, including a guide sequence disclosed herein. In some embodiments, the guide RNA is a sgRNA comprising a sequence of SEQ ID NO: 1082 or a sequence that is at least 99%, 98%, 97%, 96%, 95%, 94%, 93%, 92%, 91%, or 90% identical to SEQ ID NO: 1082. In some embodiments, the guide RNA comprises a sgRNA comprising the modification pattern shown in SEQ ID NO: 1083. In some embodiments, the guide RNA comprises a sgRNA comprising the modified nucleotides of SEQ ID NO: 1083, including a guide sequence disclosed herein. In some embodiments, the guide RNA is a sgRNA comprising a sequence of SEQ ID NO: 1083 or a sequence that is at least 99%, 98%, 97%, 96%, 95%, 94%, 93%, 92%, 91%, or 90% identical to SEQ ID NO: 1083. In some embodiments, the guide RNA comprises a sgRNA comprising the modification pattern shown in SEQ ID NO: 1084. In some embodiments, the guide RNA comprises a sgRNA comprising the modified nucleotides of SEQ ID NO: 1084, including a guide sequence disclosed herein. In some embodiments, the guide RNA is a sgRNA comprising a sequence of SEQ ID NO: 1084 or a sequence that is at least 99%, 98%, 97%, 96%, 95%, 94%, 93%, 92%, 91%, or 90% identical to SEQ ID NO: 1084. In some embodiments, the guide RNA comprises a sgRNA comprising the modification pattern shown in SEQ ID NO: 1085. In some embodiments, the guide RNA comprises a sgRNA comprising the modified nucleotides of SEQ ID NO: 1085, including a guide sequence disclosed herein. In some embodiments, the guide RNA is a sgRNA comprising a sequence of SEQ ID NO: 1085 or a sequence that is at least 99%, 98%, 97%, 96%, 95%, 94%, 93%, 92%, 91%, or 90% identical to SEQ ID NO: 1085.

[0734] The guide RNA may further comprise a trRNA. In each composition and method embodiment described herein, the crRNA and trRNA may be associated as a single RNA (sgRNA) or may be on separate RNAs (dgRNA). In the context of sgRNAs, the crRNA and trRNA components may be covalently linked, e.g., via a phosphodiester bond or other covalent bond. In some embodiments, a crRNA or trRNA sequence may be referred to as a “scaffold” or “conserved portion” of a guide RNA.

[0735] In each of the compositions, use, and method embodiments described herein, the guide RNA may comprise two RNA molecules as a “dual guide RNA” or “dgRNA.” The dgRNA comprises a first RNA molecule comprising a crRNA comprising, e.g., a guide sequence shown in Tables 1-5, and a second RNA molecule comprising a trRNA. The first and second RNA molecules may not be covalently linked, but may form an RNA duplex via the base pairing between portions of the crRNA and the trRNA.

[0736] In each of the composition, use, and method embodiments described herein, the guide RNA may comprise a single RNA molecule as a “single guide RNA” or “sgRNA”. The sgRNA may comprise a crRNA (or a portion thereof) comprising a guide sequence shown in Table 1, covalently linked to a trRNA. The sgRNA may comprise 20, 21, 22, 23, or 24 contiguous nucleotides of a guide sequence shown in Tables 1-5. In some embodiments, the crRNA and the trRNA are covalently linked via a linker. In some embodiments, the sgRNA forms a stem-loop structure via the base pairing between portions of the crRNA and the trRNA. In some embodiments, the crRNA and the trRNA are covalently linked via one or more bonds that are not a phosphodiester bond.

[0737] In some embodiments, the trRNA may comprise all or a portion of a trRNA sequence derived from a naturally-occurring CRISPR/Cas system. In some embodiments, the trRNA comprises a truncated or modified wild type trRNA. The length of the trRNA depends on the CRISPR/Cas system used. In some embodiments, the trRNA comprises or consists of 55, 60, 65, 70, 75, 80, 85, 90, 100, or more than 100 nucleotides. In some embodiments, the trRNA may comprise certain secondary structures, such as, for example, one or more hairpin or stem-loop structures, or one or more bulge structures.

[0738] In some embodiments, a composition comprising one or more guide RNAs comprising a guide sequence of any one in Tables 1-5 is provided.

[0739] In one aspect, a composition comprising a guide RNA that comprises a guide sequence that is at least 90% or 95% identical to any of the nucleic acids in Tables 1-5 is provided.

[0740] In other embodiments, a composition is provided that comprises at least one, e.g., at least two gRNAs comprising guide sequences selected from any two or more of the guide sequences shown in Tables 1-5. In some embodiments, the composition comprises at least two gRNAs that each comprise a guide sequence at least 90% or 95% identical to any of the nucleic acids shown in Tables 1-5.

[0741] In some embodiments, the guide RNA compositions of the present invention are designed to recognize (e.g., hybridize to) a target sequence in HLA-A. For example, the HLA-A target sequence may be recognized and cleaved by a provided Cas cleavase comprising a guide RNA. In some embodiments, an RNA-guided DNA binding agent, such as a Cas cleavase, may be directed by a guide RNA to a target sequence in HLA-A, where the guide sequence of the guide RNA hybridizes with the target sequence and the RNA-guided DNA binding agent, such as a Cas cleavase, cleaves the target sequence.

[0742] In some embodiments, the guide RNA compositions of the present invention are designed to recognize (or hybridize to) a target sequence in TRAC. For example, the TRAC target sequence may be recognized and cleaved by a provided Cas cleavase comprising a guide RNA. In some embodiments, an RNA-guided DNA binding agent, such as a Cas cleavase, may be directed by a guide RNA to a target sequence in TRAC, where the guide sequence of the guide RNA hybridizes with the target sequence and the RNA-guided DNA binding agent, such as a Cas cleavase, cleaves the target sequence.

[0743] In some embodiments, the guide RNA compositions of the present invention are designed to recognize (e.g., hybridize to) a target sequence in TRBC1. For example, the TRBC1 target sequence may be recognized and cleaved by a provided Cas cleavase comprising a guide RNA. In some embodiments, an RNA-guided DNA binding agent, such as a Cas cleavase, may be directed by a guide RNA to a target sequence in TRBC1, where the guide sequence of the guide RNA hybridizes with the target sequence and the RNA-guided DNA binding agent, such as a Cas cleavase, cleaves the target sequence.

[0744] In some embodiments, the guide RNA compositions of the present invention are designed to recognize (e.g., hybridize to) a target sequence in TRBC2. For example, the TRBC2 target sequence may be recognized and cleaved by a provided Cas cleavase comprising a guide RNA. In some embodiments, an RNA-guided DNA binding agent, such as a Cas cleavase, may be directed by a guide RNA to a target sequence in TRBC2, where the guide sequence of the guide RNA hybridizes with the target sequence and the RNA-guided DNA binding agent, such as a Cas cleavase, cleaves the target sequence.

[0745] In some embodiments, the guide RNA compositions of the present invention are designed to recognize (e.g., hybridize to) a target sequence in CIITA. For example, the CIITA target sequence may be recognized and cleaved by a provided Cas cleavase comprising a guide RNA. In some embodiments, an RNA-guided DNA binding agent, such as a Cas cleavase, may be directed by a guide RNA to a target sequence in CIITA, where the guide sequence of the guide RNA hybridizes with the target sequence and the RNA-guided DNA binding agent, such as a Cas cleavase, cleaves the target sequence.

[0746] In some embodiments, the guide RNA compositions of the present invention are designed to recognize (e.g., hybridize to) a target sequence in AAVS1. For example, the AAVS1 target sequence may be recognized and cleaved by a provided Cas cleavase comprising a guide RNA. In some embodiments, an RNA-guided DNA binding agent, such as a Cas cleavase, may be directed by a guide RNA to a target sequence in AAVS1, where the guide sequence of the guide RNA hybridizes with the target sequence and the RNA-guided DNA binding agent, such as a Cas cleavase, cleaves the target sequence.

[0747] In some embodiments, the selection of the one or more guide RNAs is determined based on target sequences within HLA-A, TRAC, TRBC, CIITA, or AAVS1. In some embodiments, the compositions comprising one or more guide sequences comprise a guide sequence that is complementary to the corresponding genomic region shown in Tables 1-5, according to coordinates from human reference genome hg38. Guide sequences of further embodiments may be complementary to sequences in the close vicinity of the genomic coordinate listed in any of the Tables 1-5 within HLA-A, TRAC, TRBC, CIITA, or AAVS1. For example, guide sequences of further embodiments may be complementary to sequences that comprise 10 contiguous nucleotides±10 nucleotides of a genomic coordinate listed in Tables 1-5.

[0748] Without being bound by any particular theory, modifications (e.g., frameshift mutations resulting from indels occurring as a result of a nuclease-mediated DSB) in certain regions of the target gene may be less tolerable than mutations in other regions, thus the location of a DSB is an important factor in the amount or type of protein knockdown that may result. In some embodiments, a gRNA complementary or having complementarity to a target sequence within the target gene used to direct an RNA-guided DNA binding agent to a particular location in the target gene.

[0749] In some embodiments, the Nme guide sequence is at least 90% or 95% or 100% identical to the reverse complement of a target sequence present in an HLA-A, TRAC, TRBC, CIITA, or AAVS1 gene. In some embodiments, the target sequence may be complementary to the guide sequence of the guide RNA. In some embodiments, the degree of complementarity or identity between a guide sequence of an Nme guide RNA and its corresponding target sequence is at least 80%, 85%, 90% or 95%; or 100%. In some embodiments, the target sequence and the guide sequence of the gRNA may be 100% complementary or identical.

[0750] In some embodiments, the target sequence and the guide sequence of the Nme gRNA may contain at least one mismatch. For example, the target sequence and the guide sequence of the gRNA may contain 1 or 2, less preferably 3, or 4 mismatches, where the total length of the guide sequence is 24 nucleotides. In some embodiments, the target sequence and the guide sequence of the gRNA may contain 1-2 mismatches, where the guide sequence is 24 nucleotides.

[0751] In some embodiments, the Nme guide sequence comprises a sequence of at least 21, 22, 23 or 24 contiguous nucleotides of a sequence selected from SEQ ID NOs: 2-80, 101-120, 201-265, 301, 302, 304-576, and 601-774.

[0752] In some embodiments, a composition or formulation disclosed herein comprises an mRNA comprising an open reading frame (ORF) encoding an RNA-guided DNA binding agent, such as a Cas nuclease as described herein. In some embodiments, an mRNA comprising an ORF encoding an RNA-guided DNA binding agent, such as a Cas nuclease, is provided, used, or administered.

[0753] In some embodiments, the gRNA is chemically modified. A gRNA comprising one or more modified nucleosides or nucleotides is called a “modified” gRNA or “chemically modified” gRNA, to describe the presence of one or more non-naturally or naturally occurring components or configurations that are used instead of or in addition to the canonical A, G, C, and U residues. Modified nucleosides and nucleotides can include one or more of: (i) alteration, e.g., replacement, of one or both of the non-linking phosphate oxygens or of one or more of the linking phosphate oxygens in the phosphodiester backbone linkage (an exemplary backbone modification); (ii) alteration, e.g., replacement, of a constituent of the ribose sugar, e.g., of the 2′ hydroxyl on the ribose sugar (an exemplary sugar modification); (iii) wholesale replacement of the phosphate moiety with “dephospho” linkers (an exemplary backbone modification); (iv) modification or replacement of a naturally occurring nucleobase, including with a non-canonical nucleobase (an exemplary base modification); (v) replacement or modification of the ribose-phosphate backbone (an exemplary backbone modification); (vi) modification of the 3′ end or 5′ end of the oligonucleotide, e.g., removal, modification or replacement of a terminal phosphate group or conjugation of a moiety, cap or linker (such 3′ or 5′ cap modifications may comprise a sugar or backbone modification); and (vii) modification or replacement of the sugar (an exemplary sugar modification).

[0754] Chemical modifications such as those listed above can be combined to provide modified gRNAs comprising nucleosides and nucleotides (collectively “residues”) that can have two, three, four, or more modifications. For example, a modified residue can have a modified sugar and a modified nucleobase. In some embodiments, every base of a gRNA is modified, e.g., all bases have a modified phosphate group, such as a phosphorothioate group. In certain embodiments, all, or substantially all, of the phosphate groups of an gRNA molecule are replaced with phosphorothioate groups. In some embodiments, modified gRNAs comprise at least one modified residue at or near the 5′ end of the RNA. In some embodiments, modified gRNAs comprise at least one modified residue at or near the 3′ end of the RNA.

[0755] In some embodiments, the gRNA comprises one, two, three or more modified residues. In some embodiments, at least 5% (e.g., at least 5%, at least 10%, at least 15%, at least 20%, at least 25%, at least 30%, at least 35%, at least 40%, at least 45%, at least 50%, at least 55%, at least 60%, at least 65%, at least 70%, at least 75%, at least 80%, at least 85%, at least 90%, at least 95%, or 100%) of the positions in a modified gRNA are modified nucleosides or nucleotides.

[0756] In some embodiments of a backbone modification, the phosphate group of a modified residue can be modified by replacing one or more of the oxygens with a different substituent. Further, the modified residue, e.g., modified residue present in a modified nucleic acid, can include the wholesale replacement of an unmodified phosphate moiety with a modified phosphate group as described herein. In some embodiments, the backbone modification of the phosphate backbone can include alterations that result in either an uncharged linker or a charged linker with unsymmetrical charge distribution.

[0757] Examples of modified phosphate groups include phosphorothioate, phosphoroselenates, borano phosphates, borano phosphate esters, hydrogen phosphonates, phosphoroamidates, alkyl or aryl phosphonates and phosphotriesters.

[0758] Scaffolds that can mimic nucleic acids can also be constructed wherein the phosphate linker and ribose sugar are replaced by nuclease resistant nucleoside or nucleotide surrogates. Such modifications may comprise backbone and sugar modifications. In some embodiments, the nucleobases can be tethered by a surrogate backbone. Examples can include, without limitation, the morpholino, cyclobutyl, pyrrolidine and peptide nucleic acid (PNA) nucleoside surrogates. The modified nucleosides and modified nucleotides can include one or more modifications to the sugar group, i.e. at sugar modification. For example, the 2′ hydroxyl group (OH) can be modified, e.g. replaced with a number of different “oxy” or “deoxy” substituents. In some embodiments, modifications to the 2′ hydroxyl group can enhance the stability of the nucleic acid since the hydroxyl can no longer be deprotonated to form a 2′-alkoxide ion. Examples of 2′ hydroxyl group modifications can include alkoxy or aryloxy (OR, wherein “R” can be, e.g., alkyl, cycloalkyl, aryl, aralkyl, heteroaryl or a sugar); polyethyleneglycols (PEG), O(CH₂CH₂O)ₙCH₂CH₂OR wherein R can be, e.g., H or optionally substituted alkyl, and n can be an integer from 0 to 20. In some embodiments, the 2′ hydroxyl group modification can be 2′—O-Me. In some embodiments, the 2′ hydroxyl group modification can be a 2′-fluoro modification, which replaces the 2′ hydroxyl group with a fluoride. In some embodiments, the 2′ hydroxyl group modification can include “locked” nucleic acids (LNA) in which the 2′ hydroxyl can be connected, e.g., by a C₁₋₆ alkylene or C₁₋₆ heteroalkylene bridge, to the 4′ carbon of the same ribose sugar, where exemplary bridges can include methylene, propylene, ether, or amino bridges. In some embodiments, the 2′ hydroxyl group modification can included “unlocked” nucleic acids (UNA) in which the ribose ring lacks the C2′—C3′ bond. In some embodiments, the 2′ hydroxyl group modification can include the methoxyethyl group (MOE), (OCH₂CH₂OCH₃, e.g., a PEG derivative). [00708]“Deoxy” 2′ modifications can include hydrogen (i.e. deoxyribose sugars, e.g., at the overhang portions of partially dsRNA); halo (e.g., bromo, chloro, fluoro, or iodo); amino (wherein amino can be, e.g., NH₂; alkylamino, dialkylamino, heterocyclyl, arylamino, diarylamino, heteroarylamino, diheteroarylamino, or amino acid); NH(CH₂CH₂NH)ₙCH₂CH₂— amino (wherein amino can be, e.g., as described herein), —NHC(O)R (wherein R can be, e.g., alkyl, cycloalkyl, aryl, aralkyl, heteroaryl or sugar), cyano; mercapto; alkyl-thio-alkyl; thioalkoxy; and alkyl, cycloalkyl, aryl, alkenyl and alkynyl, which may be optionally substituted with e.g., an amino as described herein.

[0759] The sugar modification can comprise a sugar group which may also contain one or more carbons that possess the opposite stereochemical configuration than that of the corresponding carbon in ribose. Thus, a modified nucleic acid can include nucleotides containing e.g., arabinose, as the sugar. The modified nucleic acids can also include abasic sugars. These abasic sugars can also be further modified at one or more of the constituent sugar atoms. The modified nucleic acids can also include one or more sugars that are in the L form, e.g. L- nucleosides.

[0760] The modified nucleosides and modified nucleotides described herein, which can be incorporated into a modified nucleic acid, can include a modified base, also called a nucleobase. Examples of nucleobases include, but are not limited to, adenine (A), guanine (G), cytosine (C), and uracil (U). These nucleobases can be modified or wholly replaced to provide modified residues that can be incorporated into modified nucleic acids. The nucleobase of the nucleotide can be independently selected from a purine, a pyrimidine, a purine analog, or pyrimidine analog. In some embodiments, the nucleobase can include, for example, naturally-occurring and synthetic derivatives of a base.

[0761] In embodiments employing a dual guide RNA, each of the crRNA and the tracr RNA can contain modifications. Such modifications may be at one or both ends of the crRNA or tracr RNA. In embodiments comprising an sgRNA, one or more residues at one or both ends of the sgRNA may be chemically modified, or the entire sgRNA may be chemically modified. Certain embodiments comprise a 5′ end modification. Certain embodiments comprise a 3′ end modification. In certain embodiments, one or more or all of the nucleotides in single stranded overhang of a gRNA molecule are deoxynucleotides.

[0762] In some embodiments, the gRNAs disclosed herein comprise one of the modification patterns disclosed in WO2018/107028 A1, published Jun. 14, 2018 the contents of which are hereby incorporated by reference in their entirety.

[0763] The terms “mA,” “mC,” “mU,” or “mG” may be used to denote a nucleotide that has been modified with 2′—O-Me. The terms “fA,” “fC,” “fU,” or “fG” may be used to denote a nucleotide that has been substituted with 2′-F. A “*” may be used to depict a PS modification. The terms A*, C*, U*, or G* may be used to denote a nucleotide that is linked to the next (e.g., 3′) nucleotide with a PS bond. The terms “mA*,” “mC*,”, “mU*,” or “mG*” may be used to denote a nucleotide that has been substituted with 2′—O-Me and that is linked to the next (e.g., 3′) nucleotide with a PS bond.

[0764] In some embodiments, the gRNAs disclosed herein comprise one or more internal linkers. As used herein, “internal linker” describes a non-nucleotide segment joining two nucleotides within a guide RNA. If the gRNA contains a spacer region, the internal linker is located outside of the spacer region (e.g., in the scaffold or conserved region of the gRNA). The length of an internal linker may be dependent on, for example, the number of nucleotides replaced by the linker and the position of the linker in the gRNA. Exemplary linker-containing gRNAs are disclosed in WO 2022/261292 A1, published Dec. 15, 2022, the content of which is hereby incorporated by reference in its entirety.

[0765] gRNAs disclosed herein may comprise an internal linker. In general, any internal linker compatible with the function of the gRNA may be used. It may be desirable for the linker to have a degree of flexibility. In some embodiments, the internal linker comprises at least two, three, four, five, six, or more on-pathway single bonds. A bond is on-pathway if it is part of the shortest path of bonds between the two nucleotides whose 5′ and 3′ positions are connected to the linker.

[0766] As used herein the length of the internal linker can be defined by its bridging length. The “bridging length” of an internal linker as used herein refers to the distance or number of atoms in the shortest chain of atoms on the pathway from the first atom of the linker (bound to a 3′ substituent, such as an oxygen or phosphate, of the preceding nucleotide to the last atom of the linker (bound to a 5′ substituent, such as an oxygen or phosphate) of the following nucleotide) (e.g., from ˜ to #in the structure of Formula (I) described below). Approximate predicted bridging lengths for various linkers are provided in the table below.

[0767] Exemplary predicted linker lengths by number of atoms, number of ethylene glycol units, approximate linker length in Angstroms on the assumption that an ethylene glycol monomer is about 3.7 Angstroms, and suitable location for substitution of at least the entire loop portion of a hairpin structure are provided in the Table 28 below. Substitution of two nucleotides requires a linker length of at least about 11 Angstroms. Substitution of at least 3 nucleotides requires a linker length of at least about 16 Angstroms.

TABLE 28

| | Number of | | |
|---|---|---|---|
| Number of | Ethylene Glycol | Approximate length | Suitable location for |
| atoms | units | in Angstroms | complete loop substitution |
| 3 | 1 | 3.7 | Repeat-anti-repeat (for both loop |
| | | | and stem when no stem present) |
| 6 | 2 | 7.4 | Repeat-anti-repeat (for both loop |
| | | | and stem when no stem present) |
| 9 | 3 | 11.1 | Repeat-anti-repeat (for both loop |
| | | | and stem when no stem present), |
| | | | Nexus |
| 12 | 4 | 14.8 | Nexus |
| 15 | 5 | 18.5 | Repeat-anti-repeat, hairpin 1, |
| | | | hairpin 2 |
| 18 | 6 | 22.2 | Repeat-anti-repeat, hairpin 1, |
| | | | hairpin 2 |
| 21 | 7 | 25.9 | Repeat-anti-repeat, hairpin 1, |
| | | | hairpin 2 |
| 24 | 8 | 29.6 | Repeat-anti-repeat, hairpin 1, |
| | | | hairpin 2 |
| 27 | 9 | 33.3 | Repeat-anti-repeat, hairpin 1, |
| | | | hairpin 2 |
| 30 | 10 | 37 | Repeat-anti-repeat, hairpin 1, |
| | | | hairpin 2 |

[0768] In some embodiments, the internal linker comprises a structure of formula (I):

˜-L0-L1-L2-# (I)
[0769] wherein:
[0770] ˜ indicates a bond to a 3′ substituent of the preceding nucleotide;
[0771] #indicates a bond to a 5′ substituent of the following nucleotide;
[0772] L0 is null or C₁₋₃ aliphatic;
[0773] L1 is -[E¹-(R¹)]ₘ-, where
[0774] each R¹ is independently a C₁₋₅ aliphatic group, optionally substituted with 1 or 2 E²,
[0775] each E¹ and E² are independently a hydrogen bond acceptor, or are each independently chosen from cyclic hydrocarbons, and heterocyclic hydrocarbons, and
[0776] each m is 1, 2, 3, 4, 5, 6, 7, 8, 9, or 10; and
[0777] L2 is null, C₁₋₃ aliphatic, or is a hydrogen bond acceptor.

[0778] In some embodiments, L1 comprises one or more —CH₂CH₂O—, —CH₂OCH₂—, or —OCH₂CH₂— units (“ethylene glycol subunits”). In some embodiments, the number of —CH₂CH₂O—, —CH₂OCH₂—, or —OCH₂CH₂— units is in the range of 1, 2, 3, 4, 5, 6, 7, 8, 9 or 10.

[0779] In some embodiments, m is 1, 2, 3, 4 or 5. In some embodiments, m is 1, 2, or 3. In some embodiments, m is 6, 7, 8, 9, or 10.

[0780] In some embodiments, L0 is null. In some embodiments, L0 is —CH₂— or —CH₂CH₂—.

[0781] In some embodiments, L2 is null. In some embodiments, L2 is —O—, —S—, or C₁₋₃ aliphatic. In some embodiments, L2 is —O—. In some embodiments, L2 is —S—. In some embodiments, L2 is —CH₂— or —CH₂CH₂—.

[0782] In the tables herein, L1 and L2, are optionally, C9 and C18, respectively as follows:

[chemical structure]

[0783] In certain embodiments, the internal linker has a bridging length of about 3-30 atoms, optionally 12-21 atoms, and the linker substitutes for at least 2 nucleotides of the gRNA. In certain embodiments, the internal linker has a bridging length of about 6-18 atoms, optionally about 6-12 atoms, and the linker substitutes for at least 2 nucleotides of the gRNA. In certain embodiments, the internal linker substitutes for 2-12 nucleotides.

[0784] In some embodiments, the guide RNA comprises a nucleic acid sequence of SEQ ID NO: 900, including modifications disclosed elsewhere herein. Table 29 shows various embodiments of the gRNA structures and species with possible number of internal linkers and positions.

TABLE 29

| gRNA | | # internal | Positions of |
|---|---|---|---|
| structures | Type | linkers | internal linkers |
| Repeat/anti- | Nme | 3 | All of repeat/anti-R; |
| R; Hp1; | | | Hp1; Hp2 |
| Hp2 | | | |
| Repeat/anti- | Nme | 2 | Any two of repeat/ |
| R; Hp1; | | | anti-R; Hp1; Hp2 |
| Hp2 | | | |
| Repeat/anti- | Nme | 1 | Any one of repeat/ |
| R; Hp1; | | | anti-R; Hp1; Hp2 |
| Hp2 | | | |

[0785] In certain embodiments, the internal linker is in a repeat-anti-repeat region of the gRNA. In certain embodiments, the internal linker substitutes for at least 4 nucleotides of the repeat-anti-repeat region of the gRNA. In certain embodiments, the internal linker substitutes for the loop in the repeat-anti-repeat region of an Nme Cas9 gRNA, corresponding to nucleotides 49-52 in SEQ ID NO: 900.

[0786] In certain embodiments, the internal linker is in a hairpin region of the gRNA. In certain embodiments, the internal linker substitutes for at least 4 nucleotides of the hairpin region of the gRNA. In certain embodiments, the internal linker substitutes for the loop in the hairpin 1 region of an Nme Cas9 gRNA, corresponding to nucleotides 87-90 in SEQ ID NO: 900. In certain embodiments, the internal linker substitutes for at least 4 nucleotides the loop in the hairpin 2 region of an Nme Cas9 gRNA, corresponding to nucleotides 122-125 in SEQ ID NO: 900. In certain embodiments, the internal linker substitutes for the loop in the hairpin 1 region of an Nme Cas9 gRNA, corresponding to nucleotides 87-90 in SEQ ID NO: 900 and for at least 4 nucleotides the loop in the hairpin 2 region of an Nme Cas9 gRNA, corresponding to nucleotides 122-125 in SEQ ID NO: 900.

TABLE 6
exemplary NmeCas9 sgRNA(SEQ ID NO: 900)

| | | | | | | | | | | | | | | | | | | | | | | | | |
|---|---|---|---|---|---|---|---|---|---|---|---|---|---|---|---|---|---|---|---|---|---|---|---|---|
| 1-24 | 25 | 26 | 27 | 28 | 29 | 30 | 31 | 32 | 33 | 34 | 35 | 36 | 37 | 38 | 39 | 40 | 41 | 42 | 43 | 44 | 45 | 46 | 47 | 48 |
| NNNNNNNNNNNNNNNNNNNNNNNN | G | U | U | G | U | A | G | C | U | C | C | C | U | U | U | C | U | C | A | U | U | U | C | G |

| | |
|---|---|
| Lower stem | Upper stem |

| Guide region | | | | | | Repeat/Anti-Repeat region | | | | | | | | | | | | | | | | | | | | | | |
|---|---|---|---|---|---|---|---|---|---|---|---|---|---|---|---|---|---|---|---|---|---|---|---|---|---|---|---|---|
| 49 | 50 | 51 | 52 | 53 | 54 | 55 | 56 | 57 | 58 | 59 | 60 | 61 | 62 | 63 | 64 | 65 | 66 | 67 | 68 | 69 | 70 | 71 | 72 | 73 | 74 | 75 | 76 | 77 |
| G | A | A | A | C | G | A | A | A | U | G | A | G | A | A | C | C | G | U | U | G | C | U | A | C | A | A | U | A |

| | | |
|---|---|---|
| Loop | Upper stem | Lower stem |

Repeat/Anti-Repeat region

| | | | | | | | | | | | | | | | | | | | | | | | | | | | | | | |
|---|---|---|---|---|---|---|---|---|---|---|---|---|---|---|---|---|---|---|---|---|---|---|---|---|---|---|---|---|---|---|
| 78 | 79 | 80 | 81 | 82 | 83 | 84 | 85 | 86 | 87 | 88 | 89 | 90 | 91 | 92 | 93 | 94 | 95 | 96 | 97 | 98 | 99 | 100 | 101 | 102 | 103 | 104 | 105 | 106 | 107 | 108 |
| A | G | G | C | C | G | U | C | U | G | A | A | A | A | G | A | U | G | U | G | C | C | G | C | A | A | C | G | C | U | C |

| | | | | |
|---|---|---|---|---|
| Stem | Loop | Stem (96: unpaired) | Lower stem | Bulge |

| | |
|---|---|
| Hairpin 1 | Hairpin 2 |

| | | | | | | | | | | | | | | | | | | | | | | | | | |
|---|---|---|---|---|---|---|---|---|---|---|---|---|---|---|---|---|---|---|---|---|---|---|---|---|---|
| 109 | 110 | 111 | 112 | 113 | 114 | 115 | 116 | 117 | 118 | 119 | 120 | 121 | 122 | 123 | 124 | 125 | 126 | 127 | 128 | 129 | 130 | 131 | 132 | 133 | 134 |
| U | G | C | C | C | C | U | U | A | A | A | G | C | U | U | C | U | G | C | U | U | U | A | A | G | G |

| | | |
|---|---|---|
| Upper Stem | Loop | Upper Stem |

Hairpin 2

| | | | | | | | | | | |
|---|---|---|---|---|---|---|---|---|---|---|
| 135 | 136 | 137 | 138 | 139 | 140 | 141 | 142 | 143 | 144 | 145 |
| G | G | C | A | U | C | G | U | U | U | A |

| | | |
|---|---|---|
| Upper Stem | Bulge | Lower Stem |

| | |
|---|---|
| Hairpin 2 | Tail |

### B. Ribonucleoprotein Complex

[0787] In some embodiments, the disclosure provides compositions comprising one or more gRNAs comprising one or more guide sequences from Tables 1-5 and an RNA-guided DNA binding agent, e.g., a nuclease, such as a Cas nuclease, such as Cas9. In some embodiments, the RNA-guided DNA-binding agent has cleavase activity, which can also be referred to as double-strand endonuclease activity. In some embodiments, the RNA-guided DNA-binding agent comprises a Cas nuclease. Examples of Cas9 nucleases include those of the type II CRISPR systems of N. meningitidis and other prokaryotes known in the art, and modified (e.g., engineered or mutant) versions thereof. In some embodiments, the RNA-guided DNA-binding agent comprises a Cas nickase. In some embodiments, the RNA-guided nickase is modified or derived from a Cas protein, such as a Class 2 Cas nuclease (which may be, e.g., a Cas nuclease of Type II). Class 2 Cas nuclease include, for example, Cas9 proteins and modifications thereof.

[0788] In some embodiments, the Cas nuclease is the Cas9 nuclease from Neisseria meningitidis.

[0789] In some embodiments, the Cas nickase is a nickase form of the Cas9 nuclease from Neisseria meningitidis. See e.g., WO/2020081568, describing an Nme2Cas9 D16A nickase fusion protein.

[0790] In some embodiments, the gRNA together with an RNA-guided DNA binding agent is called a ribonucleoprotein complex (RNP). In some embodiments, the RNA-guided DNA binding agent is a Cas nuclease. In some embodiments, the gRNA together with a Cas nuclease is called a Cas RNP. In some embodiments, the RNP comprises Type-II components. In some embodiments, the Cas nuclease is the Cas9 protein from the Type-II CRISPR/Cas system. In some embodiment, the gRNA together with Cas9 is called a Cas9 RNP.

[0791] Wild type Cas9 has two nuclease domains: RuvC and HNH. The RuvC domain cleaves the non-target DNA strand, and the HNH domain cleaves the target strand of DNA. In some embodiments, the Cas9 protein comprises more than one RuvC domain or more than one HNH domain. In some embodiments, the Cas9 protein is a wild type Cas9. In each of the composition, use, and method embodiments, the Cas induces a double strand break in target DNA.

[0792] In some embodiments, chimeric Cas nucleases are used, where one domain or region of the protein is replaced by a portion of a different protein. In some embodiments, a Cas nuclease domain may be replaced with a domain from a different nuclease such as FokI. In some embodiments, a Cas nuclease may be a modified nuclease.

[0793] In some embodiments, the RNA-guided DNA-binding agent has single-strand nickase activity, i.e., can cut one DNA strand to produce a single-strand break, also known as a “nick.” In some embodiments, the RNA-guided DNA-binding agent comprises a Cas nickase. A nickase is an enzyme that creates a nick in dsDNA, i.e., cuts one strand but not the other of the DNA double helix. In some embodiments, a Cas nickase is a version of a Cas nuclease (e.g., a Cas nuclease discussed above) in which an endonucleolytic active site is inactivated, e.g., by one or more alterations (e.g., point mutations) in a catalytic domain. See e.g., U.S. Pat. No. 8,889,356 for discussion of Cas nickases and exemplary catalytic domain alterations. In some embodiments, a Cas nickase such as a Cas9 nickase has an inactivated RuvC or HNH domain.

[0794] In some embodiments, the RNA-guided DNA-binding agent is modified to contain only one functional nuclease domain. For example, the agent protein may be modified such that one of the nuclease domains is mutated or fully or partially deleted to reduce its nucleic acid cleavage activity. In some embodiments, a nickase is used having a RuvC domain with reduced activity. In some embodiments, a nickase is used having an inactive RuvC domain. In some embodiments, a nickase is used having an HNH domain with reduced activity. In some embodiments, a nickase is used having an inactive HNH domain.

[0795] In some embodiments, a conserved amino acid within a Cas protein nuclease domain is substituted to reduce or alter nuclease activity. In some embodiments, a Cas nuclease may comprise an amino acid substitution in the RuvC or RuvC-like nuclease domain. Exemplary amino acid substitutions in the HNH or HNH-like nuclease domain or RuvC or RuvC-like domains for N. meningitidis include Nme2Cas9D16A (HNH nickase) and Nme2Cas9H588A (RuvC nickase).

[0796] In some embodiments, an mRNA encoding a nickase is provided in combination with a pair of guide RNAs that are complementary to the sense and antisense strands of the target sequence, respectively. In this embodiment, the guide RNAs direct the nickase to a target sequence and introduce a DSB by generating a nick on opposite strands of the target sequence (i.e., double nicking). In some embodiments, use of double nicking may improve specificity and reduce off-target effects. In some embodiments, a nickase is used together with two separate guide RNAs targeting opposite strands of DNA to produce a double nick in the target DNA. In some embodiments, a nickase is used together with two separate guide RNAs that are selected to be in close proximity to produce a double nick in the target DNA.

[0797] In some embodiments, the RNA-guided DNA-binding agent lacks cleavase and nickase activity. In some embodiments, the RNA-guided DNA-binding agent comprises a dCas DNA-binding polypeptide. A dCas polypeptide has DNA-binding activity while essentially lacking catalytic (cleavase/nickase) activity. In some embodiments, the dCas polypeptide is a dCas9 polypeptide. In some embodiments, the RNA-guided DNA-binding agent lacking cleavase and nickase activity or the dCas DNA-binding polypeptide is a version of a Cas nuclease (e.g., a Cas nuclease discussed above) in which its endonucleolytic active sites are inactivated, e.g., by one or more alterations (e.g., point mutations) in its catalytic domains. See, e.g., US 2014/0186958 A1; US 2015/0166980 A1.

[0798] In some embodiments, the RNA-guided DNA binding agent comprises one or more heterologous functional domains (e.g., is or comprises a fusion polypeptide).

[0799] In some embodiments, the RNA-guided DNA binding agent comprises a APOBEC3 deaminase. In some embodiments, a APOBEC3 deaminase is a APOBEC3A (A3A). In some embodiments, the A3A is a human A3A. In some embodiments, the A3A is a wild-type A3A.

[0800] In some embodiments, the RNA-guided DNA binding agent comprises a deaminase and an RNA-guided nickase. In some embodiments, the mRNA further comprises a linker to link the sequencing encoding A3A to the sequence sequencing encoding RNA-guided nickase. In some embodiments, the linker is an organic molecule, group, polymer, or chemical moiety. In some embodiments, the linker is a peptide linker. In some embodiments, the peptide linker is any stretch of amino acids having at least 1, at least 2, at least 3, at least 4, at least 5, at least 6, at least 7, at least 8, at least 9, at least 10, at least 15, at least 20, at least 25, at least 30, at least 40, at least 50, or more amino acids. In some embodiments, the peptide linker is the 16 residue “XTEN” linker, or a variant thereof (See, e.g., the Examples; and Schellenberger et al. A recombinant polypeptide extends the in vivo half-life of peptides and proteins in a tunable manner. Nat. Biotechnol. 27, 1186-1190 (2009)).

[0801] In some embodiments, the peptide linker is the 16 residue “XTEN” linker, or a variant thereof (See, e.g., the Examples; and Schellenberger et al. A recombinant polypeptide extends the in vivo half-life of peptides and proteins in a tunable manner. Nat. Biotechnol. 27, 1186-1190 (2009)). In some embodiments, the XTEN linker comprises the sequence SGSETPGTSESATPES (SEQ ID NO: 930), SGSETPGTSESA (SEQ ID NO: 931), or SGSETPGTSESATPEGGSGGS (SEQ ID NO: 932).

[0802] In some embodiments, the peptide linker comprises a (GGGGS)ₙ(SEQ ID NO: 998), a (G)ₙ, an (EAAAK)ₙ(SEQ ID NO: 935), a (GGS)ₙ, an SGSETPGTSESATPES (SEQ ID NO: 930) motif (see, e.g., Guilinger J P, Thompson D B, Liu D R. Fusion of catalytically inactive Cas9 to FokI nuclease improves the specificity of genome modification. Nat. Biotechnol. 2014; 32(6): 577-82; the entire contents are incorporated herein by reference), or an (XP)ₙ motif, or a combination of any of these, wherein n is independently an integer between 1 and 30 (SEQ ID NO: 3012). See, WO2015089406, e.g., paragraph [0012], the entire content of which is incorporated herein by reference.

[0803] In some embodiments, the peptide linker comprises one or more sequences selected from SEQ ID NOs: 930-994.

[0804] In some embodiments, the heterologous functional domain may facilitate transport of the RNA-guided DNA-binding agent into the nucleus of a cell. For example, the heterologous functional domain may be a nuclear localization signal (NLS). In some embodiments, the RNA-guided DNA-binding agent may be fused with 1-5 NLS(s). In some embodiments, the RNA-guided DNA-binding agent may be fused with 2, 3, or 4 NLS(s). In some embodiments, the RNA-guided DNA-binding agent may be fused with two NLS(s). In some embodiments, the RNA-guided DNA-binding agent may be fused with one NLS. Where one NLS is used, the NLS may be linked at the N-terminus or the C-terminus of the RNA-guided DNA-binding agent sequence. In some embodiments, the NLS is not linked to the C-terminus. It may also be inserted within the RNA-guided DNA binding agent sequence. In certain circumstances, at least the two NLSs are the same (e.g., two SV40 NLSs). In certain embodiments, at least two different NLSs are present the RNA-guided DNA binding agent. In some embodiments, the RNA-guided DNA-binding agent is fused to two SV40 NLS sequences linked at the carboxy terminus. In some embodiments, the RNA-guided DNA-binding agent may be fused with two NLSs, one linked at the N-terminus and one at the C-terminus. In some embodiments, the RNA-guided DNA-binding agent may be fused with 3 NLSs. In some embodiments, the RNA-guided DNA-binding agent may be fused with no NLS. In some embodiments, the NLS may be a monopartite sequence, such as, e.g., the SV40 NLS, PKKKRKV (SEQ ID NO: 3013) or PKKKRRV (SEQ ID NO: 923). In some embodiments, the NLS may be a bipartite sequence, such as the NLS of nucleoplasmin, KRPAATKKAGQAKKKK (SEQ ID NO: 924). In a specific embodiment, a single PKKKRKV (SEQ ID NO: 3013) NLS may be linked at the C-terminus of the RNA-guided DNA-binding agent. One or more linkers are optionally included at the fusion site. In some embodiments, the NLS comprises one or more sequences selected from SEQ ID NOs: 912-924.

[0805] In some embodiments, the RNA-guided DNA binding agent comprises an editor. An exemplary editor is BC22n which includes a H. sapiens APOBEC3A fused to Nme D16A Cas9 nickase by an XTEN linker, and mRNA encoding BC22n. An mRNA encoding NmeCas9 BC22n is provided (SEQ ID NO: 822).

[0806] In some embodiments, the heterologous functional domain may be capable of modifying the intracellular half-life of the RNA-guided DNA binding agent. In some embodiments, the half-life of the RNA-guided DNA binding agent may be increased. In some embodiments, the half-life of the RNA-guided DNA-binding agent may be reduced. In some embodiments, the heterologous functional domain may be capable of increasing the stability of the RNA-guided DNA-binding agent. In some embodiments, the heterologous functional domain may be capable of reducing the stability of the RNA-guided DNA-binding agent. In some embodiments, the heterologous functional domain may act as a signal peptide for protein degradation. In some embodiments, the protein degradation may be mediated by proteolytic enzymes, such as, for example, proteasomes, lysosomal proteases, or calpain proteases. In some embodiments, the heterologous functional domain may comprise a PEST sequence. In some embodiments, the RNA-guided DNA-binding agent may be modified by addition of ubiquitin or a polyubiquitin chain. In some embodiments, the ubiquitin may be a ubiquitin-like protein (UBL). Non-limiting examples of ubiquitin-like proteins include small ubiquitin-like modifier (SUMO), ubiquitin cross-reactive protein (UCRP, also known as interferon-stimulated gene-15 (ISG15)), ubiquitin-related modifier-1 (URM1), neuronal-precursor-cell-expressed developmentally downregulated protein-8 (NEDD8, also called Rubl in S. cerevisiae), human leukocyte antigen F-associated (FAT10), autophagy-8 (ATG8) and -12 (ATG12), Fau ubiquitin-like protein (FUB1), membrane-anchored UBL (MUB), ubiquitin fold-modifier-1 (UFM1), and ubiquitin-like protein-5 (UBL5).

[0807] In some embodiments, the heterologous functional domain may be a marker domain. Non-limiting examples of marker domains include fluorescent proteins, purification tags, epitope tags, and reporter gene sequences. In some embodiments, the marker domain may be a fluorescent protein. Non-limiting examples of suitable fluorescent proteins include green fluorescent proteins (e.g., GFP, GFP-2, tagGFP, turboGFP, sfGFP, EGFP, Emerald, Azami Green, Monomeric Azami Green, CopGFP, AceGFP, ZsGreen1), yellow fluorescent proteins (e.g., YFP, EYFP, Citrine, Venus, YPet, PhiYFP, ZsYellow1), blue fluorescent proteins (e.g., EBFP, EBFP2, Azurite, mKalamal, GFPuv, Sapphire, T-sapphire), cyan fluorescent proteins (e.g., ECFP, Cerulean, CyPet, AmCyani, Midoriishi-Cyan), red fluorescent proteins (e.g., mKate, mKate2, mPlum, DsRed monomer, mCherry, mRFP1, DsRed-Express, DsRed2, DsRed-Monomer, HcRed-Tandem, HcRed1, AsRed2, eqFP611, mRasberry, mStrawberry, Jred), and orange fluorescent proteins (mOrange, mKO, Kusabira-Orange, Monomeric Kusabira-Orange, mTangerine, tdTomato) or any other suitable fluorescent protein. In other embodiments, the marker domain may be a purification tag or an epitope tag. Non-limiting exemplary tags include glutathione-S-transferase (GST), chitin binding protein (CBP), maltose binding protein (MBP), thioredoxin (TRX), poly(NANP), tandem affinity purification (TAP) tag, myc, AcV5, AU1, AU5, E, ECS, E2, FLAG, HA, nus, Softag 1, Softag 3, Strep, SBP, Glu-Glu, HSV, KT3, S, S1, T7, V5, VSV-G, 6×His (SEQ ID NO: 3014), 8×His (SEQ ID NO: 3015), biotin carboxyl carrier protein (BCCP), poly-His, and calmodulin. Non-limiting exemplary reporter genes include glutathione-S-transferase (GST), horseradish peroxidase (HRP), chloramphenicol acetyltransferase (CAT), beta-galactosidase, beta-glucuronidase, luciferase, or fluorescent proteins.

[0808] In additional embodiments, the heterologous functional domain may target the RNA-guided DNA-binding agent to a specific organelle, cell type, tissue, or organ. In some embodiments, the heterologous functional domain may target the RNA-guided DNA-binding agent to mitochondria.

[0809] In further embodiments, the heterologous functional domain may be an effector domain such as an editor domain. When the RNA-guided DNA-binding agent is directed to its target sequence, e.g., when a Cas nuclease is directed to a target sequence by a gRNA, the effector such as an editor domain may modify or affect the target sequence. In some embodiments, the effector such as an editor domain may be chosen from a nucleic acid binding domain, a nuclease domain (e.g., a non-Cas nuclease domain), an epigenetic modification domain, a transcriptional activation domain, or a transcriptional repressor domain. In some embodiments, the heterologous functional domain is a nuclease, such as a FokI nuclease. See, e.g., U.S. Pat. No. 9,023,649. In some embodiments, the heterologous functional domain is a transcriptional activator or repressor. See, e.g., Qi et al., “Repurposing CRISPR as an RNA-guided platform for sequence-specific control of gene expression,” Cell 152:1173-83 (2013); Perez-Pinera et al., “RNA-guided gene activation by CRISPR-Cas9-based transcription factors,” Nat. Methods 10:973-6 (2013); Mali et al., “CAS9 transcriptional activators for target specificity screening and paired nickases for cooperative genome engineering,” Nat. Biotechnol. 31:833-8 (2013); Gilbert et al., “CRISPR-mediated modular RNA-guided regulation of transcription in eukaryotes,” Cell 154:442-51 (2013). As such, the RNA-guided DNA-binding agent essentially becomes a transcription factor that can be directed to bind a desired target sequence using a guide RNA.

### C. Determination of Efficacy of Guide RNAs

[0810] In some embodiments, the efficacy of a guide RNA is determined when delivered or expressed together with other components (e.g., an RNA-guided DNA binding agent) forming an RNP. In some embodiments, the guide RNA is expressed together with an RNA-guided DNA binding agent, such as a Cas protein, e.g., Cas9. In some embodiments, the guide RNA is delivered to or expressed in a cell line that already stably expresses an RNA-guided DNA nuclease, such as a Cas nuclease or nickase, e.g., Cas9 nuclease or nickase. In some embodiments the guide RNA is delivered to a cell as part of a RNP. In some embodiments, the guide RNA is delivered to a cell along with a mRNA encoding an RNA-guided DNA nuclease, such as a Cas nuclease or nickase, e.g., Cas9 nuclease or nickase.

[0811] As described herein, use of an RNA-guided DNA nuclease and a guide RNA disclosed herein can lead to DSBs, SSBs, or site-specific binding that results in nucleic acid modification in the DNA or pre-mRNA which can produce errors in the form of insertion/deletion (indel) mutations upon repair by cellular machinery. Many mutations due to indels alter the reading frame, introduce premature stop codons, or induce exon skipping and, therefore, produce a non-functional protein.

[0812] In some embodiments, the efficacy of particular guide RNAs is determined based on in vitro models. In some embodiments, the in vitro model is T cell line. In some embodiments, the in vitro model is HEK293 T cells. In some embodiments, the in vitro model is HEK293 cells stably expressing Cas9 (HEK293_Cas9). In some embodiments, the in vitro model is a lymphoblastoid cell line. In some embodiments, the in vitro model is primary human T cells. In some embodiments, the in vitro model is primary human B cells. In some embodiments, the in vitro model is primary human peripheral blood lymphocytes. In some embodiments, the in vitro model is primary human peripheral blood mononuclear cells.

[0813] In some embodiments, the number of off-target sites at which a deletion or insertion occurs in an in vitro model is determined, e.g., by analyzing genomic DNA from the cells transfected in vitro with Cas9 mRNA and the guide RNA. In some embodiments, such a determination comprises analyzing genomic DNA from cells transfected in vitro with Cas9 mRNA, the guide RNA, and a donor oligonucleotide. Exemplary procedures for such determinations are provided in the working examples below.

[0814] In some embodiments, the efficacy of particular gRNAs is determined across multiple in vitro cell models for a guide RNA selection process. In some embodiments, a cell line comparison of data with selected guide RNAs is performed. In some embodiments, cross screening in multiple cell models is performed.

[0815] In some embodiments, the efficacy of particular guide RNAs is determined based on in vivo models. In some embodiments, the in vivo model is a rodent model. In some embodiments, the rodent model is a mouse which expresses the target gene. In some embodiments, the rodent model is a mouse which expresses an HLA-A gene. In some embodiments, the rodent model is a mouse which expresses a human HLA-A gene. In some embodiments, the rodent model is a mouse which expresses an HLA-B gene. In some embodiments, the rodent model is a mouse which expresses a human HLA-B gene. In some embodiments, the rodent model is a mouse which expresses a TRAC gene. In some embodiments, the rodent model is a mouse which expresses a human TRAC gene. In some embodiments, the rodent model is a mouse which expresses a TRBC1 gene. In some embodiments, the rodent model is a mouse which expresses a human TRBC1 gene. In some embodiments, the rodent model is a mouse which expresses a human TRBC2 gene. In some embodiments, the rodent model is a mouse which expresses a TRBC2 gene. In some embodiments, the rodent model is a mouse which expresses a CIITA gene. In some embodiments, the rodent model is a mouse which expresses a human CIITA gene. In some embodiments, the in vivo model is a non-human primate, for example cynomolgus monkey.

[0816] In some embodiments, the efficacy of a guide RNA is evaluated by on target cleavage efficiency. In some embodiments, the efficacy of a guide RNA is measured by percent editing at the target location, e.g., HLA-A, TRAC, TRBC, CIITA, or AAVS1. In some embodiments, deep sequencing may be utilized to identify the presence of modifications (e.g., insertions, deletions) introduced by genomic editing. Indel percentage can be calculated from next generation sequencing “NGS.”

[0817] In some embodiments, the efficacy of a guide RNA is measured by the number or frequency of indels at off-target sequences within the genome of the target cell type. In some embodiments, efficacious guide RNAs are provided which produce indels at off target sites at very low frequencies (e.g., <5%) in a cell population or relative to the frequency of indel creation at the target site. Thus, the disclosure provides for guide RNAs which do not exhibit off-target indel formation in the target cell type (e.g., T cells or B cells), or which produce a frequency of off-target indel formation of <5% in a cell population or relative to the frequency of indel creation at the target site. In some embodiments, the disclosure provides guide RNAs which do not exhibit any off target indel formation in the target cell type (e.g., T cells or B cells). In some embodiments, guide RNAs are provided which produce indels at less than 5 off-target sites, e.g., as evaluated by one or more methods described herein. In some embodiments, guide RNAs are provided which produce indels at less than or equal to 4, 3, 2, or 1 off-target site(s) e.g., as evaluated by one or more methods described herein. In some embodiments, the off-target site(s) does not occur in a protein coding region in the target cell (e.g., T cells or B cells) genome.

[0818] In some embodiments, linear amplification is used to detect genomic editing events, such as the formation of insertion/deletion (“indel”) mutations, translocations, and homology directed repair (HDR) events in target DNA. For example, linear amplification with a unique sequence-tagged primer and isolating the tagged amplification products (herein after referred to as “UnIT,” or “Unique Identifier Tagmentation” method) may be used.

[0819] In some embodiments, the efficacy of a guide RNA is measured by the number of chromosomal rearrangements within the target cell type. Kromatid dGH assay may used to detect chromosomal rearrangements, including e.g., translocations, reciprocal translocations, translocations to off-target chromosomes, deletions (i.e., chromosomal rearrangements where fragments were lost during the cell replication cycle due to the editing event). In some embodiments, the target cell type has less than 10, less than 8, less than 5, less than 4, less than 3, less than 2, or less than 1 chromosomal rearrangement. In some embodiments, the target cell type has no chromosomal rearrangements.

D. Delivery of gRNA Compositions

[0820] Lipid nanoparticles (LNPs) are a well-known means for delivery of nucleotide and protein cargo and may be used for delivery of the guide RNAs, compositions, or pharmaceutical formulations disclosed herein. In some embodiments, the LNPs deliver nucleic acid, protein, or nucleic acid together with protein.

[0821] In some embodiments, the invention comprises a method for delivering any one of the gRNAs disclosed herein to a subject, wherein the gRNA is formulated as an LNP. In some embodiments, the LNP comprises the gRNA and a Cas9 or an mRNA encoding Cas9.

[0822] In some embodiments, the invention comprises a composition comprising any one of the gRNAs disclosed and an LNP. In some embodiments, the composition further comprises a Cas9 or an mRNA encoding Cas9.

[0823] In some embodiments, the LNPs comprise cationic lipids. In some embodiments, the LNPs comprise (9Z,12Z)-3-((4,4-bis(octyloxy)butanoyl)oxy)-2-((((3-(diethylamino)propoxy)carbonyl)oxy)methyl)propyl octadeca-9,12-dienoate, also called 3-((4,4-bis(octyloxy)butanoyl)oxy)-2-((((3-(diethylamino)propoxy)carbonyl)oxy)methyl)propyl (9Z,12Z)-octadeca-9,12-dienoate) (Lipid A) or another ionizable lipid. See, e.g., lipids of WO/2017/173054 and references described therein. In some embodiments, the LNPs comprise molar ratios of a cationic lipid amine to RNA phosphate (N:P) of about 4.5, 5.0, 5.5, 6.0, or 6.5. In some embodiments, the term cationic and ionizable in the context of LNP lipids is interchangeable, e.g., wherein ionizable lipids are cationic depending on the pH.

[0824] In some embodiments, the LNP comprises a lipid component, and the lipid component comprises: about 35 mol % Lipid A; about 15 mol % neutral lipid (e.g., distearoylphosphatidylcholine (DSPC)); about 47.5 mol % helper lipid (e.g., cholesterol); and about 2.5 mol % stealth lipid (e.g., 1,2-dimyristoyl-rac-glycero-3-methylpolyoxyethylene glycol 2000 (PEG2k-DMG)), and wherein the N/P ratio of the LNP composition is about 3-7.

[0825] In some embodiments, the gRNAs disclosed herein are formulated as LNPs for use in preparing a medicament for treating a disease or disorder.

[0826] Electroporation is a well-known means for delivery of cargo, and any electroporation methodology may be used for delivery of any one of the gRNAs disclosed herein. In some embodiments, electroporation may be used to deliver any one of the gRNAs disclosed herein and Cas9 or an mRNA encoding Cas9.

[0827] In some embodiments, the invention comprises a method for delivering any one of the gRNAs disclosed herein to an ex vivo cell, wherein the gRNA is formulated as an LNP or not formulated as an LNP. In some embodiments, the LNP comprises the gRNA and a Cas9 or an mRNA encoding Cas9.

[0828] In some embodiments, the guide RNA compositions described herein, alone or encoded on one or more vectors, are formulated in or administered via a lipid nanoparticle; see e.g., WO/2017/173054 and WO 2019/067992, the contents of which are hereby incorporated by reference in their entirety.

[0829] In certain embodiments, the invention comprises DNA or RNA vectors encoding any of the guide RNAs comprising any one or more of the guide sequences described herein. In some embodiments, in addition to guide RNA sequences, the vectors further comprise nucleic acids that do not encode guide RNAs. Nucleic acids that do not encode guide RNA include, but are not limited to, promoters, enhancers, regulatory sequences, and nucleic acids encoding an RNA-guided DNA nuclease, which can be a nuclease such as Cas9. In some embodiments, the vector comprises one or more nucleotide sequence(s) encoding a crRNA, a trRNA, or a crRNA and trRNA. In some embodiments, the vector comprises one or more nucleotide sequence(s) encoding a sgRNA and an mRNA encoding an RNA-guided DNA nuclease, which can be a Cas nuclease, such as Cas9. In some embodiments, the vector comprises one or more nucleotide sequence(s) encoding a crRNA, a trRNA, and an mRNA encoding an RNA-guided DNA nuclease, which can be a Cas protein, such as, Cas9. In one embodiment, the Cas9 is from N. meningitidis (i.e., Nine Cas9). In some embodiments, the nucleotide sequence encoding the crRNA, trRNA, or crRNA and trRNA (which may be a sgRNA) comprises or consists of a guide sequence flanked by all or a portion of a repeat sequence from a naturally-occurring CRISPR/Cas system. The nucleic acid comprising or consisting of the crRNA, trRNA, or crRNA and trRNA may further comprise a vector sequence wherein the vector sequence comprises or consists of nucleic acids that are not naturally found together with the crRNA, trRNA, or crRNA and trRNA.

### IV. Therapeutic Methods and Uses

[0830] Any of the engineered cells and compositions described herein can be used in a method of treating a variety of diseases and disorders, as described herein. In some embodiments, the genetically modified cell (engineered cell) or population of genetically modified cells (engineered cells) and compositions may be used in methods of treating a variety of diseases and disorders. In some embodiments, a method of treating any one of the diseases or disorders described herein is encompassed, comprising administering any one or more composition described herein.

[0831] In some embodiments, the methods and compositions described herein may be used to treat diseases or disorders in need of delivery of a therapeutic agent. In some embodiments, the invention provides a method of providing an immunotherapy in a subject, the method including administering to the subject an effective amount of an engineered cell (or population of engineered cells) as described herein, for example, a cell of any of the aforementioned cell aspects and embodiments.

[0832] In some embodiments, the methods comprise administering to a subject a composition comprising an engineered cell described herein as an adoptive cell transfer therapy. In some embodiments, the engineered cell is an allogeneic cell.

[0833] In some embodiments of the methods, the method includes administering a lymphodepleting agent or immunosuppressant prior to administering to the subject an effective amount of the engineered cell (or engineered cells) as described herein, for example, a cell of any of the aforementioned cell aspects and embodiments. In another aspect, the invention provides a method of preparing engineered cells (e.g., a population of engineered cells).

[0834] Immunotherapy is the treatment of disease by activating or suppressing the immune system. Immunotherapies designed to elicit or amplify an immune response are classified as activation immunotherapies. Cell-based immunotherapies have been demonstrated to be effective in the treatment of some cancers. Immune effector cells such as lymphocytes, macrophages, dendritic cells, natural killer cells, cytotoxic T lymphocytes (CTLs), T helper cells, B cells, or their progenitors such as hematopoietic stem cells (HSC) or induced pluripotent stem cells (iPSC) can be programmed to act in response to abnormal antigens expressed on the surface of tumor cells. Thus, cancer immunotherapy allows components of the immune system to destroy tumors or other cancerous cells. Cell-based immunotherapies have also been demonstrated to be effective in the treatment of autoimmune diseases or transplant rejection. Immune effector cells such as regulatory T cells (Tregs) or mesenchymal stem cells can be programmed to act in response to autoantigens or transplant antigens expressed on the surface of normal tissues.

[0835] In some embodiments, the invention provides a method of preparing engineered cells (e.g., a population of engineered cells). The population of engineered cells may be used for immunotherapy.

[0836] In some embodiments, the invention provides a method of treating a subject in need thereof that includes administering engineered cells prepared by a method of preparing cells described herein, for example, a method of any of the aforementioned aspects and embodiments of methods of preparing cells.

[0837] In some embodiments, the engineered cells can be used to treat cancer, infectious diseases, inflammatory diseases, autoimmune diseases, cardiovascular diseases, neurological diseases, ophthalmologic diseases, renal diseases, liver diseases, musculoskeletal diseases, red blood cell diseases, or transplant rejections. In some embodiments, the engineered cells can be used in cell transplant, e.g., to the heart, liver, lung, kidney, pancreas, skin, or brain. (See e.g., Deuse et al., Nature Biotechnology 37:252-258 (2019).)

[0838] In some embodiments, the engineered cells can be used as a cell therapy comprising an allogeneic stem cell therapy. In some embodiments, the cell therapy comprises induced pluripotent stem cells (iPSCs). iPSCs may be induced to differentiate into other cell types including e.g., beta islet cells, neurons, and blood cells. In some embodiments, the cell therapy comprises hematopoietic stem cells. In some embodiments, the stem cells comprise mesenchymal stem cells that can develop into bone, cartilage, muscle, and fat cells. In some embodiments, the stem cells comprise ocular stem cells. In some embodiments, the allogeneic stem cell transplant comprises allogeneic bone marrow transplant. In some embodiments, the stem cells comprise pluripotent stem cells (PSCs). In some embodiments, the stem cells comprise induced embryonic stem cells (ESCs).

[0839] In some embodiments, the methods provide for administering the engineered cells to a subject, wherein the administration is an injection. In some embodiments, the methods provide for administering the engineered cells to a subject, wherein the administration is an intravascular injection or infusion. In some embodiments, the methods provide for administering the engineered cells to a subject, wherein the administration is a single dose.

[0840] In some embodiments, the methods provide for reducing a sign or symptom associated of a subject's disease treated with a composition disclosed herein. In some embodiments, the subject has a response to treatment with a composition disclosed herein that lasts more than one week. In some embodiments, the subject has a response to treatment with a composition disclosed herein that lasts more than two weeks. In some embodiments, the subject has a response to treatment with a composition disclosed herein that lasts more than three weeks. In some embodiments, the subject has a response to treatment with a composition disclosed herein that lasts more than one month.

[0841] In some embodiments, the methods provide for administering the engineered cells to a subject, and wherein the subject has a response to the administered cell that comprises a reduction in a sign or symptom associated with the disease treated by the cell therapy. In some embodiments, the subject has a response that lasts more than one week. In some embodiments, the subject has a response that lasts more than one month. In some embodiments, the subject has a response that lasts for at least 1-6 weeks.

TABLE7
V. Additional Sequences

| Description | SEQ ID NO | Sequence |
|---|---|---|
| HLA-A | 801 | mG*mG*mC*CACGGAGCGAGACAUCUGUUUUAGAmGmCmUmAmGmAmAmAmUmAmGmCAAGUUAAAAUAAGGCUAGUCCGUUAUCAmAmCmUm |
| S. pyogenes | | UmGmAmAmAmAmAmGmUmGmGmCmAmCmCmGmAmGmUmCmGmGmUmGmCmU*mU*mU*mU |
| guide | | |
| G000529 | | |
| HLA-A | 802 | mA*mC*mA*GCGACGCCGCGAGCCAGGUUUUAGAmGmCmUmAmGmAmAmAmUmAmGmCAAGUUAAAAUAAGGCUAGUCCGUUAUCAmAmCmUm |
| control guide | | UmGmAmAmAmAmAmGmUmGmGmCmAmCmCmGmAmGmUmCmGmGmUmGmCmU*mU*mU*mU |
| G018995 | | |
| TRAC | 803 | mU*mU*mC*AAAACCUGUCAGUGAUUGUUUUAGAmGmCmUmAmGmAmAmAmUmAmGmCAAGUUAAAAUAAGGUAGUCCGUUAUCACGAAAGGG |
| control guide | | CACCGAGUCGGmU*mG*mC*mU |
| (G027891) | | |
| TRAC | 804, 3206, and 3207 | MG*MC*MC*MGMUGUMAMCCMAGMCUGAGMAGACMUCUMGUUGMUMAMGMCUCCCMU(L1)MCMCGUUMGMCUAMCAAU*AAGMGMCCMGMUM |
| control guide | | C(L1)MGMAMUGUGCMCGMCAAMCGCUCUMGMCC(L1)GGCAUCGMU*MU |
| (G023516) | | |
| TRAC | 805 | MC*MC*MC*MAMCAGMAMUAMUCMCAGAAMCCCUMGACMGUUGMUMAMGMCUCCCMUMGMAMAMAMCMCGUUMGMCUAMCAAU*AAGMGMCCM |
| control guide | | GMUMCMGMAMAMAMGMAMUGUGCMCGMCAAMCGCUCUMGMCCMUMUMCMUGGCAUCG*MU*MU |
| (G021470) | | |
| TRAC | 806 | MU*MU*MG*MUMCCCMAMCAMGAMUAUCCMAGAAMCCCMGUUGMUMAMGMCUCCCMUMGMAMAMAMCMCGUUMGMCUAMCAAU*AAGMGMCCM |
| control guide | | GMUMCMGMAMAMAMGMAMUGUGCMCGMCAAMCGCUCUMGMCCMUMUMCMUGGCAUCG*MU*MU |
| (G021471) | | |
| TRAC | 807 | mC*mU*mU*mGmUCCmCmACmAGmAUAUCmCAGAmACCmGUUGmUmAmGmCUCCCmUmGmAmAmAmCmCGUUmGmCUAmCAAU*AAGmGmCCm |
| control guide | | GmUmCmGmAmAmAmGmAmUGUGCmCGmCAAmCGCUCUmGmCCmUmUmCmUGGCAUCG*mU*mU |
| (G021472) | | |
| TRAC | 808 | mA*mU*mC*mCmUCUmUmGUmCCmCACAGmAUAUmCCAmGUUGmUmAmGmCUCCCmUmGmAmAmAmCmCGUUmGmCUAmCAAU*AAGmGmCCm |
| control guide | | GmUmCmGmAmAmAmGmAmUGUGCmCGmCAAmCGCUCUmGmCCmUmUmCmUGGCAUCG*mU*mU |
| (G021473) | | |
| TRAC | 809 | mG*mA*mU*mCmCUCmUmUGmUCmCCACAmGAUAmUCCmGUUGmUmAmGmCUCCCmUmGmAmAmAmCmCGUUmGmCUAmCAAU*AAGmGmCCm |
| control guide | | GmUmCmGmAmAmAmGmAmUGUGCmCGmCAAmCGCUCUmGmCCmUmUmCmUGGCAUCG*mU*mU |
| (G021474) | | |
| TRAC | 810 | mA*mA*mC*mCmCUGmAmUCmCUmCUUGUmCCCAmCAGmGUUGmUmAmGmCUCCCmUmGmAmAmAmCmCGUUmGmCUAmCAAU*AAGmGmCCm |
| control guide | | GmUmCmGmAmAmAmGmAmUGUGCmCGmCAAmCGCUCUmGmCCmUmUmCmUGGCAUCG*mU*mU |
| (G021475) | | |
| TRAC | 811 | mG*mC*mC*mGmUGUmAmCCmAGmCUGAGmAGACmUCUmGUUGmUmAmGmCUCCCmUmGmAmAmAmCmCGUUmGmCUAmCAAU*AAGmGmCCm |
| control guide | | GmUmCmGmAmAmAmGmAmUGUGCmCGmCAAmCGCUCUmGmCCmUmUmCmUGGCAUCG*mU*mU |
| (G021481) | | |
| ORF | 812 | ATGgaggccTcccccgccTccggcccccggcaccTgaTggacccccacaTcTTcaccTccAACTTCAACAACggcATCggccggCACAAGacc |
| encoding | | TACCTGTGCTACgaggTggagcggCTGGACAACggcaccTccgTgAAGATGGACCAGCACcggggcTTCCTGCACAACCAGgccAAGAACCTG |
| Sp. Cas9 | | CTGTGCggcTTCTACggccggCACgccgagCTGcggTTCCTGGACCTGgTgcccTccCTGCAGCTGGACcccgccCAGATCTACcgggTgacc |
| | | TGGTTCATCTCCTGGTCCCCCTGCTTCTccTGGggcTGCgccggcgaggTgcgggccTTCCTGCAGgagAACaccCACgTgcggCTGcggATC |
| | | TTCgccgcccggATCTACGACTACGACcccCTGTACAAGgaggccCTGCAGATGCTGcggGACgccggcgccCAGgTgTccATCATGaccTAC |
| | | GACgagTTCAAGCACTGCTGGGACaccTTCgTgGACCACCAGggcTGCcccTTCCAGcccTGGGACggcCTGGACgagCACTccCAGgccCTG |
| | | TccggccggCTGcgggccATCCTGCAGAACCAGggcAACTccggcTccgagacccccggcaccTccgagTccgccacccccgagTccgacaag |
| | | aagTacTccaTcggccTggCcaTcggcaccaacTccgTgggcTgggccgTgaTcaccgacgagTacaaggTgcccTccaagaagTTcaaggTg |
| | | cTgggcaacaccgaccggcacTccaTcaagaagaaccTgaTcggcgcccTgcTgTTcgacTccggcgagaccgccgaggccacccggcTgaag |
| | | cggaccgcccggcggcggTacacccggcggaagaaccggaTcTgcTaccTgcaggagaTcTTcTccaacgagaTggccaaggTggacgacTcc |
| | | TTCTTccaccggcTggaggagTccTTccTggTggaggaggacaagaagcacgagcggcaccccaTcTTcggcaacaTcgTggacgaggTggcc |
| | | TaccacgagaagTaccccaccaTcTaccaccTgcggaagaagcTggTggacTccaccgacaaggccgaccTgcggcTgaTcTaccTggcccTg |
| | | gcccacaTgaTcaagTTccggggccacTTccTgaTcgagggcgaccTgaaccccgacaacTccgacgTggacaagcTgTTcaTccagcTggTg |
| | | cagaccTacaaccagcTgTTcgaggagaaccccaTcaacgccTccggcgTggacgccaaggccaTccTgTccgcccggcTgTccaagTcccgg |
| | | cggcTggagaaccTgaTcgcccagcTgcccggcgagaagaagaacggccTgTTcggcaaccTgaTcgcccTgTcccTgggccTgacccccaac |
| | | TTcaagTccaacTTcgaccTggccgaggacgccaagcTgcagcTgTccaaggacaccTacgacgacgaccTggacaaccTgcTggcccagaTc |
| | | ggcgaccagTacgccgaccTgTTccTggccgccaagaaccTgTccgacgccaTccTgcTgTccgacaTccTgcgggTgaacaccgagaTcacc |
| | | aaggccccccTgTccgccTccaTgaTcaagcggTacgacgagcaccaccaggaccTgacccTgcTgaaggcccTggTgcggcagcagcTgccc |
| | | gagaagTacaaggagaTcTTcTTcgaccagTccaagaacggcTacgccggcTacaTcgacggcggcgccTcccaggaggagTTcTacaagTTc |
| | | aTcaagcccaTccTggagaagaTggacggcaccgaggagcTgcTggTgaagcTgaaccgggaggaccTgcTgcggaagcagcggaccTTcgac |
| | | aacggcTccaTcccccaccagaTccaccTgggcgagcTgcacgccaTccTgcggcggcaggaggacTTcTaccccTTccTgaaggacaaccgg |
| | | gagaagaTcgagaagaTccTgaccTTccggaTccccTacTacgTgggcccccTggcccggggcaacTcccggTTcgccTggaTgacccggaag |
| | | TccgaggagaccaTcacccccTggaacTTcgaggaggTggTggacaagggcgccTccgcccagTccTTcaTcgagcggaTgaccaacTTcgac |
| | | aagaaccTgcccaacgagaaggTgcTgcccaagcacTcccTgcTgTacgagTacTTcaccgTgTacaacgagcTgaccaaggTgaagTacgTg |
| | | accgagggcaTgcggaagcccgccTTccTgTccggcgagcagaagaaggccaTcgTggaccTgcTgTTcaagaccaaccggaaggTgaccgTg |
| | | aagcagcTgaaggaggacTacTTcaagaagaTcgagTgcTTcgacTccgTggagaTcTccggcgTggaggaccggTTcaacgccTcccTgggc |
| | | accTaccacgaccTgcTgaagaTcaTcaaggacaaggacTTccTggacaacgaggagaacgaggacaTccTggaggacaTcgTgcTgacccTg |
| | | acccTgTTcgaggaccgggagaTgaTcgaggagcggcTgaagaccTacgcccaccTgTTcgacgacaaggTgaTgaagcagcTgaagcggcgg |
| | | cggTacaccggcTggggccggcTgTcccggaagcTgaTcaacggcaTccgggacaagcagTccggcaagaccaTccTggacTTccTgaagTcc |
| | | gacggcTTcgccaaccggaacTTcaTgcagcTgaTccacgacgacTcccTgaccTTcaaggaggacaTccagaaggcccaggTgTccggccag |
| | | ggcgacTcccTgcacgagcacaTcgccaaccTggccggcTcccccgccaTcaagaagggcaTccTgcagaccgTgaaggTggTggacgagcTg |
| | | gTgaaggTgaTgggccggcacaagcccgagaacaTcgTgaTcgagaTggcccgggagaaccagaccacccagaagggccagaagaacTcccgg |
| | | gagcggaTgaagcggaTcgaggagggcaTcaaggagcTgggcTcccagaTccTgaaggagcaccccgTggagaacacccagcTgcagaacgag |
| | | aagcTgTaccTgTacTaccTgcagaacggccgggacaTgTacgTggaccaggagcTggacaTcaaccggcTgTccgacTacgacgTggaccac |
| | | aTcgTgccccagTccTTccTgaaggacgacTccaTcgacaacaaggTgcTgacccggTccgacaagaaccggggcaagTccgacaacgTgccc |
| | | TccgaggaggTggTgaagaagaTgaagaacTacTggcggcagcTgcTgaacgccaagcTgaTcacccagcggaagTTcgacaaccTgaccaag |
| | | gccgagcggggcggccTgTccgagcTggacaaggccggcTTcaTcaagcggcagcTggTggagacccggcagaTcaccaagcacgTggcccag |
| | | aTccTggacTcccggaTgaacaccaagTacgacgagaacgacaagcTgaTccgggaggTgaaggTgaTcacccTgaagTccaagcTggTgTcc |
| | | gacTTccggaaggacTTccagTTcTacaaggTgcgggagaTcaacaacTaccaccacgcccacgacgccTaccTgaacgccgTggTgggcacc |
| | | gcccTgaTcaagaagTaccccaagcTggagTccgagTTcgTgTacggcgacTacaaggTgTacgacgTgcggaagaTgaTcgccaagTccgag |
| | | caggagaTcggcaaggccaccgccaagTacTTcTTcTacTccaacaTcaTgaacTTcTTcaagaccgagaTcacccTggccaacggcgagaTc |
| | | cggaagcggccccTgaTcgagaccaacggcgagaccggcgagaTcgTgTgggacaagggccgggacTTcgccaccgTgcggaaggTgcTgTcc |
| | | aTgccccaggTgaacaTcgTgaagaagaccgaggTgcagaccggcggcTTcTccaaggagTccaTccTgcccaagcggaacTccgacaagcTg |
| | | aTcgcccggaagaaggacTgggaccccaagaagTacggcggcTTcgacTcccccaccgTggccTacTccgTgcTggTggTggccaaggTggag |
| | | aagggcaagTccaagaagcTgaagTccgTgaaggagcTgcTgggcaTcaccaTcaTggagcggTccTccTTcgagaagaaccccaTcgacTTc |
| | | cTggaggccaagggcTacaaggaggTgaagaaggaccTgaTcaTcaagcTgcccaagTacTcccTgTTcgagcTggagaacggccggaagcgg |
| | | aTgcTggccTccgccggcgagcTgcagaagggcaacgagcTggcccTgcccTccaagTacgTgaacTTccTgTaccTggccTcccacTacgag |
| | | aagcTgaagggcTcccccgaggacaacgagcagaagcagcTgTTcgTggagcagcacaagcacTaccTggacgagaTcaTcgagcagaTcTcc |
| | | gagTTcTccaagcgggTgaTccTggccgacgccaaccTggacaaggTgcTgTccgccTacaacaagcaccgggacaagcccaTccgggagcag |
| | | gccgagaacaTcaTccaccTgTTcacccTgaccaaccTgggcgcccccgccgccTTcaagTacTTcgacaccaccaTcgaccggaagcggTac |
| | | accTccaccaaggaggTgcTggacgccacccTgaTccaccagTccaTcaccggccTgTacgagacccggaTcgaccTgTcccagcTgggcggc |
| | | gacggcggcggcTcccccaagaagaagcggaaggTgTgA |
| ORF | 813 | ATGGACAAGAAGTACAGCATCGGACTGGACATCGGAACAAACAGCGTCGGATGGGCAGTCATCACAGACGAATACAAGGTCCCGAGCAAGAAG |
| encoding | | TTCAAGGTCCTGGGAAACACAGACAGACACAGCATCAAGAAGAACCTGATCGGAGCACTGCTGTTCGACAGCGGAGAAACAGCAGAAGCAACA |
| Sp. Cas9 | | AGACTGAAGAGAACAGCAAGAAGAAGATACACAAGAAGAAAGAACAGAATCTGCTACCTGCAGGAAATCTTCAGCAACGAAATGGCAAAGGTC |
| | | GACGACAGCTTCTTCCACAGACTGGAAGAAAGCTTCCTGGTCGAAGAAGACAAGAAGCACGAAAGACACCCGATCTTCGGAAACATCGTCGAC |
| | | GAAGTCGCATACCACGAAAAGTACCCGACAATCTACCACCTGAGAAAGAAGCTGGTCGACAGCACAGACAAGGCAGACCTGAGACTGATCTAC |
| | | CTGGCACTGGCACACATGATCAAGTTCAGAGGACACTTCCTGATCGAAGGAGACCTGAACCCGGACAACAGCGACGTCGACAAGCTGTTCATC |
| | | CAGCTGGTCCAGACATACAACCAGCTGTTCGAAGAAAACCCGATCAACGCAAGCGGAGTCGACGCAAAGGCAATCCTGAGCGCAAGACTGAGC |
| | | AAGAGCAGAAGACTGGAAAACCTGATCGCACAGCTGCCGGGAGAAAAGAAGAACGGACTGTTCGGAAACCTGATCGCACTGAGCCTGGGACTG |
| | | ACACCGAACTTCAAGAGCAACTTCGACCTGGCAGAAGACGCAAAGCTGCAGCTGAGCAAGGACACATACGACGACGACCTGGACAACCTGCTG |
| | | GCACAGATCGGAGACCAGTACGCAGACCTGTTCCTGGCAGCAAAGAACCTGAGCGACGCAATCCTGCTGAGCGACATCCTGAGAGTCAACACA |
| | | GAAATCACAAAGGCACCGCTGAGCGCAAGCATGATCAAGAGATACGACGAACACCACCAGGACCTGACACTGCTGAAGGCACTGGTCAGACAG |
| | | CAGCTGCCGGAAAAGTACAAGGAAATCTTCTTCGACCAGAGCAAGAACGGATACGCAGGATACATCGACGGAGGAGCAAGCCAGGAAGAATTC |
| | | TACAAGTTCATCAAGCCGATCCTGGAAAAGATGGACGGAACAGAAGAACTGCTGGTCAAGCTGAACAGAGAAGACCTGCTGAGAAAGCAGAGA |
| | | ACATTCGACAACGGAAGCATCCCGCACCAGATCCACCTGGGAGAACTGCACGCAATCCTGAGAAGACAGGAAGACTTCTACCCGTTCCTGAAG |
| | | GACAACAGAGAAAAGATCGAAAAGATCCTGACATTCAGAATCCCGTACTACGTCGGACCGCTGGCAAGAGGAAACAGCAGATTCGCATGGATG |
| | | ACAAGAAAGAGCGAAGAAACAATCACACCGTGGAACTTCGAAGAAGTCGTCGACAAGGGAGCAAGCGCACAGAGCTTCATCGAAAGAATGACA |
| | | AACTTCGACAAGAACCTGCCGAACGAAAAGGTCCTGCCGAAGCACAGCCTGCTGTACGAATACTTCACAGTCTACAACGAACTGACAAAGGTC |
| | | AAGTACGTCACAGAAGGAATGAGAAAGCCGGCATTCCTGAGCGGAGAACAGAAGAAGGCAATCGTCGACCTGCTGTTCAAGACAAACAGAAAG |
| | | GTCACAGTCAAGCAGCTGAAGGAAGACTACTTCAAGAAGATCGAATGCTTCGACAGCGTCGAAATCAGCGGAGTCGAAGACAGATTCAACGCA |
| | | AGCCTGGGAACATACCACGACCTGCTGAAGATCATCAAGGACAAGGACTTCCTGGACAACGAAGAAAACGAAGACATCCTGGAAGACATCGTC |
| | | CTGACACTGACACTGTTCGAAGACAGAGAAATGATCGAAGAAAGACTGAAGACATACGCACACCTGTTCGACGACAAGGTCATGAAGCAGCTG |
| | | AAGAGAAGAAGATACACAGGATGGGGAAGACTGAGCAGAAAGCTGATCAACGGAATCAGAGACAAGCAGAGCGGAAAGACAATCCTGGACTTC |
| | | CTGAAGAGCGACGGATTCGCAAACAGAAACTTCATGCAGCTGATCCACGACGACAGCCTGACATTCAAGGAAGACATCCAGAAGGCACAGGTC |
| | | AGCGGACAGGGAGACAGCCTGCACGAACACATCGCAAACCTGGCAGGAAGCCCGGCAATCAAGAAGGGAATCCTGCAGACAGTCAAGGTCGTC |
| | | GACGAACTGGTCAAGGTCATGGGAAGACACAAGCCGGAAAACATCGTCATCGAAATGGCAAGAGAAAACCAGACAACACAGAAGGGACAGAAG |
| | | AACAGCAGAGAAAGAATGAAGAGAATCGAAGAAGGAATCAAGGAACTGGGAAGCCAGATCCTGAAGGAACACCCGGTCGAAAACACACAGCTG |
| | | CAGAACGAAAAGCTGTACCTGTACTACCTGCAGAACGGAAGAGACATGTACGTCGACCAGGAACTGGACATCAACAGACTGAGCGACTACGAC |
| | | GTCGACCACATCGTCCCGCAGAGCTTCCTGAAGGACGACAGCATCGACAACAAGGTCCTGACAAGAAGCGACAAGAACAGAGGAAAGAGCGAC |
| | | AACGTCCCGAGCGAAGAAGTCGTCAAGAAGATGAAGAACTACTGGAGACAGCTGCTGAACGCAAAGCTGATCACACAGAGAAAGTTCGACAAC |
| | | CTGACAAAGGCAGAGAGAGGAGGACTGAGCGAACTGGACAAGGCAGGATTCATCAAGAGACAGCTGGTCGAAACAAGACAGATCACAAAGCAC |
| | | GTCGCACAGATCCTGGACAGCAGAATGAACACAAAGTACGACGAAAACGACAAGCTGATCAGAGAAGTCAAGGTCATCACACTGAAGAGCAAG |
| | | CTGGTCAGCGACTTCAGAAAGGACTTCCAGTTCTACAAGGTCAGAGAAATCAACAACTACCACCACGCACACGACGCATACCTGAACGCAGTC |
| | | GTCGGAACAGCACTGATCAAGAAGTACCCGAAGCTGGAAAGCGAATTCGTCTACGGAGACTACAAGGTCTACGACGTCAGAAAGATGATCGCA |
| | | AAGAGCGAACAGGAAATCGGAAAGGCAACAGCAAAGTACTTCTTCTACAGCAACATCATGAACTTCTTCAAGACAGAAATCACACTGGCAAAC |
| | | GGAGAAATCAGAAAGAGACCGCTGATCGAAACAAACGGAGAAACAGGAGAAATCGTCTGGGACAAGGGAAGAGACTTCGCAACAGTCAGAAAG |
| | | GTCCTGAGCATGCCGCAGGTCAACATCGTCAAGAAGACAGAAGTCCAGACAGGAGGATTCAGCAAGGAAAGCATCCTGCCGAAGAGAAACAGC |
| | | GACAAGCTGATCGCAAGAAAGAAGGACTGGGACCCGAAGAAGTACGGAGGATTCGACAGCCCGACAGTCGCATACAGCGTCCTGGTCGTCGCA |
| | | AAGGTCGAAAAGGGAAAGAGCAAGAAGCTGAAGAGCGTCAAGGAACTGCTGGGAATCACAATCATGGAAAGAAGCAGCTTCGAAAAGAACCCG |
| | | ATCGACTTCCTGGAAGCAAAGGGATACAAGGAAGTCAAGAAGGACCTGATCATCAAGCTGCCGAAGTACAGCCTGTTCGAACTGGAAAACGGA |
| | | AGAAAGAGAATGCTGGCAAGCGCAGGAGAACTGCAGAAGGGAAACGAACTGGCACTGCCGAGCAAGTACGTCAACTTCCTGTACCTGGCAAGC |
| | | CACTACGAAAAGCTGAAGGGAAGCCCGGAAGACAACGAACAGAAGCAGCTGTTCGTCGAACAGCACAAGCACTACCTGGACGAAATCATCGAA |
| | | CAGATCAGCGAATTCAGCAAGAGAGTCATCCTGGCAGACGCAAACCTGGACAAGGTCCTGAGCGCATACAACAAGCACAGAGACAAGCCGATC |
| | | AGAGAACAGGCAGAAAACATCATCCACCTGTTCACACTGACAAACCTGGGAGCACCGGCAGCATTCAAGTACTTCGACACAACAATCGACAGA |
| | | AAGAGATACACAAGCACAAAGGAAGTCCTGGACGCAACACTGATCCACCAGAGCATCACAGGACTGTACGAAACAAGAATCGACCTGAGCCAG |
| | | CTGGGAGGAGACGGAGGAGGAAGCCCGAAGAAGAAGAGAAAGGTCTAG |
| ORF | 814 | ATGGACAAGAAGTACTCCATCGGCCTGGACATCGGCACCAACTCCGTGGGCTGGGCCGTGATCACCGACGAGTACAAGGTGCCCTCCAAGAAG |
| encoding | | TTCAAGGTGCTGGGCAACACCGACCGGCACTCCATCAAGAAGAACCTGATCGGCGCCCTGCTGTTCGACTCCGGCGAGACCGCCGAGGCCACC |
| Sp. Cas9 | | CGGCTGAAGCGGACCGCCCGGCGGCGGTACACCCGGCGGAAGAACCGGATCTGCTACCTGCAGGAGATCTTCTCCAACGAGATGGCCAAGGTG |
| | | GACGACTCCTTCTTCCACCGGCTGGAGGAGTCCTTCCTGGTGGAGGAGGACAAGAAGCACGAGCGGCACCCCATCTTCGGCAACATCGTGGAC |
| | | GAGGTGGCCTACCACGAGAAGTACCCCACCATCTACCACCTGCGGAAGAAGCTGGTGGACTCCACCGACAAGGCCGACCTGCGGCTGATCTAC |
| | | CTGGCCCTGGCCCACATGATCAAGTTCCGGGGCCACTTCCTGATCGAGGGCGACCTGAACCCCGACAACTCCGACGTGGACAAGCTGTTCATC |
| | | CAGCTGGTGCAGACCTACAACCAGCTGTTCGAGGAGAACCCCATCAACGCCTCCGGCGTGGACGCCAAGGCCATCCTGTCCGCCCGGCTGTCC |
| | | AAGTCCCGGCGGCTGGAGAACCTGATCGCCCAGCTGCCCGGCGAGAAGAAGAACGGCCTGTTCGGCAACCTGATCGCCCTGTCCCTGGGCCTG |
| | | ACCCCCAACTTCAAGTCCAACTTCGACCTGGCCGAGGACGCCAAGCTGCAGCTGTCCAAGGACACCTACGACGACGACCTGGACAACCTGCTG |
| | | GCCCAGATCGGCGACCAGTACGCCGACCTGTTCCTGGCCGCCAAGAACCTGTCCGACGCCATCCTGCTGTCCGACATCCTGCGGGTGAACACC |
| | | GAGATCACCAAGGCCCCCCTGTCCGCCTCCATGATCAAGCGGTACGACGAGCACCACCAGGACCTGACCCTGCTGAAGGCCCTGGTGCGGCAG |
| | | CAGCTGCCCGAGAAGTACAAGGAGATCTTCTTCGACCAGTCCAAGAACGGCTACGCCGGCTACATCGACGGCGGCGCCTCCCAGGAGGAGTTC |
| | | TACAAGTTCATCAAGCCCATCCTGGAGAAGATGGACGGCACCGAGGAGCTGCTGGTGAAGCTGAACCGGGAGGACCTGCTGCGGAAGCAGCGG |
| | | ACCTTCGACAACGGCTCCATCCCCCACCAGATCCACCTGGGCGAGCTGCACGCCATCCTGCGGCGGCAGGAGGACTTCTACCCCTTCCTGAAG |
| | | GACAACCGGGAGAAGATCGAGAAGATCCTGACCTTCCGGATCCCCTACTACGTGGGCCCCCTGGCCCGGGGCAACTCCCGGTTCGCCTGGATG |
| | | ACCCGGAAGTCCGAGGAGACCATCACCCCCTGGAACTTCGAGGAGGTGGTGGACAAGGGCGCCTCCGCCCAGTCCTTCATCGAGCGGATGACC |
| | | AACTTCGACAAGAACCTGCCCAACGAGAAGGTGCTGCCCAAGCACTCCCTGCTGTACGAGTACTTCACCGTGTACAACGAGCTGACCAAGGTG |
| | | AAGTACGTGACCGAGGGCATGCGGAAGCCCGCCTTCCTGTCCGGCGAGCAGAAGAAGGCCATCGTGGACCTGCTGTTCAAGACCAACCGGAAG |
| | | GTGACCGTGAAGCAGCTGAAGGAGGACTACTTCAAGAAGATCGAGTGCTTCGACTCCGTGGAGATCTCCGGCGTGGAGGACCGGTTCAACGCC |
| | | TCCCTGGGCACCTACCACGACCTGCTGAAGATCATCAAGGACAAGGACTTCCTGGACAACGAGGAGAACGAGGACATCCTGGAGGACATCGTG |
| | | CTGACCCTGACCCTGTTCGAGGACCGGGAGATGATCGAGGAGCGGCTGAAGACCTACGCCCACCTGTTCGACGACAAGGTGATGAAGCAGCTG |
| | | AAGCGGCGGCGGTACACCGGCTGGGGCCGGCTGTCCCGGAAGCTGATCAACGGCATCCGGGACAAGCAGTCCGGCAAGACCATCCTGGACTTC |
| | | CTGAAGTCCGACGGCTTCGCCAACCGGAACTTCATGCAGCTGATCCACGACGACTCCCTGACCTTCAAGGAGGACATCCAGAAGGCCCAGGTG |
| | | TCCGGCCAGGGCGACTCCCTGCACGAGCACATCGCCAACCTGGCCGGCTCCCCCGCCATCAAGAAGGGCATCCTGCAGACCGTGAAGGTGGTG |
| | | GACGAGCTGGTGAAGGTGATGGGCCGGCACAAGCCCGAGAACATCGTGATCGAGATGGCCCGGGAGAACCAGACCACCCAGAAGGGCCAGAAG |
| | | AACTCCCGGGAGCGGATGAAGCGGATCGAGGAGGGCATCAAGGAGCTGGGCTCCCAGATCCTGAAGGAGCACCCCGTGGAGAACACCCAGCTG |
| | | CAGAACGAGAAGCTGTACCTGTACTACCTGCAGAACGGCCGGGACATGTACGTGGACCAGGAGCTGGACATCAACCGGCTGTCCGACTACGAC |
| | | GTGGACCACATCGTGCCCCAGTCCTTCCTGAAGGACGACTCCATCGACAACAAGGTGCTGACCCGGTCCGACAAGAACCGGGGCAAGTCCGAC |
| | | AACGTGCCCTCCGAGGAGGTGGTGAAGAAGATGAAGAACTACTGGCGGCAGCTGCTGAACGCCAAGCTGATCACCCAGCGGAAGTTCGACAAC |
| | | CTGACCAAGGCCGAGCGGGGCGGCCTGTCCGAGCTGGACAAGGCCGGCTTCATCAAGCGGCAGCTGGTGGAGACCCGGCAGATCACCAAGCAC |
| | | GTGGCCCAGATCCTGGACTCCCGGATGAACACCAAGTACGACGAGAACGACAAGCTGATCCGGGAGGTGAAGGTGATCACCCTGAAGTCCAAG |
| | | CTGGTGTCCGACTTCCGGAAGGACTTCCAGTTCTACAAGGTGCGGGAGATCAACAACTACCACCACGCCCACGACGCCTACCTGAACGCCGTG |
| | | GTGGGCACCGCCCTGATCAAGAAGTACCCCAAGCTGGAGTCCGAGTTCGTGTACGGCGACTACAAGGTGTACGACGTGCGGAAGATGATCGCC |
| | | AAGTCCGAGCAGGAGATCGGCAAGGCCACCGCCAAGTACTTCTTCTACTCCAACATCATGAACTTCTTCAAGACCGAGATCACCCTGGCCAAC |
| | | GGCGAGATCCGGAAGCGGCCCCTGATCGAGACCAACGGCGAGACCGGCGAGATCGTGTGGGACAAGGGCCGGGACTTCGCCACCGTGCGGAAG |
| | | GTGCTGTCCATGCCCCAGGTGAACATCGTGAAGAAGACCGAGGTGCAGACCGGCGGCTTCTCCAAGGAGTCCATCCTGCCCAAGCGGAACTCC |
| | | GACAAGCTGATCGCCCGGAAGAAGGACTGGGACCCCAAGAAGTACGGCGGCTTCGACTCCCCCACCGTGGCCTACTCCGTGCTGGTGGTGGCC |
| | | AAGGTGGAGAAGGGCAAGTCCAAGAAGCTGAAGTCCGTGAAGGAGCTGCTGGGCATCACCATCATGGAGCGGTCCTCCTTCGAGAAGAACCCC |
| | | ATCGACTTCCTGGAGGCCAAGGGCTACAAGGAGGTGAAGAAGGACCTGATCATCAAGCTGCCCAAGTACTCCCTGTTCGAGCTGGAGAACGGC |
| | | CGGAAGCGGATGCTGGCCTCCGCCGGCGAGCTGCAGAAGGGCAACGAGCTGGCCCTGCCCTCCAAGTACGTGAACTTCCTGTACCTGGCCTCC |
| | | CACTACGAGAAGCTGAAGGGCTCCCCCGAGGACAACGAGCAGAAGCAGCTGTTCGTGGAGCAGCACAAGCACTACCTGGACGAGATCATCGAG |
| | | CAGATCTCCGAGTTCTCCAAGCGGGTGATCCTGGCCGACGCCAACCTGGACAAGGTGCTGTCCGCCTACAACAAGCACCGGGACAAGCCCATC |
| | | CGGGAGCAGGCCGAGAACATCATCCACCTGTTCACCCTGACCAACCTGGGCGCCCCCGCCGCCTTCAAGTACTTCGACACCACCATCGACCGG |
| | | AAGCGGTACACCTCCACCAAGGAGGTGCTGGACGCCACCCTGATCCACCAGTCCATCACCGGCCTGTACGAGACCCGGATCGACCTGTCCCAG |
| | | CTGGGCGGCGACGGCGGCGGCTCCCCCAAGAAGAAGCGGAAGGTGTGA |
| ORF | 815 | AUGGACAAGAAGUACAGCAUCGGCCUGGACAUCGGCACGAACAGCGUUGGCUGGGCUGUGAUCACGGACGAGUACAAGGUUCCCUCAAAGAAG |
| encoding | | UUCAAGGUGCUGGGCAACACGGACCGGCACAGCAUCAAGAAGAAUCUCAUCGGUGCACUGCUGUUCGACAGCGGUGAGACGGCCGAAGCCACG |
| Sp. Cas9 | | CGGCUGAAGCGGACGGCCCGCCGGCGGUACACGCGGCGGAAGAACCGGAUCUGCUACCUGCAGGAGAUCUUCAGCAACGAGAUGGCCAAGGUG |
| | | GACGACAGCUUCUUCCACCGGCUGGAGGAGAGCUUCCUGGUGGAGGAGGACAAGAAGCACGAGCGGCACCCCAUCUUCGGCAACAUCGUGGAC |
| | | GAAGUCGCCUACCACGAGAAGUACCCCACCAUCUACCACCUGCGGAAGAAGCUGGUGGACUCGACUGACAAGGCCGACCUGCGGCUGAUCUAC |
| | | CUGGCACUGGCCCACAUGAUAAAGUUCCGGGGCCACUUCCUGAUCGAGGGCGACCUGAACCCUGACAACAGCGACGUGGACAAGCUGUUCAUC |
| | | CAGCUGGUGCAGACCUACAACCAGCUGUUCGAGGAGAACCCCAUCAACGCCAGCGGCGUGGACGCCAAGGCCAUCCUCAGCGCCCGCCUCAGC |
| | | AAGAGCCGGCGGCUGGAGAAUCUCAUCGCCCAGCUUCCAGGUGAGAAGAAGAAUGGGCUGUUCGGCAAUCUCAUCGCACUCAGCCUGGGCCUG |
| | | ACUCCCAACUUCAAGAGCAACUUCGACCUGGCCGAGGACGCCAAGCUGCAGCUCAGCAAGGACACCUACGACGACGACCUGGACAAUCUCCUG |
| | | GCCCAGAUCGGCGACCAGUACGCCGACCUGUUCCUGGCUGCCAAGAAUCUCAGCGACGCCAUCCUGCUCAGCGACAUCCUGCGGGUGAACACA |
| | | GAGAUCACGAAGGCCCCCCUCAGCGCCAGCAUGAUAAAGCGGUACGACGAGCACCACCAGGACCUGACGCUGCUGAAGGCACUGGUGCGGCAG |
| | | CAGCUUCCAGAGAAGUACAAGGAGAUCUUCUUCGACCAGAGCAAGAAUGGGUACGCCGGGUACAUCGACGGUGGUGCCAGCCAGGAGGAGUUC |
| | | UACAAGUUCAUCAAGCCCAUCCUGGAGAAGAUGGACGGCACAGAGGAGCUGCUGGUGAAGCUGAACAGGGAGGACCUGCUGCGGAAGCAGCGG |
| | | ACGUUCGACAAUGGGAGCAUCCCCCACCAGAUCCACCUGGGUGAGCUGCACGCCAUCCUGCGGCGGCAGGAGGACUUCUACCCCUUCCUGAAG |
| | | GACAACAGGGAGAAGAUCGAGAAGAUCCUGACGUUCCGGAUCCCCUACUACGUUGGCCCCCUGGCCCGCGGCAACAGCCGGUUCGCCUGGAUG |
| | | ACGCGGAAGAGCGAGGAGACGAUCACUCCCUGGAACUUCGAGGAAGUCGUGGACAAGGGUGCCAGCGCCCAGAGCUUCAUCGAGCGGAUGACG |
| | | AACUUCGACAAGAAUCUUCCAAACGAGAAGGUGCUUCCAAAGCACAGCCUGCUGUACGAGUACUUCACGGUGUACAACGAGCUGACGAAGGUG |
| | | AAGUACGUGACAGAGGGCAUGCGGAAGCCCGCCUUCCUCAGCGGUGAGCAGAAGAAGGCCAUCGUGGACCUGCUGUUCAAGACGAACCGGAAG |
| | | GUGACGGUGAAGCAGCUGAAGGAGGACUACUUCAAGAAGAUCGAGUGCUUCGACAGCGUGGAGAUCAGCGGCGUGGAGGACCGGUUCAACGCC |
| | | AGCCUGGGCACCUACCACGACCUGCUGAAGAUCAUCAAGGACAAGGACUUCCUGGACAACGAGGAGAACGAGGACAUCCUGGAGGACAUCGUG |
| | | CUGACGCUGACGCUGUUCGAGGACAGGGAGAUGAUAGAGGAGCGGCUGAAGACCUACGCCCACCUGUUCGACGACAAGGUGAUGAAGCAGCUG |
| | | AAGCGGCGGCGGUACACGGGCUGGGGCCGGCUCAGCCGGAAGCUGAUCAAUGGGAUCCGAGACAAGCAGAGCGGCAAGACGAUCCUGGACUUC |
| | | CUGAAGAGCGACGGCUUCGCCAACCGGAACUUCAUGCAGCUGAUCCACGACGACAGCCUGACGUUCAAGGAGGACAUCCAGAAGGCCCAGGUC |
| | | AGCGGCCAGGGCGACAGCCUGCACGAGCACAUCGCCAAUCUCGCCGGGAGCCCCGCCAUCAAGAAGGGGAUCCUGCAGACGGUGAAGGUGGUG |
| | | GACGAGCUGGUGAAGGUGAUGGGCCGGCACAAGCCAGAGAACAUCGUGAUCGAGAUGGCCAGGGAGAACCAGACGACUCAAAAGGGGCAGAAG |
| | | AACAGCAGGGAGCGGAUGAAGCGGAUCGAGGAGGGCAUCAAGGAGCUGGGCAGCCAGAUCCUGAAGGAGCACCCCGUGGAGAACACUCAACUG |
| | | CAGAACGAGAAGCUGUACCUGUACUACCUGCAGAAUGGGCGAGACAUGUACGUGGACCAGGAGCUGGACAUCAACCGGCUCAGCGACUACGAC |
| | | GUGGACCACAUCGUUCCCCAGAGCUUCCUGAAGGACGACAGCAUCGACAACAAGGUGCUGACGCGGAGCGACAAGAACCGGGGCAAGAGCGAC |
| | | AACGUUCCCUCAGAGGAAGUCGUGAAGAAGAUGAAGAACUACUGGCGGCAGCUGCUGAACGCCAAGCUGAUCACUCAACGGAAGUUCGACAAU |
| | | CUCACGAAGGCCGAGCGGGGUGGCCUCAGCGAGCUGGACAAGGCCGGGUUCAUCAAGCGGCAGCUGGUGGAGACGCGGCAGAUCACGAAGCAC |
| | | GUGGCCCAGAUCCUGGACAGCCGGAUGAACACGAAGUACGACGAGAACGACAAGCUGAUCAGGGAAGUCAAGGUGAUCACGCUGAAGAGCAAG |
| | | CUGGUCAGCGACUUCCGGAAGGACUUCCAGUUCUACAAGGUGAGGGAGAUCAACAACUACCACCACGCCCACGACGCCUACCUGAACGCUGUG |
| | | GUUGGCACGGCACUGAUCAAGAAGUACCCCAAGCUGGAGAGCGAGUUCGUGUACGGCGACUACAAGGUGUACGACGUGCGGAAGAUGAUAGCC |
| | | AAGAGCGAGCAGGAGAUCGGCAAGGCCACGGCCAAGUACUUCUUCUACAGCAACAUCAUGAACUUCUUCAAGACAGAGAUCACGCUGGCCAAU |
| | | GGUGAGAUCCGGAAGCGGCCCCUGAUCGAGACGAAUGGUGAGACGGGUGAGAUCGUGUGGGACAAGGGGCGAGACUUCGCCACGGUGCGGAAG |
| | | GUGCUCAGCAUGCCCCAGGUGAACAUCGUGAAGAAGACAGAAGUCCAGACGGGUGGCUUCAGCAAGGAGAGCAUCCUUCCAAAGCGGAACAGC |
| | | GACAAGCUGAUCGCCCGCAAGAAGGACUGGGACCCCAAGAAGUACGGUGGCUUCGACAGCCCCACCGUGGCCUACAGCGUGCUGGUGGUGGCC |
| | | AAGGUGGAGAAGGGGAAGAGCAAGAAGCUGAAGAGCGUGAAGGAGCUGCUGGGCAUCACGAUCAUGGAGCGGAGCAGCUUCGAGAAGAACCCC |
| | | AUCGACUUCCUGGAAGCCAAGGGGUACAAGGAAGUCAAGAAGGACCUGAUCAUCAAGCUUCCAAAGUACAGCCUGUUCGAGCUGGAGAAUGGG |
| | | CGGAAGCGGAUGCUGGCCAGCGCCGGUGAGCUGCAGAAGGGGAACGAGCUGGCACUUCCCUCAAAGUACGUGAACUUCCUGUACCUGGCCAGC |
| | | CACUACGAGAAGCUGAAGGGGAGCCCAGAGGACAACGAGCAGAAGCAGCUGUUCGUGGAGCAGCACAAGCACUACCUGGACGAGAUCAUCGAG |
| | | CAGAUCAGCGAGUUCAGCAAGCGGGUGAUCCUGGCCGACGCCAAUCUCGACAAGGUGCUCAGCGCCUACAACAAGCACCGAGACAAGCCCAUC |
| | | AGGGAGCAGGCCGAGAACAUCAUCCACCUGUUCACGCUGACGAAUCUCGGUGCCCCCGCUGCCUUCAAGUACUUCGACACGACGAUCGACCGG |
| | | AAGCGGUACACGUCGACUAAGGAAGUCCUGGACGCCACGCUGAUCCACCAGAGCAUCACGGGCCUGUACGAGACGCGGAUCGACCUCAGCCAG |
| | | CUGGGUGGCGACGGUGGUGGCAGCCCCAAGAAGAAGCGGAAGGUGUAG |
| ORF | 816 | AUGGACAAGAAGUACAGCAUCGGCCUCGACAUCGGCACCAACAGCGUCGGCUGGGCCGUCAUCACCGACGAGUACAAGGUCCCCAGCAAGAAG |
| encoding | | UUCAAGGUCCUCGGCAACACCGACCGCCACAGCAUCAAGAAGAACCUCAUCGGCGCCCUCCUCUUCGACAGCGGCGAGACCGCCGAGGCCACC |
| Sp. Cas9 | | CGCCUCAAGCGCACCGCCCGCCGCCGCUACACCCGCCGCAAGAACCGCAUCUGCUACCUCCAGGAGAUCUUCAGCAACGAGAUGGCCAAGGUC |
| | | GACGACAGCUUCUUCCACCGCCUCGAGGAGAGCUUCCUCGUCGAGGAGGACAAGAAGCACGAGCGCCACCCCAUCUUCGGCAACAUCGUCGAC |
| | | GAGGUCGCCUACCACGAGAAGUACCCCACCAUCUACCACCUCCGCAAGAAGCUCGUCGACAGCACCGACAAGGCCGACCUCCGCCUCAUCUAC |
| | | CUCGCCCUCGCCCACAUGAUCAAGUUCCGCGGCCACUUCCUCAUCGAGGGCGACCUCAACCCCGACAACAGCGACGUCGACAAGCUCUUCAUC |
| | | CAGCUCGUCCAGACCUACAACCAGCUCUUCGAGGAGAACCCCAUCAACGCCAGCGGCGUCGACGCCAAGGCCAUCCUCAGCGCCCGCCUCAGC |
| | | AAGAGCCGCCGCCUCGAGAACCUCAUCGCCCAGCUCCCCGGCGAGAAGAAGAACGGCCUCUUCGGCAACCUCAUCGCCCUCAGCCUCGGCCUC |
| | | ACCCCCAACUUCAAGAGCAACUUCGACCUCGCCGAGGACGCCAAGCUCCAGCUCAGCAAGGACACCUACGACGACGACCUCGACAACCUCCUC |
| | | GCCCAGAUCGGCGACCAGUACGCCGACCUCUUCCUCGCCGCCAAGAACCUCAGCGACGCCAUCCUCCUCAGCGACAUCCUCCGCGUCAACACC |
| | | GAGAUCACCAAGGCCCCCCUCAGCGCCAGCAUGAUCAAGCGCUACGACGAGCACCACCAGGACCUCACCCUCCUCAAGGCCCUCGUCCGCCAG |
| | | CAGCUCCCCGAGAAGUACAAGGAGAUCUUCUUCGACCAGAGCAAGAACGGCUACGCCGGCUACAUCGACGGCGGCGCCAGCCAGGAGGAGUUC |
| | | UACAAGUUCAUCAAGCCCAUCCUCGAGAAGAUGGACGGCACCGAGGAGCUCCUCGUCAAGCUCAACCGCGAGGACCUCCUCCGCAAGCAGCGC |
| | | ACCUUCGACAACGGCAGCAUCCCCCACCAGAUCCACCUCGGCGAGCUCCACGCCAUCCUCCGCCGCCAGGAGGACUUCUACCCCUUCCUCAAG |
| | | GACAACCGCGAGAAGAUCGAGAAGAUCCUCACCUUCCGCAUCCCCUACUACGUCGGCCCCCUCGCCCGCGGCAACAGCCGCUUCGCCUGGAUG |
| | | ACCCGCAAGAGCGAGGAGACCAUCACCCCCUGGAACUUCGAGGAGGUCGUCGACAAGGGCGCCAGCGCCCAGAGCUUCAUCGAGCGCAUGACC |
| | | AACUUCGACAAGAACCUCCCCAACGAGAAGGUCCUCCCCAAGCACAGCCUCCUCUACGAGUACUUCACCGUCUACAACGAGCUCACCAAGGUC |
| | | AAGUACGUCACCGAGGGCAUGCGCAAGCCCGCCUUCCUCAGCGGCGAGCAGAAGAAGGCCAUCGUCGACCUCCUCUUCAAGACCAACCGCAAG |
| | | GUCACCGUCAAGCAGCUCAAGGAGGACUACUUCAAGAAGAUCGAGUGCUUCGACAGCGUCGAGAUCAGCGGCGUCGAGGACCGCUUCAACGCC |
| | | AGCCUCGGCACCUACCACGACCUCCUCAAGAUCAUCAAGGACAAGGACUUCCUCGACAACGAGGAGAACGAGGACAUCCUCGAGGACAUCGUC |
| | | CUCACCCUCACCCUCUUCGAGGACCGCGAGAUGAUCGAGGAGCGCCUCAAGACCUACGCCCACCUCUUCGACGACAAGGUCAUGAAGCAGCUC |
| | | AAGCGCCGCCGCUACACCGGCUGGGGCCGCCUCAGCCGCAAGCUCAUCAACGGCAUCCGCGACAAGCAGAGCGGCAAGACCAUCCUCGACUUC |
| | | CUCAAGAGCGACGGCUUCGCCAACCGCAACUUCAUGCAGCUCAUCCACGACGACAGCCUCACCUUCAAGGAGGACAUCCAGAAGGCCCAGGUC |
| | | AGCGGCCAGGGCGACAGCCUCCACGAGCACAUCGCCAACCUCGCCGGCAGCCCCGCCAUCAAGAAGGGCAUCCUCCAGACCGUCAAGGUCGUC |
| | | GACGAGCUCGUCAAGGUCAUGGGCCGCCACAAGCCCGAGAACAUCGUCAUCGAGAUGGCCCGCGAGAACCAGACCACCCAGAAGGGCCAGAAG |
| | | AACAGCCGCGAGCGCAUGAAGCGCAUCGAGGAGGGCAUCAAGGAGCUCGGCAGCCAGAUCCUCAAGGAGCACCCCGUCGAGAACACCCAGCUC |
| | | CAGAACGAGAAGCUCUACCUCUACUACCUCCAGAACGGCCGCGACAUGUACGUCGACCAGGAGCUCGACAUCAACCGCCUCAGCGACUACGAC |
| | | GUCGACCACAUCGUCCCCCAGAGCUUCCUCAAGGACGACAGCAUCGACAACAAGGUCCUCACCCGCAGCGACAAGAACCGCGGCAAGAGCGAC |
| | | AACGUCCCCAGCGAGGAGGUCGUCAAGAAGAUGAAGAACUACUGGCGCCAGCUCCUCAACGCCAAGCUCAUCACCCAGCGCAAGUUCGACAAC |
| | | CUCACCAAGGCCGAGCGCGGCGGCCUCAGCGAGCUCGACAAGGCCGGCUUCAUCAAGCGCCAGCUCGUCGAGACCCGCCAGAUCACCAAGCAC |
| | | GUCGCCCAGAUCCUCGACAGCCGCAUGAACACCAAGUACGACGAGAACGACAAGCUCAUCCGCGAGGUCAAGGUCAUCACCCUCAAGAGCAAG |
| | | CUCGUCAGCGACUUCCGCAAGGACUUCCAGUUCUACAAGGUCCGCGAGAUCAACAACUACCACCACGCCCACGACGCCUACCUCAACGCCGUC |
| | | GUCGGCACCGCCCUCAUCAAGAAGUACCCCAAGCUCGAGAGCGAGUUCGUCUACGGCGACUACAAGGUCUACGACGUCCGCAAGAUGAUCGCC |
| | | AAGAGCGAGCAGGAGAUCGGCAAGGCCACCGCCAAGUACUUCUUCUACAGCAACAUCAUGAACUUCUUCAAGACCGAGAUCACCCUCGCCAAC |
| | | GGCGAGAUCCGCAAGCGCCCCCUCAUCGAGACCAACGGCGAGACCGGCGAGAUCGUCUGGGACAAGGGCCGCGACUUCGCCACCGUCCGCAAG |
| | | GUCCUCAGCAUGCCCCAGGUCAACAUCGUCAAGAAGACCGAGGUCCAGACCGGCGGCUUCAGCAAGGAGAGCAUCCUCCCCAAGCGCAACAGC |
| | | GACAAGCUCAUCGCCCGCAAGAAGGACUGGGACCCCAAGAAGUACGGCGGCUUCGACAGCCCCACCGUCGCCUACAGCGUCCUCGUCGUCGCC |
| | | AAGGUCGAGAAGGGCAAGAGCAAGAAGCUCAAGAGCGUCAAGGAGCUCCUCGGCAUCACCAUCAUGGAGCGCAGCAGCUUCGAGAAGAACCCC |
| | | AUCGACUUCCUCGAGGCCAAGGGCUACAAGGAGGUCAAGAAGGACCUCAUCAUCAAGCUCCCCAAGUACAGCCUCUUCGAGCUCGAGAACGGC |
| | | CGCAAGCGCAUGCUCGCCAGCGCCGGCGAGCUCCAGAAGGGCAACGAGCUCGCCCUCCCCAGCAAGUACGUCAACUUCCUCUACCUCGCCAGC |
| | | CACUACGAGAAGCUCAAGGGCAGCCCCGAGGACAACGAGCAGAAGCAGCUCUUCGUCGAGCAGCACAAGCACUACCUCGACGAGAUCAUCGAG |
| | | CAGAUCAGCGAGUUCAGCAAGCGCGUCAUCCUCGCCGACGCCAACCUCGACAAGGUCCUCAGCGCCUACAACAAGCACCGCGACAAGCCCAUC |
| | | CGCGAGCAGGCCGAGAACAUCAUCCACCUCUUCACCCUCACCAACCUCGGCGCCCCCGCCGCCUUCAAGUACUUCGACACCACCAUCGACCGC |
| | | AAGCGCUACACCAGCACCAAGGAGGUCCUCGACGCCACCCUCAUCCACCAGAGCAUCACCGGCCUCUACGAGACCCGCAUCGACCUCAGCCAG |
| | | CUCGGCGGCGACGGCGGCGGCAGCCCCAAGAAGAAGCGCAAGGUCUAG |
| ORF | 817 | ATGGACAAGAAGTACAGCATCGGCCTGGACATCGGCACCAACAGCGTGGGCTGGGCCGTGATCACCGACGAGTACAAGGTGCCCAGCAAGAAG |
| encoding | | TTCAAGGTGCTGGGCAACACCGACCGGCACAGCATCAAGAAGAACCTGATCGGCGCCCTGCTGTTCGACAGCGGCGAGACCGCCGAGGCCACC |
| Sp. Cas9 | | CGGCTGAAGCGGACCGCCCGGCGGCGGTACACCCGGCGGAAGAACCGGATCTGCTACCTGCAGGAGATCTTCAGCAACGAGATGGCCAAGGTG |
| | | GACGACAGCTTCTTCCACCGGCTGGAGGAGAGCTTCCTGGTGGAGGAGGACAAGAAGCACGAGCGGCACCCCATCTTCGGCAACATCGTGGAC |
| | | GAGGTGGCCTACCACGAGAAGTACCCCACCATCTACCACCTGCGGAAGAAGCTGGTGGACAGCACCGACAAGGCCGACCTGCGGCTGATCTAC |
| | | CTGGCCCTGGCCCACATGATCAAGTTCCGGGGCCACTTCCTGATCGAGGGCGACCTGAACCCCGACAACAGCGACGTGGACAAGCTGTTCATC |
| | | CAGCTGGTGCAGACCTACAACCAGCTGTTCGAGGAGAACCCCATCAACGCCAGCGGCGTGGACGCCAAGGCCATCCTGAGCGCCCGGCTGAGC |
| | | AAGAGCCGGCGGCTGGAGAACCTGATCGCCCAGCTGCCCGGCGAGAAGAAGAACGGCCTGTTCGGCAACCTGATCGCCCTGAGCCTGGGCCTG |
| | | ACCCCCAACTTCAAGAGCAACTTCGACCTGGCCGAGGACGCCAAGCTGCAGCTGAGCAAGGACACCTACGACGACGACCTGGACAACCTGCTG |
| | | GCCCAGATCGGCGACCAGTACGCCGACCTGTTCCTGGCCGCCAAGAACCTGAGCGACGCCATCCTGCTGAGCGACATCCTGCGGGTGAACACC |
| | | GAGATCACCAAGGCCCCCCTGAGCGCCAGCATGATCAAGCGGTACGACGAGCACCACCAGGACCTGACCCTGCTGAAGGCCCTGGTGCGGCAG |
| | | CAGCTGCCCGAGAAGTACAAGGAGATCTTCTTCGACCAGAGCAAGAACGGCTACGCCGGCTACATCGACGGCGGCGCCAGCCAGGAGGAGTTC |
| | | TACAAGTTCATCAAGCCCATCCTGGAGAAGATGGACGGCACCGAGGAGCTGCTGGTGAAGCTGAACCGGGAGGACCTGCTGCGGAAGCAGCGG |
| | | ACCTTCGACAACGGCAGCATCCCCCACCAGATCCACCTGGGCGAGCTGCACGCCATCCTGCGGCGGCAGGAGGACTTCTACCCCTTCCTGAAG |
| | | GACAACCGGGAGAAGATCGAGAAGATCCTGACCTTCCGGATCCCCTACTACGTGGGCCCCCTGGCCCGGGGCAACAGCCGGTTCGCCTGGATG |
| | | ACCCGGAAGAGCGAGGAGACCATCACCCCCTGGAACTTCGAGGAGGTGGTGGACAAGGGCGCCAGCGCCCAGAGCTTCATCGAGCGGATGACC |
| | | AACTTCGACAAGAACCTGCCCAACGAGAAGGTGCTGCCCAAGCACAGCCTGCTGTACGAGTACTTCACCGTGTACAACGAGCTGACCAAGGTG |
| | | AAGTACGTGACCGAGGGCATGCGGAAGCCCGCCTTCCTGAGCGGCGAGCAGAAGAAGGCCATCGTGGACCTGCTGTTCAAGACCAACCGGAAG |
| | | GTGACCGTGAAGCAGCTGAAGGAGGACTACTTCAAGAAGATCGAGTGCTTCGACAGCGTGGAGATCAGCGGCGTGGAGGACCGGTTCAACGCC |
| | | AGCCTGGGCACCTACCACGACCTGCTGAAGATCATCAAGGACAAGGACTTCCTGGACAACGAGGAGAACGAGGACATCCTGGAGGACATCGTG |
| | | CTGACCCTGACCCTGTTCGAGGACCGGGAGATGATCGAGGAGCGGCTGAAGACCTACGCCCACCTGTTCGACGACAAGGTGATGAAGCAGCTG |
| | | AAGCGGCGGCGGTACACCGGCTGGGGCCGGCTGAGCCGGAAGCTGATCAACGGCATCCGGGACAAGCAGAGCGGCAAGACCATCCTGGACTTC |
| | | CTGAAGAGCGACGGCTTCGCCAACCGGAACTTCATGCAGCTGATCCACGACGACAGCCTGACCTTCAAGGAGGACATCCAGAAGGCCCAGGTG |
| | | AGCGGCCAGGGCGACAGCCTGCACGAGCACATCGCCAACCTGGCCGGCAGCCCCGCCATCAAGAAGGGCATCCTGCAGACCGTGAAGGTGGTG |
| | | GACGAGCTGGTGAAGGTGATGGGCCGGCACAAGCCCGAGAACATCGTGATCGAGATGGCCCGGGAGAACCAGACCACCCAGAAGGGCCAGAAG |
| | | AACAGCCGGGAGCGGATGAAGCGGATCGAGGAGGGCATCAAGGAGCTGGGCAGCCAGATCCTGAAGGAGCACCCCGTGGAGAACACCCAGCTG |
| | | CAGAACGAGAAGCTGTACCTGTACTACCTGCAGAACGGCCGGGACATGTACGTGGACCAGGAGCTGGACATCAACCGGCTGAGCGACTACGAC |
| | | GTGGACCACATCGTGCCCCAGAGCTTCCTGAAGGACGACAGCATCGACAACAAGGTGCTGACCCGGAGCGACAAGAACCGGGGCAAGAGCGAC |
| | | AACGTGCCCAGCGAGGAGGTGGTGAAGAAGATGAAGAACTACTGGCGGCAGCTGCTGAACGCCAAGCTGATCACCCAGCGGAAGTTCGACAAC |
| | | CTGACCAAGGCCGAGCGGGGCGGCCTGAGCGAGCTGGACAAGGCCGGCTTCATCAAGCGGCAGCTGGTGGAGACCCGGCAGATCACCAAGCAC |
| | | GTGGCCCAGATCCTGGACAGCCGGATGAACACCAAGTACGACGAGAACGACAAGCTGATCCGGGAGGTGAAGGTGATCACCCTGAAGAGCAAG |
| | | CTGGTGAGCGACTTCCGGAAGGACTTCCAGTTCTACAAGGTGCGGGAGATCAACAACTACCACCACGCCCACGACGCCTACCTGAACGCCGTG |
| | | GTGGGCACCGCCCTGATCAAGAAGTACCCCAAGCTGGAGAGCGAGTTCGTGTACGGCGACTACAAGGTGTACGACGTGCGGAAGATGATCGCC |
| | | AAGAGCGAGCAGGAGATCGGCAAGGCCACCGCCAAGTACTTCTTCTACAGCAACATCATGAACTTCTTCAAGACCGAGATCACCCTGGCCAAC |
| | | GGCGAGATCCGGAAGCGGCCCCTGATCGAGACCAACGGCGAGACCGGCGAGATCGTGTGGGACAAGGGCCGGGACTTCGCCACCGTGCGGAAG |
| | | GTGCTGAGCATGCCCCAGGTGAACATCGTGAAGAAGACCGAGGTGCAGACCGGCGGCTTCAGCAAGGAGAGCATCCTGCCCAAGCGGAACAGC |
| | | GACAAGCTGATCGCCCGGAAGAAGGACTGGGACCCCAAGAAGTACGGCGGCTTCGACAGCCCCACCGTGGCCTACAGCGTGCTGGTGGTGGCC |
| | | AAGGTGGAGAAGGGCAAGAGCAAGAAGCTGAAGAGCGTGAAGGAGCTGCTGGGCATCACCATCATGGAGCGGAGCAGCTTCGAGAAGAACCCC |
| | | ATCGACTTCCTGGAGGCCAAGGGCTACAAGGAGGTGAAGAAGGACCTGATCATCAAGCTGCCCAAGTACAGCCTGTTCGAGCTGGAGAACGGC |
| | | CGGAAGCGGATGCTGGCCAGCGCCGGCGAGCTGCAGAAGGGCAACGAGCTGGCCCTGCCCAGCAAGTACGTGAACTTCCTGTACCTGGCCAGC |
| | | CACTACGAGAAGCTGAAGGGCAGCCCCGAGGACAACGAGCAGAAGCAGCTGTTCGTGGAGCAGCACAAGCACTACCTGGACGAGATCATCGAG |
| | | CAGATCAGCGAGTTCAGCAAGCGGGTGATCCTGGCCGACGCCAACCTGGACAAGGTGCTGAGCGCCTACAACAAGCACCGGGACAAGCCCATC |
| | | CGGGAGCAGGCCGAGAACATCATCCACCTGTTCACCCTGACCAACCTGGGCGCCCCCGCCGCCTTCAAGTACTTCGACACCACCATCGACCGG |
| | | AAGCGGTACACCAGCACCAAGGAGGTGCTGGACGCCACCCTGATCCACCAGAGCATCACCGGCCTGTACGAGACCCGGATCGACCTGAGCCAG |
| | | CTGGGCGGCGACGGCGGCGGCAGCCCCAAGAAGAAGCGGAAGGTGTGA |
| amino acid | 818 | MDKKYSIGLDIGTNSVGWAVITDEYKVPSKKFKVLGNTDRHSIKKNLIGALLFDSGETAEATRLKRTARRRYTRRKNRICYLQEIFSNEMAKV |
| sequence | | DDSFFHRLEESFLVEEDKKHERHPIFGNIVDEVAYHEKYPTIYHLRKKLVDSTDKADLRLIYLALAHMIKFRGHFLIEGDLNPDNSDVDKLFI |
| for Sp. | | QLVQTYNQLFEENPINASGVDAKAILSARLSKSRRLENLIAQLPGEKKNGLFGNLIALSLGLTPNFKSNFDLAEDAKLQLSKDTYDDDLDNLL |
| Cas9 | | AQIGDQYADLFLAAKNLSDAILLSDILRVNTEITKAPLSASMIKRYDEHHQDLTLLKALVRQQLPEKYKEIFFDQSKNGYAGYIDGGASQEEF |
| | | YKFIKPILEKMDGTEELLVKLNREDLLRKQRTFDNGSIPHQIHLGELHAILRRQEDFYPFLKDNREKIEKILTFRIPYYVGPLARGNSRFAWM |
| | | TRKSEETITPWNFEEVVDKGASAQSFIERMTNFDKNLPNEKVLPKHSLLYEYFTVYNELTKVKYVTEGMRKPAFLSGEQKKAIVDLLFKTNRK |
| | | VTVKQLKEDYFKKIECFDSVEISGVEDRFNASLGTYHDLLKIIKDKDFLDNEENEDILEDIVLTLTLFEDREMIEERLKTYAHLFDDKVMKQL |
| | | KRRRYTGWGRLSRKLINGIRDKQSGKTILDFLKSDGFANRNFMQLIHDDSLTFKEDIQKAQVSGQGDSLHEHIANLAGSPAIKKGILQTVKVV |
| | | DELVKVMGRHKPENIVIEMARENQTTQKGQKNSRERMKRIEEGIKELGSQILKEHPVENTQLQNEKLYLYYLONGRDMYVDQELDINRLSDYD |
| | | VDHIVPQSFLKDDSIDNKVLTRSDKNRGKSDNVPSEEVVKKMKNYWRQLLNAKLITQRKFDNLTKAERGGLSELDKAGFIKRQLVETRQITKH |
| | | VAQILDSRMNTKYDENDKLIREVKVITLKSKLVSDFRKDFQFYKVREINNYHHAHDAYLNAVVGTALIKKYPKLESEFVYGDYKVYDVRKMIA |
| | | KSEQEIGKATAKYFFYSNIMNFFKTEITLANGEIRKRPLIETNGETGEIVWDKGRDFATVRKVLSMPQVNIVKKTEVQTGGFSKESILPKRNS |
| | | DKLIARKKDWDPKKYGGFDSPTVAYSVLVVAKVEKGKSKKLKSVKELLGITIMERSSFEKNPIDFLEAKGYKEVKKDLIIKLPKYSLFELENG |
| | | RKRMLASAGELQKGNELALPSKYVNFLYLASHYEKLKGSPEDNEQKQLFVEQHKHYLDEIIEQISEFSKRVILADANLDKVLSAYNKHRDKPI |
| | | REQAENIIHLFTLTNLGAPAAFKYFDTTIDRKRYTSTKEVLDATLIHQSITGLYETRIDLSQLGGDGGGSPKKKRKV |
| Open | 819 | AUGGACAAGAAGUACUCCAUCGGCCUGGACAUCGGCACCAACUCCGUGGGCUGGGCCGUGAUCACCGACGAGUACAAGGUGCCCUCCAAGAAG |
| reading | | UUCAAGGUGCUGGGCAACACCGACCGGCACUCCAUCAAGAAGAACCUGAUCGGCGCCCUGCUGUUCGACUCCGGCGAGACCGCCGAGGCCACC |
| frame for | | CGGCUGAAGCGGACCGCCCGGCGGCGGUACACCCGGCGGAAGAACCGGAUCUGCUACCUGCAGGAGAUCUUCUCCAACGAGAUGGCCAAGGUG |
| Cas9 with | | GACGACUCCUUCUUCCACCGGCUGGAGGAGUCCUUCCUGGUGGAGGAGGACAAGAAGCACGAGCGGCACCCCAUCUUCGGCAACAUCGUGGAC |
| Hibit tag | | GAGGUGGCCUACCACGAGAAGUACCCCACCAUCUACCACCUGCGGAAGAAGCUGGUGGACUCCACCGACAAGGCCGACCUGCGGCUGAUCUAC |
| | | CUGGCCCUGGCCCACAUGAUCAAGUUCCGGGGCCACUUCCUGAUCGAGGGCGACCUGAACCCCGACAACUCCGACGUGGACAAGCUGUUCAUC |
| | | CAGCUGGUGCAGACCUACAACCAGCUGUUCGAGGAGAACCCCAUCAACGCCUCCGGCGUGGACGCCAAGGCCAUCCUGUCCGCCCGGCUGUCC |
| | | AAGUCCCGGCGGCUGGAGAACCUGAUCGCCCAGCUGCCCGGCGAGAAGAAGAACGGCCUGUUCGGCAACCUGAUCGCCCUGUCCCUGGGCCUG |
| | | ACCCCCAACUUCAAGUCCAACUUCGACCUGGCCGAGGACGCCAAGCUGCAGCUGUCCAAGGACACCUACGACGACGACCUGGACAACCUGCUG |
| | | GCCCAGAUCGGCGACCAGUACGCCGACCUGUUCCUGGCCGCCAAGAACCUGUCCGACGCCAUCCUGCUGUCCGACAUCCUGCGGGUGAACACC |
| | | GAGAUCACCAAGGCCCCCCUGUCCGCCUCCAUGAUCAAGCGGUACGACGAGCACCACCAGGACCUGACCCUGCUGAAGGCCCUGGUGCGGCAG |
| | | CAGCUGCCCGAGAAGUACAAGGAGAUCUUCUUCGACCAGUCCAAGAACGGCUACGCCGGCUACAUCGACGGCGGCGCCUCCCAGGAGGAGUUC |
| | | UACAAGUUCAUCAAGCCCAUCCUGGAGAAGAUGGACGGCACCGAGGAGCUGCUGGUGAAGCUGAACCGGGAGGACCUGCUGCGGAAGCAGCGG |
| | | ACCUUCGACAACGGCUCCAUCCCCCACCAGAUCCACCUGGGCGAGCUGCACGCCAUCCUGCGGCGGCAGGAGGACUUCUACCCCUUCCUGAAG |
| | | GACAACCGGGAGAAGAUCGAGAAGAUCCUGACCUUCCGGAUCCCCUACUACGUGGGCCCCCUGGCCCGGGGCAACUCCCGGUUCGCCUGGAUG |
| | | ACCCGGAAGUCCGAGGAGACCAUCACCCCCUGGAACUUCGAGGAGGUGGUGGACAAGGGCGCCUCCGCCCAGUCCUUCAUCGAGCGGAUGACC |
| | | AACUUCGACAAGAACCUGCCCAACGAGAAGGUGCUGCCCAAGCACUCCCUGCUGUACGAGUACUUCACCGUGUACAACGAGCUGACCAAGGUG |
| | | AAGUACGUGACCGAGGGCAUGCGGAAGCCCGCCUUCCUGUCCGGCGAGCAGAAGAAGGCCAUCGUGGACCUGCUGUUCAAGACCAACCGGAAG |
| | | GUGACCGUGAAGCAGCUGAAGGAGGACUACUUCAAGAAGAUCGAGUGCUUCGACUCCGUGGAGAUCUCCGGCGUGGAGGACCGGUUCAACGCC |
| | | UCCCUGGGCACCUACCACGACCUGCUGAAGAUCAUCAAGGACAAGGACUUCCUGGACAACGAGGAGAACGAGGACAUCCUGGAGGACAUCGUG |
| | | CUGACCCUGACCCUGUUCGAGGACCGGGAGAUGAUCGAGGAGCGGCUGAAGACCUACGCCCACCUGUUCGACGACAAGGUGAUGAAGCAGCUG |
| | | AAGCGGCGGCGGUACACCGGCUGGGGCCGGCUGUCCCGGAAGCUGAUCAACGGCAUCCGGGACAAGCAGUCCGGCAAGACCAUCCUGGACUUC |
| | | CUGAAGUCCGACGGCUUCGCCAACCGGAACUUCAUGCAGCUGAUCCACGACGACUCCCUGACCUUCAAGGAGGACAUCCAGAAGGCCCAGGUG |
| | | UCCGGCCAGGGCGACUCCCUGCACGAGCACAUCGCCAACCUGGCCGGCUCCCCCGCCAUCAAGAAGGGCAUCCUGCAGACCGUGAAGGUGGUG |
| | | GACGAGCUGGUGAAGGUGAUGGGCCGGCACAAGCCCGAGAACAUCGUGAUCGAGAUGGCCCGGGAGAACCAGACCACCCAGAAGGGCCAGAAG |
| | | AACUCCCGGGAGCGGAUGAAGCGGAUCGAGGAGGGCAUCAAGGAGCUGGGCUCCCAGAUCCUGAAGGAGCACCCCGUGGAGAACACCCAGCUG |
| | | CAGAACGAGAAGCUGUACCUGUACUACCUGCAGAACGGCCGGGACAUGUACGUGGACCAGGAGCUGGACAUCAACCGGCUGUCCGACUACGAC |
| | | GUGGACCACAUCGUGCCCCAGUCCUUCCUGAAGGACGACUCCAUCGACAACAAGGUGCUGACCCGGUCCGACAAGAACCGGGGCAAGUCCGAC |
| | | AACGUGCCCUCCGAGGAGGUGGUGAAGAAGAUGAAGAACUACUGGCGGCAGCUGCUGAACGCCAAGCUGAUCACCCAGCGGAAGUUCGACAAC |
| | | CUGACCAAGGCCGAGCGGGGCGGCCUGUCCGAGCUGGACAAGGCCGGCUUCAUCAAGCGGCAGCUGGUGGAGACCCGGCAGAUCACCAAGCAC |
| | | GUGGCCCAGAUCCUGGACUCCCGGAUGAACACCAAGUACGACGAGAACGACAAGCUGAUCCGGGAGGUGAAGGUGAUCACCCUGAAGUCCAAG |
| | | CUGGUGUCCGACUUCCGGAAGGACUUCCAGUUCUACAAGGUGCGGGAGAUCAACAACUACCACCACGCCCACGACGCCUACCUGAACGCCGUG |
| | | GUGGGCACCGCCCUGAUCAAGAAGUACCCCAAGCUGGAGUCCGAGUUCGUGUACGGCGACUACAAGGUGUACGACGUGCGGAAGAUGAUCGCC |
| | | AAGUCCGAGCAGGAGAUCGGCAAGGCCACCGCCAAGUACUUCUUCUACUCCAACAUCAUGAACUUCUUCAAGACCGAGAUCACCCUGGCCAAC |
| | | GGCGAGAUCCGGAAGCGGCCCCUGAUCGAGACCAACGGCGAGACCGGCGAGAUCGUGUGGGACAAGGGCCGGGACUUCGCCACCGUGCGGAAG |
| | | GUGCUGUCCAUGCCCCAGGUGAACAUCGUGAAGAAGACCGAGGUGCAGACCGGCGGCUUCUCCAAGGAGUCCAUCCUGCCCAAGCGGAACUCC |
| | | GACAAGCUGAUCGCCCGGAAGAAGGACUGGGACCCCAAGAAGUACGGCGGCUUCGACUCCCCCACCGUGGCCUACUCCGUGCUGGUGGUGGCC |
| | | AAGGUGGAGAAGGGCAAGUCCAAGAAGCUGAAGUCCGUGAAGGAGCUGCUGGGCAUCACCAUCAUGGAGCGGUCCUCCUUCGAGAAGAACCCC |
| | | AUCGACUUCCUGGAGGCCAAGGGCUACAAGGAGGUGAAGAAGGACCUGAUCAUCAAGCUGCCCAAGUACUCCCUGUUCGAGCUGGAGAACGGC |
| | | CGGAAGCGGAUGCUGGCCUCCGCCGGCGAGCUGCAGAAGGGCAACGAGCUGGCCCUGCCCUCCAAGUACGUGAACUUCCUGUACCUGGCCUCC |
| | | CACUACGAGAAGCUGAAGGGCUCCCCCGAGGACAACGAGCAGAAGCAGCUGUUCGUGGAGCAGCACAAGCACUACCUGGACGAGAUCAUCGAG |
| | | CAGAUCUCCGAGUUCUCCAAGCGGGUGAUCCUGGCCGACGCCAACCUGGACAAGGUGCUGUCCGCCUACAACAAGCACCGGGACAAGCCCAUC |
| | | CGGGAGCAGGCCGAGAACAUCAUCCACCUGUUCACCCUGACCAACCUGGGCGCCCCCGCCGCCUUCAAGUACUUCGACACCACCAUCGACCGG |
| | | AAGCGGUACACCUCCACCAAGGAGGUGCUGGACGCCACCCUGAUCCACCAGUCCAUCACCGGCCUGUACGAGACCCGGAUCGACCUGUCCCAG |
| | | CUGGGCGGCGACGGCGGCGGCUCCCCCAAGAAGAAGCGGAAGGUGUCCGAGUCCGCCACCCCCGAGUCCGUGUCCGGCUGGCGGCUGUUCAAG |
| | | AAGAUCUCCUGA |
| Amino acid | 820 | MDKKYSIGLDIGTNSVGWAVITDEYKVPSKKFKVLGNTDRHSIKKNLIGALLFDSGETAEATRLKRTARRRYTRRKNRICYLQEIFSNEMAKV |
| sequence | | DDSFFHRLEESFLVEEDKKHERHPIFGNIVDEVAYHEKYPTIYHLRKKLVDSTDKADLRLIYLALAHMIKFRGHFLIEGDLNPDNSDVDKLFI |
| for Cas9 | | QLVQTYNQLFEENPINASGVDAKAILSARLSKSRRLENLIAQLPGEKKNGLFGNLIALSLGLTPNFKSNEDLAEDAKLQLSKDTYDDDLDNLL |
| with Hibit | | AQIGDQYADLFLAAKNLSDAILLSDILRVNTEITKAPLSASMIKRYDEHHQDLTLLKALVRQQLPEKYKEIFFDQSKNGYAGYIDGGASQEEF |
| tag | | YKFIKPILEKMDGTEELLVKLNREDLLRKQRTFDNGSIPHQIHLGELHAILRRQEDFYPFLKDNREKIEKILTFRIPYYVGPLARGNSRFAWM |
| | | TRKSEETITPWNFEEVVDKGASAQSFIERMTNFDKNLPNEKVLPKHSLLYEYFTVYNELTKVKYVTEGMRKPAFLSGEQKKAIVDLLFKTNRK |
| | | VTVKQLKEDYFKKIECFDSVEISGVEDRFNASLGTYHDLLKIIKDKDFLDNEENEDILEDIVLTLTLFEDREMIEERLKTYAHLFDDKVMKQL |
| | | KRRRYTGWGRLSRKLINGIRDKQSGKTILDFLKSDGFANRNFMQLIHDDSLTFKEDIQKAQVSGQGDSLHEHIANLAGSPAIKKGILQTVKVV |
| | | DELVKVMGRHKPENIVIEMARENQTTQKGQKNSRERMKRIEEGIKELGSQILKEHPVENTQLQNEKLYLYYLONGRDMYVDQELDINRLSDYD |
| | | VDHIVPQSFLKDDSIDNKVLTRSDKNRGKSDNVPSEEVVKKMKNYWRQLLNAKLITQRKFDNLTKAERGGLSELDKAGFIKRQLVETRQITKH |
| | | VAQILDSRMNTKYDENDKLIREVKVITLKSKLVSDFRKDFQFYKVREINNYHHAHDAYLNAVVGTALIKKYPKLESEFVYGDYKVYDVRKMIA |
| | | KSEQEIGKATAKYFFYSNIMNFFKTEITLANGEIRKRPLIETNGETGEIVWDKGRDFATVRKVLSMPQVNIVKKTEVQTGGFSKESILPKRNS |
| | | DKLIARKKDWDPKKYGGFDSPTVAYSVLVVAKVEKGKSKKLKSVKELLGITIMERSSFEKNPIDELEAKGYKEVKKDLIIKLPKYSLFELENG |
| | | RKRMLASAGELQKGNELALPSKYVNFLYLASHYEKLKGSPEDNEQKQLFVEQHKHYLDEIIEQISEFSKRVILADANLDKVLSAYNKHRDKPI |
| | | REQAENIIHLFTLTNLGAPAAFKYFDTTIDRKRYTSTKEVLDATLIHQSITGLYETRIDLSQLGGDGGGSPKKKRKVSESATPESVSGWRLFK |
| | | KIS |
| mRNA | 821 | GGGAAGCUCAGAAUAAACGCUCAACUUUGGCCGGAUCUGCCACCAUGACCAACCUGUCCGACAUCAUCGAGAAGGAGACCGGCAAGCAGCUGG |
| encoding | | UGAUCCAGGAGUCCAUCCUGAUGCUGCCCGAGGAGGUGGAGGAGGUGAUCGGCAACAAGCCCGAGUCCGACAUCCUGGUGCACACCGCCUACG |
| UGI | | ACGAGUCCACCGACGAGAACGUGAUGCUGCUGACCUCCGACGCCCCCGAGUACAAGCCCUGGGCCCUGGUGAUCCAGGACUCCAACGGCGAGA |
| | | ACAAGAUCAAGAUGCUGUCCGGCGGCUCCAAGCGGACCGCCGACGGCUCCGAGUUCGAGUCCCCCAAGAAGAAGCGGAAGGUGGAGUGAUAGC |
| | | UAGCACCAGCCUCAAGAACACCCGAAUGGAGUCUCUAAGCUACAUAAUACCAACUUACACUUUACAAAAUGUUGUCCCCCAAAAUGUAGCCAU |
| | | UCGUAUCUGCUCCUAAUAAAAAGAAAGUUUCUUCACAUUCUCUCGAGAAAAAAAAAAAAUGGAAAAAAAAAAAACGGAAAAAAAAAAAAGGUA |
| | | AAAAAAAAAAAUAUAAAAAAAAAAAACAUAAAAAAAAAAAACGAAAAAAAAAAAACGUAAAAAAAAAAAACUCAAAAAAAAAAAAGAUAAAAA |
| | | AAAAAAACCUAAAAAAAAAAAAUGUAAAAAAAAAAAAGGGAAAAAAAAAAAACGCAAAAAAAAAAAACACAAAAAAAAAAAAUGCAAAAAAAA |
| | | AAAAUCGAAAAAAAAAAAAUCUAAAAAAAAAAAACGAAAAAAAAAAAACCCAAAAAAAAAAAAGACAAAAAAAAAAAAUAGAAAAAAAAAAAA |
| | | GUUAAAAAAAAAAAACUGAAAAAAAAAAAAUUUAAAAAAAAAAAAUCUAG |
| mRNA | 822 | GGGAAGCUCAGAAUAAACGCUCAACUUUGGCCGGAUCUGCCACCAUGGACGGCUCCGGCGGCGGCUCCCCCAAGAAGAAGCGGAAGGUGGAGG |
| encoding Nme2Cas9 | | ACAAGCGGCCCGCCGCCACCAAGAAGGCCGGCCAGGCCAAGAAGAAGAAGGGCGGCUCCGGCGGCGGCGAGGCCUCCCCCGCCUCCGGCCCCC |
| base editor | | GGCACCUGAUGGACCCCCACAUCUUCACCUCCAACUUCAACAACGGCAUCGGCCGGCACAAGACCUACCUGUGCUACGAGGUGGAGCGGCUGG |
| | | ACAACGGCACCUCCGUGAAGAUGGACCAGCACCGGGGCUUCCUGCACAACCAGGCCAAGAACCUGCUGUGCGGCUUCUACGGCCGGCACGCCG |
| | | AGCUGCGGUUCCUGGACCUGGUGCCCUCCCUGCAGCUGGACCCCGCCCAGAUCUACCGGGUGACCUGGUUCAUCUCCUGGUCCCCCUGCUUCU |
| | | CCUGGGGCUGCGCCGGCGAGGUGCGGGCCUUCCUGCAGGAGAACACCCACGUGCGGCUGCGGAUCUUCGCCGCCCGGAUCUACGACUACGACC |
| | | CCCUGUACAAGGAGGCCCUGCAGAUGCUGCGGGACGCCGGCGCCCAGGUGUCCAUCAUGACCUACGACGAGUUCAAGCACUGCUGGGACACCU |
| | | UCGUGGACCACCAGGGCUGCCCCUUCCAGCCCUGGGACGGCCUGGACGAGCACUCCCAGGCCCUGUCCGGCCGGCUGCGGGCCAUCCUGCAGA |
| | | ACCAGGGCAACUCCGGCUCCGAGACCCCCGGCACCUCCGAGUCCGCCACCCCCGAGUCCGCAGCGUUCAAACCAAAUCCCAUCAACUACAUCC |
| | | UGGGCCUGGCCAUCGGCAUCGCCUCCGUGGGCUGGGCCAUGGUGGAGAUCGACGAGGAGGAGAACCCCAUCCGGCUGAUCGACCUGGGCGUGC |
| | | GGGUGUUCGAGCGGGCCGAGGUGCCCAAGACCGGCGACUCCCUGGCCAUGGCCCGGCGGCUGGCCCGGUCCGUGCGGCGGCUGACCCGGCGGC |
| | | GGGCCCACCGGCUGCUGCGGGCCCGGCGGCUGCUGAAGCGGGAGGGCGUGCUGCAGGCCGCCGACUUCGACGAGAACGGCCUGAUCAAGUCCC |
| | | UGCCCAACACCCCCUGGCAGCUGCGGGCCGCCGCCCUGGACCGGAAGCUGACCCCCCUGGAGUGGUCCGCCGUGCUGCUGCACCUGAUCAAGC |
| | | ACCGGGGCUACCUGUCCCAGCGGAAGAACGAGGGCGAGACCGCCGACAAGGAGCUGGGCGCCCUGCUGAAGGGCGUGGCCAACAACGCCCACG |
| | | CCCUGCAGACCGGCGACUUCCGGACCCCCGCCGAGCUGGCCCUGAACAAGUUCGAGAAGGAGUCCGGCCACAUCCGGAACCAGCGGGGCGACU |
| | | ACUCCCACACCUUCUCCCGGAAGGACCUGCAGGCCGAGCUGAUCCUGCUGUUCGAGAAGCAGAAGGAGUUCGGCAACCCCCACGUGUCCGGCG |
| | | GCCUGAAGGAGGGCAUCGAGACCCUGCUGAUGACCCAGCGGCCCGCCCUGUCCGGCGACGCCGUGCAGAAGAUGCUGGGCCACUGCACCUUCG |
| | | AGCCCGCCGAGCCCAAGGCCGCCAAGAACACCUACACCGCCGAGCGGUUCAUCUGGCUGACCAAGCUGAACAACCUGCGGAUCCUGGAGCAGG |
| | | GCUCCGAGCGGCCCCUGACCGACACCGAGCGGGCCACCCUGAUGGACGAGCCCUACCGGAAGUCCAAGCUGACCUACGCCCAGGCCCGGAAGC |
| | | UGCUGGGCCUGGAGGACACCGCCUUCUUCAAGGGCCUGCGGUACGGCAAGGACAACGCCGAGGCCUCCACCCUGAUGGAGAUGAAGGCCUACC |
| | | ACGCCAUCUCCCGGGCCCUGGAGAAGGAGGGCCUGAAGGACAAGAAGUCCCCCCUGAACCUGUCCUCCGAGCUGCAGGACGAGAUCGGCACCG |
| | | CCUUCUCCCUGUUCAAGACCGACGAGGACAUCACCGGCCGGCUGAAGGACCGGGUGCAGCCCGAGAUCCUGGAGGCCCUGCUGAAGCACAUCU |
| | | CCUUCGACAAGUUCGUGCAGAUCUCCCUGAAGGCCCUGCGGCGGAUCGUGCCCCUGAUGGAGCAGGGCAAGCGGUACGACGAGGCCUGCGCCG |
| | | AGAUCUACGGCGACCACUACGGCAAGAAGAACACCGAGGAGAAGAUCUACCUGCCCCCCAUCCCCGCCGACGAGAUCCGGAACCCCGUGGUGC |
| | | UGCGGGCCCUGUCCCAGGCCCGGAAGGUGAUCAACGGCGUGGUGCGGCGGUACGGCUCCCCCGCCCGGAUCCACAUCGAGACCGCCCGGGAGG |
| | | UGGGCAAGUCCUUCAAGGACCGGAAGGAGAUCGAGAAGCGGCAGGAGGAGAACCGGAAGGACCGGGAGAAGGCCGCCGCCAAGUUCCGGGAGU |
| | | ACUUCCCCAACUUCGUGGGCGAGCCCAAGUCCAAGGACAUCCUGAAGCUGCGGCUGUACGAGCAGCAGCACGGCAAGUGCCUGUACUCCGGCA |
| | | AGGAGAUCAACCUGGUGCGGCUGAACGAGAAGGGCUACGUGGAGAUCGACCACGCCCUGCCCUUCUCCCGGACCUGGGACGACUCCUUCAACA |
| | | ACAAGGUGCUGGUGCUGGGCUCCGAGAACCAGAACAAGGGCAACCAGACCCCCUACGAGUACUUCAACGGCAAGGACAACUCCCGGGAGUGGC |
| | | AGGAGUUCAAGGCCCGGGUGGAGACCUCCCGGUUCCCCCGGUCCAAGAAGCAGCGGAUCCUGCUGCAGAAGUUCGACGAGGACGGCUUCAAGG |
| | | AGUGCAACCUGAACGACACCCGGUACGUGAACCGCUUCCUGUGCCAGUUCGUGGCCGACCACAUCCUGCUGACCGGCAAGGGCAAGCGGCGGG |
| | | UGUUCGCCUCCAACGGCCAGAUCACCAACCUGCUGCGGGGCUUCUGGGGCCUGCGGAAGGUGCGGGCCGAGAACGACCGGCACCACGCCCUGG |
| | | ACGCCGUGGUGGUGGCCUGCUCCACCGUGGCCAUGCAGCAGAAGAUCACCCGGUUCGUGCGGUACAAGGAGAUGAACGCCUUCGACGGCAAGA |
| | | CCAUCGACAAGGAGACCGGCAAGGUGCUGCACCAGAAGACCCACUUCCCCCAGCCCUGGGAGUUCUUCGCCCAGGAGGUGAUGAUCCGGGUGU |
| | | UCGGCAAGCCCGACGGCAAGCCCGAGUUCGAGGAGGCCGACACCCCCGAGAAGCUGCGGACCCUGCUGGCCGAGAAGCUGUCCUCCCGGCCCG |
| | | AGGCCGUGCACGAGUACGUGACCCCCCUGUUCGUGUCCCGGGCCCCCAACCGGAAGAUGUCCGGCGCCCACAAGGACACCCUGCGGUCCGCCA |
| | | AGCGGUUCGUGAAGCACAACGAGAAGAUCUCCGUGAAGCGGGUGUGGCUGACCGAGAUCAAGCUGGCCGACCUGGAGAACAUGGUGAACUACA |
| | | AGAACGGCCGGGAGAUCGAGCUGUACGAGGCCCUGAAGGCCCGGCUGGAGGCCUACGGCGGCAACGCCAAGCAGGCCUUCGACCCCAAGGACA |
| | | ACCCCUUCUACAAGAAGGGCGGCCAGCUGGUGAAGGCCGUGCGGGUGGAGAAGACCCAGGAGUCCGGCGUGCUGCUGAACAAGAAGAACGCCU |
| | | ACACCAUCGCCGACAACGGCGACAUGGUGCGGGUGGACGUGUUCUGCAAGGUGGACAAGAAGGGCAAGAACCAGUACUUCAUCGUGCCCAUCU |
| | | ACGCCUGGCAGGUGGCCGAGAACAUCCUGCCCGACAUCGACUGCAAGGGCUACCGGAUCGACGACUCCUACACCUUCUGCUUCUCCCUGCACA |
| | | AGUACGACCUGAUCGCCUUCCAGAAGGACGAGAAGUCCAAGGUGGAGUUCGCCUACUACAUCAACUGCGACUCCUCCAACGGCCGGUUCUACC |
| | | UGGCCUGGCACGACAAGGGCUCCAAGGAGCAGCAGUUCCGGAUCUCCACCCAGAACCUGGUGCUGAUCCAGAAGUACCAGGUGAACGAGCUGG |
| | | GCAAGGAGAUCCGGCCCUGCCGGCUGAAGAAGCGGCCCCCCGUGCGGUAGUGACUAGCACCAGCCUCAAGAACACCCGAAUGGAGUCUCUAAG |
| | | CUACAUAAUACCAACUUACACUUUACAAAAUGUUGUCCCCCAAAAUGUAGCCAUUCGUAUCUGCUCCUAAUAAAAAGAAAGUUUCUUCACAUU |
| | | CUCUCGAGAAAAAAAAAAAAUGGAAAAAAAAAAAACGGAAAAAAAAAAAGGUAAAAAAAAAAAAUAUAAAAAAAAAAACAUAAAAAAAAAAAA |
| | | CGAAAAAAAAAAAACGUAAAAAAAAAAAACUCAAAAAAAAAAAGAUAAAAAAAAAAAACCUAAAAAAAAAAAAUGUAAAAAAAAAAAAGGGAA |
| | | AAAAAAAAACGCAAAAAAAAAAAACACAAAAAAAAAAAAUGCAAAAAAAAAAAAUCGAAAAAAAAAAAAUCUAAAAAAAAAAAACGAAAAAAA |
| | | AAAAACCCAAAAAAAAAAAAGACAAAAAAAAAAAAUAGAAAAAAAAAAAGUUAAAAAAAAAAAACUGAAAAAAAAAAAAUUUAAAAAAAAAAA |
| | | AUCUAG |
| Open | 824 | ATGACCAACCTGTCCGACATCATCGAGAAGGAGACCGGCAAGCAGCTGGTGATCCAGGAGTCCATCCTGATGCTGCCCGAGGAGGTGGAGGAG |
| reading frame for | | GTGATCGGCAACAAGCCCGAGTCCGACATCCTGGTGCACACCGCCTACGACGAGTCCACCGACGAGAACGTGATGCTGCTGACCTCCGACGCC |
| UGI encoded | | CCCGAGTACAAGCCCTGGGCCCTGGTGATCCAGGACTCCAACGGCGAGAACAAGATCAAGATGCTGTCCGGCGGCTCCAAGCGGACCGCCGAC |
| by SEQ ID NO: 821 | | GGCTCCGAGTTCGAGTCCCCCAAGAAGAAGCGGAAGGTGGAGTGATAG |
| MRNA | 825 | GGGAAGCUCAGAAUAAACGCUCAACUUUGGCCGGAUCUGCCACCAUGGACGGCUCCGGCGGCGGCUCCCCCAAGAAGAAGCGGAAGGUGGAGG |
| encoding | | ACAAGCGGCCCGCCGCCACCAAGAAGGCCGGCCAGGCCAAGAAGAAGAAGGGCGGCUCCGGCGGCGGCGCCGCCUUCAAGCCCAACCCCAUCA |
| Nme2 Cas9 | | ACUACAUCCUGGGCCUGGACAUCGGCAUCGCCUCCGUGGGCUGGGCCAUGGUGGAGAUCGACGAGGAGGAGAACCCCAUCCGGCUGAUCGACC |
| | | UGGGCGUGCGGGUGUUCGAGCGGGCCGAGGUGCCCAAGACCGGCGACUCCCUGGCCAUGGCCCGGCGGCUGGCCCGGUCCGUGCGGCGGCUGA |
| | | CCCGGCGGCGGGCCCACCGGCUGCUGCGGGCCCGGCGGCUGCUGAAGCGGGAGGGCGUGCUGCAGGCCGCCGACUUCGACGAGAACGGCCUGA |
| | | UCAAGUCCCUGCCCAACACCCCCUGGCAGCUGCGGGCCGCCGCCCUGGACCGGAAGCUGACCCCCCUGGAGUGGUCCGCCGUGCUGCUGCACC |
| | | UGAUCAAGCACCGGGGCUACCUGUCCCAGCGGAAGAACGAGGGCGAGACCGCCGACAAGGAGCUGGGCGCCCUGCUGAAGGGCGUGGCCAACA |
| | | ACGCCCACGCCCUGCAGACCGGCGACUUCCGGACCCCCGCCGAGCUGGCCCUGAACAAGUUCGAGAAGGAGUCCGGCCACAUCCGGAACCAGC |
| | | GGGGCGACUACUCCCACACCUUCUCCCGGAAGGACCUGCAGGCCGAGCUGAUCCUGCUGUUCGAGAAGCAGAAGGAGUUCGGCAACCCCCACG |
| | | UGUCCGGCGGCCUGAAGGAGGGCAUCGAGACCCUGCUGAUGACCCAGCGGCCCGCCCUGUCCGGCGACGCCGUGCAGAAGAUGCUGGGCCACU |
| | | GCACCUUCGAGCCCGCCGAGCCCAAGGCCGCCAAGAACACCUACACCGCCGAGCGGUUCAUCUGGCUGACCAAGCUGAACAACCUGCGGAUCC |
| | | UGGAGCAGGGCUCCGAGCGGCCCCUGACCGACACCGAGCGGGCCACCCUGAUGGACGAGCCCUACCGGAAGUCCAAGCUGACCUACGCCCAGG |
| | | CCCGGAAGCUGCUGGGCCUGGAGGACACCGCCUUCUUCAAGGGCCUGCGGUACGGCAAGGACAACGCCGAGGCCUCCACCCUGAUGGAGAUGA |
| | | AGGCCUACCACGCCAUCUCCCGGGCCCUGGAGAAGGAGGGCCUGAAGGACAAGAAGUCCCCCCUGAACCUGUCCUCCGAGCUGCAGGACGAGA |
| | | UCGGCACCGCCUUCUCCCUGUUCAAGACCGACGAGGACAUCACCGGCCGGCUGAAGGACCGGGUGCAGCCCGAGAUCCUGGAGGCCCUGCUGA |
| | | AGCACAUCUCCUUCGACAAGUUCGUGCAGAUCUCCCUGAAGGCCCUGCGGCGGAUCGUGCCCCUGAUGGAGCAGGGCAAGCGGUACGACGAGG |
| | | CCUGCGCCGAGAUCUACGGCGACCACUACGGCAAGAAGAACACCGAGGAGAAGAUCUACCUGCCCCCCAUCCCCGCCGACGAGAUCCGGAACC |
| | | CCGUGGUGCUGCGGGCCCUGUCCCAGGCCCGGAAGGUGAUCAACGGCGUGGUGCGGCGGUACGGCUCCCCCGCCCGGAUCCACAUCGAGACCG |
| | | CCCGGGAGGUGGGCAAGUCCUUCAAGGACCGGAAGGAGAUCGAGAAGCGGCAGGAGGAGAACCGGAAGGACCGGGAGAAGGCCGCCGCCAAGU |
| | | UCCGGGAGUACUUCCCCAACUUCGUGGGCGAGCCCAAGUCCAAGGACAUCCUGAAGCUGCGGCUGUACGAGCAGCAGCACGGCAAGUGCCUGU |
| | | ACUCCGGCAAGGAGAUCAACCUGGUGCGGCUGAACGAGAAGGGCUACGUGGAGAUCGACCACGCCCUGCCCUUCUCCCGGACCUGGGACGACU |
| | | CCUUCAACAACAAGGUGCUGGUGCUGGGCUCCGAGAACCAGAACAAGGGCAACCAGACCCCCUACGAGUACUUCAACGGCAAGGACAACUCCC |
| | | GGGAGUGGCAGGAGUUCAAGGCCCGGGUGGAGACCUCCCGGUUCCCCCGGUCCAAGAAGCAGCGGAUCCUGCUGCAGAAGUUCGACGAGGACG |
| | | GCUUCAAGGAGUGCAACCUGAACGACACCCGGUACGUGAACCGGUUCCUGUGCCAGUUCGUGGCCGACCACAUCCUGCUGACCGGCAAGGGCA |
| | | AGCGGCGGGUGUUCGCCUCCAACGGCCAGAUCACCAACCUGCUGCGGGGCUUCUGGGGCCUGCGGAAGGUGCGGGCCGAGAACGACCGGCACC |
| | | ACGCCCUGGACGCCGUGGUGGUGGCCUGCUCCACCGUGGCCAUGCAGCAGAAGAUCACCCGGUUCGUGCGGUACAAGGAGAUGAACGCCUUCG |
| | | ACGGCAAGACCAUCGACAAGGAGACCGGCAAGGUGCUGCACCAGAAGACCCACUUCCCCCAGCCCUGGGAGUUCUUCGCCCAGGAGGUGAUGA |
| | | UCCGGGUGUUCGGCAAGCCCGACGGCAAGCCCGAGUUCGAGGAGGCCGACACCCCCGAGAAGCUGCGGACCCUGCUGGCCGAGAAGCUGUCCU |
| | | CCCGGCCCGAGGCCGUGCACGAGUACGUGACCCCCCUGUUCGUGUCCCGGGCCCCCAACCGGAAGAUGUCCGGCGCCCACAAGGACACCCUGC |
| | | GGUCCGCCAAGCGGUUCGUGAAGCACAACGAGAAGAUCUCCGUGAAGCGGGUGUGGCUGACCGAGAUCAAGCUGGCCGACCUGGAGAACAUGG |
| | | UGAACUACAAGAACGGCCGGGAGAUCGAGCUGUACGAGGCCCUGAAGGCCCGGCUGGAGGCCUACGGCGGCAACGCCAAGCAGGCCUUCGACC |
| | | CCAAGGACAACCCCUUCUACAAGAAGGGCGGCCAGCUGGUGAAGGCCGUGCGGGUGGAGAAGACCCAGGAGUCCGGCGUGCUGCUGAACAAGA |
| | | AGAACGCCUACACCAUCGCCGACAACGGCGACAUGGUGCGGGUGGACGUGUUCUGCAAGGUGGACAAGAAGGGCAAGAACCAGUACUUCAUCG |
| | | UGCCCAUCUACGCCUGGCAGGUGGCCGAGAACAUCCUGCCCGACAUCGACUGCAAGGGCUACCGGAUCGACGACUCCUACACCUUCUGCUUCU |
| | | CCCUGCACAAGUACGACCUGAUCGCCUUCCAGAAGGACGAGAAGUCCAAGGUGGAGUUCGCCUACUACAUCAACUGCGACUCCUCCAACGGCC |
| | | GGUUCUACCUGGCCUGGCACGACAAGGGCUCCAAGGAGCAGCAGUUCCGGAUCUCCACCCAGAACCUGGUGCUGAUCCAGAAGUACCAGGUGA |
| | | ACGAGCUGGGCAAGGAGAUCCGGCCCUGCCGGCUGAAGAAGCGGCCCCCCGUGCGGUAGCUAGCACCAGCCUCAAGAACACCCGAAUGGAGUC |
| | | UCUAAGCUACAUAAUACCAACUUACACUUUACAAAAUGUUGUCCCCCAAAAUGUAGCCAUUCGUAUCUGCUCCUAAUAAAAAGAAAGUUUCUU |
| | | CACAUUCUCUCGAGAAAAAAAAAAAAUGGAAAAAAAAAAAACGGAAAAAAAAAAAAGGUAAAAAAAAAAAAUAUAAAAAAAAAAAACAUAAAA |
| | | AAAAAAAACGAAAAAAAAAAAACGUAAAAAAAAAAAACUCAAAAAAAAAAAGAUAAAAAAAAAAAACCUAAAAAAAAAAAAUGUAAAAAAAAA |
| | | AAAGGGAAAAAAAAAAAACGCAAAAAAAAAAAACACAAAAAAAAAAAAUGCAAAAAAAAAAAAUCGAAAAAAAAAAAAUCUAAAAAAAAAAAA |
| | | CGAAAAAAAAAAAACCCAAAAAAAAAAAAGACAAAAAAAAAAAAUAGAAAAAAAAAAAGUUAAAAAAAAAAAACUGAAAAAAAAAAAAUUUAA |
| | | AAAAAAAAAAUCUAG |
| mRNA | 826 | GGGAAGCUCAGAAUAAACGCUCAACUUUGGCCGGAUCUGCCACCAUGGACGGCUCCGGCGGCGGCUCCCCCAAGAAGAAGCGGAAGGUGGAGG |
| encoding | | ACAAGCGGCCCGCCGCCACCAAGAAGGCCGGCCAGGCCAAGAAGAAGAAGGGCGGCUCCGGCGGCGGCGCCGCCUUCAAGCCCAACCCCAUCA |
| Nme2 Cas9 | | ACUACAUCCUGGGCCUGGACAUCGGCAUCGCCUCCGUGGGCUGGGCCAUGGUGGAGAUCGACGAGGAGGAGAACCCCAUCCGGCUGAUCGACC |
| with Hibit tag | | UGGGCGUGCGGGUGUUCGAGCGGGCCGAGGUGCCCAAGACCGGCGACUCCCUGGCCAUGGCCCGGCGGCUGGCCCGGUCCGUGCGGCGGCUGA |
| | | CCCGGCGGCGGGCCCACCGGCUGCUGCGGGCCCGGCGGCUGCUGAAGCGGGAGGGCGUGCUGCAGGCCGCCGACUUCGACGAGAACGGCCUGA |
| | | UCAAGUCCCUGCCCAACACCCCCUGGCAGCUGCGGGCCGCCGCCCUGGACCGGAAGCUGACCCCCCUGGAGUGGUCCGCCGUGCUGCUGCACC |
| | | UGAUCAAGCACCGGGGCUACCUGUCCCAGCGGAAGAACGAGGGCGAGACCGCCGACAAGGAGCUGGGCGCCCUGCUGAAGGGCGUGGCCAACA |
| | | ACGCCCACGCCCUGCAGACCGGCGACUUCCGGACCCCCGCCGAGCUGGCCCUGAACAAGUUCGAGAAGGAGUCCGGCCACAUCCGGAACCAGC |
| | | GGGGCGACUACUCCCACACCUUCUCCCGGAAGGACCUGCAGGCCGAGCUGAUCCUGCUGUUCGAGAAGCAGAAGGAGUUCGGCAACCCCCACG |
| | | UGUCCGGCGGCCUGAAGGAGGGCAUCGAGACCCUGCUGAUGACCCAGCGGCCCGCCCUGUCCGGCGACGCCGUGCAGAAGAUGCUGGGCCACU |
| | | GCACCUUCGAGCCCGCCGAGCCCAAGGCCGCCAAGAACACCUACACCGCCGAGCGGUUCAUCUGGCUGACCAAGCUGAACAACCUGCGGAUCC |
| | | UGGAGCAGGGCUCCGAGCGGCCCCUGACCGACACCGAGCGGGCCACCCUGAUGGACGAGCCCUACCGGAAGUCCAAGCUGACCUACGCCCAGG |
| | | CCCGGAAGCUGCUGGGCCUGGAGGACACCGCCUUCUUCAAGGGCCUGCGGUACGGCAAGGACAACGCCGAGGCCUCCACCCUGAUGGAGAUGA |
| | | AGGCCUACCACGCCAUCUCCCGGGCCCUGGAGAAGGAGGGCCUGAAGGACAAGAAGUCCCCCCUGAACCUGUCCUCCGAGCUGCAGGACGAGA |
| | | UCGGCACCGCCUUCUCCCUGUUCAAGACCGACGAGGACAUCACCGGCCGGCUGAAGGACCGGGUGCAGCCCGAGAUCCUGGAGGCCCUGCUGA |
| | | AGCACAUCUCCUUCGACAAGUUCGUGCAGAUCUCCCUGAAGGCCCUGCGGCGGAUCGUGCCCCUGAUGGAGCAGGGCAAGCGGUACGACGAGG |
| | | CCUGCGCCGAGAUCUACGGCGACCACUACGGCAAGAAGAACACCGAGGAGAAGAUCUACCUGCCCCCCAUCCCCGCCGACGAGAUCCGGAACC |
| | | CCGUGGUGCUGCGGGCCCUGUCCCAGGCCCGGAAGGUGAUCAACGGCGUGGUGCGGCGGUACGGCUCCCCCGCCCGGAUCCACAUCGAGACCG |
| | | CCCGGGAGGUGGGCAAGUCCUUCAAGGACCGGAAGGAGAUCGAGAAGCGGCAGGAGGAGAACCGGAAGGACCGGGAGAAGGCCGCCGCCAAGU |
| | | UCCGGGAGUACUUCCCCAACUUCGUGGGCGAGCCCAAGUCCAAGGACAUCCUGAAGCUGCGGCUGUACGAGCAGCAGCACGGCAAGUGCCUGU |
| | | ACUCCGGCAAGGAGAUCAACCUGGUGCGGCUGAACGAGAAGGGCUACGUGGAGAUCGACCACGCCCUGCCCUUCUCCCGGACCUGGGACGACU |
| | | CCUUCAACAACAAGGUGCUGGUGCUGGGCUCCGAGAACCAGAACAAGGGCAACCAGACCCCCUACGAGUACUUCAACGGCAAGGACAACUCCC |
| | | GGGAGUGGCAGGAGUUCAAGGCCCGGGUGGAGACCUCCCGGUUCCCCCGGUCCAAGAAGCAGCGGAUCCUGCUGCAGAAGUUCGACGAGGACG |
| | | GCUUCAAGGAGUGCAACCUGAACGACACCCGGUACGUGAACCGGUUCCUGUGCCAGUUCGUGGCCGACCACAUCCUGCUGACCGGCAAGGGCA |
| | | AGCGGCGGGUGUUCGCCUCCAACGGCCAGAUCACCAACCUGCUGCGGGGCUUCUGGGGCCUGCGGAAGGUGCGGGCCGAGAACGACCGGCACC |
| | | ACGCCCUGGACGCCGUGGUGGUGGCCUGCUCCACCGUGGCCAUGCAGCAGAAGAUCACCCGGUUCGUGCGGUACAAGGAGAUGAACGCCUUCG |
| | | ACGGCAAGACCAUCGACAAGGAGACCGGCAAGGUGCUGCACCAGAAGACCCACUUCCCCCAGCCCUGGGAGUUCUUCGCCCAGGAGGUGAUGA |
| | | UCCGGGUGUUCGGCAAGCCCGACGGCAAGCCCGAGUUCGAGGAGGCCGACACCCCCGAGAAGCUGCGGACCCUGCUGGCCGAGAAGCUGUCCU |
| | | CCCGGCCCGAGGCCGUGCACGAGUACGUGACCCCCCUGUUCGUGUCCCGGGCCCCCAACCGGAAGAUGUCCGGCGCCCACAAGGACACCCUGC |
| | | GGUCCGCCAAGCGGUUCGUGAAGCACAACGAGAAGAUCUCCGUGAAGCGGGUGUGGCUGACCGAGAUCAAGCUGGCCGACCUGGAGAACAUGG |
| | | UGAACUACAAGAACGGCCGGGAGAUCGAGCUGUACGAGGCCCUGAAGGCCCGGCUGGAGGCCUACGGCGGCAACGCCAAGCAGGCCUUCGACC |
| | | CCAAGGACAACCCCUUCUACAAGAAGGGCGGCCAGCUGGUGAAGGCCGUGCGGGUGGAGAAGACCCAGGAGUCCGGCGUGCUGCUGAACAAGA |
| | | AGAACGCCUACACCAUCGCCGACAACGGCGACAUGGUGCGGGUGGACGUGUUCUGCAAGGUGGACAAGAAGGGCAAGAACCAGUACUUCAUCG |
| | | UGCCCAUCUACGCCUGGCAGGUGGCCGAGAACAUCCUGCCCGACAUCGACUGCAAGGGCUACCGGAUCGACGACUCCUACACCUUCUGCUUCU |
| | | CCCUGCACAAGUACGACCUGAUCGCCUUCCAGAAGGACGAGAAGUCCAAGGUGGAGUUCGCCUACUACAUCAACUGCGACUCCUCCAACGGCC |
| | | GGUUCUACCUGGCCUGGCACGACAAGGGCUCCAAGGAGCAGCAGUUCCGGAUCUCCACCCAGAACCUGGUGCUGAUCCAGAAGUACCAGGUGA |
| | | ACGAGCUGGGCAAGGAGAUCCGGCCCUGCCGGCUGAAGAAGCGGCCCCCCGUGCGGUCCGAGUCCGCCACCCCCGAGUCCGUGUCCGGCUGGC |
| | | GGCUGUUCAAGAAGAUCUCCUAGCUAGCACCAGCCUCAAGAACACCCGAAUGGAGUCUCUAAGCUACAUAAUACCAACUUACACUUUACAAAA |
| | | UGUUGUCCCCCAAAAUGUAGCCAUUCGUAUCUGCUCCUAAUAAAAAGAAAGUUUCUUCACAUUCUCUCGAGAAAAAAAAAAAAUGGAAAAAAA |
| | | AAAAACGGAAAAAAAAAAAAGGUAAAAAAAAAAAAUAUAAAAAAAAAAAACAUAAAAAAAAAAAACGAAAAAAAAAAAACGUAAAAAAAAAAA |
| | | ACUCAAAAAAAAAAAAGAUAAAAAAAAAAAACCUAAAAAAAAAAAAUGUAAAAAAAAAAAAGGGAAAAAAAAAAAACGCAAAAAAAAAAAACA |
| | | CAAAAAAAAAAAAUGCAAAAAAAAAAAAUCGAAAAAAAAAAAAUCUAAAAAAAAAAAACGAAAAAAAAAAAACCCAAAAAAAAAAAAGACAAA |
| | | AAAAAAAAAUAGAAAAAAAAAAAAGUUAAAAAAAAAAAACUGAAAAAAAAAAAAUUUAAAAAAAAAAAAUCUAG |
| Wild-type | 899 | GUUGUAGCUCCCUUUCUCAUUUCGGAAACGAAAUGAGAACCGUUGCUACAAUAAGGCCGUCUGAAAAGAUGUGCCGCAACGCUCUGCCCCUUA |
| NmeCas9 | | AAGCUUCUGCUUUAAGGGGCAUCGUUUA |
| guide RNA-conserved portion | | |
| only | | |
| Wild-type | 900 | NNNNNNNNNNNNNNNNNNNNNNNNGUUGUAGCUCCCUUUCUCAUUUCGGAAACGAAAUGAGAACCGUUGCUACAAUAAGGCCGUCUGAAAAGA |
| NmeCas9 guide RNA | | UGUGCCGCAACGCUCUGCCCCUUAAAGCUUCUGCUUUAAGGGGCAUCGUUUA |
| Shortened/unmodified | 901 | (N)₂₀₋₂₅ GUUGUAGCUCCCUGAAACCGUUGCUACAAUAAGGCCGUCGAAAGAUGUGCCGCAACGCUCUGCCUUCUGGCAUCGUU |
| NmeCas9 guide RNA motif | | |
| Shortened/unmodified | 902 | (N)₂₀₋₂₅ GUUGUAGCUCCCUGAAACCGUUGCUACAAUAAGGCCGUCGAAAGAUGUGCCGCAACGCUCUGCCUUCUGGCAUCGUUUAUU |
| NmeCas9 guide RNA motif | | |
| Shortened/unmodified | 903 | (N)₂₀₋₂₅ GUUGUAGCUCCCUGGAAACCCGUUGCUACAAUAAGGCCGUCGAAAGAUGUGCCGCAACGCUCUGCCUUCUGGCAUCGUUUAUU |
| NmeCas9 guide RNA motif | | |
| Shortened/modified | 904 | mN*mNNNNNNNNmNNNmNNNNNNNNNNNNmGUUGmUmAmGmCUCCCmUmGmAmAmAmCmCGUUmGmCUAmCAAU*AAGmGmCCmGmUmCmGmA |
| NmeCas9 guide RNA motif | | mAmAmGmAmUGUGCmCGCmAmAmCmGCUCUmGmCCmUmUmCmUGmGCmAmUC*mG*mU*mU |
| (101-mer) | | |
| Shortened/modified | 905 | (N)₂₀₋ |
| NmeCas9 guide RNA motif | | 25GUUGmUmAmGmCUCCCmUmGmAmAmAmCmCGUUmGmCUAmCAAU*AAGmGmCCmGmUmCmGmAmAmAmGmAmUGUGCmCGCmAmAmCmGCU |
| | | CUmGmCCmUmUmCmUGmGCmAmUC*mG*mU*mU |
| Shortened/modified | 906 | GUUGmUmAmGmCUCCCmUmGmAmAmAmCmCGUUmGmCUAmCAAU*AAGmGmCCmGmUmCmGmAmAmAmGmAmUGUGCmCGCmAmAmCmGCUCU |
| NmeCas9 guide RNA motif | | mGmCCmUmUmCmUGmGCmAmUC*mG*mU*mU |
| Shortened/modified | 907 | mN*mN*mN*mNmNNNmNmNNmNNmNNNNNmNNNNmNNNmGUUGmUmAmGmCUCCCmUmGmAmAmAmCmCGUUmGmCUAmCAAU*AAGmGmCCm |
| NmeCas9 guide RNA motif | | GmUmCmGmAmAmAmGmAmUGUGCmCGmCAAmCGCUCUmGmCCmUmUmCmUGGCAUCG*mU*mU |
| (101-mer) | | |
| Shortened/modified | 908 | (N)₂₀₋₂₅ |
| NmeCas9 guide RNA motif | | GUUGmUmAmGmCUCCCmUmGmAmAmAmCmCGUUmGmCUAmCAAU*AAGmGmCCmGmUmCmGmAmAmAmGmAmUGUGCmCGmCAAmCGCUCU |
| | | mGmCCmUmUmCmUGGCAUCG*mU*mU |
| Shortened/modified | 909 | GUUGmUmAmGmCUCCCmUmGmAmAmAmCmCGUUmGmCUAmCAAU*AAGmGmCCmGmUmCmGmAmAmAmGmAmUGUGCmCGmCAAmCGCUCUmG |
| NmeCas9 guide RNA motif | | mCCmUmUmCmUGGCAUCG*mU*mU |
| Shortened/unmodified | 910 | (N)₂₀₋₂₅GUUGUAGCUCCCUUCGAAAGACCGUUGCUACAAUAAGGCCGUCGAAAGAUGUGCCGCAACGCUCUGCCUUCUGGCAUCGUU |
| NmeCas9 guide RNA motif | | |
| Shortened/modified | 911 | mN*mN*mN*mNmNNNmNmNNmNNmNNNNNmNNNNmNNNmGUUGmUmAmGmCUCCCmUmUmCmGmAmAmAmGmAmCmCGUUmGmCUAmCAAU*A |
| NmeCas9 guide RNA motif | | AGmGmCCmGmUmCmGmAmAmAmGmAmUGUGCmCGmCAAmCGCUCUmGmCCmUmUmCmUGGCAUCG*mU*mU |
| (105-mer) | | |
| Exemplary | 912 | LAAKRSRTT |
| NLS1 | | |
| Exemplary | 913 | QAAKRSRTT |
| NLS2 | | |
| Exemplary | 914 | PAPAKRERTT |
| NLS3 | | |
| Exemplary | 915 | QAAKRPRTT |
| NLS4 | | |
| Exemplary | 916 | RAAKRPRTT |
| NLS5 | | |
| Exemplary | 917 | AAAKRSWSMAA |
| NLS6 | | |
| Exemplary | 918 | AAAKRVWSMAF |
| NLS7 | | |
| Exemplary | 919 | AAAKRSWSMAF |
| NLS8 | | |
| Exemplary | 920 | AAAKRKYFAA |
| NLS9 | | |
| Exemplary | 921 | RAAKRKAFAA |
| NLS10 | | |
| Exemplary | 922 | RAAKRKYFAV |
| NLS11 | | |
| Altern- | 923 | PKKKRRV |
| ative | | |
| SV40 NLS | | |
| Nucleo- | 924 | KRPAATKKAGQAKKKK |
| plasmin | | |
| MLS | | |
| exemplary | 930 | SGSETPGTSESATPES |
| XTEN | | |
| exemplary | 931 | SGSETPGTSESA |
| XTEN | | |
| exemplary | 932 | SGSETPGTSESATPEGGSGGS |
| XTEN | | |
| amino acid | 933 | GGS |
| sequence | | |
| for | | |
| exemplary | | |
| linker | | |
| amino acid sequence | 934 | GGGGS |
| for exemplary linker | | |
| amino acid sequence | 935 | EAAAK |
| for exemplary linker | | |
| amino acid sequence | 936 | SEGSA |
| for exemplary linker | | |
| amino acid sequence | 937 | SEGSAGTST |
| for exemplary linker | | |
| amino acid sequence | 938 | GGGGSGGGGS |
| for exemplary linker | | |
| amino acid sequence | 939 | GGGGSEAAAK |
| for exemplary linker | | |
| amino acid sequence | 940 | EAAAKGGGGS |
| for exemplary linker | | |
| amino acid sequence | 941 | EAAAKEAAAK |
| for exemplary linker | | |
| amino acid sequence | 942 | SEGSAGTSTESEGSA |
| for exemplary linker | | |
| amino acid sequence | 943 | GGGGSGGGGSGGGGS |
| for exemplary linker | | |
| amino acid sequence | 944 | GGGGSGGGGSEAAAK |
| for exemplary linker | | |
| amino acid sequence | 945 | GGGGSEAAAKGGGGS |
| for exemplary linker | | |
| amino acid sequence | 946 | EAAAKGGGGSEAAAK |
| for exemplary linker | | |
| amino acid sequence | 947 | EAAAKEAAAKGGGGS |
| for exemplary linker | | |
| amino acid sequence | 948 | SEGSAGTSTESEGSAGTSTE |
| for exemplary linker | | |
| amino acid sequence | 949 | GGGGSGGGGSGGGGSEAAAK |
| for exemplary linker | | |
| amino acid sequence | 950 | GGGGSGGGGSEAAAKGGGGS |
| for exemplary linker | | |
| amino acid sequence | 951 | GGGGSEAAAKGGGGSEAAAK |
| for exemplary linker | | |
| amino acid sequence | 952 | GGGGSEAAAKEAAAKGGGGS |
| for exemplary linker | | |
| amino acid sequence | 953 | GGGGSEAAAKEAAAKEAAAK |
| for exemplary linker | | |
| amino acid sequence | 954 | EAAAKGGGGSGGGGSGGGGS |
| for exemplary linker | | |
| amino acid sequence | 955 | EAAAKGGGGSGGGGSEAAAK |
| for exemplary linker | | |
| amino acid sequence | 956 | EAAAKGGGGSEAAAKGGGGS |
| for exemplary linker | | |
| amino acid sequence | 957 | EAAAKGGGGSEAAAKEAAAK |
| for exemplary linker | | |
| amino acid sequence | 958 | EAAAKEAAAKGGGGSGGGGS |
| for exemplary linker | | |
| amino acid sequence | 959 | EAAAKEAAAKGGGGSEAAAK |
| for exemplary linker | | |
| amino acid sequence | 960 | EAAAKEAAAKEAAAKGGGGS |
| for exemplary linker | | |
| amino acid sequence | 961 | SEGSAGTSTESEGSAGTSTESEGSA |
| for exemplary linker | | |
| amino acid sequence | 962 | GGGGSGGGGSGGGGSGGGGSGGGGS |
| for exemplary linker | | |
| amino acid sequence | 963 | GGGGGGGGSGGGGSGGGGSEAAAK |
| for exemplary linker | | |
| amino acid sequence | 964 | GGGGSGGGGSGGGGSEAAAKGGGGS |
| for exemplary linker | | |
| amino acid sequence | 965 | GGGGSGGGGSGGGGSEAAAKEAAAK |
| for exemplary linker | | |
| amino acid sequence | 966 | GGGGSGGGGSEAAAKGGGGSGGGGS |
| for exemplary linker | | |
| amino acid sequence | 967 | GGGGSGGGGSEAAAKGGGGSEAAAK |
| for exemplary linker | | |
| amino acid sequence | 968 | GGGGSGGGGSEAAAKEAAAKGGGGS |
| for exemplary linker | | |
| amino acid sequence | 969 | GGGGSGGGGSEAAAKEAAAKEAAAK |
| for exemplary linker | | |
| amino acid sequence | 970 | GGGGSEAAAKGGGGSGGGGSGGGGS |
| for exemplary linker | | |
| amino acid sequence | 971 | GGGGSEAAAKGGGGSGGGGSEAAAK |
| for exemplary linker | | |
| amino acid sequence | 972 | GGGGSEAAAKGGGGSEAAAKGGGGS |
| for exemplary linker | | |
| amino acid sequence | 973 | GGGGSEAAAKGGGGSEAAAKEAAAK |
| for exemplary linker | | |
| amino acid sequence | 974 | GGGGSEAAAKEAAAKGGGGSGGGGS |
| for exemplary linker | | |
| amino acid sequence | 975 | GGGGSEAAAKEAAAKEAAAKGGGGS |
| for exemplary linker | | |
| amino acid sequence | 976 | GGGGSEAAAKEAAAKEAAAKEAAAK |
| for exemplary linker | | |
| amino acid sequence | 977 | EAAAKGGGGSGGGGSGGGGSGGGGS |
| for exemplary linker | | |
| amino acid sequence | 978 | EAAAKGGGGSGGGGSGGGGSEAAAK |
| for exemplary linker | | |
| amino acid sequence | 979 | EAAAKGGGGSGGGGSEAAAKGGGGS |
| for exemplary linker | | |
| amino acid sequence | 980 | EAAAKGGGGSGGGGSEAAAKEAAAK |
| for exemplary linker | | |
| amino acid sequence | 981 | EAAAKGGGGSEAAAKGGGGSGGGGS |
| for exemplary linker | | |
| amino acid sequence | 982 | EAAAKGGGGSEAAAKGGGGSEAAAK |
| for exemplary linker | | |
| amino acid sequence | 983 | EAAAKGGGGSEAAAKEAAAKGGGGS |
| for exemplary linker | | |
| amino acid sequence | 984 | EAAAKGGGGSEAAAKEAAAKEAAAK |
| for exemplary linker | | |
| amino acid sequence | 985 | EAAAKEAAAKGGGGSEAAAKGGGGS |
| for exemplary linker | | |
| amino acid sequence | 986 | EAAAKEAAAKGGGGSEAAAKEAAAK |
| for exemplary linker | | |
| amino acid sequence | 987 | EAAAKEAAAKEAAAKGGGGSEAAAK |
| for exemplary linker | | |
| amino acid sequence | 988 | EAAAKEAAAKEAAAKEAAAKGGGGS |
| for exemplary linker | | |
| amino acid sequence | 989 | EAAAKEAAAKEAAAKEAAAKEAAAK |
| for exemplary linker | | |
| amino acid sequence | 990 | GTKDSTKDIPETPSKD |
| for exemplary linker | | |
| amino acid sequence | 991 | GRDVRQPEVKEEKPES |
| for exemplary linker | | |
| amino acid sequence | 992 | EGKSSGSGSESKSTAG |
| for exemplary linker | | |
| amino acid sequence | 993 | TPGSPAGSPTSTEEGT |
| for exemplary linker | | |
| amino acid sequence | 994 | GSEPATSGSETPGTST |
| for exemplary linker | | |
| Exemplary modified | 995 | mN*mN*mN*mNmNNNmNmNNmNNmNNNNNmNNNNmNNNmGUUGmUmAmGmCUCCCmUmGmAmAmAmCmCGUUmGmCUAmCAAUAAGmGmCCmG |
| Nme guide sgRNA | | mUmCmGmAmAmAmGmAmUGUGCmCGmCAAmCGCUCUmGmCCmUmUmCmUGGCAUCG*mU*mU |
| Exemplary modified | 996 | mN*mN*mN*mNmNNNmNmNNmNNmNNNNNmNNNNmNNNmGUUGmUmAmGmCUCCCmUmGmAmAmAmCmCGUUmGmCUAmCAAU*AAGmGmCCm |
| Nme guide sgRNA | | GmUmCmGmAmAmAmGmAmUGUGCmCGmCAAmCGmCmUmCmUmGmCCmUmUmCmUGGCAUCG*mU*mU |
| Exemplary modified | 997 | mN*mN*mN*mNmNNNmNmNNmNNmNNNNNmNNNNmNNNmGUUGmUmAmGmCUCCCmUmGmAmAmAmCmCGUUmGmCUAmCAAUAAGmGmCCmG |
| Nme guide sgRNA | | mUmCmGmAmAmAmGmAmUGUGCmCGmCAAmCGmCmUmCmUmGmCCmUmUmCmUGGCAUCG*mU*mU |

*The guide sequence disclosed in this Table may be unmodified, modified with the exemplary modification pattern shown in the Table, or modified with a different
modification pattern disclosed herein or available in the art.

TABLE 7A
VI. Additional Exemplary Guide RNAs

| | | | | Genomic |
|---|---|---|---|---|
| | | Guide | | Coordinates |
| Guide ID | Target | Sequence | Exemplary Guide RNA Modified Sequence | (hg38) |
| G034202 | HLA-A | GCUCUAUC | mG*mC*mU*mCmUAUmCmCAmCGmGCGCCmCGCGmGCUmGUUGmUmAmGmCU | chr6: 29942891- |
| | | CACGGCGC | CCCmUmGmAmAmAmCmCGUUmGmCUAmCAAUAAGmGmCCmGmUmCmGmAmA | 29942915 |
| | | CCGCGGCU | mAmGmAmUGUGCmCGmCAAmCGCUCUmGmCCmUmUmCmUGGCAUCG*mU*mU | |
| | | (SEQ ID | (SEQ ID NO: 3001) | |
| | | NO: 66) | | |
| G034617 | HLA-A | CACUCACC | mC*mA*mC*mUmCACmCmCGmCCmCAGGUmCUGGmGUCmGUUGmUmAmGmCU | chr6: 29942609- |
| | | CGCCCAGG | CCCmUmGmAmAmAmCmCGUUmGmCUAmCAAUAAGmGmCCmGmUmCmGmAmA | 29942633 |
| | | UCUGGGUC | mAmGmAmUGUGCmCGmCAAmCGCUCUmGmCCmUmUmCmUGGCAUCG*mU*mU | |
| | | (SEQ ID | (SEQ ID NO: 3002) | |
| | | NO: 61) | | |
| G034982 | TRAC | AAAACCUG | mA*mA*mA*mAmCCUmGmUCmAGmUGAUUmGGGUmUCCmGUUGmUmAmGmCU | chr14: 22550574- |
| | | UCAGUGA | CCCmUmGmAmAmAmCmCGUUmGmCUAmCAAUAAGmGmCCmGmUmCmGmAmA | 22550598 |
| | | UUGGGUU | mAmGmAmUGUGCmCGmCAAmCGCUCUmGmCCmUmUmCmUGGCAUCG*mU*mU | |
| | | CC | (SEQ ID NO: 3003) | |
| | | (SEQ ID | | |
| | | NO: 111) | | |
| G034981 | TRAC | UUAGGUU | mU*mU*mA*mGmGUUmCmGUmAUmCUGUAmAAACmCAAmGUUGmUmAmGmCU | chr14: 22550544- |
| | | CGUAUCUG | CCCmUmGmAmAmAmCmCGUUmGmCUAmCAAUAAGmGmCCmGmUmCmGmAmA | 22550568 |
| | | UAAAACCA | mAmGmAmUGUGCmCGmCAAmCGCUCUmGmCCmUmUmCmUGGCAUCG*mU*mU | |
| | | A (SEQ ID | (SEQ ID NO: 3004) | |
| | | NO: 107) | | |
| G034618 | TRBC1 | GUGUCCUA | mG*mU*mG*mUmCCUmAmCCmAGmCAAGGmGGUCmCUGmGUUGmUmAmGmCU | chr7: 142792690- |
| | | CCAGCAAG | CCCmUmGmAmAmAmCmCGUUmGmCUAmCAAUAAGmGmCCmGmUmCmGmAmA | 142792714 |
| | | GGGUCCUG | mAmGmAmUGUGCmCGmCAAmCGCUCUmGmCCmUmUmCmUGGCAUCG*mU*mU | |
| | | (SEQ ID | (SEQ ID NO: 3005) | |
| | | NO: 215) | | |
| G034201 | CIITA | UCAAAGU | mU*mC*mA*mAmAGUmAmCCmCUmACAGGmAGGAmCCAmGUUGmUmAmGmCU | chr16: 10907504- |
| | | ACCCUACA | CCCmUmGmAmAmAmCmCGUUmGmCUAmCAAUAAGmGmCCmGmUmCmGmAmA | 10907528 |
| | | GGAGGACC | mAmGmAmUGUGCmCGmCAAmCGCUCUmGmCCmUmUmCmUGGCAUCG*mU*mU | |
| | | A (SEQ ID | (SEQ ID NO: 3006) | |
| | | NO: 301) | | |
| G034619 | CIITA | AGCUGCCG | mA*mG*mC*mUmGCCmGmUUmCUmGCCCAmGUCCmGGGmGUUGmUmAmGmCU | chr16: 10906643- |
| | | UUCUGCCC | CCCmUmGmAmAmAmCmCGUUmGmCUAmCAAUAAGmGmCCmGmUmCmGmAmA | 10906667 |
| | | AGUCCGGG | mAmGmAmUGUGCmCGmCAAmCGCUCUmGmCCmUmUmCmUGGCAUCG*mU*mU | |
| | | (SEQ ID | (SEQ ID NO: 3007) | |
| | | NO: 422) | | |
| G032794 | HLA-B | UCUGGGA | mU*mC*mU*mGmGGAmAmAGmGAmGGGGAmAGAUmGAGmGUUGmUmAmGmCU | chr6: 31355222- |
| | | AAGGAGG | CCCmUmGmAmAmAmCmCGUUmGmCUAmCAAU*AAGmGmCCmGmUmCmGmAm | 31355246 |
| | | GGAAGAU | AmAmGmAmUGUGCmCGmCAAmCGCUCUmGmCCmUmUmCmUGGCAUCG*mU*m | |
| | | GAG (SEQ | U (SEQ ID NO: 2828) | |
| | | ID NO: | | |
| | | 828) | | |
| G034208 | HLA-B | UCUGGGA | mU*mC*mU*mGmGGAmAmAGmGAmGGGGAmAGAUmGAGmGUUGmUmAmGmCU | chr6: 31355222- |
| | | AAGGAGG | CCCmUmGmAmAmAmCmCGUUmGmCUAmCAAUAAGmGmCCmGmUmCmGmAmA | 31355246 |
| | | GGAAGAU | mAmGmAmUGUGCmCGmCAAmCGCUCUmGmCCmUmUmCmUGGCAUCG*mU*mU | |
| | | GAG (SEQ | (SEQ ID NO: 3008) | |
| | | ID NO: | | |
| | | 828) | | |
| G032795 | HLA-B | CUCUGGGA | mC*mU*mC*mUmGGGmAmAAmGGmAGGGGmAAGAmUGAmGUUGmUmAmGmCU | chr6: 31355221- |
| | | AAGGAGG | CCCmUmGmAmAmAmCmCGUUmGmCUAmCAAU*AAGmGmCCmGmUmCmGmAm | 31355245 |
| | | GGAAGAU | AmAmGmAmUGUGCmCGmCAAmCGCUCUmGmCCmUmUmCmUGGCAUCG*mU*m | |
| | | GA (SEQ | U (SEQ ID NO: 2829) | |
| | | ID NO: | | |
| | | 829) | | |
| G034209 | HLA-B | CUCUGGGA | mC*mU*mC*mUmGGGmAmAAmGGmAGGGGmAAGAmUGAmGUUGmUmAmGmCU | chr6: 31355221- |
| | | AAGGAGG | CCCmUmGmAmAmAmCmCGUUmGmCUAmCAAUAAGmGmCCmGmUmCmGmAmA | 31355245 |
| | | GGAAGAU | mAmGmAmUGUGCmCGmCAAmCGCUCUmGmCCmUmUmCmUGGCAUCG*mU*mU | |
| | | GA (SEQ | (SEQ ID NO: 3009) | |
| | | ID NO: | | |
| | | 829) | | |
| G032806 | HLA-B | UCCCAGAG | mU*mC*mC*mCmAGAmGmCCmGUmCUUCCmCAGUmCCAmGUUGmUmAmGmCU | chr6: 31355205- |
| | | CCGUCUUC | CCCmUmGmAmAmAmCmCGUUmGmCUAmCAAU*AAGmGmCCmGmUmCmGmAm | 31355229 |
| | | CCAGUCCA | AmAmGmAmUGUGCmCGmCAAmCGCUCUmGmCCmUmUmCmUGGCAUCG*mU*m | |
| | | (SEQ ID | U (SEQ ID NO: 2830) | |
| | | NO: 830) | | |
| G034211 | HLA-B | UCCCAGAG | mU*mC*mC*mCmAGAmGmCCmGUmCUUCCmCAGUmCCAmGUUGmUmAmGmCU | chr6: 31355205- |
| | | CCGUCUUC | CCCmUmGmAmAmAmCmCGUUmGmCUAmCAAUAAGmGmCCmGmUmCmGmAmA | 31355229 |
| | | CCAGUCCA | mAmGmAmUGUGCmCGmCAAmCGCUCUmGmCCmUmUmCmUGGCAUCG*mU*mU | |
| | | (SEQ ID | (SEQ ID NO: 3010) | |
| | | NO: 830) | | |
| G021557 | VEGFA | GCAUGGGC | mG*mC*mA*mUmGGGmCmAGmGGmGCUGGmGGUGmCACmGUUGmUmAmGmCU | chr6: 43774288- |
| | | AGGGGCU | CCCmUmGmAmAmAmCmCGUUmGmCUAmCAAU*AAGmGmCCmGmUmCmGmAm | 43774312 |
| | | GGGGUGC | AmAmGmAmUGUGCmCGmCAAmCGCUCUmGmCCmUmUmCmUGGCAUCG*mU*m | |
| | | AC (SEQ | U (SEQ ID NO: 2831) | |
| | | ID NO: | | |
| | | 831) | | |
| G021558 | VEGFA | GAAUGGC | mG*mA*mA*mUmGGCmAmGGmCGmGAGGUmUGUAmCUGmGUUGmUmAmGmCU | chr6: 43780852- |
| | | AGGCGGA | CCCmUmGmAmAmAmCmCGUUmGmCUAmCAAU*AAGmGmCCmGmUmCmGmAm | 43780876 |
| | | GGUUGUA | AmAmGmAmUGUGCmCGmCAAmCGCUCUmGmCCmUmUmCmUGGCAUCG*mU*m | |
| | | CUG (SEQ | U (SEQ ID NO: 2832) | |
| | | ID NO: | | |
| | | 832) | | |
| G021567 | VEGFA | GUGAGCA | mG*mU*mG*mAmGCAmGmGCmACmCUGUGmCCAAmCAUmGUUGmUmAmGmCU | chr6: 43781113- |
| | | GGCACCUG | CCCmUmGmAmAmAmCmCGUUmGmCUAmCAAU*AAGmGmCCmGmUmCmGmAm | 43781137 |
| | | UGCCAACA | AmAmGmAmUGUGCmCGmCAAmCGCUCUmGmCCmUmUmCmUGGCAUCG*mU*m | |
| | | U (SEQ ID | U (SEQ ID NO: 2833) | |
| | | NO: 833) | | |

TABLE 7B
VII. Exemplary Modified Conserved Region Nme Guide RNA Motifs

| | | SEQ |
|---|---|---|
| | | ID |
| #mer | Modified nucleotide sequence of conserved portion | NO |
| 101 | mGUUGmUmAmGmCUCCCmUmGmAmAmAmCmCGUUmGmCUAmCAA | 1081 |
| | U*AAGmGmCCmGmUmCmGmAmAmAmGmAmUGUGCmCGCmAmAmC | |
| | mGCUCUmGmCCmUmUmCmUGmGCmAmUC*mG*mU*mU | |
| 101 | mGUUGmUmAmGmCUCCCmUmGmAmAmAmCmCGUUmGmCUAmCAA | 1082 |
| | U*AAGmGmCCmGmUmCmGmAmAmAmGmAmUGUGCmCGmCAAmCG | |
| | CUCUmGmCCmUmUmCmUGGCAUCG*mU*mU | |
| 101 | mGUUGmUmAmGmCUCCCmUmGmAmAmAmCmCGUUmGmCUAmCAA | 1083 |
| | UAAGmGmCCmGmUmCmGmAmAmAmGmAmUGUGCmCGmCAAmCGC | |
| | UCUmGmCCmUmUmCmUGGCAUCG*mU*mU | |
| 101 | mGUUGmUmAmGmCUCCCmUmGmAmAmAmCmCGUUmGmCUAmCAA | 1084 |
| | U*AAGmGmCCmGmUmCmGmAmAmAmGmAmUGUGCmCGmCAAmCG | |
| | mCmUmCmUmGmCCmUmUmCmUGGCAUCG*mU*mU | |
| 101 | mGUUGmUmAmGmCUCCCmUmGmAmAmAmCmCGUUmGmCUAmCAA | 1085 |
| | UAAGmGmCCmGmUmCmGmAmAmAmGmAmUGUGCmCGmCAAmCGm | |
| | CmUmCmUmGmCCmUmUmCmUGGCAUCG*mU*mU | |
| 105 | mGUUGmUmAmGmCUCCCmUmUmCmGmAmAmAmGmAmCmCGUUmG | 1086 |
| | mCUAmCAAU*AAGmGmCCmGmUmCmGmAmAmAmGmAmUGUGCmC | |
| | GmCAAmCGCUCUmGmCCmUmUmCmUGGCAUCG*mU*mU | |
| 105 | mGUUGmUmAmGmCUCCCmUmUmCmGmAmAmAmGmAmCmCGUUmG | 1087 |
| | mCUAmCAAUAAGmGmCCmGmUmCmGmAmAmAmGmAmUGUGCmCG | |
| | mCAAmCGCUCUmGmCCmUmUmCmUGGCAUCG*mU*mU | |
| 105 | mGUUGmUmAmGmCUCCCmUmUmCmGmAmAmAmGmAmCmCGUUmG | 1088 |
| | mCUAmCAAU*AAGmGmCCmGmUmCmGmAmAmAmGmAmUGUGCmC | |
| | GmCAAmCGmCmUmCmUmGmCCmUmUmCmUGGCAUCG*mU*mU | |
| 105 | mGUUGmUmAmGmCUCCCmUmUmCmGmAmAmAmGmAmCmCGUUmG | 1089 |
| | mCUAmCAAUAAGmGmCCmGmUmCmGmAmAmAmGmAmUGUGCmCG | |
| | mCAAmCGmCmUmCmUmGmCCmUmUmCmUGGCAUCG*mU*mU | |

### EXAMPLES

[0842] The following examples are provided to illustrate certain disclosed embodiments and are not to be construed as limiting the scope of this disclosure in any way.

### Example 1: General Methods

[0843] Generally, unless otherwise indicated, guide RNAs used throughout the Examples identified as “GXXXXXX” refer to 89-nt or 101-nt modified sgRNA format such as those shown in the Tables provided herein.

### 1.1 Next-Generation Sequencing (“NGS”) and Analysis for On-Target Cleavage Efficiency.

[0844] Genomic DNA was extracted using QuickExtract™ DNA Extraction Solution (Lucigen, Cat. No. QE09050) according to manufacturer's protocol.

[0845] To quantitatively determine the efficiency of editing at the target location in the genome, deep sequencing was utilized to identify the presence of insertions, deletions, and substitution introduced by gene editing. PCR primers were designed around the target site within the gene of interest (e.g., HLA-A) and the genomic area of interest was amplified. Primer sequence design was done as is standard in the field.

[0846] Additional PCR was performed according to the manufacturer's protocols (Illumina) to add chemistry for sequencing. The amplicons were sequenced on an Illumina MiSeq or NextSeq instrument. The reads were aligned to the human reference genome (e.g., hg38) after eliminating those having low quality scores. Reads that overlapped the target region of interest were re-aligned to the local genome sequence to improve the alignment. Then the number of wild type reads versus the number of reads which contain C-to-T mutations, C-to-A/G mutations or indels was calculated. Insertions and deletions were scored in a 20 bp region centered on the predicted Cas9 cleavage site. Indel percentage is defined as the total number of sequencing reads with one or more base inserted or deleted within the 20 bp scoring region divided by the total number of sequencing reads, including wild type. C-to-T mutations or C-to-A/G mutations were scored in a 40 bp region including 10 bp upstream and 10 bp downstream of the 20 bp sgRNA target sequence. The C-to-T editing percentage is defined as the total number of sequencing reads with either one or more C-to-T mutations within the 40 bp region divided by the total number of sequencing reads, including wild type. The percentage of C-to-A/G mutations are calculated similarly.

1.2 In Vitro Transcription (“IVT”) of mRNA

[0847] Capped and polyadenylated mRNA containing N1-methyl pseudo-U was generated by in vitro transcription using a linearized plasmid DNA template and T7 RNA polymerase. Plasmid DNA containing a T7 promoter, a sequence for transcription, and a polyadenylation sequence was linearized by incubating at 37° C. for 2 hours with XbaI with the following conditions: 200 ng/μL plasmid, 2 U/μL XbaI (NEB), and 1× reaction buffer. The XbaI was inactivated by heating the reaction at 65° C. for 20 min. The linearized plasmid was purified from enzyme and buffer salts. The IVT reaction to generate modified mRNA was performed by incubating at 37° C. for 1.5-4 hours in the following conditions: 50 ng/μL linearized plasmid; 2-5 mM each of GTP, ATP, CTP, and N1-methyl pseudo-UTP (Trilink); 10-25 mM ARCA (Trilink); 5 U/μL T7 RNA polymerase (NEB); 1 U/μL Murine RNase inhibitor (NEB); 0.004 U/μL Inorganic E. coli pyrophosphatase (NEB); and 1× reaction buffer. TURBO DNase (ThermoFisher) was added to a final concentration of 0.01 U/μL, and the reaction was incubated for an additional 30 minutes to remove the DNA template. The mRNA was purified using a MegaClear Transcription Clean-up kit (ThermoFisher) or a RNeasy Maxi kit (Qiagen) per the manufacturers' protocols. Alternatively, the mRNA was purified through a precipitation protocol, which in some cases was followed by HPLC-based purification. Briefly, after the DNase digestion, mRNA is purified using LiCl precipitation, ammonium acetate precipitation and sodium acetate precipitation. For HPLC purified mRNA, after the LiCl precipitation and reconstitution, the mRNA was purified by RP-IP HPLC (see, e.g., Kariko, et al. Nucleic Acids Research, 2011, Vol. 39, No. 21 e142). The fractions chosen for pooling were combined and desalted by sodium acetate/ethanol precipitation as described above. In a further alternative method, mRNA was purified with a LiCl precipitation method followed by further purification by tangential flow filtration. RNA concentrations were determined by measuring the light absorbance at 260 nm (Nanodrop), and transcripts were analyzed by capillary electrophoresis by Bioanlayzer (Agilent).

[0848] Streptococcus pyogenes (“Spy”) Cas9 mRNA was generated from plasmid DNA encoding an open reading frame according to SEQ ID NOs: 812-817 (see sequences in Table 7). When SEQ ID NOs: 812-817 are referred to below with respect to RNAs, it is understood that Ts should be replaced with Us (which were N1-methyl pseudouridines as described above). Messenger RNAs used in the Examples include a 5′ cap and a 3′ polyadenylation region, e.g., up to 100 nts, and are identified by the SEQ ID NOs: 812-817 in Table 7.

### 1.3 T Cell Preparation

[0849] Healthy human donor apheresis was obtained commercially (Hemacare), and cells were washed and resuspended in in CliniMACS® PBS/EDTA buffer (Miltenyi Biotec Cat. 130-070-525) and processed in a MultiMACS™ Cell 24 Separator Plus device (Miltenyi Biotec). T cells were isolated via positive selection using a Straight from Leukopak® CD4/CD8 MicroBead kit, human (Miltenyi Biotec Cat. 130-122-352). T cells were aliquoted and cryopreserved for future use in Cryostor® CS10 (StemCell Technologies Cat. 07930). Upon thaw, T cells were plated at a density of 1.0×10⁶ cells/mL in T cell growth media (TCGM) composed of CTS OpTmizer T Cell Expansion SFM and T Cell Expansion Supplement (ThermoFisher Cat. A1048501) containing 2.5% or 5% human AB serum (GeminiBio, Cat. 100-512), 1× Penicillin-Streptomycin, 1× Glutamax, 10 mM HEPES, further supplemented with 200 U/mL recombinant human interleukin-2 (Peprotech, Cat. 200-02), 5 ng/ml recombinant human interleukin 7 (Peprotech, Cat. 200-07), and 5 ng/ml recombinant human interleukin 15 (Peprotech, Cat. 200-15). T cells were rested in the T cell growth media for 24 hours at which time they were activated with TransAct™ (1:100 dilution, Miltenyi Biotec, Cat. 130-111-160). T cells were activated for 48 hours prior to electroporation.

### 1.4 RNA Electroporation

[0850] Guide RNAs targeting a specific gene were removed from their storage plates and denatured for 2 minutes at 95° C. before incubating at room temperature for 5 minutes. Forty-eight hours post T cell activation, T cells were harvested, centrifuged at 500 g for 5 minutes, and resuspended at a concentration of 12.5×10⁶ T cells/mL in P3 electroporation buffer (Lonza Catalog #V4SP-3960). BC22n electroporation mix was prepared with 1×10⁵ T cells, 20 ng/μL of BC22n mRNAs, 20 ng/μL of UGI mRNA and 20 pmols of sgRNA in a final volume of 20 μL of P3 electroporation buffer. The mixture was transferred to the corresponding wells of a 96-well Nucleofector™ plate (Lonza Catalog #V4SP-3960). Cells were electroporated in duplicate using Lonza shuttle 96w using manufacturer's pulse code. Immediately post electroporation, cells were recovered in 80 μL of TCGM without cytokines at 37° C. for 15 minutes. Electroporated T cells were subsequently cultured in TCGM further supplemented with 2× cytokines (200 U/mL recombinant human interleukin-2 (Peprotech, Cat. 200-02), 5 ng/ml recombinant human interleukin 7 (Peprotech, Cat. 200-07), and 5 ng/ml recombinant human interleukin 15 (Peprotech, Cat. 200-15) per well. The plates were incubated at 37° C. On day 4 post-electroporation, edited T cells were collected for NGS analysis. Fresh CTS Optimizer media (ThermoFisher Cat. A1048501) supplemented with 1× cytokines (200 U/mL recombinant human interleukin-2 (Peprotech, Cat. 200-02), 5 ng/ml recombinant human interleukin 7 (Peprotech, Cat. 200-07), and 5 ng/ml recombinant human interleukin 15 (Peprotech, Cat. 200-15) was added to the remaining cells and incubated at 37° C. degrees. On day 7 post-electroporation, edited T cells were collected for flow cytometry analysis.

1.5 RNA Electroporation of an sgRNA Dilution Series

[0851] Solutions containing sgRNAs targeting a gene of interest and solutions containing mRNA encoding Nme2 BC22n (SEQ ID No: 822) and mRNA encoding UGI (SEQ ID No. 821) were prepared in P3 electroporation buffer. Single guide RNAs were removed from their storage plates, denatured for 2 minutes at 95° C. and incubated at room temperature for 5 minutes. Forty-eight hours post-activation, T cells were harvested, centrifuged, and resuspended at a concentration of 12.5×10⁶ T cells/mL in P3 electroporation buffer (Lonza Catalog #V4SP-3960). Each sgRNA was serially diluted 1:2 (v/v) in P3 electroporation buffer starting from a final concentration of 5 μM. Subsequently, 1×10⁵ T cells, 20 ng/μL of BC22n mRNA and 20 ng/μL of UGI mRNA were added to serially diluted sgRNAs in a final volume of 20 μL of P3 electroporation buffer. The resulting mix was transferred in duplicate to 96-well Nucleofector™ plates. Cells were electroporated using the manufacturer's pulse code. Immediately post electroporation, cells were recovered in 80 μL of TCGM without cytokines at 37° C. for 15 minutes. After recovery, 80 μL of electroporated T cells were transferred to 96-well plates containing 80 μL of TCGM supplemented with 400 U/mL recombinant human interleukin-2 (Peprotech, Cat. 200-02), 10 ng/ml recombinant human interleukin 7 (Peprotech, Cat. 200-07), and 10 ng/ml recombinant human interleukin 15 (Peprotech, Cat. 200-15) per well. Plates were incubated at 37° C. for 4 days. On day 4 post-editing, T cells were sub-cultured 1:4 (v/v) and on day 7 post-editing, T cells were collected for flow cytometry analysis.

### 1.6 Lipid Nanoparticle Formulation

[0852] In general, the lipid nanoparticle (LNP) components were dissolved in 100% ethanol at various molar ratios. The RNA cargos (e.g., Cas9 or base editor mRNA and sgRNA) were dissolved in 25 mM citrate, 100 mM NaCl, pH 5.0, resulting in a concentration of RNA cargo of approximately 0.45 mg/mL. The LNPs used contained ionizable lipid ((9Z,12Z)-3-((4,4-bis(octyloxy)butanoyl)oxy)-2-((((3-(diethylamino)propoxy)carbonyl)oxy)methyl)propyl octadeca-9,12-dienoate, also called 3-((4,4-bis(octyloxy)butanoyl)oxy)-2-((((3-(diethylamino)propoxy)carbonyl)oxy)methyl)propyl(9Z,12Z)-octadeca-9,12-dienoate), also called herein Lipid A, cholesterol, distearoylphosphatidylcholine (DSPC), and 1,2-dimyristoyl-rac-glycero-3-methoxypolyethylene glycol-2000 (PEG2K-DMG) (catalog #GM-020 from NOF, Tokyo, Japan) in a molar ratio of 35 Lipid A: 47.5 cholesterol: 15 DSPC: 2.5 PEG2k-DMG. The LNPs were formulated with a lipid amine to RNA phosphate (N:P) molar ratio of about 6. In some cases, LNPs were prepared with a single RNA species such as a mRNA or a gRNA. In some cases, LNPs were prepared with a mixture of mRNA and a guide RNA.

[0853] The LNPs were prepared using a cross-flow technique utilizing impinging jet mixing of the lipid in ethanol with two volumes of RNA solution and one volume of water. First, the lipid in ethanol was mixed through a mixing cross with the two volumes of RNA solution. Then, a fourth stream of water was mixed with the outlet stream of the cross through an inline tee (See WO 2016/010840, FIG. 2). The LNPs were held for at least 1 hour at room temperature, and further diluted with water (approximately 1:1 v/v). Diluted LNPs were buffer exchanged into 50 mM Tris, 45 mM NaCl, 5% (w/v) sucrose, pH 7.5 (TSS) and concentrated as needed by methods known in the art. The resulting mixture was then filtered using a 0.2 m sterile filter. The final LNPs were characterized to determine the encapsulation efficiency, polydispersity index, and average particle size. The final LNP was stored at 4° C. or −80° C. until further use.

### Example 2: Screening of HLA-A Guide RNAs with Nme2 BC22n

[0854] Guide RNAs designed for the disruption of the HLA-A gene were screened for editing efficacy in T cells by assessing loss of two allelic versions of the MHC I surface protein, HLA-A2 and HLA-A3. The donor had a heterozygous HLA-A phenotype of A*02:01:01G and 03:01:01G. The percentage of T cells double negative for HLA-A2 and A3 (“% A2-/A3-”) was determined by flow cytometry following editing at the HLA-A locus by electroporation with Nme2 base editor system and each test guide.

2.1 T Cell Preparation and Editing with RNA Electroporation

[0855] T cells from a single donor (no. 808) were prepared and activated as described in Example 1. T cells were electroporated with sgRNAs targeting HLA-A, mRNA encoding Nme2 BC22n SEQ ID NO: 822), and mRNA encoding UGI (SEQ ID NO: 821) as described in Example 1 and herein.

### 2.2 Flow Cytometry

[0856] On day 7 post-electroporation, edited T cells were phenotyped by flow cytometry to determine HLA-A2 and HLA-A3 protein expression. Briefly, T cells were incubated for 30 min at 4° C. with a mixture of antibodies against CD3 (BioLegend, Cat. No. 316314), CD4 (BioLegend, Cat. No. 317434), CD8 (BioLegend, Cat. No. 301046), Viakrome (Immunotech, Cat. No. C36628), HLA A2 (BioLegend, Cat. No. 343306), and HLA A3 (Fisher Scientific, Cat. No. 501122330) diluted at 1:100, and HLA B7 (Milteny Biotech, Cat. No. 130-120-234) diluted at 1:200 in cell staining buffer. Cells were subsequently washed and resuspended in 100 μL of cell staining buffer. Cells were then processed on a Cytoflex flow cytometer (Beckman Coulter) and analyzed using the FlowJo™ software package. T cells were gated based on size, shape, viability, and CD8 positivity.

[0857] Table 8 and FIG. 1A show the mean percentage of cells double negative for HLA-A2 and HLA-A3 following editing at the HLA-A locus. The percentage of cells that are double or single negative for HLA-A2 and HLA-B3 for select guides, and guide specificity of the select guides to HLA-A over HLA-B are shown in FIGS. 1B and 1C.

TABLE 8
Mean percentage of T cells HLA-A negative (double negative
for HLA-A2 and HLA-A3) following editing at the HLA-A locus

| Guide | % HLA A2/A3 −ve | | |
|---|---|---|---|
| ID | Mean | SD | N |
| G028854 | 0.63 | 0.47 | 2 |
| G028855 | 14.15 | 0.64 | 2 |
| G028856 | 0.62 | 0.01 | 2 |
| G028857 | 1.32 | 0.35 | 2 |
| G028858 | 5.17 | 0.45 | 2 |
| G028859 | 4.51 | 0.59 | 2 |
| G028860 | 1.49 | 0.3 | 2 |
| G028861 | 4.26 | 0.18 | 2 |
| G028862 | 0.21 | 0.04 | 2 |
| G028863 | 0.08 | 0 | 2 |
| G028864 | 0.16 | 0.05 | 2 |
| G028865 | 75.45 | 0.78 | 2 |
| G028866 | 42.6 | 1.7 | 2 |
| G028867 | 11.6 | 1.41 | 2 |
| G028868 | 0.84 | 0.27 | 2 |
| G028869 | 38.3 | 2.4 | 2 |
| G028870 | 2.59 | 0.28 | 2 |
| G028871 | 0.19 | 0.03 | 2 |
| G028872 | 0.07 | 0.03 | 2 |
| G028873 | 0.03 | 0.01 | 2 |
| G028874 | 28.65 | 1.48 | 2 |
| G028875 | 0.37 | 0.14 | 2 |
| G028876 | 0.57 | 0.05 | 2 |
| G028877 | 10.9 | 0.57 | 2 |
| G028878 | 3.59 | 0.01 | 2 |
| G028879 | 1.73 | 0.23 | 2 |
| G028880 | 0.41 | 0.01 | 2 |
| G028881 | 0.06 | 0.03 | 2 |
| G028882 | 0.04 | 0.01 | 2 |
| G028883 | 0.27 | 0.01 | 2 |
| G028884 | 0.01 | 0.01 | 2 |
| G028885 | 0 | 0.01 | 2 |
| G028886 | 2.83 | 1.07 | 2 |
| G028887 | 0.84 | 0.62 | 2 |
| G028888 | 11.25 | 0.21 | 2 |
| G028889 | 0.91 | 0.07 | 2 |
| G028890 | 1.15 | 0.23 | 2 |
| G028891 | 25.7 | 1.84 | 2 |
| G028892 | 5.53 | 0.28 | 2 |
| G028893 | 1.57 | 0.18 | 2 |
| G028894 | 60.6 | 4.38 | 2 |
| G028895 | 1.02 | 0.1 | 2 |
| G028896 | 5.39 | 0.61 | 2 |
| G028897 | 0.37 | 0 | 2 |
| G028898 | 0.28 | 0.15 | 2 |
| G028899 | 52.5 | 5.09 | 2 |
| G028900 | 19.5 | 2.12 | 2 |
| G028901 | 27.45 | 0.49 | 2 |
| G028902 | 22.85 | 0.64 | 2 |
| G028903 | 55.5 | 3.54 | 2 |
| G028904 | 1.92 | 0.02 | 2 |
| G028905 | 6.86 | 0.88 | 2 |
| G028906 | 5.88 | 0.64 | 2 |
| G028907 | 91.1 | 2.26 | 2 |
| G028908 | 8.82 | 0.08 | 2 |
| G028909 | 1.05 | 0.23 | 2 |
| G028910 | 2.43 | 1.03 | 2 |
| G028911 | 0.02 | 0.03 | 2 |
| G028912 | 18.3 | 4.67 | 2 |
| G028913 | 91.15 | 2.76 | 2 |
| G028914 | 30.25 | 2.62 | 2 |
| G028915 | 8.47 | 1.39 | 2 |
| G028916 | 0.59 | 0.21 | 2 |
| G028917 | 0.01 | 0.01 | 2 |
| G028918 | 81.4 | 2.69 | 2 |
| G028919 | 0.49 | 0.44 | 2 |
| G028920 | 22.4 | 2.69 | 2 |
| G028921 | 2.12 | 0.31 | 2 |
| G028922 | 87.5 | 6.51 | 2 |
| G028923 | 67.45 | 13.51 | 2 |
| G028924 | 46.2 | 3.39 | 2 |
| G028925 | 0.07 | 0.06 | 2 |
| G028926 | 0.07 | 0.03 | 2 |
| G028927 | 0.86 | 0.06 | 2 |
| G028928 | 8.48 | 0.93 | 2 |
| G028929 | 2.9 | 0.32 | 2 |
| G028930 | 0.08 | 0.11 | 2 |
| G028933 | 8.31 | 1.34 | 2 |
| G028934 | 27.7 | 1.7 | 2 |

### Example 3: Dose Response Curves (DRC) for Select HLA-A Nme2 Guides

[0858] A titration experiment was conducted to evaluate the editing efficacy of sgRNAs designed for the disruption of the HLA-A locus by assessing loss of one allelic version of the MHC I surface protein, HLA-A2. An eight-point dose response curve was generated for each sgRNA by titrating each sgRNA with a fixed concentration of mRNA encoding Nme2 BC22n (SEQ ID NO:822) and mRNA encoding UGI (SEQ ID NO: 821) for electroporation in T cells. T cells were then expanded and phenotyped by flow cytometry to determine the editing efficiency of each sgRNA tested.

[0859] T cells were prepared as described in Example 1. T cells were edited with serially diluted sgRNAs by the mRNA electroporation method described in Example 1. On day 7 post-editing, edited T cells were phenotyped by flow cytometry to determine HLA-A2 protein expression. Briefly, T cells were transferred to U-bottom plates, spun at 500 g for 5 minutes and resuspended in 100 μL of FACs buffer (PBS with 2% FBS and 2 mM EDTA) containing the following staining reagents: PerCP/Cy5.5 anti-human CD3 (BioLegend, Cat. 317434) diluted 1:100 (v/v), BV421 anti-human CD4 (BioLegend, Cat. 317434) diluted 1:100 (v/v), BV785 anti-human CD8 (BioLegend, Cat. 301046) diluted 1:100 (v/v), PE anti-human HLA-A2 (BioLegend Inc., Cat. 343306) diluted 1:100 (v/v), FITC anti-human-HLA-B7 (Miltenyi Biotec Inc., Cat. 130-120-234) diluted 1:200 and Viakrome 808 (Beckman Coulter Cat. C36628) diluted 1:100. T cells were incubated in staining solution for 30 minutes at 4° C., washed and resuspended using 100 μL of FACS buffer. Then, T cells were processed in a Beckman Coulter Cytoflex LX flow cytometer, and analyzed using the FlowJo™ software package. T cells were gated based on size, singularity, viability and CD8 positivity. Table 9 and FIG. 2 show the percentage of CD8+ T cells that are negative for the expression of HLA-A2.

TABLE 9
Mean percentage of CD8⁺ HLA-A2⁻ T cells following base editing

| | G028907 | | | G028913 | | | G028869 | | |
|---|---|---|---|---|---|---|---|---|---|
| Guide | Mean | SD | | Mean | SD | | Mean | SD | |
| sgRNA | % CD8⁺ | % CD8⁺ | | % CD8⁺ | % CD8⁺ | | % CD8⁺ | % CD8⁺ | |
| (μg/mL) | Cells | Cells | N | Cells | Cells | N | Cells | Cells | N |
| 5 | 98.65 | 0.07 | 2 | 97.20 | 0.42 | 2 | 70.55 | 0.49 | 2 |
| 2.5 | 98.25 | 0.21 | 2 | 96.15 | 0.07 | 2 | 61.75 | 0.92 | 2 |
| 1.25 | 97.40 | 0.14 | 2 | 93.30 | 0.00 | 2 | 43.75 | 1.91 | 2 |
| 0.625 | 95.70 | 0.42 | 2 | 90.85 | 0.92 | 2 | 25.45 | 0.92 | 2 |
| 0.313 | 92.40 | 0.00 | 2 | 85.55 | 1.77 | 2 | 14.55 | 0.92 | 2 |
| 0.078 | 80.20 | 3.25 | 2 | 68.25 | 3.75 | 2 | 6.20 | 0.33 | 2 |
| 0 | 54.45 | 2.05 | 2 | 42.70 | 1.13 | 2 | 3.19 | 0.40 | 2 |
| EC50 | 0.07038 | | | 0.08998 | | | 0.9213 | | |
| | G028922 | | | G028918 | | | G028865 | | |
| Guide | Mean | SD | | Mean | SD | | Mean | SD | |
| sgRNA | % CD8⁺ | % CD8⁺ | | % CD8⁺ | % CD8⁺ | | % CD8⁺ | % CD8⁺ | |
| (μg/mL) | Cells | Cells | N | Cells | Cells | N | Cells | Cells | N |
| 5 | 98.65 | 0.21 | 2 | 92.15 | 0.07 | 2 | 90.95 | 1.06 | 2 |
| 2.5 | 95.00 | 0.99 | 2 | 89.45 | 1.20 | 2 | 90.20 | 1.27 | 2 |
| 1.25 | 74.90 | 2.12 | 2 | 87.25 | 1.06 | 2 | 87.20 | 0.42 | 2 |
| 0.625 | 54.20 | 0.42 | 2 | 83.40 | 0.71 | 2 | 81.35 | 1.34 | 2 |
| 0.313 | 36.80 | 0.85 | 2 | 72.05 | 0.64 | 2 | 75.45 | 1.06 | 2 |
| 0.078 | 18.60 | 0.42 | 2 | 48.80 | 0.85 | 2 | 55.60 | 2.26 | 2 |
| 0 | 8.73 | 0.02 | 2 | 24.65 | 1.20 | 2 | 34.30 | 1.56 | 2 |

| | | | |
|---|---|---|---|
| EC50 | 0.6028 | 0.1429 | 0.09631 |

### Example 4: Screening of TRAC Guide RNAs with Nme2 Base Editing System

[0860] TRAC guide RNAs were screened for Nme2 base editing efficacy in T cells by assessing loss of CD3 cell surface expression by flow cytometry and editing frequency by NGS. CD3 is a cell-surface component of the T cell receptor complex and its presence at the cell surface is used as a surrogate marker for TRAC protein expression.

4.1 T Cell Preparation and Editing with RNA Electroporation

[0861] T cells were prepared and activated as described in Example 1. T cells were electroporated with sgRNAs targeting TRAC, mRNA encoding Nme2 BC22n (SEQ ID NO: 822), and mRNA encoding UGI (SEQ ID NO: 821) as described in Example 1 and herein.

### 4.2 Flow Cytometry and NGS Sequencing

[0862] T cells from a single donor (no. 3786) were prepared as described in Example 1. T cells were edited with sgRNA targeting the TRAC locus using mRNA electroporation as described in Example 1. On day 4 post-electroporation, edited T cell samples were subjected to PCR and NGS analysis as described in Example 1. On day 7 post-electroporation, T cells were phenotyped by flow cytometry. Briefly, T cells were incubated for 30 min at 4° C. with a mixture of antibodies against CD3 (BioLegend, Cat. No. 316314), CD4 (BioLegend, Cat. No. 317434), CD8 (BioLegend, Cat. No. 301046), Viakrome (Immunotech, Cat. No. C36628) diluted at 1:100 in cell staining buffer (BioLegend, Cat. No. 420201). Cells were subsequently washed and resuspended in 100 μL of cell staining buffer. Cells were then processed on a Cytoflex flow cytometer (Beckman Coulter) and analyzed using the FlowJo™ software package. T cells were gated based on size, shape, viability, CD8 and CD3 expression. Table 10 and FIG. 3A show the mean percentage of CD3 negative T cells. Mean percent editing in is shown in Table 10 and FIG. 3B.

TABLE 10
Mean percentage of CD3 negative T cells; Mean percent editing
of the TRAC loci as a percentage of total NGS reads. N =
4 represents two technical replicates each with two primer sets.

| | % CD3 −ve | | | % C to T | | | % C to A/G | | | % Indels | | |
|---|---|---|---|---|---|---|---|---|---|---|---|---|
| Guide ID | Mean | SD | N | Mean | SD | N | Mean | SD | N | Mean | SD | N |
| G021469 | 93.25 | 1.20 | 2 | 94.59 | 0.81 | 4 | 2.83 | 0.64 | 4 | 0.72 | 0.09 | 4 |
| G021481 | 95.50 | 1.56 | 2 | 93.52 | 0.31 | 4 | 2.59 | 0.14 | 4 | 1.75 | 0.22 | 4 |
| G028935 | 93.75 | 1.20 | 2 | 95.22 | 0.34 | 4 | 1.67 | 0.35 | 4 | 1.65 | 0.14 | 4 |
| G028936 | 2.66 | 0.73 | 2 | 50.63 | 5.08 | 4 | 1.26 | 0.37 | 4 | 2.48 | 0.35 | 4 |
| G028937 | 46.25 | 8.13 | 2 | 88.13 | 2.82 | 4 | 2.04 | 1.03 | 4 | 0.87 | 0.57 | 4 |
| G028938 | 9.93 | 0.24 | 2 | 26.77 | 3.16 | 4 | 0.91 | 0.06 | 4 | 0.35 | 0.05 | 4 |
| G028939 | 93.10 | 0.99 | 2 | 95.12 | 0.97 | 4 | 1.28 | 0.18 | 4 | 0.55 | 0.08 | 4 |
| G028940 | 1.28 | 0.01 | 2 | 7.76 | 0.85 | 4 | 1.22 | 0.10 | 4 | 0.21 | 0.06 | 4 |
| G028941 | 11.95 | 0.21 | 2 | 95.88 | 1.30 | 4 | 0.92 | 0.19 | 4 | 0.39 | 0.07 | 4 |
| G028942 | 30.75 | 5.73 | 2 | 50.37 | 4.35 | 4 | 1.47 | 0.24 | 4 | 0.21 | 0.08 | 4 |
| G028943 | 93.65 | 5.44 | 2 | 92.43 | 3.16 | 4 | 1.94 | 0.62 | 4 | 1.80 | 0.33 | 4 |
| G028944 | 1.25 | 0.19 | 2 | 1.42 | 0.10 | 4 | 0.73 | 0.11 | 4 | 0.12 | 0.04 | 4 |
| G028945 | 9.89 | 1.86 | 2 | 46.15 | 5.94 | 4 | 1.01 | 0.07 | 4 | 0.58 | 0.11 | 4 |
| G028946 | 4.29 | 0.11 | 2 | 41.35 | 2.67 | 4 | 0.88 | 0.45 | 4 | 0.66 | 0.10 | 4 |
| G028947 | 1.05 | 0.08 | 2 | 95.68 | 1.72 | 4 | 1.83 | 1.65 | 4 | 0.63 | 0.05 | 4 |
| G028948 | 0.27 | 0.19 | 2 | 1.83 | 0.14 | 4 | 0.56 | 0.07 | 4 | 0.20 | 0.09 | 4 |

### Example 5: Dose Response Curves (DRC) for Select TRAC Nme2 Guides

[0863] A titration experiment was conducted to evaluate the editing efficacy of select sgRNAs that target the TRAC locus by assessing loss of CD3 cell surface expression. CD3 is a cell-surface component of the T cell receptor complex and its presence at the cell surface is used as a surrogate marker for TRAC protein expression. An eight-point dose response curve was generated for each sgRNA by titrating each sgRNA with a fixed concentration of Nme2 BC22n (SEQ ID NO:822) and UGI mRNA132 (SEQ ID NO: 821) in T cells using electroporation. T cells were then expanded and phenotyped by flow cytometry to determine the editing efficiency of each sgRNA tested.

[0864] T cells were prepared as described in Example 1. T cells were edited with serially diluted sgRNAs that target TRAC by mRNA electroporation as described in Example 1. On day 7 post-editing, edited T cells were phenotyped by flow cytometry to determine CD3 expression as described in Example 4. T cells were gated based on size, singularity, viability and CD8 positivity. Tables 11 and FIG. 4 show the percentage of CD8+ T cells that are negative for the expression of CD3.

TABLE 11
Mean percent CD3 negative T cells following
base editing at the TRAC locus

| G021469 | | | | G021481 | | | |
|---|---|---|---|---|---|---|---|
| sgRNA | % CD3− of CD8+ | | | sgRNA | % CD3− of CD8+ | | |
| (uM) | Ave | SD | N | (uM) | Ave | SD | N |
| 5.00 | 95.40 | 0.00 | 2.00 | 5.00 | 97.35 | 0.21 | 2 |
| 2.50 | 92.20 | 0.85 | 2.00 | 2.50 | 94.15 | 0.21 | 2 |
| 1.25 | 88.45 | 2.90 | 2.00 | 1.25 | 85.6 | 0.42 | 2 |
| 0.63 | 78.55 | 3.46 | 2.00 | 0.63 | 74.75 | 1.48 | 2 |
| 0.31 | 64.80 | 1.84 | 2.00 | 0.31 | 54.75 | 4.45 | 2 |
| 0.16 | 47.90 | 0.42 | 2.00 | 0.16 | 39.9 | 1.27 | 2 |
| 0.08 | 25.40 | 5.37 | 2.00 | 0.08 | 22.05 | 0.64 | 2 |
| 0.00 | 0.47 | 0.34 | 2.00 | 0.00 | 0.375 | 0.06 | 2 |
| G028935 | | | | G028939 | | | |
| sgRNA | % CD3− of CD8+ | | | sgRNA | % CD3− of CD8+ | | |
| (uM) | Ave | SD | N | (uM) | Ave | SD | N |
| 5.00 | 94.60 | 0.14 | 2.00 | 5.00 | 97.7 | 0.42 | 2 |
| 2.50 | 92.10 | 0.14 | 2.00 | 2.50 | 92.65 | 1.20 | 2 |
| 1.25 | 90.05 | 0.07 | 2.00 | 1.25 | 88.35 | 0.49 | 2 |
| 0.63 | 88.15 | 1.20 | 2.00 | 0.63 | 79.55 | 1.06 | 2 |
| 0.31 | 87.75 | 0.78 | 2.00 | 0.31 | 73.35 | 3.04 | 2 |
| 0.16 | 79.90 | 1.27 | 2.00 | 0.16 | 51.8 | 3.39 | 2 |
| 0.08 | 67.20 | 1.13 | 2.00 | 0.08 | 36.05 | 5.02 | 2 |
| 0.00 | 0.46 | 0.23 | 2.00 | 0.00 | 0.22 | 0.03 | 2 |

G028943

| sgRNA | % CD3− of CD8+ | | |
|---|---|---|---|
| (uM) | Ave | SD | N |
| 5.00 | 97.50 | 0.71 | 2 |
| 2.50 | 95.55 | 0.64 | 2 |
| 1.25 | 91.95 | 3.46 | 2 |
| 0.63 | 91.10 | 2.97 | 2 |
| 0.31 | 85.40 | 0.71 | 2 |
| 0.16 | 70.05 | 2.33 | 2 |
| 0.08 | 50.10 | 0.28 | 2 |
| 0.00 | 0.40 | 0.04 | 2 |

### Example 6: Screening of TRBC 1 and 2 Guide RNAs with Nme2 BC22n

[0865] Guide RNAs targeting TRBC 1 and/or TRBC 2 were screened for editing efficacy in T cells by assessing loss of CD3 cell surface expression by flow cytometry and for editing efficacy by NGS, following TRBC editing by mRNA delivery. CD3 is a cell-surface component of the T cell receptor complex and its presence at the cell surface is used as a surrogate marker for TRBC protein expression.

6.1 T Cell Preparation and Editing with RNA Electroporation

[0866] T cells were prepared and activated as described in Example 1. T cells were electroporated with sgRNAs targeting TRBC, mRNA encoding Nme2 BC22n (SEQ ID NO:822), and mRNA encoding UGI (SEQ ID NO: 821) as described in Example 1 and herein.

### 6.2 Flow Cytometry and NGS Sequencing

[0867] T cells from a single donor (no. 3786) were prepared as described in Example 1. T cells were edited with sgRNA targeting the TRBC1 and/or TRBC 2 locus using mRNA electroporation as described in Example 1. On day 4 post-electroporation, edited T cell samples were subjected PCR and NGS analysis as described in Example 1. On day 7 post-electroporation, T cells were phenotyped by flow cytometry. Briefly, T cells were incubated for 30 min at 4° C. with a mixture of antibodies against CD3 (BioLegend, Cat. No. 316314), CD4 (BioLegend, Cat. No. 317434), CD8 (BioLegend, Cat. No. 301046), and Viakrome (Immunotech, Cat. No. C36628) diluted at 1:100 in cell staining buffer (BioLegend, Cat. No. 420201). Cells were subsequently washed and resuspended in 100 μL of cell staining buffer. Cells were then processed on a Cytoflex flow cytometer (Beckman Coulter) and analyzed using the FlowJo™ software package. T cells were gated based on size, shape, viability, CD8 and CD3 expression.

[0868] Table 12 and FIG. 5A show the mean percentage of CD3− T cells. Percent editing at the TRBC 1 and/or 2 locus is shown in Table 12 and in FIG. 5B.

TABLE 12
Mean percentage of CD3 negative T cells; Mean percent editing
of the TRBC loci as a percentage of total NGS reads.

| | % CD3 -ve | | | % C to T | | | % C to A/G | | | % Indels | | | Gene |
|---|---|---|---|---|---|---|---|---|---|---|---|---|---|
| Guide ID | Mean | SD | N | Mean | SD | N | Mean | SD | N | Mean | SD | N | target |
| G028952 | 9.65 | 1.06 | 2 | 14.08 | 1.30 | 4 | 0.84 | 0.50 | 4 | 0.36 | 0.06 | 4 | TRBC1 |
| G028953 | 15.30 | 0.99 | 2 | 46.47 | 4.15 | 4 | 1.82 | 0.48 | 4 | 0.61 | 0.12 | 4 | TRBC1 |
| G028968 | 19.45 | 2.05 | 2 | 38.11 | 8.64 | 4 | 1.29 | 0.21 | 4 | 0.74 | 0.04 | 4 | TRBC1 |
| G028969 | 3.41 | 0.49 | 2 | 17.85 | 9.69 | 4 | 0.63 | 0.39 | 4 | 0.15 | 0.05 | 4 | TRBC1 |
| G028970 | 29.30 | 3.54 | 2 | 71.73 | 5.73 | 4 | 1.59 | 0.33 | 4 | 0.54 | 0.08 | 4 | TRBC1 |
| G028977 | 0.99 | 0.07 | 2 | 23.09 | 16.10 | 4 | 0.90 | 1.04 | 4 | 0.49 | 0.59 | 4 | TRBC1 |
| G028978 | 1.67 | 0.25 | 2 | 43.93 | 5.74 | 4 | 1.46 | 0.09 | 4 | 0.82 | 0.24 | 4 | TRBC1 |
| G028979 | 5.32 | 0.29 | 2 | 90.62 | 2.52 | 4 | 2.11 | 0.18 | 4 | 2.32 | 0.28 | 4 | TRBC1 |
| G028980 | 2.41 | 0.00 | 2 | 37.84 | 1.93 | 4 | 1.57 | 0.28 | 4 | 0.36 | 0.10 | 4 | TRBC1 |
| G028981 | 1.08 | ND | 1 | 65.21 | 5.04 | 4 | 1.99 | 0.24 | 4 | 0.55 | 0.03 | 4 | TRBC1 |
| G028982 | 15.60 | 0.14 | 2 | 89.82 | 1.24 | 4 | 3.90 | 0.33 | 4 | 3.30 | 0.57 | 4 | TRBC1 |
| G028983 | 1.42 | 0.35 | 2 | 65.07 | 2.82 | 4 | 4.05 | 0.28 | 4 | 5.47 | 0.59 | 4 | TRBC1 |
| G028984 | 0.22 | 0.08 | 2 | 18.19 | 1.46 | 4 | 1.92 | 0.32 | 4 | 1.14 | 0.17 | 4 | TRBC1 |
| G028985 | 5.78 | 0.12 | 2 | 47.94 | 1.02 | 4 | 1.77 | 0.22 | 4 | 0.45 | 0.15 | 4 | TRBC1 |
| G028986 | 92.30 | 4.53 | 2 | 91.48 | 1.28 | 4 | 3.58 | 0.49 | 4 | 1.83 | 0.17 | 4 | TRBC1 |
| G028987 | 68.85 | 4.45 | 2 | 82.47 | 2.97 | 4 | 2.65 | 0.14 | 4 | 0.59 | 0.16 | 4 | TRBC1 |
| G028989 | 19.00 | 0.57 | 2 | 92.81 | 0.70 | 4 | 3.76 | 0.30 | 4 | 1.43 | 0.16 | 4 | TRBC1 |
| G028990 | 0.73 | 0.25 | 2 | 79.63 | 2.77 | 4 | 1.72 | 0.21 | 4 | 0.75 | 0.19 | 4 | TRBC1 |
| G028991 | 0.31 | 0.26 | 2 | 9.78 | 0.55 | 4 | 0.58 | 0.21 | 4 | 0.10 | 0.03 | 4 | TRBC1 |
| G028992 | 0.19 | 0.08 | 2 | 3.26 | 0.29 | 4 | 0.45 | 0.30 | 4 | 0.10 | 0.04 | 4 | TRBC1 |
| G028993 | 0.16 | 0.16 | 2 | 7.36 | 0.89 | 4 | 1.57 | 1.38 | 4 | 0.56 | 0.42 | 4 | TRBC1 |
| G028949 | 62.95 | 6.43 | 2 | 65.32 | 3.28 | 4 | 2.23 | 0.26 | 4 | 0.98 | 0.14 | 4 | TRBC1/2 |
| G028950 | 65.60 | 4.38 | 2 | 63.75 | 44.44 | 4 | 1.13 | 1.30 | 4 | 0.40 | 0.47 | 4 | TRBC1/2 |
| G028951 | 70.90 | 1.27 | 2 | 69.08 | 46.09 | 4 | 1.25 | 0.83 | 4 | 1.87 | 1.25 | 4 | TRBC1/2 |
| G028954 | 1.48 | ND | 1 | 7.84 | 0.83 | 4 | 1.25 | 0.75 | 4 | 0.16 | 0.06 | 4 | TRBC1/2 |
| G028955 | 0.50 | 0.13 | 2 | 2.35 | 0.43 | 4 | 1.05 | 0.57 | 4 | 0.11 | 0.05 | 4 | TRBC1/2 |
| G028956 | 20.00 | 1.98 | 2 | 80.04 | 3.44 | 4 | 1.82 | 0.32 | 4 | 1.04 | 0.19 | 4 | TRBC1/2 |
| G028957 | 2.09 | 0.39 | 2 | 13.49 | 0.63 | 4 | 1.17 | 0.31 | 4 | 0.23 | 0.06 | 4 | TRBC1/2 |
| G028958 | 69.40 | 0.14 | 2 | 89.79 | 0.26 | 4 | 2.25 | 0.16 | 4 | 2.67 | 0.31 | 4 | TRBC1/2 |
| G028959 | 2.86 | 0.49 | 2 | 5.62 | 0.62 | 4 | 1.32 | 0.30 | 4 | 0.12 | 0.05 | 4 | TRBC1/2 |
| G028960 | 42.50 | 4.24 | 2 | 42.76 | 0.36 | 4 | 1.74 | 0.44 | 4 | 0.25 | 0.08 | 4 | TRBC1/2 |
| G028961 | 1.27 | 0.04 | 2 | 1.64 | 0.43 | 4 | 0.46 | 0.08 | 4 | 0.12 | 0.04 | 4 | TRBC1/2 |
| G028962 | 0.65 | 0.20 | 2 | 6.58 | 2.20 | 4 | 1.12 | 0.57 | 4 | 0.14 | 0.06 | 4 | TRBC1/2 |
| G028963 | 11.65 | 2.19 | 2 | 11.55 | 1.59 | 4 | 0.97 | 0.49 | 4 | 0.25 | 0.05 | 4 | TRBC1/2 |
| G028964 | 23.10 | 1.84 | 2 | 21.45 | 0.91 | 4 | 1.09 | 0.59 | 4 | 0.32 | 0.05 | 4 | TRBC1/2 |
| G028965 | 40.35 | 5.59 | 2 | 61.42 | 3.81 | 4 | 2.10 | 0.15 | 4 | 4.12 | 0.40 | 4 | TRBC1/2 |
| G028966 | 18.00 | 4.67 | 2 | 26.83 | 8.93 | 4 | 1.00 | 0.11 | 4 | 0.78 | 0.46 | 4 | TRBC1/2 |
| G028967 | 21.30 | 2.55 | 2 | 19.82 | 0.85 | 4 | 0.63 | 0.17 | 4 | 0.17 | 0.09 | 4 | TRBC1/2 |
| G028971 | 1.14 | 0.01 | 2 | 25.06 | 3.88 | 4 | 0.49 | 0.06 | 4 | 0.42 | 0.14 | 4 | TRBC1/2 |
| G028972 | 16.85 | 2.05 | 2 | 67.14 | 4.73 | 4 | 2.15 | 1.09 | 4 | 1.63 | 0.27 | 4 | TRBC1/2 |
| G028973 | 4.88 | 0.30 | 2 | 90.36 | 2.03 | 4 | 1.35 | 0.19 | 4 | 0.98 | 0.14 | 4 | TRBC1/2 |
| G028974 | 3.05 | 0.15 | 2 | 83.09 | 1.63 | 4 | 2.11 | 0.75 | 4 | 1.58 | 0.12 | 4 | TRBC1/2 |
| G028975 | 1.01 | 0.04 | 2 | 18.72 | 2.39 | 4 | 1.49 | 0.34 | 4 | 0.60 | 0.12 | 4 | TRBC1/2 |
| G028976 | 0.97 | 0.18 | 2 | 31.70 | 1.75 | 4 | 1.66 | 0.39 | 4 | 0.86 | 0.20 | 4 | TRBC1/2 |
| G028988 | 9.14 | 0.85 | 2 | 87.16 | 3.83 | 4 | 2.33 | 0.27 | 4 | 0.51 | 0.08 | 4 | TRBC1/2 |
| G028994 | 17.70 | 3.82 | 2 | 30.45 | 3.67 | 4 | 1.30 | 0.53 | 4 | 0.54 | 0.06 | 4 | TRBC2 |
| G028995 | 25.45 | 2.47 | 2 | 49.38 | 1.71 | 4 | 1.61 | 0.50 | 4 | 0.64 | 0.03 | 4 | TRBC2 |
| G028996 | 1.64 | 0.28 | 2 | 5.61 | 2.70 | 4 | 0.41 | 0.14 | 4 | 0.19 | 0.06 | 4 | TRBC2 |
| G028997 | 17.00 | 0.85 | 2 | 57.64 | 25.79 | 4 | 1.16 | 0.35 | 4 | 0.54 | 0.17 | 4 | TRBC2 |
| G028998 | 4.13 | 1.70 | 2 | 20.02 | 4.05 | 4 | 2.11 | 0.71 | 4 | 0.24 | 0.08 | 4 | TRBC2 |
| G028999 | 1.51 | 0.12 | 2 | 5.33 | 0.63 | 4 | 1.88 | 2.00 | 4 | 0.16 | 0.03 | 4 | TRBC2 |
| G029000 | 0.58 | 0.06 | 2 | 4.08 | 0.41 | 4 | 0.79 | 0.25 | 4 | 0.32 | 0.08 | 4 | TRBC2 |
| G029001 | 0.25 | 0.01 | 2 | 0.60 | 0.05 | 4 | 0.48 | 0.04 | 4 | 0.11 | 0.03 | 4 | TRBC2 |
| G029002 | 8.26 | 0.19 | 2 | 73.39 | 0.87 | 4 | 1.13 | 0.26 | 4 | 0.73 | 0.05 | 4 | TRBC2 |
| G029003 | 35.00 | 0.28 | 2 | 93.20 | 0.57 | 4 | 1.43 | 0.17 | 4 | 3.78 | 0.38 | 4 | TRBC2 |
| G029004 | 34.20 | 2.12 | 2 | 44.18 | 0.76 | 4 | 1.66 | 0.18 | 4 | 0.35 | 0.07 | 4 | TRBC2 |
| G029005 | 5.40 | 0.40 | 2 | 40.16 | 2.70 | 4 | 1.34 | 0.18 | 4 | 0.48 | 0.06 | 4 | TRBC2 |
| G029006 | 88.15 | 2.76 | 2 | 89.41 | 0.89 | 4 | 3.49 | 0.58 | 4 | 4.54 | 0.26 | 4 | TRBC2 |
| G029007 | 60.55 | 0.64 | 2 | 88.74 | 2.32 | 4 | 2.40 | 0.77 | 4 | 0.84 | 0.23 | 4 | TRBC2 |
| G029008 | 48.55 | 1.48 | 2 | 95.20 | 0.44 | 4 | 1.56 | 0.26 | 4 | 2.05 | 0.23 | 4 | TRBC2 |
| G029009 | 0.95 | 0.22 | 2 | 68.27 | 2.76 | 4 | 2.26 | 0.91 | 4 | 12.78 | 0.16 | 4 | TRBC2 |
| G029010 | 1.42 | 0.25 | 2 | 61.68 | 1.86 | 4 | 1.78 | 0.12 | 4 | 1.13 | 0.10 | 4 | TRBC2 |
| G029011 | 0.25 | 0.01 | 2 | 12.47 | 1.05 | 4 | 2.16 | 0.42 | 4 | 0.18 | 0.02 | 4 | TRBC2 |
| G029012 | 0.17 | 0.01 | 2 | 47.87 | 2.46 | 4 | 2.07 | 0.15 | 4 | 0.22 | 0.05 | 4 | TRBC2 |

“ND” indicates no data.
N = 4 represents two technical replicates each with two primer sets.

### Example 7: Dose Response Curves (DRC) for Select TRBC Nme2 Guides

[0869] A titration experiment was conducted to evaluate the editing efficacy of select sgRNAs designed for the disruption of one or both TRBC genes by assessing loss of CD3 cell surface expression. CD3 is a cell-surface component of the T cell receptor complex and its presence at the cell surface is used as a surrogate marker for TRBC protein expression. An eight-point dose response curve was generated for each sgRNA by titrating each sgRNA with a fixed concentration of mRNA encoding Nme2 BC22n (SEQ ID NO:822) and mRNA encoding UGI (SEQ ID NO: 1821 in T cells using electroporation. T cells were then expanded and phenotyped by flow cytometry to determine the editing efficiency of each sgRNA tested.

[0870] T cells were prepared as described in Example 1. T cells were edited with serially diluted TRBC targeting sgRNAs by mRNA electroporation as described in Example 1 and Table 13. On day 7 post-editing, edited T cells were phenotyped by flow cytometry to determine loss of CD3 expression as described in Example 4. T cells were gated based on size, singularity, viability and CD8 positivity. Table 13 and FIG. 6 show the percentage of CD8+ T cells that are negative for the expression of CD3.

[0871] T cells were prepared as described in Example 1. T cells were edited with serially diluted TRBC targeting sgRNAs by mRNA electroporation as described in Example 1. On day 7 post-editing, edited T cells were phenotyped by flow cytometry to determine loss of CD3 expression as described in Example 3. T cells were gated based on size, singularity, viability and CD8 positivity. Tables 13 and FIG. 6 show the percentage of CD8+ T cells that are negative for the expression of CD3.

TABLE 13
Percentage of CD8 positive cells that are
CD3 negative at various doses of TRBC sgRNA

| | % CD3− of | | |
|---|---|---|---|
| | CD8+ | | |
| sgRNA (uM) | Ave | SD | N |

G028986

| | | | |
|---|---|---|---|
| 5.00 | 96.75 | 0.07 | 2 |
| 2.50 | 88.15 | 0.35 | 2 |
| 1.25 | 70.85 | 1.63 | 2 |
| 0.63 | 56 | 3.25 | 2 |
| 0.31 | 34.35 | 1.48 | 2 |
| 0.16 | 20 | 0.28 | 2 |
| 0.08 | 10.16 | 1.05 | 2 |
| 0.00 | 0.36 | 0.06 | 2 |

G029006

| | | | |
|---|---|---|---|
| 5.00 | 95.05 | 0.35 | 2 |
| 2.50 | 82.75 | 0.21 | 2 |
| 1.25 | 68.35 | 8.27 | 2 |
| 0.63 | 55.05 | 4.60 | 2 |
| 0.31 | 37.55 | 2.33 | 2 |
| 0.16 | 19.7 | 1.13 | 2 |
| 0.08 | 13.1 | 1.13 | 2 |
| 0.00 | 0.43 | 0.00 | 2 |

G029007

| | | | |
|---|---|---|---|
| 5.00 | 65.65 | 0.07 | 2 |
| 2.50 | 52.55 | 1.34 | 2 |
| 1.25 | 36.3 | 0.57 | 2 |
| 0.63 | 22.6 | 0.71 | 2 |
| 0.31 | 10.4 | 0.42 | 2 |
| 0.16 | 4.565 | 0.49 | 2 |
| 0.08 | 3.21 | 1.09 | 2 |
| 0.00 | 0.335 | 0.05 | 2 |

### Example 8: Screening of CIITA Guide RNAs with Nme2 BC22n and Nme2 Cas9

8.1 Screen of CIITA sgRNA with Nme2 BC22n

[0872] CIITA guide RNAs were screened for editing efficacy in T cells by assessing loss of HLA DP, DQ, DR cell surface expression and editing by NGS, following CIITA editing by mRNA delivery. HLA-DP, DR and DQ are cell surface proteins whose expression requires the transcription factor CIITA and thus their presence at the cell surface is a surrogate marker for CIITA protein expression.

8.1.1 T Cell Preparation and Editing with RNA Electroporation

[0873] T cells from a single donor (no. 3786) were prepared and activated as described in Example 1. T cells were electroporated with sgRNAs targeting CIITA, mRNA encoding Nme2 BC22n (SEQ ID NO: 822), and mRNA encoding UGI (SEQ ID NO: 821) as described in Example 1 and herein.

### 8.1.2 Flow Cytometry and NGS Sequencing

[0874] T cells were prepared as described in Example 1. T cells were edited with sgRNA targeting the CIITA locus using mRNA electroporation as described in Example 1. On day 4 post-electroporation, edited T cell samples were subjected PCR and NGS analysis as described in Example 1. On day 7 post-electroporation, T cells were phenotyped by flow cytometry as described in Example 1 except the mixture of antibodies used were against CD3 (BioLegend, Cat. No. 316314), CD4 (BioLegend, Cat. No. 317434), CD8 (BioLegend, Cat. No. 301046), Viakrome (Immunotech, Cat. No. C36628) diluted at 1:100, and HLA II-DR, DP, DQ (BioLegend, Cat. No. 361706) diluted at 1:50 in cell staining buffer (BioLegend, Cat. No. 420201). T cells were gated based on size, shape, viability, CD8 and HLA II-DR, DP, DQ, expression.

[0875] Table 14 and FIG. 7A show the mean percentage of CD3 T cells with loss of the HLA-DP, DQ, DR expression. Percent editing at the CIITA locus is shown in Table 14 and FIG. 7B.

TABLE 14
Mean percentage of HLA II-DP, DR, DQ negative cells; Mean percent
editing of the CIITA locus as a percentage of total NGS reads

| | % HLA | | | | | | | | | |
|---|---|---|---|---|---|---|---|---|---|---|
| | DP, DR, DQ -ve | | | % C to T | | % C to A/G | | % Indels | | |
| Guide ID | Mean | SD | N | Mean | SD | Mean | SD | Mean | SD | N |
| G029013 | 34.40 | 4.95 | 2 | 18.75 | 1.90 | 0.60 | 0.11 | 0.13 | 0.07 | 3 |
| G029014 | 54.60 | 5.80 | 2 | 96.18 | 0.32 | 1.71 | 0.05 | 0.78 | 0.15 | 3 |
| G029015 | 44.85 | 0.07 | 2 | 88.66 | 1.75 | 1.40 | 0.08 | 0.42 | 0.09 | 3 |
| G029016 | 37.05 | 7.99 | 2 | 3.20 | 0.50 | 0.23 | 0.17 | 0.02 | 0.02 | 3 |
| G029017 | 41.75 | 12.66 | 2 | 90.90 | 1.36 | 0.55 | 0.01 | 7.28 | 1.08 | 3 |
| G029018 | 45.05 | 4.74 | 2 | 46.49 | 0.66 | 0.41 | 0.09 | 3.13 | 0.17 | 3 |
| G029019 | 44.70 | 4.81 | 2 | 59.06 | 0.13 | 0.42 | 0.04 | 0.30 | 0.05 | 3 |
| G029020 | 37.85 | 3.46 | 2 | 40.66 | 0.14 | 0.52 | 0.15 | 0.31 | 0.04 | 3 |
| G029021 | 31.35 | 1.91 | 2 | 31.25 | 1.13 | 0.38 | 0.06 | 0.17 | 0.04 | 3 |
| G029022 | 38.60 | 0.42 | 2 | 5.70 | 1.01 | 0.44 | 0.36 | 0.21 | 0.27 | 3 |
| G029023 | 38.90 | 3.68 | 2 | 14.55 | 0.94 | 0.77 | 0.11 | 0.03 | 0.04 | 3 |
| G029024 | 29.75 | 4.17 | 2 | 12.24 | 0.41 | 0.23 | 0.04 | 0.06 | 0.03 | 3 |
| G029025 | 41.05 | 5.30 | 2 | 12.60 | 0.73 | 0.32 | 0.06 | 0.35 | 0.15 | 3 |
| G029026 | 49.35 | 1.34 | 2 | 5.75 | 0.66 | 0.24 | 0.06 | 0.04 | 0.03 | 3 |
| G029027 | 54.25 | 2.90 | 2 | 1.45 | 0.07 | 0.30 | 0.06 | 0.75 | 0.14 | 3 |
| G029028 | 50.50 | 0.71 | 2 | 68.54 | 3.78 | 2.29 | 0.09 | 6.12 | 0.59 | 3 |
| G029029 | 88.00 | 2.69 | 2 | 78.07 | 3.53 | 0.97 | 0.36 | 0.18 | 0.10 | 3 |
| G029030 | 77.85 | 1.48 | 2 | 87.88 | 0.43 | 0.57 | 0.23 | 0.60 | 0.03 | 3 |
| G029031 | 62.70 | 0.42 | 2 | 75.45 | 1.67 | 0.15 | 0.06 | 0.05 | 0.00 | 3 |
| G029032 | 49.60 | 2.12 | 2 | 2.41 | 0.30 | 0.17 | 0.12 | 0.17 | 0.23 | 3 |
| G029033 | 69.60 | 1.84 | 2 | 58.57 | 3.90 | 0.49 | 0.14 | 1.09 | 0.58 | 3 |
| G029034 | 50.90 | 6.08 | 1 | 16.00 | 2.53 | 0.38 | 0.28 | 0.10 | 0.06 | 3 |
| G029035 | 75.00 | 8.91 | 2 | 69.61 | 3.67 | 0.40 | 0.15 | 1.75 | 0.31 | 3 |
| G029036 | 71.65 | 14.78 | 2 | 0.00 | 0.00 | 0.00 | 0.00 | 0.00 | 0.00 | 3 |
| G029037 | 41.85 | 8.27 | 2 | 33.36 | 3.21 | 0.58 | 0.18 | 0.93 | 0.12 | 3 |
| G029038 | 56.00 | 2.55 | 2 | 6.63 | 3.25 | 0.31 | 0.13 | 0.01 | 0.02 | 3 |
| G029039 | 50.15 | 1.20 | 2 | 12.85 | 18.84 | 1.01 | 1.16 | 0.00 | 0.00 | 3 |
| G029040 | 55.50 | 0.57 | 2 | 36.13 | 12.71 | 0.30 | 0.24 | 0.01 | 0.02 | 3 |
| G029041 | 70.00 | 2.97 | 2 | 29.51 | 1.69 | 0.51 | 0.16 | 0.11 | 0.02 | 3 |
| G029042 | 52.10 | 0.85 | 2 | 14.95 | 2.44 | 0.45 | 0.04 | 0.03 | 0.00 | 3 |
| G029043 | 52.65 | 4.45 | 2 | 8.31 | 0.36 | 0.43 | 0.18 | 0.05 | 0.02 | 3 |
| G029044 | 54.40 | 1.13 | 2 | 3.50 | 0.04 | 0.47 | 0.13 | 0.07 | 0.05 | 3 |
| G029045 | 48.30 | 1.56 | 2 | 5.11 | 0.72 | 0.24 | 0.09 | 0.04 | 0.03 | 3 |
| G029046 | 60.60 | 2.83 | 2 | 85.08 | 2.95 | 1.26 | 0.24 | 0.58 | 0.11 | 3 |
| G029047 | 48.00 | 5.80 | 2 | 91.28 | 2.37 | 1.44 | 0.43 | 2.26 | 0.66 | 3 |
| G029048 | 56.35 | 3.32 | 2 | 77.44 | 0.57 | 1.31 | 0.68 | 1.76 | 0.63 | 3 |
| G029049 | 41.15 | 8.56 | 2 | 7.42 | 0.23 | 0.09 | 0.04 | 1.55 | 2.65 | 3 |
| G029050 | 59.15 | 4.74 | 2 | 19.53 | 0.87 | 0.17 | 0.07 | 0.02 | 0.02 | 3 |
| G029051 | 51.60 | 5.66 | 2 | 9.63 | 0.80 | 0.15 | 0.05 | 0.07 | 0.03 | 3 |
| G029052 | 52.60 | 1.98 | 2 | 5.81 | 0.21 | 0.29 | 0.04 | 0.20 | 0.06 | 3 |
| G029053 | 49.25 | 1.48 | 2 | 0.37 | 0.07 | 0.20 | 0.06 | 0.16 | 0.23 | 3 |
| G029054 | 47.60 | 11.03 | 2 | 3.23 | 0.11 | 0.14 | 0.03 | 0.04 | 0.04 | 3 |
| G029055 | 50.10 | 8.77 | 2 | 2.06 | 0.27 | 0.10 | 0.06 | 0.02 | 0.01 | 3 |
| G029056 | 62.45 | 2.76 | 2 | 79.87 | 3.36 | 0.79 | 0.08 | 1.87 | 0.15 | 3 |
| G029057 | 53.20 | 3.82 | 2 | 4.50 | 0.24 | 0.26 | 0.12 | 0.03 | 0.01 | 3 |
| G029058 | 51.95 | 5.16 | 2 | 0.91 | 0.15 | 0.12 | 0.03 | 0.26 | 0.18 | 3 |
| G029059 | 52.55 | 6.29 | 2 | 1.25 | 0.11 | 0.21 | 0.06 | 0.29 | 0.23 | 3 |
| G029060 | 43.25 | 3.46 | 2 | 0.45 | 0.11 | 0.18 | 0.10 | 0.22 | 0.17 | 3 |
| G029061 | 41.30 | 8.63 | 1 | 27.96 | 2.63 | 0.33 | 0.15 | 0.55 | 0.11 | 3 |
| G029062 | 57.55 | 0.21 | 2 | 65.48 | 5.49 | 1.08 | 0.15 | 4.29 | 2.51 | 3 |
| G029063 | 72.90 | 0.71 | 2 | 63.82 | 6.02 | 1.43 | 0.25 | 0.19 | 0.07 | 3 |
| G029064 | 50.15 | 4.31 | 2 | 8.25 | 1.52 | 0.38 | 0.07 | 0.60 | 0.30 | 3 |
| G029065 | 45.90 | 2.12 | 2 | 19.00 | 1.71 | 1.61 | 0.46 | 0.41 | 0.37 | 3 |
| G029066 | 43.80 | 7.07 | 2 | 1.93 | 0.50 | 0.95 | 0.24 | 0.08 | 0.03 | 3 |
| G029067 | 45.75 | 0.78 | 2 | 2.32 | 0.48 | 0.78 | 0.27 | 0.06 | 0.02 | 3 |
| G029068 | 44.55 | 0.35 | 2 | 3.58 | 0.11 | 0.14 | 0.05 | 0.04 | 0.03 | 3 |
| G029069 | 52.75 | 3.46 | 2 | 32.35 | 0.63 | 0.35 | 0.02 | 0.10 | 0.05 | 3 |
| G029070 | 73.30 | 4.38 | 2 | 92.11 | 0.53 | 1.28 | 0.22 | 0.67 | 0.14 | 3 |
| G029071 | 50.65 | 1.06 | 2 | 35.16 | 2.51 | 0.29 | 0.08 | 0.19 | 0.10 | 3 |
| G029072 | 42.35 | 2.33 | 2 | 1.47 | 0.07 | 0.27 | 0.03 | 0.05 | 0.04 | 3 |
| G029073 | 41.30 | 9.48 | 2 | 46.89 | 2.53 | 0.66 | 0.23 | 0.21 | 0.15 | 3 |
| G029074 | 52.20 | 0.14 | 2 | 48.77 | 3.02 | 0.61 | 0.04 | 0.19 | 0.08 | 3 |
| G029075 | 49.30 | 1.13 | 2 | 12.47 | 1.16 | 0.69 | 0.19 | 0.76 | 0.82 | 3 |
| G029076 | 43.45 | 3.04 | 2 | 17.10 | 0.40 | 0.47 | 0.05 | 0.79 | 0.97 | 3 |
| G029077 | 48.20 | 2.55 | 2 | 6.55 | 1.34 | 0.16 | 0.12 | 0.14 | 0.03 | 3 |
| G029078 | 43.30 | 0.42 | 2 | 9.78 | 0.71 | 1.18 | 0.12 | 0.07 | 0.07 | 3 |
| G029079 | 58.65 | 0.35 | 2 | 56.55 | 3.15 | 1.49 | 0.10 | 0.41 | 0.04 | 3 |
| G029080 | 50.35 | 0.21 | 2 | 11.06 | 0.91 | 1.24 | 0.14 | 0.07 | 0.03 | 3 |
| G029081 | 85.40 | 1.84 | 2 | 69.63 | 4.27 | 1.26 | 0.21 | 0.57 | 0.31 | 3 |
| G029082 | 51.85 | 4.17 | 2 | 9.09 | 2.32 | 1.87 | 0.85 | 0.04 | 0.04 | 3 |
| G029083 | 46.55 | 0.35 | 2 | 6.81 | 2.37 | 1.21 | 0.07 | 0.03 | 0.03 | 3 |
| G029084 | 46.60 | 12.16 | 2 | 35.64 | 9.40 | 0.94 | 0.55 | 0.40 | 0.14 | 3 |
| G029085 | 38.40 | 7.50 | 2 | 92.18 | 1.18 | 1.09 | 0.03 | 1.98 | 0.05 | 3 |
| G029086 | 44.85 | 2.47 | 2 | 7.25 | 0.44 | 0.34 | 0.08 | 0.73 | 0.16 | 3 |
| G029087 | 47.30 | 0.28 | 2 | 17.14 | 1.34 | 0.43 | 0.07 | 0.75 | 0.17 | 3 |
| G029088 | 49.85 | 4.17 | 2 | 30.15 | 3.86 | 0.20 | 0.34 | 0.22 | 0.38 | 3 |
| G029089 | 45.00 | 0.28 | 2 | 2.98 | 0.25 | 0.66 | 0.38 | 0.10 | 0.05 | 3 |
| G029090 | 39.10 | 2.26 | 2 | 8.97 | 0.53 | 0.39 | 0.20 | 0.34 | 0.13 | 3 |
| G029091 | 40.05 | 3.18 | 2 | 25.28 | 4.23 | 3.02 | 2.63 | 0.31 | 0.28 | 3 |
| G029092 | 49.50 | 0.99 | 2 | 90.70 | 4.31 | 3.27 | 2.57 | 3.66 | 0.69 | 3 |
| G029093 | 46.70 | 7.07 | 2 | 0.39 | 0.05 | 2.79 | 2.28 | 0.08 | 0.07 | 3 |
| G029094 | 46.40 | 4.81 | 2 | 11.75 | 0.73 | 0.98 | 0.08 | 0.33 | 0.10 | 3 |
| G029095 | 42.75 | 7.57 | 2 | 3.37 | 0.46 | 0.89 | 0.17 | 0.11 | 0.05 | 3 |
| G029096 | 33.95 | 4.60 | 2 | 19.19 | 4.61 | 0.94 | 0.18 | 0.33 | 0.19 | 3 |
| G029097 | 33.90 | 1.70 | 2 | 85.22 | 0.86 | 1.66 | 0.16 | 6.17 | 0.23 | 3 |
| G029098 | 45.70 | 1.41 | 2 | 55.36 | 3.68 | 0.96 | 0.14 | 0.35 | 0.16 | 3 |
| G029099 | 42.75 | 0.64 | 2 | 11.94 | 1.85 | 1.17 | 0.08 | 0.14 | 0.06 | 3 |
| G029100 | 34.55 | 0.49 | 2 | 4.72 | 0.45 | 1.52 | 0.56 | 0.13 | 0.15 | 3 |
| G029101 | 40.95 | 0.21 | 2 | 1.72 | 0.44 | 1.16 | 0.39 | 0.07 | 0.06 | 3 |
| G029102 | 35.40 | 1.98 | 2 | 0.44 | 0.13 | 0.50 | 0.05 | 0.08 | 0.05 | 3 |
| G029103 | 32.20 | 0.99 | 2 | 2.30 | 0.43 | 0.35 | 0.24 | 0.10 | 0.13 | 4 |
| G029104 | 50.40 | 5.52 | 2 | 34.26 | 1.13 | 0.94 | 0.21 | 0.38 | 0.18 | 4 |
| G029105 | 38.05 | 1.34 | 2 | 93.46 | 0.85 | 1.80 | 0.13 | 3.54 | 0.79 | 4 |
| G029106 | 43.05 | 3.18 | 2 | 24.88 | 0.99 | 0.31 | 0.07 | 0.09 | 0.06 | 4 |
| G029107 | 49.40 | 2.97 | 2 | 39.56 | 2.80 | 0.35 | 0.05 | 0.28 | 0.02 | 4 |
| G029108 | 39.05 | 9.69 | 2 | 31.33 | 5.11 | 0.27 | 0.02 | 0.15 | 0.05 | 4 |
| G029109 | 71.15 | 0.92 | 2 | 89.12 | 9.14 | 8.05 | 8.87 | 0.79 | 0.20 | 4 |
| G029110 | 37.25 | 0.78 | 2 | 53.06 | 3.72 | 1.41 | 0.60 | 0.45 | 0.15 | 4 |
| G029111 | 35.20 | 2.40 | 2 | 43.21 | 4.33 | 1.02 | 0.22 | 0.47 | 0.25 | 4 |
| G029112 | 41.90 | 0.42 | 2 | 4.38 | 0.37 | 0.67 | 0.21 | 0.22 | 0.20 | 4 |
| G029113 | 41.30 | 9.19 | 2 | 11.35 | 0.91 | 0.66 | 0.04 | 0.45 | 0.16 | 4 |
| G029114 | 34.00 | 3.96 | 2 | 8.69 | 0.44 | 0.63 | 0.08 | 0.27 | 0.03 | 4 |
| G029115 | 45.35 | 11.67 | 2 | 50.53 | 1.40 | 0.99 | 0.19 | 2.22 | 0.77 | 4 |
| G029116 | 59.55 | 4.88 | 2 | 31.29 | 2.75 | 0.81 | 0.09 | 0.49 | 0.24 | 4 |
| G029117 | 81.45 | 0.35 | 2 | 91.14 | 1.77 | 2.68 | 1.60 | 0.41 | 0.10 | 4 |
| G029118 | 51.90 | 1.27 | 2 | 16.93 | 0.68 | 1.79 | 0.61 | 0.89 | 0.47 | 4 |
| G029119 | 63.15 | 5.30 | 2 | 46.34 | 0.58 | 1.54 | 0.39 | 0.65 | 0.16 | 4 |
| G029120 | 55.30 | 2.69 | 2 | 12.79 | 0.80 | 0.47 | 0.14 | 0.13 | 0.06 | 4 |
| G029121 | 56.15 | 3.32 | 2 | 16.62 | 0.64 | 0.62 | 0.17 | 0.07 | 0.05 | 4 |
| G029122 | 55.30 | 8.34 | 2 | 3.08 | 1.96 | 0.20 | 0.27 | 0.10 | 0.17 | 4 |
| G029123 | 90.80 | 0.99 | 2 | 89.28 | 0.71 | 0.63 | 0.94 | 0.17 | 0.22 | 4 |
| G029124 | 65.90 | 3.39 | 2 | 43.34 | 6.94 | 0.19 | 0.13 | 0.42 | 0.28 | 4 |
| G029125 | 54.35 | 4.31 | 2 | 11.68 | 3.17 | 0.23 | 0.27 | 0.06 | 0.07 | 4 |
| G029126 | 37.75 | 0.49 | 2 | 12.13 | 1.22 | 0.58 | 0.19 | 0.47 | 0.40 | 4 |
| G029127 | 45.20 | 7.07 | 2 | 5.05 | 1.26 | 0.28 | 0.32 | 0.06 | 0.08 | 4 |
| G029128 | 81.55 | 2.05 | 2 | 88.85 | 2.04 | 0.82 | 0.29 | 2.03 | 0.33 | 4 |
| G029129 | 75.35 | 5.02 | 2 | 51.88 | 0.94 | 0.49 | 0.04 | 0.86 | 0.13 | 4 |
| G029130 | 58.20 | 8.77 | 2 | 18.50 | 1.66 | 0.40 | 0.15 | 1.43 | 0.40 | 4 |
| G029131 | 93.15 | 1.91 | 2 | 93.47 | 1.53 | 0.78 | 0.37 | 1.63 | 0.67 | 4 |
| G029132 | 53.50 | 8.20 | 2 | 4.52 | 0.15 | 0.53 | 0.11 | 0.05 | 0.03 | 4 |
| G029133 | 63.55 | 1.91 | 2 | 44.52 | 1.48 | 1.33 | 0.30 | 0.99 | 0.51 | 4 |
| G029134 | 47.70 | 1.98 | 2 | 7.17 | 1.32 | 1.32 | 0.54 | 0.34 | 0.31 | 4 |
| G029135 | 43.25 | 61.16 | 2 | 85.48 | 1.21 | 1.52 | 0.31 | 10.28 | 1.03 | 4 |
| G029136 | 52.75 | 2.47 | 2 | 10.14 | 0.23 | 1.00 | 0.46 | 0.13 | 0.06 | 4 |
| G029137 | 65.90 | 0.57 | 2 | 50.89 | 1.82 | 1.30 | 0.57 | 0.27 | 0.07 | 4 |
| G029138 | 57.60 | 6.79 | 2 | 38.26 | 1.45 | 2.03 | 0.49 | 0.25 | 0.05 | 4 |
| G029139 | 48.30 | 1.27 | 2 | 16.01 | 0.82 | 1.37 | 1.10 | 0.06 | 0.06 | 4 |
| G029140 | 75.15 | 0.07 | 2 | 47.78 | 3.71 | 1.10 | 0.64 | 0.17 | 0.06 | 4 |
| G029141 | 69.90 | 3.82 | 2 | 34.65 | 1.70 | 0.93 | 0.61 | 0.32 | 0.39 | 4 |
| G029142 | 60.95 | 3.75 | 2 | 15.07 | 1.14 | 0.89 | 0.68 | 0.06 | 0.06 | 4 |
| G029143 | 67.65 | 1.06 | 2 | 36.84 | 1.93 | 0.63 | 0.32 | 0.18 | 0.09 | 4 |
| G029144 | 56.70 | 2.55 | 2 | 5.40 | 0.54 | 0.44 | 0.31 | 0.04 | 0.02 | 4 |
| G029145 | 54.40 | 9.48 | 2 | 0.78 | 0.04 | 0.68 | 0.53 | 0.18 | 0.17 | 4 |
| G029146 | 63.20 | 8.63 | 2 | 63.58 | 3.19 | 0.93 | 0.80 | 1.93 | 0.28 | 4 |
| G029147 | 56.05 | 1.20 | 2 | 10.86 | 0.91 | 0.66 | 0.41 | 0.05 | 0.04 | 4 |
| G029148 | 51.95 | 0.49 | 2 | 1.50 | 0.36 | 0.35 | 0.20 | 0.04 | 0.03 | 4 |
| G029149 | 59.30 | 2.69 | 2 | 3.23 | 0.18 | 0.49 | 0.15 | 0.14 | 0.08 | 4 |
| G029150 | 49.40 | 1.70 | 2 | 46.90 | 1.43 | 1.09 | 0.23 | 0.89 | 0.15 | 4 |
| G029151 | 52.95 | 9.83 | 2 | 9.70 | 0.57 | 0.59 | 0.42 | 0.89 | 0.12 | 4 |
| G029152 | 56.90 | 3.11 | 2 | 1.80 | 0.23 | 1.06 | 1.52 | 3.20 | 3.20 | 4 |
| G029153 | 52.90 | 4.95 | 2 | 0.23 | 0.10 | 0.65 | 0.27 | 0.29 | 0.20 | 4 |
| G029154 | 54.45 | 4.88 | 2 | 1.15 | 0.38 | 0.49 | 0.12 | 0.85 | 0.61 | 4 |
| G029155 | 56.70 | 0.28 | 2 | 14.72 | 1.08 | 0.67 | 0.12 | 0.44 | 0.42 | 4 |
| G029156 | 53.75 | 0.35 | 2 | 6.87 | 0.62 | 0.73 | 0.14 | 0.13 | 0.11 | 4 |
| G029157 | 56.25 | .06 | 2 | 3.13 | 0.37 | 0.78 | 0.10 | 0.20 | 0.09 | 4 |
| G029158 | 51.60 | 3.96 | 2 | 7.70 | 0.81 | 1.02 | 0.02 | 0.10 | 0.03 | 4 |
| G029159 | 56.45 | 1.20 | 2 | 8.61 | 0.59 | 1.16 | 0.19 | 0.18 | 0.03 | 4 |
| G029160 | 72.15 | 5.02 | 2 | 50.61 | 2.24 | 3.06 | 2.44 | 1.28 | 0.34 | 4 |
| G029161 | 59.45 | 2.62 | 2 | 1.81 | 0.22 | 0.39 | 0.18 | 0.07 | 0.04 | 4 |
| G029162 | 50.50 | 2.12 | 2 | 17.38 | 1.22 | 0.93 | 0.50 | 3.06 | 2.91 | 4 |
| G029163 | 46.55 | 9.97 | 2 | 11.23 | 0.99 | 0.57 | 0.18 | 0.04 | 0.03 | 4 |
| G029164 | 67.15 | 2.33 | 2 | 58.31 | 3.24 | 0.96 | 0.32 | 0.92 | 0.73 | 4 |
| G029165 | 53.65 | 4.17 | 2 | 0.71 | 0.24 | 0.19 | 0.14 | 0.42 | 0.49 | 4 |
| G029166 | 53.45 | 0.35 | 2 | 29.13 | 1.23 | 0.48 | 0.08 | 0.27 | 0.20 | 4 |
| G029167 | 66.60 | 1.84 | 2 | 32.25 | 1.39 | 1.11 | 0.13 | 0.15 | 0.23 | 4 |
| G029168 | 50.20 | 6.93 | 2 | 1.25 | 0.27 | 0.93 | 0.53 | 0.13 | 0.20 | 4 |
| G029169 | 49.80 | 6.51 | 2 | 0.89 | 1.05 | 0.47 | 0.55 | 0.05 | 0.07 | 4 |
| G029170 | 49.35 | 5.4 | 2 | 0.00 | 0.00 | 0.00 | 0.00 | 0.00 | 0.00 | |
| G029171 | 84.10 | 0.00 | 2 | 0.00 | 0.00 | 0.00 | 0.00 | 0.00 | 0.00 | |
| G029172 | 95.20 | 0.42 | 2 | 90.18 | 1.06 | 1.15 | 0.09 | 1.95 | 0.62 | 4 |
| G029173 | 72.50 | 4.95 | 2 | 45.16 | 1.85 | 0.93 | 0.03 | 1.85 | 1.06 | 4 |
| G029174 | 59.55 | 5.59 | 2 | 6.11 | 0.81 | 0.58 | 0.06 | 0.10 | 0.05 | 4 |
| G029175 | 49.80 | 3.25 | 2 | 0.28 | 0.10 | 0.29 | 0.19 | 5.18 | 4.22 | 4 |
| G029176 | 48.35 | 4.88 | 2 | 3.15 | 0.46 | 0.23 | 0.16 | 4.47 | 2.55 | 4 |
| G029177 | 79.80 | 1.41 | 2 | 83.07 | 2.06 | 0.76 | 0.11 | 2.00 | 1.95 | 4 |
| G029178 | 53.80 | 0.85 | 2 | 34.52 | 8.46 | 0.41 | 0.17 | 2.52 | 2.17 | 4 |
| G029179 | 51.45 | 7.14 | 2 | 22.28 | 2.43 | 0.24 | 0.04 | 1.25 | 1.31 | 4 |
| G029180 | 51.75 | 4.88 | 2 | 58.42 | 2.55 | 1.21 | 0.13 | 0.21 | 0.05 | 4 |
| G029181 | 51.15 | 4.88 | 2 | 9.33 | 0.23 | 0.67 | 0.30 | 0.14 | 0.14 | 4 |
| G029182 | 49.95 | 2.76 | 2 | 7.53 | 0.57 | 0.83 | 0.09 | 0.29 | 0.24 | 4 |
| G029183 | 49.20 | 2.12 | 2 | 27.27 | 1.48 | 1.14 | 0.21 | 0.45 | 0.36 | 4 |
| G029184 | 36.70 | 2.83 | 2 | 23.25 | 2.15 | 0.36 | 0.20 | 0.11 | 0.05 | 4 |
| G029185 | 42.00 | 4.81 | 2 | 11.98 | 2.17 | 0.33 | 0.14 | 0.11 | 0.09 | 4 |
| G029186 | 55.05 | 2.76 | 2 | 19.73 | 0.53 | 0.41 | 0.18 | 0.15 | 0.05 | 4 |
| G029187 | 59.60 | 1.56 | 2 | 12.22 | 1.40 | 0.79 | 0.13 | 0.04 | 0.04 | 4 |
| G029188 | 57.50 | 7.21 | 2 | 6.53 | 0.36 | 0.41 | 0.35 | 0.20 | 0.16 | 4 |
| G029189 | 49.20 | 4.38 | 2 | 0.13 | 0.04 | 0.65 | 0.22 | 0.04 | 0.05 | 4 |
| G029190 | 44.05 | 2.76 | 2 | 0.40 | 0.09 | 0.54 | 0.19 | 0.04 | 0.04 | 4 |

8.2. Screening of CIITA Guide RNAs with Nme2 Cas9

[0876] Additional sgRNAs targeting CIITA were screened for efficacy in T cells by assessing loss of HLA-DP/DQ/DR cell surface expression by flow cytometry and editing by NGS, following CIITA editing by mRNA delivery.

8.2.1 T Cell Preparation and Editing with RNA Electroporation

[0877] T cells were prepared as described in Example 1 using 2.5% o human AB serum (GeminiBio, Cat. 100-512) in the T Cell growth media. T cells were electroporated with sgRNA targeting the CIITA gene using mRNA electroporation as described in Example 1 except for the following differences. This study used mRNA encoding Nme2 Cas9 (SEQ ID No: 826) instead of mRNAs encoding Nme2 BC22n base editor and UGI, respectively.

[0878] Cas9 electroporation mix was prepared with 1×10⁵ T cells, 30 ng/L of Nme2 Cas9 mRNA and 40 pmols of sgRNA in a final volume of 20 μL of P3 electroporation buffer.

### 8.2.2 Flow Cytometry and NGS Sequencing

[0879] On day 7 post-electroporation, edited T cell samples were collected and subjected to PCR and NGS analysis as described in Example 1. On day 13 post-editing, cells were phenotyped by flow cytometry to determine HLA II-DR, DP, DQ protein expression. Briefly, T cells were incubated for 30 min at 4° C. with a mixture of antibodies against CD3 (BioLegend, Cat. No. 317338), CD4 (BioLegend, Cat. No. 317434), CD8 (BioLegend, Cat. No. 301046), Viakrome (Beckman Coulter, Cat. No. C36628) diluted at 1:100, and HLA II-DR, DP, DQ (BioLegend, Cat. No. 361706) diluted at 1:50 in cell staining buffer (BioLegend, Cat. No. 420201) to determine HLA-DP, DQ, DR protein expression. T cells were gated based on size, shape, viability, CD3, CD8, and HLA II-DR, DP, DQ, expression.

[0880] Table 15 shows the percentage of T cells with loss of HLA II and mean percent editing of the CIITA gene. FIG. 8 shows percentage of HLA II-DR, DP, DQ negative cells edited with Nme2 Cas9 on the left vertical axis and mean percent editing on the right vertical axis.

TABLE 15
Mean percentage of HLA II-DP, DR, DQ negative cells; Mean percent
indels oatthe CIITA locus as a percentage of total NGS reads

| | | CD8+, HLA-DP, |
|---|---|---|
| Guide | % INdels | DQ, DR− |

| ID | Mean | SD | Mean | SD | N |
|---|---|---|---|---|---|
| Untreated | | | 40.25 | 0.05 | 2 |
| G023421 | 2.55 | 0.25 | 45.2 | 8.1 | 2 |
| G023422 | 1.1 | 0 | 46.4 | 5.1 | 2 |
| G023423 | 1.7 | 0.4 | 47.7 | 1.7 | 2 |
| G023424 | 0.35 | 0.05 | 44.45 | 1.25 | 2 |
| G023425 | 0.65 | 0.55 | 46.25 | 2.95 | 2 |
| G023426 | 7.7 | 2.1 | 50.15 | 1.55 | 2 |
| G023427 | 0.5 | 0.1 | 46.15 | 4.35 | 2 |
| G023428 | 0.15 | 0.05 | 50.4 | 0.4 | 2 |
| G023429 | 0.9 | 0.1 | 48.15 | 2.35 | 2 |
| G023430 | 0.1 | 0 | 50.3 | 1.5 | 2 |
| G023431 | 1.55 | 0.35 | 50.8 | 1.6 | 2 |
| G023432 | 0.15 | 0.05 | 52.45 | 0.85 | 2 |
| G023433 | 0.15 | 0.05 | 46.25 | 0.65 | 2 |
| G023434 | 2.1 | 0.2 | 49.85 | 0.05 | 2 |
| G023435 | 0.65 | 0.05 | 52.05 | 0.85 | 2 |
| G023436 | 0.35 | 0.05 | 53.5 | 1.4 | 2 |
| G023437 | 0.9 | 0.1 | 52.1 | 0.1 | 2 |
| G023438 | 0.15 | 0.15 | 53.15 | 1.35 | 2 |
| G023439 | 0.1 | 0 | 51.05 | 0.25 | 2 |
| G023440 | 0.35 | 0.15 | 54.35 | 1.05 | 2 |
| G023441 | 25.4 | 1.1 | 59.7 | 4.3 | 2 |
| G023442 | 0.2 | 0 | 57.75 | 1.55 | 2 |
| G023443 | 18.65 | 0.25 | 69.15 | 15.05 | 2 |
| G023444 | 28.15 | 6.05 | 58.65 | 1.85 | 2 |
| G023445 | 2.45 | 0.35 | 55.25 | 0.15 | 2 |
| G023446 | 0.9 | 0.3 | 49.15 | 0.55 | 2 |
| G023447 | 0.35 | 0.15 | 54.45 | 3.75 | 2 |
| G023448 | 0.2 | 0 | 51.5 | 0.6 | 2 |
| G023449 | 0 | 0 | 53.6 | 3 | 2 |
| G023450 | 0.1 | 0 | 54 | 2.3 | 2 |
| G023451 | 0.15 | 0.05 | 51.05 | 2.75 | 2 |
| G023452 | 0.55 | 0.15 | 52.75 | 2.45 | 2 |
| G023453 | 0.1 | 0 | 52.85 | 3.55 | 2 |
| G023454 | 0.35 | 0.15 | 55.65 | 4.35 | 2 |
| G023455 | 0.25 | 0.05 | 53.3 | 4.2 | 2 |
| G023456 | 12.8 | 2 | 56 | 3 | 2 |
| G023457 | 0.35 | 0.05 | 55.85 | 3.75 | 2 |
| G023458 | 1 | 0.3 | 52 | 3.2 | 2 |
| G023459 | 1.3 | 0.4 | 51.15 | 3.05 | 2 |
| G023460 | 0.45 | 0.05 | 53.75 | 1.35 | 2 |
| G023461 | 0.45 | 0.05 | 53.25 | 1.65 | 2 |
| G023462 | 1.05 | 0.15 | 52.2 | 4 | 2 |
| G023463 | 0.2 | 0 | 51.15 | 3.95 | 2 |
| G023464 | 6.6 | 1 | 54.1 | 1 | 2 |
| G023465 | 0.05 | 0.05 | 52.45 | 0.45 | 2 |
| G023466 | 0.2 | 0.2 | 51.2 | 2.7 | 2 |
| G023467 | 0.2 | 0 | 54.75 | 2.45 | 2 |
| G023468 | 3.25 | 0.15 | 58.3 | 3.9 | 2 |
| G023469 | 1.6 | 0.1 | 56.85 | 4.55 | 2 |
| G023470 | 0.1 | 0 | 54.25 | 2.95 | 2 |
| G023471 | 0.55 | 0.25 | 53.65 | 4.05 | 2 |
| G023472 | 0.1 | 0 | 53.2 | 1.7 | 2 |
| G023473 | 2.5 | 1 | 57.2 | 2.3 | 2 |
| G023474 | 0.6 | 0.1 | 57.65 | 1.75 | 2 |
| G023475 | 12.75 | 1.05 | 58.65 | 2.25 | 2 |
| G023476 | 10.9 | 1.3 | 58.25 | 1.05 | 2 |
| G023477 | 93.8 | 1.1 | 80.45 | 3.95 | 2 |
| G023478 | 52.75 | 5.95 | 64.9 | 2.2 | 2 |
| G023479 | 13.75 | 2.05 | 58.85 | 0.25 | 2 |
| G023480 | 0.1 | 0 | 55.5 | 1.2 | 2 |
| G023481 | 0.2 | 0 | 54.8 | 1.4 | 2 |
| G023482 | 0.5 | 0.4 | 52.8 | 2.1 | 2 |
| G023483 | 0.1 | 0 | 53.35 | 2.65 | 2 |
| G023484 | 0.1 | 0 | 59.7 | 8.4 | 2 |
| G023485 | 0.25 | 0.05 | 50.2 | 0.2 | 2 |
| G023486 | 4.5 | 0.2 | 52.45 | 0.65 | 2 |
| G023487 | 0.4 | 0.1 | 52.85 | 3.35 | 2 |
| G023488 | 1.4 | 0.2 | 52 | 2.7 | 2 |
| G023489 | 0.15 | 0.05 | 52.85 | 2.35 | 2 |
| G023490 | 0.15 | 0.15 | 53.2 | 1.8 | 2 |
| G023491 | 1 | 0.2 | 53.45 | 0.95 | 2 |
| G023492 | 40.25 | 12.05 | 59.6 | 0.8 | 2 |
| G023493 | 0.8 | 0.4 | 56.7 | 0.9 | 2 |
| G023494 | 0.3 | 0.2 | 51.55 | 2.35 | 2 |
| G023495 | 1.5 | 1.3 | 53.25 | 1.05 | 2 |
| G023496 | 0.1 | 0 | 52.05 | 3.15 | 2 |
| G023497 | 0.05 | 0.05 | 52.85 | 0.35 | 2 |
| G023498 | 0.1 | 0 | 53 | 0.9 | 2 |
| G023499 | 0.4 | 0 | 53.65 | 4.05 | 2 |
| G023500 | 4.2 | 0.3 | 53.7 | 3 | 2 |
| G023501 | 3.1 | 0.1 | 51.95 | 2.35 | 2 |
| G023502 | 3.95 | 0.35 | 53.95 | 0.95 | 2 |
| G023503 | 2.95 | 0.05 | 53.5 | 3.5 | 2 |
| G023504 | 0.25 | 0.05 | 51.7 | 1.6 | 2 |
| G023505 | 4.1 | 0.1 | 52.9 | 1 | 2 |
| G023506 | 1.95 | 0.15 | 49.8 | 0.9 | 2 |
| G023507 | 1.3 | 1 | 53.2 | 3.4 | 2 |
| G023508 | 0.1 | 0 | 53.15 | 5.35 | 2 |
| G023509 | 0.15 | 0.05 | 51.85 | 0.85 | 2 |
| G023510 | 0.15 | 0.05 | 53.8 | 0.3 | 2 |
| G023511 | 0.25 | 0.05 | 51.75 | 0.25 | 2 |
| G023512 | 0.1 | 0 | 51.75 | 2.65 | 2 |
| G023513 | 0.1 | 0 | 53.85 | 2.35 | 2 |
| G023514 | 0.35 | 0.05 | 53.1 | 2.1 | 2 |
| G023515 | 0.1 | 0 | 51.95 | 0.95 | 2 |

### Example 9: Dose Response Curves (DRC) for Select CIITA Nme2 Guides

[0881] A titration experiment was conducted to evaluate the editing efficacy of select sgRNAs designed for the disruption of the CIITA gene by assessing loss of HLA DP, DQ, DR cell surface expression by flow cytometry and editing frequency at CIITA by NGS. HLA-DP, DR and DQ are cell surface proteins whose expression requires the transcription factor CIITA and thus their presence at the cell surface is a surrogate marker for CIITA protein expression.

[0882] An eight-point dose response curve was generated for each sgRNA by titrating each sgRNA with a fixed concentration of mRNA encoding Nme2 BC22n (SEQ ID NO:822) and mRNA encoding UGI (SEQ ID NO: 821) in T cells using electroporation. T cells were then expanded and phenotyped by flow cytometry to determine the editing efficiency of each sgRNA tested.

[0883] T cells were prepared single donor (no. 808) as described in Example 1. T cells were edited with serially diluted CIITA targeting sgRNAs (0, 0.94, 1.88, 3.75, 7.5, 15, 30, or 60 pmols) by mRNA electroporation as described in Example 1. On day 4 post-editing, T cell samples were collected and subjected to PCR and NGS analysis as described in Example 1. On day 7 post-editing, T cells were phenotyped by flow cytometry to determine HLA-DP, DQ, DR expression as described in Example 8. T cells were gated based on size, singularity, viability and CD8 positivity. Table 16 and FIG. 9A show the NGS editing results. Table 16 and FIG. 9B show the percentage of CD8+ T cells that are negative for HLA-DP, DQ, DR expression

TABLE 16

| | | | | | | | | | | % HLA II-DP, DQ, DR- of | | |
|---|---|---|---|---|---|---|---|---|---|---|---|---|
| sgRNA | C > T | | | C > A/G | | | Indels | | | CD8+ | | |
| (pmols) | Ave | SD | N | Ave | SD | N | Ave | SD | N | Ave | SD | N |

G029029

| | | | | | | | | | | | | |
|---|---|---|---|---|---|---|---|---|---|---|---|---|
| 60 | 90.74% | 1.38% | 2 | 1.62% | 0.27% | 2 | 0.43% | 0.08% | 2 | 91.95 | 1.77 | 2 |
| 30 | 42.49% | 0.45% | 2 | 1.70% | 0.22% | 2 | 0.15% | 0.04% | 2 | 69.45 | 1.20 | 2 |
| 15 | 25.50% | 2.00% | 2 | 1.64% | 0.17% | 2 | 0.11% | 0.05% | 2 | 58.1 | 3.25 | 2 |
| 7.5 | 13.63% | 0.29% | 2 | 1.96% | 0.12% | 2 | 0.05% | 0.00% | 2 | 52.7 | 0.99 | 2 |
| 3.75 | 7.08% | 0.37% | 2 | 1.58% | 0.16% | 2 | 0.07% | 0.00% | 2 | 50.35 | 2.33 | 2 |
| 1.88 | 3.08% | 0.13% | 2 | 1.49% | 0.20% | 2 | 0.04% | 0.00% | 2 | 45.2 | 2.40 | 2 |
| 0.94 | 1.46% | 0.34% | 2 | 1.42% | 0.19% | 2 | 0.03% | 0.01% | 2 | 47.15 | 1.48 | 2 |
| 0 | 0.04% | 0.00% | 2 | 2.51% | 1.11% | 2 | 0.03% | 0.02% | 2 | 45.3 | 4.81 | 2 |

G029081

| | | | | | | | | | | | | |
|---|---|---|---|---|---|---|---|---|---|---|---|---|
| 60 | 87.77% | 0.42% | 2 | 1.29% | 0.03% | 2 | 1.05% | 0.22% | 2 | 92.15 | 1.48 | 2 |
| 30 | 36.59% | 1.71% | 2 | 1.06% | 0.11% | 2 | 0.42% | 0.03% | 2 | 66.85 | 2.33 | 2 |
| 15 | 21.90% | 1.00% | 2 | 0.86% | 0.11% | 2 | 0.19% | 0.03% | 2 | 56.2 | 2.55 | 2 |
| 7.5 | 10.56% | 0.50% | 2 | 0.90% | 0.02% | 2 | 0.17% | 0.01% | 2 | 52.8 | 0.85 | 2 |
| 3.75 | 5.17% | 0.57% | 2 | 1.04% | 0.04% | 2 | 0.06% | 0.01% | 2 | 50.7 | 1.70 | 2 |
| 1.88 | 2.39% | 0.07% | 2 | 0.86% | 0.01% | 2 | 0.04% | 0.00% | 2 | 49.15 | 1.77 | 2 |
| 0.94 | 1.01% | 0.06% | 2 | 0.76% | 0.10% | 2 | 0.02% | 0.01% | 2 | 46.35 | 0.92 | 2 |
| 0 | 0.10% | 0.01% | 2 | 0.90% | 0.06% | 2 | 0.02% | 0.01% | 2 | 50.6 | 2.55 | 2 |

G029123

| | | | | | | | | | | | | |
|---|---|---|---|---|---|---|---|---|---|---|---|---|
| 60 | 97.68% | 0.04% | 2 | 0.47% | 0.66% | 2 | 0.46% | 0.01% | 2 | 95.45 | 0.07 | 2 |
| 30 | 53.86% | 0.40% | 2 | 0.19% | 0.27% | 2 | 0.00% | 0.00% | 2 | 72.5 | 1.70 | 2 |
| 15 | 31.51% | 2.00% | 2 | 0.23% | 0.33% | 2 | 0.00% | 0.00% | 2 | 62.8 | 3.25 | 2 |
| 7.5 | 16.83% | 2.14% | 2 | 0.00% | 0.00% | 2 | 0.00% | 0.00% | 2 | 56.25 | 0.35 | 2 |
| 3.75 | 7.72% | 2.36% | 2 | 0.56% | 0.21% | 2 | 0.18% | 0.25% | 2 | 52.35 | 0.07 | 2 |
| 1.88 | 3.37% | 0.94% | 2 | 0.34% | 0.48% | 2 | 0.00% | 0.00% | 2 | 48.4 | 0.14 | 2 |
| 0.94 | 0.39% | 0.05% | 2 | 0.18% | 0.25% | 2 | 0.00% | 0.00% | 2 | 48.9 | 0.85 | 2 |
| 0 | 0.00% | 0.00% | 2 | 0.00% | 0.00% | 2 | 0.00% | 0.00% | 2 | 47.3 | 3.25 | 2 |

G029128

| | | | | | | | | | | | | |
|---|---|---|---|---|---|---|---|---|---|---|---|---|
| 60 | 94.41% | 0.63% | 2 | 0.50% | 0.08% | 2 | 2.61% | 0.21% | 2 | 86.6 | 1.98 | 2 |
| 30 | 61.36% | 0.04% | 2 | 0.47% | 0.07% | 2 | 1.57% | 0.13% | 2 | 67.6 | 1.98 | 2 |
| 15 | 41.10% | 1.11% | 2 | 0.26% | 0.01% | 2 | 1.11% | 0.11% | 2 | 64.3 | 3.39 | 2 |
| 7.5 | 24.54% | 0.03% | 2 | 0.23% | 0.06% | 2 | 1.05% | 0.08% | 2 | 56.4 | 1.70 | 2 |
| 3.75 | 11.39% | 0.16% | 2 | 0.17% | 0.04% | 2 | 0.72% | 0.03% | 2 | 52.85 | 0.49 | 2 |
| 1.88 | 4.88% | 0.50% | 2 | 0.17% | 0.02% | 2 | 0.67% | 0.08% | 2 | 50.1 | 0.99 | 2 |
| 0.94 | 1.90% | 0.02% | 2 | 0.15% | 0.00% | 2 | 0.63% | 0.06% | 2 | 49.85 | 0.21 | 2 |
| 0 | 0.20% | 0.01% | 2 | 0.16% | 0.07% | 2 | 0.60% | 0.06% | 2 | 46.45 | 1.20 | 2 |

G029131

| | | | | | | | | | | | | |
|---|---|---|---|---|---|---|---|---|---|---|---|---|
| 60 | 94.92% | 0.02% | 2 | 1.48% | 0.09% | 2 | 1.86% | 0.22% | 2 | 95.3 | 0.99 | 2 |
| 30 | 79.21% | 2.08% | 2 | 1.49% | 0.07% | 2 | 1.24% | 0.02% | 2 | 86.75 | 4.74 | 2 |
| 15 | 64.70% | 2.53% | 2 | 1.03% | 0.15% | 2 | 0.65% | 0.32% | 2 | 79.85 | 0.21 | 2 |
| 7.5 | 41.12% | 2.09% | 2 | 1.32% | 0.35% | 2 | 0.38% | 0.02% | 2 | 70.3 | 0.57 | 2 |
| 3.75 | 23.58% | 0.18% | 2 | 1.20% | 0.06% | 2 | 0.27% | 0.05% | 2 | 60.1 | 1.70 | 2 |
| 1.88 | 11.88% | 0.04% | 2 | 1.20% | 0.14% | 2 | 0.23% | 0.09% | 2 | 55.15 | 1.06 | 2 |
| 0.94 | 4.51% | 0.14% | 2 | 1.05% | 0.11% | 2 | 0.15% | 0.01% | 2 | 50.2 | 1.56 | 2 |
| 0 | 0.26% | 0.04% | 2 | 1.07% | 0.15% | 2 | 0.10% | 0.02% | 2 | 44.95 | 0.49 | 2 |

G029171

| | | | | | | | | | | | | |
|---|---|---|---|---|---|---|---|---|---|---|---|---|
| 60 | 81.24% | 3.07% | 2 | 1.68% | 0.07% | 2 | 0.80% | 0.15% | 2 | 94.4 | 1.98 | 2 |
| 30 | 26.12% | 2.63% | 2 | 1.70% | 0.16% | 2 | 0.21% | 0.08% | 2 | 63.25 | 3.46 | 2 |
| 15 | 15.27% | 1.25% | 2 | 1.81% | 0.12% | 2 | 0.29% | 0.07% | 2 | 56.95 | 0.35 | 2 |
| 7.5 | 8.44% | 0.58% | 2 | 1.43% | 0.01% | 2 | 0.21% | 0.08% | 2 | 53.6 | 0.28 | 2 |
| 3.75 | 4.16% | 0.26% | 2 | 1.78% | 0.11% | 2 | 0.17% | 0.05% | 2 | 53.9 | 2.12 | 2 |
| 1.88 | 2.45% | 0.10% | 2 | 1.67% | 0.03% | 2 | 0.20% | 0.00% | 2 | 51 | 4.10 | 2 |
| 0.94 | 1.49% | 0.23% | 2 | 2.86% | 2.01% | 2 | 0.78% | 0.82% | 2 | 50.75 | 2.76 | 2 |
| 0 | 0.16% | 0.02% | 2 | 1.51% | 0.14% | 2 | 0.18% | 0.01% | 2 | 47.15 | 1.06 | 2 |

G029172

| | | | | | | | | | | | | |
|---|---|---|---|---|---|---|---|---|---|---|---|---|
| 60 | 92.73% | 0.76% | 2 | 1.29% | 0.12% | 2 | 2.73% | 0.33% | 2 | 97.2 | 0.28 | 2 |
| 30 | 50.99% | 1.65% | 2 | 0.94% | 0.22% | 2 | 6.70% | 0.11% | 2 | 75.45 | 2.19 | 2 |
| 15 | 28.49% | 1.14% | 2 | 0.96% | 0.02% | 2 | 8.41% | 0.22% | 2 | 64.8 | 2.83 | 2 |
| 7.5 | 15.76% | 0.07% | 2 | 0.69% | 0.07% | 2 | 7.58% | 0.46% | 2 | 59.55 | 0.35 | 2 |
| 3.75 | 7.75% | 0.38% | 2 | 0.77% | 0.21% | 2 | 7.21% | 0.59% | 2 | 55.95 | 0.78 | 2 |
| 1.88 | 3.11% | 0.18% | 2 | 0.75% | 0.04% | 2 | 8.28% | 0.66% | 2 | 50.45 | 5.44 | 2 |
| 0.94 | 0.88% | 0.05% | 2 | 1.26% | 0.75% | 2 | 24.29% | 23.82% | 2 | 49.45 | 3.61 | 2 |
| 0 | 0.08% | 0.02% | 2 | 0.60% | 0.19% | 2 | 7.52% | 0.26% | 2 | 46.2 | 0.99 | 2 |

G026584

| | | | | | | | | | | | | |
|---|---|---|---|---|---|---|---|---|---|---|---|---|
| 60 | 95.17% | 0.99% | 2 | 1.26% | 0.25% | 2 | 2.17% | 0.03% | 2 | 99.05 | 0.07 | 2 |
| 30 | 84.51% | 1.04% | 2 | 1.59% | 0.03% | 2 | 1.86% | 0.12% | 2 | 93.45 | 0.07 | 2 |
| 15 | 70.25% | 0.04% | 2 | 1.26% | 0.05% | 2 | 1.92% | 0.01% | 2 | 86.35 | 2.47 | 2 |
| 7.5 | 49.19% | 2.18% | 2 | 1.19% | 0.32% | 2 | 1.29% | 0.07% | 2 | 76.45 | 2.05 | 2 |
| 3.75 | 27.90% | 2.71% | 2 | 0.84% | 0.15% | 2 | 0.92% | 0.24% | 2 | 66.15 | 0.92 | 2 |
| 1.88 | 10.85% | 0.07% | 2 | 1.01% | 0.14% | 2 | 0.93% | 0.19% | 2 | 52.75 | 7.00 | 2 |
| 0.94 | 3.17% | 0.16% | 2 | 1.11% | 0.06% | 2 | 1.21% | 0.03% | 2 | 49.4 | 1.56 | 2 |
| 0 | 0.08% | 0.03% | 2 | 1.01% | 0.26% | 2 | 1.35% | 0.53% | 2 | 43 | 2.83 | 2 |

G026585

| | | | | | | | | | | | | |
|---|---|---|---|---|---|---|---|---|---|---|---|---|
| 60 | 86.56% | 0.77% | 2 | 1.17% | 0.01% | 2 | 9.62% | 0.42% | 2 | 96.35 | 1.06 | 2 |
| 30 | 49.55% | 0.28% | 2 | 1.23% | 0.02% | 2 | 5.08% | 0.37% | 2 | 74.3 | 3.25 | 2 |
| 15 | 29.91% | 0.35% | 2 | 1.13% | 0.27% | 2 | 3.10% | 0.05% | 2 | 65.15 | 3.61 | 2 |
| 7.5 | 16.67% | 0.14% | 2 | 1.08% | 0.03% | 2 | 1.72% | 0.11% | 2 | 57.2 | 1.13 | 2 |
| 3.75 | 8.49% | 0.35% | 2 | 1.01% | 0.09% | 2 | 1.10% | 0.05% | 2 | 51.85 | 6.43 | 2 |
| 1.88 | 3.16% | 0.60% | 2 | 1.07% | 0.09% | 2 | 0.64% | 0.19% | 2 | 51.15 | 4.31 | 2 |
| 0.94 | 1.04% | 0.15% | 2 | 0.95% | 0.02% | 2 | 0.52% | 0.11% | 2 | 45.95 | 2.19 | 2 |
| 0 | 0.05% | 0.05% | 2 | 0.95% | 0.11% | 2 | 0.40% | 0.05% | 2 | 47.9 | 2.69 | 2 |

### Example 10: Screening of AAVS1 Guides with Nme2Cas9

[0884] Guide RNAs targeting AAVS1 were screened for editing efficacy in T cells by assessing editing by NGS, following AAVS1 editing by mRNA delivery.

T Cell Preparation and Editing with RNA Electroporation

[0885] T cells single donor (no. 613) were prepared as described in Example 1 using 2.5% human AB serum (GeminiBio, Cat. 100-512) in the T Cell growth media. T cells were electroporated with sgRNA targeting the AAVS1 gene using mRNA electroporation as described in Example 1 with the following exceptions.

[0886] This study used mRNA encoding Nme2 Cas9 (SEQ ID No: 825) instead of mRNAs encoding Nme2 BC22n base editor and UGI, respectively. Nme2 Cas9 electroporation mix was prepared with 1×10⁵ T cells, 30 ng/μL of Nme2Cas9 mRNA and 40 pmols of sgRNA in a final volume of 20 μL of P3 electroporation buffer. On day 7 post-electroporation, DNA samples were subjected to PCR and subsequent NGS analysis as described in Example 1.

[0887] Table 17 shows mean percent indels at the AAVS1 gene with Nme2Cas9 guides. FIGS. 10A-10B show editing at the AAVS1 gene represented as indel frequency.

TABLE 17
Mean percent indels at the AAVS1 locus
as a percentage of total NGS reads

| | | | Guide | | | |
|---|---|---|---|---|---|---|
| Guide ID | Mean | SD | ID | Mean | SD | N |
| G025808 | 0.6 | 0 | G025894 | 95.9 | 4.1 | 2 |
| G025809 | 0.25 | 0.05 | G025895 | 0.15 | 0.05 | 2 |
| G025810 | 2.3 | 0.3 | G025896 | 20.1 | 10.3 | 2 |
| G025811 | 4.25 | 0.45 | G025897 | 99.75 | 0.05 | 2 |
| G025812 | 0.2 | 0 | G025898 | 99.55 | 0.05 | 2 |
| G025813 | 0.3 | 0.1 | G025899 | 39.5 | 9.4 | 2 |
| G025814 | 0.45 | 0.05 | G025900 | 54.1 | 41.9 | 2 |
| G025815 | 0.3 | 0 | G025901 | 16.3 | 13.4 | 2 |
| G025816 | 0 | 0 | G02502 | 52.75 | 1.55 | 2 |
| G025817 | 0.9 | 0.1 | G025903 | 2.7 | 0.2 | 2 |
| G025818 | 65.55 | 2.25 | G025904 | 2.7 | 1.1 | 2 |
| G025819 | 0.35 | 0.05 | G025905 | 0.5 | 0 | 2 |
| G025820 | 1.1 | 0 | G025906 | 0.4 | 0 | 2 |
| G025821 | 3.8 | 0.3 | G025907 | 0.1 | 0 | 2 |
| G025822 | 41.7 | 3.8 | G025908 | 16.9 | 3.1 | 2 |
| G025823 | 0.35 | 0.05 | G025909 | 2.95 | 0.35 | 2 |
| G025824 | 11.25 | 3.95 | G025910 | 1.45 | 0.15 | 2 |
| G025825 | 3.95 | 1.55 | G025911 | 12.3 | 0.5 | 2 |
| G025826 | 1.25 | 0.65 | G025912 | 2.75 | 0.35 | 2 |
| G025827 | 89.3 | 2.6 | G025913 | 1.85 | 0.15 | 2 |
| G025828 | 32.05 | 2.95 | G025914 | 3.7 | 0.4 | 2 |
| G025829 | 98.1 | 1 | G025915 | 24.75 | 2.25 | 2 |
| G025830 | 48.45 | 5.65 | G025916 | 1.4 | 0.2 | 2 |
| G025831 | 39 | 3.9 | G025917 | 3.25 | 0.65 | 2 |
| G025832 | 52.9 | 5.1 | G025918 | 6.15 | 0.85 | 2 |
| G025833 | 82.15 | 3.55 | G025919 | 4.7 | 0.4 | 2 |
| G025834 | 89.75 | 0.75 | G025920 | 0.25 | 0.05 | 2 |
| G025835 | 92 | 0.8 | G025921 | 1.15 | 0.35 | 2 |
| G025836 | 98.55 | 0.05 | G025922 | 0.75 | 0.25 | 2 |
| G025837 | 37.35 | 0.15 | G025923 | 10.9 | 1.1 | 2 |
| G025838 | 1.7 | 0.7 | G025924 | 1.05 | 0.05 | 2 |
| G025839 | 99.2 | 0.3 | G025925 | 0.2 | 0 | 2 |
| G025840 | 68.55 | 11.45 | G025926 | 2.5 | 0.2 | 2 |
| G025841 | 97.45 | 0.45 | G025927 | 0.2 | 0 | 2 |
| G025842 | 3.45 | 0.05 | G025928 | 0.2 | 0 | 2 |
| G025843 | 43 | 2.7 | G025929 | 39.1 | 5 | 2 |
| G025844 | 0.1 | 0 | G025930 | 0.8 | 0.1 | 2 |
| G025845 | 13.5 | 0.6 | G025931 | 1.1 | 0.2 | 2 |
| G025846 | 0.9 | 0.1 | G025932 | 9.7 | 1.2 | 2 |
| G025847 | 0.55 | 0.15 | G025933 | 29.6 | 3.3 | 2 |
| G025848 | 3.9 | 0.3 | G025934 | 0.5 | 0 | 2 |
| G025849 | 38.4 | 0.3 | G025935 | 4.15 | 0.75 | 2 |
| G025850 | 6.7 | 0.2 | G025936 | 85.1 | 1.2 | 2 |
| G025851 | 1 | 0 | G025937 | 15.5 | 0.6 | 2 |
| G025852 | 0.15 | 0.05 | G025938 | 1.25 | 0.35 | 2 |
| G025853 | 0.25 | 0.05 | G025939 | 2.75 | 0.55 | 2 |
| G025854 | 15.85 | 0.05 | G025940 | 98.3 | 0.6 | 2 |
| G025855 | 27.4 | 2.3 | G025941 | 0.1 | 0 | 2 |
| G025856 | 0.95 | 0.05 | G025942 | 0.25 | 0.05 | 2 |
| G025857 | 4.9 | 0.2 | G025943 | 0.25 | 0.05 | 2 |
| G025858 | 0.3 | 0 | G025944 | 0.15 | 0.05 | 2 |
| G025859 | 1.55 | 0.15 | G025945 | 2.2 | 0.3 | 2 |
| G025860 | 0.2 | 0 | G025946 | 1.6 | 0.2 | 2 |
| G025861 | 0.25 | 0.05 | G025947 | 0.2 | 0 | 2 |
| G025862 | 0.15 | 0.05 | G025948 | 1.1 | 0.1 | 2 |
| G025863 | 88.6 | 1.4 | G025949 | 3.45 | 0.55 | 2 |
| G025864 | 10.55 | 0.55 | G025950 | 0.2 | 0 | 2 |
| G025865 | 2.7 | 0.1 | G025951 | 0.35 | 0.05 | 2 |
| G025866 | 98.35 | 0.05 | G025952 | 82.2 | 1.9 | 2 |
| G025867 | 98.75 | 0.05 | G025953 | 9.25 | 0.65 | 2 |
| G025868 | 89.85 | 0.05 | G025954 | 19.2 | 3.3 | 2 |
| G025869 | 3.1 | 0.1 | G025955 | 7.5 | 1.1 | 2 |
| G025870 | 15.45 | 2.15 | G025956 | 0.55 | 0.05 | 2 |
| G025871 | 0.3 | 0 | G025957 | 1 | 0.1 | 2 |
| G025872 | 4.15 | 0.05 | G025958 | 0.5 | 0 | 2 |
| G025873 | 9.1 | 0.4 | G025959 | 3.05 | 0.45 | 2 |
| G025874 | 7.15 | 1.15 | G025960 | 0.4 | 0.1 | 2 |
| G025875 | 20.6 | 1.1 | G025961 | 0.95 | 0.05 | 2 |
| G025876 | 25.95 | 4.65 | G025962 | 0.4 | 0.1 | 2 |
| G025877 | 2.2 | 0.2 | G025963 | 0.1 | 0 | 2 |
| G025878 | 0.55 | 0.05 | G025964 | 0.15 | 0.05 | 2 |
| G025879 | 8.25 | 0.25 | G025965 | 0.35 | 0.05 | 2 |
| G025880 | 96.45 | 0.85 | G025966 | 54.5 | 5.4 | 2 |
| G025881 | 1.2 | 0 | G025967 | 32.95 | 2.55 | 2 |
| G025882 | 0.2 | 0 | G025968 | 1.05 | 0.05 | 2 |
| G025883 | 0.6 | 0 | G025969 | 43.9 | 4 | 2 |
| G025884 | 0.3 | 0 | G025970 | 0.9 | 0.3 | 2 |
| G025885 | 1.35 | 0.05 | G025971 | 14 | 2 | 2 |
| G025886 | 0.1 | 0 | G025972 | 1.55 | 0.05 | 2 |
| G025887 | 0.25 | 0.05 | G025973 | 0.95 | 0.05 | 2 |
| G025888 | 0.45 | 0.45 | G025974 | 0.45 | 0.05 | 2 |
| G025889 | 0.3 | 0.1 | G025975 | 0.25 | 0.05 | 2 |
| G025890 | 0.25 | 0.05 | G025976 | 0.65 | 0.05 | 2 |
| G025891 | 48.8 | 3.1 | G025977 | 0.4 | 0 | 2 |
| G025892 | 25.25 | 5.05 | G025978 | 1 | 0.3 | 2 |
| G025893 | 7.3 | 1.1 | G025979 | 15.95 | 1.05 | 2 |
| G025894 | 41.85 | 19.35 | G025980 | 0.1 | 0 | 2 |
| G025895 | 0.35 | 0.05 | | | | |

### Example 11: Dose Response of AAVS1 Guides with Nme2Cas9

[0888] A dilution series of AAVS1 guide RNAs were screened for editing efficacy by dose response in T cells by assessing editing by NGS following AAV S1 editing by mRNA delivery. A four-point dose response curve was generated for each sgRNA by titrating each sgRNA with a fixed concentration of mRNA encoding Nme2 Cas9 (SEQ ID NO: 825) in T cells using mRNA electroporation.

[0889] T cells single donor (no. 613) were prepared and activated as described in Example 1 using 2.5% o human AB serum (GeminiBio, Cat. 100-512) in T Cell growth media (TCGM). T cells were electroporated with serially diluted sgRNA targeting the AAVS1 gene using mRNA electroporation as described in Example 1 with the following exceptions. This study used mRNA encoding Nme2 Cas9 instead of mRNAs encoding Nme2 BC22n base editor and UGI, respectively. Cas9 electroporation mix was prepared with 1×10⁵ T cells, 30 ng/L of Nme2Cas9 mRNA and 40, 13.3, 4.4 and 1.5 pmols of sgRNA in a final volume of 20 μL of P3 electroporation buffer. On day 3 post-editing, T cells were harvested and subjected to PCR and NGS sequencing as described in Example 1.

[0890] Table 18 and FIGS. 11A-11B show the mean indel frequency at various AASV1 sgRNA concentrations.

TABLE 18
Mean indel frequency at AAVS1

| sgRNA | G025836 | | | G025835 | | | G025829 | | | G025834 | | |
|---|---|---|---|---|---|---|---|---|---|---|---|---|
| (uM) | Mean | SD | N | Mean | SD | N | Mean | SD | N | Mean | SD | N |
| 2.00 | 1.00 | 0.00 | 2 | 0.91 | 0.01 | 2 | 1.00 | 0.00 | 2 | 0.88 | 0.03 | 2 |
| 0.67 | 0.93 | 0.02 | 2 | 0.49 | 0.07 | 2 | 0.87 | 0.03 | 2 | 0.44 | 0.03 | 2 |
| 0.22 | 0.67 | 0.16 | 2 | 0.18 | 0.00 | 2 | 0.25 | 0.02 | 2 | 0.07 | 0.02 | 2 |
| 0.07 | 0.44 | 0.24 | 2 | 0.06 | 0.03 | 2 | 0.12 | 0.04 | 2 | 0.02 | 0.01 | 2 |

| | G025827 | | | G025880 | | | G025866 | | | G025868 | | |
|---|---|---|---|---|---|---|---|---|---|---|---|---|
| sgRNA | Mean % | | | Mean % | | | Mean % | | | Mean % | | |
| (uM) | editing | SD | N | editing | SD | N | editing | SD | N | editing | SD | N |
| 2.00 | 0.99 | 0.00 | 2 | 0.97 | 0.00 | 2 | 0.97 | 0.00 | 2 | 0.97 | 0.00 | 2 |
| 0.67 | 0.90 | 0.03 | 2 | 0.93 | 0.04 | 2 | 0.97 | 0.00 | 2 | 0.78 | 0.09 | 2 |
| 0.22 | 0.14 | 0.00 | 2 | 0.16 | 0.05 | 2 | 0.85 | 0.05 | 2 | 0.10 | 0.02 | 2 |
| 0.07 | 0.03 | 0.00 | 2 | 0.03 | 0.01 | 2 | 0.39 | 0.06 | 2 | 0.02 | 0.01 | 2 |
| | G025867 | | | G025863 | | | G025818 | | | G025843 | | |
| sgRNA | Mean % | | | Mean % | | | Mean % | | | Mean % | | |
| (uM) | editing | SD | N | editing | SD | N | editing | SD | N | editing | SD | N |
| 2.00 | 0.97 | 0.01 | 2 | 0.97 | 0.00 | 2 | 0.97 | 0.00 | 2 | 0.95 | 0.00 | 2 |
| 0.67 | 0.97 | 0.01 | 2 | 0.92 | 0.02 | 2 | 0.75 | 0.08 | 2 | 0.52 | 0.08 | 2 |
| 0.22 | 0.73 | 0.08 | 2 | 0.19 | 0.04 | 2 | 0.05 | 0.01 | 2 | 0.05 | 0.02 | 2 |
| 0.07 | 0.26 | 0.05 | 2 | 0.04 | 0.01 | 2 | 0.01 | 0.00 | 2 | 0.01 | 0.00 | 2 |

### Example 12. Screening of Insertion Guide RNAs with Nme2Cas9 or SpyCas9

[0891] A select sgRNA targeting CIITA (G023477) was redesigned for AAV insertion and evaluated for insertion efficacy in T cells. Cells were edited using Nme2Cas9 and an AAV encoding an insertion template including a GFP reporter gene flanked by homology arms to the guide cut site. Insertion efficiency was assessed by measuring luminescence and the absence of HLA-DP, DQ, DR expression by flow cytometry and editing at AAVS1 was assessed by NGS.

12.1 mRNA Electroporation and AAV Transduction of T Cells

[0892] T cells from a single donor (no. 613) were prepared and activated as described in Example 1. T cells were electroporated with sgRNA targeting the CIITA gene using mRNA electroporation as described in Example 1 except for the following differences. This study used mRNA encoding Nme2 Cas9 (SEQ ID No: 825) instead of mRNAs encoding Nme2 BC22n base editor and UGI, respectively. Guide G028533 targeting targeting CIITA was editing using mRNA encoding SpCas9 (SEQ ID No: 816). Nme2 Cas9 electroporation mix was prepared with 1×10⁵ T cells in P3 buffer (Lonza), 600 ng of mRNA encoding Cas9 and 20 pmoles of sgRNA. Fifteen minutes after electroporation, T cells were transduced with AAV. Briefly, AAV encoding green fluorescent protein flanked by homology arms bracketing the guide cut site was added to 80 ul of CTS Optimizer T cell growth media supplemented with in new flat-bottom 96-well plates with final multiplicity of infection (MOI) of 300,000. Electroporated T cells were added to the resulting plates and incubated at 37° C. Twenty-four hours post-electroporation and transduction, cells were split 1:2 in 2 U-bottom plates replenished with CTS Optimizer media supplemented with cytokines.

### 12.2 Flow Cytometry and NGS Sequencing

[0893] On day 7 post-electroporation, edited T cell samples were subjected to PCR and NGS analysis as described in Example 1.

[0894] Edited T cells were phenotyped by flow cytometry 10 days post electroporation to determine HLA II-DR, DP, DQ protein expression. Briefly, T cells were incubated for 30 min at 4° C. with a mixture of antibodies against CD3 (BioLegend, Cat. No. 317338), CD4 (BioLegend, Cat. No. 317434), CD8 (BioLegend, Cat. No. 301046), Viakrome (Beckman Coulter, Cat. No. C36628) diluted at 1:100 and HLA II-DR, DP, DQ (BioLegend, Cat. No. 361711) diluted at 1:50 in cell staining buffer (BioLegend, Cat. No. 420201). Cells were subsequently washed and resuspended in 100 μL of cell staining buffer. Cells were then processed on a Cytoflex flow cytometer (Beckman Coulter) and analyzed using the FlowJo™ software package. T cells were gated based on size, shape, viability, as well as CD8, HLA II-DR, DP, DQ, and GFP expression. Table 19 shows the percentage of T cells with HLA II-DR, DP, DQ negative cells, HLA II-DR, DP, DQ negative cells with GFP, and mean percent indel frequency.

TABLE 19
Mean percentages of HLA II-DP, DR, DQ negative cells and HLA-
DP, DQ, DR negative, GFP positive cells.; Mean percent indel
frequency of the CIITA loci as a percentage of total NGS reads

| | | | | % MHC Class II | | | % MHC Class II | | |
|---|---|---|---|---|---|---|---|---|---|
| | % Indel Frequency | | | negative | | | negative, GFP+ | | |
| Guide | Mean | SD | n | Mean | SD | n | Mean | SD | n |
| Untreated | 0 | n/a | 1 | 46.5 | n/a | 1 | 0 | 0 | 2 |
| AAV only | 0 | n/a | 1 | 47.20 | 0.24 | 2 | 5.05 | 0.50 | 3 |
| G026584 | 0.86 | 0.02 | 3 | 87.10 | 0.82 | 2 | 59.47 | 2.30 | 3 |
| G026588 | 0.98 | 0.002 | 3 | 75.40 | 0.82 | 2 | 14.57 | 14.57 | 3 |

### Example 13. Dose Dependence of Additional TRAC Guide RNAs with Nme2Cas9

[0895] Guide RNAs targeting TRAC were screened for editing efficacy in T cells. TRAC editing was assessed by NGS for each concentration of sgRNA. T cells from a single donor were prepared and activated as described in Example 1 using 2.5% human AB serum (GeminiBio, Cat. 100-512) in T Cell growth media (TCGM). T cells were electroporated as described in Example 1 with sgRNAs targeting the TRAC locus at the concentration listed in Table 20 with the following exceptions. This study used 30 ng/μL mRNA encoding Nme2 Cas9 instead of mRNAs encoding Nme2 BC22n base editor and UGI.

[0896] On day 3 post-electroporation, T cells were harvested and subjected to PCR and subsequent NGS analysis as described in Example 1. Table 20 and FIG. 12 show the mean editing frequency at various TRAC sgRNA concentrations.

TABLE 20
Mean editing frequency at the TRAC locus

| sgRNA | G021475 | | | G021476 | | | G021477 | | | G021478 | | |
|---|---|---|---|---|---|---|---|---|---|---|---|---|
| (uM) | Mean | SD | N | Mean | SD | N | Mean | SD | N | Mean | SD | N |
| 2.00 | 0.95 | 0.01 | 2 | 0.48 | 0.06 | 2 | 0.90 | 0.01 | 2 | 0.66 | 0.08 | 2 |
| 0.40 | 0.59 | 0.05 | 2 | 0.08 | 0.01 | 2 | 0.48 | 0.04 | 2 | 0.10 | 0.03 | 2 |
| 0.08 | 0.13 | 0.03 | 2 | 0.01 | 0.00 | 2 | 0.09 | 0.02 | 2 | 0.02 | 0.01 | 2 |
| 0.02 | 0.02 | 0.00 | 2 | 0.00 | 0.00 | 2 | 0.01 | 0.01 | 2 | 0.01 | 0.00 | 2 |

### Example 14. Dose Dependence for Select CIITA Guide RNAs with Nme2Cas9

[0897] Guide RNAs targeting CIITA were screened for editing efficacy by dose response in T cells. CIITA editing was assessed by NGS for each concentration of sgRNA. A five-point dilution series was generated for each sgRNA by titrating each sgRNA with a fixed concentration of mRNA encoding Nme2 Cas9 in T cells using electroporation.

[0898] T cells were prepared from single donor as described in Example 1. T cells were electroporated with mRNA encoding Nme2 Cas9 and CIITA-targeting sgRNAs at the concentrations listed in Table 21 as described in Example 1. On day 3 post-editing, T cell samples were collected and subjected to PCR and NGS analysis as described in Example 1. Table 21 and FIG. 13 show the NGS editing results.

TABLE 21
Mean editing frequency at the CIITA locus.

| | sgRNA | | | |
|---|---|---|---|---|
| Guide | (uM) | Mean | SD | N |
| G023443 | 2 | 0.17 | 0.01 | 4 |
| | 0.4 | 0.01 | 0.00 | 4 |
| | 0.08 | 0.00 | 0.00 | 4 |
| | 0.016 | 0.00 | 0.00 | 4 |
| | 0.003 | 0.00 | 0.00 | 4 |
| G023444 | 2 | 0.19 | 0.01 | 4 |
| | 0.4 | 0.02 | 0.01 | 4 |
| | 0.08 | 0.00 | 0.00 | 4 |
| | 0.016 | 0.00 | 0.00 | 4 |
| | 0.003 | 0.00 | 0.00 | 4 |
| G023477 | 2 | 0.67 | 0.07 | 4 |
| | 0.4 | 0.16 | 0.06 | 4 |
| | 0.08 | 0.03 | 0.00 | 4 |
| | 0.016 | 0.00 | 0.00 | 4 |
| | 0.003 | 0.00 | 0.00 | 4 |
| G023478 | 2 | 0.26 | 0.05 | 4 |
| | 0.4 | 0.03 | 0.01 | 4 |
| | 0.08 | 0.01 | 0.00 | 4 |
| | 0.016 | 0.00 | 0.00 | 4 |
| | 0.003 | 0.00 | 0.00 | 4 |
| G023492 | 2 | 0.23 | 0.05 | 4 |
| | 0.4 | 0.02 | 0.01 | 4 |
| | 0.08 | 0.00 | 0.00 | 4 |
| | 0.016 | 0.00 | 0.00 | 4 |
| | 0.003 | 0.00 | 0.00 | 4 |

### Example 15. Dose Responsiveness Analysis in Non-Activated T Cells

[0899] Guide RNAs were screened for editing efficacy in non-activated T cells by assessing editing frequency by NGS or by flow cytometry following lipid nanoparticle (LNP) delivery.

### 15.1 T Cell Preparation

[0900] Isolated, cryopreserved T cells from 3 donors were thawed in a water bath on Day 0 and plated at a density of 1×10⁶ cells/mL in TCAM media containing CTS OpTmizer T Cell Expansion SFM and T Cell Expansion Supplement (ThermoFisher Cat. A1048501), 1× Penicillin-Streptomycin, 1× Glutamax, 10 mM HEPES, 200 U/mL recombinant human interleukin-2 (Peprotech, Cat. 200-02), 5 ng/mL recombinant human interleukin 7 (Peprotech, Cat. 200-07), 5 ng/mL recombinant human interleukin 15 (Peprotech, Cat. 200-15), 2.5% human AB serum (GeminiBio, Cat. 100-512).

### 15.2 T Cell Engineering

[0901] LNPs were generally prepared as described in Example 1. Lipid nanoparticles in this example were prepared with molar ratios of 35 Lipid A: 47.5 cholesterol: 15 DSPC: 2.5 PEG2k-DMG. LNPs were made with a lipid amine to RNA phosphate (N:P) molar ratio of about 6. LNPs were formulated with a single RNA species. LNPs were delivered to T cells in TCAM media containing ApoE3 (Peprotech, Cat. 350-02).

[0902] On Day 1 (about 24 hours after thaw), T cells were centrifuged, resuspended, and plated at 100,000 cells/well in 50 μL/well TCGM with 2.5% human AB serum. LNPs were applied at 1 μg/mL total RNA cargo of Nme2 base editor mRNA and 0.5 μg/mL total RNA cargo of UGI mRNA along with 10 μg/mL of ApoE3. An LNP formulated with CIITA G026584 and an LNP formulated with HLA-A G028918 were mixed and applied in an eight point 2-fold serial dilution series starting with a high dose of 1.7 μg/mL CIITA G026584 and of 0.7 μg/mL HLA-A G028918. No LNPs were applied to “untreated” samples.

[0903] On Day 3 or Day 4, cells were washed and activated with 1:100 dilution of Trans Act (Miltenyi Biotec). Cells were incubated at 37° C. with regular cell splitting and the addition of fresh media. On Day 9, cells were harvested for analysis by flow cytometry and NGS analysis. For flow cytometric analysis, cells were washed in FACS buffer (PBS+2% FBS+2 mM EDTA). Cells were incubated in a cocktail of antibodies targeting CD4 (Biolegend 317434), CD8 (Biolegend 301046), CD3 (Biolegend 317336), HLA-A2 (Biolegend 343320), HLA-A3 (eBioscience, 11-5754-42), HLA-DR, DP, DQ (Biolegend 361712), and ViaKrome 808 Fixable Viability Dye (Beckman Coulter, C36628). T cells were subsequently washed and analyzed on a Cytoflex instrument (Beckman Coulter). Data analysis was performed using FlowJo software package (v.10.6.1). T cells were gated on size, viability, CD4 or CD8 expression, and expression of markers indicated in Table 22. Flow cytometry data for a representative donor that received about 48 hours of LNP exposure are shown in Table 22 and FIG. 14. Similar results were seen in all three donors and for both the 48- and 72-hour LNP exposure periods.

TABLE 22
Mean percent cells negative for HLA-A2 surface
expression for a representative donor.

| | | |
|---|---|---|
| G028918 | Treated | Untreated |

| (μg/mL) | Mean | SD | n | Mean | SD | n |
|---|---|---|---|---|---|---|
| 0.700 | 91.9 | 0.6 | 3 | 1.8 | 0.0 | 1 |
| 0.350 | 92.3 | 0.7 | 3 | 2.8 | 0.0 | 1 |
| 0.175 | 90.5 | 0.4 | 3 | 1.4 | 0.0 | 1 |
| 0.088 | 85.3 | 0.6 | 3 | 2.6 | 0.0 | 1 |
| 0.044 | 75.1 | 1.0 | 3 | 1.6 | 0.0 | 1 |
| 0.022 | 61.1 | 2.9 | 3 | 1.9 | 0.0 | 1 |
| 0.011 | 44.7 | 1.6 | 3 | 2.5 | 0.0 | 1 |
| 0.005 | 33.3 | 2.4 | 3 | 3.8 | 0.0 | 1 |

[0904] NGS analysis was performed on samples using 0.85 μg/mL G026584 and 0.35 μg/mL G028918 with 48-hour LNP exposure. NGS results are shown in Table 23 and FIG. 15.

TABLE 23
Mean percent editing at the CIITA locus.

| | C to T | | | C to A/G | | | Indel | | |
|---|---|---|---|---|---|---|---|---|---|
| Sample | Mean | SD | n | Mean | SD | n | Mean | SD | n |
| Donor 1 | 50.9 | 2.2 | 3 | 8.6 | 1.5 | 3 | 7.5 | 0.5 | 3 |
| Donor 2 | 64.5 | 1.2 | 3 | 7.9 | 0.6 | 3 | 5.8 | 0.9 | 3 |
| Donor 3 | 52.6 | 0.3 | 2 | 8.4 | 0.8 | 2 | 6.8 | 0.2 | 2 |
| Untreated | 0.3 | 0.0 | 2 | 1.3 | 0.1 | 2 | 0.2 | 0.0 | 2 |

### Example 16. Dose Response Analysis of Select Guide RNAs with LNP

[0905] Select HLA-A, TRAC, TRBC1 & TRBC2, and CIITA guide RNAs were screened for editing efficacy in T cells by assessing editing frequency by NGS and by flow cytometry following lipid nanoparticle (LNP) delivery.

### 16.1 T Cell Preparation & Activation

[0906] Isolated, cryopreserved T cells from 2 donors were thawed in a water bath on Day 0 and plated at a density of 1.5×10⁶ cells/mL in TCAM media containing CTS OpTmizer T Cell Expansion SFM and T Cell Expansion Supplement (Gibco Cat. A3705001), 1× Penicillin-Streptomycin, 1× Glutamax, 10 mM HEPES, 200 U/mL recombinant human interleukin-2 (Peprotech, Cat. 200-02), 5 ng/mL recombinant human interleukin 7 (Peprotech, Cat. 200-07), and 5 ng/mL recombinant human interleukin 15 (Peprotech, Cat. 200-15) and 2.5% human AB serum (GeminiBio, Cat. 100-512). On Day 1 (24 hours post thaw) cells were washed and activated with TransAct™ (1:100 dilution, Miltenyi Biotec).

### 16.2 LNP Formulation

[0907] LNPs were generally prepared as described in Example 1.6. Lipid nanoparticles in this example were prepared with molar ratios of 35 Lipid A: 47.5 cholesterol: 15 DSPC: 2.5 PEG2k-DMG. LNPs were made with a lipid amine to RNA phosphate (N:P) molar ratio of about 6. LNPs were formulated with a single RNA cargo of Nme2BC22 mRNA, UGI mRNA, or a sgRNA as listed in Table 24 and Table 25. LNPs were delivered to T cells in TCAM media containing ApoE3 (Peprotech, Cat. 350-02).

### 16.3 T Cell Engineering

[0908] On Day 3, T cells were centrifuged, resuspended, and plated at 100,000 cells/well in 100 μL/well of TCAM with 2.5% human AB serum to which 100 μL of corresponding LNP formulation were added. LNP formulation containing gRNA was added to T cells in at concentrations listed in Table 24 along with 1 μg/mL total RNA cargo of Nme2 base editor mRNA and 0.5 μg/mL total RNA cargo of UGI mRNA. No LNPs were applied to “untreated” samples.

[0909] Beginning on Day 4, cells were split, and media refreshed regularly. On Day 7, a portion of cells were harvested for sequencing analysis at TRAC, TRBC1, TRBC2 and CIITA loci. NGS analysis was performed as described in Example 1. Table 24 and FIGS. 16A-16L show mean percent editing for these cells. For each guide, data from one representative donor is shown in Table 24.

TABLE 24
Mean percent editing.

| | sgRNA | C to T | | | C to A/G | | | Indels | | |
|---|---|---|---|---|---|---|---|---|---|---|
| gRNA | dose (μg/mL) | Mean | SD | n | Mean | SD | n | Mean | SD | n |
| G021469 | 0.0003 | 2.27 | 0.28 | 3 | 0.86 | 0.05 | 3 | 0.33 | 0.08 | 3 |
| (TRAC) | 0.0012 | 7.70 | 0.24 | 3 | 0.88 | 0.02 | 3 | 0.24 | 0.05 | 3 |
| | 0.0049 | 25.76 | 1.03 | 3 | 0.87 | 0.03 | 3 | 0.30 | 0.07 | 3 |
| | 0.0195 | 62.68 | 1.69 | 3 | 0.92 | 0.02 | 3 | 0.27 | 0.07 | 3 |
| | 0.0781 | 91.88 | 0.16 | 3 | 1.12 | 0.03 | 3 | 0.52 | 0.08 | 3 |
| | 0.3125 | 96.90 | 0.59 | 3 | 1.12 | 0.07 | 3 | 0.69 | 0.15 | 3 |
| | 1.25 | 97.42 | 0.39 | 3 | 1.24 | 0.02 | 3 | 0.88 | 0.19 | 3 |
| | 5 | 97.01 | 0.40 | 3 | 1.71 | 0.10 | 3 | 0.92 | 0.08 | 3 |
| G021481 | 0.00008 | 0.83 | 0.15 | 3 | 0.55 | 0.11 | 3 | 0.22 | 0.07 | 3 |
| (TRAC) | 0.00031 | 2.57 | 0.49 | 3 | 0.68 | 0.10 | 3 | 0.14 | 0.06 | 3 |
| | 0.00122 | 8.56 | 0.76 | 3 | 0.51 | 0.10 | 3 | 0.19 | 0.08 | 3 |
| | 0.00488 | 29.59 | 1.22 | 3 | 0.56 | 0.09 | 3 | 0.38 | 0.17 | 3 |
| | 0.01953 | 67.99 | 0.88 | 3 | 0.89 | 0.25 | 3 | 0.42 | 0.06 | 3 |
| | 0.07813 | 92.54 | 1.51 | 3 | 0.66 | 0.06 | 3 | 0.58 | 0.18 | 3 |
| | 0.3125 | 97.06 | 0.30 | 3 | 0.71 | 0.02 | 3 | 0.99 | 0.03 | 3 |
| | 1.25 | 96.85 | 0.44 | 3 | 0.93 | 0.07 | 3 | 1.71 | 0.10 | 3 |
| G028935 | 0.0003 | 10.56 | 0.30 | 3 | 0.83 | 0.06 | 3 | 0.12 | 0.01 | 3 |
| (TRAC) | 0.0012 | 33.70 | 1.30 | 3 | 1.05 | 0.06 | 3 | 10.19 | 0.04 | 3 |
| | 0.0049 | 72.47 | 1.20 | 3 | 1.16 | 0.13 | 3 | 0.33 | 0.07 | 3 |
| | 0.0195 | 94.40 | 0.52 | 3 | 1.43 | 0.20 | 3 | 0.42 | 0.10 | 3 |
| | 0.0781 | 96.53 | 0.68 | 3 | 1.78 | 0.25 | 3 | 0.52 | 0.09 | 3 |
| | 0.3125 | 96.50 | 0.86 | 3 | 2.02 | 0.24 | 3 | 0.74 | 0.28 | 3 |
| | 1.25 | 96.32 | 0.28 | 3 | 2.27 | 0.08 | 3 | 1.02 | 0.05 | 3 |
| | 5 | 95.22 | 0.44 | 3 | 2.84 | 0.13 | 3 | 1.49 | 0.12 | 3 |
| G028939 | 0.0003 | 2.63 | 0.49 | 2 | 1.37 | 0.41 | 2 | 10.20 | 0.02 | 2 |
| (TRAC) | 0.0012 | 9.65 | 0.16 | 2 | 1.21 | 0.90 | 2 | 0.13 | 0.02 | 2 |
| | 0.0049 | 29.60 | 1.03 | 2 | 1.42 | 0.69 | 2 | 0.19 | 0.00 | 1 |
| | 0.0195 | 66.33 | 2.98 | 2 | 1.68 | 0.47 | 2 | 0.33 | 0.04 | 2 |
| | 0.0781 | 192.37 | 0.69 | 2 | 1.93 | 0.34 | 2 | 0.60 | 0.30 | 2 |
| | 0.3125 | 94.59 | 0.32 | 2 | 1.65 | 0.91 | 2 | 0.39 | 0.30 | 2 |
| | 1.25 | n.d. | | | | | | | | |
| | 5 | 94.89 | 4.17 | 2 | 1.87 | 0.03 | 2 | 0.21 | 0.08 | 2 |
| G028943 | 0.0003 | 14.74 | 0.27 | 3 | 0.67 | 0.03 | 3 | 0.38 | 0.01 | 3 |
| (TRAC) | 0.0012 | 44.84 | 0.69 | 3 | 0.73 | 0.03 | 3 | 0.50 | 0.04 | 3 |
| | 0.0049 | 83.57 | 0.21 | 3 | 0.67 | 0.06 | 3 | 0.61 | 0.10 | 3 |
| | 0.0195 | 97.05 | 0.26 | 3 | 0.72 | 0.12 | 3 | 0.79 | 0.11 | 3 |
| | 0.0781 | 97.65 | 0.48 | 3 | 0.79 | 0.21 | 3 | 0.93 | 0.21 | 3 |
| | 0.3125 | 197.32 | 0.24 | 3 | 0.97 | 0.13 | 3 | 1.26 | 0.22 | 3 |
| | 1.25 | 96.51 | 0.35 | 3 | 1.37 | 0.09 | 3 | 1.82 | 0.34 | 3 |
| | 5 | 95.41 | 0.32 | 3 | 1.92 | 0.24 | 3 | 2.26 | 0.17 | 3 |
| G028986 | 0.0003 | 2.31 | 0.41 | 3 | 1.60 | 0.54 | 3 | 0.14 | 0.01 | 3 |
| (TRBC1) | 0.0012 | 8.20 | 0.37 | 3 | 1.48 | 0.16 | 3 | 10.15 | 0.03 | 3 |
| | 0.0049 | 26.27 | 1.69 | 3 | 1.69 | 0.31 | 3 | 0.26 | 0.08 | 3 |
| | 0.0195 | 62.21 | 0.95 | 3 | 1.73 | 0.13 | 3 | 0.52 | 0.22 | 3 |
| | 0.0781 | 92.08 | 0.61 | 3 | 1.33 | 0.09 | 3 | 10.65 | 0.20 | 3 |
| | 0.3125 | 96.37 | 0.34 | 3 | 1.48 | 0.06 | 3 | 1.12 | 0.46 | 3 |
| | 1.25 | 97.18 | 0.23 | 3 | 1.52 | 0.21 | 3 | 0.98 | 0.11 | 3 |
| | 5 | 96.58 | 0.35 | 3 | 1.77 | 0.14 | 3 | 1.30 | 0.32 | 3 |
| G029006 | 0.0003 | 3.00 | 0.73 | 3 | 0.55 | 0.02 | 3 | 0.25 | 0.03 | 3 |
| (TRBC2) | 0.0012 | 9.04 | 0.86 | 3 | 0.57 | 0.07 | 3 | 0.34 | 0.03 | 3 |
| | 0.0049 | 28.73 | 0.77 | 3 | 0.59 | 0.06 | 3 | 0.89 | 0.03 | 3 |
| | 0.0195 | 67.16 | 0.57 | 3 | 0.77 | 0.14 | 3 | 2.01 | 0.25 | 3 |
| | 0.0781 | 91.90 | 0.42 | 3 | 0.84 | 0.02 | 3 | 3.50 | 0.36 | 3 |
| | 0.3125 | 93.22 | 10.44 | 3 | 0.95 | 0.08 | 3 | 5.04 | 0.49 | 3 |
| | 1.25 | 91.67 | 10.70 | 3 | 1.42 | 0.13 | 3 | 6.27 | 0.41 | 3 |
| | 5 | 91.91 | 0.59 | 3 | 1.73 | 0.16 | 3 | 5.85 | 0.54 | 3 |
| G029007 | 0.0003 | 1.38 | 0.35 | 3 | 0.61 | 0.01 | 3 | 0.09 | 0.00 | 3 |
| (TRBC2) | 0.0012 | 3.96 | 0.46 | 3 | 0.69 | 0.05 | 3 | 0.11 | 0.01 | 3 |
| | 0.0049 | 12.87 | 0.75 | 3 | 0.68 | 0.13 | 3 | 0.16 | 0.03 | 3 |
| | 0.0195 | 38.66 | 10.91 | 3 | 0.95 | 0.32 | 3 | 0.25 | 0.01 | 3 |
| | 0.0781 | 79.87 | 0.93 | 3 | 0.74 | 0.07 | 3 | 0.43 | 0.08 | 3 |
| | 0.3125 | 96.82 | 0.18 | 3 | 0.75 | 0.03 | 3 | 0.62 | 0.06 | 3 |
| | 1.25 | 97.63 | 0.22 | 3 | 1.01 | 0.26 | 3 | 0.73 | 0.09 | 3 |
| | 5 | 97.44 | 0.25 | 3 | 10.93 | 0.12 | 3 | 0.86 | 0.08 | 3 |
| G026584 | 0.0003 | 1.30 | 0.06 | 3 | 0.66 | 0.03 | 3 | 0.08 | 0.03 | 3 |
| (CIITA) | 0.0012 | 3.97 | 0.40 | 3 | 0.60 | 0.04 | 3 | 0.10 | 0.01 | 3 |
| | 0.0049 | 13.87 | 0.18 | 3 | 0.61 | 0.07 | 3 | 0.10 | 0.04 | 3 |
| | 0.0195 | 42.35 | 0.82 | 3 | 0.59 | 0.04 | 3 | 0.17 | 0.04 | 3 |
| | 0.0781 | 82.44 | 0.99 | 3 | 0.64 | 0.05 | 3 | 0.29 | 0.08 | 3 |
| | 0.3125 | 97.03 | 0.60 | 3 | 0.77 | 0.32 | 3 | 0.43 | 0.08 | 3 |
| | 1.25 | 98.01 | 0.10 | 3 | 0.87 | 0.12 | 3 | 0.66 | 0.08 | 3 |
| | 5 | 97.83 | 0.23 | 3 | 0.97 | 0.03 | 3 | 0.68 | 0.06 | 3 |
| G029123 | 0.0003 | 0.68 | 0.10 | 3 | 10.27 | 0.04 | 3 | 0.12 | 0.01 | 3 |
| (CIITA) | 0.0012 | 2.19 | 0.28 | 3 | 0.31 | 0.06 | 3 | 0.15 | 0.08 | 3 |
| | 0.0049 | 7.60 | 0.52 | 3 | 0.31 | 0.05 | 3 | 0.17 | 0.02 | 3 |
| | 0.0195 | 27.13 | 1.24 | 3 | 0.32 | 0.11 | 3 | 0.15 | 0.04 | 3 |
| | 0.0781 | 65.16 | 0.17 | 3 | 10.27 | 0.02 | 3 | 0.18 | 0.05 | 3 |
| | 0.3125 | 94.17 | 0.27 | 3 | 0.30 | 0.05 | 3 | 0.18 | 0.05 | 3 |
| | 1.25 | 98.54 | 0.52 | 3 | 0.41 | 0.13 | 3 | 0.25 | 0.01 | 3 |
| | 5 | 98.37 | 0.22 | 3 | 0.46 | 0.07 | 3 | 0.17 | 0.04 | 3 |
| G029131 | 0.0003 | 2.43 | 0.08 | 3 | 0.25 | 0.03 | 3 | 0.15 | 0.03 | 3 |
| (CIITA) | 0.0012 | 7.66 | 0.42 | 3 | 0.24 | 0.03 | 3 | 0.19 | 0.07 | 3 |
| | 0.0049 | 24.67 | 0.25 | 3 | 0.34 | 0.08 | 3 | 0.29 | 0.08 | 3 |
| | 0.0195 | 60.40 | 0.99 | 3 | 0.32 | 0.07 | 3 | 0.58 | 0.04 | 3 |
| | 0.0781 | 91.11 | 0.39 | 3 | 0.46 | 0.04 | 3 | 0.95 | 0.08 | 3 |
| | 0.3125 | 97.56 | 0.12 | 3 | 0.42 | 0.10 | 3 | 1.27 | 0.06 | 3 |
| | 1.25 | 97.70 | 0.10 | 3 | 0.52 | 0.01 | 3 | 1.53 | 0.09 | 3 |
| | 5 | 97.59 | 0.29 | 3 | 0.71 | 0.02 | 3 | 1.46 | 0.35 | 3 |
| | 0.0003 | 0.46 | 0.07 | 3 | 0.39 | 0.02 | 3 | 0.15 | 0.03 | 3 |
| | 0.0012 | 1.42 | 0.25 | 3 | 0.39 | 0.03 | 3 | 0.14 | 0.07 | 3 |
| | 0.0049 | 5.11 | 0.21 | 3 | 0.43 | 0.03 | 3 | 0.12 | 0.01 | 3 |
| G029172 | 0.0195 | 17.07 | 0.41 | 3 | 0.59 | 0.21 | 3 | 0.22 | 0.04 | 3 |
| (CIITA) | 0.0781 | 46.68 | 1.19 | 3 | 0.45 | 0.09 | 3 | 0.43 | 0.12 | 3 |
| | 0.3125 | 82.18 | 0.17 | 3 | 0.54 | 0.07 | 3 | 0.52 | 0.09 | 3 |
| | 1.25 | 95.09 | 0.61 | 3 | 0.55 | 0.10 | 3 | 0.54 | 0.08 | 3 |
| | 5 | 94.17 | 0.07 | 3 | 0.89 | 0.30 | 3 | 0.62 | 0.20 | 3 |

“n.d.” indicates no data.

### 16.4 Flow Cytometry

[0910] On Day 10, cells were harvested for analysis by flow cytometry. For flow cytometric analysis, cells were washed in FACS buffer (PBS+2% FBS+2 mM EDTA). Cells were incubated in a cocktail of antibodies targeting CD3 (Biolegend 317336), CD4 (Biolegend 300538), CD8 (Biolegend 301051), HLA-A2 (Biolegend 343320), HLA-A3 (Invitrogen, 17-5754-42), HLA-B7 (Miltenyi Biotec, 130-120-234), HLA-DR, DP, DQ (Biolegend 361708), and ViaKrome 808 Fixable Viability Dye (Beckman Coulter, C36628). T cells were subsequently washed and analyzed on a Cytoflex instrument (Beckman Coulter). Data analysis was performed using FlowJo software package (v.10.6.1). T cells were gated based on size, viability, CD8 positivity, and expression of markers indicated in Table 25. Flow cytometry data for CD8+ T cells are shown in Table 25 and FIGS. 17A-17D. CD3-, HLA-A2-/HLA-A3-, and HLA-DR, DP, DQ-cell populations indicate efficient disruption of TRAC, TRBC1 or TRBC2; HLA-A; or CIITA, respectively. Data from one representative donor is shown in Table 25. Similar results were seen in both donors.

TABLE 25
Mean percent CD8+ T cells expressing surface markers in representative
donor. CIITA guides are reported as mean percent HLA-DP, DQ, DR-
cells. HLA-A guides are reported as mean percent HLA-A2/A3- cells.
TRAC and TRBC guides are reported as mean percent CD3− cells.

| | sgRNA | | | | | sgRNA | | | |
|---|---|---|---|---|---|---|---|---|---|
| | dose | | | | | dose | | | |
| Guide | (ug/ml) | Mean | SD | n | Guide | (ug/ml) | Mean | SD | n |
| G026584 | 0.0003 | 14.8 | 2.5 | 3 | G029123 | 0.0003 | 14.3 | 3.4 | 3 |
| CIITA | 0.0012 | 16.3 | 3.7 | 3 | CIITA | 0.0012 | 16.6 | 3.9 | 3 |
| | 0.0049 | 20.5 | 4.2 | 3 | | 0.0049 | 18.4 | 3.6 | 3 |
| | 0.0195 | 36.5 | 6.5 | 2 | | 0.0195 | 28.1 | 3.4 | 3 |
| | 0.0781 | 76.5 | 2.6 | 3 | | 0.0781 | 50.6 | 2.7 | 3 |
| | 0.3125 | 96.3 | 0.2 | 3 | | 0.3125 | 81.4 | 1.9 | 3 |
| | 1.25 | 98.8 | 0.3 | 3 | | 1.25 | 93.2 | 1.1 | 3 |
| | 5 | 98.7 | 0.2 | 3 | | 5 | 92.6 | 0.3 | 3 |
| G029131 | 0.0003 | 16.2 | 1.7 | 3 | G029172 | 0.0003 | 13.9 | 0.7 | 3 |
| CIITA | 0.0012 | 17.5 | 5.0 | 3 | CIITA | 0.0012 | 13.8 | 1.0 | 3 |
| | 0.0049 | 25.2 | 3.6 | 3 | | 0.0049 | 15.5 | 1.4 | 3 |
| | 0.0195 | 46.9 | 4.0 | 3 | | 0.0195 | 19.5 | 5.2 | 3 |
| | 0.0781 | 73.7 | 3.3 | 3 | | 0.0781 | 45.4 | 2.3 | 3 |
| | 0.3125 | 88.5 | 1.3 | 3 | | 0.3125 | 82.1 | 2.8 | 3 |
| | 1.25 | 94.6 | 0.7 | 3 | | 1.25 | 95.8 | 0.4 | 3 |
| | 5 | 94.4 | 1.5 | 3 | | 5 | 93.1 | 1.5 | 3 |
| G028922 | 0.0003 | 2.6 | 0.4 | 3 | G028865 | 0.0003 | 4.7 | 0.2 | 3 |
| HLA-A | 0.0012 | 2.7 | 0.9 | 3 | HLA-A | 0.0012 | 10.2 | 0.5 | 3 |
| | 0.0049 | 7.4 | 0.7 | 3 | | 0.0049 | 26.1 | 1.1 | 3 |
| | 0.0195 | 22.6 | 0.8 | 3 | | 0.0195 | 56.6 | 1.7 | 3 |
| | 0.0781 | 58.1 | 1.0 | 3 | | 0.0781 | 77.1 | 1.7 | 3 |
| | 0.3125 | 91.9 | 0.9 | 3 | | 0.3125 | 82.5 | 1.1 | 3 |
| | 1.25 | 99.1 | 0.1 | 3 | | 1.25 | 87.5 | 1.1 | 3 |
| | 5 | 98.3 | 0.6 | 3 | | 5 | 89.0 | 0.8 | 3 |
| G028869 | 0.0003 | 2.4 | 0.8 | 3 | G028907 | 0.0003 | 5.8 | 0.3 | 3 |
| HLA-A | 0.0012 | 2.1 | 1.3 | 3 | HLA-A | 0.0012 | 15.4 | 0.2 | 3 |
| | 0.0049 | 2.7 | 0.2 | 3 | | 0.0049 | 39.5 | 2.9 | 3 |
| | 0.0195 | 7.1 | 0.5 | 3 | | 0.0195 | 76.5 | 0.5 | 3 |
| | 0.0781 | 19.7 | 2.3 | 3 | | 0.0781 | 92.4 | 0.4 | 3 |
| | 0.3125 | 47.9 | 1.4 | 3 | | 0.3125 | 95.7 | 0.7 | 3 |
| | 1.25 | 68.7 | 0.6 | 3 | | 1.25 | 97.7 | 0.5 | 3 |
| | 5 | 66.9 | 0.6 | 3 | | 5 | 97.0 | 0.2 | 3 |
| G028913 | 0.0003 | 4.3 | 0.7 | 3 | G028918 | 0.0003 | 4.8 | 0.4 | 3 |
| HLA-A | 0.0012 | 11.8 | 0.7 | 3 | HLA-A | 0.0012 | 10.0 | 1.2 | 3 |
| | 0.0049 | 33.7 | 0.5 | 3 | | 0.0049 | 31.0 | 1.0 | 3 |
| | 0.0195 | 71.5 | 0.9 | 3 | | 0.0195 | 63.4 | 0.2 | 3 |
| | 0.0781 | 90.8 | 0.9 | 3 | | 0.0781 | 88.4 | 1.0 | 3 |
| | 0.3125 | 95.4 | 0.5 | 3 | | 0.3125 | 93.5 | 0.4 | 3 |
| | 1.25 | 97.3 | 0.6 | 3 | | 1.25 | 94.3 | 0.5 | 3 |
| | 5 | 97.4 | 0.3 | 3 | | 5 | 94.5 | 0.1 | 3 |
| G029006 | 0.0003 | 4.2 | 0.8 | 3 | G028986 | 0.0003 | 3.8 | 1.2 | 3 |
| TRBC | 0.0012 | 9.0 | 1.3 | 3 | TRBC | 0.0012 | 7.3 | 0.2 | 3 |
| | 0.0049 | 25.8 | 0.9 | 3 | | 0.0049 | 22.2 | 0.3 | 3 |
| | 0.0195 | 54.7 | 1.5 | 3 | | 0.0195 | 55.1 | 1.1 | 3 |
| | 0.0781 | 84.8 | 0.7 | 3 | | 0.0781 | 89.7 | 1.3 | 3 |
| | 0.3125 | 96.6 | 0.2 | 3 | | 0.3125 | 97.8 | 0.2 | 3 |
| | 1.25 | 99.1 | 0.2 | 3 | | 1.25 | 99.1 | 0.1 | 3 |
| | 5 | 99.0 | 0.2 | 3 | | 5 | 98.8 | 0.1 | 3 |
| G029007 | 0.0003 | 3.3 | 0.4 | 3 | G028943 | 0.0003 | 17.97 | 6.36 | 3 |
| TRBC | 0.0012 | 4.7 | 0.7 | 3 | TRAC | 0.0012 | 36.57 | 0.49 | 3 |
| | 0.0049 | 12.1 | 1.5 | 3 | | 0.0049 | 73.73 | 1.19 | 3 |
| | 0.0195 | 29.4 | 1.7 | 3 | | 0.0195 | 95.03 | 0.32 | 3 |
| | 0.0781 | 53.4 | 2.0 | 3 | | 0.0781 | 99.00 | 0.44 | 3 |
| | 0.3125 | 61.9 | 0.8 | 3 | | 0.3125 | 99.27 | 0.06 | 3 |
| | 1.25 | 65.5 | 1.1 | 3 | | 1.25 | 99.33 | 0.25 | 3 |
| | 5 | 69.0 | 1.4 | 3 | | 5 | 98.97 | 0.42 | 3 |
| G021469 | 0.0003 | 7.04 | 3.60 | 3 | G021481 | 0.00008 | 2.43 | 0.47 | 3 |
| TRAC | 0.0012 | 8.84 | 0.27 | 3 | TRAC | 0.00031 | 3.58 | 0.77 | 3 |
| | 0.0049 | 24.50 | 1.04 | 3 | | 0.00122 | 8.21 | 1.05 | 3 |
| | 0.0195 | 57.13 | 1.20 | 3 | | 0.00488 | 26.03 | 0.35 | 3 |
| | 0.0781 | 85.10 | 1.35 | 3 | | 0.01953 | 62.40 | 2.12 | 3 |
| | 0.3125 | 92.30 | 2.12 | 3 | | 0.07813 | 92.70 | 0.70 | 3 |
| | 1.25 | 96.90 | 0.26 | 3 | | 0.3125 | 99.00 | 0.10 | 3 |
| | 5 | 97.57 | 0.40 | 3 | | 1.25 | 99.47 | 0.21 | 3 |
| G028935 | 0.0003 | 15.60 | 4.65 | 3 | G028939 | 0.0003 | 7.87 | 3.58 | 3 |
| TRAC | 0.0012 | 34.63 | 0.83 | 3 | TRAC | 0.0012 | 15.70 | 0.10 | 3 |
| | 0.0049 | 70.97 | 2.47 | 3 | | 0.0049 | 40.90 | 2.88 | 3 |
| | 0.0195 | 90.27 | 0.35 | 3 | | 0.0195 | 75.90 | 1.28 | 3 |
| | 0.0781 | 94.17 | 1.00 | 3 | | 0.0781 | 92.10 | 0.66 | 3 |
| | 0.3125 | 95.57 | 0.76 | 3 | | 0.3125 | 98.43 | 0.06 | 3 |
| | 1.25 | 96.63 | 0.25 | 3 | | 1.25 | 99.70 | 0.10 | 3 |
| | 5 | 96.47 | 0.06 | 3 | | 5 | 99.53 | 0.06 | 3 |

### Example 17. Off-Target Analysis

### 17.1 Biochemical Off-Target Analysis

[0911] A biochemical method (See, e.g., Cameron et al., Nature Methods. 6, 600-606; 2017) was used to determine potential off-target genomic sites cleaved by Nme2Cas9 using specific guides targeting HLA-A, TRAC, TRBC1 & TRBC2, and CIITA, respectively. Guide RNAs shown in Table 26 were screened using NA24385 genomic DNA (Coriell Institute) alongside control guides. The number of on target and potential off-target cleavage sites were detected using a guide concentration of 192 nM gRNA and 64 nM Nme2Cas9 protein in the biochemical assay for which results are shown in Table 26.

[0912] Digenome sequencing was also performed by methods known in the art for discovery of potential off-target sites for select guides using Nme2 base editor. Data not shown.

TABLE 26
Biochemical Off-Target Analysis

| Guide ID | Target Gene | Sites |
|---|---|---|
| G028865 | HLA-A | 18 |
| G028869 | HLA-A | 11 |
| G028907 | HLA-A | 7 |
| G028913 | HLA-A | 13 |
| G028918 | HLA-A | 4 |
| G028922 | HLA-A | 14 |
| G028935 | TRAC | 4 |
| G028939 | TRAC | 4 |
| G028943 | TRAC | 2 |
| G028986 | TRBC1 | 8 |
| G029006 | TRBC2 | 9 |
| G029007 | TRBC2 | 7 |
| G026584 | CIITA | 6 |
| G029123 | CIITA | 1 |
| G029131 | CIITA | 2 |
| G029172 | CIITA | 4 |
| G021557 | VEGFA | 5 |
| G021558 | VEGFA | 1 |
| G021567 | VEGFA | 2 |

### 17.2 Targeted Sequencing at Potential Off-Target Sites

[0913] A two-phase process was applied to identify and then confirm potential off-target editing. In phase one, a computational off-target prediction method Cas-OFFinder (Bae et al., 2014) was combined with the biochemical off-target discovery assay described above to identify potential off-target editing sites. The final phase confirms editing at the potential off-target loci through the detection of C-to-T mutations using NGS in genome-edited cells. A multiplex PCR based rhAMPSeq (RNase H2 dependent PCR Amplification for Next Generation Sequencing) assay or NGS as described in Example 1 was employed to characterize potential off-target editing in cells.

[0914] Samples were prepared in triplicate for two T cell donors. T cells were prepared as described in Example 1. Cells were treated simultaneously with 3 LNPs, each formulated with a single RNA cargo of Nme2BC22 mRNA, UGI mRNA, or a select sgRNA as listed in Table 27. LNPs were generally prepared as described in Example 1 with lipid molar ratio of 35 Lipid A:47.5 cholesterol:15 DSPC:2.5 PEG. LNPs were pre-incubated in 10 μg/mL of human ApoE3. Approximately 50,000 T cells were treated with LNPs measured by RNA weight as follows: 100 ng of Nme2BC22 mRNA, 50 ng of UGI mRNA, and sgRNA at the dose shown in Table 27. Cells were incubated at 37° C. for about 24 hours then resuspended in fresh media for further growth. Approximately 96 hours (4 days) after LNP treatment, cells were harvested and NGS analysis was performed generally as described in Example 1 or via rhAmpSeq CRISPR Analysis System (IDT) by the manufacturer's protocol using cell lysate. NGS analysis used primers designed to identify percent C-to-T mutations at predicted off-target sites. Results of the potential off target site sequencing analysis from two donors are summarized in Table 27. Potential off target sites were considered to have confirmed base editing when the mean % C to T editing was statistically significant (P value of 0.05 or less) compared to donor-matched untreated controls. Edited sequence reads were manually inspected for potential off target sites reaching these criteria to confirm edit-relevant C to T repair structures.

TABLE 27
Editing confirmation at potential off target sites by sequencing

| | | | | Loci with |
|---|---|---|---|---|
| | | | Loci | confirmed |
| Guide | Target | LNP Dose (ng) | characterized | base editing |
| G028907 | HLA-A | 23.8 | 7 | 3 |
| G028913 | HLA-A | 31.7 | 6 | 2 |
| G028918 | HLA-A | 28.6 | 4 | 3 |
| G028939 | TRAC | 21.5 | 3 | 0 |
| G028943 | TRAC | 5.8 | 1 | 0 |
| G028986 | TRBC | 37.7 | 7 | 1 |
| G029006 | TRBC | 55.0 | 7 | 3 |
| G026584 | CIITA | 70.6 | 7 | 2 |
| G029131 | CIITA | 96.8 | 1 | 0 |

1. An engineered cell, which has reduced or eliminated surface expression of HLA-A relative to an unmodified cell, comprising a genetic modification in the HLA-A gene, wherein the genetic modification comprises at least one nucleotide within the genomic coordinates chosen from: a) chr6:29942540-29945459: b) chr6:29942891-29942915: chr6:29942609-29942633: chr6:29944266-29944290: chr6:29942889-29942913: chr6:29944471-29944495; and chr6:29944470-29944494; and c) chr6:29942785-29942809.

2. The engineered cell of claim 1, wherein the genetic modification comprises:
a) at least one nucleotide within the genomic coordinates chosen from the genomic coordinates listed in Table 1;
b) at least one nucleotide within the genomic coordinates targeted by a guide RNA comprising a guide sequence of any one of SEQ ID NOs: 66, 61, 2-60, 62-65, 67-80; and/or
c) an indel, a C to T substitution, or an A to G substitution within the genomic coordinates.

3. (canceled)

4. (canceled)

5. (canceled)

6. (canceled)

7. (canceled)

8. (canceled)

9. The engineered cell of claim 1, wherein the cell is: a) homozygous for HLA-C or b) homozygous for HLA-B and homozygous for HLA-C.

10. (canceled)

11. A composition comprising an HLA-A guide RNA, wherein the HLA-A guide RNA comprises
i) a guide sequence chosen from SEQ ID NOs: 66, 61, 2-60, 62-65, and 67-80;
ii) at least 19, 20, 21, 22, 23, or 24 contiguous nucleotides of a sequence chosen from SEQ ID NOs: 66, 61, 2-60, 62-65, and 67-80; or
iii) a guide sequence that is at least 95%, 90%, or 85% identical to a sequence chosen from SEQ ID NOs: 66, 61, 2-60, 62-65, and 67-80;
iv) a sequence that comprises 10 contiguous nucleotides±10 nucleotides of a genomic coordinate listed in Table 1;
v) at least 20, 21, 22, 23, or 24, contiguous nucleotides of a sequence chosen from iv); or
vi) a guide sequence that is at least 95%, 90%, or 85% identical to a sequence chosen from iv).

12. A method of a) making an engineered human cell, which has reduced or eliminated surface expression of HLA-A protein relative to an unmodified cell, or b) reducing surface expression of HLA-A protein in a human cell relative to an unmodified cell, the method comprising contacting a cell with a composition comprising an HLA-A guide RNA, wherein the HLA-A guide RNA comprises
i) a guide sequence chosen from SEQ ID NOs: 66, 61, 2-60, 62-65, and 67-80;
ii) at least 20, 21, 22, 23, or 24 contiguous nucleotides of a sequence chosen from SEQ ID NOs: 66, 61, 2-60, 62-65, and 67-80; or
iii) a guide sequence that is at least 95%, 90%, or 85% identical to a sequence chosen from SEQ ID NOs: 66, 61, 2-60, 62-65, and 67-80;
iv) a sequence that comprises 10 contiguous nucleotides±10 nucleotides of a genomic coordinate listed in Table 1;
v) at least 20, 21, 22, 23, or 24 contiguous nucleotides of a sequence chosen from iv); or
vi) a guide sequence that is at least 95%, 90%, or 85% identical to a sequence chosen from iv).

13. (canceled)

14. The composition of claim 11, wherein the HLA-A guide RNA comprises:
a) a guide sequence chosen from SEQ ID NOs: 66, 61, 13, 55, 70, and 71,
b) a guide sequence chosen from SEQ ID NOs: 61, 66, 13, 17, 55, and 70;
c) a guide sequence comprising the sequence of SEQ ID NO: 61; or
d) a guide sequence comprising the sequence of SEQ ID NO: 66.

15. (canceled)

16. (canceled)

17. (canceled)

18. A population of cells comprising the engineered cells of claim 1.

19. A pharmaceutical composition comprising the engineered cell of claim 1.

20. An engineered human cell, which has reduced or eliminated surface expression of TRAC relative to an unmodified cell, comprising a genetic modification in the TRAC gene, wherein the genetic modification comprises: a) at least one nucleotide within the genomic coordinates chr14:22547505-22551621 or chr14:22547462-22551621; or b) an indel, a C to T substitution, or an A to G substitution within the genomic coordinates chosen from: chr14:22550574-22550598: chr14:22550544-22550568: chr14:22547505-22547529; chr14:22547525-22547549; and chr14:22547674-22547698.

21. The engineered cell of claim 20, wherein the genetic modification comprises: a) at least one nucleotide within the genomic coordinates chosen from the genomic coordinates listed in Table 2 or at least one nucleotide within the genomic coordinates targeted by a guide RNA comprising a guide sequence chosen from SEQ ID NOs: 111, 107, 101-106, 108-110, and 112-120; and/or
b) at least one nucleotide within the genomic coordinates chosen from: chr14:22550574-22550598: chr14:22550544-22550568: chr14:22547505-22547529; chr14:22547525-22547549; and chr14:22547674-22547698.

22. (canceled)

23. (canceled)

24. (canceled)

25. A composition comprising:
a) a TRAC guide RNA comprising a guide sequence that i) targets a TRAC genomic target sequence; or ii) directs an RNA-guided DNA binding agent to induce a double stranded break (DSB) or a single-stranded break (SSB) in a TRAC genomic target sequence comprising at least 10 contiguous nucleotides within the genomic coordinates chosen from: chr14:22550574-22550598; chr14:22550544-22550568; chr14:22547505-22547529; chr14:22547525-22547549; and chr14:22547674-22547698; or
b) a TRAC guide RNA, wherein the TRAC guide RNA comprises:
i) a guide sequence chosen from SEQ ID NOs: 111, 107, 101-106, 108-110, and 112-120;
ii) at least 20, 21, 22, 23, or 24 contiguous nucleotides of a sequence chosen from SEQ ID NOs: 111, 107, 101-106, 108-110, and 112-120; or
iii) a guide sequence that is at least 95%, 90%, or 85% identical to a sequence chosen from SEQ ID NOs: 111, 107, 101-106, 108-110, and 112-120;
iv) a sequence that comprises 10 contiguous nucleotides±10 nucleotides of a genomic coordinate listed in Table 2;
v) at least 20, 21, 22, 23, or 24 contiguous nucleotides of a sequence chosen from iv); or
vi) a guide sequence that is at least 95%, 90%, or 85% identical to a sequence chosen from iv).

26. (canceled)

27. (canceled)

28. (canceled)

29. A method of I) making an engineered human cell, which has reduced or eliminated surface expression of TRAC protein relative to an unmodified cell, or II) reducing surface expression of TRAC protein in a human cell relative to an unmodified cell, the method comprising contacting a cell with a composition comprising a TRAC guide RNA, wherein the TRAC guide RNA comprises:
i) a guide sequence chosen from SEQ ID NOs: 111, 107, 101-106, 108-110, and 112-120;
ii) at least 20, 21, 22, 23, or 24 contiguous nucleotides of a sequence chosen from SEQ ID NOs: 111, 107, 101-106, 108-110, and 112-120; or
iii) a guide sequence that is at least 95%, 90%, or 85% identical to a sequence chosen from SEQ ID NOs: 111, 107, 101-106, 108-110, and 112-120; or
iv) a sequence that comprises 10 contiguous nucleotides±10 nucleotides of a genomic coordinate listed in Table 2;
v) at least 20, 21, 22, 23, or 24 contiguous nucleotides of a sequence chosen from iv); or
vi) a guide sequence that is at least 95%, 90%, or 85% identical to a sequence chosen from iv).

30. (canceled)

31. The composition of claim 25,
wherein the TRAC guide RNA comprises:
a) a guide sequence chosen from SEQ ID NOs: 111, 107, 101, 102, and 103;
b) a guide sequence comprising the sequence of SEQ ID NO: 107; or
c) a guide sequence comprising the sequence of SEQ ID NO: 111.

32. (canceled)

33. (canceled)

34. A pharmaceutical composition comprising the engineered cell of claim 20.

35. An engineered cell, which has reduced or eliminated surface expression of TRBC relative to an unmodified cell, comprising a genetic modification in the TRBC gene, wherein the genetic modification comprises:
I) at least one nucleotide within the genomic coordinates (a)_chr7:142791756-142802543; (b) chr7:142791862-142793149; (c) chr7: 142791756-142792721; or (d) chr7:142801104-142802543; or wherein the genetic modification comprises at least one nucleotide within the genomic coordinates targeted by a guide RNA comprising a guide sequence chosen from SEQ ID NOs: 215, 201-214, and 216-265; or
II) an indel, a C to T substitution, or an A to G substitution within the genomic coordinates chosen from: (a) chr7:142791862-142793149; (b) chr7:142791756-142792721; (c) chr7:142801104-142802543; (d) chr7:142792690-142792714 and chr7:142792693-142792717; (e) chr7:142791756-142791780; chr7:142791761-142791785; chr7:142791820-142791844; chr7:142791939-142791963; chr7:142791940-142791964; and chr7:142792004-142792028; (f) chr7:142801104-142801124; chr7:142802103-142802127; and chr7:142802106-142802130; and (g) chr7:142802103-142802127.

36. (canceled)

37. The engineered cell of claim 35, wherein the genetic modification comprises at least one nucleotide within the genomic coordinates chosen from:
a) chr7:142792690-142792714; and chr7:142792693-142792717;
b) chr7:142791756-142791780; chr7:142791761-142791785; chr7:142791820-142791844; chr7:142791939-142791963; chr7:142791940-142791964; and chr7:142792004-142792028;
c) chr7:142801104-142801124; chr7:142802103-142802127; and chr7:142802106-142802130; and
d) chr7:142802103-142802127; and chr7:142802106-14280213; and
e) the genomic coordinates listed in Table 3.

38. (canceled)

39. (canceled)

40. (canceled)

41. (canceled)

42. (canceled)

43. (canceled)

44. (canceled)

45. A composition comprising (a) a TRBC guide RNA, wherein the TRBC guide RNA comprises:
i) a guide sequence chosen from SEQ ID NOs: 215, 201-214, and 216-265;
ii) at least 20, 21, 22, 23, or 24, contiguous nucleotides of a sequence chosen from SEQ ID NOs: 215, 201-214, and 216-265;
iii) a guide sequence that is at least 95%, 90%, or 85% identical to a sequence chosen from SEQ ID NOs: 215, 201-214, and 216-265;
iv) a sequence that comprises 10 contiguous nucleotides±10 nucleotides of a genomic coordinate listed in Table 3;
v) at least 20, 21, 22, 23, or 24 contiguous nucleotides of a sequence chosen from iv); or
vi) a guide sequence that is at least 95%, 90%, or 85% identical to a sequence chosen from iv).

46. (canceled)

47. (canceled)

48. A method of I) making an engineered human cell, which has reduced or eliminated surface expression of TRBC protein relative to an unmodified cell, or II) reducing surface expression of TRBC protein in a human cell relative to an unmodified cell, the method comprising contacting a cell with TRBC guide RNA and, wherein the TRBC guide RNA comprises:
i) a guide sequence chosen from SEQ ID NOs: 215, 201-214, and 216-265;
ii) at least 20, 21, 22, 23, or 24 contiguous nucleotides of a sequence chosen from SEQ ID NOs: 215, 201-214, and 216-265;
iii) a guide sequence that is at least 95%, 90%, or 85% identical to a sequence chosen from SEQ ID NOs: 215, 201-214, and 216-265;
iv) a sequence that comprises 10 contiguous nucleotides±10 nucleotides of a genomic coordinate listed in Table 3;
v) at least 20, 21, 22, 23, or 24, contiguous nucleotides of a sequence chosen from iv); or
vi) a guide sequence that is at least 95%, 90%, or 85% identical to a sequence chosen from iv).

49. (canceled)

50. The composition of claim 45, wherein the TRBC guide RNA comprises a guide sequence of:
a) any one of SEQ ID NOs: 215, 216, 223, 224, 229, 230, 246, 259, and 260,
b) any one of SEQ ID NOs: 215, 216, 224, 229, 246, 259, and 260; or
c) any one of SEQ ID NOs: 215, 259, and 260.

51. (canceled)

52. (canceled)

53. A pharmaceutical composition comprising the engineered cell of claim 35.

54. An engineered cell, which has reduced or eliminated surface expression of MHC class II relative to an unmodified cell, comprising:
I) a genetic modification in the CIITA gene, wherein the genetic modification comprises at least one nucleotide within the genomic coordinates chosen from: (a) chr16:10877363-10907788; and (b) chr16:10906515-10908136;
II) a genetic modification in the CIITA gene, wherein the genetic modification comprises an indel, a C to T substitution, or an A to G substitution within the genomic coordinates chosen from: (a) chr16:10906643-10906667: chr16:10907504-10907528: chr16:10907508-10907532: chr16:10907539-10907559; chr16:10895658-10895682; chr16:10895668-10895692; chr16:10895750-10895774; chr16:10895753-10895777; chr16:10895754-10895778; chr16:10898684-10898708; chr16:10901529-10901553; chr16:10902121-10902145; chr16:10902701-10902725; chr16:10904726-10904750; chr16:10904760-10904784; chr16:10906493-10906517; chr16:10906515-10906539; chr16:10906631-10906655; chr16:10906636-10906660; chr16:10906770-10906794; chr16:10906788-10906812; chr16:10906789-10906813; chr16:10906816-10906840; chr16:10907148-10907172; chr16:10907254-10907278; chr16:10907331-10907355; chr16:10907477-10907501; chr16:10907497-10907521; chr16:10907503-10907527; and chr16:10907574-10907598; and (b) chr16:10907504-10907528; or
III) a genetic modification in the CIITA gene, wherein the genetic modification comprises an indel, a C to T substitution, or an A to G substitution within the genomic coordinates chosen from: a) chr16:10906643-10906667: chr16:10907504-10907528: chr16:10895658-10895682: chr16:10902701-10902725; chr16:10906493-10906517; chr16:10906631-10906655; chr16:10907477-10907501; chr16:10907497-10907521; chr16:10907504-10907528; and chr16:10907508-10907532; and
b) chr16:10906889-10906913.

55. (canceled)

56. (canceled)

57. (canceled)

58. (canceled)

59. (canceled)

60. (canceled)

61. (canceled)

62. A composition comprising a CIITA guide RNA, wherein the CIITA guide RNA comprises:
i) a guide sequence chosen from SEQ ID NOs: 422, 301-421, and 423-576; or
ii) at least 20, 21, 22, 23, or 24 contiguous nucleotides of a sequence chosen from SEQ ID NOs: 422, 301-421, and 423-576; or
iii) a guide sequence that is at least 95%, 90%, or 85% identical to a sequence chosen from SEQ ID NOs: 422, 301-421, and 423-576; or
iv) a sequence that comprises 10 contiguous nucleotides±10 nucleotides of a genomic coordinate listed in Table 4; or
v) at least 20, 21, 22, 23, or 24 contiguous nucleotides of a sequence chosen from iv); or
vi) a guide sequence that is at least 95%, 90%, or 85% identical to a sequence chosen from iv).

63. (canceled)

64. (canceled)

65. A method of I) making an engineered human cell, which has reduced or eliminated surface expression of MHC class II protein relative to an unmodified cell, or II) reducing surface expression of MHC class II protein in a human cell relative to an unmodified cell, the method comprising contacting a cell with a CIITA guide RNA, wherein the CIITA guide RNA comprises:
i) a guide sequence chosen from SEQ ID NOs: 422, 301-421, and 423-576; or
ii) at least 20, 21, 22, 23, or 24 contiguous nucleotides of a sequence chosen from SEQ ID NOs: 422, 301-421, and 423-576; or
iii) a guide sequence that is at least 95%, 90%, or 85% identical to a sequence chosen from SEQ ID NOs: 422, 301-421, and 423-576; or
iv) a sequence that comprises 10 contiguous nucleotides±10 nucleotides of a genomic coordinate listed in Table 4; or
v) at least 20, 21, 22, 23, or 24 contiguous nucleotides of a sequence chosen from iv); or
vi) a guide sequence that is at least 95%, 90%, or 85% identical to a sequence chosen from iv).

66. (canceled)

67. The composition of claim 62, wherein the CIITA guide RNA comprises a guide sequence of chosen from SEQ ID NOs: 422, 301, 302, 320, 321, 324, 326, 327, 332, 354, 361, 372, 400, 408, 414, 415, 419, 420, 428, 431, 432, 434, 451, 455, 458, 462, 463, 464, and 468.

68. (canceled)

69. A pharmaceutical composition comprising the engineered cell of claim 54.

70. (canceled)

71. (canceled)

72. (canceled)

73. (canceled)

74. (canceled)

75. (canceled)

76. The engineered cell of claim 54,
wherein the cell:
a) has reduced expression of TRAC protein on the surface of the cell;
b) has reduced expression of TRBC protein on the surface of the cell;
c) is an immune cell;
d) is a stem cell;
e) is a primary cell; or
f) is engineered with a genomic editing system.

77. (canceled)

78. (canceled)

79. (canceled)

80. (canceled)

81. (canceled)

82. (canceled)

83. (canceled)

84. (canceled)

85. (canceled)

86. (canceled)

87. (canceled)

88. (canceled)

89. (canceled)

90. (canceled)

91. (canceled)

92. (canceled)

93. (canceled)

94. (canceled)

95. (canceled)

96. (canceled)

97. (canceled)

98. (canceled)

99. (canceled)

100. (canceled)

101. (canceled)

102. (canceled)

103. (canceled)

104. A method of treating a disease or disorder comprising administering the engineered cell, of claim 54 to a subject in need thereof.

105. (canceled)

106. (canceled)

107. (canceled)

108. (canceled)

The application's sequence listing, which the Patent Office published only in electronic form, follows.

SEQUENCE LISTING (3207 sequences)

SEQ ID NO: 1 - skipped

SEQ ID NO: 2 - RNA, 24 nt, synthetic construct
  source 1..24: mol_type = other RNA
cctgggtctggtcctccccatccc

SEQ ID NO: 3 - RNA, 24 nt, synthetic construct
  source 1..24: mol_type = other RNA
gtggagaccaggcctgcaggggat

SEQ ID NO: 4 - RNA, 24 nt, synthetic construct
  source 1..24: mol_type = other RNA
ccgtgtcctgggtctggtcctccc

SEQ ID NO: 5 - RNA, 24 nt, synthetic construct
  source 1..24: mol_type = other RNA
tccgtgtcctgggtctggtcctcc

SEQ ID NO: 6 - RNA, 24 nt, synthetic construct
  source 1..24: mol_type = other RNA
cacatggcaggtgtatctctgctc

SEQ ID NO: 7 - RNA, 24 nt, synthetic construct
  source 1..24: mol_type = other RNA
tgctgcacatggcaggtgtatctc

SEQ ID NO: 8 - RNA, 24 nt, synthetic construct
  source 1..24: mol_type = other RNA
ccgcacgaactgcgtgtcgtccac

SEQ ID NO: 9 - RNA, 24 nt, synthetic construct
  source 1..24: mol_type = other RNA
cgcacgaactgcgtgtcgtccacg

SEQ ID NO: 10 - RNA, 24 nt, synthetic construct
  source 1..24: mol_type = other RNA
gtgcgctgcagcgtctccttcccg

SEQ ID NO: 11 - RNA, 24 nt, synthetic construct
  source 1..24: mol_type = other RNA
ccgaggatggccgtcatggcgccc

SEQ ID NO: 12 - RNA, 24 nt, synthetic construct
  source 1..24: mol_type = other RNA
cgaggatggccgtcatggcgcccc

SEQ ID NO: 13 - RNA, 24 nt, synthetic construct
  source 1..24: mol_type = other RNA
aaggttccatcccctgcaggcctg

SEQ ID NO: 14 - RNA, 24 nt, synthetic construct
  source 1..24: mol_type = other RNA
agaccaggcctgcaggggatggaa

SEQ ID NO: 15 - RNA, 24 nt, synthetic construct
  source 1..24: mol_type = other RNA
acttctggaaggttccatcccctg

SEQ ID NO: 16 - RNA, 24 nt, synthetic construct
  source 1..24: mol_type = other RNA
cgatgaagcggggctccccgcggc

SEQ ID NO: 17 - RNA, 24 nt, synthetic construct
  source 1..24: mol_type = other RNA
tccgtgtcccggcccggccgcggg

SEQ ID NO: 18 - RNA, 24 nt, synthetic construct
  source 1..24: mol_type = other RNA
ccgtgtcccggcccggccgcgggg

SEQ ID NO: 19 - RNA, 24 nt, synthetic construct
  source 1..24: mol_type = other RNA
cagacgccgaggatggccgtcatg

SEQ ID NO: 20 - RNA, 24 nt, synthetic construct
  source 1..24: mol_type = other RNA
ccagacgccgaggatggccgtcat

SEQ ID NO: 21 - RNA, 24 nt, synthetic construct
  source 1..24: mol_type = other RNA
agacgccgaggatggccgtcatgg

SEQ ID NO: 22 - RNA, 24 nt, synthetic construct
  source 1..24: mol_type = other RNA
ctgtcgaaccgcacgaactgcgtg

SEQ ID NO: 23 - RNA, 24 nt, synthetic construct
  source 1..24: mol_type = other RNA
tcgtgcggttcgacagcgacgccg

SEQ ID NO: 24 - RNA, 24 nt, synthetic construct
  source 1..24: mol_type = other RNA
ccatccccatcgtgggcatcattg

SEQ ID NO: 25 - RNA, 24 nt, synthetic construct
  source 1..24: mol_type = other RNA
tcctctggctcgcggcgtcgctgt

SEQ ID NO: 26 - RNA, 24 nt, synthetic construct
  source 1..24: mol_type = other RNA
ctctggttgtagtagccgcgcagg

SEQ ID NO: 27 - RNA, 24 nt, synthetic construct
  source 1..24: mol_type = other RNA
acctggggaccctgcgcggctact

SEQ ID NO: 28 - RNA, 24 nt, synthetic construct
  source 1..24: mol_type = other RNA
cgctctggttgtagtagccgcgca

SEQ ID NO: 29 - RNA, 24 nt, synthetic construct
  source 1..24: mol_type = other RNA
gctctggttgtagtagccgcgcag

SEQ ID NO: 30 - RNA, 24 nt, synthetic construct
  source 1..24: mol_type = other RNA
tatttttttctatagtgtgagaca

SEQ ID NO: 31 - RNA, 24 nt, synthetic construct
  source 1..24: mol_type = other RNA
acgcctacgacggcaaggattaca

SEQ ID NO: 32 - RNA, 24 nt, synthetic construct
  source 1..24: mol_type = other RNA
tttgttctaccccaggcagtgaca

SEQ ID NO: 33 - RNA, 24 nt, synthetic construct
  source 1..24: mol_type = other RNA
ttttgttctaccccaggcagtgac

SEQ ID NO: 34 - RNA, 24 nt, synthetic construct
  source 1..24: mol_type = other RNA
agcgaccacagctccagtgatcac

SEQ ID NO: 35 - RNA, 24 nt, synthetic construct
  source 1..24: mol_type = other RNA
gagctccgtgtcctgggtctggtc

SEQ ID NO: 36 - RNA, 24 nt, synthetic construct
  source 1..24: mol_type = other RNA
tccacgagctccgtgtcctgggtc

SEQ ID NO: 37 - RNA, 24 nt, synthetic construct
  source 1..24: mol_type = other RNA
acgagctccgtgtcctgggtctgg

SEQ ID NO: 38 - RNA, 24 nt, synthetic construct
  source 1..24: mol_type = other RNA
cgagctccgtgtcctgggtctggt

SEQ ID NO: 39 - RNA, 24 nt, synthetic construct
  source 1..24: mol_type = other RNA
gcaggcctggtctccacgagctcc

SEQ ID NO: 40 - RNA, 24 nt, synthetic construct
  source 1..24: mol_type = other RNA
tcccctgcaggcctggtctccacg

SEQ ID NO: 41 - RNA, 24 nt, synthetic construct
  source 1..24: mol_type = other RNA
atccgtgtcccggcccggccgcgg

SEQ ID NO: 42 - RNA, 24 nt, synthetic construct
  source 1..24: mol_type = other RNA
ccttcccgttctccaggtatctgc

SEQ ID NO: 43 - RNA, 24 nt, synthetic construct
  source 1..24: mol_type = other RNA
ccgttctccaggtatctgcggagc

SEQ ID NO: 44 - RNA, 24 nt, synthetic construct
  source 1..24: mol_type = other RNA
acctgccatgtgcagcatgagggt

SEQ ID NO: 45 - RNA, 24 nt, synthetic construct
  source 1..24: mol_type = other RNA
cacctgccatgtgcagcatgaggg

SEQ ID NO: 46 - RNA, 24 nt, synthetic construct
  source 1..24: mol_type = other RNA
acctggcagcgggatggggaggac

SEQ ID NO: 47 - RNA, 24 nt, synthetic construct
  source 1..24: mol_type = other RNA
cactgacctggcagcgggatgggg

SEQ ID NO: 48 - RNA, 24 nt, synthetic construct
  source 1..24: mol_type = other RNA
cctggcagcgggatggggaggacc

SEQ ID NO: 49 - RNA, 24 nt, synthetic construct
  source 1..24: mol_type = other RNA
ccatctcagggtgaggggcttggg

SEQ ID NO: 50 - RNA, 24 nt, synthetic construct
  source 1..24: mol_type = other RNA
tggccgtcatggcgccccgaaccc

SEQ ID NO: 51 - RNA, 24 nt, synthetic construct
  source 1..24: mol_type = other RNA
atgtccgccgcggtccaagagcgc

SEQ ID NO: 52 - RNA, 24 nt, synthetic construct
  source 1..24: mol_type = other RNA
ggtacccgtgcgctgcagcgtctc

SEQ ID NO: 53 - RNA, 24 nt, synthetic construct
  source 1..24: mol_type = other RNA
gggaaggagacgctgcagcgcacg

SEQ ID NO: 54 - RNA, 24 nt, synthetic construct
  source 1..24: mol_type = other RNA
gcgggcgccgtggatagagcagga

SEQ ID NO: 55 - RNA, 24 nt, synthetic construct
  source 1..24: mol_type = other RNA
tcctgctctatccacggcgcccgc

SEQ ID NO: 56 - RNA, 24 nt, synthetic construct
  source 1..24: mol_type = other RNA
cccctggtacccgtgcgctgcagc

SEQ ID NO: 57 - RNA, 24 nt, synthetic construct
  source 1..24: mol_type = other RNA
tggtacccgtgcgctgcagcgtct

SEQ ID NO: 58 - RNA, 24 nt, synthetic construct
  source 1..24: mol_type = other RNA
catctcagggtgaggggcttgggc

SEQ ID NO: 59 - RNA, 24 nt, synthetic construct
  source 1..24: mol_type = other RNA
acgcagttcgtgcggttcgacagc

SEQ ID NO: 60 - RNA, 24 nt, synthetic construct
  source 1..24: mol_type = other RNA
cgcccaggtctgggtcagggccag

SEQ ID NO: 61 - RNA, 24 nt, synthetic construct
  source 1..24: mol_type = other RNA
cactcacccgcccaggtctgggtc

SEQ ID NO: 62 - RNA, 24 nt, synthetic construct
  source 1..24: mol_type = other RNA
ccgcccaggtctgggtcagggcca

SEQ ID NO: 63 - RNA, 24 nt, synthetic construct
  source 1..24: mol_type = other RNA
cccgcccaggtctgggtcagggcc

SEQ ID NO: 64 - RNA, 24 nt, synthetic construct
  source 1..24: mol_type = other RNA
cagcgacgccgcgagccagaggat

SEQ ID NO: 65 - RNA, 24 nt, synthetic construct
  source 1..24: mol_type = other RNA
cgcgagccagaggatggagccgcg

SEQ ID NO: 66 - RNA, 24 nt, synthetic construct
  source 1..24: mol_type = other RNA
gctctatccacggcgcccgcggct

SEQ ID NO: 67 - RNA, 24 nt, synthetic construct
  source 1..24: mol_type = other RNA
cacatcagagccctgggcactgtc

SEQ ID NO: 68 - RNA, 24 nt, synthetic construct
  source 1..24: mol_type = other RNA
cagacccaggacacggagctcgtg

SEQ ID NO: 69 - RNA, 24 nt, synthetic construct
  source 1..24: mol_type = other RNA
ccaggacacggagctcgtggagac

SEQ ID NO: 70 - RNA, 24 nt, synthetic construct
  source 1..24: mol_type = other RNA
ctctgggaaaagaggggaaggtga

SEQ ID NO: 71 - RNA, 24 nt, synthetic construct
  source 1..24: mol_type = other RNA
tctgggaaaagaggggaaggtgag

SEQ ID NO: 72 - RNA, 24 nt, synthetic construct
  source 1..24: mol_type = other RNA
agacgctgcagcgcacgggtacca

SEQ ID NO: 73 - RNA, 24 nt, synthetic construct
  source 1..24: mol_type = other RNA
tccttttctatctgtgggaagaaa

SEQ ID NO: 74 - RNA, 24 nt, synthetic construct
  source 1..24: mol_type = other RNA
cactgcctggggtagaacaaaaac

SEQ ID NO: 75 - RNA, 24 nt, synthetic construct
  source 1..24: mol_type = other RNA
acaaccagagcgaggccggtgagt

SEQ ID NO: 76 - RNA, 24 nt, synthetic construct
  source 1..24: mol_type = other RNA
ctacaaccagagcgaggccggtga

SEQ ID NO: 77 - RNA, 24 nt, synthetic construct
  source 1..24: mol_type = other RNA
tacaaccagagcgaggccggtgag

SEQ ID NO: 78 - RNA, 24 nt, synthetic construct
  source 1..24: mol_type = other RNA
ccagagcgaggccggtgagtgacc

SEQ ID NO: 79 - RNA, 24 nt, synthetic construct
  source 1..24: mol_type = other RNA
ccatcccgctgccaggtcagtgtg

SEQ ID NO: 80 - RNA, 24 nt, synthetic construct
  source 1..24: mol_type = other RNA
gtatctgcggagccactccacgca

SEQ ID NO: 81-100 - skipped (20 entries)

SEQ ID NO: 101 - RNA, 24 nt, synthetic construct
  source 1..24: mol_type = other RNA
atatccagaaccctgaccctgccg

SEQ ID NO: 102 - RNA, 24 nt, synthetic construct
  source 1..24: mol_type = other RNA
gccgtgtaccagctgagagactct

SEQ ID NO: 103 - RNA, 24 nt, synthetic construct
  source 1..24: mol_type = other RNA
caggccacagcactgttgctcttg

SEQ ID NO: 104 - RNA, 24 nt, synthetic construct
  source 1..24: mol_type = other RNA
cccagcccaggtaagggcagcttt

SEQ ID NO: 105 - RNA, 24 nt, synthetic construct
  source 1..24: mol_type = other RNA
gtcttacctgtttcaaagcttttc

SEQ ID NO: 106 - RNA, 24 nt, synthetic construct
  source 1..24: mol_type = other RNA
ctttgaaacaggtaagacaggggt

SEQ ID NO: 107 - RNA, 24 nt, synthetic construct
  source 1..24: mol_type = other RNA
ttaggttcgtatctgtaaaaccaa

SEQ ID NO: 108 - RNA, 24 nt, synthetic construct
  source 1..24: mol_type = other RNA
ttacagatacgaacctaaactttc

SEQ ID NO: 109 - RNA, 24 nt, synthetic construct
  source 1..24: mol_type = other RNA
ttgaaagtttaggttcgtatctgt

SEQ ID NO: 110 - RNA, 24 nt, synthetic construct
  source 1..24: mol_type = other RNA
actttcaaaacctgtcagtgattg

SEQ ID NO: 111 - RNA, 24 nt, synthetic construct
  source 1..24: mol_type = other RNA
aaaacctgtcagtgattgggttcc

SEQ ID NO: 112 - RNA, 24 nt, synthetic construct
  source 1..24: mol_type = other RNA
tgtcagtgattgggttccgaatcc

SEQ ID NO: 113 - RNA, 24 nt, synthetic construct
  source 1..24: mol_type = other RNA
gggttccgaatcctcctcctgaaa

SEQ ID NO: 114 - RNA, 24 nt, synthetic construct
  source 1..24: mol_type = other RNA
aaggcccctcacctcagctggacc

SEQ ID NO: 115 - RNA, 24 nt, synthetic construct
  source 1..24: mol_type = other RNA
agcttcaaggcccctcacctcagc

SEQ ID NO: 116 - RNA, 24 nt, synthetic construct
  source 1..24: mol_type = other RNA
attccagatctgcaagattgtaag

SEQ ID NO: 117 - RNA, 24 nt, synthetic construct
  source 1..24: mol_type = other RNA
aaccctgatcctcttgtcccacag

SEQ ID NO: 118 - RNA, 24 nt, synthetic construct
  source 1..24: mol_type = other RNA
atcatgtcctaaccctgatcctct

SEQ ID NO: 119 - RNA, 24 nt, synthetic construct
  source 1..24: mol_type = other RNA
gatcatgtcctaaccctgatcctc

SEQ ID NO: 120 - RNA, 24 nt, synthetic construct
  source 1..24: mol_type = other RNA
ggaaatgagatcatgtcctaaccc

SEQ ID NO: 121-200 - skipped (80 entries)

SEQ ID NO: 201 - RNA, 24 nt, synthetic construct
  source 1..24: mol_type = other RNA
cacggacccgcagcccctcaagga

SEQ ID NO: 202 - RNA, 24 nt, synthetic construct
  source 1..24: mol_type = other RNA
acggacccgcagcccctcaaggag

SEQ ID NO: 203 - RNA, 24 nt, synthetic construct
  source 1..24: mol_type = other RNA
gacgagtggacccaggatagggcc

SEQ ID NO: 204 - RNA, 24 nt, synthetic construct
  source 1..24: mol_type = other RNA
tggacccaggatagggccaaaccc

SEQ ID NO: 205 - RNA, 24 nt, synthetic construct
  source 1..24: mol_type = other RNA
ggacccaggatagggccaaacccg

SEQ ID NO: 206 - RNA, 24 nt, synthetic construct
  source 1..24: mol_type = other RNA
ccctgctttctttcagactgtggc

SEQ ID NO: 207 - RNA, 24 nt, synthetic construct
  source 1..24: mol_type = other RNA
gactgtggctttacctcgggtaag

SEQ ID NO: 208 - RNA, 24 nt, synthetic construct
  source 1..24: mol_type = other RNA
actgtggctttacctcgggtaagt

SEQ ID NO: 209 - RNA, 24 nt, synthetic construct
  source 1..24: mol_type = other RNA
tggctttacctcgggtaagtaagc

SEQ ID NO: 210 - RNA, 24 nt, synthetic construct
  source 1..24: mol_type = other RNA
tacctcgggtaagtaagcccttcc

SEQ ID NO: 211 - RNA, 24 nt, synthetic construct
  source 1..24: mol_type = other RNA
aggaagggcttacttacccgaggt

SEQ ID NO: 212 - RNA, 24 nt, synthetic construct
  source 1..24: mol_type = other RNA
cgggtaagtaagcccttccttttc

SEQ ID NO: 213 - RNA, 24 nt, synthetic construct
  source 1..24: mol_type = other RNA
gggtaagtaagcccttccttttcc

SEQ ID NO: 214 - RNA, 24 nt, synthetic construct
  source 1..24: mol_type = other RNA
tgccaacagtgtcctaccagcaag

SEQ ID NO: 215 - RNA, 24 nt, synthetic construct
  source 1..24: mol_type = other RNA
gtgtcctaccagcaaggggtcctg

SEQ ID NO: 216 - RNA, 24 nt, synthetic construct
  source 1..24: mol_type = other RNA
tcctaccagcaaggggtcctgtct

SEQ ID NO: 217 - RNA, 24 nt, synthetic construct
  source 1..24: mol_type = other RNA
accatggccatcaacacaagggcg

SEQ ID NO: 218 - RNA, 24 nt, synthetic construct
  source 1..24: mol_type = other RNA
ccatggtaagcaggagggcaggat

SEQ ID NO: 219 - RNA, 24 nt, synthetic construct
  source 1..24: mol_type = other RNA
ggtcaagagaaaggatttctgaag

SEQ ID NO: 220 - RNA, 24 nt, synthetic construct
  source 1..24: mol_type = other RNA
gtcaagagaaaggatttctgaagg

SEQ ID NO: 221 - RNA, 24 nt, synthetic construct
  source 1..24: mol_type = other RNA
ggctgccttcagaaatcctttctc

SEQ ID NO: 222 - RNA, 24 nt, synthetic construct
  source 1..24: mol_type = other RNA
cccacacccaaaaggccacactgg

SEQ ID NO: 223 - RNA, 24 nt, synthetic construct
  source 1..24: mol_type = other RNA
acccaaaaggccacactggtgtgc

SEQ ID NO: 224 - RNA, 24 nt, synthetic construct
  source 1..24: mol_type = other RNA
tccttcccattcacccaccagctc

SEQ ID NO: 225 - RNA, 24 nt, synthetic construct
  source 1..24: mol_type = other RNA
gacccgcagcccctcaaggagcag

SEQ ID NO: 226 - RNA, 24 nt, synthetic construct
  source 1..24: mol_type = other RNA
acccgcagcccctcaaggagcagc

SEQ ID NO: 227 - RNA, 24 nt, synthetic construct
  source 1..24: mol_type = other RNA
ctcaaggagcagcccgccctcaat

SEQ ID NO: 228 - RNA, 24 nt, synthetic construct
  source 1..24: mol_type = other RNA
agcccgccctcaatgactccagat

SEQ ID NO: 229 - RNA, 24 nt, synthetic construct
  source 1..24: mol_type = other RNA
cggccaccttctggcagaaccccc

SEQ ID NO: 230 - RNA, 24 nt, synthetic construct
  source 1..24: mol_type = other RNA
gggggttctgccagaaggtggccg

SEQ ID NO: 231 - RNA, 24 nt, synthetic construct
  source 1..24: mol_type = other RNA
cgggggttctgccagaaggtggcc

SEQ ID NO: 232 - RNA, 24 nt, synthetic construct
  source 1..24: mol_type = other RNA
ccttctggcagaacccccgcaacc

SEQ ID NO: 233 - RNA, 24 nt, synthetic construct
  source 1..24: mol_type = other RNA
tggttgcgggggttctgccagaag

SEQ ID NO: 234 - RNA, 24 nt, synthetic construct
  source 1..24: mol_type = other RNA
ctgggtccactcgtcattctccga

SEQ ID NO: 235 - RNA, 24 nt, synthetic construct
  source 1..24: mol_type = other RNA
cctgggtccactcgtcattctccg

SEQ ID NO: 236 - RNA, 24 nt, synthetic construct
  source 1..24: mol_type = other RNA
gagaatgacgagtggacccaggat

SEQ ID NO: 237 - RNA, 24 nt, synthetic construct
  source 1..24: mol_type = other RNA
tgacgagtggacccaggatagggc

SEQ ID NO: 238 - RNA, 24 nt, synthetic construct
  source 1..24: mol_type = other RNA
gccctatcctgggtccactcgtca

SEQ ID NO: 239 - RNA, 24 nt, synthetic construct
  source 1..24: mol_type = other RNA
aggcctggggtagagcaggtgagt

SEQ ID NO: 240 - RNA, 24 nt, synthetic construct
  source 1..24: mol_type = other RNA
aggccccactcacctgctctaccc

SEQ ID NO: 241 - RNA, 24 nt, synthetic construct
  source 1..24: mol_type = other RNA
gagcaggtgagtggggcctgggga

SEQ ID NO: 242 - RNA, 24 nt, synthetic construct
  source 1..24: mol_type = other RNA
tccccaggccccactcacctgctc

SEQ ID NO: 243 - RNA, 24 nt, synthetic construct
  source 1..24: mol_type = other RNA
ctccccaggccccactcacctgct

SEQ ID NO: 244 - RNA, 24 nt, synthetic construct
  source 1..24: mol_type = other RNA
tctccccaggccccactcacctgc

SEQ ID NO: 245 - RNA, 24 nt, synthetic construct
  source 1..24: mol_type = other RNA
accagcaaggggtcctgtctgcca

SEQ ID NO: 246 - RNA, 20 nt, synthetic construct
  source 1..20: mol_type = other RNA
ccacacccaaaaggccacac

SEQ ID NO: 247 - RNA, 24 nt, synthetic construct
  source 1..24: mol_type = other RNA
cacagacccgcagcccctcaagga

SEQ ID NO: 248 - RNA, 24 nt, synthetic construct
  source 1..24: mol_type = other RNA
acagacccgcagcccctcaaggag

SEQ ID NO: 249 - RNA, 24 nt, synthetic construct
  source 1..24: mol_type = other RNA
tggacccaggatagggccaaacct

SEQ ID NO: 250 - RNA, 24 nt, synthetic construct
  source 1..24: mol_type = other RNA
ggacccaggatagggccaaacctg

SEQ ID NO: 251 - RNA, 24 nt, synthetic construct
  source 1..24: mol_type = other RNA
gccaaacctgtcacccagatcgtc

SEQ ID NO: 252 - RNA, 24 nt, synthetic construct
  source 1..24: mol_type = other RNA
cctgtcacccagatcgtcagcgcc

SEQ ID NO: 253 - RNA, 24 nt, synthetic construct
  source 1..24: mol_type = other RNA
ccctgttttctttcagactgtggc

SEQ ID NO: 254 - RNA, 24 nt, synthetic construct
  source 1..24: mol_type = other RNA
tgttttctttcagactgtggcttc

SEQ ID NO: 255 - RNA, 24 nt, synthetic construct
  source 1..24: mol_type = other RNA
tggcttcacctccggtaagtgagt

SEQ ID NO: 256 - RNA, 24 nt, synthetic construct
  source 1..24: mol_type = other RNA
aggagagactcacttaccggaggt

SEQ ID NO: 257 - RNA, 24 nt, synthetic construct
  source 1..24: mol_type = other RNA
ctgttgacaagaacagagcatgta

SEQ ID NO: 258 - RNA, 24 nt, synthetic construct
  source 1..24: mol_type = other RNA
tgtcaacagagtcttaccagcaag

SEQ ID NO: 259 - RNA, 24 nt, synthetic construct
  source 1..24: mol_type = other RNA
gagtcttaccagcaaggggtcctg

SEQ ID NO: 260 - RNA, 24 nt, synthetic construct
  source 1..24: mol_type = other RNA
tcttaccagcaaggggtcctgtct

SEQ ID NO: 261 - RNA, 24 nt, synthetic construct
  source 1..24: mol_type = other RNA
accatggccatcagcacgagggca

SEQ ID NO: 262 - RNA, 24 nt, synthetic construct
  source 1..24: mol_type = other RNA
tctcttccacaggtcaagagaaag

SEQ ID NO: 263 - RNA, 24 nt, synthetic construct
  source 1..24: mol_type = other RNA
tcaagagaaaggattccagaggct

SEQ ID NO: 264 - RNA, 24 nt, synthetic construct
  source 1..24: mol_type = other RNA
agctagcctctggaatcctttctc

SEQ ID NO: 265 - RNA, 24 nt, synthetic construct
  source 1..24: mol_type = other RNA
ggatggttttggagctagcctctg

SEQ ID NO: 266-300 - skipped (35 entries)

SEQ ID NO: 301 - RNA, 24 nt, synthetic construct
  source 1..24: mol_type = other RNA
tcaaagtaccctacaggaggacca

SEQ ID NO: 302 - RNA, 24 nt, synthetic construct
  source 1..24: mol_type = other RNA
agtaccctacaggaggaccagttc

SEQ ID NO: 303 - skipped

SEQ ID NO: 304 - RNA, 24 nt, synthetic construct
  source 1..24: mol_type = other RNA
tacctgtcagagccccaaggtaaa

SEQ ID NO: 305 - RNA, 24 nt, synthetic construct
  source 1..24: mol_type = other RNA
tttaccttggggctctgacaggta

SEQ ID NO: 306 - RNA, 24 nt, synthetic construct
  source 1..24: mol_type = other RNA
ttttaccttggggctctgacaggt

SEQ ID NO: 307 - RNA, 24 nt, synthetic construct
  source 1..24: mol_type = other RNA
gcctgggagggaagacaatgctca

SEQ ID NO: 308 - RNA, 24 nt, synthetic construct
  source 1..24: mol_type = other RNA
tcttccctcccaggcagctcacag

SEQ ID NO: 309 - RNA, 24 nt, synthetic construct
  source 1..24: mol_type = other RNA
tccctcccaggcagctcacagtgt

SEQ ID NO: 310 - RNA, 24 nt, synthetic construct
  source 1..24: mol_type = other RNA
ctcacagtgtgccaccatggagtt

SEQ ID NO: 311 - RNA, 24 nt, synthetic construct
  source 1..24: mol_type = other RNA
tcacagtgtgccaccatggagttg

SEQ ID NO: 312 - RNA, 24 nt, synthetic construct
  source 1..24: mol_type = other RNA
cacagtgtgccaccatggagttgg

SEQ ID NO: 313 - RNA, 24 nt, synthetic construct
  source 1..24: mol_type = other RNA
gaagagattgagctctactcaggt

SEQ ID NO: 314 - RNA, 24 nt, synthetic construct
  source 1..24: mol_type = other RNA
acctgagtagagctcaatctcttc

SEQ ID NO: 315 - RNA, 24 nt, synthetic construct
  source 1..24: mol_type = other RNA
gagattgagctctactcaggtggg

SEQ ID NO: 316 - RNA, 24 nt, synthetic construct
  source 1..24: mol_type = other RNA
attgagctctactcaggtgggccc

SEQ ID NO: 317 - RNA, 24 nt, synthetic construct
  source 1..24: mol_type = other RNA
ttgagctctactcaggtgggccct

SEQ ID NO: 318 - RNA, 24 nt, synthetic construct
  source 1..24: mol_type = other RNA
aggtgggccctcctccctctggtc

SEQ ID NO: 319 - RNA, 24 nt, synthetic construct
  source 1..24: mol_type = other RNA
cttttcctcccagaacccgacaca

SEQ ID NO: 320 - RNA, 24 nt, synthetic construct
  source 1..24: mol_type = other RNA
gtctgtgtcgggttctgggaggaa

SEQ ID NO: 321 - RNA, 24 nt, synthetic construct
  source 1..24: mol_type = other RNA
aacccgacacagacaccatcaact

SEQ ID NO: 322 - RNA, 24 nt, synthetic construct
  source 1..24: mol_type = other RNA
ggcttatgccaatatcggtgagga

SEQ ID NO: 323 - RNA, 24 nt, synthetic construct
  source 1..24: mol_type = other RNA
cttcctcaccgatattggcataag

SEQ ID NO: 324 - RNA, 24 nt, synthetic construct
  source 1..24: mol_type = other RNA
gcttcctcaccgatattggcataa

SEQ ID NO: 325 - RNA, 24 nt, synthetic construct
  source 1..24: mol_type = other RNA
tgccaatatcggtgaggaagcacc

SEQ ID NO: 326 - RNA, 24 nt, synthetic construct
  source 1..24: mol_type = other RNA
ggtgcttcctcaccgatattggca

SEQ ID NO: 327 - RNA, 24 nt, synthetic construct
  source 1..24: mol_type = other RNA
gccaatatcggtgaggaagcacct

SEQ ID NO: 328 - RNA, 24 nt, synthetic construct
  source 1..24: mol_type = other RNA
ttttccttgtctgggcagcggaac

SEQ ID NO: 329 - RNA, 24 nt, synthetic construct
  source 1..24: mol_type = other RNA
gggcagcggaactggaccagtatg

SEQ ID NO: 330 - RNA, 24 nt, synthetic construct
  source 1..24: mol_type = other RNA
gaactggaccagtatgtcttccag

SEQ ID NO: 331 - RNA, 24 nt, synthetic construct
  source 1..24: mol_type = other RNA
aactggaccagtatgtcttccagg

SEQ ID NO: 332 - RNA, 24 nt, synthetic construct
  source 1..24: mol_type = other RNA
atgtcttccaggactcccagctgg

SEQ ID NO: 333 - RNA, 24 nt, synthetic construct
  source 1..24: mol_type = other RNA
ttactgaaaatgtccttgctcagg

SEQ ID NO: 334 - RNA, 24 nt, synthetic construct
  source 1..24: mol_type = other RNA
aacttactgaaaatgtccttgctc

SEQ ID NO: 335 - RNA, 24 nt, synthetic construct
  source 1..24: mol_type = other RNA
aaacttactgaaaatgtccttgct

SEQ ID NO: 336 - RNA, 24 nt, synthetic construct
  source 1..24: mol_type = other RNA
ccacccaccacaaacttactgaaa

SEQ ID NO: 337 - RNA, 24 nt, synthetic construct
  source 1..24: mol_type = other RNA
tgtgctctactttgagaaaaacca

SEQ ID NO: 338 - RNA, 24 nt, synthetic construct
  source 1..24: mol_type = other RNA
ggtttttctcaaagtagagcacat

SEQ ID NO: 339 - RNA, 24 nt, synthetic construct
  source 1..24: mol_type = other RNA
ggtcctatgtgctctactttgaga

SEQ ID NO: 340 - RNA, 24 nt, synthetic construct
  source 1..24: mol_type = other RNA
cagaaaagtcagaaaagacgtgag

SEQ ID NO: 341 - RNA, 24 nt, synthetic construct
  source 1..24: mol_type = other RNA
agaaaagtcagaaaagacgtgagt

SEQ ID NO: 342 - RNA, 24 nt, synthetic construct
  source 1..24: mol_type = other RNA
gaaaagtcagaaaagacgtgagtg

SEQ ID NO: 343 - RNA, 24 nt, synthetic construct
  source 1..24: mol_type = other RNA
tcactcacgtcttttctgactttt

SEQ ID NO: 344 - RNA, 24 nt, synthetic construct
  source 1..24: mol_type = other RNA
ctcactcacgtcttttctgacttt

SEQ ID NO: 345 - RNA, 24 nt, synthetic construct
  source 1..24: mol_type = other RNA
aagtcagaaaagacgtgagtgagc

SEQ ID NO: 346 - RNA, 24 nt, synthetic construct
  source 1..24: mol_type = other RNA
agtcagaaaagacgtgagtgagcc

SEQ ID NO: 347 - RNA, 24 nt, synthetic construct
  source 1..24: mol_type = other RNA
aaaagacgtgagtgagcccctccc

SEQ ID NO: 348 - RNA, 24 nt, synthetic construct
  source 1..24: mol_type = other RNA
gacgtgagtgagcccctccctgat

SEQ ID NO: 349 - RNA, 24 nt, synthetic construct
  source 1..24: mol_type = other RNA
ctgcagagaaaacatgtgatcagc

SEQ ID NO: 350 - RNA, 24 nt, synthetic construct
  source 1..24: mol_type = other RNA
gctgcagagaaaacatgtgatcag

SEQ ID NO: 351 - RNA, 24 nt, synthetic construct
  source 1..24: mol_type = other RNA
ggctgcagagaaaacatgtgatca

SEQ ID NO: 352 - RNA, 24 nt, synthetic construct
  source 1..24: mol_type = other RNA
tttctctgcagccttcccagagga

SEQ ID NO: 353 - RNA, 24 nt, synthetic construct
  source 1..24: mol_type = other RNA
cagccttcccagaggagcttccgg

SEQ ID NO: 354 - RNA, 24 nt, synthetic construct
  source 1..24: mol_type = other RNA
ttccagtgcttcaggtctgccgga

SEQ ID NO: 355 - RNA, 24 nt, synthetic construct
  source 1..24: mol_type = other RNA
acacctggcttccagtgcttcagg

SEQ ID NO: 356 - RNA, 24 nt, synthetic construct
  source 1..24: mol_type = other RNA
cagcccacctgccctgcacacctg

SEQ ID NO: 357 - RNA, 24 nt, synthetic construct
  source 1..24: mol_type = other RNA
cacagcccacttcctcacagctga

SEQ ID NO: 358 - RNA, 24 nt, synthetic construct
  source 1..24: mol_type = other RNA
acagcccacttcctcacagctgag

SEQ ID NO: 359 - RNA, 24 nt, synthetic construct
  source 1..24: mol_type = other RNA
ctgcctgcgctgttcaaccaggag

SEQ ID NO: 360 - RNA, 24 nt, synthetic construct
  source 1..24: mol_type = other RNA
cctgcgctgttcaaccaggagcca

SEQ ID NO: 361 - RNA, 24 nt, synthetic construct
  source 1..24: mol_type = other RNA
cgctgttcaaccaggagccagcct

SEQ ID NO: 362 - RNA, 24 nt, synthetic construct
  source 1..24: mol_type = other RNA
accaggagccagcctccggccaga

SEQ ID NO: 363 - RNA, 24 nt, synthetic construct
  source 1..24: mol_type = other RNA
gcctccggccagatgcgcctggag

SEQ ID NO: 364 - RNA, 24 nt, synthetic construct
  source 1..24: mol_type = other RNA
ccggccagatgcgcctggagaaaa

SEQ ID NO: 365 - RNA, 24 nt, synthetic construct
  source 1..24: mol_type = other RNA
aacatactgggaatctggtcggtt

SEQ ID NO: 366 - RNA, 24 nt, synthetic construct
  source 1..24: mol_type = other RNA
ctgcctttgtctcttgcagtgcct

SEQ ID NO: 367 - RNA, 24 nt, synthetic construct
  source 1..24: mol_type = other RNA
ttgtctcttgcagtgcctttctcc

SEQ ID NO: 368 - RNA, 24 nt, synthetic construct
  source 1..24: mol_type = other RNA
tgcctttctccagttcctcgttga

SEQ ID NO: 369 - RNA, 24 nt, synthetic construct
  source 1..24: mol_type = other RNA
tctccctgagggacccatccagtt

SEQ ID NO: 370 - RNA, 24 nt, synthetic construct
  source 1..24: mol_type = other RNA
ctccctgagggacccatccagttt

SEQ ID NO: 371 - RNA, 24 nt, synthetic construct
  source 1..24: mol_type = other RNA
cctgagggacccatccagtttgtc

SEQ ID NO: 372 - RNA, 24 nt, synthetic construct
  source 1..24: mol_type = other RNA
ggacccatccagtttgtccccacc

SEQ ID NO: 373 - RNA, 24 nt, synthetic construct
  source 1..24: mol_type = other RNA
ccagtttgtccccaccatctccac

SEQ ID NO: 374 - RNA, 24 nt, synthetic construct
  source 1..24: mol_type = other RNA
cagtttgtccccaccatctccact

SEQ ID NO: 375 - RNA, 24 nt, synthetic construct
  source 1..24: mol_type = other RNA
agtttgtccccaccatctccactc

SEQ ID NO: 376 - RNA, 24 nt, synthetic construct
  source 1..24: mol_type = other RNA
caaatctctgaggctggaacaggg

SEQ ID NO: 377 - RNA, 24 nt, synthetic construct
  source 1..24: mol_type = other RNA
accatggtagatgaatatactgga

SEQ ID NO: 378 - RNA, 24 nt, synthetic construct
  source 1..24: mol_type = other RNA
caccatggtagatgaatatactgg

SEQ ID NO: 379 - RNA, 24 nt, synthetic construct
  source 1..24: mol_type = other RNA
tcaccatggtagatgaatatactg

SEQ ID NO: 380 - RNA, 24 nt, synthetic construct
  source 1..24: mol_type = other RNA
tctaccatggtgagtgcggggcct

SEQ ID NO: 381 - RNA, 24 nt, synthetic construct
  source 1..24: mol_type = other RNA
ctaccatggtgagtgcggggcctg

SEQ ID NO: 382 - RNA, 24 nt, synthetic construct
  source 1..24: mol_type = other RNA
taccatggtgagtgcggggcctgg

SEQ ID NO: 383 - RNA, 24 nt, synthetic construct
  source 1..24: mol_type = other RNA
atggtgagtgcggggcctggctcc

SEQ ID NO: 384 - RNA, 24 nt, synthetic construct
  source 1..24: mol_type = other RNA
gtgagtgcggggcctggctccccg

SEQ ID NO: 385 - RNA, 24 nt, synthetic construct
  source 1..24: mol_type = other RNA
actctccacccccaatgtaggtga

SEQ ID NO: 386 - RNA, 24 nt, synthetic construct
  source 1..24: mol_type = other RNA
ctctccacccccaatgtaggtgag

SEQ ID NO: 387 - RNA, 24 nt, synthetic construct
  source 1..24: mol_type = other RNA
tctccacccccaatgtaggtgagg

SEQ ID NO: 388 - RNA, 24 nt, synthetic construct
  source 1..24: mol_type = other RNA
acccccaatgtaggtgaggtgccc

SEQ ID NO: 389 - RNA, 24 nt, synthetic construct
  source 1..24: mol_type = other RNA
ccaatgtaggtgaggtgccccagg

SEQ ID NO: 390 - RNA, 24 nt, synthetic construct
  source 1..24: mol_type = other RNA
aggtgaggtgccccaggccagcca

SEQ ID NO: 391 - RNA, 24 nt, synthetic construct
  source 1..24: mol_type = other RNA
ggtgaggtgccccaggccagccaa

SEQ ID NO: 392 - RNA, 24 nt, synthetic construct
  source 1..24: mol_type = other RNA
gtgaggtgccccaggccagccaag

SEQ ID NO: 393 - RNA, 24 nt, synthetic construct
  source 1..24: mol_type = other RNA
tgaggtgccccaggccagccaagt

SEQ ID NO: 394 - RNA, 24 nt, synthetic construct
  source 1..24: mol_type = other RNA
ggtgccccaggccagccaagtacc

SEQ ID NO: 395 - RNA, 24 nt, synthetic construct
  source 1..24: mol_type = other RNA
gtgccccaggccagccaagtaccc

SEQ ID NO: 396 - RNA, 24 nt, synthetic construct
  source 1..24: mol_type = other RNA
aagtaccccctcccagtggattca

SEQ ID NO: 397 - RNA, 24 nt, synthetic construct
  source 1..24: mol_type = other RNA
cctcccgagcaaacatgacaggta

SEQ ID NO: 398 - RNA, 24 nt, synthetic construct
  source 1..24: mol_type = other RNA
ctcccgagcaaacatgacaggtaa

SEQ ID NO: 399 - RNA, 24 nt, synthetic construct
  source 1..24: mol_type = other RNA
caaacatgacaggtaaggaccctt

SEQ ID NO: 400 - RNA, 24 nt, synthetic construct
  source 1..24: mol_type = other RNA
ttgtgctctggagatggagaagca

SEQ ID NO: 401 - RNA, 24 nt, synthetic construct
  source 1..24: mol_type = other RNA
gcttctccatctccagagcacaag

SEQ ID NO: 402 - RNA, 24 nt, synthetic construct
  source 1..24: mol_type = other RNA
cttctccatctccagagcacaaga

SEQ ID NO: 403 - RNA, 24 nt, synthetic construct
  source 1..24: mol_type = other RNA
ttctccatctccagagcacaagac

SEQ ID NO: 404 - RNA, 24 nt, synthetic construct
  source 1..24: mol_type = other RNA
tctccatctccagagcacaagacg

SEQ ID NO: 405 - RNA, 24 nt, synthetic construct
  source 1..24: mol_type = other RNA
ccatctccagagcacaagacgtcc

SEQ ID NO: 406 - RNA, 24 nt, synthetic construct
  source 1..24: mol_type = other RNA
catctccagagcacaagacgtccc

SEQ ID NO: 407 - RNA, 24 nt, synthetic construct
  source 1..24: mol_type = other RNA
agagcacaagacgtcccccaccca

SEQ ID NO: 408 - RNA, 24 nt, synthetic construct
  source 1..24: mol_type = other RNA
acccaatgcccggcagctggagag

SEQ ID NO: 409 - RNA, 24 nt, synthetic construct
  source 1..24: mol_type = other RNA
ccattttggaagcttgttggagac

SEQ ID NO: 410 - RNA, 24 nt, synthetic construct
  source 1..24: mol_type = other RNA
ccaggccattttggaagcttgttg

SEQ ID NO: 411 - RNA, 24 nt, synthetic construct
  source 1..24: mol_type = other RNA
gcctggtgagtgatgcgggatctc

SEQ ID NO: 412 - RNA, 24 nt, synthetic construct
  source 1..24: mol_type = other RNA
cctggtgagtgatgcgggatctct

SEQ ID NO: 413 - RNA, 24 nt, synthetic construct
  source 1..24: mol_type = other RNA
cctttgcagagccggtggagcagt

SEQ ID NO: 414 - RNA, 24 nt, synthetic construct
  source 1..24: mol_type = other RNA
tagaactgctccaccggctctgca

SEQ ID NO: 415 - RNA, 24 nt, synthetic construct
  source 1..24: mol_type = other RNA
taccgctcactgcaggacacgtat

SEQ ID NO: 416 - RNA, 24 nt, synthetic construct
  source 1..24: mol_type = other RNA
ctcactgcaggacacgtatggtgc

SEQ ID NO: 417 - RNA, 24 nt, synthetic construct
  source 1..24: mol_type = other RNA
tcactgcaggacacgtatggtgcc

SEQ ID NO: 418 - RNA, 24 nt, synthetic construct
  source 1..24: mol_type = other RNA
aggacacgtatggtgccgagcccg

SEQ ID NO: 419 - RNA, 24 nt, synthetic construct
  source 1..24: mol_type = other RNA
gcccagtccggggtggccagttcc

SEQ ID NO: 420 - RNA, 24 nt, synthetic construct
  source 1..24: mol_type = other RNA
gttctgcccagtccggggtggcca

SEQ ID NO: 421 - RNA, 24 nt, synthetic construct
  source 1..24: mol_type = other RNA
cgttctgcccagtccggggtggcc

SEQ ID NO: 422 - RNA, 24 nt, synthetic construct
  source 1..24: mol_type = other RNA
agctgccgttctgcccagtccggg

SEQ ID NO: 423 - RNA, 24 nt, synthetic construct
  source 1..24: mol_type = other RNA
gggcagaacggcagctggcccaag

SEQ ID NO: 424 - RNA, 24 nt, synthetic construct
  source 1..24: mol_type = other RNA
caatagctcttgccctgaccagct

SEQ ID NO: 425 - RNA, 24 nt, synthetic construct
  source 1..24: mol_type = other RNA
ccaatagctcttgccctgaccagc

SEQ ID NO: 426 - RNA, 24 nt, synthetic construct
  source 1..24: mol_type = other RNA
tgccccagcccaatagctcttgcc

SEQ ID NO: 427 - RNA, 24 nt, synthetic construct
  source 1..24: mol_type = other RNA
ctcactgccccagcccaatagctc

SEQ ID NO: 428 - RNA, 24 nt, synthetic construct
  source 1..24: mol_type = other RNA
gctcactgccccagcccaatagct

SEQ ID NO: 429 - RNA, 24 nt, synthetic construct
  source 1..24: mol_type = other RNA
aagcccaggcccggctcactgccc

SEQ ID NO: 430 - RNA, 24 nt, synthetic construct
  source 1..24: mol_type = other RNA
caagcccaggcccggctcactgcc

SEQ ID NO: 431 - RNA, 24 nt, synthetic construct
  source 1..24: mol_type = other RNA
gccacaagcccaggcccggctcac

SEQ ID NO: 432 - RNA, 24 nt, synthetic construct
  source 1..24: mol_type = other RNA
ggccacaagcccaggcccggctca

SEQ ID NO: 433 - RNA, 24 nt, synthetic construct
  source 1..24: mol_type = other RNA
cggccacaagcccaggcccggctc

SEQ ID NO: 434 - RNA, 24 nt, synthetic construct
  source 1..24: mol_type = other RNA
ttccccagtacgactttgtcttct

SEQ ID NO: 435 - RNA, 24 nt, synthetic construct
  source 1..24: mol_type = other RNA
tccccagtacgactttgtcttctc

SEQ ID NO: 436 - RNA, 24 nt, synthetic construct
  source 1..24: mol_type = other RNA
ccccagtacgactttgtcttctct

SEQ ID NO: 437 - RNA, 24 nt, synthetic construct
  source 1..24: mol_type = other RNA
agtacgactttgtcttctctgtcc

SEQ ID NO: 438 - RNA, 24 nt, synthetic construct
  source 1..24: mol_type = other RNA
gcctatggcctgcaggatctgctc

SEQ ID NO: 439 - RNA, 24 nt, synthetic construct
  source 1..24: mol_type = other RNA
cctatggcctgcaggatctgctct

SEQ ID NO: 440 - RNA, 24 nt, synthetic construct
  source 1..24: mol_type = other RNA
gcctgcaggatctgctcttctccc

SEQ ID NO: 441 - RNA, 24 nt, synthetic construct
  source 1..24: mol_type = other RNA
cctgcaggatctgctcttctccct

SEQ ID NO: 442 - RNA, 24 nt, synthetic construct
  source 1..24: mol_type = other RNA
tccctgggcccacagccactcgtg

SEQ ID NO: 443 - RNA, 24 nt, synthetic construct
  source 1..24: mol_type = other RNA
tcgaggagctggaagcgcaagatg

SEQ ID NO: 444 - RNA, 24 nt, synthetic construct
  source 1..24: mol_type = other RNA
tggccggccttttccagaagaagc

SEQ ID NO: 445 - RNA, 24 nt, synthetic construct
  source 1..24: mol_type = other RNA
ttccagaagaagctgctccgaggt

SEQ ID NO: 446 - RNA, 24 nt, synthetic construct
  source 1..24: mol_type = other RNA
tccagaagaagctgctccgaggtt

SEQ ID NO: 447 - RNA, 24 nt, synthetic construct
  source 1..24: mol_type = other RNA
agaagaagctgctccgaggttgca

SEQ ID NO: 448 - RNA, 24 nt, synthetic construct
  source 1..24: mol_type = other RNA
agaagctgctccgaggttgcaccc

SEQ ID NO: 449 - RNA, 24 nt, synthetic construct
  source 1..24: mol_type = other RNA
ctccgaggttgcaccctcctcctc

SEQ ID NO: 450 - RNA, 24 nt, synthetic construct
  source 1..24: mol_type = other RNA
tccgaggttgcaccctcctcctca

SEQ ID NO: 451 - RNA, 24 nt, synthetic construct
  source 1..24: mol_type = other RNA
ctggtccagagcctgagcaaggcc

SEQ ID NO: 452 - RNA, 24 nt, synthetic construct
  source 1..24: mol_type = other RNA
tggtccagagcctgagcaaggccg

SEQ ID NO: 453 - RNA, 24 nt, synthetic construct
  source 1..24: mol_type = other RNA
tcagggatgacagagcaccaagac

SEQ ID NO: 454 - RNA, 24 nt, synthetic construct
  source 1..24: mol_type = other RNA
cagggatgacagagcaccaagaca

SEQ ID NO: 455 - RNA, 24 nt, synthetic construct
  source 1..24: mol_type = other RNA
cagagcaccaagacagagccctga

SEQ ID NO: 456 - RNA, 24 nt, synthetic construct
  source 1..24: mol_type = other RNA
agcaccaagacagagccctgacgc

SEQ ID NO: 457 - RNA, 24 nt, synthetic construct
  source 1..24: mol_type = other RNA
aagacagagccctgacgctcctcc

SEQ ID NO: 458 - RNA, 24 nt, synthetic construct
  source 1..24: mol_type = other RNA
tgccgggcagtgtgccagctctca

SEQ ID NO: 459 - RNA, 24 nt, synthetic construct
  source 1..24: mol_type = other RNA
gccgggcagtgtgccagctctcag

SEQ ID NO: 460 - RNA, 24 nt, synthetic construct
  source 1..24: mol_type = other RNA
caggccagcttggccagctctgcc

SEQ ID NO: 461 - RNA, 24 nt, synthetic construct
  source 1..24: mol_type = other RNA
agctcccaggccagcttggccagc

SEQ ID NO: 462 - RNA, 24 nt, synthetic construct
  source 1..24: mol_type = other RNA
ctgcggcccagctcccaggccagc

SEQ ID NO: 463 - RNA, 24 nt, synthetic construct
  source 1..24: mol_type = other RNA
gcagacatcaaagtaccctacagg

SEQ ID NO: 464 - RNA, 24 nt, synthetic construct
  source 1..24: mol_type = other RNA
atcaaagtaccctacaggaggacc

SEQ ID NO: 465 - RNA, 24 nt, synthetic construct
  source 1..24: mol_type = other RNA
gaccagttcccatccgcagacgtg

SEQ ID NO: 466 - RNA, 24 nt, synthetic construct
  source 1..24: mol_type = other RNA
gatggccaaaggcttagtccaaca

SEQ ID NO: 467 - RNA, 24 nt, synthetic construct
  source 1..24: mol_type = other RNA
aaaggcttagtccaacacccaccg

SEQ ID NO: 468 - RNA, 24 nt, synthetic construct
  source 1..24: mol_type = other RNA
gtccaacacccaccgcgggccgca

SEQ ID NO: 469 - RNA, 24 nt, synthetic construct
  source 1..24: mol_type = other RNA
agcttcctcctgcaatgcttcctg

SEQ ID NO: 470 - RNA, 24 nt, synthetic construct
  source 1..24: mol_type = other RNA
gcttcctcctgcaatgcttcctgg

SEQ ID NO: 471 - RNA, 24 nt, synthetic construct
  source 1..24: mol_type = other RNA
tcgccactcagagccagccacagg

SEQ ID NO: 472 - RNA, 24 nt, synthetic construct
  source 1..24: mol_type = other RNA
ttcgccactcagagccagccacag

SEQ ID NO: 473 - RNA, 24 nt, synthetic construct
  source 1..24: mol_type = other RNA
tttcgccactcagagccagccaca

SEQ ID NO: 474 - RNA, 24 nt, synthetic construct
  source 1..24: mol_type = other RNA
atttcgccactcagagccagccac

SEQ ID NO: 475 - RNA, 24 nt, synthetic construct
  source 1..24: mol_type = other RNA
aaggagctcccgcagtacctagca

SEQ ID NO: 476 - RNA, 24 nt, synthetic construct
  source 1..24: mol_type = other RNA
aggagctcccgcagtacctagcat

SEQ ID NO: 477 - RNA, 24 nt, synthetic construct
  source 1..24: mol_type = other RNA
ggagctcccgcagtacctagcatt

SEQ ID NO: 478 - RNA, 24 nt, synthetic construct
  source 1..24: mol_type = other RNA
ccagccagttgtcatagggcctct

SEQ ID NO: 479 - RNA, 24 nt, synthetic construct
  source 1..24: mol_type = other RNA
gcacgccctccagccagttgtcat

SEQ ID NO: 480 - RNA, 24 nt, synthetic construct
  source 1..24: mol_type = other RNA
ctggctgggctgatcttccagcct

SEQ ID NO: 481 - RNA, 24 nt, synthetic construct
  source 1..24: mol_type = other RNA
tggctgggctgatcttccagcctc

SEQ ID NO: 482 - RNA, 24 nt, synthetic construct
  source 1..24: mol_type = other RNA
taccgctcactgcaggacacgtat

SEQ ID NO: 483 - RNA, 24 nt, synthetic construct
  source 1..24: mol_type = other RNA
ctcactgcaggacacgtatggtgc

SEQ ID NO: 484 - RNA, 24 nt, synthetic construct
  source 1..24: mol_type = other RNA
tcactgcaggacacgtatggtgcc

SEQ ID NO: 485 - RNA, 24 nt, synthetic construct
  source 1..24: mol_type = other RNA
aggacacgtatggtgccgagcccg

SEQ ID NO: 486 - RNA, 24 nt, synthetic construct
  source 1..24: mol_type = other RNA
ggacacgtatggtgccgagcccgc

SEQ ID NO: 487 - RNA, 24 nt, synthetic construct
  source 1..24: mol_type = other RNA
atcctagtggaggtggatctggtg

SEQ ID NO: 488 - RNA, 24 nt, synthetic construct
  source 1..24: mol_type = other RNA
gcaagagcctggagcgggaactgg

SEQ ID NO: 489 - RNA, 24 nt, synthetic construct
  source 1..24: mol_type = other RNA
caagagcctggagcgggaactggc

SEQ ID NO: 490 - RNA, 24 nt, synthetic construct
  source 1..24: mol_type = other RNA
gggcagaacggcagctggcccaag

SEQ ID NO: 491 - RNA, 24 nt, synthetic construct
  source 1..24: mol_type = other RNA
gcacagcaatcactcgtgtctcac

SEQ ID NO: 492 - RNA, 24 nt, synthetic construct
  source 1..24: mol_type = other RNA
caatagctcttgccctgaccagct

SEQ ID NO: 493 - RNA, 24 nt, synthetic construct
  source 1..24: mol_type = other RNA
ccaatagctcttgccctgaccagc

SEQ ID NO: 494 - RNA, 24 nt, synthetic construct
  source 1..24: mol_type = other RNA
agccgggcctgggcttgtggccgg

SEQ ID NO: 495 - RNA, 24 nt, synthetic construct
  source 1..24: mol_type = other RNA
cagagaagacaaagtcgtactggg

SEQ ID NO: 496 - RNA, 24 nt, synthetic construct
  source 1..24: mol_type = other RNA
agtacgactttgtcttctctgtcc

SEQ ID NO: 497 - RNA, 24 nt, synthetic construct
  source 1..24: mol_type = other RNA
agcagatcctgcaggccataggca

SEQ ID NO: 498 - RNA, 24 nt, synthetic construct
  source 1..24: mol_type = other RNA
gcctatggcctgcaggatctgctc

SEQ ID NO: 499 - RNA, 24 nt, synthetic construct
  source 1..24: mol_type = other RNA
gagcagatcctgcaggccataggc

SEQ ID NO: 500 - RNA, 24 nt, synthetic construct
  source 1..24: mol_type = other RNA
cctatggcctgcaggatctgctct

SEQ ID NO: 501 - RNA, 24 nt, synthetic construct
  source 1..24: mol_type = other RNA
agagcagatcctgcaggccatagg

SEQ ID NO: 502 - RNA, 24 nt, synthetic construct
  source 1..24: mol_type = other RNA
aagagcagatcctgcaggccatag

SEQ ID NO: 503 - RNA, 24 nt, synthetic construct
  source 1..24: mol_type = other RNA
gcctgcaggatctgctcttctccc

SEQ ID NO: 504 - RNA, 24 nt, synthetic construct
  source 1..24: mol_type = other RNA
ggatctgctcttctccctgggccc

SEQ ID NO: 505 - RNA, 24 nt, synthetic construct
  source 1..24: mol_type = other RNA
cactcgtggcggccgatgaggttt

SEQ ID NO: 506 - RNA, 24 nt, synthetic construct
  source 1..24: mol_type = other RNA
tgaggttttcagccacatcttgaa

SEQ ID NO: 507 - RNA, 24 nt, synthetic construct
  source 1..24: mol_type = other RNA
tgaagagacctgaccgcgttctgc

SEQ ID NO: 508 - RNA, 24 nt, synthetic construct
  source 1..24: mol_type = other RNA
tcgaggagctggaagcgcaagatg

SEQ ID NO: 509 - RNA, 24 nt, synthetic construct
  source 1..24: mol_type = other RNA
agatggcttcctgcacagcacgtg

SEQ ID NO: 510 - RNA, 24 nt, synthetic construct
  source 1..24: mol_type = other RNA
tggccggccttttccagaagaagc

SEQ ID NO: 511 - RNA, 24 nt, synthetic construct
  source 1..24: mol_type = other RNA
ttccagaagaagctgctccgaggt

SEQ ID NO: 512 - RNA, 24 nt, synthetic construct
  source 1..24: mol_type = other RNA
tccagaagaagctgctccgaggtt

SEQ ID NO: 513 - RNA, 24 nt, synthetic construct
  source 1..24: mol_type = other RNA
agaagaagctgctccgaggttgca

SEQ ID NO: 514 - RNA, 24 nt, synthetic construct
  source 1..24: mol_type = other RNA
agaagctgctccgaggttgcaccc

SEQ ID NO: 515 - RNA, 24 nt, synthetic construct
  source 1..24: mol_type = other RNA
ctccgaggttgcaccctcctcctc

SEQ ID NO: 516 - RNA, 24 nt, synthetic construct
  source 1..24: mol_type = other RNA
aggttgcaccctcctcctcacagc

SEQ ID NO: 517 - RNA, 24 nt, synthetic construct
  source 1..24: mol_type = other RNA
ctggtccagagcctgagcaaggcc

SEQ ID NO: 518 - RNA, 24 nt, synthetic construct
  source 1..24: mol_type = other RNA
tggtccagagcctgagcaaggccg

SEQ ID NO: 519 - RNA, 24 nt, synthetic construct
  source 1..24: mol_type = other RNA
agcaaggccgacgccctatttgag

SEQ ID NO: 520 - RNA, 24 nt, synthetic construct
  source 1..24: mol_type = other RNA
gacgccctatttgagctgtccggc

SEQ ID NO: 521 - RNA, 24 nt, synthetic construct
  source 1..24: mol_type = other RNA
aagccggacagctcaaatagggcg

SEQ ID NO: 522 - RNA, 24 nt, synthetic construct
  source 1..24: mol_type = other RNA
gagctgtccggcttctccatggag

SEQ ID NO: 523 - RNA, 24 nt, synthetic construct
  source 1..24: mol_type = other RNA
agctgtccggcttctccatggagc

SEQ ID NO: 524 - RNA, 24 nt, synthetic construct
  source 1..24: mol_type = other RNA
tcagggatgacagagcaccaagac

SEQ ID NO: 525 - RNA, 24 nt, synthetic construct
  source 1..24: mol_type = other RNA
cagagcaccaagacagagccctga

SEQ ID NO: 526 - RNA, 24 nt, synthetic construct
  source 1..24: mol_type = other RNA
agcaccaagacagagccctgacgc

SEQ ID NO: 527 - RNA, 24 nt, synthetic construct
  source 1..24: mol_type = other RNA
gggaccggccacttcttctcagtc

SEQ ID NO: 528 - RNA, 24 nt, synthetic construct
  source 1..24: mol_type = other RNA
ggccacttcttctcagtcacagcc

SEQ ID NO: 529 - RNA, 24 nt, synthetic construct
  source 1..24: mol_type = other RNA
acagccctactttgtgccgggcag

SEQ ID NO: 530 - RNA, 24 nt, synthetic construct
  source 1..24: mol_type = other RNA
tgccgggcagtgtgccagctctca

SEQ ID NO: 531 - RNA, 24 nt, synthetic construct
  source 1..24: mol_type = other RNA
gccgggcagtgtgccagctctcag

SEQ ID NO: 532 - RNA, 24 nt, synthetic construct
  source 1..24: mol_type = other RNA
cctccacgctcacgggactctatg

SEQ ID NO: 533 - RNA, 24 nt, synthetic construct
  source 1..24: mol_type = other RNA
tcacgggactctatgtcggcctgc

SEQ ID NO: 534 - RNA, 24 nt, synthetic construct
  source 1..24: mol_type = other RNA
tgggagctgggccgcagacatcaa

SEQ ID NO: 535 - RNA, 24 nt, synthetic construct
  source 1..24: mol_type = other RNA
gggagctgggccgcagacatcaaa

SEQ ID NO: 536 - RNA, 24 nt, synthetic construct
  source 1..24: mol_type = other RNA
gcagacatcaaagtaccctacagg

SEQ ID NO: 537 - RNA, 24 nt, synthetic construct
  source 1..24: mol_type = other RNA
atcaaagtaccctacaggaggacc

SEQ ID NO: 538 - RNA, 24 nt, synthetic construct
  source 1..24: mol_type = other RNA
tcaaagtaccctacaggaggacca

SEQ ID NO: 539 - RNA, 24 nt, synthetic construct
  source 1..24: mol_type = other RNA
agtaccctacaggaggaccagttc

SEQ ID NO: 540 - RNA, 24 nt, synthetic construct
  source 1..24: mol_type = other RNA
tccgcagacgtgaggacctgggcg

SEQ ID NO: 541 - RNA, 24 nt, synthetic construct
  source 1..24: mol_type = other RNA
ggacctgggcgatggccaaaggct

SEQ ID NO: 542 - RNA, 24 nt, synthetic construct
  source 1..24: mol_type = other RNA
gggcgatggccaaaggcttagtcc

SEQ ID NO: 543 - RNA, 24 nt, synthetic construct
  source 1..24: mol_type = other RNA
ggcgatggccaaaggcttagtcca

SEQ ID NO: 544 - RNA, 24 nt, synthetic construct
  source 1..24: mol_type = other RNA
cgcgggccgcagagtccgagctgg

SEQ ID NO: 545 - RNA, 24 nt, synthetic construct
  source 1..24: mol_type = other RNA
gcgggccgcagagtccgagctggc

SEQ ID NO: 546 - RNA, 24 nt, synthetic construct
  source 1..24: mol_type = other RNA
cgggccgcagagtccgagctggcc

SEQ ID NO: 547 - RNA, 24 nt, synthetic construct
  source 1..24: mol_type = other RNA
tgagtggcgaaatcaaggacaagg

SEQ ID NO: 548 - RNA, 24 nt, synthetic construct
  source 1..24: mol_type = other RNA
gagtggcgaaatcaaggacaagga

SEQ ID NO: 549 - RNA, 24 nt, synthetic construct
  source 1..24: mol_type = other RNA
aaatcaaggacaaggagctcccgc

SEQ ID NO: 550 - RNA, 24 nt, synthetic construct
  source 1..24: mol_type = other RNA
aaggagctcccgcagtacctagca

SEQ ID NO: 551 - RNA, 24 nt, synthetic construct
  source 1..24: mol_type = other RNA
aggagctcccgcagtacctagcat

SEQ ID NO: 552 - RNA, 24 nt, synthetic construct
  source 1..24: mol_type = other RNA
ggagctcccgcagtacctagcatt

SEQ ID NO: 553 - RNA, 24 nt, synthetic construct
  source 1..24: mol_type = other RNA
gccctatgacaactggctggaggg

SEQ ID NO: 554 - RNA, 24 nt, synthetic construct
  source 1..24: mol_type = other RNA
tgccacgctttctggctgggctga

SEQ ID NO: 555 - RNA, 24 nt, synthetic construct
  source 1..24: mol_type = other RNA
acgctttctggctgggctgatctt

SEQ ID NO: 556 - RNA, 24 nt, synthetic construct
  source 1..24: mol_type = other RNA
ctttctggctgggctgatcttcca

SEQ ID NO: 557 - RNA, 24 nt, synthetic construct
  source 1..24: mol_type = other RNA
ctggctgggctgatcttccagcct

SEQ ID NO: 558 - RNA, 24 nt, synthetic construct
  source 1..24: mol_type = other RNA
tggctgggctgatcttccagcctc

SEQ ID NO: 559 - RNA, 24 nt, synthetic construct
  source 1..24: mol_type = other RNA
ggagccctactcgggccatcggcg

SEQ ID NO: 560 - RNA, 24 nt, synthetic construct
  source 1..24: mol_type = other RNA
acaggaagcagaaggtgcttgcga

SEQ ID NO: 561 - RNA, 24 nt, synthetic construct
  source 1..24: mol_type = other RNA
gcttgcgaggtacctgaagcggct

SEQ ID NO: 562 - RNA, 24 nt, synthetic construct
  source 1..24: mol_type = other RNA
gaatttggcagcacgtggtacagg

SEQ ID NO: 563 - RNA, 24 nt, synthetic construct
  source 1..24: mol_type = other RNA
aatttggcagcacgtggtacagga

SEQ ID NO: 564 - RNA, 24 nt, synthetic construct
  source 1..24: mol_type = other RNA
atttggcagcacgtggtacaggag

SEQ ID NO: 565 - RNA, 24 nt, synthetic construct
  source 1..24: mol_type = other RNA
ccggccgcctctcttttctgggca

SEQ ID NO: 566 - RNA, 24 nt, synthetic construct
  source 1..24: mol_type = other RNA
cctctcttttctgggcacccgcct

SEQ ID NO: 567 - RNA, 24 nt, synthetic construct
  source 1..24: mol_type = other RNA
cctcctgatgcacatgtactgggc

SEQ ID NO: 568 - RNA, 24 nt, synthetic construct
  source 1..24: mol_type = other RNA
gccttggaggcggcgggccaagac

SEQ ID NO: 569 - RNA, 24 nt, synthetic construct
  source 1..24: mol_type = other RNA
ccttggaggcggcgggccaagact

SEQ ID NO: 570 - RNA, 24 nt, synthetic construct
  source 1..24: mol_type = other RNA
aggcggcgggccaagacttctccc

SEQ ID NO: 571 - RNA, 24 nt, synthetic construct
  source 1..24: mol_type = other RNA
cggcgggccaagacttctccctgg

SEQ ID NO: 572 - RNA, 24 nt, synthetic construct
  source 1..24: mol_type = other RNA
ccctggacctccgcagcactggca

SEQ ID NO: 573 - RNA, 24 nt, synthetic construct
  source 1..24: mol_type = other RNA
cctggacctccgcagcactggcat

SEQ ID NO: 574 - RNA, 24 nt, synthetic construct
  source 1..24: mol_type = other RNA
ctggacctccgcagcactggcatt

SEQ ID NO: 575 - RNA, 24 nt, synthetic construct
  source 1..24: mol_type = other RNA
gggagcctcgtgggactcagctgt

SEQ ID NO: 576 - RNA, 24 nt, synthetic construct
  source 1..24: mol_type = other RNA
ggagcctcgtgggactcagctgtg

SEQ ID NO: 577-600 - skipped (24 entries)

SEQ ID NO: 601 - RNA, 24 nt, synthetic construct
  source 1..24: mol_type = other RNA
atatccagaaccctgaccctgccg

SEQ ID NO: 602 - RNA, 24 nt, synthetic construct
  source 1..24: mol_type = other RNA
cccacagatatccagaaccctgac

SEQ ID NO: 603 - RNA, 24 nt, synthetic construct
  source 1..24: mol_type = other RNA
ttgtcccacagatatccagaaccc

SEQ ID NO: 604 - RNA, 24 nt, synthetic construct
  source 1..24: mol_type = other RNA
cttgtcccacagatatccagaacc

SEQ ID NO: 605 - RNA, 24 nt, synthetic construct
  source 1..24: mol_type = other RNA
atcctcttgtcccacagatatcca

SEQ ID NO: 606 - RNA, 24 nt, synthetic construct
  source 1..24: mol_type = other RNA
gatcctcttgtcccacagatatcc

SEQ ID NO: 607 - RNA, 24 nt, synthetic construct
  source 1..24: mol_type = other RNA
aaccctgatcctcttgtcccacag

SEQ ID NO: 608 - RNA, 24 nt, synthetic construct
  source 1..24: mol_type = other RNA
gccgtgtaccagctgagagactct

SEQ ID NO: 609 - RNA, 24 nt, synthetic construct
  source 1..24: mol_type = other RNA
aagagaaagggagtagaggcggcc

SEQ ID NO: 610 - RNA, 24 nt, synthetic construct
  source 1..24: mol_type = other RNA
agtagaggcggccacgacctggtg

SEQ ID NO: 611 - RNA, 24 nt, synthetic construct
  source 1..24: mol_type = other RNA
ccacgacctggtgaacacctagga

SEQ ID NO: 612 - RNA, 24 nt, synthetic construct
  source 1..24: mol_type = other RNA
gacgcaccattctcacaaagggag

SEQ ID NO: 613 - RNA, 24 nt, synthetic construct
  source 1..24: mol_type = other RNA
ctcacaaagggagttttccacacg

SEQ ID NO: 614 - RNA, 24 nt, synthetic construct
  source 1..24: mol_type = other RNA
tcacaaagggagttttccacacgg

SEQ ID NO: 615 - RNA, 24 nt, synthetic construct
  source 1..24: mol_type = other RNA
cacaaagggagttttccacacgga

SEQ ID NO: 616 - RNA, 24 nt, synthetic construct
  source 1..24: mol_type = other RNA
acaaagggagttttccacacggac

SEQ ID NO: 617 - RNA, 24 nt, synthetic construct
  source 1..24: mol_type = other RNA
caaagggagttttccacacggaca

SEQ ID NO: 618 - RNA, 24 nt, synthetic construct
  source 1..24: mol_type = other RNA
agggagttttccacacggacaccc

SEQ ID NO: 619 - RNA, 24 nt, synthetic construct
  source 1..24: mol_type = other RNA
gttttccacacggacacccccctc

SEQ ID NO: 620 - RNA, 24 nt, synthetic construct
  source 1..24: mol_type = other RNA
cacacggacacccccctcctcacc

SEQ ID NO: 621 - RNA, 24 nt, synthetic construct
  source 1..24: mol_type = other RNA
acacggacacccccctcctcacca

SEQ ID NO: 622 - RNA, 24 nt, synthetic construct
  source 1..24: mol_type = other RNA
ggacacccccctcctcaccacagc

SEQ ID NO: 623 - RNA, 24 nt, synthetic construct
  source 1..24: mol_type = other RNA
gccctgccaggacggggctggcta

SEQ ID NO: 624 - RNA, 24 nt, synthetic construct
  source 1..24: mol_type = other RNA
ggtgaagagccaaagttagaactc

SEQ ID NO: 625 - RNA, 24 nt, synthetic construct
  source 1..24: mol_type = other RNA
tcttgggaagtgtaaggaagctgc

SEQ ID NO: 626 - RNA, 24 nt, synthetic construct
  source 1..24: mol_type = other RNA
gctgcagcaccaggatcagtgaaa

SEQ ID NO: 627 - RNA, 24 nt, synthetic construct
  source 1..24: mol_type = other RNA
accaggatcagtgaaacgcaccag

SEQ ID NO: 628 - RNA, 24 nt, synthetic construct
  source 1..24: mol_type = other RNA
ggttctgggagagggtagcgcagg

SEQ ID NO: 629 - RNA, 24 nt, synthetic construct
  source 1..24: mol_type = other RNA
gagggtagcgcagggtggccactg

SEQ ID NO: 630 - RNA, 24 nt, synthetic construct
  source 1..24: mol_type = other RNA
gccactgagaaccgggcaggtcac

SEQ ID NO: 631 - RNA, 24 nt, synthetic construct
  source 1..24: mol_type = other RNA
ccactgagaaccgggcaggtcacg

SEQ ID NO: 632 - RNA, 24 nt, synthetic construct
  source 1..24: mol_type = other RNA
cactgagaaccgggcaggtcacgc

SEQ ID NO: 633 - RNA, 24 nt, synthetic construct
  source 1..24: mol_type = other RNA
actgagaaccgggcaggtcacgca

SEQ ID NO: 634 - RNA, 24 nt, synthetic construct
  source 1..24: mol_type = other RNA
aaccgggcaggtcacgcatccccc

SEQ ID NO: 635 - RNA, 24 nt, synthetic construct
  source 1..24: mol_type = other RNA
accgggcaggtcacgcatcccccc

SEQ ID NO: 636 - RNA, 24 nt, synthetic construct
  source 1..24: mol_type = other RNA
gggcaggtcacgcatccccccctt

SEQ ID NO: 637 - RNA, 24 nt, synthetic construct
  source 1..24: mol_type = other RNA
ggcaggtcacgcatcccccccttc

SEQ ID NO: 638 - RNA, 24 nt, synthetic construct
  source 1..24: mol_type = other RNA
ccttccctcccaccccctgccaag

SEQ ID NO: 639 - RNA, 24 nt, synthetic construct
  source 1..24: mol_type = other RNA
cttccctcccaccccctgccaagc

SEQ ID NO: 640 - RNA, 24 nt, synthetic construct
  source 1..24: mol_type = other RNA
ccccctgccaagctctccctccca

SEQ ID NO: 641 - RNA, 24 nt, synthetic construct
  source 1..24: mol_type = other RNA
gatcctctctggctccatcgtaag

SEQ ID NO: 642 - RNA, 24 nt, synthetic construct
  source 1..24: mol_type = other RNA
agaggttctggcaaggagagagat

SEQ ID NO: 643 - RNA, 24 nt, synthetic construct
  source 1..24: mol_type = other RNA
gggggtgtgtcaccagataaggaa

SEQ ID NO: 644 - RNA, 24 nt, synthetic construct
  source 1..24: mol_type = other RNA
caatatcaggagactaggaaggag

SEQ ID NO: 645 - RNA, 24 nt, synthetic construct
  source 1..24: mol_type = other RNA
atggggcttttctgtcaccaatcc

SEQ ID NO: 646 - RNA, 24 nt, synthetic construct
  source 1..24: mol_type = other RNA
tttctgtcaccaatcctgtcccta

SEQ ID NO: 647 - RNA, 24 nt, synthetic construct
  source 1..24: mol_type = other RNA
ttctgtcaccaatcctgtccctag

SEQ ID NO: 648 - RNA, 24 nt, synthetic construct
  source 1..24: mol_type = other RNA
tctgtcaccaatcctgtccctagt

SEQ ID NO: 649 - RNA, 24 nt, synthetic construct
  source 1..24: mol_type = other RNA
gtggggtggaggggacagataaaa

SEQ ID NO: 650 - RNA, 24 nt, synthetic construct
  source 1..24: mol_type = other RNA
tggaggggacagataaaagtaccc

SEQ ID NO: 651 - RNA, 24 nt, synthetic construct
  source 1..24: mol_type = other RNA
ggacagataaaagtacccagaacc

SEQ ID NO: 652 - RNA, 24 nt, synthetic construct
  source 1..24: mol_type = other RNA
aaagtacccagaaccagagccaca

SEQ ID NO: 653 - RNA, 24 nt, synthetic construct
  source 1..24: mol_type = other RNA
tacccagaaccagagccacattaa

SEQ ID NO: 654 - RNA, 24 nt, synthetic construct
  source 1..24: mol_type = other RNA
acccagaaccagagccacattaac

SEQ ID NO: 655 - RNA, 24 nt, synthetic construct
  source 1..24: mol_type = other RNA
ttaaccggccctgggaatataagg

SEQ ID NO: 656 - RNA, 24 nt, synthetic construct
  source 1..24: mol_type = other RNA
taaccggccctgggaatataaggt

SEQ ID NO: 657 - RNA, 24 nt, synthetic construct
  source 1..24: mol_type = other RNA
aggtggtcccagctcggggacaca

SEQ ID NO: 658 - RNA, 24 nt, synthetic construct
  source 1..24: mol_type = other RNA
ggatccctggaggcagcaaacatg

SEQ ID NO: 659 - RNA, 24 nt, synthetic construct
  source 1..24: mol_type = other RNA
acatgctgtcctgaagtggacata

SEQ ID NO: 660 - RNA, 24 nt, synthetic construct
  source 1..24: mol_type = other RNA
catgctgtcctgaagtggacatag

SEQ ID NO: 661 - RNA, 24 nt, synthetic construct
  source 1..24: mol_type = other RNA
gaggaagaagactagctgagctct

SEQ ID NO: 662 - RNA, 24 nt, synthetic construct
  source 1..24: mol_type = other RNA
aggaagaagactagctgagctctc

SEQ ID NO: 663 - RNA, 24 nt, synthetic construct
  source 1..24: mol_type = other RNA
ggaagaagactagctgagctctcg

SEQ ID NO: 664 - RNA, 24 nt, synthetic construct
  source 1..24: mol_type = other RNA
agctgagctctcggacccctggaa

SEQ ID NO: 665 - RNA, 24 nt, synthetic construct
  source 1..24: mol_type = other RNA
ctgcccaaatgaaaggagtgagag

SEQ ID NO: 666 - RNA, 24 nt, synthetic construct
  source 1..24: mol_type = other RNA
tgcccaaatgaaaggagtgagagg

SEQ ID NO: 667 - RNA, 24 nt, synthetic construct
  source 1..24: mol_type = other RNA
aatgaaaggagtgagaggtgaccc

SEQ ID NO: 668 - RNA, 24 nt, synthetic construct
  source 1..24: mol_type = other RNA
gacccgaatccacaggagaacggg

SEQ ID NO: 669 - RNA, 24 nt, synthetic construct
  source 1..24: mol_type = other RNA
aagcaagaggatggagaggtggct

SEQ ID NO: 670 - RNA, 24 nt, synthetic construct
  source 1..24: mol_type = other RNA
ttgtccagaaaaacggtgatgatg

SEQ ID NO: 671 - RNA, 24 nt, synthetic construct
  source 1..24: mol_type = other RNA
tggccgcctctactccctttctct

SEQ ID NO: 672 - RNA, 24 nt, synthetic construct
  source 1..24: mol_type = other RNA
gttcaccaggtcgtggccgcctct

SEQ ID NO: 673 - RNA, 24 nt, synthetic construct
  source 1..24: mol_type = other RNA
tgttcaccaggtcgtggccgcctc

SEQ ID NO: 674 - RNA, 24 nt, synthetic construct
  source 1..24: mol_type = other RNA
gtcctaggtgttcaccaggtcgtg

SEQ ID NO: 675 - RNA, 24 nt, synthetic construct
  source 1..24: mol_type = other RNA
tgcgtcctaggtgttcaccaggtc

SEQ ID NO: 676 - RNA, 24 nt, synthetic construct
  source 1..24: mol_type = other RNA
tgtgagaatggtgcgtcctaggtg

SEQ ID NO: 677 - RNA, 24 nt, synthetic construct
  source 1..24: mol_type = other RNA
gaaaactccctttgtgagaatggt

SEQ ID NO: 678 - RNA, 24 nt, synthetic construct
  source 1..24: mol_type = other RNA
acctgtgagataaggccagtagcc

SEQ ID NO: 679 - RNA, 24 nt, synthetic construct
  source 1..24: mol_type = other RNA
tacctgtgagataaggccagtagc

SEQ ID NO: 680 - RNA, 24 nt, synthetic construct
  source 1..24: mol_type = other RNA
ttacctgtgagataaggccagtag

SEQ ID NO: 681 - RNA, 24 nt, synthetic construct
  source 1..24: mol_type = other RNA
agttttacctgtgagataaggcca

SEQ ID NO: 682 - RNA, 24 nt, synthetic construct
  source 1..24: mol_type = other RNA
gtgcgtcagttttacctgtgagat

SEQ ID NO: 683 - RNA, 24 nt, synthetic construct
  source 1..24: mol_type = other RNA
tatattgttcctccgtgcgtcagt

SEQ ID NO: 684 - RNA, 24 nt, synthetic construct
  source 1..24: mol_type = other RNA
taactttggctcttcacctttcta

SEQ ID NO: 685 - RNA, 24 nt, synthetic construct
  source 1..24: mol_type = other RNA
ctaactttggctcttcacctttct

SEQ ID NO: 686 - RNA, 24 nt, synthetic construct
  source 1..24: mol_type = other RNA
tctaactttggctcttcacctttc

SEQ ID NO: 687 - RNA, 24 nt, synthetic construct
  source 1..24: mol_type = other RNA
ggtcctgagttctaactttggctc

SEQ ID NO: 688 - RNA, 24 nt, synthetic construct
  source 1..24: mol_type = other RNA
tcctggtgctgcagcttccttaca

SEQ ID NO: 689 - RNA, 24 nt, synthetic construct
  source 1..24: mol_type = other RNA
cagctagtcttcttcctccaaccc

SEQ ID NO: 690 - RNA, 24 nt, synthetic construct
  source 1..24: mol_type = other RNA
gcgtgacctgcccggttctcagtg

SEQ ID NO: 691 - RNA, 24 nt, synthetic construct
  source 1..24: mol_type = other RNA
gatgcgtgacctgcccggttctca

SEQ ID NO: 692 - RNA, 24 nt, synthetic construct
  source 1..24: mol_type = other RNA
gtttgcttacgatggagccagaga

SEQ ID NO: 693 - RNA, 24 nt, synthetic construct
  source 1..24: mol_type = other RNA
gaacctctaaggtttgcttacgat

SEQ ID NO: 694 - RNA, 24 nt, synthetic construct
  source 1..24: mol_type = other RNA
cctggagccatctctctccttgcc

SEQ ID NO: 695 - RNA, 24 nt, synthetic construct
  source 1..24: mol_type = other RNA
cacccccatttcctggagccatct

SEQ ID NO: 696 - RNA, 24 nt, synthetic construct
  source 1..24: mol_type = other RNA
tctggtgacacacccccatttcct

SEQ ID NO: 697 - RNA, 24 nt, synthetic construct
  source 1..24: mol_type = other RNA
ttccttatctggtgacacaccccc

SEQ ID NO: 698 - RNA, 24 nt, synthetic construct
  source 1..24: mol_type = other RNA
ggcagattccttatctggtgacac

SEQ ID NO: 699 - RNA, 24 nt, synthetic construct
  source 1..24: mol_type = other RNA
aggcagattccttatctggtgaca

SEQ ID NO: 700 - RNA, 24 nt, synthetic construct
  source 1..24: mol_type = other RNA
taggcagattccttatctggtgac

SEQ ID NO: 701 - RNA, 24 nt, synthetic construct
  source 1..24: mol_type = other RNA
ttaggcagattccttatctggtga

SEQ ID NO: 702 - RNA, 24 nt, synthetic construct
  source 1..24: mol_type = other RNA
ctaacccccacctcctgttaggca

SEQ ID NO: 703 - RNA, 24 nt, synthetic construct
  source 1..24: mol_type = other RNA
ctcctgatattgggtctaaccccc

SEQ ID NO: 704 - RNA, 24 nt, synthetic construct
  source 1..24: mol_type = other RNA
agtctcctgatattgggtctaacc

SEQ ID NO: 705 - RNA, 24 nt, synthetic construct
  source 1..24: mol_type = other RNA
cctagtctcctgatattgggtcta

SEQ ID NO: 706 - RNA, 24 nt, synthetic construct
  source 1..24: mol_type = other RNA
tcctagtctcctgatattgggtct

SEQ ID NO: 707 - RNA, 24 nt, synthetic construct
  source 1..24: mol_type = other RNA
ttcctagtctcctgatattgggtc

SEQ ID NO: 708 - RNA, 24 nt, synthetic construct
  source 1..24: mol_type = other RNA
cttcctagtctcctgatattgggt

SEQ ID NO: 709 - RNA, 24 nt, synthetic construct
  source 1..24: mol_type = other RNA
catccttaggcctcctccttccta

SEQ ID NO: 710 - RNA, 24 nt, synthetic construct
  source 1..24: mol_type = other RNA
aaaagccccatccttaggcctcct

SEQ ID NO: 711 - RNA, 24 nt, synthetic construct
  source 1..24: mol_type = other RNA
gtgacagaaaagccccatccttag

SEQ ID NO: 712 - RNA, 24 nt, synthetic construct
  source 1..24: mol_type = other RNA
ttggtgacagaaaagccccatcct

SEQ ID NO: 713 - RNA, 24 nt, synthetic construct
  source 1..24: mol_type = other RNA
gacaggattggtgacagaaaagcc

SEQ ID NO: 714 - RNA, 24 nt, synthetic construct
  source 1..24: mol_type = other RNA
tagggacaggattggtgacagaaa

SEQ ID NO: 715 - RNA, 24 nt, synthetic construct
  source 1..24: mol_type = other RNA
ctagggacaggattggtgacagaa

SEQ ID NO: 716 - RNA, 24 nt, synthetic construct
  source 1..24: mol_type = other RNA
actagggacaggattggtgacaga

SEQ ID NO: 717 - RNA, 24 nt, synthetic construct
  source 1..24: mol_type = other RNA
ctgggtacttttatctgtcccctc

SEQ ID NO: 718 - RNA, 24 nt, synthetic construct
  source 1..24: mol_type = other RNA
tctgggtacttttatctgtcccct

SEQ ID NO: 719 - RNA, 24 nt, synthetic construct
  source 1..24: mol_type = other RNA
ttctgggtacttttatctgtcccc

SEQ ID NO: 720 - RNA, 24 nt, synthetic construct
  source 1..24: mol_type = other RNA
tggttctgggtacttttatctgtc

SEQ ID NO: 721 - RNA, 24 nt, synthetic construct
  source 1..24: mol_type = other RNA
ctctggttctgggtacttttatct

SEQ ID NO: 722 - RNA, 24 nt, synthetic construct
  source 1..24: mol_type = other RNA
gctctggttctgggtacttttatc

SEQ ID NO: 723 - RNA, 24 nt, synthetic construct
  source 1..24: mol_type = other RNA
ggctctggttctgggtacttttat

SEQ ID NO: 724 - RNA, 24 nt, synthetic construct
  source 1..24: mol_type = other RNA
gagctgggaccaccttatattccc

SEQ ID NO: 725 - RNA, 24 nt, synthetic construct
  source 1..24: mol_type = other RNA
gtccccgagctgggaccaccttat

SEQ ID NO: 726 - RNA, 24 nt, synthetic construct
  source 1..24: mol_type = other RNA
tgtccccgagctgggaccacctta

SEQ ID NO: 727 - RNA, 24 nt, synthetic construct
  source 1..24: mol_type = other RNA
ccagggatcctgtgtccccgagct

SEQ ID NO: 728 - RNA, 24 nt, synthetic construct
  source 1..24: mol_type = other RNA
gtttgctgcctccagggatcctgt

SEQ ID NO: 729 - RNA, 24 nt, synthetic construct
  source 1..24: mol_type = other RNA
tgtttgctgcctccagggatcctg

SEQ ID NO: 730 - RNA, 24 nt, synthetic construct
  source 1..24: mol_type = other RNA
atgtttgctgcctccagggatcct

SEQ ID NO: 731 - RNA, 24 nt, synthetic construct
  source 1..24: mol_type = other RNA
ggacagcatgtttgctgcctccag

SEQ ID NO: 732 - RNA, 24 nt, synthetic construct
  source 1..24: mol_type = other RNA
ccacttcaggacagcatgtttgct

SEQ ID NO: 733 - RNA, 24 nt, synthetic construct
  source 1..24: mol_type = other RNA
tgtccacttcaggacagcatgttt

SEQ ID NO: 734 - RNA, 24 nt, synthetic construct
  source 1..24: mol_type = other RNA
cttcttcctccaacccgggcccct

SEQ ID NO: 735 - RNA, 24 nt, synthetic construct
  source 1..24: mol_type = other RNA
tcagctagtcttcttcctccaacc

SEQ ID NO: 736 - RNA, 24 nt, synthetic construct
  source 1..24: mol_type = other RNA
agagctcagctagtcttcttcctc

SEQ ID NO: 737 - RNA, 24 nt, synthetic construct
  source 1..24: mol_type = other RNA
gagagctcagctagtcttcttcct

SEQ ID NO: 738 - RNA, 24 nt, synthetic construct
  source 1..24: mol_type = other RNA
gtccgagagctcagctagtcttct

SEQ ID NO: 739 - RNA, 24 nt, synthetic construct
  source 1..24: mol_type = other RNA
gccccctgtcatggcatcttccag

SEQ ID NO: 740 - RNA, 24 nt, synthetic construct
  source 1..24: mol_type = other RNA
ctcttccagccccctgtcatggca

SEQ ID NO: 741 - RNA, 24 nt, synthetic construct
  source 1..24: mol_type = other RNA
ctctagtctgtgctagctcttcca

SEQ ID NO: 742 - RNA, 24 nt, synthetic construct
  source 1..24: mol_type = other RNA
tctctagtctgtgctagctcttcc

SEQ ID NO: 743 - RNA, 24 nt, synthetic construct
  source 1..24: mol_type = other RNA
ctctctagtctgtgctagctcttc

SEQ ID NO: 744 - RNA, 24 nt, synthetic construct
  source 1..24: mol_type = other RNA
cctctctagtctgtgctagctctt

SEQ ID NO: 745 - RNA, 24 nt, synthetic construct
  source 1..24: mol_type = other RNA
cttacctctctagtctgtgctagc

SEQ ID NO: 746 - RNA, 24 nt, synthetic construct
  source 1..24: mol_type = other RNA
catttgggcagctcccctaccccc

SEQ ID NO: 747 - RNA, 24 nt, synthetic construct
  source 1..24: mol_type = other RNA
ctcctttcatttgggcagctcccc

SEQ ID NO: 748 - RNA, 24 nt, synthetic construct
  source 1..24: mol_type = other RNA
actcctttcatttgggcagctccc

SEQ ID NO: 749 - RNA, 24 nt, synthetic construct
  source 1..24: mol_type = other RNA
cactcctttcatttgggcagctcc

SEQ ID NO: 750 - RNA, 24 nt, synthetic construct
  source 1..24: mol_type = other RNA
ctctcactcctttcatttgggcag

SEQ ID NO: 751 - RNA, 24 nt, synthetic construct
  source 1..24: mol_type = other RNA
cctctcactcctttcatttgggca

SEQ ID NO: 752 - RNA, 24 nt, synthetic construct
  source 1..24: mol_type = other RNA
acctctcactcctttcatttgggc

SEQ ID NO: 753 - RNA, 24 nt, synthetic construct
  source 1..24: mol_type = other RNA
ctcctgtggattcgggtcacctct

SEQ ID NO: 754 - RNA, 24 nt, synthetic construct
  source 1..24: mol_type = other RNA
caccccgttctcctgtggattcgg

SEQ ID NO: 755 - RNA, 24 nt, synthetic construct
  source 1..24: mol_type = other RNA
tgctttctttgcctggacaccccg

SEQ ID NO: 756 - RNA, 24 nt, synthetic construct
  source 1..24: mol_type = other RNA
atcctcttgctttctttgcctgga

SEQ ID NO: 757 - RNA, 24 nt, synthetic construct
  source 1..24: mol_type = other RNA
catcctcttgctttctttgcctgg

SEQ ID NO: 758 - RNA, 24 nt, synthetic construct
  source 1..24: mol_type = other RNA
ccatcctcttgctttctttgcctg

SEQ ID NO: 759 - RNA, 24 nt, synthetic construct
  source 1..24: mol_type = other RNA
ccacctctccatcctcttgctttc

SEQ ID NO: 760 - RNA, 24 nt, synthetic construct
  source 1..24: mol_type = other RNA
gtctccctggctttagccacctct

SEQ ID NO: 761 - RNA, 24 nt, synthetic construct
  source 1..24: mol_type = other RNA
ccccgtctccctggctttagccac

SEQ ID NO: 762 - RNA, 24 nt, synthetic construct
  source 1..24: mol_type = other RNA
aagtaccccgtctccctggcttta

SEQ ID NO: 763 - RNA, 24 nt, synthetic construct
  source 1..24: mol_type = other RNA
ccaaagtaccccgtctccctggct

SEQ ID NO: 764 - RNA, 24 nt, synthetic construct
  source 1..24: mol_type = other RNA
tctggacaaccccaaagtaccccg

SEQ ID NO: 765 - RNA, 24 nt, synthetic construct
  source 1..24: mol_type = other RNA
ttctggacaaccccaaagtacccc

SEQ ID NO: 766 - RNA, 24 nt, synthetic construct
  source 1..24: mol_type = other RNA
ccgtttttctggacaaccccaaag

SEQ ID NO: 767 - RNA, 24 nt, synthetic construct
  source 1..24: mol_type = other RNA
accgtttttctggacaaccccaaa

SEQ ID NO: 768 - RNA, 24 nt, synthetic construct
  source 1..24: mol_type = other RNA
caccgtttttctggacaaccccaa

SEQ ID NO: 769 - RNA, 24 nt, synthetic construct
  source 1..24: mol_type = other RNA
tgcatcatcaccgtttttctggac

SEQ ID NO: 770 - RNA, 24 nt, synthetic construct
  source 1..24: mol_type = other RNA
ctgcatcatcaccgtttttctgga

SEQ ID NO: 771 - RNA, 24 nt, synthetic construct
  source 1..24: mol_type = other RNA
cctgcatcatcaccgtttttctgg

SEQ ID NO: 772 - RNA, 24 nt, synthetic construct
  source 1..24: mol_type = other RNA
ctccccttcttgtaggcctgcatc

SEQ ID NO: 773 - RNA, 24 nt, synthetic construct
  source 1..24: mol_type = other RNA
cttgcgtcccgcctccccttcttg

SEQ ID NO: 774 - RNA, 24 nt, synthetic construct
  source 1..24: mol_type = other RNA
ctccgacggatgtctcccttgcgt

SEQ ID NO: 775-800 - skipped (26 entries)

SEQ ID NO: 801 - RNA, 100 nt, synthetic construct
  source 1..100: mol_type = other RNA
  modified_base 1: mod_base = OTHER; note = 2'-O-methyl modified nucleotide with phosphorothioate linkage
  modified_base 2: mod_base = OTHER; note = 2'-O-methyl modified nucleotide with phosphorothioate linkage
  modified_base 3: mod_base = OTHER; note = 2'-O-methyl modified nucleotide with phosphorothioate linkage
  modified_base 29: mod_base = OTHER; note = 2'-O-methyl modified nucleotide
  modified_base 30: mod_base = OTHER; note = 2'-O-methyl modified nucleotide
  modified_base 31: mod_base = OTHER; note = 2'-O-methyl modified nucleotide
  modified_base 32: mod_base = OTHER; note = 2'-O-methyl modified nucleotide
  modified_base 33: mod_base = OTHER; note = 2'-O-methyl modified nucleotide
  modified_base 34: mod_base = OTHER; note = 2'-O-methyl modified nucleotide
  modified_base 35: mod_base = OTHER; note = 2'-O-methyl modified nucleotide
  modified_base 36: mod_base = OTHER; note = 2'-O-methyl modified nucleotide
  modified_base 37: mod_base = OTHER; note = 2'-O-methyl modified nucleotide
  modified_base 38: mod_base = OTHER; note = 2'-O-methyl modified nucleotide
  modified_base 39: mod_base = OTHER; note = 2'-O-methyl modified nucleotide
  modified_base 40: mod_base = OTHER; note = 2'-O-methyl modified nucleotide
  modified_base 69: mod_base = OTHER; note = 2'-O-methyl modified nucleotide
  modified_base 70: mod_base = OTHER; note = 2'-O-methyl modified nucleotide
  modified_base 71: mod_base = OTHER; note = 2'-O-methyl modified nucleotide
  modified_base 72: mod_base = OTHER; note = 2'-O-methyl modified nucleotide
  modified_base 73: mod_base = OTHER; note = 2'-O-methyl modified nucleotide
  modified_base 74: mod_base = OTHER; note = 2'-O-methyl modified nucleotide
  modified_base 75: mod_base = OTHER; note = 2'-O-methyl modified nucleotide
  modified_base 76: mod_base = OTHER; note = 2'-O-methyl modified nucleotide
  modified_base 77: mod_base = OTHER; note = 2'-O-methyl modified nucleotide
  modified_base 78: mod_base = OTHER; note = 2'-O-methyl modified nucleotide
  modified_base 79: mod_base = OTHER; note = 2'-O-methyl modified nucleotide
  modified_base 80: mod_base = OTHER; note = 2'-O-methyl modified nucleotide
  modified_base 81: mod_base = OTHER; note = 2'-O-methyl modified nucleotide
  modified_base 82: mod_base = OTHER; note = 2'-O-methyl modified nucleotide
  modified_base 83: mod_base = OTHER; note = 2'-O-methyl modified nucleotide
  modified_base 84: mod_base = OTHER; note = 2'-O-methyl modified nucleotide
  modified_base 85: mod_base = OTHER; note = 2'-O-methyl modified nucleotide
  modified_base 86: mod_base = OTHER; note = 2'-O-methyl modified nucleotide
  modified_base 87: mod_base = OTHER; note = 2'-O-methyl modified nucleotide
  modified_base 88: mod_base = OTHER; note = 2'-O-methyl modified nucleotide
  modified_base 89: mod_base = OTHER; note = 2'-O-methyl modified nucleotide
  modified_base 90: mod_base = OTHER; note = 2'-O-methyl modified nucleotide
  modified_base 91: mod_base = OTHER; note = 2'-O-methyl modified nucleotide
  modified_base 92: mod_base = OTHER; note = 2'-O-methyl modified nucleotide
  modified_base 93: mod_base = OTHER; note = 2'-O-methyl modified nucleotide
  modified_base 94: mod_base = OTHER; note = 2'-O-methyl modified nucleotide
  modified_base 95: mod_base = OTHER; note = 2'-O-methyl modified nucleotide
  modified_base 96: mod_base = OTHER; note = 2'-O-methyl modified nucleotide
  modified_base 97: mod_base = OTHER; note = 2'-O-methyl modified nucleotide with phosphorothioate linkage
  modified_base 98: mod_base = OTHER; note = 2'-O-methyl modified nucleotide with phosphorothioate linkage
  modified_base 99: mod_base = OTHER; note = 2'-O-methyl modified nucleotide with phosphorothioate linkage
  modified_base 100: mod_base = OTHER; note = 2'-O-methyl modified nucleotide
ggccacggagcgagacatctgttttagagctagaaatagcaagttaaaataaggctagtccgttatcaacttgaaaaagtggcaccgagtcggtgctttt

SEQ ID NO: 802 - RNA, 100 nt, synthetic construct
  source 1..100: mol_type = other RNA
  modified_base 1: mod_base = OTHER; note = 2'-O-methyl modified nucleotide with phosphorothioate linkage
  modified_base 2: mod_base = OTHER; note = 2'-O-methyl modified nucleotide with phosphorothioate linkage
  modified_base 3: mod_base = OTHER; note = 2'-O-methyl modified nucleotide with phosphorothioate linkage
  modified_base 29: mod_base = OTHER; note = 2'-O-methyl modified nucleotide
  modified_base 30: mod_base = OTHER; note = 2'-O-methyl modified nucleotide
  modified_base 31: mod_base = OTHER; note = 2'-O-methyl modified nucleotide
  modified_base 32: mod_base = OTHER; note = 2'-O-methyl modified nucleotide
  modified_base 33: mod_base = OTHER; note = 2'-O-methyl modified nucleotide
  modified_base 34: mod_base = OTHER; note = 2'-O-methyl modified nucleotide
  modified_base 35: mod_base = OTHER; note = 2'-O-methyl modified nucleotide
  modified_base 36: mod_base = OTHER; note = 2'-O-methyl modified nucleotide
  modified_base 37: mod_base = OTHER; note = 2'-O-methyl modified nucleotide
  modified_base 38: mod_base = OTHER; note = 2'-O-methyl modified nucleotide
  modified_base 39: mod_base = OTHER; note = 2'-O-methyl modified nucleotide
  modified_base 40: mod_base = OTHER; note = 2'-O-methyl modified nucleotide
  modified_base 69: mod_base = OTHER; note = 2'-O-methyl modified nucleotide
  modified_base 70: mod_base = OTHER; note = 2'-O-methyl modified nucleotide
  modified_base 71: mod_base = OTHER; note = 2'-O-methyl modified nucleotide
  modified_base 72: mod_base = OTHER; note = 2'-O-methyl modified nucleotide
  modified_base 73: mod_base = OTHER; note = 2'-O-methyl modified nucleotide
  modified_base 74: mod_base = OTHER; note = 2'-O-methyl modified nucleotide
  modified_base 75: mod_base = OTHER; note = 2'-O-methyl modified nucleotide
  modified_base 76: mod_base = OTHER; note = 2'-O-methyl modified nucleotide
  modified_base 77: mod_base = OTHER; note = 2'-O-methyl modified nucleotide
  modified_base 78: mod_base = OTHER; note = 2'-O-methyl modified nucleotide
  modified_base 79: mod_base = OTHER; note = 2'-O-methyl modified nucleotide
  modified_base 80: mod_base = OTHER; note = 2'-O-methyl modified nucleotide
  modified_base 81: mod_base = OTHER; note = 2'-O-methyl modified nucleotide
  modified_base 82: mod_base = OTHER; note = 2'-O-methyl modified nucleotide
  modified_base 83: mod_base = OTHER; note = 2'-O-methyl modified nucleotide
  modified_base 84: mod_base = OTHER; note = 2'-O-methyl modified nucleotide
  modified_base 85: mod_base = OTHER; note = 2'-O-methyl modified nucleotide
  modified_base 86: mod_base = OTHER; note = 2'-O-methyl modified nucleotide
  modified_base 87: mod_base = OTHER; note = 2'-O-methyl modified nucleotide
  modified_base 88: mod_base = OTHER; note = 2'-O-methyl modified nucleotide
  modified_base 89: mod_base = OTHER; note = 2'-O-methyl modified nucleotide
  modified_base 90: mod_base = OTHER; note = 2'-O-methyl modified nucleotide
  modified_base 91: mod_base = OTHER; note = 2'-O-methyl modified nucleotide
  modified_base 92: mod_base = OTHER; note = 2'-O-methyl modified nucleotide
  modified_base 93: mod_base = OTHER; note = 2'-O-methyl modified nucleotide
  modified_base 94: mod_base = OTHER; note = 2'-O-methyl modified nucleotide
  modified_base 95: mod_base = OTHER; note = 2'-O-methyl modified nucleotide
  modified_base 96: mod_base = OTHER; note = 2'-O-methyl modified nucleotide
  modified_base 97: mod_base = OTHER; note = 2'-O-methyl modified nucleotide with phosphorothioate linkage
  modified_base 98: mod_base = OTHER; note = 2'-O-methyl modified nucleotide with phosphorothioate linkage
  modified_base 99: mod_base = OTHER; note = 2'-O-methyl modified nucleotide with phosphorothioate linkage
  modified_base 100: mod_base = OTHER; note = 2'-O-methyl modified nucleotide
acagcgacgccgcgagccaggttttagagctagaaatagcaagttaaaataaggctagtccgttatcaacttgaaaaagtggcaccgagtcggtgctttt

SEQ ID NO: 803 - RNA, 91 nt, synthetic construct
  source 1..91: mol_type = other RNA
  modified_base 1: mod_base = OTHER; note = 2'-O-methyl modified nucleotide with phosphorothioate linkage
  modified_base 2: mod_base = OTHER; note = 2'-O-methyl modified nucleotide with phosphorothioate linkage
  modified_base 3: mod_base = OTHER; note = 2'-O-methyl modified nucleotide with phosphorothioate linkage
  modified_base 29: mod_base = OTHER; note = 2'-O-methyl modified nucleotide
  modified_base 30: mod_base = OTHER; note = 2'-O-methyl modified nucleotide
  modified_base 31: mod_base = OTHER; note = 2'-O-methyl modified nucleotide
  modified_base 32: mod_base = OTHER; note = 2'-O-methyl modified nucleotide
  modified_base 33: mod_base = OTHER; note = 2'-O-methyl modified nucleotide
  modified_base 34: mod_base = OTHER; note = 2'-O-methyl modified nucleotide
  modified_base 35: mod_base = OTHER; note = 2'-O-methyl modified nucleotide
  modified_base 36: mod_base = OTHER; note = 2'-O-methyl modified nucleotide
  modified_base 37: mod_base = OTHER; note = 2'-O-methyl modified nucleotide
  modified_base 38: mod_base = OTHER; note = 2'-O-methyl modified nucleotide
  modified_base 39: mod_base = OTHER; note = 2'-O-methyl modified nucleotide
  modified_base 40: mod_base = OTHER; note = 2'-O-methyl modified nucleotide
  modified_base 88: mod_base = OTHER; note = 2'-O-methyl modified nucleotide with phosphorothioate linkage
  modified_base 89: mod_base = OTHER; note = 2'-O-methyl modified nucleotide with phosphorothioate linkage
  modified_base 90: mod_base = OTHER; note = 2'-O-methyl modified nucleotide with phosphorothioate linkage
  modified_base 91: mod_base = OTHER; note = 2'-O-methyl modified nucleotide
ttcaaaacctgtcagtgattgttttagagctagaaatagcaagttaaaataaggctagtccgttatcacgaaagggcaccgagtcggtgct

SEQ ID NO: 804 - RNA, 37 nt, synthetic construct
  source 1..37: mol_type = other RNA
  modified_base 1: mod_base = OTHER; note = 2'-O-methyl modified nucleotide with phosphorothioate linkage
  modified_base 2: mod_base = OTHER; note = 2'-O-methyl modified nucleotide with phosphorothioate linkage
  modified_base 3: mod_base = OTHER; note = 2'-O-methyl modified nucleotide with phosphorothioate linkage
  modified_base 4: mod_base = OTHER; note = 2'-O-methyl modified nucleotide
  modified_base 5: mod_base = OTHER; note = 2'-O-methyl modified nucleotide
  modified_base 8: mod_base = OTHER; note = 2'-O-methyl modified nucleotide
  modified_base 9: mod_base = OTHER; note = 2'-O-methyl modified nucleotide
  modified_base 11: mod_base = OTHER; note = 2'-O-methyl modified nucleotide
  modified_base 13: mod_base = OTHER; note = 2'-O-methyl modified nucleotide
  modified_base 18: mod_base = OTHER; note = 2'-O-methyl modified nucleotide
  modified_base 22: mod_base = OTHER; note = 2'-O-methyl modified nucleotide
  modified_base 25: mod_base = OTHER; note = 2'-O-methyl modified nucleotide
  modified_base 29: mod_base = OTHER; note = 2'-O-methyl modified nucleotide
  modified_base 30: mod_base = OTHER; note = 2'-O-methyl modified nucleotide
  modified_base 31: mod_base = OTHER; note = 2'-O-methyl modified nucleotide
  modified_base 32: mod_base = OTHER; note = 2'-O-methyl modified nucleotide
  modified_base 37: mod_base = OTHER; note = 2'-O-methyl modified nucleotide attached to position 1 of SEQ ID NO: 3206 via a L1 linker
gccgtgtaccagctgagagactctgttgtagctccct

SEQ ID NO: 805 - RNA, 101 nt, synthetic construct
  source 1..101: mol_type = other RNA
  modified_base 1: mod_base = OTHER; note = 2'-O-methyl modified nucleotide with phosphorothioate linkage
  modified_base 2: mod_base = OTHER; note = 2'-O-methyl modified nucleotide with phosphorothioate linkage
  modified_base 3: mod_base = OTHER; note = 2'-O-methyl modified nucleotide with phosphorothioate linkage
  modified_base 4: mod_base = OTHER; note = 2'-O-methyl modified nucleotide
  modified_base 5: mod_base = OTHER; note = 2'-O-methyl modified nucleotide
  modified_base 8: mod_base = OTHER; note = 2'-O-methyl modified nucleotide
  modified_base 9: mod_base = OTHER; note = 2'-O-methyl modified nucleotide
  modified_base 11: mod_base = OTHER; note = 2'-O-methyl modified nucleotide
  modified_base 13: mod_base = OTHER; note = 2'-O-methyl modified nucleotide
  modified_base 18: mod_base = OTHER; note = 2'-O-methyl modified nucleotide
  modified_base 22: mod_base = OTHER; note = 2'-O-methyl modified nucleotide
  modified_base 25: mod_base = OTHER; note = 2'-O-methyl modified nucleotide
  modified_base 29: mod_base = OTHER; note = 2'-O-methyl modified nucleotide
  modified_base 30: mod_base = OTHER; note = 2'-O-methyl modified nucleotide
  modified_base 31: mod_base = OTHER; note = 2'-O-methyl modified nucleotide
  modified_base 32: mod_base = OTHER; note = 2'-O-methyl modified nucleotide
  modified_base 37: mod_base = OTHER; note = 2'-O-methyl modified nucleotide
  modified_base 38: mod_base = OTHER; note = 2'-O-methyl modified nucleotide
  modified_base 39: mod_base = OTHER; note = 2'-O-methyl modified nucleotide
  modified_base 40: mod_base = OTHER; note = 2'-O-methyl modified nucleotide
  modified_base 41: mod_base = OTHER; note = 2'-O-methyl modified nucleotide
  modified_base 42: mod_base = OTHER; note = 2'-O-methyl modified nucleotide
  modified_base 43: mod_base = OTHER; note = 2'-O-methyl modified nucleotide
  modified_base 47: mod_base = OTHER; note = 2'-O-methyl modified nucleotide
  modified_base 48: mod_base = OTHER; note = 2'-O-methyl modified nucleotide
  modified_base 51: mod_base = OTHER; note = 2'-O-methyl modified nucleotide
  modified_base 54: mod_base = OTHER; note = nucleotide with phosphorothioate linkage
  modified_base 58: mod_base = OTHER; note = 2'-O-methyl modified nucleotide
  modified_base 59: mod_base = OTHER; note = 2'-O-methyl modified nucleotide
  modified_base 61: mod_base = OTHER; note = 2'-O-methyl modified nucleotide
  modified_base 62: mod_base = OTHER; note = 2'-O-methyl modified nucleotide
  modified_base 63: mod_base = OTHER; note = 2'-O-methyl modified nucleotide
  modified_base 64: mod_base = OTHER; note = 2'-O-methyl modified nucleotide
  modified_base 65: mod_base = OTHER; note = 2'-O-methyl modified nucleotide
  modified_base 66: mod_base = OTHER; note = 2'-O-methyl modified nucleotide
  modified_base 67: mod_base = OTHER; note = 2'-O-methyl modified nucleotide
  modified_base 68: mod_base = OTHER; note = 2'-O-methyl modified nucleotide
  modified_base 69: mod_base = OTHER; note = 2'-O-methyl modified nucleotide
  modified_base 70: mod_base = OTHER; note = 2'-O-methyl modified nucleotide
  modified_base 75: mod_base = OTHER; note = 2'-O-methyl modified nucleotide
  modified_base 77: mod_base = OTHER; note = 2'-O-methyl modified nucleotide
  modified_base 80: mod_base = OTHER; note = 2'-O-methyl modified nucleotide
  modified_base 86: mod_base = OTHER; note = 2'-O-methyl modified nucleotide
  modified_base 87: mod_base = OTHER; note = 2'-O-methyl modified nucleotide
  modified_base 89: mod_base = OTHER; note = 2'-O-methyl modified nucleotide
  modified_base 90: mod_base = OTHER; note = 2'-O-methyl modified nucleotide
  modified_base 91: mod_base = OTHER; note = 2'-O-methyl modified nucleotide
  modified_base 92: mod_base = OTHER; note = 2'-O-methyl modified nucleotide
  modified_base 99: mod_base = OTHER; note = nucleotide with phosphorothioate linkage
  modified_base 100: mod_base = OTHER; note = 2'-O-methyl modified nucleotide with phosphorothioate linkage
  modified_base 101: mod_base = OTHER; note = 2'-O-methyl modified nucleotide
cccacagatatccagaaccctgacgttgtagctccctgaaaccgttgctacaataaggccgtcgaaagatgtgccgcaacgctctgccttctggcatcgtt

SEQ ID NO: 806 - RNA, 101 nt, synthetic construct
  source 1..101: mol_type = other RNA
  modified_base 1: mod_base = OTHER; note = 2'-O-methyl modified nucleotide with phosphorothioate linkage
  modified_base 2: mod_base = OTHER; note = 2'-O-methyl modified nucleotide with phosphorothioate linkage
  modified_base 3: mod_base = OTHER; note = 2'-O-methyl modified nucleotide with phosphorothioate linkage
  modified_base 4: mod_base = OTHER; note = 2'-O-methyl modified nucleotide
  modified_base 5: mod_base = OTHER; note = 2'-O-methyl modified nucleotide
  modified_base 8: mod_base = OTHER; note = 2'-O-methyl modified nucleotide
  modified_base 9: mod_base = OTHER; note = 2'-O-methyl modified nucleotide
  modified_base 11: mod_base = OTHER; note = 2'-O-methyl modified nucleotide
  modified_base 13: mod_base = OTHER; note = 2'-O-methyl modified nucleotide
  modified_base 18: mod_base = OTHER; note = 2'-O-methyl modified nucleotide
  modified_base 22: mod_base = OTHER; note = 2'-O-methyl modified nucleotide
  modified_base 25: mod_base = OTHER; note = 2'-O-methyl modified nucleotide
  modified_base 29: mod_base = OTHER; note = 2'-O-methyl modified nucleotide
  modified_base 30: mod_base = OTHER; note = 2'-O-methyl modified nucleotide
  modified_base 31: mod_base = OTHER; note = 2'-O-methyl modified nucleotide
  modified_base 32: mod_base = OTHER; note = 2'-O-methyl modified nucleotide
  modified_base 37: mod_base = OTHER; note = 2'-O-methyl modified nucleotide
  modified_base 38: mod_base = OTHER; note = 2'-O-methyl modified nucleotide
  modified_base 39: mod_base = OTHER; note = 2'-O-methyl modified nucleotide
  modified_base 40: mod_base = OTHER; note = 2'-O-methyl modified nucleotide
  modified_base 41: mod_base = OTHER; note = 2'-O-methyl modified nucleotide
  modified_base 42: mod_base = OTHER; note = 2'-O-methyl modified nucleotide
  modified_base 43: mod_base = OTHER; note = 2'-O-methyl modified nucleotide
  modified_base 47: mod_base = OTHER; note = 2'-O-methyl modified nucleotide
  modified_base 48: mod_base = OTHER; note = 2'-O-methyl modified nucleotide
  modified_base 51: mod_base = OTHER; note = 2'-O-methyl modified nucleotide
  modified_base 54: mod_base = OTHER; note = nucleotide with phosphorothioate linkage
  modified_base 58: mod_base = OTHER; note = 2'-O-methyl modified nucleotide
  modified_base 59: mod_base = OTHER; note = 2'-O-methyl modified nucleotide
  modified_base 61: mod_base = OTHER; note = 2'-O-methyl modified nucleotide
  modified_base 62: mod_base = OTHER; note = 2'-O-methyl modified nucleotide
  modified_base 63: mod_base = OTHER; note = 2'-O-methyl modified nucleotide
  modified_base 64: mod_base = OTHER; note = 2'-O-methyl modified nucleotide
  modified_base 65: mod_base = OTHER; note = 2'-O-methyl modified nucleotide
  modified_base 66: mod_base = OTHER; note = 2'-O-methyl modified nucleotide
  modified_base 67: mod_base = OTHER; note = 2'-O-methyl modified nucleotide
  modified_base 68: mod_base = OTHER; note = 2'-O-methyl modified nucleotide
  modified_base 69: mod_base = OTHER; note = 2'-O-methyl modified nucleotide
  modified_base 70: mod_base = OTHER; note = 2'-O-methyl modified nucleotide
  modified_base 75: mod_base = OTHER; note = 2'-O-methyl modified nucleotide
  modified_base 77: mod_base = OTHER; note = 2'-O-methyl modified nucleotide
  modified_base 80: mod_base = OTHER; note = 2'-O-methyl modified nucleotide
  modified_base 86: mod_base = OTHER; note = 2'-O-methyl modified nucleotide
  modified_base 87: mod_base = OTHER; note = 2'-O-methyl modified nucleotide
  modified_base 89: mod_base = OTHER; note = 2'-O-methyl modified nucleotide
  modified_base 90: mod_base = OTHER; note = 2'-O-methyl modified nucleotide
  modified_base 91: mod_base = OTHER; note = 2'-O-methyl modified nucleotide
  modified_base 92: mod_base = OTHER; note = 2'-O-methyl modified nucleotide
  modified_base 99: mod_base = OTHER; note = nucleotide with phosphorothioate linkage
  modified_base 100: mod_base = OTHER; note = 2'-O-methyl modified nucleotide with phosphorothioate linkage
  modified_base 101: mod_base = OTHER; note = 2'-O-methyl modified nucleotide
ttgtcccacagatatccagaacccgttgtagctccctgaaaccgttgctacaataaggccgtcgaaagatgtgccgcaacgctctgccttctggcatcgtt

SEQ ID NO: 807 - RNA, 101 nt, synthetic construct
  source 1..101: mol_type = other RNA
  modified_base 1: mod_base = OTHER; note = 2'-O-methyl modified nucleotide with phosphorothioate linkage
  modified_base 2: mod_base = OTHER; note = 2'-O-methyl modified nucleotide with phosphorothioate linkage
  modified_base 3: mod_base = OTHER; note = 2'-O-methyl modified nucleotide with phosphorothioate linkage
  modified_base 4: mod_base = OTHER; note = 2'-O-methyl modified nucleotide
  modified_base 5: mod_base = OTHER; note = 2'-O-methyl modified nucleotide
  modified_base 8: mod_base = OTHER; note = 2'-O-methyl modified nucleotide
  modified_base 9: mod_base = OTHER; note = 2'-O-methyl modified nucleotide
  modified_base 11: mod_base = OTHER; note = 2'-O-methyl modified nucleotide
  modified_base 13: mod_base = OTHER; note = 2'-O-methyl modified nucleotide
  modified_base 18: mod_base = OTHER; note = 2'-O-methyl modified nucleotide
  modified_base 22: mod_base = OTHER; note = 2'-O-methyl modified nucleotide
  modified_base 25: mod_base = OTHER; note = 2'-O-methyl modified nucleotide
  modified_base 29: mod_base = OTHER; note = 2'-O-methyl modified nucleotide
  modified_base 30: mod_base = OTHER; note = 2'-O-methyl modified nucleotide
  modified_base 31: mod_base = OTHER; note = 2'-O-methyl modified nucleotide
  modified_base 32: mod_base = OTHER; note = 2'-O-methyl modified nucleotide
  modified_base 37: mod_base = OTHER; note = 2'-O-methyl modified nucleotide
  modified_base 38: mod_base = OTHER; note = 2'-O-methyl modified nucleotide
  modified_base 39: mod_base = OTHER; note = 2'-O-methyl modified nucleotide
  modified_base 40: mod_base = OTHER; note = 2'-O-methyl modified nucleotide
  modified_base 41: mod_base = OTHER; note = 2'-O-methyl modified nucleotide
  modified_base 42: mod_base = OTHER; note = 2'-O-methyl modified nucleotide
  modified_base 43: mod_base = OTHER; note = 2'-O-methyl modified nucleotide
  modified_base 47: mod_base = OTHER; note = 2'-O-methyl modified nucleotide
  modified_base 48: mod_base = OTHER; note = 2'-O-methyl modified nucleotide
  modified_base 51: mod_base = OTHER; note = 2'-O-methyl modified nucleotide
  modified_base 54: mod_base = OTHER; note = nucleotide with phosphorothioate linkage
  modified_base 58: mod_base = OTHER; note = 2'-O-methyl modified nucleotide
  modified_base 59: mod_base = OTHER; note = 2'-O-methyl modified nucleotide
  modified_base 61: mod_base = OTHER; note = 2'-O-methyl modified nucleotide
  modified_base 62: mod_base = OTHER; note = 2'-O-methyl modified nucleotide
  modified_base 63: mod_base = OTHER; note = 2'-O-methyl modified nucleotide
  modified_base 64: mod_base = OTHER; note = 2'-O-methyl modified nucleotide
  modified_base 65: mod_base = OTHER; note = 2'-O-methyl modified nucleotide
  modified_base 66: mod_base = OTHER; note = 2'-O-methyl modified nucleotide
  modified_base 67: mod_base = OTHER; note = 2'-O-methyl modified nucleotide
  modified_base 68: mod_base = OTHER; note = 2'-O-methyl modified nucleotide
  modified_base 69: mod_base = OTHER; note = 2'-O-methyl modified nucleotide
  modified_base 70: mod_base = OTHER; note = 2'-O-methyl modified nucleotide
  modified_base 75: mod_base = OTHER; note = 2'-O-methyl modified nucleotide
  modified_base 77: mod_base = OTHER; note = 2'-O-methyl modified nucleotide
  modified_base 80: mod_base = OTHER; note = 2'-O-methyl modified nucleotide
  modified_base 86: mod_base = OTHER; note = 2'-O-methyl modified nucleotide
  modified_base 87: mod_base = OTHER; note = 2'-O-methyl modified nucleotide
  modified_base 89: mod_base = OTHER; note = 2'-O-methyl modified nucleotide
  modified_base 90: mod_base = OTHER; note = 2'-O-methyl modified nucleotide
  modified_base 91: mod_base = OTHER; note = 2'-O-methyl modified nucleotide
  modified_base 92: mod_base = OTHER; note = 2'-O-methyl modified nucleotide
  modified_base 99: mod_base = OTHER; note = nucleotide with phosphorothioate linkage
  modified_base 100: mod_base = OTHER; note = 2'-O-methyl modified nucleotide with phosphorothioate linkage
  modified_base 101: mod_base = OTHER; note = 2'-O-methyl modified nucleotide
cttgtcccacagatatccagaaccgttgtagctccctgaaaccgttgctacaataaggccgtcgaaagatgtgccgcaacgctctgccttctggcatcgtt

SEQ ID NO: 808 - RNA, 101 nt, synthetic construct
  source 1..101: mol_type = other RNA
  modified_base 1: mod_base = OTHER; note = 2'-O-methyl modified nucleotide with phosphorothioate linkage
  modified_base 2: mod_base = OTHER; note = 2'-O-methyl modified nucleotide with phosphorothioate linkage
  modified_base 3: mod_base = OTHER; note = 2'-O-methyl modified nucleotide with phosphorothioate linkage
  modified_base 4: mod_base = OTHER; note = 2'-O-methyl modified nucleotide
  modified_base 5: mod_base = OTHER; note = 2'-O-methyl modified nucleotide
  modified_base 8: mod_base = OTHER; note = 2'-O-methyl modified nucleotide
  modified_base 9: mod_base = OTHER; note = 2'-O-methyl modified nucleotide
  modified_base 11: mod_base = OTHER; note = 2'-O-methyl modified nucleotide
  modified_base 13: mod_base = OTHER; note = 2'-O-methyl modified nucleotide
  modified_base 18: mod_base = OTHER; note = 2'-O-methyl modified nucleotide
  modified_base 22: mod_base = OTHER; note = 2'-O-methyl modified nucleotide
  modified_base 25: mod_base = OTHER; note = 2'-O-methyl modified nucleotide
  modified_base 29: mod_base = OTHER; note = 2'-O-methyl modified nucleotide
  modified_base 30: mod_base = OTHER; note = 2'-O-methyl modified nucleotide
  modified_base 31: mod_base = OTHER; note = 2'-O-methyl modified nucleotide
  modified_base 32: mod_base = OTHER; note = 2'-O-methyl modified nucleotide
  modified_base 37: mod_base = OTHER; note = 2'-O-methyl modified nucleotide
  modified_base 38: mod_base = OTHER; note = 2'-O-methyl modified nucleotide
  modified_base 39: mod_base = OTHER; note = 2'-O-methyl modified nucleotide
  modified_base 40: mod_base = OTHER; note = 2'-O-methyl modified nucleotide
  modified_base 41: mod_base = OTHER; note = 2'-O-methyl modified nucleotide
  modified_base 42: mod_base = OTHER; note = 2'-O-methyl modified nucleotide
  modified_base 43: mod_base = OTHER; note = 2'-O-methyl modified nucleotide
  modified_base 47: mod_base = OTHER; note = 2'-O-methyl modified nucleotide
  modified_base 48: mod_base = OTHER; note = 2'-O-methyl modified nucleotide
  modified_base 51: mod_base = OTHER; note = 2'-O-methyl modified nucleotide
  modified_base 54: mod_base = OTHER; note = nucleotide with phosphorothioate linkage
  modified_base 58: mod_base = OTHER; note = 2'-O-methyl modified nucleotide
  modified_base 59: mod_base = OTHER; note = 2'-O-methyl modified nucleotide
  modified_base 61: mod_base = OTHER; note = 2'-O-methyl modified nucleotide
  modified_base 62: mod_base = OTHER; note = 2'-O-methyl modified nucleotide
  modified_base 63: mod_base = OTHER; note = 2'-O-methyl modified nucleotide
  modified_base 64: mod_base = OTHER; note = 2'-O-methyl modified nucleotide
  modified_base 65: mod_base = OTHER; note = 2'-O-methyl modified nucleotide
  modified_base 66: mod_base = OTHER; note = 2'-O-methyl modified nucleotide
  modified_base 67: mod_base = OTHER; note = 2'-O-methyl modified nucleotide
  modified_base 68: mod_base = OTHER; note = 2'-O-methyl modified nucleotide
  modified_base 69: mod_base = OTHER; note = 2'-O-methyl modified nucleotide
  modified_base 70: mod_base = OTHER; note = 2'-O-methyl modified nucleotide
  modified_base 75: mod_base = OTHER; note = 2'-O-methyl modified nucleotide
  modified_base 77: mod_base = OTHER; note = 2'-O-methyl modified nucleotide
  modified_base 80: mod_base = OTHER; note = 2'-O-methyl modified nucleotide
  modified_base 86: mod_base = OTHER; note = 2'-O-methyl modified nucleotide
  modified_base 87: mod_base = OTHER; note = 2'-O-methyl modified nucleotide
  modified_base 89: mod_base = OTHER; note = 2'-O-methyl modified nucleotide
  modified_base 90: mod_base = OTHER; note = 2'-O-methyl modified nucleotide
  modified_base 91: mod_base = OTHER; note = 2'-O-methyl modified nucleotide
  modified_base 92: mod_base = OTHER; note = 2'-O-methyl modified nucleotide
  modified_base 99: mod_base = OTHER; note = nucleotide with phosphorothioate linkage
  modified_base 100: mod_base = OTHER; note = 2'-O-methyl modified nucleotide with phosphorothioate linkage
  modified_base 101: mod_base = OTHER; note = 2'-O-methyl modified nucleotide
atcctcttgtcccacagatatccagttgtagctccctgaaaccgttgctacaataaggccgtcgaaagatgtgccgcaacgctctgccttctggcatcgtt

SEQ ID NO: 809 - RNA, 101 nt, synthetic construct
  source 1..101: mol_type = other RNA
  modified_base 1: mod_base = OTHER; note = 2'-O-methyl modified nucleotide with phosphorothioate linkage
  modified_base 2: mod_base = OTHER; note = 2'-O-methyl modified nucleotide with phosphorothioate linkage
  modified_base 3: mod_base = OTHER; note = 2'-O-methyl modified nucleotide with phosphorothioate linkage
  modified_base 4: mod_base = OTHER; note = 2'-O-methyl modified nucleotide
  modified_base 5: mod_base = OTHER; note = 2'-O-methyl modified nucleotide
  modified_base 8: mod_base = OTHER; note = 2'-O-methyl modified nucleotide
  modified_base 9: mod_base = OTHER; note = 2'-O-methyl modified nucleotide
  modified_base 11: mod_base = OTHER; note = 2'-O-methyl modified nucleotide
  modified_base 13: mod_base = OTHER; note = 2'-O-methyl modified nucleotide
  modified_base 18: mod_base = OTHER; note = 2'-O-methyl modified nucleotide
  modified_base 22: mod_base = OTHER; note = 2'-O-methyl modified nucleotide
  modified_base 25: mod_base = OTHER; note = 2'-O-methyl modified nucleotide
  modified_base 29: mod_base = OTHER; note = 2'-O-methyl modified nucleotide
  modified_base 30: mod_base = OTHER; note = 2'-O-methyl modified nucleotide
  modified_base 31: mod_base = OTHER; note = 2'-O-methyl modified nucleotide
  modified_base 32: mod_base = OTHER; note = 2'-O-methyl modified nucleotide
  modified_base 37: mod_base = OTHER; note = 2'-O-methyl modified nucleotide
  modified_base 38: mod_base = OTHER; note = 2'-O-methyl modified nucleotide
  modified_base 39: mod_base = OTHER; note = 2'-O-methyl modified nucleotide
  modified_base 40: mod_base = OTHER; note = 2'-O-methyl modified nucleotide
  modified_base 41: mod_base = OTHER; note = 2'-O-methyl modified nucleotide
  modified_base 42: mod_base = OTHER; note = 2'-O-methyl modified nucleotide
  modified_base 43: mod_base = OTHER; note = 2'-O-methyl modified nucleotide
  modified_base 47: mod_base = OTHER; note = 2'-O-methyl modified nucleotide
  modified_base 48: mod_base = OTHER; note = 2'-O-methyl modified nucleotide
  modified_base 51: mod_base = OTHER; note = 2'-O-methyl modified nucleotide
  modified_base 54: mod_base = OTHER; note = nucleotide with phosphorothioate linkage
  modified_base 58: mod_base = OTHER; note = 2'-O-methyl modified nucleotide
  modified_base 59: mod_base = OTHER; note = 2'-O-methyl modified nucleotide
  modified_base 61: mod_base = OTHER; note = 2'-O-methyl modified nucleotide
  modified_base 62: mod_base = OTHER; note = 2'-O-methyl modified nucleotide
  modified_base 63: mod_base = OTHER; note = 2'-O-methyl modified nucleotide
  modified_base 64: mod_base = OTHER; note = 2'-O-methyl modified nucleotide
  modified_base 65: mod_base = OTHER; note = 2'-O-methyl modified nucleotide
  modified_base 66: mod_base = OTHER; note = 2'-O-methyl modified nucleotide
  modified_base 67: mod_base = OTHER; note = 2'-O-methyl modified nucleotide
  modified_base 68: mod_base = OTHER; note = 2'-O-methyl modified nucleotide
  modified_base 69: mod_base = OTHER; note = 2'-O-methyl modified nucleotide
  modified_base 70: mod_base = OTHER; note = 2'-O-methyl modified nucleotide
  modified_base 75: mod_base = OTHER; note = 2'-O-methyl modified nucleotide
  modified_base 77: mod_base = OTHER; note = 2'-O-methyl modified nucleotide
  modified_base 80: mod_base = OTHER; note = 2'-O-methyl modified nucleotide
  modified_base 86: mod_base = OTHER; note = 2'-O-methyl modified nucleotide
  modified_base 87: mod_base = OTHER; note = 2'-O-methyl modified nucleotide
  modified_base 89: mod_base = OTHER; note = 2'-O-methyl modified nucleotide
  modified_base 90: mod_base = OTHER; note = 2'-O-methyl modified nucleotide
  modified_base 91: mod_base = OTHER; note = 2'-O-methyl modified nucleotide
  modified_base 92: mod_base = OTHER; note = 2'-O-methyl modified nucleotide
  modified_base 99: mod_base = OTHER; note = nucleotide with phosphorothioate linkage
  modified_base 100: mod_base = OTHER; note = 2'-O-methyl modified nucleotide with phosphorothioate linkage
  modified_base 101: mod_base = OTHER; note = 2'-O-methyl modified nucleotide
gatcctcttgtcccacagatatccgttgtagctccctgaaaccgttgctacaataaggccgtcgaaagatgtgccgcaacgctctgccttctggcatcgtt

SEQ ID NO: 810 - RNA, 101 nt, synthetic construct
  source 1..101: mol_type = other RNA
  modified_base 1: mod_base = OTHER; note = 2'-O-methyl modified nucleotide with phosphorothioate linkage
  modified_base 2: mod_base = OTHER; note = 2'-O-methyl modified nucleotide with phosphorothioate linkage
  modified_base 3: mod_base = OTHER; note = 2'-O-methyl modified nucleotide with phosphorothioate linkage
  modified_base 4: mod_base = OTHER; note = 2'-O-methyl modified nucleotide
  modified_base 5: mod_base = OTHER; note = 2'-O-methyl modified nucleotide
  modified_base 8: mod_base = OTHER; note = 2'-O-methyl modified nucleotide
  modified_base 9: mod_base = OTHER; note = 2'-O-methyl modified nucleotide
  modified_base 11: mod_base = OTHER; note = 2'-O-methyl modified nucleotide
  modified_base 13: mod_base = OTHER; note = 2'-O-methyl modified nucleotide
  modified_base 18: mod_base = OTHER; note = 2'-O-methyl modified nucleotide
  modified_base 22: mod_base = OTHER; note = 2'-O-methyl modified nucleotide
  modified_base 25: mod_base = OTHER; note = 2'-O-methyl modified nucleotide
  modified_base 29: mod_base = OTHER; note = 2'-O-methyl modified nucleotide
  modified_base 30: mod_base = OTHER; note = 2'-O-methyl modified nucleotide
  modified_base 31: mod_base = OTHER; note = 2'-O-methyl modified nucleotide
  modified_base 32: mod_base = OTHER; note = 2'-O-methyl modified nucleotide
  modified_base 37: mod_base = OTHER; note = 2'-O-methyl modified nucleotide
  modified_base 38: mod_base = OTHER; note = 2'-O-methyl modified nucleotide
  modified_base 39: mod_base = OTHER; note = 2'-O-methyl modified nucleotide
  modified_base 40: mod_base = OTHER; note = 2'-O-methyl modified nucleotide
  modified_base 41: mod_base = OTHER; note = 2'-O-methyl modified nucleotide
  modified_base 42: mod_base = OTHER; note = 2'-O-methyl modified nucleotide
  modified_base 43: mod_base = OTHER; note = 2'-O-methyl modified nucleotide
  modified_base 47: mod_base = OTHER; note = 2'-O-methyl modified nucleotide
  modified_base 48: mod_base = OTHER; note = 2'-O-methyl modified nucleotide
  modified_base 51: mod_base = OTHER; note = 2'-O-methyl modified nucleotide
  modified_base 54: mod_base = OTHER; note = nucleotide with phosphorothioate linkage
  modified_base 58: mod_base = OTHER; note = 2'-O-methyl modified nucleotide
  modified_base 59: mod_base = OTHER; note = 2'-O-methyl modified nucleotide
  modified_base 61: mod_base = OTHER; note = 2'-O-methyl modified nucleotide
  modified_base 62: mod_base = OTHER; note = 2'-O-methyl modified nucleotide
  modified_base 63: mod_base = OTHER; note = 2'-O-methyl modified nucleotide
  modified_base 64: mod_base = OTHER; note = 2'-O-methyl modified nucleotide
  modified_base 65: mod_base = OTHER; note = 2'-O-methyl modified nucleotide
  modified_base 66: mod_base = OTHER; note = 2'-O-methyl modified nucleotide
  modified_base 67: mod_base = OTHER; note = 2'-O-methyl modified nucleotide
  modified_base 68: mod_base = OTHER; note = 2'-O-methyl modified nucleotide
  modified_base 69: mod_base = OTHER; note = 2'-O-methyl modified nucleotide
  modified_base 70: mod_base = OTHER; note = 2'-O-methyl modified nucleotide
  modified_base 75: mod_base = OTHER; note = 2'-O-methyl modified nucleotide
  modified_base 77: mod_base = OTHER; note = 2'-O-methyl modified nucleotide
  modified_base 80: mod_base = OTHER; note = 2'-O-methyl modified nucleotide
  modified_base 86: mod_base = OTHER; note = 2'-O-methyl modified nucleotide
  modified_base 87: mod_base = OTHER; note = 2'-O-methyl modified nucleotide
  modified_base 89: mod_base = OTHER; note = 2'-O-methyl modified nucleotide
  modified_base 90: mod_base = OTHER; note = 2'-O-methyl modified nucleotide
  modified_base 91: mod_base = OTHER; note = 2'-O-methyl modified nucleotide
  modified_base 92: mod_base = OTHER; note = 2'-O-methyl modified nucleotide
  modified_base 99: mod_base = OTHER; note = nucleotide with phosphorothioate linkage
  modified_base 100: mod_base = OTHER; note = 2'-O-methyl modified nucleotide with phosphorothioate linkage
  modified_base 101: mod_base = OTHER; note = 2'-O-methyl modified nucleotide
aaccctgatcctcttgtcccacaggttgtagctccctgaaaccgttgctacaataaggccgtcgaaagatgtgccgcaacgctctgccttctggcatcgtt

SEQ ID NO: 811 - RNA, 101 nt, synthetic construct
  source 1..101: mol_type = other RNA
  modified_base 1: mod_base = OTHER; note = 2'-O-methyl modified nucleotide with phosphorothioate linkage
  modified_base 2: mod_base = OTHER; note = 2'-O-methyl modified nucleotide with phosphorothioate linkage
  modified_base 3: mod_base = OTHER; note = 2'-O-methyl modified nucleotide with phosphorothioate linkage
  modified_base 4: mod_base = OTHER; note = 2'-O-methyl modified nucleotide
  modified_base 5: mod_base = OTHER; note = 2'-O-methyl modified nucleotide
  modified_base 8: mod_base = OTHER; note = 2'-O-methyl modified nucleotide
  modified_base 9: mod_base = OTHER; note = 2'-O-methyl modified nucleotide
  modified_base 11: mod_base = OTHER; note = 2'-O-methyl modified nucleotide
  modified_base 13: mod_base = OTHER; note = 2'-O-methyl modified nucleotide
  modified_base 18: mod_base = OTHER; note = 2'-O-methyl modified nucleotide
  modified_base 22: mod_base = OTHER; note = 2'-O-methyl modified nucleotide
  modified_base 25: mod_base = OTHER; note = 2'-O-methyl modified nucleotide
  modified_base 29: mod_base = OTHER; note = 2'-O-methyl modified nucleotide
  modified_base 30: mod_base = OTHER; note = 2'-O-methyl modified nucleotide
  modified_base 31: mod_base = OTHER; note = 2'-O-methyl modified nucleotide
  modified_base 32: mod_base = OTHER; note = 2'-O-methyl modified nucleotide
  modified_base 37: mod_base = OTHER; note = 2'-O-methyl modified nucleotide
  modified_base 38: mod_base = OTHER; note = 2'-O-methyl modified nucleotide
  modified_base 39: mod_base = OTHER; note = 2'-O-methyl modified nucleotide
  modified_base 40: mod_base = OTHER; note = 2'-O-methyl modified nucleotide
  modified_base 41: mod_base = OTHER; note = 2'-O-methyl modified nucleotide
  modified_base 42: mod_base = OTHER; note = 2'-O-methyl modified nucleotide
  modified_base 43: mod_base = OTHER; note = 2'-O-methyl modified nucleotide
  modified_base 47: mod_base = OTHER; note = 2'-O-methyl modified nucleotide
  modified_base 48: mod_base = OTHER; note = 2'-O-methyl modified nucleotide
  modified_base 51: mod_base = OTHER; note = 2'-O-methyl modified nucleotide
  modified_base 54: mod_base = OTHER; note = nucleotide with phosphorothioate linkage
  modified_base 58: mod_base = OTHER; note = 2'-O-methyl modified nucleotide
  modified_base 59: mod_base = OTHER; note = 2'-O-methyl modified nucleotide
  modified_base 61: mod_base = OTHER; note = 2'-O-methyl modified nucleotide
  modified_base 62: mod_base = OTHER; note = 2'-O-methyl modified nucleotide
  modified_base 63: mod_base = OTHER; note = 2'-O-methyl modified nucleotide
  modified_base 64: mod_base = OTHER; note = 2'-O-methyl modified nucleotide
  modified_base 65: mod_base = OTHER; note = 2'-O-methyl modified nucleotide
  modified_base 66: mod_base = OTHER; note = 2'-O-methyl modified nucleotide
  modified_base 67: mod_base = OTHER; note = 2'-O-methyl modified nucleotide
  modified_base 68: mod_base = OTHER; note = 2'-O-methyl modified nucleotide
  modified_base 69: mod_base = OTHER; note = 2'-O-methyl modified nucleotide
  modified_base 70: mod_base = OTHER; note = 2'-O-methyl modified nucleotide
  modified_base 75: mod_base = OTHER; note = 2'-O-methyl modified nucleotide
  modified_base 77: mod_base = OTHER; note = 2'-O-methyl modified nucleotide
  modified_base 80: mod_base = OTHER; note = 2'-O-methyl modified nucleotide
  modified_base 86: mod_base = OTHER; note = 2'-O-methyl modified nucleotide
  modified_base 87: mod_base = OTHER; note = 2'-O-methyl modified nucleotide
  modified_base 89: mod_base = OTHER; note = 2'-O-methyl modified nucleotide
  modified_base 90: mod_base = OTHER; note = 2'-O-methyl modified nucleotide
  modified_base 91: mod_base = OTHER; note = 2'-O-methyl modified nucleotide
  modified_base 92: mod_base = OTHER; note = 2'-O-methyl modified nucleotide
  modified_base 99: mod_base = OTHER; note = nucleotide with phosphorothioate linkage
  modified_base 100: mod_base = OTHER; note = 2'-O-methyl modified nucleotide with phosphorothioate linkage
  modified_base 101: mod_base = OTHER; note = 2'-O-methyl modified nucleotide
gccgtgtaccagctgagagactctgttgtagctccctgaaaccgttgctacaataaggccgtcgaaagatgtgccgcaacgctctgccttctggcatcgtt

SEQ ID NO: 812 - DNA, 4782 bp, synthetic construct
  source 1..4782: mol_type = other DNA
atggaggcctcccccgcctccggcccccggcacctgatggacccccacatcttcacctccaacttcaacaacggcatcggccggcacaagacctacctgtgctacgaggtggagcggctggacaacggcacctccgtgaagatggaccagcaccggggcttcctgcacaaccaggccaagaacctgctgtgcggcttctacggccggcacgccgagctgcggttcctggacctggtgccctccctgcagctggaccccgcccagatctaccgggtgacctggttcatctcctggtccccctgcttctcctggggctgcgccggcgaggtgcgggccttcctgcaggagaacacccacgtgcggctgcggatcttcgccgcccggatctacgactacgaccccctgtacaaggaggccctgcagatgctgcgggacgccggcgcccaggtgtccatcatgacctacgacgagttcaagcactgctgggacaccttcgtggaccaccagggctgccccttccagccctgggacggcctggacgagcactcccaggccctgtccggccggctgcgggccatcctgcagaaccagggcaactccggctccgagacccccggcacctccgagtccgccacccccgagtccgacaagaagtactccatcggcctggccatcggcaccaactccgtgggctgggccgtgatcaccgacgagtacaaggtgccctccaagaagttcaaggtgctgggcaacaccgaccggcactccatcaagaagaacctgatcggcgccctgctgttcgactccggcgagaccgccgaggccacccggctgaagcggaccgcccggcggcggtacacccggcggaagaaccggatctgctacctgcaggagatcttctccaacgagatggccaaggtggacgactccttcttccaccggctggaggagtccttcctggtggaggaggacaagaagcacgagcggcaccccatcttcggcaacatcgtggacgaggtggcctaccacgagaagtaccccaccatctaccacctgcggaagaagctggtggactccaccgacaaggccgacctgcggctgatctacctggccctggcccacatgatcaagttccggggccacttcctgatcgagggcgacctgaaccccgacaactccgacgtggacaagctgttcatccagctggtgcagacctacaaccagctgttcgaggagaaccccatcaacgcctccggcgtggacgccaaggccatcctgtccgcccggctgtccaagtcccggcggctggagaacctgatcgcccagctgcccggcgagaagaagaacggcctgttcggcaacctgatcgccctgtccctgggcctgacccccaacttcaagtccaacttcgacctggccgaggacgccaagctgcagctgtccaaggacacctacgacgacgacctggacaacctgctggcccagatcggcgaccagtacgccgacctgttcctggccgccaagaacctgtccgacgccatcctgctgtccgacatcctgcgggtgaacaccgagatcaccaaggcccccctgtccgcctccatgatcaagcggtacgacgagcaccaccaggacctgaccctgctgaaggccctggtgcggcagcagctgcccgagaagtacaaggagatcttcttcgaccagtccaagaacggctacgccggctacatcgacggcggcgcctcccaggaggagttctacaagttcatcaagcccatcctggagaagatggacggcaccgaggagctgctggtgaagctgaaccgggaggacctgctgcggaagcagcggaccttcgacaacggctccatcccccaccagatccacctgggcgagctgcacgccatcctgcggcggcaggaggacttctaccccttcctgaaggacaaccgggagaagatcgagaagatcctgaccttccggatcccctactacgtgggccccctggcccggggcaactcccggttcgcctggatgacccggaagtccgaggagaccatcaccccctggaacttcgaggaggtggtggacaagggcgcctccgcccagtccttcatcgagcggatgaccaacttcgacaagaacctgcccaacgagaaggtgctgcccaagcactccctgctgtacgagtacttcaccgtgtacaacgagctgaccaaggtgaagtacgtgaccgagggcatgcggaagcccgccttcctgtccggcgagcagaagaaggccatcgtggacctgctgttcaagaccaaccggaaggtgaccgtgaagcagctgaaggaggactacttcaagaagatcgagtgcttcgactccgtggagatctccggcgtggaggaccggttcaacgcctccctgggcacctaccacgacctgctgaagatcatcaaggacaaggacttcctggacaacgaggagaacgaggacatcctggaggacatcgtgctgaccctgaccctgttcgaggaccgggagatgatcgaggagcggctgaagacctacgcccacctgttcgacgacaaggtgatgaagcagctgaagcggcggcggtacaccggctggggccggctgtcccggaagctgatcaacggcatccgggacaagcagtccggcaagaccatcctggacttcctgaagtccgacggcttcgccaaccggaacttcatgcagctgatccacgacgactccctgaccttcaaggaggacatccagaaggcccaggtgtccggccagggcgactccctgcacgagcacatcgccaacctggccggctcccccgccatcaagaagggcatcctgcagaccgtgaaggtggtggacgagctggtgaaggtgatgggccggcacaagcccgagaacatcgtgatcgagatggcccgggagaaccagaccacccagaagggccagaagaactcccgggagcggatgaagcggatcgaggagggcatcaaggagctgggctcccagatcctgaaggagcaccccgtggagaacacccagctgcagaacgagaagctgtacctgtactacctgcagaacggccgggacatgtacgtggaccaggagctggacatcaaccggctgtccgactacgacgtggaccacatcgtgccccagtccttcctgaaggacgactccatcgacaacaaggtgctgacccggtccgacaagaaccggggcaagtccgacaacgtgccctccgaggaggtggtgaagaagatgaagaactactggcggcagctgctgaacgccaagctgatcacccagcggaagttcgacaacctgaccaaggccgagcggggcggcctgtccgagctggacaaggccggcttcatcaagcggcagctggtggagacccggcagatcaccaagcacgtggcccagatcctggactcccggatgaacaccaagtacgacgagaacgacaagctgatccgggaggtgaaggtgatcaccctgaagtccaagctggtgtccgacttccggaaggacttccagttctacaaggtgcgggagatcaacaactaccaccacgcccacgacgcctacctgaacgccgtggtgggcaccgccctgatcaagaagtaccccaagctggagtccgagttcgtgtacggcgactacaaggtgtacgacgtgcggaagatgatcgccaagtccgagcaggagatcggcaaggccaccgccaagtacttcttctactccaacatcatgaacttcttcaagaccgagatcaccctggccaacggcgagatccggaagcggcccctgatcgagaccaacggcgagaccggcgagatcgtgtgggacaagggccgggacttcgccaccgtgcggaaggtgctgtccatgccccaggtgaacatcgtgaagaagaccgaggtgcagaccggcggcttctccaaggagtccatcctgcccaagcggaactccgacaagctgatcgcccggaagaaggactgggaccccaagaagtacggcggcttcgactcccccaccgtggcctactccgtgctggtggtggccaaggtggagaagggcaagtccaagaagctgaagtccgtgaaggagctgctgggcatcaccatcatggagcggtcctccttcgagaagaaccccatcgacttcctggaggccaagggctacaaggaggtgaagaaggacctgatcatcaagctgcccaagtactccctgttcgagctggagaacggccggaagcggatgctggcctccgccggcgagctgcagaagggcaacgagctggccctgccctccaagtacgtgaacttcctgtacctggcctcccactacgagaagctgaagggctcccccgaggacaacgagcagaagcagctgttcgtggagcagcacaagcactacctggacgagatcatcgagcagatctccgagttctccaagcgggtgatcctggccgacgccaacctggacaaggtgctgtccgcctacaacaagcaccgggacaagcccatccgggagcaggccgagaacatcatccacctgttcaccctgaccaacctgggcgcccccgccgccttcaagtacttcgacaccaccatcgaccggaagcggtacacctccaccaaggaggtgctggacgccaccctgatccaccagtccatcaccggcctgtacgagacccggatcgacctgtcccagctgggcggcgacggcggcggctcccccaagaagaagcggaaggtgtga

SEQ ID NO: 813 - DNA, 4140 bp, synthetic construct
  source 1..4140: mol_type = other DNA
atggacaagaagtacagcatcggactggacatcggaacaaacagcgtcggatgggcagtcatcacagacgaatacaaggtcccgagcaagaagttcaaggtcctgggaaacacagacagacacagcatcaagaagaacctgatcggagcactgctgttcgacagcggagaaacagcagaagcaacaagactgaagagaacagcaagaagaagatacacaagaagaaagaacagaatctgctacctgcaggaaatcttcagcaacgaaatggcaaaggtcgacgacagcttcttccacagactggaagaaagcttcctggtcgaagaagacaagaagcacgaaagacacccgatcttcggaaacatcgtcgacgaagtcgcataccacgaaaagtacccgacaatctaccacctgagaaagaagctggtcgacagcacagacaaggcagacctgagactgatctacctggcactggcacacatgatcaagttcagaggacacttcctgatcgaaggagacctgaacccggacaacagcgacgtcgacaagctgttcatccagctggtccagacatacaaccagctgttcgaagaaaacccgatcaacgcaagcggagtcgacgcaaaggcaatcctgagcgcaagactgagcaagagcagaagactggaaaacctgatcgcacagctgccgggagaaaagaagaacggactgttcggaaacctgatcgcactgagcctgggactgacaccgaacttcaagagcaacttcgacctggcagaagacgcaaagctgcagctgagcaaggacacatacgacgacgacctggacaacctgctggcacagatcggagaccagtacgcagacctgttcctggcagcaaagaacctgagcgacgcaatcctgctgagcgacatcctgagagtcaacacagaaatcacaaaggcaccgctgagcgcaagcatgatcaagagatacgacgaacaccaccaggacctgacactgctgaaggcactggtcagacagcagctgccggaaaagtacaaggaaatcttcttcgaccagagcaagaacggatacgcaggatacatcgacggaggagcaagccaggaagaattctacaagttcatcaagccgatcctggaaaagatggacggaacagaagaactgctggtcaagctgaacagagaagacctgctgagaaagcagagaacattcgacaacggaagcatcccgcaccagatccacctgggagaactgcacgcaatcctgagaagacaggaagacttctacccgttcctgaaggacaacagagaaaagatcgaaaagatcctgacattcagaatcccgtactacgtcggaccgctggcaagaggaaacagcagattcgcatggatgacaagaaagagcgaagaaacaatcacaccgtggaacttcgaagaagtcgtcgacaagggagcaagcgcacagagcttcatcgaaagaatgacaaacttcgacaagaacctgccgaacgaaaaggtcctgccgaagcacagcctgctgtacgaatacttcacagtctacaacgaactgacaaaggtcaagtacgtcacagaaggaatgagaaagccggcattcctgagcggagaacagaagaaggcaatcgtcgacctgctgttcaagacaaacagaaaggtcacagtcaagcagctgaaggaagactacttcaagaagatcgaatgcttcgacagcgtcgaaatcagcggagtcgaagacagattcaacgcaagcctgggaacataccacgacctgctgaagatcatcaaggacaaggacttcctggacaacgaagaaaacgaagacatcctggaagacatcgtcctgacactgacactgttcgaagacagagaaatgatcgaagaaagactgaagacatacgcacacctgttcgacgacaaggtcatgaagcagctgaagagaagaagatacacaggatggggaagactgagcagaaagctgatcaacggaatcagagacaagcagagcggaaagacaatcctggacttcctgaagagcgacggattcgcaaacagaaacttcatgcagctgatccacgacgacagcctgacattcaaggaagacatccagaaggcacaggtcagcggacagggagacagcctgcacgaacacatcgcaaacctggcaggaagcccggcaatcaagaagggaatcctgcagacagtcaaggtcgtcgacgaactggtcaaggtcatgggaagacacaagccggaaaacatcgtcatcgaaatggcaagagaaaaccagacaacacagaagggacagaagaacagcagagaaagaatgaagagaatcgaagaaggaatcaaggaactgggaagccagatcctgaaggaacacccggtcgaaaacacacagctgcagaacgaaaagctgtacctgtactacctgcagaacggaagagacatgtacgtcgaccaggaactggacatcaacagactgagcgactacgacgtcgaccacatcgtcccgcagagcttcctgaaggacgacagcatcgacaacaaggtcctgacaagaagcgacaagaacagaggaaagagcgacaacgtcccgagcgaagaagtcgtcaagaagatgaagaactactggagacagctgctgaacgcaaagctgatcacacagagaaagttcgacaacctgacaaaggcagagagaggaggactgagcgaactggacaaggcaggattcatcaagagacagctggtcgaaacaagacagatcacaaagcacgtcgcacagatcctggacagcagaatgaacacaaagtacgacgaaaacgacaagctgatcagagaagtcaaggtcatcacactgaagagcaagctggtcagcgacttcagaaaggacttccagttctacaaggtcagagaaatcaacaactaccaccacgcacacgacgcatacctgaacgcagtcgtcggaacagcactgatcaagaagtacccgaagctggaaagcgaattcgtctacggagactacaaggtctacgacgtcagaaagatgatcgcaaagagcgaacaggaaatcggaaaggcaacagcaaagtacttcttctacagcaacatcatgaacttcttcaagacagaaatcacactggcaaacggagaaatcagaaagagaccgctgatcgaaacaaacggagaaacaggagaaatcgtctgggacaagggaagagacttcgcaacagtcagaaaggtcctgagcatgccgcaggtcaacatcgtcaagaagacagaagtccagacaggaggattcagcaaggaaagcatcctgccgaagagaaacagcgacaagctgatcgcaagaaagaaggactgggacccgaagaagtacggaggattcgacagcccgacagtcgcatacagcgtcctggtcgtcgcaaaggtcgaaaagggaaagagcaagaagctgaagagcgtcaaggaactgctgggaatcacaatcatggaaagaagcagcttcgaaaagaacccgatcgacttcctggaagcaaagggatacaaggaagtcaagaaggacctgatcatcaagctgccgaagtacagcctgttcgaactggaaaacggaagaaagagaatgctggcaagcgcaggagaactgcagaagggaaacgaactggcactgccgagcaagtacgtcaacttcctgtacctggcaagccactacgaaaagctgaagggaagcccggaagacaacgaacagaagcagctgttcgtcgaacagcacaagcactacctggacgaaatcatcgaacagatcagcgaattcagcaagagagtcatcctggcagacgcaaacctggacaaggtcctgagcgcatacaacaagcacagagacaagccgatcagagaacaggcagaaaacatcatccacctgttcacactgacaaacctgggagcaccggcagcattcaagtacttcgacacaacaatcgacagaaagagatacacaagcacaaaggaagtcctggacgcaacactgatccaccagagcatcacaggactgtacgaaacaagaatcgacctgagccagctgggaggagacggaggaggaagcccgaagaagaagagaaaggtctag

SEQ ID NO: 814 - DNA, 4140 bp, synthetic construct
  source 1..4140: mol_type = other DNA
atggacaagaagtactccatcggcctggacatcggcaccaactccgtgggctgggccgtgatcaccgacgagtacaaggtgccctccaagaagttcaaggtgctgggcaacaccgaccggcactccatcaagaagaacctgatcggcgccctgctgttcgactccggcgagaccgccgaggccacccggctgaagcggaccgcccggcggcggtacacccggcggaagaaccggatctgctacctgcaggagatcttctccaacgagatggccaaggtggacgactccttcttccaccggctggaggagtccttcctggtggaggaggacaagaagcacgagcggcaccccatcttcggcaacatcgtggacgaggtggcctaccacgagaagtaccccaccatctaccacctgcggaagaagctggtggactccaccgacaaggccgacctgcggctgatctacctggccctggcccacatgatcaagttccggggccacttcctgatcgagggcgacctgaaccccgacaactccgacgtggacaagctgttcatccagctggtgcagacctacaaccagctgttcgaggagaaccccatcaacgcctccggcgtggacgccaaggccatcctgtccgcccggctgtccaagtcccggcggctggagaacctgatcgcccagctgcccggcgagaagaagaacggcctgttcggcaacctgatcgccctgtccctgggcctgacccccaacttcaagtccaacttcgacctggccgaggacgccaagctgcagctgtccaaggacacctacgacgacgacctggacaacctgctggcccagatcggcgaccagtacgccgacctgttcctggccgccaagaacctgtccgacgccatcctgctgtccgacatcctgcgggtgaacaccgagatcaccaaggcccccctgtccgcctccatgatcaagcggtacgacgagcaccaccaggacctgaccctgctgaaggccctggtgcggcagcagctgcccgagaagtacaaggagatcttcttcgaccagtccaagaacggctacgccggctacatcgacggcggcgcctcccaggaggagttctacaagttcatcaagcccatcctggagaagatggacggcaccgaggagctgctggtgaagctgaaccgggaggacctgctgcggaagcagcggaccttcgacaacggctccatcccccaccagatccacctgggcgagctgcacgccatcctgcggcggcaggaggacttctaccccttcctgaaggacaaccgggagaagatcgagaagatcctgaccttccggatcccctactacgtgggccccctggcccggggcaactcccggttcgcctggatgacccggaagtccgaggagaccatcaccccctggaacttcgaggaggtggtggacaagggcgcctccgcccagtccttcatcgagcggatgaccaacttcgacaagaacctgcccaacgagaaggtgctgcccaagcactccctgctgtacgagtacttcaccgtgtacaacgagctgaccaaggtgaagtacgtgaccgagggcatgcggaagcccgccttcctgtccggcgagcagaagaaggccatcgtggacctgctgttcaagaccaaccggaaggtgaccgtgaagcagctgaaggaggactacttcaagaagatcgagtgcttcgactccgtggagatctccggcgtggaggaccggttcaacgcctccctgggcacctaccacgacctgctgaagatcatcaaggacaaggacttcctggacaacgaggagaacgaggacatcctggaggacatcgtgctgaccctgaccctgttcgaggaccgggagatgatcgaggagcggctgaagacctacgcccacctgttcgacgacaaggtgatgaagcagctgaagcggcggcggtacaccggctggggccggctgtcccggaagctgatcaacggcatccgggacaagcagtccggcaagaccatcctggacttcctgaagtccgacggcttcgccaaccggaacttcatgcagctgatccacgacgactccctgaccttcaaggaggacatccagaaggcccaggtgtccggccagggcgactccctgcacgagcacatcgccaacctggccggctcccccgccatcaagaagggcatcctgcagaccgtgaaggtggtggacgagctggtgaaggtgatgggccggcacaagcccgagaacatcgtgatcgagatggcccgggagaaccagaccacccagaagggccagaagaactcccgggagcggatgaagcggatcgaggagggcatcaaggagctgggctcccagatcctgaaggagcaccccgtggagaacacccagctgcagaacgagaagctgtacctgtactacctgcagaacggccgggacatgtacgtggaccaggagctggacatcaaccggctgtccgactacgacgtggaccacatcgtgccccagtccttcctgaaggacgactccatcgacaacaaggtgctgacccggtccgacaagaaccggggcaagtccgacaacgtgccctccgaggaggtggtgaagaagatgaagaactactggcggcagctgctgaacgccaagctgatcacccagcggaagttcgacaacctgaccaaggccgagcggggcggcctgtccgagctggacaaggccggcttcatcaagcggcagctggtggagacccggcagatcaccaagcacgtggcccagatcctggactcccggatgaacaccaagtacgacgagaacgacaagctgatccgggaggtgaaggtgatcaccctgaagtccaagctggtgtccgacttccggaaggacttccagttctacaaggtgcgggagatcaacaactaccaccacgcccacgacgcctacctgaacgccgtggtgggcaccgccctgatcaagaagtaccccaagctggagtccgagttcgtgtacggcgactacaaggtgtacgacgtgcggaagatgatcgccaagtccgagcaggagatcggcaaggccaccgccaagtacttcttctactccaacatcatgaacttcttcaagaccgagatcaccctggccaacggcgagatccggaagcggcccctgatcgagaccaacggcgagaccggcgagatcgtgtgggacaagggccgggacttcgccaccgtgcggaaggtgctgtccatgccccaggtgaacatcgtgaagaagaccgaggtgcagaccggcggcttctccaaggagtccatcctgcccaagcggaactccgacaagctgatcgcccggaagaaggactgggaccccaagaagtacggcggcttcgactcccccaccgtggcctactccgtgctggtggtggccaaggtggagaagggcaagtccaagaagctgaagtccgtgaaggagctgctgggcatcaccatcatggagcggtcctccttcgagaagaaccccatcgacttcctggaggccaagggctacaaggaggtgaagaaggacctgatcatcaagctgcccaagtactccctgttcgagctggagaacggccggaagcggatgctggcctccgccggcgagctgcagaagggcaacgagctggccctgccctccaagtacgtgaacttcctgtacctggcctcccactacgagaagctgaagggctcccccgaggacaacgagcagaagcagctgttcgtggagcagcacaagcactacctggacgagatcatcgagcagatctccgagttctccaagcgggtgatcctggccgacgccaacctggacaaggtgctgtccgcctacaacaagcaccgggacaagcccatccgggagcaggccgagaacatcatccacctgttcaccctgaccaacctgggcgcccccgccgccttcaagtacttcgacaccaccatcgaccggaagcggtacacctccaccaaggaggtgctggacgccaccctgatccaccagtccatcaccggcctgtacgagacccggatcgacctgtcccagctgggcggcgacggcggcggctcccccaagaagaagcggaaggtgtga

SEQ ID NO: 815 - RNA, 4140 nt, synthetic construct
  source 1..4140: mol_type = other RNA
atggacaagaagtacagcatcggcctggacatcggcacgaacagcgttggctgggctgtgatcacggacgagtacaaggttccctcaaagaagttcaaggtgctgggcaacacggaccggcacagcatcaagaagaatctcatcggtgcactgctgttcgacagcggtgagacggccgaagccacgcggctgaagcggacggcccgccggcggtacacgcggcggaagaaccggatctgctacctgcaggagatcttcagcaacgagatggccaaggtggacgacagcttcttccaccggctggaggagagcttcctggtggaggaggacaagaagcacgagcggcaccccatcttcggcaacatcgtggacgaagtcgcctaccacgagaagtaccccaccatctaccacctgcggaagaagctggtggactcgactgacaaggccgacctgcggctgatctacctggcactggcccacatgataaagttccggggccacttcctgatcgagggcgacctgaaccctgacaacagcgacgtggacaagctgttcatccagctggtgcagacctacaaccagctgttcgaggagaaccccatcaacgccagcggcgtggacgccaaggccatcctcagcgcccgcctcagcaagagccggcggctggagaatctcatcgcccagcttccaggtgagaagaagaatgggctgttcggcaatctcatcgcactcagcctgggcctgactcccaacttcaagagcaacttcgacctggccgaggacgccaagctgcagctcagcaaggacacctacgacgacgacctggacaatctcctggcccagatcggcgaccagtacgccgacctgttcctggctgccaagaatctcagcgacgccatcctgctcagcgacatcctgcgggtgaacacagagatcacgaaggcccccctcagcgccagcatgataaagcggtacgacgagcaccaccaggacctgacgctgctgaaggcactggtgcggcagcagcttccagagaagtacaaggagatcttcttcgaccagagcaagaatgggtacgccgggtacatcgacggtggtgccagccaggaggagttctacaagttcatcaagcccatcctggagaagatggacggcacagaggagctgctggtgaagctgaacagggaggacctgctgcggaagcagcggacgttcgacaatgggagcatcccccaccagatccacctgggtgagctgcacgccatcctgcggcggcaggaggacttctaccccttcctgaaggacaacagggagaagatcgagaagatcctgacgttccggatcccctactacgttggccccctggcccgcggcaacagccggttcgcctggatgacgcggaagagcgaggagacgatcactccctggaacttcgaggaagtcgtggacaagggtgccagcgcccagagcttcatcgagcggatgacgaacttcgacaagaatcttccaaacgagaaggtgcttccaaagcacagcctgctgtacgagtacttcacggtgtacaacgagctgacgaaggtgaagtacgtgacagagggcatgcggaagcccgccttcctcagcggtgagcagaagaaggccatcgtggacctgctgttcaagacgaaccggaaggtgacggtgaagcagctgaaggaggactacttcaagaagatcgagtgcttcgacagcgtggagatcagcggcgtggaggaccggttcaacgccagcctgggcacctaccacgacctgctgaagatcatcaaggacaaggacttcctggacaacgaggagaacgaggacatcctggaggacatcgtgctgacgctgacgctgttcgaggacagggagatgatagaggagcggctgaagacctacgcccacctgttcgacgacaaggtgatgaagcagctgaagcggcggcggtacacgggctggggccggctcagccggaagctgatcaatgggatccgagacaagcagagcggcaagacgatcctggacttcctgaagagcgacggcttcgccaaccggaacttcatgcagctgatccacgacgacagcctgacgttcaaggaggacatccagaaggcccaggtcagcggccagggcgacagcctgcacgagcacatcgccaatctcgccgggagccccgccatcaagaaggggatcctgcagacggtgaaggtggtggacgagctggtgaaggtgatgggccggcacaagccagagaacatcgtgatcgagatggccagggagaaccagacgactcaaaaggggcagaagaacagcagggagcggatgaagcggatcgaggagggcatcaaggagctgggcagccagatcctgaaggagcaccccgtggagaacactcaactgcagaacgagaagctgtacctgtactacctgcagaatgggcgagacatgtacgtggaccaggagctggacatcaaccggctcagcgactacgacgtggaccacatcgttccccagagcttcctgaaggacgacagcatcgacaacaaggtgctgacgcggagcgacaagaaccggggcaagagcgacaacgttccctcagaggaagtcgtgaagaagatgaagaactactggcggcagctgctgaacgccaagctgatcactcaacggaagttcgacaatctcacgaaggccgagcggggtggcctcagcgagctggacaaggccgggttcatcaagcggcagctggtggagacgcggcagatcacgaagcacgtggcccagatcctggacagccggatgaacacgaagtacgacgagaacgacaagctgatcagggaagtcaaggtgatcacgctgaagagcaagctggtcagcgacttccggaaggacttccagttctacaaggtgagggagatcaacaactaccaccacgcccacgacgcctacctgaacgctgtggttggcacggcactgatcaagaagtaccccaagctggagagcgagttcgtgtacggcgactacaaggtgtacgacgtgcggaagatgatagccaagagcgagcaggagatcggcaaggccacggccaagtacttcttctacagcaacatcatgaacttcttcaagacagagatcacgctggccaatggtgagatccggaagcggcccctgatcgagacgaatggtgagacgggtgagatcgtgtgggacaaggggcgagacttcgccacggtgcggaaggtgctcagcatgccccaggtgaacatcgtgaagaagacagaagtccagacgggtggcttcagcaaggagagcatccttccaaagcggaacagcgacaagctgatcgcccgcaagaaggactgggaccccaagaagtacggtggcttcgacagccccaccgtggcctacagcgtgctggtggtggccaaggtggagaaggggaagagcaagaagctgaagagcgtgaaggagctgctgggcatcacgatcatggagcggagcagcttcgagaagaaccccatcgacttcctggaagccaaggggtacaaggaagtcaagaaggacctgatcatcaagcttccaaagtacagcctgttcgagctggagaatgggcggaagcggatgctggccagcgccggtgagctgcagaaggggaacgagctggcacttccctcaaagtacgtgaacttcctgtacctggccagccactacgagaagctgaaggggagcccagaggacaacgagcagaagcagctgttcgtggagcagcacaagcactacctggacgagatcatcgagcagatcagcgagttcagcaagcgggtgatcctggccgacgccaatctcgacaaggtgctcagcgcctacaacaagcaccgagacaagcccatcagggagcaggccgagaacatcatccacctgttcacgctgacgaatctcggtgcccccgctgccttcaagtacttcgacacgacgatcgaccggaagcggtacacgtcgactaaggaagtcctggacgccacgctgatccaccagagcatcacgggcctgtacgagacgcggatcgacctcagccagctgggtggcgacggtggtggcagccccaagaagaagcggaaggtgtag

SEQ ID NO: 816 - RNA, 4140 nt, synthetic construct
  source 1..4140: mol_type = other RNA
atggacaagaagtacagcatcggcctcgacatcggcaccaacagcgtcggctgggccgtcatcaccgacgagtacaaggtccccagcaagaagttcaaggtcctcggcaacaccgaccgccacagcatcaagaagaacctcatcggcgccctcctcttcgacagcggcgagaccgccgaggccacccgcctcaagcgcaccgcccgccgccgctacacccgccgcaagaaccgcatctgctacctccaggagatcttcagcaacgagatggccaaggtcgacgacagcttcttccaccgcctcgaggagagcttcctcgtcgaggaggacaagaagcacgagcgccaccccatcttcggcaacatcgtcgacgaggtcgcctaccacgagaagtaccccaccatctaccacctccgcaagaagctcgtcgacagcaccgacaaggccgacctccgcctcatctacctcgccctcgcccacatgatcaagttccgcggccacttcctcatcgagggcgacctcaaccccgacaacagcgacgtcgacaagctcttcatccagctcgtccagacctacaaccagctcttcgaggagaaccccatcaacgccagcggcgtcgacgccaaggccatcctcagcgcccgcctcagcaagagccgccgcctcgagaacctcatcgcccagctccccggcgagaagaagaacggcctcttcggcaacctcatcgccctcagcctcggcctcacccccaacttcaagagcaacttcgacctcgccgaggacgccaagctccagctcagcaaggacacctacgacgacgacctcgacaacctcctcgcccagatcggcgaccagtacgccgacctcttcctcgccgccaagaacctcagcgacgccatcctcctcagcgacatcctccgcgtcaacaccgagatcaccaaggcccccctcagcgccagcatgatcaagcgctacgacgagcaccaccaggacctcaccctcctcaaggccctcgtccgccagcagctccccgagaagtacaaggagatcttcttcgaccagagcaagaacggctacgccggctacatcgacggcggcgccagccaggaggagttctacaagttcatcaagcccatcctcgagaagatggacggcaccgaggagctcctcgtcaagctcaaccgcgaggacctcctccgcaagcagcgcaccttcgacaacggcagcatcccccaccagatccacctcggcgagctccacgccatcctccgccgccaggaggacttctaccccttcctcaaggacaaccgcgagaagatcgagaagatcctcaccttccgcatcccctactacgtcggccccctcgcccgcggcaacagccgcttcgcctggatgacccgcaagagcgaggagaccatcaccccctggaacttcgaggaggtcgtcgacaagggcgccagcgcccagagcttcatcgagcgcatgaccaacttcgacaagaacctccccaacgagaaggtcctccccaagcacagcctcctctacgagtacttcaccgtctacaacgagctcaccaaggtcaagtacgtcaccgagggcatgcgcaagcccgccttcctcagcggcgagcagaagaaggccatcgtcgacctcctcttcaagaccaaccgcaaggtcaccgtcaagcagctcaaggaggactacttcaagaagatcgagtgcttcgacagcgtcgagatcagcggcgtcgaggaccgcttcaacgccagcctcggcacctaccacgacctcctcaagatcatcaaggacaaggacttcctcgacaacgaggagaacgaggacatcctcgaggacatcgtcctcaccctcaccctcttcgaggaccgcgagatgatcgaggagcgcctcaagacctacgcccacctcttcgacgacaaggtcatgaagcagctcaagcgccgccgctacaccggctggggccgcctcagccgcaagctcatcaacggcatccgcgacaagcagagcggcaagaccatcctcgacttcctcaagagcgacggcttcgccaaccgcaacttcatgcagctcatccacgacgacagcctcaccttcaaggaggacatccagaaggcccaggtcagcggccagggcgacagcctccacgagcacatcgccaacctcgccggcagccccgccatcaagaagggcatcctccagaccgtcaaggtcgtcgacgagctcgtcaaggtcatgggccgccacaagcccgagaacatcgtcatcgagatggcccgcgagaaccagaccacccagaagggccagaagaacagccgcgagcgcatgaagcgcatcgaggagggcatcaaggagctcggcagccagatcctcaaggagcaccccgtcgagaacacccagctccagaacgagaagctctacctctactacctccagaacggccgcgacatgtacgtcgaccaggagctcgacatcaaccgcctcagcgactacgacgtcgaccacatcgtcccccagagcttcctcaaggacgacagcatcgacaacaaggtcctcacccgcagcgacaagaaccgcggcaagagcgacaacgtccccagcgaggaggtcgtcaagaagatgaagaactactggcgccagctcctcaacgccaagctcatcacccagcgcaagttcgacaacctcaccaaggccgagcgcggcggcctcagcgagctcgacaaggccggcttcatcaagcgccagctcgtcgagacccgccagatcaccaagcacgtcgcccagatcctcgacagccgcatgaacaccaagtacgacgagaacgacaagctcatccgcgaggtcaaggtcatcaccctcaagagcaagctcgtcagcgacttccgcaaggacttccagttctacaaggtccgcgagatcaacaactaccaccacgcccacgacgcctacctcaacgccgtcgtcggcaccgccctcatcaagaagtaccccaagctcgagagcgagttcgtctacggcgactacaaggtctacgacgtccgcaagatgatcgccaagagcgagcaggagatcggcaaggccaccgccaagtacttcttctacagcaacatcatgaacttcttcaagaccgagatcaccctcgccaacggcgagatccgcaagcgccccctcatcgagaccaacggcgagaccggcgagatcgtctgggacaagggccgcgacttcgccaccgtccgcaaggtcctcagcatgccccaggtcaacatcgtcaagaagaccgaggtccagaccggcggcttcagcaaggagagcatcctccccaagcgcaacagcgacaagctcatcgcccgcaagaaggactgggaccccaagaagtacggcggcttcgacagccccaccgtcgcctacagcgtcctcgtcgtcgccaaggtcgagaagggcaagagcaagaagctcaagagcgtcaaggagctcctcggcatcaccatcatggagcgcagcagcttcgagaagaaccccatcgacttcctcgaggccaagggctacaaggaggtcaagaaggacctcatcatcaagctccccaagtacagcctcttcgagctcgagaacggccgcaagcgcatgctcgccagcgccggcgagctccagaagggcaacgagctcgccctccccagcaagtacgtcaacttcctctacctcgccagccactacgagaagctcaagggcagccccgaggacaacgagcagaagcagctcttcgtcgagcagcacaagcactacctcgacgagatcatcgagcagatcagcgagttcagcaagcgcgtcatcctcgccgacgccaacctcgacaaggtcctcagcgcctacaacaagcaccgcgacaagcccatccgcgagcaggccgagaacatcatccacctcttcaccctcaccaacctcggcgcccccgccgccttcaagtacttcgacaccaccatcgaccgcaagcgctacaccagcaccaaggaggtcctcgacgccaccctcatccaccagagcatcaccggcctctacgagacccgcatcgacctcagccagctcggcggcgacggcggcggcagccccaagaagaagcgcaaggtctag

SEQ ID NO: 817 - DNA, 4140 bp, synthetic construct
  source 1..4140: mol_type = other DNA
atggacaagaagtacagcatcggcctggacatcggcaccaacagcgtgggctgggccgtgatcaccgacgagtacaaggtgcccagcaagaagttcaaggtgctgggcaacaccgaccggcacagcatcaagaagaacctgatcggcgccctgctgttcgacagcggcgagaccgccgaggccacccggctgaagcggaccgcccggcggcggtacacccggcggaagaaccggatctgctacctgcaggagatcttcagcaacgagatggccaaggtggacgacagcttcttccaccggctggaggagagcttcctggtggaggaggacaagaagcacgagcggcaccccatcttcggcaacatcgtggacgaggtggcctaccacgagaagtaccccaccatctaccacctgcggaagaagctggtggacagcaccgacaaggccgacctgcggctgatctacctggccctggcccacatgatcaagttccggggccacttcctgatcgagggcgacctgaaccccgacaacagcgacgtggacaagctgttcatccagctggtgcagacctacaaccagctgttcgaggagaaccccatcaacgccagcggcgtggacgccaaggccatcctgagcgcccggctgagcaagagccggcggctggagaacctgatcgcccagctgcccggcgagaagaagaacggcctgttcggcaacctgatcgccctgagcctgggcctgacccccaacttcaagagcaacttcgacctggccgaggacgccaagctgcagctgagcaaggacacctacgacgacgacctggacaacctgctggcccagatcggcgaccagtacgccgacctgttcctggccgccaagaacctgagcgacgccatcctgctgagcgacatcctgcgggtgaacaccgagatcaccaaggcccccctgagcgccagcatgatcaagcggtacgacgagcaccaccaggacctgaccctgctgaaggccctggtgcggcagcagctgcccgagaagtacaaggagatcttcttcgaccagagcaagaacggctacgccggctacatcgacggcggcgccagccaggaggagttctacaagttcatcaagcccatcctggagaagatggacggcaccgaggagctgctggtgaagctgaaccgggaggacctgctgcggaagcagcggaccttcgacaacggcagcatcccccaccagatccacctgggcgagctgcacgccatcctgcggcggcaggaggacttctaccccttcctgaaggacaaccgggagaagatcgagaagatcctgaccttccggatcccctactacgtgggccccctggcccggggcaacagccggttcgcctggatgacccggaagagcgaggagaccatcaccccctggaacttcgaggaggtggtggacaagggcgccagcgcccagagcttcatcgagcggatgaccaacttcgacaagaacctgcccaacgagaaggtgctgcccaagcacagcctgctgtacgagtacttcaccgtgtacaacgagctgaccaaggtgaagtacgtgaccgagggcatgcggaagcccgccttcctgagcggcgagcagaagaaggccatcgtggacctgctgttcaagaccaaccggaaggtgaccgtgaagcagctgaaggaggactacttcaagaagatcgagtgcttcgacagcgtggagatcagcggcgtggaggaccggttcaacgccagcctgggcacctaccacgacctgctgaagatcatcaaggacaaggacttcctggacaacgaggagaacgaggacatcctggaggacatcgtgctgaccctgaccctgttcgaggaccgggagatgatcgaggagcggctgaagacctacgcccacctgttcgacgacaaggtgatgaagcagctgaagcggcggcggtacaccggctggggccggctgagccggaagctgatcaacggcatccgggacaagcagagcggcaagaccatcctggacttcctgaagagcgacggcttcgccaaccggaacttcatgcagctgatccacgacgacagcctgaccttcaaggaggacatccagaaggcccaggtgagcggccagggcgacagcctgcacgagcacatcgccaacctggccggcagccccgccatcaagaagggcatcctgcagaccgtgaaggtggtggacgagctggtgaaggtgatgggccggcacaagcccgagaacatcgtgatcgagatggcccgggagaaccagaccacccagaagggccagaagaacagccgggagcggatgaagcggatcgaggagggcatcaaggagctgggcagccagatcctgaaggagcaccccgtggagaacacccagctgcagaacgagaagctgtacctgtactacctgcagaacggccgggacatgtacgtggaccaggagctggacatcaaccggctgagcgactacgacgtggaccacatcgtgccccagagcttcctgaaggacgacagcatcgacaacaaggtgctgacccggagcgacaagaaccggggcaagagcgacaacgtgcccagcgaggaggtggtgaagaagatgaagaactactggcggcagctgctgaacgccaagctgatcacccagcggaagttcgacaacctgaccaaggccgagcggggcggcctgagcgagctggacaaggccggcttcatcaagcggcagctggtggagacccggcagatcaccaagcacgtggcccagatcctggacagccggatgaacaccaagtacgacgagaacgacaagctgatccgggaggtgaaggtgatcaccctgaagagcaagctggtgagcgacttccggaaggacttccagttctacaaggtgcgggagatcaacaactaccaccacgcccacgacgcctacctgaacgccgtggtgggcaccgccctgatcaagaagtaccccaagctggagagcgagttcgtgtacggcgactacaaggtgtacgacgtgcggaagatgatcgccaagagcgagcaggagatcggcaaggccaccgccaagtacttcttctacagcaacatcatgaacttcttcaagaccgagatcaccctggccaacggcgagatccggaagcggcccctgatcgagaccaacggcgagaccggcgagatcgtgtgggacaagggccgggacttcgccaccgtgcggaaggtgctgagcatgccccaggtgaacatcgtgaagaagaccgaggtgcagaccggcggcttcagcaaggagagcatcctgcccaagcggaacagcgacaagctgatcgcccggaagaaggactgggaccccaagaagtacggcggcttcgacagccccaccgtggcctacagcgtgctggtggtggccaaggtggagaagggcaagagcaagaagctgaagagcgtgaaggagctgctgggcatcaccatcatggagcggagcagcttcgagaagaaccccatcgacttcctggaggccaagggctacaaggaggtgaagaaggacctgatcatcaagctgcccaagtacagcctgttcgagctggagaacggccggaagcggatgctggccagcgccggcgagctgcagaagggcaacgagctggccctgcccagcaagtacgtgaacttcctgtacctggccagccactacgagaagctgaagggcagccccgaggacaacgagcagaagcagctgttcgtggagcagcacaagcactacctggacgagatcatcgagcagatcagcgagttcagcaagcgggtgatcctggccgacgccaacctggacaaggtgctgagcgcctacaacaagcaccgggacaagcccatccgggagcaggccgagaacatcatccacctgttcaccctgaccaacctgggcgcccccgccgccttcaagtacttcgacaccaccatcgaccggaagcggtacaccagcaccaaggaggtgctggacgccaccctgatccaccagagcatcaccggcctgtacgagacccggatcgacctgagccagctgggcggcgacggcggcggcagccccaagaagaagcggaaggtgtga

SEQ ID NO: 818 - protein, 1379 aa, synthetic construct
MDKKYSIGLDIGTNSVGWAVITDEYKVPSKKFKVLGNTDRHSIKKNLIGALLFDSGETAEATRLKRTARRRYTRRKNRICYLQEIFSNEMAKVDDSFFHRLEESFLVEEDKKHERHPIFGNIVDEVAYHEKYPTIYHLRKKLVDSTDKADLRLIYLALAHMIKFRGHFLIEGDLNPDNSDVDKLFIQLVQTYNQLFEENPINASGVDAKAILSARLSKSRRLENLIAQLPGEKKNGLFGNLIALSLGLTPNFKSNFDLAEDAKLQLSKDTYDDDLDNLLAQIGDQYADLFLAAKNLSDAILLSDILRVNTEITKAPLSASMIKRYDEHHQDLTLLKALVRQQLPEKYKEIFFDQSKNGYAGYIDGGASQEEFYKFIKPILEKMDGTEELLVKLNREDLLRKQRTFDNGSIPHQIHLGELHAILRRQEDFYPFLKDNREKIEKILTFRIPYYVGPLARGNSRFAWMTRKSEETITPWNFEEVVDKGASAQSFIERMTNFDKNLPNEKVLPKHSLLYEYFTVYNELTKVKYVTEGMRKPAFLSGEQKKAIVDLLFKTNRKVTVKQLKEDYFKKIECFDSVEISGVEDRFNASLGTYHDLLKIIKDKDFLDNEENEDILEDIVLTLTLFEDREMIEERLKTYAHLFDDKVMKQLKRRRYTGWGRLSRKLINGIRDKQSGKTILDFLKSDGFANRNFMQLIHDDSLTFKEDIQKAQVSGQGDSLHEHIANLAGSPAIKKGILQTVKVVDELVKVMGRHKPENIVIEMARENQTTQKGQKNSRERMKRIEEGIKELGSQILKEHPVENTQLQNEKLYLYYLQNGRDMYVDQELDINRLSDYDVDHIVPQSFLKDDSIDNKVLTRSDKNRGKSDNVPSEEVVKKMKNYWRQLLNAKLITQRKFDNLTKAERGGLSELDKAGFIKRQLVETRQITKHVAQILDSRMNTKYDENDKLIREVKVITLKSKLVSDFRKDFQFYKVREINNYHHAHDAYLNAVVGTALIKKYPKLESEFVYGDYKVYDVRKMIAKSEQEIGKATAKYFFYSNIMNFFKTEITLANGEIRKRPLIETNGETGEIVWDKGRDFATVRKVLSMPQVNIVKKTEVQTGGFSKESILPKRNSDKLIARKKDWDPKKYGGFDSPTVAYSVLVVAKVEKGKSKKLKSVKELLGITIMERSSFEKNPIDFLEAKGYKEVKKDLIIKLPKYSLFELENGRKRMLASAGELQKGNELALPSKYVNFLYLASHYEKLKGSPEDNEQKQLFVEQHKHYLDEIIEQISEFSKRVILADANLDKVLSAYNKHRDKPIREQAENIIHLFTLTNLGAPAAFKYFDTTIDRKRYTSTKEVLDATLIHQSITGLYETRIDLSQLGGDGGGSPKKKRKV

SEQ ID NO: 819 - RNA, 4197 nt, synthetic construct
  source 1..4197: mol_type = other RNA
atggacaagaagtactccatcggcctggacatcggcaccaactccgtgggctgggccgtgatcaccgacgagtacaaggtgccctccaagaagttcaaggtgctgggcaacaccgaccggcactccatcaagaagaacctgatcggcgccctgctgttcgactccggcgagaccgccgaggccacccggctgaagcggaccgcccggcggcggtacacccggcggaagaaccggatctgctacctgcaggagatcttctccaacgagatggccaaggtggacgactccttcttccaccggctggaggagtccttcctggtggaggaggacaagaagcacgagcggcaccccatcttcggcaacatcgtggacgaggtggcctaccacgagaagtaccccaccatctaccacctgcggaagaagctggtggactccaccgacaaggccgacctgcggctgatctacctggccctggcccacatgatcaagttccggggccacttcctgatcgagggcgacctgaaccccgacaactccgacgtggacaagctgttcatccagctggtgcagacctacaaccagctgttcgaggagaaccccatcaacgcctccggcgtggacgccaaggccatcctgtccgcccggctgtccaagtcccggcggctggagaacctgatcgcccagctgcccggcgagaagaagaacggcctgttcggcaacctgatcgccctgtccctgggcctgacccccaacttcaagtccaacttcgacctggccgaggacgccaagctgcagctgtccaaggacacctacgacgacgacctggacaacctgctggcccagatcggcgaccagtacgccgacctgttcctggccgccaagaacctgtccgacgccatcctgctgtccgacatcctgcgggtgaacaccgagatcaccaaggcccccctgtccgcctccatgatcaagcggtacgacgagcaccaccaggacctgaccctgctgaaggccctggtgcggcagcagctgcccgagaagtacaaggagatcttcttcgaccagtccaagaacggctacgccggctacatcgacggcggcgcctcccaggaggagttctacaagttcatcaagcccatcctggagaagatggacggcaccgaggagctgctggtgaagctgaaccgggaggacctgctgcggaagcagcggaccttcgacaacggctccatcccccaccagatccacctgggcgagctgcacgccatcctgcggcggcaggaggacttctaccccttcctgaaggacaaccgggagaagatcgagaagatcctgaccttccggatcccctactacgtgggccccctggcccggggcaactcccggttcgcctggatgacccggaagtccgaggagaccatcaccccctggaacttcgaggaggtggtggacaagggcgcctccgcccagtccttcatcgagcggatgaccaacttcgacaagaacctgcccaacgagaaggtgctgcccaagcactccctgctgtacgagtacttcaccgtgtacaacgagctgaccaaggtgaagtacgtgaccgagggcatgcggaagcccgccttcctgtccggcgagcagaagaaggccatcgtggacctgctgttcaagaccaaccggaaggtgaccgtgaagcagctgaaggaggactacttcaagaagatcgagtgcttcgactccgtggagatctccggcgtggaggaccggttcaacgcctccctgggcacctaccacgacctgctgaagatcatcaaggacaaggacttcctggacaacgaggagaacgaggacatcctggaggacatcgtgctgaccctgaccctgttcgaggaccgggagatgatcgaggagcggctgaagacctacgcccacctgttcgacgacaaggtgatgaagcagctgaagcggcggcggtacaccggctggggccggctgtcccggaagctgatcaacggcatccgggacaagcagtccggcaagaccatcctggacttcctgaagtccgacggcttcgccaaccggaacttcatgcagctgatccacgacgactccctgaccttcaaggaggacatccagaaggcccaggtgtccggccagggcgactccctgcacgagcacatcgccaacctggccggctcccccgccatcaagaagggcatcctgcagaccgtgaaggtggtggacgagctggtgaaggtgatgggccggcacaagcccgagaacatcgtgatcgagatggcccgggagaaccagaccacccagaagggccagaagaactcccgggagcggatgaagcggatcgaggagggcatcaaggagctgggctcccagatcctgaaggagcaccccgtggagaacacccagctgcagaacgagaagctgtacctgtactacctgcagaacggccgggacatgtacgtggaccaggagctggacatcaaccggctgtccgactacgacgtggaccacatcgtgccccagtccttcctgaaggacgactccatcgacaacaaggtgctgacccggtccgacaagaaccggggcaagtccgacaacgtgccctccgaggaggtggtgaagaagatgaagaactactggcggcagctgctgaacgccaagctgatcacccagcggaagttcgacaacctgaccaaggccgagcggggcggcctgtccgagctggacaaggccggcttcatcaagcggcagctggtggagacccggcagatcaccaagcacgtggcccagatcctggactcccggatgaacaccaagtacgacgagaacgacaagctgatccgggaggtgaaggtgatcaccctgaagtccaagctggtgtccgacttccggaaggacttccagttctacaaggtgcgggagatcaacaactaccaccacgcccacgacgcctacctgaacgccgtggtgggcaccgccctgatcaagaagtaccccaagctggagtccgagttcgtgtacggcgactacaaggtgtacgacgtgcggaagatgatcgccaagtccgagcaggagatcggcaaggccaccgccaagtacttcttctactccaacatcatgaacttcttcaagaccgagatcaccctggccaacggcgagatccggaagcggcccctgatcgagaccaacggcgagaccggcgagatcgtgtgggacaagggccgggacttcgccaccgtgcggaaggtgctgtccatgccccaggtgaacatcgtgaagaagaccgaggtgcagaccggcggcttctccaaggagtccatcctgcccaagcggaactccgacaagctgatcgcccggaagaaggactgggaccccaagaagtacggcggcttcgactcccccaccgtggcctactccgtgctggtggtggccaaggtggagaagggcaagtccaagaagctgaagtccgtgaaggagctgctgggcatcaccatcatggagcggtcctccttcgagaagaaccccatcgacttcctggaggccaagggctacaaggaggtgaagaaggacctgatcatcaagctgcccaagtactccctgttcgagctggagaacggccggaagcggatgctggcctccgccggcgagctgcagaagggcaacgagctggccctgccctccaagtacgtgaacttcctgtacctggcctcccactacgagaagctgaagggctcccccgaggacaacgagcagaagcagctgttcgtggagcagcacaagcactacctggacgagatcatcgagcagatctccgagttctccaagcgggtgatcctggccgacgccaacctggacaaggtgctgtccgcctacaacaagcaccgggacaagcccatccgggagcaggccgagaacatcatccacctgttcaccctgaccaacctgggcgcccccgccgccttcaagtacttcgacaccaccatcgaccggaagcggtacacctccaccaaggaggtgctggacgccaccctgatccaccagtccatcaccggcctgtacgagacccggatcgacctgtcccagctgggcggcgacggcggcggctcccccaagaagaagcggaaggtgtccgagtccgccacccccgagtccgtgtccggctggcggctgttcaagaagatctcctga

SEQ ID NO: 820 - protein, 1398 aa, synthetic construct
MDKKYSIGLDIGTNSVGWAVITDEYKVPSKKFKVLGNTDRHSIKKNLIGALLFDSGETAEATRLKRTARRRYTRRKNRICYLQEIFSNEMAKVDDSFFHRLEESFLVEEDKKHERHPIFGNIVDEVAYHEKYPTIYHLRKKLVDSTDKADLRLIYLALAHMIKFRGHFLIEGDLNPDNSDVDKLFIQLVQTYNQLFEENPINASGVDAKAILSARLSKSRRLENLIAQLPGEKKNGLFGNLIALSLGLTPNFKSNFDLAEDAKLQLSKDTYDDDLDNLLAQIGDQYADLFLAAKNLSDAILLSDILRVNTEITKAPLSASMIKRYDEHHQDLTLLKALVRQQLPEKYKEIFFDQSKNGYAGYIDGGASQEEFYKFIKPILEKMDGTEELLVKLNREDLLRKQRTFDNGSIPHQIHLGELHAILRRQEDFYPFLKDNREKIEKILTFRIPYYVGPLARGNSRFAWMTRKSEETITPWNFEEVVDKGASAQSFIERMTNFDKNLPNEKVLPKHSLLYEYFTVYNELTKVKYVTEGMRKPAFLSGEQKKAIVDLLFKTNRKVTVKQLKEDYFKKIECFDSVEISGVEDRFNASLGTYHDLLKIIKDKDFLDNEENEDILEDIVLTLTLFEDREMIEERLKTYAHLFDDKVMKQLKRRRYTGWGRLSRKLINGIRDKQSGKTILDFLKSDGFANRNFMQLIHDDSLTFKEDIQKAQVSGQGDSLHEHIANLAGSPAIKKGILQTVKVVDELVKVMGRHKPENIVIEMARENQTTQKGQKNSRERMKRIEEGIKELGSQILKEHPVENTQLQNEKLYLYYLQNGRDMYVDQELDINRLSDYDVDHIVPQSFLKDDSIDNKVLTRSDKNRGKSDNVPSEEVVKKMKNYWRQLLNAKLITQRKFDNLTKAERGGLSELDKAGFIKRQLVETRQITKHVAQILDSRMNTKYDENDKLIREVKVITLKSKLVSDFRKDFQFYKVREINNYHHAHDAYLNAVVGTALIKKYPKLESEFVYGDYKVYDVRKMIAKSEQEIGKATAKYFFYSNIMNFFKTEITLANGEIRKRPLIETNGETGEIVWDKGRDFATVRKVLSMPQVNIVKKTEVQTGGFSKESILPKRNSDKLIARKKDWDPKKYGGFDSPTVAYSVLVVAKVEKGKSKKLKSVKELLGITIMERSSFEKNPIDFLEAKGYKEVKKDLIIKLPKYSLFELENGRKRMLASAGELQKGNELALPSKYVNFLYLASHYEKLKGSPEDNEQKQLFVEQHKHYLDEIIEQISEFSKRVILADANLDKVLSAYNKHRDKPIREQAENIIHLFTLTNLGAPAAFKYFDTTIDRKRYTSTKEVLDATLIHQSITGLYETRIDLSQLGGDGGGSPKKKRKVSESATPESVSGWRLFKKIS

SEQ ID NO: 821 - RNA, 887 nt, synthetic construct
  source 1..887: mol_type = other RNA
gggaagctcagaataaacgctcaactttggccggatctgccaccatgaccaacctgtccgacatcatcgagaaggagaccggcaagcagctggtgatccaggagtccatcctgatgctgcccgaggaggtggaggaggtgatcggcaacaagcccgagtccgacatcctggtgcacaccgcctacgacgagtccaccgacgagaacgtgatgctgctgacctccgacgcccccgagtacaagccctgggccctggtgatccaggactccaacggcgagaacaagatcaagatgctgtccggcggctccaagcggaccgccgacggctccgagttcgagtcccccaagaagaagcggaaggtggagtgatagctagcaccagcctcaagaacacccgaatggagtctctaagctacataataccaacttacactttacaaaatgttgtcccccaaaatgtagccattcgtatctgctcctaataaaaagaaagtttcttcacattctctcgagaaaaaaaaaaaatggaaaaaaaaaaaacggaaaaaaaaaaaaggtaaaaaaaaaaaatataaaaaaaaaaaacataaaaaaaaaaaacgaaaaaaaaaaaacgtaaaaaaaaaaaactcaaaaaaaaaaaagataaaaaaaaaaaacctaaaaaaaaaaaatgtaaaaaaaaaaaagggaaaaaaaaaaaacgcaaaaaaaaaaaacacaaaaaaaaaaaatgcaaaaaaaaaaaatcgaaaaaaaaaaaatctaaaaaaaaaaaacgaaaaaaaaaaaacccaaaaaaaaaaaagacaaaaaaaaaaaatagaaaaaaaaaaaagttaaaaaaaaaaaactgaaaaaaaaaaaatttaaaaaaaaaaaatctag

SEQ ID NO: 822 - RNA, 4563 nt, synthetic construct
  source 1..4563: mol_type = other RNA
gggaagctcagaataaacgctcaactttggccggatctgccaccatggacggctccggcggcggctcccccaagaagaagcggaaggtggaggacaagcggcccgccgccaccaagaaggccggccaggccaagaagaagaagggcggctccggcggcggcgaggcctcccccgcctccggcccccggcacctgatggacccccacatcttcacctccaacttcaacaacggcatcggccggcacaagacctacctgtgctacgaggtggagcggctggacaacggcacctccgtgaagatggaccagcaccggggcttcctgcacaaccaggccaagaacctgctgtgcggcttctacggccggcacgccgagctgcggttcctggacctggtgccctccctgcagctggaccccgcccagatctaccgggtgacctggttcatctcctggtccccctgcttctcctggggctgcgccggcgaggtgcgggccttcctgcaggagaacacccacgtgcggctgcggatcttcgccgcccggatctacgactacgaccccctgtacaaggaggccctgcagatgctgcgggacgccggcgcccaggtgtccatcatgacctacgacgagttcaagcactgctgggacaccttcgtggaccaccagggctgccccttccagccctgggacggcctggacgagcactcccaggccctgtccggccggctgcgggccatcctgcagaaccagggcaactccggctccgagacccccggcacctccgagtccgccacccccgagtccgcagcgttcaaaccaaatcccatcaactacatcctgggcctggccatcggcatcgcctccgtgggctgggccatggtggagatcgacgaggaggagaaccccatccggctgatcgacctgggcgtgcgggtgttcgagcgggccgaggtgcccaagaccggcgactccctggccatggcccggcggctggcccggtccgtgcggcggctgacccggcggcgggcccaccggctgctgcgggcccggcggctgctgaagcgggagggcgtgctgcaggccgccgacttcgacgagaacggcctgatcaagtccctgcccaacaccccctggcagctgcgggccgccgccctggaccggaagctgacccccctggagtggtccgccgtgctgctgcacctgatcaagcaccggggctacctgtcccagcggaagaacgagggcgagaccgccgacaaggagctgggcgccctgctgaagggcgtggccaacaacgcccacgccctgcagaccggcgacttccggacccccgccgagctggccctgaacaagttcgagaaggagtccggccacatccggaaccagcggggcgactactcccacaccttctcccggaaggacctgcaggccgagctgatcctgctgttcgagaagcagaaggagttcggcaacccccacgtgtccggcggcctgaaggagggcatcgagaccctgctgatgacccagcggcccgccctgtccggcgacgccgtgcagaagatgctgggccactgcaccttcgagcccgccgagcccaaggccgccaagaacacctacaccgccgagcggttcatctggctgaccaagctgaacaacctgcggatcctggagcagggctccgagcggcccctgaccgacaccgagcgggccaccctgatggacgagccctaccggaagtccaagctgacctacgcccaggcccggaagctgctgggcctggaggacaccgccttcttcaagggcctgcggtacggcaaggacaacgccgaggcctccaccctgatggagatgaaggcctaccacgccatctcccgggccctggagaaggagggcctgaaggacaagaagtcccccctgaacctgtcctccgagctgcaggacgagatcggcaccgccttctccctgttcaagaccgacgaggacatcaccggccggctgaaggaccgggtgcagcccgagatcctggaggccctgctgaagcacatctccttcgacaagttcgtgcagatctccctgaaggccctgcggcggatcgtgcccctgatggagcagggcaagcggtacgacgaggcctgcgccgagatctacggcgaccactacggcaagaagaacaccgaggagaagatctacctgccccccatccccgccgacgagatccggaaccccgtggtgctgcgggccctgtcccaggcccggaaggtgatcaacggcgtggtgcggcggtacggctcccccgcccggatccacatcgagaccgcccgggaggtgggcaagtccttcaaggaccggaaggagatcgagaagcggcaggaggagaaccggaaggaccgggagaaggccgccgccaagttccgggagtacttccccaacttcgtgggcgagcccaagtccaaggacatcctgaagctgcggctgtacgagcagcagcacggcaagtgcctgtactccggcaaggagatcaacctggtgcggctgaacgagaagggctacgtggagatcgaccacgccctgcccttctcccggacctgggacgactccttcaacaacaaggtgctggtgctgggctccgagaaccagaacaagggcaaccagaccccctacgagtacttcaacggcaaggacaactcccgggagtggcaggagttcaaggcccgggtggagacctcccggttcccccggtccaagaagcagcggatcctgctgcagaagttcgacgaggacggcttcaaggagtgcaacctgaacgacacccggtacgtgaaccgcttcctgtgccagttcgtggccgaccacatcctgctgaccggcaagggcaagcggcgggtgttcgcctccaacggccagatcaccaacctgctgcggggcttctggggcctgcggaaggtgcgggccgagaacgaccggcaccacgccctggacgccgtggtggtggcctgctccaccgtggccatgcagcagaagatcacccggttcgtgcggtacaaggagatgaacgccttcgacggcaagaccatcgacaaggagaccggcaaggtgctgcaccagaagacccacttcccccagccctgggagttcttcgcccaggaggtgatgatccgggtgttcggcaagcccgacggcaagcccgagttcgaggaggccgacacccccgagaagctgcggaccctgctggccgagaagctgtcctcccggcccgaggccgtgcacgagtacgtgacccccctgttcgtgtcccgggcccccaaccggaagatgtccggcgcccacaaggacaccctgcggtccgccaagcggttcgtgaagcacaacgagaagatctccgtgaagcgggtgtggctgaccgagatcaagctggccgacctggagaacatggtgaactacaagaacggccgggagatcgagctgtacgaggccctgaaggcccggctggaggcctacggcggcaacgccaagcaggccttcgaccccaaggacaaccccttctacaagaagggcggccagctggtgaaggccgtgcgggtggagaagacccaggagtccggcgtgctgctgaacaagaagaacgcctacaccatcgccgacaacggcgacatggtgcgggtggacgtgttctgcaaggtggacaagaagggcaagaaccagtacttcatcgtgcccatctacgcctggcaggtggccgagaacatcctgcccgacatcgactgcaagggctaccggatcgacgactcctacaccttctgcttctccctgcacaagtacgacctgatcgccttccagaaggacgagaagtccaaggtggagttcgcctactacatcaactgcgactcctccaacggccggttctacctggcctggcacgacaagggctccaaggagcagcagttccggatctccacccagaacctggtgctgatccagaagtaccaggtgaacgagctgggcaaggagatccggccctgccggctgaagaagcggccccccgtgcggtagtgactagcaccagcctcaagaacacccgaatggagtctctaagctacataataccaacttacactttacaaaatgttgtcccccaaaatgtagccattcgtatctgctcctaataaaaagaaagtttcttcacattctctcgagaaaaaaaaaaaatggaaaaaaaaaaaacggaaaaaaaaaaaggtaaaaaaaaaaaatataaaaaaaaaaacataaaaaaaaaaaacgaaaaaaaaaaaacgtaaaaaaaaaaaactcaaaaaaaaaaagataaaaaaaaaaaacctaaaaaaaaaaaatgtaaaaaaaaaaaagggaaaaaaaaaaacgcaaaaaaaaaaaacacaaaaaaaaaaaatgcaaaaaaaaaaaatcgaaaaaaaaaaaatctaaaaaaaaaaaacgaaaaaaaaaaaacccaaaaaaaaaaaagacaaaaaaaaaaaatagaaaaaaaaaaagttaaaaaaaaaaaactgaaaaaaaaaaaatttaaaaaaaaaaaatctag

SEQ ID NO: 823 - skipped

SEQ ID NO: 824 - DNA, 327 bp, synthetic construct
  source 1..327: mol_type = other DNA
atgaccaacctgtccgacatcatcgagaaggagaccggcaagcagctggtgatccaggagtccatcctgatgctgcccgaggaggtggaggaggtgatcggcaacaagcccgagtccgacatcctggtgcacaccgcctacgacgagtccaccgacgagaacgtgatgctgctgacctccgacgcccccgagtacaagccctgggccctggtgatccaggactccaacggcgagaacaagatcaagatgctgtccggcggctccaagcggaccgccgacggctccgagttcgagtcccccaagaagaagcggaaggtggagtgatag

SEQ ID NO: 825 - RNA, 3921 nt, synthetic construct
  source 1..3921: mol_type = other RNA
gggaagctcagaataaacgctcaactttggccggatctgccaccatggacggctccggcggcggctcccccaagaagaagcggaaggtggaggacaagcggcccgccgccaccaagaaggccggccaggccaagaagaagaagggcggctccggcggcggcgccgccttcaagcccaaccccatcaactacatcctgggcctggacatcggcatcgcctccgtgggctgggccatggtggagatcgacgaggaggagaaccccatccggctgatcgacctgggcgtgcgggtgttcgagcgggccgaggtgcccaagaccggcgactccctggccatggcccggcggctggcccggtccgtgcggcggctgacccggcggcgggcccaccggctgctgcgggcccggcggctgctgaagcgggagggcgtgctgcaggccgccgacttcgacgagaacggcctgatcaagtccctgcccaacaccccctggcagctgcgggccgccgccctggaccggaagctgacccccctggagtggtccgccgtgctgctgcacctgatcaagcaccggggctacctgtcccagcggaagaacgagggcgagaccgccgacaaggagctgggcgccctgctgaagggcgtggccaacaacgcccacgccctgcagaccggcgacttccggacccccgccgagctggccctgaacaagttcgagaaggagtccggccacatccggaaccagcggggcgactactcccacaccttctcccggaaggacctgcaggccgagctgatcctgctgttcgagaagcagaaggagttcggcaacccccacgtgtccggcggcctgaaggagggcatcgagaccctgctgatgacccagcggcccgccctgtccggcgacgccgtgcagaagatgctgggccactgcaccttcgagcccgccgagcccaaggccgccaagaacacctacaccgccgagcggttcatctggctgaccaagctgaacaacctgcggatcctggagcagggctccgagcggcccctgaccgacaccgagcgggccaccctgatggacgagccctaccggaagtccaagctgacctacgcccaggcccggaagctgctgggcctggaggacaccgccttcttcaagggcctgcggtacggcaaggacaacgccgaggcctccaccctgatggagatgaaggcctaccacgccatctcccgggccctggagaaggagggcctgaaggacaagaagtcccccctgaacctgtcctccgagctgcaggacgagatcggcaccgccttctccctgttcaagaccgacgaggacatcaccggccggctgaaggaccgggtgcagcccgagatcctggaggccctgctgaagcacatctccttcgacaagttcgtgcagatctccctgaaggccctgcggcggatcgtgcccctgatggagcagggcaagcggtacgacgaggcctgcgccgagatctacggcgaccactacggcaagaagaacaccgaggagaagatctacctgccccccatccccgccgacgagatccggaaccccgtggtgctgcgggccctgtcccaggcccggaaggtgatcaacggcgtggtgcggcggtacggctcccccgcccggatccacatcgagaccgcccgggaggtgggcaagtccttcaaggaccggaaggagatcgagaagcggcaggaggagaaccggaaggaccgggagaaggccgccgccaagttccgggagtacttccccaacttcgtgggcgagcccaagtccaaggacatcctgaagctgcggctgtacgagcagcagcacggcaagtgcctgtactccggcaaggagatcaacctggtgcggctgaacgagaagggctacgtggagatcgaccacgccctgcccttctcccggacctgggacgactccttcaacaacaaggtgctggtgctgggctccgagaaccagaacaagggcaaccagaccccctacgagtacttcaacggcaaggacaactcccgggagtggcaggagttcaaggcccgggtggagacctcccggttcccccggtccaagaagcagcggatcctgctgcagaagttcgacgaggacggcttcaaggagtgcaacctgaacgacacccggtacgtgaaccggttcctgtgccagttcgtggccgaccacatcctgctgaccggcaagggcaagcggcgggtgttcgcctccaacggccagatcaccaacctgctgcggggcttctggggcctgcggaaggtgcgggccgagaacgaccggcaccacgccctggacgccgtggtggtggcctgctccaccgtggccatgcagcagaagatcacccggttcgtgcggtacaaggagatgaacgccttcgacggcaagaccatcgacaaggagaccggcaaggtgctgcaccagaagacccacttcccccagccctgggagttcttcgcccaggaggtgatgatccgggtgttcggcaagcccgacggcaagcccgagttcgaggaggccgacacccccgagaagctgcggaccctgctggccgagaagctgtcctcccggcccgaggccgtgcacgagtacgtgacccccctgttcgtgtcccgggcccccaaccggaagatgtccggcgcccacaaggacaccctgcggtccgccaagcggttcgtgaagcacaacgagaagatctccgtgaagcgggtgtggctgaccgagatcaagctggccgacctggagaacatggtgaactacaagaacggccgggagatcgagctgtacgaggccctgaaggcccggctggaggcctacggcggcaacgccaagcaggccttcgaccccaaggacaaccccttctacaagaagggcggccagctggtgaaggccgtgcgggtggagaagacccaggagtccggcgtgctgctgaacaagaagaacgcctacaccatcgccgacaacggcgacatggtgcgggtggacgtgttctgcaaggtggacaagaagggcaagaaccagtacttcatcgtgcccatctacgcctggcaggtggccgagaacatcctgcccgacatcgactgcaagggctaccggatcgacgactcctacaccttctgcttctccctgcacaagtacgacctgatcgccttccagaaggacgagaagtccaaggtggagttcgcctactacatcaactgcgactcctccaacggccggttctacctggcctggcacgacaagggctccaaggagcagcagttccggatctccacccagaacctggtgctgatccagaagtaccaggtgaacgagctgggcaaggagatccggccctgccggctgaagaagcggccccccgtgcggtagctagcaccagcctcaagaacacccgaatggagtctctaagctacataataccaacttacactttacaaaatgttgtcccccaaaatgtagccattcgtatctgctcctaataaaaagaaagtttcttcacattctctcgagaaaaaaaaaaaatggaaaaaaaaaaaacggaaaaaaaaaaaaggtaaaaaaaaaaaatataaaaaaaaaaaacataaaaaaaaaaaacgaaaaaaaaaaaacgtaaaaaaaaaaaactcaaaaaaaaaaagataaaaaaaaaaaacctaaaaaaaaaaaatgtaaaaaaaaaaaagggaaaaaaaaaaaacgcaaaaaaaaaaaacacaaaaaaaaaaaatgcaaaaaaaaaaaatcgaaaaaaaaaaaatctaaaaaaaaaaaacgaaaaaaaaaaaacccaaaaaaaaaaaagacaaaaaaaaaaaatagaaaaaaaaaaagttaaaaaaaaaaaactgaaaaaaaaaaaatttaaaaaaaaaaaatctag

SEQ ID NO: 826 - RNA, 3980 nt, synthetic construct
  source 1..3980: mol_type = other RNA
gggaagctcagaataaacgctcaactttggccggatctgccaccatggacggctccggcggcggctcccccaagaagaagcggaaggtggaggacaagcggcccgccgccaccaagaaggccggccaggccaagaagaagaagggcggctccggcggcggcgccgccttcaagcccaaccccatcaactacatcctgggcctggacatcggcatcgcctccgtgggctgggccatggtggagatcgacgaggaggagaaccccatccggctgatcgacctgggcgtgcgggtgttcgagcgggccgaggtgcccaagaccggcgactccctggccatggcccggcggctggcccggtccgtgcggcggctgacccggcggcgggcccaccggctgctgcgggcccggcggctgctgaagcgggagggcgtgctgcaggccgccgacttcgacgagaacggcctgatcaagtccctgcccaacaccccctggcagctgcgggccgccgccctggaccggaagctgacccccctggagtggtccgccgtgctgctgcacctgatcaagcaccggggctacctgtcccagcggaagaacgagggcgagaccgccgacaaggagctgggcgccctgctgaagggcgtggccaacaacgcccacgccctgcagaccggcgacttccggacccccgccgagctggccctgaacaagttcgagaaggagtccggccacatccggaaccagcggggcgactactcccacaccttctcccggaaggacctgcaggccgagctgatcctgctgttcgagaagcagaaggagttcggcaacccccacgtgtccggcggcctgaaggagggcatcgagaccctgctgatgacccagcggcccgccctgtccggcgacgccgtgcagaagatgctgggccactgcaccttcgagcccgccgagcccaaggccgccaagaacacctacaccgccgagcggttcatctggctgaccaagctgaacaacctgcggatcctggagcagggctccgagcggcccctgaccgacaccgagcgggccaccctgatggacgagccctaccggaagtccaagctgacctacgcccaggcccggaagctgctgggcctggaggacaccgccttcttcaagggcctgcggtacggcaaggacaacgccgaggcctccaccctgatggagatgaaggcctaccacgccatctcccgggccctggagaaggagggcctgaaggacaagaagtcccccctgaacctgtcctccgagctgcaggacgagatcggcaccgccttctccctgttcaagaccgacgaggacatcaccggccggctgaaggaccgggtgcagcccgagatcctggaggccctgctgaagcacatctccttcgacaagttcgtgcagatctccctgaaggccctgcggcggatcgtgcccctgatggagcagggcaagcggtacgacgaggcctgcgccgagatctacggcgaccactacggcaagaagaacaccgaggagaagatctacctgccccccatccccgccgacgagatccggaaccccgtggtgctgcgggccctgtcccaggcccggaaggtgatcaacggcgtggtgcggcggtacggctcccccgcccggatccacatcgagaccgcccgggaggtgggcaagtccttcaaggaccggaaggagatcgagaagcggcaggaggagaaccggaaggaccgggagaaggccgccgccaagttccgggagtacttccccaacttcgtgggcgagcccaagtccaaggacatcctgaagctgcggctgtacgagcagcagcacggcaagtgcctgtactccggcaaggagatcaacctggtgcggctgaacgagaagggctacgtggagatcgaccacgccctgcccttctcccggacctgggacgactccttcaacaacaaggtgctggtgctgggctccgagaaccagaacaagggcaaccagaccccctacgagtacttcaacggcaaggacaactcccgggagtggcaggagttcaaggcccgggtggagacctcccggttcccccggtccaagaagcagcggatcctgctgcagaagttcgacgaggacggcttcaaggagtgcaacctgaacgacacccggtacgtgaaccggttcctgtgccagttcgtggccgaccacatcctgctgaccggcaagggcaagcggcgggtgttcgcctccaacggccagatcaccaacctgctgcggggcttctggggcctgcggaaggtgcgggccgagaacgaccggcaccacgccctggacgccgtggtggtggcctgctccaccgtggccatgcagcagaagatcacccggttcgtgcggtacaaggagatgaacgccttcgacggcaagaccatcgacaaggagaccggcaaggtgctgcaccagaagacccacttcccccagccctgggagttcttcgcccaggaggtgatgatccgggtgttcggcaagcccgacggcaagcccgagttcgaggaggccgacacccccgagaagctgcggaccctgctggccgagaagctgtcctcccggcccgaggccgtgcacgagtacgtgacccccctgttcgtgtcccgggcccccaaccggaagatgtccggcgcccacaaggacaccctgcggtccgccaagcggttcgtgaagcacaacgagaagatctccgtgaagcgggtgtggctgaccgagatcaagctggccgacctggagaacatggtgaactacaagaacggccgggagatcgagctgtacgaggccctgaaggcccggctggaggcctacggcggcaacgccaagcaggccttcgaccccaaggacaaccccttctacaagaagggcggccagctggtgaaggccgtgcgggtggagaagacccaggagtccggcgtgctgctgaacaagaagaacgcctacaccatcgccgacaacggcgacatggtgcgggtggacgtgttctgcaaggtggacaagaagggcaagaaccagtacttcatcgtgcccatctacgcctggcaggtggccgagaacatcctgcccgacatcgactgcaagggctaccggatcgacgactcctacaccttctgcttctccctgcacaagtacgacctgatcgccttccagaaggacgagaagtccaaggtggagttcgcctactacatcaactgcgactcctccaacggccggttctacctggcctggcacgacaagggctccaaggagcagcagttccggatctccacccagaacctggtgctgatccagaagtaccaggtgaacgagctgggcaaggagatccggccctgccggctgaagaagcggccccccgtgcggtccgagtccgccacccccgagtccgtgtccggctggcggctgttcaagaagatctcctagctagcaccagcctcaagaacacccgaatggagtctctaagctacataataccaacttacactttacaaaatgttgtcccccaaaatgtagccattcgtatctgctcctaataaaaagaaagtttcttcacattctctcgagaaaaaaaaaaaatggaaaaaaaaaaaacggaaaaaaaaaaaaggtaaaaaaaaaaaatataaaaaaaaaaaacataaaaaaaaaaaacgaaaaaaaaaaaacgtaaaaaaaaaaaactcaaaaaaaaaaaagataaaaaaaaaaaacctaaaaaaaaaaaatgtaaaaaaaaaaaagggaaaaaaaaaaaacgcaaaaaaaaaaaacacaaaaaaaaaaaatgcaaaaaaaaaaaatcgaaaaaaaaaaaatctaaaaaaaaaaaacgaaaaaaaaaaaacccaaaaaaaaaaaagacaaaaaaaaaaaatagaaaaaaaaaaaagttaaaaaaaaaaaactgaaaaaaaaaaaatttaaaaaaaaaaaatctag

SEQ ID NO: 827 - skipped

SEQ ID NO: 828 - RNA, 24 nt, synthetic construct
  source 1..24: mol_type = other RNA
tctgggaaaggaggggaagatgag

SEQ ID NO: 829 - RNA, 24 nt, synthetic construct
  source 1..24: mol_type = other RNA
ctctgggaaaggaggggaagatga

SEQ ID NO: 830 - RNA, 24 nt, synthetic construct
  source 1..24: mol_type = other RNA
tcccagagccgtcttcccagtcca

SEQ ID NO: 831 - RNA, 24 nt, synthetic construct
  source 1..24: mol_type = other RNA
gcatgggcaggggctggggtgcac

SEQ ID NO: 832 - RNA, 24 nt, synthetic construct
  source 1..24: mol_type = other RNA
gaatggcaggcggaggttgtactg

SEQ ID NO: 833 - RNA, 24 nt, synthetic construct
  source 1..24: mol_type = other RNA
gtgagcaggcacctgtgccaacat

SEQ ID NO: 834-898 - skipped (65 entries)

SEQ ID NO: 899 - RNA, 121 nt, synthetic construct
  source 1..121: mol_type = other RNA
gttgtagctccctttctcatttcggaaacgaaatgagaaccgttgctacaataaggccgtctgaaaagatgtgccgcaacgctctgccccttaaagcttctgctttaaggggcatcgttta

SEQ ID NO: 900 - RNA, 145 nt, synthetic construct
  source 1..145: mol_type = other RNA
  misc_difference 1: note = a, c, g, u, unknown or other
  misc_difference 2: note = a, c, g, u, unknown or other
  misc_difference 3: note = a, c, g, u, unknown or other
  misc_difference 4: note = a, c, g, u, unknown or other
  misc_difference 5: note = a, c, g, u, unknown or other
  misc_difference 6: note = a, c, g, u, unknown or other
  misc_difference 7: note = a, c, g, u, unknown or other
  misc_difference 8: note = a, c, g, u, unknown or other
  misc_difference 9: note = a, c, g, u, unknown or other
  misc_difference 10: note = a, c, g, u, unknown or other
  misc_difference 11: note = a, c, g, u, unknown or other
  misc_difference 12: note = a, c, g, u, unknown or other
  misc_difference 13: note = a, c, g, u, unknown or other
  misc_difference 14: note = a, c, g, u, unknown or other
  misc_difference 15: note = a, c, g, u, unknown or other
  misc_difference 16: note = a, c, g, u, unknown or other
  misc_difference 17: note = a, c, g, u, unknown or other
  misc_difference 18: note = a, c, g, u, unknown or other
  misc_difference 19: note = a, c, g, u, unknown or other
  misc_difference 20: note = a, c, g, u, unknown or other
  misc_difference 21: note = a, c, g, u, unknown or other
  misc_difference 22: note = a, c, g, u, unknown or other
  misc_difference 23: note = a, c, g, u, unknown or other
  misc_difference 24: note = a, c, g, u, unknown or other
nnnnnnnnnnnnnnnnnnnnnnnngttgtagctccctttctcatttcggaaacgaaatgagaaccgttgctacaataaggccgtctgaaaagatgtgccgcaacgctctgccccttaaagcttctgctttaaggggcatcgttta

SEQ ID NO: 901 - RNA, 102 nt, synthetic construct
  source 1..102: mol_type = other RNA
  misc_difference 1: note = a, c, g, u, unknown or other
  misc_difference 2: note = a, c, g, u, unknown or other
  misc_difference 3: note = a, c, g, u, unknown or other
  misc_difference 4: note = a, c, g, u, unknown or other
  misc_difference 5: note = a, c, g, u, unknown or other
  misc_difference 6: note = a, c, g, u, unknown or other
  misc_difference 7: note = a, c, g, u, unknown or other
  misc_difference 8: note = a, c, g, u, unknown or other
  misc_difference 9: note = a, c, g, u, unknown or other
  misc_difference 10: note = a, c, g, u, unknown or other
  misc_difference 11: note = a, c, g, u, unknown or other
  misc_difference 12: note = a, c, g, u, unknown or other
  misc_difference 13: note = a, c, g, u, unknown or other
  misc_difference 14: note = a, c, g, u, unknown or other
  misc_difference 15: note = a, c, g, u, unknown or other
  misc_difference 16: note = a, c, g, u, unknown or other
  misc_difference 17: note = a, c, g, u, unknown or other
  misc_difference 18: note = a, c, g, u, unknown or other
  misc_difference 19: note = a, c, g, u, unknown or other
  misc_difference 20: note = a, c, g, u, unknown or other
  misc_difference 21: note = a, c, g, u, unknown or other
  misc_difference 22: note = a, c, g, u, unknown or other
  misc_difference 23: note = a, c, g, u, unknown or other
  misc_difference 24: note = a, c, g, u, unknown or other
  misc_difference 25: note = a, c, g, u, unknown or other
  misc_difference 1..25: note = This region may encompass 20-25 nucleotides
nnnnnnnnnnnnnnnnnnnnnnnnngttgtagctccctgaaaccgttgctacaataaggccgtcgaaagatgtgccgcaacgctctgccttctggcatcgtt

SEQ ID NO: 902 - RNA, 106 nt, synthetic construct
  source 1..106: mol_type = other RNA
  misc_difference 1: note = a, c, g, u, unknown or other
  misc_difference 2: note = a, c, g, u, unknown or other
  misc_difference 3: note = a, c, g, u, unknown or other
  misc_difference 4: note = a, c, g, u, unknown or other
  misc_difference 5: note = a, c, g, u, unknown or other
  misc_difference 6: note = a, c, g, u, unknown or other
  misc_difference 7: note = a, c, g, u, unknown or other
  misc_difference 8: note = a, c, g, u, unknown or other
  misc_difference 9: note = a, c, g, u, unknown or other
  misc_difference 10: note = a, c, g, u, unknown or other
  misc_difference 11: note = a, c, g, u, unknown or other
  misc_difference 12: note = a, c, g, u, unknown or other
  misc_difference 13: note = a, c, g, u, unknown or other
  misc_difference 14: note = a, c, g, u, unknown or other
  misc_difference 15: note = a, c, g, u, unknown or other
  misc_difference 16: note = a, c, g, u, unknown or other
  misc_difference 17: note = a, c, g, u, unknown or other
  misc_difference 18: note = a, c, g, u, unknown or other
  misc_difference 19: note = a, c, g, u, unknown or other
  misc_difference 20: note = a, c, g, u, unknown or other
  misc_difference 21: note = a, c, g, u, unknown or other
  misc_difference 22: note = a, c, g, u, unknown or other
  misc_difference 23: note = a, c, g, u, unknown or other
  misc_difference 24: note = a, c, g, u, unknown or other
  misc_difference 25: note = a, c, g, u, unknown or other
  misc_difference 1..25: note = This region may encompass 20-25 nucleotides
nnnnnnnnnnnnnnnnnnnnnnnnngttgtagctccctgaaaccgttgctacaataaggccgtcgaaagatgtgccgcaacgctctgccttctggcatcgtttatt

SEQ ID NO: 903 - RNA, 108 nt, synthetic construct
  source 1..108: mol_type = other RNA
  misc_difference 1: note = a, c, g, u, unknown or other
  misc_difference 2: note = a, c, g, u, unknown or other
  misc_difference 3: note = a, c, g, u, unknown or other
  misc_difference 4: note = a, c, g, u, unknown or other
  misc_difference 5: note = a, c, g, u, unknown or other
  misc_difference 6: note = a, c, g, u, unknown or other
  misc_difference 7: note = a, c, g, u, unknown or other
  misc_difference 8: note = a, c, g, u, unknown or other
  misc_difference 9: note = a, c, g, u, unknown or other
  misc_difference 10: note = a, c, g, u, unknown or other
  misc_difference 11: note = a, c, g, u, unknown or other
  misc_difference 12: note = a, c, g, u, unknown or other
  misc_difference 13: note = a, c, g, u, unknown or other
  misc_difference 14: note = a, c, g, u, unknown or other
  misc_difference 15: note = a, c, g, u, unknown or other
  misc_difference 16: note = a, c, g, u, unknown or other
  misc_difference 17: note = a, c, g, u, unknown or other
  misc_difference 18: note = a, c, g, u, unknown or other
  misc_difference 19: note = a, c, g, u, unknown or other
  misc_difference 20: note = a, c, g, u, unknown or other
  misc_difference 21: note = a, c, g, u, unknown or other
  misc_difference 22: note = a, c, g, u, unknown or other
  misc_difference 23: note = a, c, g, u, unknown or other
  misc_difference 24: note = a, c, g, u, unknown or other
  misc_difference 25: note = a, c, g, u, unknown or other
  misc_difference 1..25: note = This region may encompass 20-25 nucleotides
nnnnnnnnnnnnnnnnnnnnnnnnngttgtagctccctggaaacccgttgctacaataaggccgtcgaaagatgtgccgcaacgctctgccttctggcatcgtttatt

SEQ ID NO: 904 - RNA, 101 nt, synthetic construct
  source 1..101: mol_type = other RNA
  misc_difference 1: note = 2'-O-methyl modified adenosine, cytidine, guanosine, uridine, unknown or other nucleotide with phosphorothioate linkage
  misc_difference 2: note = 2'-O-methyl modified adenosine, cytidine, guanosine, uridine, unknown or other nucleotide
  misc_difference 3: note = a, c, g, u, unknown or other
  misc_difference 4: note = a, c, g, u, unknown or other
  misc_difference 5: note = a, c, g, u, unknown or other
  misc_difference 6: note = a, c, g, u, unknown or other
  misc_difference 7: note = a, c, g, u, unknown or other
  misc_difference 8: note = a, c, g, u, unknown or other
  misc_difference 9: note = a, c, g, u, unknown or other
  misc_difference 10: note = 2'-O-methyl modified adenosine, cytidine, guanosine, uridine, unknown or other nucleotide
  misc_difference 11: note = a, c, g, u, unknown or other
  misc_difference 12: note = a, c, g, u, unknown or other
  misc_difference 13: note = 2'-O-methyl modified adenosine, cytidine, guanosine, uridine, unknown or other nucleotide
  misc_difference 14: note = a, c, g, u, unknown or other
  misc_difference 15: note = a, c, g, u, unknown or other
  misc_difference 16: note = a, c, g, u, unknown or other
  misc_difference 17: note = a, c, g, u, unknown or other
  misc_difference 18: note = a, c, g, u, unknown or other
  misc_difference 19: note = a, c, g, u, unknown or other
  misc_difference 20: note = a, c, g, u, unknown or other
  misc_difference 21: note = a, c, g, u, unknown or other
  misc_difference 22: note = a, c, g, u, unknown or other
  misc_difference 23: note = a, c, g, u, unknown or other
  misc_difference 24: note = a, c, g, u, unknown or other
  modified_base 25: mod_base = OTHER; note = 2'-O-methyl modified nucleotide
  modified_base 29: mod_base = OTHER; note = 2'-O-methyl modified nucleotide
  modified_base 30: mod_base = OTHER; note = 2'-O-methyl modified nucleotide
  modified_base 31: mod_base = OTHER; note = 2'-O-methyl modified nucleotide
  modified_base 32: mod_base = OTHER; note = 2'-O-methyl modified nucleotide
  modified_base 37: mod_base = OTHER; note = 2'-O-methyl modified nucleotide
  modified_base 38: mod_base = OTHER; note = 2'-O-methyl modified nucleotide
  modified_base 39: mod_base = OTHER; note = 2'-O-methyl modified nucleotide
  modified_base 40: mod_base = OTHER; note = 2'-O-methyl modified nucleotide
  modified_base 41: mod_base = OTHER; note = 2'-O-methyl modified nucleotide
  modified_base 42: mod_base = OTHER; note = 2'-O-methyl modified nucleotide
  modified_base 43: mod_base = OTHER; note = 2'-O-methyl modified nucleotide
  modified_base 47: mod_base = OTHER; note = 2'-O-methyl modified nucleotide
  modified_base 48: mod_base = OTHER; note = 2'-O-methyl modified nucleotide
  modified_base 51: mod_base = OTHER; note = 2'-O-methyl modified nucleotide
  modified_base 54: mod_base = OTHER; note = nucleotide with phosphorothioate linkage
  modified_base 58: mod_base = OTHER; note = 2'-O-methyl modified nucleotide
  modified_base 59: mod_base = OTHER; note = 2'-O-methyl modified nucleotide
  modified_base 61: mod_base = OTHER; note = 2'-O-methyl modified nucleotide
  modified_base 62: mod_base = OTHER; note = 2'-O-methyl modified nucleotide
  modified_base 63: mod_base = OTHER; note = 2'-O-methyl modified nucleotide
  modified_base 64: mod_base = OTHER; note = 2'-O-methyl modified nucleotide
  modified_base 65: mod_base = OTHER; note = 2'-O-methyl modified nucleotide
  modified_base 66: mod_base = OTHER; note = 2'-O-methyl modified nucleotide
  modified_base 67: mod_base = OTHER; note = 2'-O-methyl modified nucleotide
  modified_base 68: mod_base = OTHER; note = 2'-O-methyl modified nucleotide
  modified_base 69: mod_base = OTHER; note = 2'-O-methyl modified nucleotide
  modified_base 70: mod_base = OTHER; note = 2'-O-methyl modified nucleotide
  modified_base 75: mod_base = OTHER; note = 2'-O-methyl modified nucleotide
  modified_base 78: mod_base = OTHER; note = 2'-O-methyl modified nucleotide
  modified_base 79: mod_base = OTHER; note = 2'-O-methyl modified nucleotide
  modified_base 80: mod_base = OTHER; note = 2'-O-methyl modified nucleotide
  modified_base 81: mod_base = OTHER; note = 2'-O-methyl modified nucleotide
  modified_base 86: mod_base = OTHER; note = 2'-O-methyl modified nucleotide
  modified_base 87: mod_base = OTHER; note = 2'-O-methyl modified nucleotide
  modified_base 89: mod_base = OTHER; note = 2'-O-methyl modified nucleotide
  modified_base 90: mod_base = OTHER; note = 2'-O-methyl modified nucleotide
  modified_base 91: mod_base = OTHER; note = 2'-O-methyl modified nucleotide
  modified_base 92: mod_base = OTHER; note = 2'-O-methyl modified nucleotide
  modified_base 94: mod_base = OTHER; note = 2'-O-methyl modified nucleotide
  modified_base 96: mod_base = OTHER; note = 2'-O-methyl modified nucleotide
  modified_base 97: mod_base = OTHER; note = 2'-O-methyl modified nucleotide
  modified_base 98: mod_base = OTHER; note = nucleotide with phosphorothioate linkage
  modified_base 99: mod_base = OTHER; note = 2'-O-methyl modified nucleotide with phosphorothioate linkage
  modified_base 100: mod_base = OTHER; note = 2'-O-methyl modified nucleotide with phosphorothioate linkage
  modified_base 101: mod_base = OTHER; note = 2'-O-methyl modified nucleotide
nnnnnnnnnnnnnnnnnnnnnnnngttgtagctccctgaaaccgttgctacaataaggccgtcgaaagatgtgccgcaacgctctgccttctggcatcgtt

SEQ ID NO: 905 - RNA, 102 nt, synthetic construct; identical to SEQ ID NO: 901
  source 1..102: mol_type = other RNA
  misc_difference 1: note = a, c, g, u, unknown or other
  misc_difference 2: note = a, c, g, u, unknown or other
  misc_difference 3: note = a, c, g, u, unknown or other
  misc_difference 4: note = a, c, g, u, unknown or other
  misc_difference 5: note = a, c, g, u, unknown or other
  misc_difference 6: note = a, c, g, u, unknown or other
  misc_difference 7: note = a, c, g, u, unknown or other
  misc_difference 8: note = a, c, g, u, unknown or other
  misc_difference 9: note = a, c, g, u, unknown or other
  misc_difference 10: note = a, c, g, u, unknown or other
  misc_difference 11: note = a, c, g, u, unknown or other
  misc_difference 12: note = a, c, g, u, unknown or other
  misc_difference 13: note = a, c, g, u, unknown or other
  misc_difference 14: note = a, c, g, u, unknown or other
  misc_difference 15: note = a, c, g, u, unknown or other
  misc_difference 16: note = a, c, g, u, unknown or other
  misc_difference 17: note = a, c, g, u, unknown or other
  misc_difference 18: note = a, c, g, u, unknown or other
  misc_difference 19: note = a, c, g, u, unknown or other
  misc_difference 20: note = a, c, g, u, unknown or other
  misc_difference 21: note = a, c, g, u, unknown or other
  misc_difference 22: note = a, c, g, u, unknown or other
  misc_difference 23: note = a, c, g, u, unknown or other
  misc_difference 24: note = a, c, g, u, unknown or other
  misc_difference 25: note = a, c, g, u, unknown or other
  modified_base 30: mod_base = OTHER; note = 2'-O-methyl modified nucleotide
  modified_base 31: mod_base = OTHER; note = 2'-O-methyl modified nucleotide
  modified_base 32: mod_base = OTHER; note = 2'-O-methyl modified nucleotide
  modified_base 33: mod_base = OTHER; note = 2'-O-methyl modified nucleotide
  modified_base 38: mod_base = OTHER; note = 2'-O-methyl modified nucleotide
  modified_base 39: mod_base = OTHER; note = 2'-O-methyl modified nucleotide
  modified_base 40: mod_base = OTHER; note = 2'-O-methyl modified nucleotide
  modified_base 41: mod_base = OTHER; note = 2'-O-methyl modified nucleotide
  modified_base 42: mod_base = OTHER; note = 2'-O-methyl modified nucleotide
  modified_base 43: mod_base = OTHER; note = 2'-O-methyl modified nucleotide
  modified_base 44: mod_base = OTHER; note = 2'-O-methyl modified nucleotide
  modified_base 48: mod_base = OTHER; note = 2'-O-methyl modified nucleotide
  modified_base 49: mod_base = OTHER; note = 2'-O-methyl modified nucleotide
  modified_base 52: mod_base = OTHER; note = 2'-O-methyl modified nucleotide
  modified_base 55: mod_base = OTHER; note = nucleotide with phosphorothioate linkage
  modified_base 59: mod_base = OTHER; note = 2'-O-methyl modified nucleotide
  modified_base 60: mod_base = OTHER; note = 2'-O-methyl modified nucleotide
  modified_base 62: mod_base = OTHER; note = 2'-O-methyl modified nucleotide
  modified_base 63: mod_base = OTHER; note = 2'-O-methyl modified nucleotide
  modified_base 64: mod_base = OTHER; note = 2'-O-methyl modified nucleotide
  modified_base 65: mod_base = OTHER; note = 2'-O-methyl modified nucleotide
  modified_base 66: mod_base = OTHER; note = 2'-O-methyl modified nucleotide
  modified_base 67: mod_base = OTHER; note = 2'-O-methyl modified nucleotide
  modified_base 68: mod_base = OTHER; note = 2'-O-methyl modified nucleotide
  modified_base 69: mod_base = OTHER; note = 2'-O-methyl modified nucleotide
  modified_base 70: mod_base = OTHER; note = 2'-O-methyl modified nucleotide
  modified_base 71: mod_base = OTHER; note = 2'-O-methyl modified nucleotide
  modified_base 76: mod_base = OTHER; note = 2'-O-methyl modified nucleotide
  modified_base 79: mod_base = OTHER; note = 2'-O-methyl modified nucleotide
  modified_base 80: mod_base = OTHER; note = 2'-O-methyl modified nucleotide
  modified_base 81: mod_base = OTHER; note = 2'-O-methyl modified nucleotide
  modified_base 82: mod_base = OTHER; note = 2'-O-methyl modified nucleotide
  modified_base 87: mod_base = OTHER; note = 2'-O-methyl modified nucleotide
  modified_base 88: mod_base = OTHER; note = 2'-O-methyl modified nucleotide
  modified_base 90: mod_base = OTHER; note = 2'-O-methyl modified nucleotide
  modified_base 91: mod_base = OTHER; note = 2'-O-methyl modified nucleotide
  modified_base 92: mod_base = OTHER; note = 2'-O-methyl modified nucleotide
  modified_base 93: mod_base = OTHER; note = 2'-O-methyl modified nucleotide
  modified_base 95: mod_base = OTHER; note = 2'-O-methyl modified nucleotide
  modified_base 97: mod_base = OTHER; note = 2'-O-methyl modified nucleotide
  modified_base 98: mod_base = OTHER; note = 2'-O-methyl modified nucleotide
  modified_base 99: mod_base = OTHER; note = nucleotide with phosphorothioate linkage
  modified_base 100: mod_base = OTHER; note = 2'-O-methyl modified nucleotide with phosphorothioate linkage
  modified_base 101: mod_base = OTHER; note = 2'-O-methyl modified nucleotide with phosphorothioate linkage
  modified_base 102: mod_base = OTHER; note = 2'-O-methyl modified nucleotide
  misc_difference 1..25: note = This region may encompass 20-25 nucleotides

SEQ ID NO: 906 - RNA, 77 nt, synthetic construct
  source 1..77: mol_type = other RNA
  modified_base 5: mod_base = OTHER; note = 2'-O-methyl modified nucleotide
  modified_base 6: mod_base = OTHER; note = 2'-O-methyl modified nucleotide
  modified_base 7: mod_base = OTHER; note = 2'-O-methyl modified nucleotide
  modified_base 8: mod_base = OTHER; note = 2'-O-methyl modified nucleotide
  modified_base 13: mod_base = OTHER; note = 2'-O-methyl modified nucleotide
  modified_base 14: mod_base = OTHER; note = 2'-O-methyl modified nucleotide
  modified_base 15: mod_base = OTHER; note = 2'-O-methyl modified nucleotide
  modified_base 16: mod_base = OTHER; note = 2'-O-methyl modified nucleotide
  modified_base 17: mod_base = OTHER; note = 2'-O-methyl modified nucleotide
  modified_base 18: mod_base = OTHER; note = 2'-O-methyl modified nucleotide
  modified_base 19: mod_base = OTHER; note = 2'-O-methyl modified nucleotide
  modified_base 23: mod_base = OTHER; note = 2'-O-methyl modified nucleotide
  modified_base 24: mod_base = OTHER; note = 2'-O-methyl modified nucleotide
  modified_base 27: mod_base = OTHER; note = 2'-O-methyl modified nucleotide
  modified_base 30: mod_base = OTHER; note = nucleotide with phosphorothioate linkage
  modified_base 34: mod_base = OTHER; note = 2'-O-methyl modified nucleotide
  modified_base 35: mod_base = OTHER; note = 2'-O-methyl modified nucleotide
  modified_base 37: mod_base = OTHER; note = 2'-O-methyl modified nucleotide
  modified_base 38: mod_base = OTHER; note = 2'-O-methyl modified nucleotide
  modified_base 39: mod_base = OTHER; note = 2'-O-methyl modified nucleotide
  modified_base 40: mod_base = OTHER; note = 2'-O-methyl modified nucleotide
  modified_base 41: mod_base = OTHER; note = 2'-O-methyl modified nucleotide
  modified_base 42: mod_base = OTHER; note = 2'-O-methyl modified nucleotide
  modified_base 43: mod_base = OTHER; note = 2'-O-methyl modified nucleotide
  modified_base 44: mod_base = OTHER; note = 2'-O-methyl modified nucleotide
  modified_base 45: mod_base = OTHER; note = 2'-O-methyl modified nucleotide
  modified_base 46: mod_base = OTHER; note = 2'-O-methyl modified nucleotide
  modified_base 51: mod_base = OTHER; note = 2'-O-methyl modified nucleotide
  modified_base 54: mod_base = OTHER; note = 2'-O-methyl modified nucleotide
  modified_base 55: mod_base = OTHER; note = 2'-O-methyl modified nucleotide
  modified_base 56: mod_base = OTHER; note = 2'-O-methyl modified nucleotide
  modified_base 57: mod_base = OTHER; note = 2'-O-methyl modified nucleotide
  modified_base 62: mod_base = OTHER; note = 2'-O-methyl modified nucleotide
  modified_base 63: mod_base = OTHER; note = 2'-O-methyl modified nucleotide
  modified_base 65: mod_base = OTHER; note = 2'-O-methyl modified nucleotide
  modified_base 66: mod_base = OTHER; note = 2'-O-methyl modified nucleotide
  modified_base 67: mod_base = OTHER; note = 2'-O-methyl modified nucleotide
  modified_base 68: mod_base = OTHER; note = 2'-O-methyl modified nucleotide
  modified_base 70: mod_base = OTHER; note = 2'-O-methyl modified nucleotide
  modified_base 72: mod_base = OTHER; note = 2'-O-methyl modified nucleotide
  modified_base 73: mod_base = OTHER; note = 2'-O-methyl modified nucleotide
  modified_base 74: mod_base = OTHER; note = nucleotide with phosphorothioate linkage
  modified_base 75: mod_base = OTHER; note = 2'-O-methyl modified nucleotide with phosphorothioate linkage
  modified_base 76: mod_base = OTHER; note = 2'-O-methyl modified nucleotide with phosphorothioate linkage
  modified_base 77: mod_base = OTHER; note = 2'-O-methyl modified nucleotide
gttgtagctccctgaaaccgttgctacaataaggccgtcgaaagatgtgccgcaacgctctgccttctggcatcgtt

SEQ ID NO: 907 - RNA, 101 nt, synthetic construct; identical to SEQ ID NO: 904
  source 1..101: mol_type = other RNA
  misc_difference 1: note = 2'-O-methyl modified adenosine, cytidine, guanosine, uridine, unknown or other nucleotide with phosphorothioate linkage
  misc_difference 2: note = 2'-O-methyl modified adenosine, cytidine, guanosine, uridine, unknown or other nucleotide with phosphorothioate linkage
  misc_difference 3: note = 2'-O-methyl modified adenosine, cytidine, guanosine, uridine, unknown or other nucleotide with phosphorothioate linkage
  misc_difference 4: note = 2'-O-methyl modified adenosine, cytidine, guanosine, uridine, unknown or other nucleotide
  misc_difference 5: note = 2'-O-methyl modified adenosine, cytidine, guanosine, uridine, unknown or other nucleotide
  misc_difference 6: note = a, c, g, u, unknown or other
  misc_difference 7: note = a, c, g, u, unknown or other
  misc_difference 8: note = 2'-O-methyl modified adenosine, cytidine, guanosine, uridine, unknown or other nucleotide
  misc_difference 9: note = 2'-O-methyl modified adenosine, cytidine, guanosine, uridine, unknown or other nucleotide
  misc_difference 10: note = a, c, g, u, unknown or other
  misc_difference 11: note = 2'-O-methyl modified adenosine, cytidine, guanosine, uridine, unknown or other nucleotide
  misc_difference 12: note = a, c, g, u, unknown or other
  misc_difference 13: note = 2'-O-methyl modified adenosine, cytidine, guanosine, uridine, unknown or other nucleotide
  misc_difference 14: note = a, c, g, u, unknown or other
  misc_difference 15: note = a, c, g, u, unknown or other
  misc_difference 16: note = a, c, g, u, unknown or other
  misc_difference 17: note = a, c, g, u, unknown or other
  misc_difference 18: note = 2'-O-methyl modified adenosine, cytidine, guanosine, uridine, unknown or other nucleotide
  misc_difference 19: note = a, c, g, u, unknown or other
  misc_difference 20: note = a, c, g, u, unknown or other
  misc_difference 21: note = a, c, g, u, unknown or other
  misc_difference 22: note = 2'-O-methyl modified adenosine, cytidine, guanosine, uridine, unknown or other nucleotide
  misc_difference 23: note = a, c, g, u, unknown or other
  misc_difference 24: note = a, c, g, u, unknown or other
  modified_base 25: mod_base = OTHER; note = 2'-O-methyl modified nucleotide
  modified_base 29: mod_base = OTHER; note = 2'-O-methyl modified nucleotide
  modified_base 30: mod_base = OTHER; note = 2'-O-methyl modified nucleotide
  modified_base 31: mod_base = OTHER; note = 2'-O-methyl modified nucleotide
  modified_base 32: mod_base = OTHER; note = 2'-O-methyl modified nucleotide
  modified_base 37: mod_base = OTHER; note = 2'-O-methyl modified nucleotide
  modified_base 38: mod_base = OTHER; note = 2'-O-methyl modified nucleotide
  modified_base 39: mod_base = OTHER; note = 2'-O-methyl modified nucleotide
  modified_base 40: mod_base = OTHER; note = 2'-O-methyl modified nucleotide
  modified_base 41: mod_base = OTHER; note = 2'-O-methyl modified nucleotide
  modified_base 42: mod_base = OTHER; note = 2'-O-methyl modified nucleotide
  modified_base 43: mod_base = OTHER; note = 2'-O-methyl modified nucleotide
  modified_base 47: mod_base = OTHER; note = 2'-O-methyl modified nucleotide
  modified_base 48: mod_base = OTHER; note = 2'-O-methyl modified nucleotide
  modified_base 51: mod_base = OTHER; note = 2'-O-methyl modified nucleotide
  modified_base 54: mod_base = OTHER; note = nucleotide with phosphorothioate linkage
  modified_base 58: mod_base = OTHER; note = 2'-O-methyl modified nucleotide
  modified_base 59: mod_base = OTHER; note = 2'-O-methyl modified nucleotide
  modified_base 61: mod_base = OTHER; note = 2'-O-methyl modified nucleotide
  modified_base 62: mod_base = OTHER; note = 2'-O-methyl modified nucleotide
  modified_base 63: mod_base = OTHER; note = 2'-O-methyl modified nucleotide
  modified_base 64: mod_base = OTHER; note = 2'-O-methyl modified nucleotide
  modified_base 65: mod_base = OTHER; note = 2'-O-methyl modified nucleotide
  modified_base 66: mod_base = OTHER; note = 2'-O-methyl modified nucleotide
  modified_base 67: mod_base = OTHER; note = 2'-O-methyl modified nucleotide
  modified_base 68: mod_base = OTHER; note = 2'-O-methyl modified nucleotide
  modified_base 69: mod_base = OTHER; note = 2'-O-methyl modified nucleotide
  modified_base 70: mod_base = OTHER; note = 2'-O-methyl modified nucleotide
  modified_base 75: mod_base = OTHER; note = 2'-O-methyl modified nucleotide
  modified_base 77: mod_base = OTHER; note = 2'-O-methyl modified nucleotide
  modified_base 80: mod_base = OTHER; note = 2'-O-methyl modified nucleotide
  modified_base 86: mod_base = OTHER; note = 2'-O-methyl modified nucleotide
  modified_base 87: mod_base = OTHER; note = 2'-O-methyl modified nucleotide
  modified_base 89: mod_base = OTHER; note = 2'-O-methyl modified nucleotide
  modified_base 90: mod_base = OTHER; note = 2'-O-methyl modified nucleotide
  modified_base 91: mod_base = OTHER; note = 2'-O-methyl modified nucleotide
  modified_base 92: mod_base = OTHER; note = 2'-O-methyl modified nucleotide
  modified_base 99: mod_base = OTHER; note = nucleotide with phosphorothioate linkage
  modified_base 100: mod_base = OTHER; note = 2'-O-methyl modified nucleotide with phosphorothioate linkage
  modified_base 101: mod_base = OTHER; note = 2'-O-methyl modified nucleotide

SEQ ID NO: 908 - RNA, 102 nt, synthetic construct; identical to SEQ ID NO: 901
  source 1..102: mol_type = other RNA
  misc_difference 1: note = a, c, g, u, unknown or other
  misc_difference 2: note = a, c, g, u, unknown or other
  misc_difference 3: note = a, c, g, u, unknown or other
  misc_difference 4: note = a, c, g, u, unknown or other
  misc_difference 5: note = a, c, g, u, unknown or other
  misc_difference 6: note = a, c, g, u, unknown or other
  misc_difference 7: note = a, c, g, u, unknown or other
  misc_difference 8: note = a, c, g, u, unknown or other
  misc_difference 9: note = a, c, g, u, unknown or other
  misc_difference 10: note = a, c, g, u, unknown or other
  misc_difference 11: note = a, c, g, u, unknown or other
  misc_difference 12: note = a, c, g, u, unknown or other
  misc_difference 13: note = a, c, g, u, unknown or other
  misc_difference 14: note = a, c, g, u, unknown or other
  misc_difference 15: note = a, c, g, u, unknown or other
  misc_difference 16: note = a, c, g, u, unknown or other
  misc_difference 17: note = a, c, g, u, unknown or other
  misc_difference 18: note = a, c, g, u, unknown or other
  misc_difference 19: note = a, c, g, u, unknown or other
  misc_difference 20: note = a, c, g, u, unknown or other
  misc_difference 21: note = a, c, g, u, unknown or other
  misc_difference 22: note = a, c, g, u, unknown or other
  misc_difference 23: note = a, c, g, u, unknown or other
  misc_difference 24: note = a, c, g, u, unknown or other
  misc_difference 25: note = a, c, g, u, unknown or other
  modified_base 30: mod_base = OTHER; note = 2'-O-methyl modified nucleotide
  modified_base 31: mod_base = OTHER; note = 2'-O-methyl modified nucleotide
  modified_base 32: mod_base = OTHER; note = 2'-O-methyl modified nucleotide
  modified_base 33: mod_base = OTHER; note = 2'-O-methyl modified nucleotide
  modified_base 38: mod_base = OTHER; note = 2'-O-methyl modified nucleotide
  modified_base 39: mod_base = OTHER; note = 2'-O-methyl modified nucleotide
  modified_base 40: mod_base = OTHER; note = 2'-O-methyl modified nucleotide
  modified_base 41: mod_base = OTHER; note = 2'-O-methyl modified nucleotide
  modified_base 42: mod_base = OTHER; note = 2'-O-methyl modified nucleotide
  modified_base 43: mod_base = OTHER; note = 2'-O-methyl modified nucleotide
  modified_base 44: mod_base = OTHER; note = 2'-O-methyl modified nucleotide
  modified_base 48: mod_base = OTHER; note = 2'-O-methyl modified nucleotide
  modified_base 49: mod_base = OTHER; note = 2'-O-methyl modified nucleotide
  modified_base 52: mod_base = OTHER; note = 2'-O-methyl modified nucleotide
  modified_base 55: mod_base = OTHER; note = nucleotide with phosphorothioate linkage
  modified_base 59: mod_base = OTHER; note = 2'-O-methyl modified nucleotide
  modified_base 60: mod_base = OTHER; note = 2'-O-methyl modified nucleotide
  modified_base 62: mod_base = OTHER; note = 2'-O-methyl modified nucleotide
  modified_base 63: mod_base = OTHER; note = 2'-O-methyl modified nucleotide
  modified_base 64: mod_base = OTHER; note = 2'-O-methyl modified nucleotide
  modified_base 65: mod_base = OTHER; note = 2'-O-methyl modified nucleotide
  modified_base 66: mod_base = OTHER; note = 2'-O-methyl modified nucleotide
  modified_base 67: mod_base = OTHER; note = 2'-O-methyl modified nucleotide
  modified_base 68: mod_base = OTHER; note = 2'-O-methyl modified nucleotide
  modified_base 69: mod_base = OTHER; note = 2'-O-methyl modified nucleotide
  modified_base 70: mod_base = OTHER; note = 2'-O-methyl modified nucleotide
  modified_base 71: mod_base = OTHER; note = 2'-O-methyl modified nucleotide
  modified_base 76: mod_base = OTHER; note = 2'-O-methyl modified nucleotide
  modified_base 78: mod_base = OTHER; note = 2'-O-methyl modified nucleotide
  modified_base 81: mod_base = OTHER; note = 2'-O-methyl modified nucleotide
  modified_base 87: mod_base = OTHER; note = 2'-O-methyl modified nucleotide
  modified_base 88: mod_base = OTHER; note = 2'-O-methyl modified nucleotide
  modified_base 90: mod_base = OTHER; note = 2'-O-methyl modified nucleotide
  modified_base 91: mod_base = OTHER; note = 2'-O-methyl modified nucleotide
  modified_base 92: mod_base = OTHER; note = 2'-O-methyl modified nucleotide
  modified_base 93: mod_base = OTHER; note = 2'-O-methyl modified nucleotide
  modified_base 100: mod_base = OTHER; note = nucleotide with phosphorothioate linkage
  modified_base 101: mod_base = OTHER; note = 2'-O-methyl modified nucleotide with phosphorothioate linkage
  modified_base 102: mod_base = OTHER; note = 2'-O-methyl modified nucleotide
  misc_difference 1..25: note = This region may encompass 20-25 nucleotides

SEQ ID NO: 909 - RNA, 77 nt, synthetic construct; identical to SEQ ID NO: 906
  source 1..77: mol_type = other RNA
  modified_base 5: mod_base = OTHER; note = 2'-O-methyl modified nucleotide
  modified_base 6: mod_base = OTHER; note = 2'-O-methyl modified nucleotide
  modified_base 7: mod_base = OTHER; note = 2'-O-methyl modified nucleotide
  modified_base 8: mod_base = OTHER; note = 2'-O-methyl modified nucleotide
  modified_base 13: mod_base = OTHER; note = 2'-O-methyl modified nucleotide
  modified_base 14: mod_base = OTHER; note = 2'-O-methyl modified nucleotide
  modified_base 15: mod_base = OTHER; note = 2'-O-methyl modified nucleotide
  modified_base 16: mod_base = OTHER; note = 2'-O-methyl modified nucleotide
  modified_base 17: mod_base = OTHER; note = 2'-O-methyl modified nucleotide
  modified_base 18: mod_base = OTHER; note = 2'-O-methyl modified nucleotide
  modified_base 19: mod_base = OTHER; note = 2'-O-methyl modified nucleotide
  modified_base 23: mod_base = OTHER; note = 2'-O-methyl modified nucleotide
  modified_base 24: mod_base = OTHER; note = 2'-O-methyl modified nucleotide
  modified_base 27: mod_base = OTHER; note = 2'-O-methyl modified nucleotide
  modified_base 30: mod_base = OTHER; note = nucleotide with phosphorothioate linkage
  modified_base 34: mod_base = OTHER; note = 2'-O-methyl modified nucleotide
  modified_base 35: mod_base = OTHER; note = 2'-O-methyl modified nucleotide
  modified_base 37: mod_base = OTHER; note = 2'-O-methyl modified nucleotide
  modified_base 38: mod_base = OTHER; note = 2'-O-methyl modified nucleotide
  modified_base 39: mod_base = OTHER; note = 2'-O-methyl modified nucleotide
  modified_base 40: mod_base = OTHER; note = 2'-O-methyl modified nucleotide
  modified_base 41: mod_base = OTHER; note = 2'-O-methyl modified nucleotide
  modified_base 42: mod_base = OTHER; note = 2'-O-methyl modified nucleotide
  modified_base 43: mod_base = OTHER; note = 2'-O-methyl modified nucleotide
  modified_base 44: mod_base = OTHER; note = 2'-O-methyl modified nucleotide
  modified_base 45: mod_base = OTHER; note = 2'-O-methyl modified nucleotide
  modified_base 46: mod_base = OTHER; note = 2'-O-methyl modified nucleotide
  modified_base 51: mod_base = OTHER; note = 2'-O-methyl modified nucleotide
  modified_base 53: mod_base = OTHER; note = 2'-O-methyl modified nucleotide
  modified_base 56: mod_base = OTHER; note = 2'-O-methyl modified nucleotide
  modified_base 62: mod_base = OTHER; note = 2'-O-methyl modified nucleotide
  modified_base 63: mod_base = OTHER; note = 2'-O-methyl modified nucleotide
  modified_base 65: mod_base = OTHER; note = 2'-O-methyl modified nucleotide
  modified_base 66: mod_base = OTHER; note = 2'-O-methyl modified nucleotide
  modified_base 67: mod_base = OTHER; note = 2'-O-methyl modified nucleotide
  modified_base 68: mod_base = OTHER; note = 2'-O-methyl modified nucleotide
  modified_base 75: mod_base = OTHER; note = nucleotide with phosphorothioate linkage
  modified_base 76: mod_base = OTHER; note = 2'-O-methyl modified nucleotide with phosphorothioate linkage
  modified_base 77: mod_base = OTHER; note = 2'-O-methyl modified nucleotide

SEQ ID NO: 910 - RNA, 106 nt, synthetic construct
  source 1..106: mol_type = other RNA
  misc_difference 1: note = a, c, g, u, unknown or other
  misc_difference 2: note = a, c, g, u, unknown or other
  misc_difference 3: note = a, c, g, u, unknown or other
  misc_difference 4: note = a, c, g, u, unknown or other
  misc_difference 5: note = a, c, g, u, unknown or other
  misc_difference 6: note = a, c, g, u, unknown or other
  misc_difference 7: note = a, c, g, u, unknown or other
  misc_difference 8: note = a, c, g, u, unknown or other
  misc_difference 9: note = a, c, g, u, unknown or other
  misc_difference 10: note = a, c, g, u, unknown or other
  misc_difference 11: note = a, c, g, u, unknown or other
  misc_difference 12: note = a, c, g, u, unknown or other
  misc_difference 13: note = a, c, g, u, unknown or other
  misc_difference 14: note = a, c, g, u, unknown or other
  misc_difference 15: note = a, c, g, u, unknown or other
  misc_difference 16: note = a, c, g, u, unknown or other
  misc_difference 17: note = a, c, g, u, unknown or other
  misc_difference 18: note = a, c, g, u, unknown or other
  misc_difference 19: note = a, c, g, u, unknown or other
  misc_difference 20: note = a, c, g, u, unknown or other
  misc_difference 21: note = a, c, g, u, unknown or other
  misc_difference 22: note = a, c, g, u, unknown or other
  misc_difference 23: note = a, c, g, u, unknown or other
  misc_difference 24: note = a, c, g, u, unknown or other
  misc_difference 25: note = a, c, g, u, unknown or other
  misc_difference 1..25: note = This region may encompass 20-25 nucleotides
nnnnnnnnnnnnnnnnnnnnnnnnngttgtagctcccttcgaaagaccgttgctacaataaggccgtcgaaagatgtgccgcaacgctctgccttctggcatcgtt

SEQ ID NO: 911 - RNA, 105 nt, synthetic construct
  source 1..105: mol_type = other RNA
  misc_difference 1: note = 2'-O-methyl modified adenosine, cytidine, guanosine, uridine, unknown or other nucleotide with phosphorothioate linkage
  misc_difference 2: note = 2'-O-methyl modified adenosine, cytidine, guanosine, uridine, unknown or other nucleotide with phosphorothioate linkage
  misc_difference 3: note = 2'-O-methyl modified adenosine, cytidine, guanosine, uridine, unknown or other nucleotide with phosphorothioate linkage
  misc_difference 4: note = 2'-O-methyl modified adenosine, cytidine, guanosine, uridine, unknown or other nucleotide
  misc_difference 5: note = 2'-O-methyl modified adenosine, cytidine, guanosine, uridine, unknown or other nucleotide
  misc_difference 6: note = a, c, g, u, unknown or other
  misc_difference 7: note = a, c, g, u, unknown or other
  misc_difference 8: note = 2'-O-methyl modified adenosine, cytidine, guanosine, uridine, unknown or other nucleotide
  misc_difference 9: note = 2'-O-methyl modified adenosine, cytidine, guanosine, uridine, unknown or other nucleotide
  misc_difference 10: note = a, c, g, u, unknown or other
  misc_difference 11: note = 2'-O-methyl modified adenosine, cytidine, guanosine, uridine, unknown or other nucleotide
  misc_difference 12: note = a, c, g, u, unknown or other
  misc_difference 13: note = 2'-O-methyl modified adenosine, cytidine, guanosine, uridine, unknown or other nucleotide
  misc_difference 14: note = a, c, g, u, unknown or other
  misc_difference 15: note = a, c, g, u, unknown or other
  misc_difference 16: note = a, c, g, u, unknown or other
  misc_difference 17: note = a, c, g, u, unknown or other
  misc_difference 18: note = 2'-O-methyl modified adenosine, cytidine, guanosine, uridine, unknown or other nucleotide
  misc_difference 19: note = a, c, g, u, unknown or other
  misc_difference 20: note = a, c, g, u, unknown or other
  misc_difference 21: note = a, c, g, u, unknown or other
  misc_difference 22: note = 2'-O-methyl modified adenosine, cytidine, guanosine, uridine, unknown or other nucleotide
  misc_difference 23: note = a, c, g, u, unknown or other
  misc_difference 24: note = a, c, g, u, unknown or other
  modified_base 25: mod_base = OTHER; note = 2'-O-methyl modified nucleotide
  modified_base 29: mod_base = OTHER; note = 2'-O-methyl modified nucleotide
  modified_base 30: mod_base = OTHER; note = 2'-O-methyl modified nucleotide
  modified_base 31: mod_base = OTHER; note = 2'-O-methyl modified nucleotide
  modified_base 32: mod_base = OTHER; note = 2'-O-methyl modified nucleotide
  modified_base 37: mod_base = OTHER; note = 2'-O-methyl modified nucleotide
  modified_base 38: mod_base = OTHER; note = 2'-O-methyl modified nucleotide
  modified_base 39: mod_base = OTHER; note = 2'-O-methyl modified nucleotide
  modified_base 40: mod_base = OTHER; note = 2'-O-methyl modified nucleotide
  modified_base 41: mod_base = OTHER; note = 2'-O-methyl modified nucleotide
  modified_base 42: mod_base = OTHER; note = 2'-O-methyl modified nucleotide
  modified_base 43: mod_base = OTHER; note = 2'-O-methyl modified nucleotide
  modified_base 44: mod_base = OTHER; note = 2'-O-methyl modified nucleotide
  modified_base 45: mod_base = OTHER; note = 2'-O-methyl modified nucleotide
  modified_base 46: mod_base = OTHER; note = 2'-O-methyl modified nucleotide
  modified_base 47: mod_base = OTHER; note = 2'-O-methyl modified nucleotide
  modified_base 51: mod_base = OTHER; note = 2'-O-methyl modified nucleotide
  modified_base 52: mod_base = OTHER; note = 2'-O-methyl modified nucleotide
  modified_base 55: mod_base = OTHER; note = 2'-O-methyl modified nucleotide
  modified_base 58: mod_base = OTHER; note = nucleotide with phosphorothioate linkage
  modified_base 62: mod_base = OTHER; note = 2'-O-methyl modified nucleotide
  modified_base 63: mod_base = OTHER; note = 2'-O-methyl modified nucleotide
  modified_base 65: mod_base = OTHER; note = 2'-O-methyl modified nucleotide
  modified_base 66: mod_base = OTHER; note = 2'-O-methyl modified nucleotide
  modified_base 67: mod_base = OTHER; note = 2'-O-methyl modified nucleotide
  modified_base 68: mod_base = OTHER; note = 2'-O-methyl modified nucleotide
  modified_base 69: mod_base = OTHER; note = 2'-O-methyl modified nucleotide
  modified_base 70: mod_base = OTHER; note = 2'-O-methyl modified nucleotide
  modified_base 71: mod_base = OTHER; note = 2'-O-methyl modified nucleotide
  modified_base 72: mod_base = OTHER; note = 2'-O-methyl modified nucleotide
  modified_base 73: mod_base = OTHER; note = 2'-O-methyl modified nucleotide
  modified_base 74: mod_base = OTHER; note = 2'-O-methyl modified nucleotide
  modified_base 79: mod_base = OTHER; note = 2'-O-methyl modified nucleotide
  modified_base 81: mod_base = OTHER; note = 2'-O-methyl modified nucleotide
  modified_base 84: mod_base = OTHER; note = 2'-O-methyl modified nucleotide
  modified_base 90: mod_base = OTHER; note = 2'-O-methyl modified nucleotide
  modified_base 91: mod_base = OTHER; note = 2'-O-methyl modified nucleotide
  modified_base 93: mod_base = OTHER; note = 2'-O-methyl modified nucleotide
  modified_base 94: mod_base = OTHER; note = 2'-O-methyl modified nucleotide
  modified_base 95: mod_base = OTHER; note = 2'-O-methyl modified nucleotide
  modified_base 96: mod_base = OTHER; note = 2'-O-methyl modified nucleotide
  modified_base 103: mod_base = OTHER; note = nucleotide with phosphorothioate linkage
  modified_base 104: mod_base = OTHER; note = 2'-O-methyl modified nucleotide with phosphorothioate linkage
  modified_base 105: mod_base = OTHER; note = 2'-O-methyl modified nucleotide
nnnnnnnnnnnnnnnnnnnnnnnngttgtagctcccttcgaaagaccgttgctacaataaggccgtcgaaagatgtgccgcaacgctctgccttctggcatcgtt

SEQ ID NO: 912 - protein, 9 aa, synthetic construct
LAAKRSRTT

SEQ ID NO: 913 - protein, 9 aa, synthetic construct
QAAKRSRTT

SEQ ID NO: 914 - protein, 10 aa, synthetic construct
PAPAKRERTT

SEQ ID NO: 915 - protein, 9 aa, synthetic construct
QAAKRPRTT

SEQ ID NO: 916 - protein, 9 aa, synthetic construct
RAAKRPRTT

SEQ ID NO: 917 - protein, 11 aa, synthetic construct
AAAKRSWSMAA

SEQ ID NO: 918 - protein, 11 aa, synthetic construct
AAAKRVWSMAF

SEQ ID NO: 919 - protein, 11 aa, synthetic construct
AAAKRSWSMAF

SEQ ID NO: 920 - protein, 10 aa, synthetic construct
AAAKRKYFAA

SEQ ID NO: 921 - protein, 10 aa, synthetic construct
RAAKRKAFAA

SEQ ID NO: 922 - protein, 10 aa, synthetic construct
RAAKRKYFAV

SEQ ID NO: 923 - protein, 7 aa, synthetic construct
PKKKRRV

SEQ ID NO: 924 - protein, 16 aa, synthetic construct
KRPAATKKAGQAKKKK

SEQ ID NO: 925-929 - skipped (5 entries)

SEQ ID NO: 930 - protein, 16 aa, synthetic construct
SGSETPGTSESATPES

SEQ ID NO: 931 - protein, 12 aa, synthetic construct
SGSETPGTSESA

SEQ ID NO: 932 - protein, 21 aa, synthetic construct
SGSETPGTSESATPEGGSGGS

SEQ ID NO: 933 - skipped

SEQ ID NO: 934 - protein, 5 aa, synthetic construct
GGGGS

SEQ ID NO: 935 - protein, 5 aa, synthetic construct
EAAAK

SEQ ID NO: 936 - protein, 5 aa, synthetic construct
SEGSA

SEQ ID NO: 937 - protein, 9 aa, synthetic construct
SEGSAGTST

SEQ ID NO: 938 - protein, 10 aa, synthetic construct
GGGGSGGGGS

SEQ ID NO: 939 - protein, 10 aa, synthetic construct
GGGGSEAAAK

SEQ ID NO: 940 - protein, 10 aa, synthetic construct
EAAAKGGGGS

SEQ ID NO: 941 - protein, 10 aa, synthetic construct
EAAAKEAAAK

SEQ ID NO: 942 - protein, 15 aa, synthetic construct
SEGSAGTSTESEGSA

SEQ ID NO: 943 - protein, 15 aa, synthetic construct
GGGGSGGGGSGGGGS

SEQ ID NO: 944 - protein, 15 aa, synthetic construct
GGGGSGGGGSEAAAK

SEQ ID NO: 945 - protein, 15 aa, synthetic construct
GGGGSEAAAKGGGGS

SEQ ID NO: 946 - protein, 15 aa, synthetic construct
EAAAKGGGGSEAAAK

SEQ ID NO: 947 - protein, 15 aa, synthetic construct
EAAAKEAAAKGGGGS

SEQ ID NO: 948 - protein, 20 aa, synthetic construct
SEGSAGTSTESEGSAGTSTE

SEQ ID NO: 949 - protein, 20 aa, synthetic construct
GGGGSGGGGSGGGGSEAAAK

SEQ ID NO: 950 - protein, 20 aa, synthetic construct
GGGGSGGGGSEAAAKGGGGS

SEQ ID NO: 951 - protein, 20 aa, synthetic construct
GGGGSEAAAKGGGGSEAAAK

SEQ ID NO: 952 - protein, 20 aa, synthetic construct
GGGGSEAAAKEAAAKGGGGS

SEQ ID NO: 953 - protein, 20 aa, synthetic construct
GGGGSEAAAKEAAAKEAAAK

SEQ ID NO: 954 - protein, 20 aa, synthetic construct
EAAAKGGGGSGGGGSGGGGS

SEQ ID NO: 955 - protein, 20 aa, synthetic construct
EAAAKGGGGSGGGGSEAAAK

SEQ ID NO: 956 - protein, 20 aa, synthetic construct
EAAAKGGGGSEAAAKGGGGS

SEQ ID NO: 957 - protein, 20 aa, synthetic construct
EAAAKGGGGSEAAAKEAAAK

SEQ ID NO: 958 - protein, 20 aa, synthetic construct
EAAAKEAAAKGGGGSGGGGS

SEQ ID NO: 959 - protein, 20 aa, synthetic construct
EAAAKEAAAKGGGGSEAAAK

SEQ ID NO: 960 - protein, 20 aa, synthetic construct
EAAAKEAAAKEAAAKGGGGS

SEQ ID NO: 961 - protein, 25 aa, synthetic construct
SEGSAGTSTESEGSAGTSTESEGSA

SEQ ID NO: 962 - protein, 25 aa, synthetic construct
GGGGSGGGGSGGGGSGGGGSGGGGS

SEQ ID NO: 963 - protein, 25 aa, synthetic construct
GGGGSGGGGSGGGGSGGGGSEAAAK

SEQ ID NO: 964 - protein, 25 aa, synthetic construct
GGGGSGGGGSGGGGSEAAAKGGGGS

SEQ ID NO: 965 - protein, 25 aa, synthetic construct
GGGGSGGGGSGGGGSEAAAKEAAAK

SEQ ID NO: 966 - protein, 25 aa, synthetic construct
GGGGSGGGGSEAAAKGGGGSGGGGS

SEQ ID NO: 967 - protein, 25 aa, synthetic construct
GGGGSGGGGSEAAAKGGGGSEAAAK

SEQ ID NO: 968 - protein, 25 aa, synthetic construct
GGGGSGGGGSEAAAKEAAAKGGGGS

SEQ ID NO: 969 - protein, 25 aa, synthetic construct
GGGGSGGGGSEAAAKEAAAKEAAAK

SEQ ID NO: 970 - protein, 25 aa, synthetic construct
GGGGSEAAAKGGGGSGGGGSGGGGS

SEQ ID NO: 971 - protein, 25 aa, synthetic construct
GGGGSEAAAKGGGGSGGGGSEAAAK

SEQ ID NO: 972 - protein, 25 aa, synthetic construct
GGGGSEAAAKGGGGSEAAAKGGGGS

SEQ ID NO: 973 - protein, 25 aa, synthetic construct
GGGGSEAAAKGGGGSEAAAKEAAAK

SEQ ID NO: 974 - protein, 25 aa, synthetic construct
GGGGSEAAAKEAAAKGGGGSGGGGS

SEQ ID NO: 975 - protein, 25 aa, synthetic construct
GGGGSEAAAKEAAAKEAAAKGGGGS

SEQ ID NO: 976 - protein, 25 aa, synthetic construct
GGGGSEAAAKEAAAKEAAAKEAAAK

SEQ ID NO: 977 - protein, 25 aa, synthetic construct
EAAAKGGGGSGGGGSGGGGSGGGGS

SEQ ID NO: 978 - protein, 25 aa, synthetic construct
EAAAKGGGGSGGGGSGGGGSEAAAK

SEQ ID NO: 979 - protein, 25 aa, synthetic construct
EAAAKGGGGSGGGGSEAAAKGGGGS

SEQ ID NO: 980 - protein, 25 aa, synthetic construct
EAAAKGGGGSGGGGSEAAAKEAAAK

SEQ ID NO: 981 - protein, 25 aa, synthetic construct
EAAAKGGGGSEAAAKGGGGSGGGGS

SEQ ID NO: 982 - protein, 25 aa, synthetic construct
EAAAKGGGGSEAAAKGGGGSEAAAK

SEQ ID NO: 983 - protein, 25 aa, synthetic construct
EAAAKGGGGSEAAAKEAAAKGGGGS

SEQ ID NO: 984 - protein, 25 aa, synthetic construct
EAAAKGGGGSEAAAKEAAAKEAAAK

SEQ ID NO: 985 - protein, 25 aa, synthetic construct
EAAAKEAAAKGGGGSEAAAKGGGGS

SEQ ID NO: 986 - protein, 25 aa, synthetic construct
EAAAKEAAAKGGGGSEAAAKEAAAK

SEQ ID NO: 987 - protein, 25 aa, synthetic construct
EAAAKEAAAKEAAAKGGGGSEAAAK

SEQ ID NO: 988 - protein, 25 aa, synthetic construct
EAAAKEAAAKEAAAKEAAAKGGGGS

SEQ ID NO: 989 - protein, 25 aa, synthetic construct
EAAAKEAAAKEAAAKEAAAKEAAAK

SEQ ID NO: 990 - protein, 16 aa, synthetic construct
GTKDSTKDIPETPSKD

SEQ ID NO: 991 - protein, 16 aa, synthetic construct
GRDVRQPEVKEEKPES

SEQ ID NO: 992 - protein, 16 aa, synthetic construct
EGKSSGSGSESKSTAG

SEQ ID NO: 993 - protein, 16 aa, synthetic construct
TPGSPAGSPTSTEEGT

SEQ ID NO: 994 - protein, 16 aa, synthetic construct
GSEPATSGSETPGTST

SEQ ID NO: 995 - RNA, 101 nt, synthetic construct; identical to SEQ ID NO: 904
  source 1..101: mol_type = other RNA
  misc_difference 1: note = 2'-O-methyl modified adenosine, cytidine, guanosine, uridine, unknown or other nucleotide nucloetide with a phosphorothioate linkage
  misc_difference 2: note = 2'-O-methyl modified adenosine, cytidine, guanosine, uridine, unknown or other nucleotide nucloetide with a phosphorothioate linkage
  misc_difference 3: note = 2'-O-methyl modified adenosine, cytidine, guanosine, uridine, unknown or other nucleotide nucloetide with a phosphorothioate linkage
  misc_difference 4: note = 2'-O-methyl modified adenosine, cytidine, guanosine, uridine, unknown or other nucleotide nucloetide
  misc_difference 5: note = 2'-O-methyl modified adenosine, cytidine, guanosine, uridine, unknown or other nucleotide nucloetide
  misc_difference 6: note = a, c, u, g, unknown or other
  misc_difference 7: note = a, c, u, g, unknown or other
  misc_difference 8: note = 2'-O-methyl modified adenosine, cytidine, guanosine, uridine, unknown or other nucleotide nucloetide
  misc_difference 9: note = 2'-O-methyl modified adenosine, cytidine, guanosine, uridine, unknown or other nucleotide nucloetide
  misc_difference 10: note = a, c, u, g, unknown or other
  misc_difference 11: note = 2'-O-methyl modified adenosine, cytidine, guanosine, uridine, unknown or other nucleotide nucloetide
  misc_difference 12: note = a, c, u, g, unknown or other
  misc_difference 13: note = 2'-O-methyl modified adenosine, cytidine, guanosine, uridine, unknown or other nucleotide nucloetide
  misc_difference 14: note = a, c, u, g, unknown or other
  misc_difference 15: note = a, c, u, g, unknown or other
  misc_difference 16: note = a, c, u, g, unknown or other
  misc_difference 17: note = a, c, u, g, unknown or other
  misc_difference 18: note = 2'-O-methyl modified adenosine, cytidine, guanosine, uridine, unknown or other nucleotide nucloetide
  misc_difference 19: note = a, c, u, g, unknown or other
  misc_difference 20: note = a, c, u, g, unknown or other
  misc_difference 21: note = a, c, u, g, unknown or other
  misc_difference 22: note = 2'-O-methyl modified adenosine, cytidine, guanosine, uridine, unknown or other nucleotide nucloetide
  misc_difference 23: note = a, c, u, g, unknown or other
  misc_difference 24: note = a, c, u, g, unknown or other
  modified_base 25: mod_base = OTHER; note = 2'-O-methyl modified nucleotide
  modified_base 29: mod_base = OTHER; note = 2'-O-methyl modified nucleotide
  modified_base 30: mod_base = OTHER; note = 2'-O-methyl modified nucleotide
  modified_base 31: mod_base = OTHER; note = 2'-O-methyl modified nucleotide
  modified_base 32: mod_base = OTHER; note = 2'-O-methyl modified nucleotide
  modified_base 37: mod_base = OTHER; note = 2'-O-methyl modified nucleotide
  modified_base 38: mod_base = OTHER; note = 2'-O-methyl modified nucleotide
  modified_base 39: mod_base = OTHER; note = 2'-O-methyl modified nucleotide
  modified_base 40: mod_base = OTHER; note = 2'-O-methyl modified nucleotide
  modified_base 41: mod_base = OTHER; note = 2'-O-methyl modified nucleotide
  modified_base 42: mod_base = OTHER; note = 2'-O-methyl modified nucleotide
  modified_base 43: mod_base = OTHER; note = 2'-O-methyl modified nucleotide
  modified_base 47: mod_base = OTHER; note = 2'-O-methyl modified nucleotide
  modified_base 48: mod_base = OTHER; note = 2'-O-methyl modified nucleotide
  modified_base 51: mod_base = OTHER; note = 2'-O-methyl modified nucleotide
  modified_base 58: mod_base = OTHER; note = 2'-O-methyl modified nucleotide
  modified_base 59: mod_base = OTHER; note = 2'-O-methyl modified nucleotide
  modified_base 61: mod_base = OTHER; note = 2'-O-methyl modified nucleotide
  modified_base 62: mod_base = OTHER; note = 2'-O-methyl modified nucleotide
  modified_base 63: mod_base = OTHER; note = 2'-O-methyl modified nucleotide
  modified_base 64: mod_base = OTHER; note = 2'-O-methyl modified nucleotide
  modified_base 65: mod_base = OTHER; note = 2'-O-methyl modified nucleotide
  modified_base 66: mod_base = OTHER; note = 2'-O-methyl modified nucleotide
  modified_base 67: mod_base = OTHER; note = 2'-O-methyl modified nucleotide
  modified_base 68: mod_base = OTHER; note = 2'-O-methyl modified nucleotide
  modified_base 69: mod_base = OTHER; note = 2'-O-methyl modified nucleotide
  modified_base 70: mod_base = OTHER; note = 2'-O-methyl modified nucleotide
  modified_base 75: mod_base = OTHER; note = 2'-O-methyl modified nucleotide
  modified_base 77: mod_base = OTHER; note = 2'-O-methyl modified nucleotide
  modified_base 80: mod_base = OTHER; note = 2'-O-methyl modified nucleotide
  modified_base 86: mod_base = OTHER; note = 2'-O-methyl modified nucleotide
  modified_base 87: mod_base = OTHER; note = 2'-O-methyl modified nucleotide
  modified_base 89: mod_base = OTHER; note = 2'-O-methyl modified nucleotide
  modified_base 90: mod_base = OTHER; note = 2'-O-methyl modified nucleotide
  modified_base 91: mod_base = OTHER; note = 2'-O-methyl modified nucleotide
  modified_base 92: mod_base = OTHER; note = 2'-O-methyl modified nucleotide
  modified_base 99: mod_base = OTHER; note = nucleotide with a phosphorothioate linkage
  modified_base 100: mod_base = OTHER; note = 2'-O-methyl modified nucleotide with a phosphorothioate linkage
  modified_base 101: mod_base = OTHER; note = 2'-O-methyl modified nucleotide

SEQ ID NO: 996 - RNA, 101 nt, synthetic construct; identical to SEQ ID NO: 904
  source 1..101: mol_type = other RNA
  misc_difference 1: note = 2'-O-methyl modified adenosine, cytidine, guanosine, uridine, unknown or other nucleotide nucloetide with a phosphorothioate linkage
  misc_difference 2: note = 2'-O-methyl modified adenosine, cytidine, guanosine, uridine, unknown or other nucleotide nucloetide with a phosphorothioate linkage
  misc_difference 3: note = 2'-O-methyl modified adenosine, cytidine, guanosine, uridine, unknown or other nucleotide nucloetide with a phosphorothioate linkage
  misc_difference 4: note = 2'-O-methyl modified adenosine, cytidine, guanosine, uridine, unknown or other nucleotide nucloetide
  misc_difference 5: note = 2'-O-methyl modified adenosine, cytidine, guanosine, uridine, unknown or other nucleotide nucloetide
  misc_difference 6: note = a, c, u, g, unknown or other
  misc_difference 7: note = a, c, u, g, unknown or other
  misc_difference 8: note = 2'-O-methyl modified adenosine, cytidine, guanosine, uridine, unknown or other nucleotide nucloetide
  misc_difference 9: note = 2'-O-methyl modified adenosine, cytidine, guanosine, uridine, unknown or other nucleotide nucloetide
  misc_difference 10: note = a, c, u, g, unknown or other
  misc_difference 11: note = 2'-O-methyl modified adenosine, cytidine, guanosine, uridine, unknown or other nucleotide nucloetide
  misc_difference 12: note = a, c, u, g, unknown or other
  misc_difference 13: note = 2'-O-methyl modified adenosine, cytidine, guanosine, uridine, unknown or other nucleotide nucloetide
  misc_difference 14: note = a, c, u, g, unknown or other
  misc_difference 15: note = a, c, u, g, unknown or other
  misc_difference 16: note = a, c, u, g, unknown or other
  misc_difference 17: note = a, c, u, g, unknown or other
  misc_difference 18: note = 2'-O-methyl modified adenosine, cytidine, guanosine, uridine, unknown or other nucleotide nucloetide
  misc_difference 19: note = a, c, u, g, unknown or other
  misc_difference 20: note = a, c, u, g, unknown or other
  misc_difference 21: note = a, c, u, g, unknown or other
  misc_difference 22: note = 2'-O-methyl modified adenosine, cytidine, guanosine, uridine, unknown or other nucleotide nucloetide
  misc_difference 23: note = a, c, u, g, unknown or other
  misc_difference 24: note = a, c, u, g, unknown or other
  modified_base 25: mod_base = OTHER; note = 2'-O-methyl modified nucleotide
  modified_base 29: mod_base = OTHER; note = 2'-O-methyl modified nucleotide
  modified_base 30: mod_base = OTHER; note = 2'-O-methyl modified nucleotide
  modified_base 31: mod_base = OTHER; note = 2'-O-methyl modified nucleotide
  modified_base 32: mod_base = OTHER; note = 2'-O-methyl modified nucleotide
  modified_base 37: mod_base = OTHER; note = 2'-O-methyl modified nucleotide
  modified_base 38: mod_base = OTHER; note = 2'-O-methyl modified nucleotide
  modified_base 39: mod_base = OTHER; note = 2'-O-methyl modified nucleotide
  modified_base 40: mod_base = OTHER; note = 2'-O-methyl modified nucleotide
  modified_base 41: mod_base = OTHER; note = 2'-O-methyl modified nucleotide
  modified_base 42: mod_base = OTHER; note = 2'-O-methyl modified nucleotide
  modified_base 43: mod_base = OTHER; note = 2'-O-methyl modified nucleotide
  modified_base 47: mod_base = OTHER; note = 2'-O-methyl modified nucleotide
  modified_base 48: mod_base = OTHER; note = 2'-O-methyl modified nucleotide
  modified_base 51: mod_base = OTHER; note = 2'-O-methyl modified nucleotide
  modified_base 54: mod_base = OTHER; note = nucleotide with a phosphorothioate linkage
  modified_base 58: mod_base = OTHER; note = 2'-O-methyl modified nucleotide
  modified_base 59: mod_base = OTHER; note = 2'-O-methyl modified nucleotide
  modified_base 61: mod_base = OTHER; note = 2'-O-methyl modified nucleotide
  modified_base 62: mod_base = OTHER; note = 2'-O-methyl modified nucleotide
  modified_base 63: mod_base = OTHER; note = 2'-O-methyl modified nucleotide
  modified_base 64: mod_base = OTHER; note = 2'-O-methyl modified nucleotide
  modified_base 65: mod_base = OTHER; note = 2'-O-methyl modified nucleotide
  modified_base 66: mod_base = OTHER; note = 2'-O-methyl modified nucleotide
  modified_base 67: mod_base = OTHER; note = 2'-O-methyl modified nucleotide
  modified_base 68: mod_base = OTHER; note = 2'-O-methyl modified nucleotide
  modified_base 69: mod_base = OTHER; note = 2'-O-methyl modified nucleotide
  modified_base 70: mod_base = OTHER; note = 2'-O-methyl modified nucleotide
  modified_base 75: mod_base = OTHER; note = 2'-O-methyl modified nucleotide
  modified_base 77: mod_base = OTHER; note = 2'-O-methyl modified nucleotide
  modified_base 80: mod_base = OTHER; note = 2'-O-methyl modified nucleotide
  modified_base 82: mod_base = OTHER; note = 2'-O-methyl modified nucleotide
  modified_base 83: mod_base = OTHER; note = 2'-O-methyl modified nucleotide
  modified_base 84: mod_base = OTHER; note = 2'-O-methyl modified nucleotide
  modified_base 85: mod_base = OTHER; note = 2'-O-methyl modified nucleotide
  modified_base 86: mod_base = OTHER; note = 2'-O-methyl modified nucleotide
  modified_base 87: mod_base = OTHER; note = 2'-O-methyl modified nucleotide
  modified_base 89: mod_base = OTHER; note = 2'-O-methyl modified nucleotide
  modified_base 90: mod_base = OTHER; note = 2'-O-methyl modified nucleotide
  modified_base 91: mod_base = OTHER; note = 2'-O-methyl modified nucleotide
  modified_base 92: mod_base = OTHER; note = 2'-O-methyl modified nucleotide
  modified_base 99: mod_base = OTHER; note = nucleotide with a phosphorothioate linkage
  modified_base 100: mod_base = OTHER; note = 2'-O-methyl modified nucleotide with a phosphorothioate linkage
  modified_base 101: mod_base = OTHER; note = 2'-O-methyl modified nucleotide

SEQ ID NO: 997 - RNA, 101 nt, synthetic construct; identical to SEQ ID NO: 904
  source 1..101: mol_type = other RNA
  misc_difference 1: note = 2'-O-methyl modified adenosine, cytidine, guanosine, uridine, unknown or other nucleotide nucloetide with a phosphorothioate linkage
  misc_difference 2: note = 2'-O-methyl modified adenosine, cytidine, guanosine, uridine, unknown or other nucleotide nucloetide with a phosphorothioate linkage
  misc_difference 3: note = 2'-O-methyl modified adenosine, cytidine, guanosine, uridine, unknown or other nucleotide nucloetide with a phosphorothioate linkage
  misc_difference 4: note = 2'-O-methyl modified adenosine, cytidine, guanosine, uridine, unknown or other nucleotide nucloetide
  misc_difference 5: note = 2'-O-methyl modified adenosine, cytidine, guanosine, uridine, unknown or other nucleotide nucloetide
  misc_difference 6: note = a, c, u, g, unknown or other
  misc_difference 7: note = a, c, u, g, unknown or other
  misc_difference 8: note = 2'-O-methyl modified adenosine, cytidine, guanosine, uridine, unknown or other nucleotide nucloetide
  misc_difference 9: note = 2'-O-methyl modified adenosine, cytidine, guanosine, uridine, unknown or other nucleotide nucloetide
  misc_difference 10: note = a, c, u, g, unknown or other
  misc_difference 11: note = 2'-O-methyl modified adenosine, cytidine, guanosine, uridine, unknown or other nucleotide nucloetide
  misc_difference 12: note = a, c, u, g, unknown or other
  misc_difference 13: note = 2'-O-methyl modified adenosine, cytidine, guanosine, uridine, unknown or other nucleotide nucloetide
  misc_difference 14: note = a, c, u, g, unknown or other
  misc_difference 15: note = a, c, u, g, unknown or other
  misc_difference 16: note = a, c, u, g, unknown or other
  misc_difference 17: note = a, c, u, g, unknown or other
  misc_difference 18: note = 2'-O-methyl modified adenosine, cytidine, guanosine, uridine, unknown or other nucleotide nucloetide
  misc_difference 19: note = a, c, u, g, unknown or other
  misc_difference 20: note = a, c, u, g, unknown or other
  misc_difference 21: note = a, c, u, g, unknown or other
  misc_difference 22: note = 2'-O-methyl modified adenosine, cytidine, guanosine, uridine, unknown or other nucleotide nucloetide
  misc_difference 23: note = a, c, u, g, unknown or other
  misc_difference 24: note = a, c, u, g, unknown or other
  modified_base 25: mod_base = OTHER; note = 2'-O-methyl modified nucleotide
  modified_base 29: mod_base = OTHER; note = 2'-O-methyl modified nucleotide
  modified_base 30: mod_base = OTHER; note = 2'-O-methyl modified nucleotide
  modified_base 31: mod_base = OTHER; note = 2'-O-methyl modified nucleotide
  modified_base 32: mod_base = OTHER; note = 2'-O-methyl modified nucleotide
  modified_base 37: mod_base = OTHER; note = 2'-O-methyl modified nucleotide
  modified_base 38: mod_base = OTHER; note = 2'-O-methyl modified nucleotide
  modified_base 39: mod_base = OTHER; note = 2'-O-methyl modified nucleotide
  modified_base 40: mod_base = OTHER; note = 2'-O-methyl modified nucleotide
  modified_base 41: mod_base = OTHER; note = 2'-O-methyl modified nucleotide
  modified_base 42: mod_base = OTHER; note = 2'-O-methyl modified nucleotide
  modified_base 43: mod_base = OTHER; note = 2'-O-methyl modified nucleotide
  modified_base 47: mod_base = OTHER; note = 2'-O-methyl modified nucleotide
  modified_base 48: mod_base = OTHER; note = 2'-O-methyl modified nucleotide
  modified_base 51: mod_base = OTHER; note = 2'-O-methyl modified nucleotide
  modified_base 58: mod_base = OTHER; note = 2'-O-methyl modified nucleotide
  modified_base 59: mod_base = OTHER; note = 2'-O-methyl modified nucleotide
  modified_base 61: mod_base = OTHER; note = 2'-O-methyl modified nucleotide
  modified_base 62: mod_base = OTHER; note = 2'-O-methyl modified nucleotide
  modified_base 63: mod_base = OTHER; note = 2'-O-methyl modified nucleotide
  modified_base 64: mod_base = OTHER; note = 2'-O-methyl modified nucleotide
  modified_base 65: mod_base = OTHER; note = 2'-O-methyl modified nucleotide
  modified_base 66: mod_base = OTHER; note = 2'-O-methyl modified nucleotide
  modified_base 67: mod_base = OTHER; note = 2'-O-methyl modified nucleotide
  modified_base 68: mod_base = OTHER; note = 2'-O-methyl modified nucleotide
  modified_base 69: mod_base = OTHER; note = 2'-O-methyl modified nucleotide
  modified_base 70: mod_base = OTHER; note = 2'-O-methyl modified nucleotide
  modified_base 75: mod_base = OTHER; note = 2'-O-methyl modified nucleotide
  modified_base 77: mod_base = OTHER; note = 2'-O-methyl modified nucleotide
  modified_base 80: mod_base = OTHER; note = 2'-O-methyl modified nucleotide
  modified_base 82: mod_base = OTHER; note = 2'-O-methyl modified nucleotide
  modified_base 83: mod_base = OTHER; note = 2'-O-methyl modified nucleotide
  modified_base 84: mod_base = OTHER; note = 2'-O-methyl modified nucleotide
  modified_base 85: mod_base = OTHER; note = 2'-O-methyl modified nucleotide
  modified_base 86: mod_base = OTHER; note = 2'-O-methyl modified nucleotide
  modified_base 87: mod_base = OTHER; note = 2'-O-methyl modified nucleotide
  modified_base 89: mod_base = OTHER; note = 2'-O-methyl modified nucleotide
  modified_base 90: mod_base = OTHER; note = 2'-O-methyl modified nucleotide
  modified_base 91: mod_base = OTHER; note = 2'-O-methyl modified nucleotide
  modified_base 92: mod_base = OTHER; note = 2'-O-methyl modified nucleotide
  modified_base 99: mod_base = OTHER; note = nucleotide with a phosphorothioate linkage
  modified_base 100: mod_base = OTHER; note = 2'-O-methyl modified nucleotide with a phosphorothioate linkage
  modified_base 101: mod_base = OTHER; note = 2'-O-methyl modified nucleotide

SEQ ID NO: 998 - protein, 5 aa, synthetic construct
GGGGS

SEQ ID NO: 999-1001 - skipped (3 entries)

SEQ ID NO: 1002 - RNA, 101 nt, synthetic construct
  source 1..101: mol_type = other RNA
cctgggtctggtcctccccatcccgttgtagctccctgaaaccgttgctacaataaggccgtcgaaagatgtgccgcaacgctctgccttctggcatcgtt

SEQ ID NO: 1003 - RNA, 101 nt, synthetic construct
  source 1..101: mol_type = other RNA
gtggagaccaggcctgcaggggatgttgtagctccctgaaaccgttgctacaataaggccgtcgaaagatgtgccgcaacgctctgccttctggcatcgtt

SEQ ID NO: 1004 - RNA, 101 nt, synthetic construct
  source 1..101: mol_type = other RNA
ccgtgtcctgggtctggtcctcccgttgtagctccctgaaaccgttgctacaataaggccgtcgaaagatgtgccgcaacgctctgccttctggcatcgtt

SEQ ID NO: 1005 - RNA, 101 nt, synthetic construct
  source 1..101: mol_type = other RNA
tccgtgtcctgggtctggtcctccgttgtagctccctgaaaccgttgctacaataaggccgtcgaaagatgtgccgcaacgctctgccttctggcatcgtt

SEQ ID NO: 1006 - RNA, 101 nt, synthetic construct
  source 1..101: mol_type = other RNA
cacatggcaggtgtatctctgctcgttgtagctccctgaaaccgttgctacaataaggccgtcgaaagatgtgccgcaacgctctgccttctggcatcgtt

SEQ ID NO: 1007 - RNA, 101 nt, synthetic construct
  source 1..101: mol_type = other RNA
tgctgcacatggcaggtgtatctcgttgtagctccctgaaaccgttgctacaataaggccgtcgaaagatgtgccgcaacgctctgccttctggcatcgtt

SEQ ID NO: 1008 - RNA, 101 nt, synthetic construct
  source 1..101: mol_type = other RNA
ccgcacgaactgcgtgtcgtccacgttgtagctccctgaaaccgttgctacaataaggccgtcgaaagatgtgccgcaacgctctgccttctggcatcgtt

SEQ ID NO: 1009 - RNA, 101 nt, synthetic construct
  source 1..101: mol_type = other RNA
cgcacgaactgcgtgtcgtccacggttgtagctccctgaaaccgttgctacaataaggccgtcgaaagatgtgccgcaacgctctgccttctggcatcgtt

SEQ ID NO: 1010 - RNA, 101 nt, synthetic construct
  source 1..101: mol_type = other RNA
gtgcgctgcagcgtctccttcccggttgtagctccctgaaaccgttgctacaataaggccgtcgaaagatgtgccgcaacgctctgccttctggcatcgtt

SEQ ID NO: 1011 - RNA, 101 nt, synthetic construct
  source 1..101: mol_type = other RNA
ccgaggatggccgtcatggcgcccgttgtagctccctgaaaccgttgctacaataaggccgtcgaaagatgtgccgcaacgctctgccttctggcatcgtt

SEQ ID NO: 1012 - RNA, 101 nt, synthetic construct
  source 1..101: mol_type = other RNA
cgaggatggccgtcatggcgccccgttgtagctccctgaaaccgttgctacaataaggccgtcgaaagatgtgccgcaacgctctgccttctggcatcgtt

SEQ ID NO: 1013 - RNA, 101 nt, synthetic construct
  source 1..101: mol_type = other RNA
aaggttccatcccctgcaggcctggttgtagctccctgaaaccgttgctacaataaggccgtcgaaagatgtgccgcaacgctctgccttctggcatcgtt

SEQ ID NO: 1014 - RNA, 101 nt, synthetic construct
  source 1..101: mol_type = other RNA
agaccaggcctgcaggggatggaagttgtagctccctgaaaccgttgctacaataaggccgtcgaaagatgtgccgcaacgctctgccttctggcatcgtt

SEQ ID NO: 1015 - RNA, 101 nt, synthetic construct
  source 1..101: mol_type = other RNA
acttctggaaggttccatcccctggttgtagctccctgaaaccgttgctacaataaggccgtcgaaagatgtgccgcaacgctctgccttctggcatcgtt

SEQ ID NO: 1016 - RNA, 101 nt, synthetic construct
  source 1..101: mol_type = other RNA
cgatgaagcggggctccccgcggcgttgtagctccctgaaaccgttgctacaataaggccgtcgaaagatgtgccgcaacgctctgccttctggcatcgtt

SEQ ID NO: 1017 - RNA, 101 nt, synthetic construct
  source 1..101: mol_type = other RNA
tccgtgtcccggcccggccgcggggttgtagctccctgaaaccgttgctacaataaggccgtcgaaagatgtgccgcaacgctctgccttctggcatcgtt

SEQ ID NO: 1018 - RNA, 101 nt, synthetic construct
  source 1..101: mol_type = other RNA
ccgtgtcccggcccggccgcgggggttgtagctccctgaaaccgttgctacaataaggccgtcgaaagatgtgccgcaacgctctgccttctggcatcgtt

SEQ ID NO: 1019 - RNA, 101 nt, synthetic construct
  source 1..101: mol_type = other RNA
cagacgccgaggatggccgtcatggttgtagctccctgaaaccgttgctacaataaggccgtcgaaagatgtgccgcaacgctctgccttctggcatcgtt

SEQ ID NO: 1020 - RNA, 101 nt, synthetic construct
  source 1..101: mol_type = other RNA
ccagacgccgaggatggccgtcatgttgtagctccctgaaaccgttgctacaataaggccgtcgaaagatgtgccgcaacgctctgccttctggcatcgtt

SEQ ID NO: 1021 - RNA, 101 nt, synthetic construct
  source 1..101: mol_type = other RNA
agacgccgaggatggccgtcatgggttgtagctccctgaaaccgttgctacaataaggccgtcgaaagatgtgccgcaacgctctgccttctggcatcgtt

SEQ ID NO: 1022 - RNA, 101 nt, synthetic construct
  source 1..101: mol_type = other RNA
ctgtcgaaccgcacgaactgcgtggttgtagctccctgaaaccgttgctacaataaggccgtcgaaagatgtgccgcaacgctctgccttctggcatcgtt

SEQ ID NO: 1023 - RNA, 101 nt, synthetic construct
  source 1..101: mol_type = other RNA
tcgtgcggttcgacagcgacgccggttgtagctccctgaaaccgttgctacaataaggccgtcgaaagatgtgccgcaacgctctgccttctggcatcgtt

SEQ ID NO: 1024 - RNA, 101 nt, synthetic construct
  source 1..101: mol_type = other RNA
ccatccccatcgtgggcatcattggttgtagctccctgaaaccgttgctacaataaggccgtcgaaagatgtgccgcaacgctctgccttctggcatcgtt

SEQ ID NO: 1025 - RNA, 101 nt, synthetic construct
  source 1..101: mol_type = other RNA
tcctctggctcgcggcgtcgctgtgttgtagctccctgaaaccgttgctacaataaggccgtcgaaagatgtgccgcaacgctctgccttctggcatcgtt

SEQ ID NO: 1026 - RNA, 101 nt, synthetic construct
  source 1..101: mol_type = other RNA
ctctggttgtagtagccgcgcagggttgtagctccctgaaaccgttgctacaataaggccgtcgaaagatgtgccgcaacgctctgccttctggcatcgtt

SEQ ID NO: 1027 - RNA, 101 nt, synthetic construct
  source 1..101: mol_type = other RNA
acctggggaccctgcgcggctactgttgtagctccctgaaaccgttgctacaataaggccgtcgaaagatgtgccgcaacgctctgccttctggcatcgtt

SEQ ID NO: 1028 - RNA, 101 nt, synthetic construct
  source 1..101: mol_type = other RNA
cgctctggttgtagtagccgcgcagttgtagctccctgaaaccgttgctacaataaggccgtcgaaagatgtgccgcaacgctctgccttctggcatcgtt

SEQ ID NO: 1029 - RNA, 101 nt, synthetic construct
  source 1..101: mol_type = other RNA
gctctggttgtagtagccgcgcaggttgtagctccctgaaaccgttgctacaataaggccgtcgaaagatgtgccgcaacgctctgccttctggcatcgtt

SEQ ID NO: 1030 - RNA, 101 nt, synthetic construct
  source 1..101: mol_type = other RNA
tatttttttctatagtgtgagacagttgtagctccctgaaaccgttgctacaataaggccgtcgaaagatgtgccgcaacgctctgccttctggcatcgtt

SEQ ID NO: 1031 - RNA, 101 nt, synthetic construct
  source 1..101: mol_type = other RNA
acgcctacgacggcaaggattacagttgtagctccctgaaaccgttgctacaataaggccgtcgaaagatgtgccgcaacgctctgccttctggcatcgtt

SEQ ID NO: 1032 - RNA, 101 nt, synthetic construct
  source 1..101: mol_type = other RNA
tttgttctaccccaggcagtgacagttgtagctccctgaaaccgttgctacaataaggccgtcgaaagatgtgccgcaacgctctgccttctggcatcgtt

SEQ ID NO: 1033 - RNA, 101 nt, synthetic construct
  source 1..101: mol_type = other RNA
ttttgttctaccccaggcagtgacgttgtagctccctgaaaccgttgctacaataaggccgtcgaaagatgtgccgcaacgctctgccttctggcatcgtt

SEQ ID NO: 1034 - RNA, 101 nt, synthetic construct
  source 1..101: mol_type = other RNA
agcgaccacagctccagtgatcacgttgtagctccctgaaaccgttgctacaataaggccgtcgaaagatgtgccgcaacgctctgccttctggcatcgtt

SEQ ID NO: 1035 - RNA, 101 nt, synthetic construct
  source 1..101: mol_type = other RNA
gagctccgtgtcctgggtctggtcgttgtagctccctgaaaccgttgctacaataaggccgtcgaaagatgtgccgcaacgctctgccttctggcatcgtt

SEQ ID NO: 1036 - RNA, 101 nt, synthetic construct
  source 1..101: mol_type = other RNA
tccacgagctccgtgtcctgggtcgttgtagctccctgaaaccgttgctacaataaggccgtcgaaagatgtgccgcaacgctctgccttctggcatcgtt

SEQ ID NO: 1037 - RNA, 101 nt, synthetic construct
  source 1..101: mol_type = other RNA
acgagctccgtgtcctgggtctgggttgtagctccctgaaaccgttgctacaataaggccgtcgaaagatgtgccgcaacgctctgccttctggcatcgtt

SEQ ID NO: 1038 - RNA, 101 nt, synthetic construct
  source 1..101: mol_type = other RNA
cgagctccgtgtcctgggtctggtgttgtagctccctgaaaccgttgctacaataaggccgtcgaaagatgtgccgcaacgctctgccttctggcatcgtt

SEQ ID NO: 1039 - RNA, 101 nt, synthetic construct
  source 1..101: mol_type = other RNA
gcaggcctggtctccacgagctccgttgtagctccctgaaaccgttgctacaataaggccgtcgaaagatgtgccgcaacgctctgccttctggcatcgtt

SEQ ID NO: 1040 - RNA, 101 nt, synthetic construct
  source 1..101: mol_type = other RNA
tcccctgcaggcctggtctccacggttgtagctccctgaaaccgttgctacaataaggccgtcgaaagatgtgccgcaacgctctgccttctggcatcgtt

SEQ ID NO: 1041 - RNA, 101 nt, synthetic construct
  source 1..101: mol_type = other RNA
atccgtgtcccggcccggccgcgggttgtagctccctgaaaccgttgctacaataaggccgtcgaaagatgtgccgcaacgctctgccttctggcatcgtt

SEQ ID NO: 1042 - RNA, 101 nt, synthetic construct
  source 1..101: mol_type = other RNA
ccttcccgttctccaggtatctgcgttgtagctccctgaaaccgttgctacaataaggccgtcgaaagatgtgccgcaacgctctgccttctggcatcgtt

SEQ ID NO: 1043 - RNA, 101 nt, synthetic construct
  source 1..101: mol_type = other RNA
ccgttctccaggtatctgcggagcgttgtagctccctgaaaccgttgctacaataaggccgtcgaaagatgtgccgcaacgctctgccttctggcatcgtt

SEQ ID NO: 1044 - RNA, 101 nt, synthetic construct
  source 1..101: mol_type = other RNA
acctgccatgtgcagcatgagggtgttgtagctccctgaaaccgttgctacaataaggccgtcgaaagatgtgccgcaacgctctgccttctggcatcgtt

SEQ ID NO: 1045 - RNA, 101 nt, synthetic construct
  source 1..101: mol_type = other RNA
cacctgccatgtgcagcatgaggggttgtagctccctgaaaccgttgctacaataaggccgtcgaaagatgtgccgcaacgctctgccttctggcatcgtt

SEQ ID NO: 1046 - RNA, 101 nt, synthetic construct
  source 1..101: mol_type = other RNA
acctggcagcgggatggggaggacgttgtagctccctgaaaccgttgctacaataaggccgtcgaaagatgtgccgcaacgctctgccttctggcatcgtt

SEQ ID NO: 1047 - RNA, 101 nt, synthetic construct
  source 1..101: mol_type = other RNA
cactgacctggcagcgggatgggggttgtagctccctgaaaccgttgctacaataaggccgtcgaaagatgtgccgcaacgctctgccttctggcatcgtt

SEQ ID NO: 1048 - RNA, 101 nt, synthetic construct
  source 1..101: mol_type = other RNA
cctggcagcgggatggggaggaccgttgtagctccctgaaaccgttgctacaataaggccgtcgaaagatgtgccgcaacgctctgccttctggcatcgtt

SEQ ID NO: 1049 - RNA, 101 nt, synthetic construct
  source 1..101: mol_type = other RNA
ccatctcagggtgaggggcttggggttgtagctccctgaaaccgttgctacaataaggccgtcgaaagatgtgccgcaacgctctgccttctggcatcgtt

SEQ ID NO: 1050 - RNA, 101 nt, synthetic construct
  source 1..101: mol_type = other RNA
tggccgtcatggcgccccgaacccgttgtagctccctgaaaccgttgctacaataaggccgtcgaaagatgtgccgcaacgctctgccttctggcatcgtt

SEQ ID NO: 1051 - RNA, 101 nt, synthetic construct
  source 1..101: mol_type = other RNA
atgtccgccgcggtccaagagcgcgttgtagctccctgaaaccgttgctacaataaggccgtcgaaagatgtgccgcaacgctctgccttctggcatcgtt

SEQ ID NO: 1052 - RNA, 101 nt, synthetic construct
  source 1..101: mol_type = other RNA
ggtacccgtgcgctgcagcgtctcgttgtagctccctgaaaccgttgctacaataaggccgtcgaaagatgtgccgcaacgctctgccttctggcatcgtt

SEQ ID NO: 1053 - RNA, 101 nt, synthetic construct
  source 1..101: mol_type = other RNA
gggaaggagacgctgcagcgcacggttgtagctccctgaaaccgttgctacaataaggccgtcgaaagatgtgccgcaacgctctgccttctggcatcgtt

SEQ ID NO: 1054 - RNA, 101 nt, synthetic construct
  source 1..101: mol_type = other RNA
gcgggcgccgtggatagagcaggagttgtagctccctgaaaccgttgctacaataaggccgtcgaaagatgtgccgcaacgctctgccttctggcatcgtt

SEQ ID NO: 1055 - RNA, 101 nt, synthetic construct
  source 1..101: mol_type = other RNA
tcctgctctatccacggcgcccgcgttgtagctccctgaaaccgttgctacaataaggccgtcgaaagatgtgccgcaacgctctgccttctggcatcgtt

SEQ ID NO: 1056 - RNA, 101 nt, synthetic construct
  source 1..101: mol_type = other RNA
cccctggtacccgtgcgctgcagcgttgtagctccctgaaaccgttgctacaataaggccgtcgaaagatgtgccgcaacgctctgccttctggcatcgtt

SEQ ID NO: 1057 - RNA, 101 nt, synthetic construct
  source 1..101: mol_type = other RNA
tggtacccgtgcgctgcagcgtctgttgtagctccctgaaaccgttgctacaataaggccgtcgaaagatgtgccgcaacgctctgccttctggcatcgtt

SEQ ID NO: 1058 - RNA, 101 nt, synthetic construct
  source 1..101: mol_type = other RNA
catctcagggtgaggggcttgggcgttgtagctccctgaaaccgttgctacaataaggccgtcgaaagatgtgccgcaacgctctgccttctggcatcgtt

SEQ ID NO: 1059 - RNA, 101 nt, synthetic construct
  source 1..101: mol_type = other RNA
acgcagttcgtgcggttcgacagcgttgtagctccctgaaaccgttgctacaataaggccgtcgaaagatgtgccgcaacgctctgccttctggcatcgtt

SEQ ID NO: 1060 - RNA, 101 nt, synthetic construct
  source 1..101: mol_type = other RNA
cgcccaggtctgggtcagggccaggttgtagctccctgaaaccgttgctacaataaggccgtcgaaagatgtgccgcaacgctctgccttctggcatcgtt

SEQ ID NO: 1061 - RNA, 101 nt, synthetic construct
  source 1..101: mol_type = other RNA
cactcacccgcccaggtctgggtcgttgtagctccctgaaaccgttgctacaataaggccgtcgaaagatgtgccgcaacgctctgccttctggcatcgtt

SEQ ID NO: 1062 - RNA, 101 nt, synthetic construct
  source 1..101: mol_type = other RNA
ccgcccaggtctgggtcagggccagttgtagctccctgaaaccgttgctacaataaggccgtcgaaagatgtgccgcaacgctctgccttctggcatcgtt

SEQ ID NO: 1063 - RNA, 101 nt, synthetic construct
  source 1..101: mol_type = other RNA
cccgcccaggtctgggtcagggccgttgtagctccctgaaaccgttgctacaataaggccgtcgaaagatgtgccgcaacgctctgccttctggcatcgtt

SEQ ID NO: 1064 - RNA, 101 nt, synthetic construct
  source 1..101: mol_type = other RNA
cagcgacgccgcgagccagaggatgttgtagctccctgaaaccgttgctacaataaggccgtcgaaagatgtgccgcaacgctctgccttctggcatcgtt

SEQ ID NO: 1065 - RNA, 101 nt, synthetic construct
  source 1..101: mol_type = other RNA
cgcgagccagaggatggagccgcggttgtagctccctgaaaccgttgctacaataaggccgtcgaaagatgtgccgcaacgctctgccttctggcatcgtt

SEQ ID NO: 1066 - RNA, 101 nt, synthetic construct
  source 1..101: mol_type = other RNA
gctctatccacggcgcccgcggctgttgtagctccctgaaaccgttgctacaataaggccgtcgaaagatgtgccgcaacgctctgccttctggcatcgtt

SEQ ID NO: 1067 - RNA, 101 nt, synthetic construct
  source 1..101: mol_type = other RNA
cacatcagagccctgggcactgtcgttgtagctccctgaaaccgttgctacaataaggccgtcgaaagatgtgccgcaacgctctgccttctggcatcgtt

SEQ ID NO: 1068 - RNA, 101 nt, synthetic construct
  source 1..101: mol_type = other RNA
cagacccaggacacggagctcgtggttgtagctccctgaaaccgttgctacaataaggccgtcgaaagatgtgccgcaacgctctgccttctggcatcgtt

SEQ ID NO: 1069 - RNA, 101 nt, synthetic construct
  source 1..101: mol_type = other RNA
ccaggacacggagctcgtggagacgttgtagctccctgaaaccgttgctacaataaggccgtcgaaagatgtgccgcaacgctctgccttctggcatcgtt

SEQ ID NO: 1070 - RNA, 101 nt, synthetic construct
  source 1..101: mol_type = other RNA
ctctgggaaaagaggggaaggtgagttgtagctccctgaaaccgttgctacaataaggccgtcgaaagatgtgccgcaacgctctgccttctggcatcgtt

SEQ ID NO: 1071 - RNA, 101 nt, synthetic construct
  source 1..101: mol_type = other RNA
tctgggaaaagaggggaaggtgaggttgtagctccctgaaaccgttgctacaataaggccgtcgaaagatgtgccgcaacgctctgccttctggcatcgtt

SEQ ID NO: 1072 - RNA, 101 nt, synthetic construct
  source 1..101: mol_type = other RNA
agacgctgcagcgcacgggtaccagttgtagctccctgaaaccgttgctacaataaggccgtcgaaagatgtgccgcaacgctctgccttctggcatcgtt

SEQ ID NO: 1073 - RNA, 101 nt, synthetic construct
  source 1..101: mol_type = other RNA
tccttttctatctgtgggaagaaagttgtagctccctgaaaccgttgctacaataaggccgtcgaaagatgtgccgcaacgctctgccttctggcatcgtt

SEQ ID NO: 1074 - RNA, 101 nt, synthetic construct
  source 1..101: mol_type = other RNA
cactgcctggggtagaacaaaaacgttgtagctccctgaaaccgttgctacaataaggccgtcgaaagatgtgccgcaacgctctgccttctggcatcgtt

SEQ ID NO: 1075 - RNA, 101 nt, synthetic construct
  source 1..101: mol_type = other RNA
acaaccagagcgaggccggtgagtgttgtagctccctgaaaccgttgctacaataaggccgtcgaaagatgtgccgcaacgctctgccttctggcatcgtt

SEQ ID NO: 1076 - RNA, 101 nt, synthetic construct
  source 1..101: mol_type = other RNA
ctacaaccagagcgaggccggtgagttgtagctccctgaaaccgttgctacaataaggccgtcgaaagatgtgccgcaacgctctgccttctggcatcgtt

SEQ ID NO: 1077 - RNA, 101 nt, synthetic construct
  source 1..101: mol_type = other RNA
tacaaccagagcgaggccggtgaggttgtagctccctgaaaccgttgctacaataaggccgtcgaaagatgtgccgcaacgctctgccttctggcatcgtt

SEQ ID NO: 1078 - RNA, 101 nt, synthetic construct
  source 1..101: mol_type = other RNA
ccagagcgaggccggtgagtgaccgttgtagctccctgaaaccgttgctacaataaggccgtcgaaagatgtgccgcaacgctctgccttctggcatcgtt

SEQ ID NO: 1079 - RNA, 101 nt, synthetic construct
  source 1..101: mol_type = other RNA
ccatcccgctgccaggtcagtgtggttgtagctccctgaaaccgttgctacaataaggccgtcgaaagatgtgccgcaacgctctgccttctggcatcgtt

SEQ ID NO: 1080 - RNA, 101 nt, synthetic construct
  source 1..101: mol_type = other RNA
gtatctgcggagccactccacgcagttgtagctccctgaaaccgttgctacaataaggccgtcgaaagatgtgccgcaacgctctgccttctggcatcgtt

SEQ ID NO: 1081 - RNA, 77 nt, synthetic construct; identical to SEQ ID NO: 906
  source 1..77: mol_type = other RNA
  modified_base 1: mod_base = OTHER; note = 2'-O-methyl modified nucleotide
  modified_base 5: mod_base = OTHER; note = 2'-O-methyl modified nucleotide
  modified_base 6: mod_base = OTHER; note = 2'-O-methyl modified nucleotide
  modified_base 7: mod_base = OTHER; note = 2'-O-methyl modified nucleotide
  modified_base 8: mod_base = OTHER; note = 2'-O-methyl modified nucleotide
  modified_base 13: mod_base = OTHER; note = 2'-O-methyl modified nucleotide
  modified_base 14: mod_base = OTHER; note = 2'-O-methyl modified nucleotide
  modified_base 15: mod_base = OTHER; note = 2'-O-methyl modified nucleotide
  modified_base 16: mod_base = OTHER; note = 2'-O-methyl modified nucleotide
  modified_base 17: mod_base = OTHER; note = 2'-O-methyl modified nucleotide
  modified_base 18: mod_base = OTHER; note = 2'-O-methyl modified nucleotide
  modified_base 19: mod_base = OTHER; note = 2'-O-methyl modified nucleotide
  modified_base 23: mod_base = OTHER; note = 2'-O-methyl modified nucleotide
  modified_base 24: mod_base = OTHER; note = 2'-O-methyl modified nucleotide
  modified_base 27: mod_base = OTHER; note = 2'-O-methyl modified nucleotide
  modified_base 30: mod_base = OTHER; note = nucleotide with phosphorothioate linkage
  modified_base 34: mod_base = OTHER; note = 2'-O-methyl modified nucleotide
  modified_base 35: mod_base = OTHER; note = 2'-O-methyl modified nucleotide
  modified_base 37: mod_base = OTHER; note = 2'-O-methyl modified nucleotide
  modified_base 38: mod_base = OTHER; note = 2'-O-methyl modified nucleotide
  modified_base 39: mod_base = OTHER; note = 2'-O-methyl modified nucleotide
  modified_base 40: mod_base = OTHER; note = 2'-O-methyl modified nucleotide
  modified_base 41: mod_base = OTHER; note = 2'-O-methyl modified nucleotide
  modified_base 42: mod_base = OTHER; note = 2'-O-methyl modified nucleotide
  modified_base 43: mod_base = OTHER; note = 2'-O-methyl modified nucleotide
  modified_base 44: mod_base = OTHER; note = 2'-O-methyl modified nucleotide
  modified_base 45: mod_base = OTHER; note = 2'-O-methyl modified nucleotide
  modified_base 46: mod_base = OTHER; note = 2'-O-methyl modified nucleotide
  modified_base 51: mod_base = OTHER; note = 2'-O-methyl modified nucleotide
  modified_base 54: mod_base = OTHER; note = 2'-O-methyl modified nucleotide
  modified_base 55: mod_base = OTHER; note = 2'-O-methyl modified nucleotide
  modified_base 56: mod_base = OTHER; note = 2'-O-methyl modified nucleotide
  modified_base 57: mod_base = OTHER; note = 2'-O-methyl modified nucleotide
  modified_base 62: mod_base = OTHER; note = 2'-O-methyl modified nucleotide
  modified_base 63: mod_base = OTHER; note = 2'-O-methyl modified nucleotide
  modified_base 65: mod_base = OTHER; note = 2'-O-methyl modified nucleotide
  modified_base 66: mod_base = OTHER; note = 2'-O-methyl modified nucleotide
  modified_base 67: mod_base = OTHER; note = 2'-O-methyl modified nucleotide
  modified_base 68: mod_base = OTHER; note = 2'-O-methyl modified nucleotide
  modified_base 70: mod_base = OTHER; note = 2'-O-methyl modified nucleotide
  modified_base 72: mod_base = OTHER; note = 2'-O-methyl modified nucleotide
  modified_base 73: mod_base = OTHER; note = 2'-O-methyl modified nucleotide
  modified_base 74: mod_base = OTHER; note = nucleotide with phosphorothioate linkage
  modified_base 75: mod_base = OTHER; note = 2'-O-methyl modified nucleotide with phosphorothioate linkage
  modified_base 76: mod_base = OTHER; note = 2'-O-methyl modified nucleotide with phosphorothioate linkage
  modified_base 77: mod_base = OTHER; note = 2'-O-methyl modified nucleotide

SEQ ID NO: 1082 - RNA, 77 nt, synthetic construct; identical to SEQ ID NO: 906
  source 1..77: mol_type = other RNA
  modified_base 1: mod_base = OTHER; note = 2'-O-methyl modified nucleotide
  modified_base 5: mod_base = OTHER; note = 2'-O-methyl modified nucleotide
  modified_base 6: mod_base = OTHER; note = 2'-O-methyl modified nucleotide
  modified_base 7: mod_base = OTHER; note = 2'-O-methyl modified nucleotide
  modified_base 8: mod_base = OTHER; note = 2'-O-methyl modified nucleotide
  modified_base 13: mod_base = OTHER; note = 2'-O-methyl modified nucleotide
  modified_base 14: mod_base = OTHER; note = 2'-O-methyl modified nucleotide
  modified_base 15: mod_base = OTHER; note = 2'-O-methyl modified nucleotide
  modified_base 16: mod_base = OTHER; note = 2'-O-methyl modified nucleotide
  modified_base 17: mod_base = OTHER; note = 2'-O-methyl modified nucleotide
  modified_base 18: mod_base = OTHER; note = 2'-O-methyl modified nucleotide
  modified_base 19: mod_base = OTHER; note = 2'-O-methyl modified nucleotide
  modified_base 23: mod_base = OTHER; note = 2'-O-methyl modified nucleotide
  modified_base 24: mod_base = OTHER; note = 2'-O-methyl modified nucleotide
  modified_base 27: mod_base = OTHER; note = 2'-O-methyl modified nucleotide
  modified_base 30: mod_base = OTHER; note = nucleotide with phosphorothioate linkage
  modified_base 34: mod_base = OTHER; note = 2'-O-methyl modified nucleotide
  modified_base 35: mod_base = OTHER; note = 2'-O-methyl modified nucleotide
  modified_base 37: mod_base = OTHER; note = 2'-O-methyl modified nucleotide
  modified_base 38: mod_base = OTHER; note = 2'-O-methyl modified nucleotide
  modified_base 39: mod_base = OTHER; note = 2'-O-methyl modified nucleotide
  modified_base 40: mod_base = OTHER; note = 2'-O-methyl modified nucleotide
  modified_base 41: mod_base = OTHER; note = 2'-O-methyl modified nucleotide
  modified_base 42: mod_base = OTHER; note = 2'-O-methyl modified nucleotide
  modified_base 43: mod_base = OTHER; note = 2'-O-methyl modified nucleotide
  modified_base 44: mod_base = OTHER; note = 2'-O-methyl modified nucleotide
  modified_base 45: mod_base = OTHER; note = 2'-O-methyl modified nucleotide
  modified_base 46: mod_base = OTHER; note = 2'-O-methyl modified nucleotide
  modified_base 51: mod_base = OTHER; note = 2'-O-methyl modified nucleotide
  modified_base 53: mod_base = OTHER; note = 2'-O-methyl modified nucleotide
  modified_base 56: mod_base = OTHER; note = 2'-O-methyl modified nucleotide
  modified_base 62: mod_base = OTHER; note = 2'-O-methyl modified nucleotide
  modified_base 63: mod_base = OTHER; note = 2'-O-methyl modified nucleotide
  modified_base 65: mod_base = OTHER; note = 2'-O-methyl modified nucleotide
  modified_base 66: mod_base = OTHER; note = 2'-O-methyl modified nucleotide
  modified_base 67: mod_base = OTHER; note = 2'-O-methyl modified nucleotide
  modified_base 68: mod_base = OTHER; note = 2'-O-methyl modified nucleotide
  modified_base 75: mod_base = OTHER; note = nucleotide with phosphorothioate linkage
  modified_base 76: mod_base = OTHER; note = 2'-O-methyl modified nucleotide with phosphorothioate linkage
  modified_base 77: mod_base = OTHER; note = 2'-O-methyl modified nucleotide

SEQ ID NO: 1083 - RNA, 77 nt, synthetic construct; identical to SEQ ID NO: 906
  source 1..77: mol_type = other RNA
  modified_base 1: mod_base = OTHER; note = 2'-O-methyl modified nucleotide
  modified_base 5: mod_base = OTHER; note = 2'-O-methyl modified nucleotide
  modified_base 6: mod_base = OTHER; note = 2'-O-methyl modified nucleotide
  modified_base 7: mod_base = OTHER; note = 2'-O-methyl modified nucleotide
  modified_base 8: mod_base = OTHER; note = 2'-O-methyl modified nucleotide
  modified_base 13: mod_base = OTHER; note = 2'-O-methyl modified nucleotide
  modified_base 14: mod_base = OTHER; note = 2'-O-methyl modified nucleotide
  modified_base 15: mod_base = OTHER; note = 2'-O-methyl modified nucleotide
  modified_base 16: mod_base = OTHER; note = 2'-O-methyl modified nucleotide
  modified_base 17: mod_base = OTHER; note = 2'-O-methyl modified nucleotide
  modified_base 18: mod_base = OTHER; note = 2'-O-methyl modified nucleotide
  modified_base 19: mod_base = OTHER; note = 2'-O-methyl modified nucleotide
  modified_base 23: mod_base = OTHER; note = 2'-O-methyl modified nucleotide
  modified_base 24: mod_base = OTHER; note = 2'-O-methyl modified nucleotide
  modified_base 27: mod_base = OTHER; note = 2'-O-methyl modified nucleotide
  modified_base 34: mod_base = OTHER; note = 2'-O-methyl modified nucleotide
  modified_base 35: mod_base = OTHER; note = 2'-O-methyl modified nucleotide
  modified_base 37: mod_base = OTHER; note = 2'-O-methyl modified nucleotide
  modified_base 38: mod_base = OTHER; note = 2'-O-methyl modified nucleotide
  modified_base 39: mod_base = OTHER; note = 2'-O-methyl modified nucleotide
  modified_base 40: mod_base = OTHER; note = 2'-O-methyl modified nucleotide
  modified_base 41: mod_base = OTHER; note = 2'-O-methyl modified nucleotide
  modified_base 42: mod_base = OTHER; note = 2'-O-methyl modified nucleotide
  modified_base 43: mod_base = OTHER; note = 2'-O-methyl modified nucleotide
  modified_base 44: mod_base = OTHER; note = 2'-O-methyl modified nucleotide
  modified_base 45: mod_base = OTHER; note = 2'-O-methyl modified nucleotide
  modified_base 46: mod_base = OTHER; note = 2'-O-methyl modified nucleotide
  modified_base 51: mod_base = OTHER; note = 2'-O-methyl modified nucleotide
  modified_base 53: mod_base = OTHER; note = 2'-O-methyl modified nucleotide
  modified_base 56: mod_base = OTHER; note = 2'-O-methyl modified nucleotide
  modified_base 62: mod_base = OTHER; note = 2'-O-methyl modified nucleotide
  modified_base 63: mod_base = OTHER; note = 2'-O-methyl modified nucleotide
  modified_base 65: mod_base = OTHER; note = 2'-O-methyl modified nucleotide
  modified_base 66: mod_base = OTHER; note = 2'-O-methyl modified nucleotide
  modified_base 67: mod_base = OTHER; note = 2'-O-methyl modified nucleotide
  modified_base 68: mod_base = OTHER; note = 2'-O-methyl modified nucleotide
  modified_base 75: mod_base = OTHER; note = nucleotide with phosphorothioate linkage
  modified_base 76: mod_base = OTHER; note = 2'-O-methyl modified nucleotide with phosphorothioate linkage
  modified_base 77: mod_base = OTHER; note = 2'-O-methyl modified nucleotide

SEQ ID NO: 1084 - RNA, 77 nt, synthetic construct; identical to SEQ ID NO: 906
  source 1..77: mol_type = other RNA
  modified_base 1: mod_base = OTHER; note = 2'-O-methyl modified nucleotide
  modified_base 5: mod_base = OTHER; note = 2'-O-methyl modified nucleotide
  modified_base 6: mod_base = OTHER; note = 2'-O-methyl modified nucleotide
  modified_base 7: mod_base = OTHER; note = 2'-O-methyl modified nucleotide
  modified_base 8: mod_base = OTHER; note = 2'-O-methyl modified nucleotide
  modified_base 13: mod_base = OTHER; note = 2'-O-methyl modified nucleotide
  modified_base 14: mod_base = OTHER; note = 2'-O-methyl modified nucleotide
  modified_base 15: mod_base = OTHER; note = 2'-O-methyl modified nucleotide
  modified_base 16: mod_base = OTHER; note = 2'-O-methyl modified nucleotide
  modified_base 17: mod_base = OTHER; note = 2'-O-methyl modified nucleotide
  modified_base 18: mod_base = OTHER; note = 2'-O-methyl modified nucleotide
  modified_base 19: mod_base = OTHER; note = 2'-O-methyl modified nucleotide
  modified_base 23: mod_base = OTHER; note = 2'-O-methyl modified nucleotide
  modified_base 24: mod_base = OTHER; note = 2'-O-methyl modified nucleotide
  modified_base 27: mod_base = OTHER; note = 2'-O-methyl modified nucleotide
  modified_base 30: mod_base = OTHER; note = nucleotide with phosphorothioate linkage
  modified_base 34: mod_base = OTHER; note = 2'-O-methyl modified nucleotide
  modified_base 35: mod_base = OTHER; note = 2'-O-methyl modified nucleotide
  modified_base 37: mod_base = OTHER; note = 2'-O-methyl modified nucleotide
  modified_base 38: mod_base = OTHER; note = 2'-O-methyl modified nucleotide
  modified_base 39: mod_base = OTHER; note = 2'-O-methyl modified nucleotide
  modified_base 40: mod_base = OTHER; note = 2'-O-methyl modified nucleotide
  modified_base 41: mod_base = OTHER; note = 2'-O-methyl modified nucleotide
  modified_base 42: mod_base = OTHER; note = 2'-O-methyl modified nucleotide
  modified_base 43: mod_base = OTHER; note = 2'-O-methyl modified nucleotide
  modified_base 44: mod_base = OTHER; note = 2'-O-methyl modified nucleotide
  modified_base 45: mod_base = OTHER; note = 2'-O-methyl modified nucleotide
  modified_base 46: mod_base = OTHER; note = 2'-O-methyl modified nucleotide
  modified_base 51: mod_base = OTHER; note = 2'-O-methyl modified nucleotide
  modified_base 53: mod_base = OTHER; note = 2'-O-methyl modified nucleotide
  modified_base 56: mod_base = OTHER; note = 2'-O-methyl modified nucleotide
  modified_base 58: mod_base = OTHER; note = 2'-O-methyl modified nucleotide
  modified_base 59: mod_base = OTHER; note = 2'-O-methyl modified nucleotide
  modified_base 60: mod_base = OTHER; note = 2'-O-methyl modified nucleotide
  modified_base 61: mod_base = OTHER; note = 2'-O-methyl modified nucleotide
  modified_base 62: mod_base = OTHER; note = 2'-O-methyl modified nucleotide
  modified_base 63: mod_base = OTHER; note = 2'-O-methyl modified nucleotide
  modified_base 65: mod_base = OTHER; note = 2'-O-methyl modified nucleotide
  modified_base 66: mod_base = OTHER; note = 2'-O-methyl modified nucleotide
  modified_base 67: mod_base = OTHER; note = 2'-O-methyl modified nucleotide
  modified_base 68: mod_base = OTHER; note = 2'-O-methyl modified nucleotide
  modified_base 75: mod_base = OTHER; note = nucleotide with phosphorothioate linkage
  modified_base 76: mod_base = OTHER; note = 2'-O-methyl modified nucleotide with phosphorothioate linkage
  modified_base 77: mod_base = OTHER; note = 2'-O-methyl modified nucleotide

SEQ ID NO: 1085 - RNA, 77 nt, synthetic construct; identical to SEQ ID NO: 906
  source 1..77: mol_type = other RNA
  modified_base 1: mod_base = OTHER; note = 2'-O-methyl modified nucleotide
  modified_base 5: mod_base = OTHER; note = 2'-O-methyl modified nucleotide
  modified_base 6: mod_base = OTHER; note = 2'-O-methyl modified nucleotide
  modified_base 7: mod_base = OTHER; note = 2'-O-methyl modified nucleotide
  modified_base 8: mod_base = OTHER; note = 2'-O-methyl modified nucleotide
  modified_base 13: mod_base = OTHER; note = 2'-O-methyl modified nucleotide
  modified_base 14: mod_base = OTHER; note = 2'-O-methyl modified nucleotide
  modified_base 15: mod_base = OTHER; note = 2'-O-methyl modified nucleotide
  modified_base 16: mod_base = OTHER; note = 2'-O-methyl modified nucleotide
  modified_base 17: mod_base = OTHER; note = 2'-O-methyl modified nucleotide
  modified_base 18: mod_base = OTHER; note = 2'-O-methyl modified nucleotide
  modified_base 19: mod_base = OTHER; note = 2'-O-methyl modified nucleotide
  modified_base 23: mod_base = OTHER; note = 2'-O-methyl modified nucleotide
  modified_base 24: mod_base = OTHER; note = 2'-O-methyl modified nucleotide
  modified_base 27: mod_base = OTHER; note = 2'-O-methyl modified nucleotide
  modified_base 34: mod_base = OTHER; note = 2'-O-methyl modified nucleotide
  modified_base 35: mod_base = OTHER; note = 2'-O-methyl modified nucleotide
  modified_base 37: mod_base = OTHER; note = 2'-O-methyl modified nucleotide
  modified_base 38: mod_base = OTHER; note = 2'-O-methyl modified nucleotide
  modified_base 39: mod_base = OTHER; note = 2'-O-methyl modified nucleotide
  modified_base 40: mod_base = OTHER; note = 2'-O-methyl modified nucleotide
  modified_base 41: mod_base = OTHER; note = 2'-O-methyl modified nucleotide
  modified_base 42: mod_base = OTHER; note = 2'-O-methyl modified nucleotide
  modified_base 43: mod_base = OTHER; note = 2'-O-methyl modified nucleotide
  modified_base 44: mod_base = OTHER; note = 2'-O-methyl modified nucleotide
  modified_base 45: mod_base = OTHER; note = 2'-O-methyl modified nucleotide
  modified_base 46: mod_base = OTHER; note = 2'-O-methyl modified nucleotide
  modified_base 51: mod_base = OTHER; note = 2'-O-methyl modified nucleotide
  modified_base 53: mod_base = OTHER; note = 2'-O-methyl modified nucleotide
  modified_base 56: mod_base = OTHER; note = 2'-O-methyl modified nucleotide
  modified_base 58: mod_base = OTHER; note = 2'-O-methyl modified nucleotide
  modified_base 59: mod_base = OTHER; note = 2'-O-methyl modified nucleotide
  modified_base 60: mod_base = OTHER; note = 2'-O-methyl modified nucleotide
  modified_base 61: mod_base = OTHER; note = 2'-O-methyl modified nucleotide
  modified_base 62: mod_base = OTHER; note = 2'-O-methyl modified nucleotide
  modified_base 63: mod_base = OTHER; note = 2'-O-methyl modified nucleotide
  modified_base 65: mod_base = OTHER; note = 2'-O-methyl modified nucleotide
  modified_base 66: mod_base = OTHER; note = 2'-O-methyl modified nucleotide
  modified_base 67: mod_base = OTHER; note = 2'-O-methyl modified nucleotide
  modified_base 68: mod_base = OTHER; note = 2'-O-methyl modified nucleotide
  modified_base 75: mod_base = OTHER; note = nucleotide with phosphorothioate linkage
  modified_base 76: mod_base = OTHER; note = 2'-O-methyl modified nucleotide with phosphorothioate linkage
  modified_base 77: mod_base = OTHER; note = 2'-O-methyl modified nucleotide

SEQ ID NO: 1086 - RNA, 81 nt, synthetic construct
  source 1..81: mol_type = other RNA
  modified_base 1: mod_base = OTHER; note = 2'-O-methyl modified nucleotide
  modified_base 5: mod_base = OTHER; note = 2'-O-methyl modified nucleotide
  modified_base 6: mod_base = OTHER; note = 2'-O-methyl modified nucleotide
  modified_base 7: mod_base = OTHER; note = 2'-O-methyl modified nucleotide
  modified_base 8: mod_base = OTHER; note = 2'-O-methyl modified nucleotide
  modified_base 13: mod_base = OTHER; note = 2'-O-methyl modified nucleotide
  modified_base 14: mod_base = OTHER; note = 2'-O-methyl modified nucleotide
  modified_base 15: mod_base = OTHER; note = 2'-O-methyl modified nucleotide
  modified_base 16: mod_base = OTHER; note = 2'-O-methyl modified nucleotide
  modified_base 17: mod_base = OTHER; note = 2'-O-methyl modified nucleotide
  modified_base 18: mod_base = OTHER; note = 2'-O-methyl modified nucleotide
  modified_base 19: mod_base = OTHER; note = 2'-O-methyl modified nucleotide
  modified_base 20: mod_base = OTHER; note = 2'-O-methyl modified nucleotide
  modified_base 21: mod_base = OTHER; note = 2'-O-methyl modified nucleotide
  modified_base 22: mod_base = OTHER; note = 2'-O-methyl modified nucleotide
  modified_base 23: mod_base = OTHER; note = 2'-O-methyl modified nucleotide
  modified_base 27: mod_base = OTHER; note = 2'-O-methyl modified nucleotide
  modified_base 28: mod_base = OTHER; note = 2'-O-methyl modified nucleotide
  modified_base 31: mod_base = OTHER; note = 2'-O-methyl modified nucleotide
  modified_base 34: mod_base = OTHER; note = nucleotide with phosphorothioate linkage
  modified_base 38: mod_base = OTHER; note = 2'-O-methyl modified nucleotide
  modified_base 39: mod_base = OTHER; note = 2'-O-methyl modified nucleotide
  modified_base 41: mod_base = OTHER; note = 2'-O-methyl modified nucleotide
  modified_base 42: mod_base = OTHER; note = 2'-O-methyl modified nucleotide
  modified_base 43: mod_base = OTHER; note = 2'-O-methyl modified nucleotide
  modified_base 44: mod_base = OTHER; note = 2'-O-methyl modified nucleotide
  modified_base 45: mod_base = OTHER; note = 2'-O-methyl modified nucleotide
  modified_base 46: mod_base = OTHER; note = 2'-O-methyl modified nucleotide
  modified_base 47: mod_base = OTHER; note = 2'-O-methyl modified nucleotide
  modified_base 48: mod_base = OTHER; note = 2'-O-methyl modified nucleotide
  modified_base 49: mod_base = OTHER; note = 2'-O-methyl modified nucleotide
  modified_base 50: mod_base = OTHER; note = 2'-O-methyl modified nucleotide
  modified_base 55: mod_base = OTHER; note = 2'-O-methyl modified nucleotide
  modified_base 57: mod_base = OTHER; note = 2'-O-methyl modified nucleotide
  modified_base 60: mod_base = OTHER; note = 2'-O-methyl modified nucleotide
  modified_base 66: mod_base = OTHER; note = 2'-O-methyl modified nucleotide
  modified_base 67: mod_base = OTHER; note = 2'-O-methyl modified nucleotide
  modified_base 69: mod_base = OTHER; note = 2'-O-methyl modified nucleotide
  modified_base 70: mod_base = OTHER; note = 2'-O-methyl modified nucleotide
  modified_base 71: mod_base = OTHER; note = 2'-O-methyl modified nucleotide
  modified_base 72: mod_base = OTHER; note = 2'-O-methyl modified nucleotide
  modified_base 79: mod_base = OTHER; note = nucleotide with phosphorothioate linkage
  modified_base 80: mod_base = OTHER; note = 2'-O-methyl modified nucleotide with phosphorothioate linkage
  modified_base 81: mod_base = OTHER; note = 2'-O-methyl modified nucleotide
gttgtagctcccttcgaaagaccgttgctacaataaggccgtcgaaagatgtgccgcaacgctctgccttctggcatcgtt

SEQ ID NO: 1087 - RNA, 81 nt, synthetic construct; identical to SEQ ID NO: 1086
  source 1..81: mol_type = other RNA
  modified_base 1: mod_base = OTHER; note = 2'-O-methyl modified nucleotide
  modified_base 5: mod_base = OTHER; note = 2'-O-methyl modified nucleotide
  modified_base 6: mod_base = OTHER; note = 2'-O-methyl modified nucleotide
  modified_base 7: mod_base = OTHER; note = 2'-O-methyl modified nucleotide
  modified_base 8: mod_base = OTHER; note = 2'-O-methyl modified nucleotide
  modified_base 13: mod_base = OTHER; note = 2'-O-methyl modified nucleotide
  modified_base 14: mod_base = OTHER; note = 2'-O-methyl modified nucleotide
  modified_base 15: mod_base = OTHER; note = 2'-O-methyl modified nucleotide
  modified_base 16: mod_base = OTHER; note = 2'-O-methyl modified nucleotide
  modified_base 17: mod_base = OTHER; note = 2'-O-methyl modified nucleotide
  modified_base 18: mod_base = OTHER; note = 2'-O-methyl modified nucleotide
  modified_base 19: mod_base = OTHER; note = 2'-O-methyl modified nucleotide
  modified_base 20: mod_base = OTHER; note = 2'-O-methyl modified nucleotide
  modified_base 21: mod_base = OTHER; note = 2'-O-methyl modified nucleotide
  modified_base 22: mod_base = OTHER; note = 2'-O-methyl modified nucleotide
  modified_base 23: mod_base = OTHER; note = 2'-O-methyl modified nucleotide
  modified_base 27: mod_base = OTHER; note = 2'-O-methyl modified nucleotide
  modified_base 28: mod_base = OTHER; note = 2'-O-methyl modified nucleotide
  modified_base 31: mod_base = OTHER; note = 2'-O-methyl modified nucleotide
  modified_base 38: mod_base = OTHER; note = 2'-O-methyl modified nucleotide
  modified_base 39: mod_base = OTHER; note = 2'-O-methyl modified nucleotide
  modified_base 41: mod_base = OTHER; note = 2'-O-methyl modified nucleotide
  modified_base 42: mod_base = OTHER; note = 2'-O-methyl modified nucleotide
  modified_base 43: mod_base = OTHER; note = 2'-O-methyl modified nucleotide
  modified_base 44: mod_base = OTHER; note = 2'-O-methyl modified nucleotide
  modified_base 45: mod_base = OTHER; note = 2'-O-methyl modified nucleotide
  modified_base 46: mod_base = OTHER; note = 2'-O-methyl modified nucleotide
  modified_base 47: mod_base = OTHER; note = 2'-O-methyl modified nucleotide
  modified_base 48: mod_base = OTHER; note = 2'-O-methyl modified nucleotide
  modified_base 49: mod_base = OTHER; note = 2'-O-methyl modified nucleotide
  modified_base 50: mod_base = OTHER; note = 2'-O-methyl modified nucleotide
  modified_base 55: mod_base = OTHER; note = 2'-O-methyl modified nucleotide
  modified_base 57: mod_base = OTHER; note = 2'-O-methyl modified nucleotide
  modified_base 60: mod_base = OTHER; note = 2'-O-methyl modified nucleotide
  modified_base 66: mod_base = OTHER; note = 2'-O-methyl modified nucleotide
  modified_base 67: mod_base = OTHER; note = 2'-O-methyl modified nucleotide
  modified_base 69: mod_base = OTHER; note = 2'-O-methyl modified nucleotide
  modified_base 70: mod_base = OTHER; note = 2'-O-methyl modified nucleotide
  modified_base 71: mod_base = OTHER; note = 2'-O-methyl modified nucleotide
  modified_base 72: mod_base = OTHER; note = 2'-O-methyl modified nucleotide
  modified_base 79: mod_base = OTHER; note = nucleotide with phosphorothioate linkage
  modified_base 80: mod_base = OTHER; note = 2'-O-methyl modified nucleotide with phosphorothioate linkage
  modified_base 81: mod_base = OTHER; note = 2'-O-methyl modified nucleotide

SEQ ID NO: 1088 - RNA, 81 nt, synthetic construct; identical to SEQ ID NO: 1086
  source 1..81: mol_type = other RNA
  modified_base 1: mod_base = OTHER; note = 2'-O-methyl modified nucleotide
  modified_base 5: mod_base = OTHER; note = 2'-O-methyl modified nucleotide
  modified_base 6: mod_base = OTHER; note = 2'-O-methyl modified nucleotide
  modified_base 7: mod_base = OTHER; note = 2'-O-methyl modified nucleotide
  modified_base 8: mod_base = OTHER; note = 2'-O-methyl modified nucleotide
  modified_base 13: mod_base = OTHER; note = 2'-O-methyl modified nucleotide
  modified_base 14: mod_base = OTHER; note = 2'-O-methyl modified nucleotide
  modified_base 15: mod_base = OTHER; note = 2'-O-methyl modified nucleotide
  modified_base 16: mod_base = OTHER; note = 2'-O-methyl modified nucleotide
  modified_base 17: mod_base = OTHER; note = 2'-O-methyl modified nucleotide
  modified_base 18: mod_base = OTHER; note = 2'-O-methyl modified nucleotide
  modified_base 19: mod_base = OTHER; note = 2'-O-methyl modified nucleotide
  modified_base 20: mod_base = OTHER; note = 2'-O-methyl modified nucleotide
  modified_base 21: mod_base = OTHER; note = 2'-O-methyl modified nucleotide
  modified_base 22: mod_base = OTHER; note = 2'-O-methyl modified nucleotide
  modified_base 23: mod_base = OTHER; note = 2'-O-methyl modified nucleotide
  modified_base 27: mod_base = OTHER; note = 2'-O-methyl modified nucleotide
  modified_base 28: mod_base = OTHER; note = 2'-O-methyl modified nucleotide
  modified_base 31: mod_base = OTHER; note = 2'-O-methyl modified nucleotide
  modified_base 34: mod_base = OTHER; note = nucleotide with phosphorothioate linkage
  modified_base 38: mod_base = OTHER; note = 2'-O-methyl modified nucleotide
  modified_base 39: mod_base = OTHER; note = 2'-O-methyl modified nucleotide
  modified_base 41: mod_base = OTHER; note = 2'-O-methyl modified nucleotide
  modified_base 42: mod_base = OTHER; note = 2'-O-methyl modified nucleotide
  modified_base 43: mod_base = OTHER; note = 2'-O-methyl modified nucleotide
  modified_base 44: mod_base = OTHER; note = 2'-O-methyl modified nucleotide
  modified_base 45: mod_base = OTHER; note = 2'-O-methyl modified nucleotide
  modified_base 46: mod_base = OTHER; note = 2'-O-methyl modified nucleotide
  modified_base 47: mod_base = OTHER; note = 2'-O-methyl modified nucleotide
  modified_base 48: mod_base = OTHER; note = 2'-O-methyl modified nucleotide
  modified_base 49: mod_base = OTHER; note = 2'-O-methyl modified nucleotide
  modified_base 50: mod_base = OTHER; note = 2'-O-methyl modified nucleotide
  modified_base 55: mod_base = OTHER; note = 2'-O-methyl modified nucleotide
  modified_base 57: mod_base = OTHER; note = 2'-O-methyl modified nucleotide
  modified_base 60: mod_base = OTHER; note = 2'-O-methyl modified nucleotide
  modified_base 62: mod_base = OTHER; note = 2'-O-methyl modified nucleotide
  modified_base 63: mod_base = OTHER; note = 2'-O-methyl modified nucleotide
  modified_base 64: mod_base = OTHER; note = 2'-O-methyl modified nucleotide
  modified_base 65: mod_base = OTHER; note = 2'-O-methyl modified nucleotide
  modified_base 66: mod_base = OTHER; note = 2'-O-methyl modified nucleotide
  modified_base 67: mod_base = OTHER; note = 2'-O-methyl modified nucleotide
  modified_base 69: mod_base = OTHER; note = 2'-O-methyl modified nucleotide
  modified_base 70: mod_base = OTHER; note = 2'-O-methyl modified nucleotide
  modified_base 71: mod_base = OTHER; note = 2'-O-methyl modified nucleotide
  modified_base 72: mod_base = OTHER; note = 2'-O-methyl modified nucleotide
  modified_base 79: mod_base = OTHER; note = nucleotide with phosphorothioate linkage
  modified_base 80: mod_base = OTHER; note = 2'-O-methyl modified nucleotide with phosphorothioate linkage
  modified_base 81: mod_base = OTHER; note = 2'-O-methyl modified nucleotide

SEQ ID NO: 1089 - RNA, 81 nt, synthetic construct; identical to SEQ ID NO: 1086
  source 1..81: mol_type = other RNA
  modified_base 1: mod_base = OTHER; note = 2'-O-methyl modified nucleotide
  modified_base 5: mod_base = OTHER; note = 2'-O-methyl modified nucleotide
  modified_base 6: mod_base = OTHER; note = 2'-O-methyl modified nucleotide
  modified_base 7: mod_base = OTHER; note = 2'-O-methyl modified nucleotide
  modified_base 8: mod_base = OTHER; note = 2'-O-methyl modified nucleotide
  modified_base 13: mod_base = OTHER; note = 2'-O-methyl modified nucleotide
  modified_base 14: mod_base = OTHER; note = 2'-O-methyl modified nucleotide
  modified_base 15: mod_base = OTHER; note = 2'-O-methyl modified nucleotide
  modified_base 16: mod_base = OTHER; note = 2'-O-methyl modified nucleotide
  modified_base 17: mod_base = OTHER; note = 2'-O-methyl modified nucleotide
  modified_base 18: mod_base = OTHER; note = 2'-O-methyl modified nucleotide
  modified_base 19: mod_base = OTHER; note = 2'-O-methyl modified nucleotide
  modified_base 20: mod_base = OTHER; note = 2'-O-methyl modified nucleotide
  modified_base 21: mod_base = OTHER; note = 2'-O-methyl modified nucleotide
  modified_base 22: mod_base = OTHER; note = 2'-O-methyl modified nucleotide
  modified_base 23: mod_base = OTHER; note = 2'-O-methyl modified nucleotide
  modified_base 27: mod_base = OTHER; note = 2'-O-methyl modified nucleotide
  modified_base 28: mod_base = OTHER; note = 2'-O-methyl modified nucleotide
  modified_base 31: mod_base = OTHER; note = 2'-O-methyl modified nucleotide
  modified_base 38: mod_base = OTHER; note = 2'-O-methyl modified nucleotide
  modified_base 39: mod_base = OTHER; note = 2'-O-methyl modified nucleotide
  modified_base 41: mod_base = OTHER; note = 2'-O-methyl modified nucleotide
  modified_base 42: mod_base = OTHER; note = 2'-O-methyl modified nucleotide
  modified_base 43: mod_base = OTHER; note = 2'-O-methyl modified nucleotide
  modified_base 44: mod_base = OTHER; note = 2'-O-methyl modified nucleotide
  modified_base 45: mod_base = OTHER; note = 2'-O-methyl modified nucleotide
  modified_base 46: mod_base = OTHER; note = 2'-O-methyl modified nucleotide
  modified_base 47: mod_base = OTHER; note = 2'-O-methyl modified nucleotide
  modified_base 48: mod_base = OTHER; note = 2'-O-methyl modified nucleotide
  modified_base 49: mod_base = OTHER; note = 2'-O-methyl modified nucleotide
  modified_base 50: mod_base = OTHER; note = 2'-O-methyl modified nucleotide
  modified_base 55: mod_base = OTHER; note = 2'-O-methyl modified nucleotide
  modified_base 57: mod_base = OTHER; note = 2'-O-methyl modified nucleotide
  modified_base 60: mod_base = OTHER; note = 2'-O-methyl modified nucleotide
  modified_base 62: mod_base = OTHER; note = 2'-O-methyl modified nucleotide
  modified_base 63: mod_base = OTHER; note = 2'-O-methyl modified nucleotide
  modified_base 64: mod_base = OTHER; note = 2'-O-methyl modified nucleotide
  modified_base 65: mod_base = OTHER; note = 2'-O-methyl modified nucleotide
  modified_base 66: mod_base = OTHER; note = 2'-O-methyl modified nucleotide
  modified_base 67: mod_base = OTHER; note = 2'-O-methyl modified nucleotide
  modified_base 69: mod_base = OTHER; note = 2'-O-methyl modified nucleotide
  modified_base 70: mod_base = OTHER; note = 2'-O-methyl modified nucleotide
  modified_base 71: mod_base = OTHER; note = 2'-O-methyl modified nucleotide
  modified_base 72: mod_base = OTHER; note = 2'-O-methyl modified nucleotide
  modified_base 79: mod_base = OTHER; note = nucleotide with phosphorothioate linkage
  modified_base 80: mod_base = OTHER; note = 2'-O-methyl modified nucleotide with phosphorothioate linkage
  modified_base 81: mod_base = OTHER; note = 2'-O-methyl modified nucleotide

SEQ ID NO: 1090-1100 - skipped (11 entries)

SEQ ID NO: 1101 - RNA, 101 nt, synthetic construct
  source 1..101: mol_type = other RNA
atatccagaaccctgaccctgccggttgtagctccctgaaaccgttgctacaataaggccgtcgaaagatgtgccgcaacgctctgccttctggcatcgtt

SEQ ID NO: 1102 - RNA, 101 nt, synthetic construct; identical to SEQ ID NO: 811
  source 1..101: mol_type = other RNA

SEQ ID NO: 1103 - RNA, 101 nt, synthetic construct
  source 1..101: mol_type = other RNA
caggccacagcactgttgctcttggttgtagctccctgaaaccgttgctacaataaggccgtcgaaagatgtgccgcaacgctctgccttctggcatcgtt

SEQ ID NO: 1104 - RNA, 101 nt, synthetic construct
  source 1..101: mol_type = other RNA
cccagcccaggtaagggcagctttgttgtagctccctgaaaccgttgctacaataaggccgtcgaaagatgtgccgcaacgctctgccttctggcatcgtt

SEQ ID NO: 1105 - RNA, 101 nt, synthetic construct
  source 1..101: mol_type = other RNA
gtcttacctgtttcaaagcttttcgttgtagctccctgaaaccgttgctacaataaggccgtcgaaagatgtgccgcaacgctctgccttctggcatcgtt

SEQ ID NO: 1106 - RNA, 101 nt, synthetic construct
  source 1..101: mol_type = other RNA
ctttgaaacaggtaagacaggggtgttgtagctccctgaaaccgttgctacaataaggccgtcgaaagatgtgccgcaacgctctgccttctggcatcgtt

SEQ ID NO: 1107 - RNA, 101 nt, synthetic construct
  source 1..101: mol_type = other RNA
ttaggttcgtatctgtaaaaccaagttgtagctccctgaaaccgttgctacaataaggccgtcgaaagatgtgccgcaacgctctgccttctggcatcgtt

SEQ ID NO: 1108 - RNA, 101 nt, synthetic construct
  source 1..101: mol_type = other RNA
ttacagatacgaacctaaactttcgttgtagctccctgaaaccgttgctacaataaggccgtcgaaagatgtgccgcaacgctctgccttctggcatcgtt

SEQ ID NO: 1109 - RNA, 101 nt, synthetic construct
  source 1..101: mol_type = other RNA
ttgaaagtttaggttcgtatctgtgttgtagctccctgaaaccgttgctacaataaggccgtcgaaagatgtgccgcaacgctctgccttctggcatcgtt

SEQ ID NO: 1110 - RNA, 101 nt, synthetic construct
  source 1..101: mol_type = other RNA
actttcaaaacctgtcagtgattggttgtagctccctgaaaccgttgctacaataaggccgtcgaaagatgtgccgcaacgctctgccttctggcatcgtt

SEQ ID NO: 1111 - RNA, 101 nt, synthetic construct
  source 1..101: mol_type = other RNA
aaaacctgtcagtgattgggttccgttgtagctccctgaaaccgttgctacaataaggccgtcgaaagatgtgccgcaacgctctgccttctggcatcgtt

SEQ ID NO: 1112 - RNA, 101 nt, synthetic construct
  source 1..101: mol_type = other RNA
tgtcagtgattgggttccgaatccgttgtagctccctgaaaccgttgctacaataaggccgtcgaaagatgtgccgcaacgctctgccttctggcatcgtt

SEQ ID NO: 1113 - RNA, 101 nt, synthetic construct
  source 1..101: mol_type = other RNA
gggttccgaatcctcctcctgaaagttgtagctccctgaaaccgttgctacaataaggccgtcgaaagatgtgccgcaacgctctgccttctggcatcgtt

SEQ ID NO: 1114 - RNA, 101 nt, synthetic construct
  source 1..101: mol_type = other RNA
aaggcccctcacctcagctggaccgttgtagctccctgaaaccgttgctacaataaggccgtcgaaagatgtgccgcaacgctctgccttctggcatcgtt

SEQ ID NO: 1115 - RNA, 101 nt, synthetic construct
  source 1..101: mol_type = other RNA
agcttcaaggcccctcacctcagcgttgtagctccctgaaaccgttgctacaataaggccgtcgaaagatgtgccgcaacgctctgccttctggcatcgtt

SEQ ID NO: 1116 - RNA, 101 nt, synthetic construct
  source 1..101: mol_type = other RNA
attccagatctgcaagattgtaaggttgtagctccctgaaaccgttgctacaataaggccgtcgaaagatgtgccgcaacgctctgccttctggcatcgtt

SEQ ID NO: 1117 - RNA, 101 nt, synthetic construct; identical to SEQ ID NO: 810
  source 1..101: mol_type = other RNA

SEQ ID NO: 1118 - RNA, 101 nt, synthetic construct
  source 1..101: mol_type = other RNA
atcatgtcctaaccctgatcctctgttgtagctccctgaaaccgttgctacaataaggccgtcgaaagatgtgccgcaacgctctgccttctggcatcgtt

SEQ ID NO: 1119 - RNA, 101 nt, synthetic construct
  source 1..101: mol_type = other RNA
gatcatgtcctaaccctgatcctcgttgtagctccctgaaaccgttgctacaataaggccgtcgaaagatgtgccgcaacgctctgccttctggcatcgtt

SEQ ID NO: 1120 - RNA, 101 nt, synthetic construct
  source 1..101: mol_type = other RNA
ggaaatgagatcatgtcctaacccgttgtagctccctgaaaccgttgctacaataaggccgtcgaaagatgtgccgcaacgctctgccttctggcatcgtt

SEQ ID NO: 1121-1200 - skipped (80 entries)

SEQ ID NO: 1201 - RNA, 101 nt, synthetic construct
  source 1..101: mol_type = other RNA
cacggacccgcagcccctcaaggagttgtagctccctgaaaccgttgctacaataaggccgtcgaaagatgtgccgcaacgctctgccttctggcatcgtt

SEQ ID NO: 1202 - RNA, 101 nt, synthetic construct
  source 1..101: mol_type = other RNA
acggacccgcagcccctcaaggaggttgtagctccctgaaaccgttgctacaataaggccgtcgaaagatgtgccgcaacgctctgccttctggcatcgtt

SEQ ID NO: 1203 - RNA, 101 nt, synthetic construct
  source 1..101: mol_type = other RNA
gacgagtggacccaggatagggccgttgtagctccctgaaaccgttgctacaataaggccgtcgaaagatgtgccgcaacgctctgccttctggcatcgtt

SEQ ID NO: 1204 - RNA, 101 nt, synthetic construct
  source 1..101: mol_type = other RNA
tggacccaggatagggccaaacccgttgtagctccctgaaaccgttgctacaataaggccgtcgaaagatgtgccgcaacgctctgccttctggcatcgtt

SEQ ID NO: 1205 - RNA, 101 nt, synthetic construct
  source 1..101: mol_type = other RNA
ggacccaggatagggccaaacccggttgtagctccctgaaaccgttgctacaataaggccgtcgaaagatgtgccgcaacgctctgccttctggcatcgtt

SEQ ID NO: 1206 - RNA, 101 nt, synthetic construct
  source 1..101: mol_type = other RNA
ccctgctttctttcagactgtggcgttgtagctccctgaaaccgttgctacaataaggccgtcgaaagatgtgccgcaacgctctgccttctggcatcgtt

SEQ ID NO: 1207 - RNA, 101 nt, synthetic construct
  source 1..101: mol_type = other RNA
gactgtggctttacctcgggtaaggttgtagctccctgaaaccgttgctacaataaggccgtcgaaagatgtgccgcaacgctctgccttctggcatcgtt

SEQ ID NO: 1208 - RNA, 101 nt, synthetic construct
  source 1..101: mol_type = other RNA
actgtggctttacctcgggtaagtgttgtagctccctgaaaccgttgctacaataaggccgtcgaaagatgtgccgcaacgctctgccttctggcatcgtt

SEQ ID NO: 1209 - RNA, 101 nt, synthetic construct
  source 1..101: mol_type = other RNA
tggctttacctcgggtaagtaagcgttgtagctccctgaaaccgttgctacaataaggccgtcgaaagatgtgccgcaacgctctgccttctggcatcgtt

SEQ ID NO: 1210 - RNA, 101 nt, synthetic construct
  source 1..101: mol_type = other RNA
tacctcgggtaagtaagcccttccgttgtagctccctgaaaccgttgctacaataaggccgtcgaaagatgtgccgcaacgctctgccttctggcatcgtt

SEQ ID NO: 1211 - RNA, 101 nt, synthetic construct
  source 1..101: mol_type = other RNA
aggaagggcttacttacccgaggtgttgtagctccctgaaaccgttgctacaataaggccgtcgaaagatgtgccgcaacgctctgccttctggcatcgtt

SEQ ID NO: 1212 - RNA, 101 nt, synthetic construct
  source 1..101: mol_type = other RNA
cgggtaagtaagcccttccttttcgttgtagctccctgaaaccgttgctacaataaggccgtcgaaagatgtgccgcaacgctctgccttctggcatcgtt

SEQ ID NO: 1213 - RNA, 101 nt, synthetic construct
  source 1..101: mol_type = other RNA
gggtaagtaagcccttccttttccgttgtagctccctgaaaccgttgctacaataaggccgtcgaaagatgtgccgcaacgctctgccttctggcatcgtt

SEQ ID NO: 1214 - RNA, 101 nt, synthetic construct
  source 1..101: mol_type = other RNA
tgccaacagtgtcctaccagcaaggttgtagctccctgaaaccgttgctacaataaggccgtcgaaagatgtgccgcaacgctctgccttctggcatcgtt

SEQ ID NO: 1215 - RNA, 101 nt, synthetic construct
  source 1..101: mol_type = other RNA
gtgtcctaccagcaaggggtcctggttgtagctccctgaaaccgttgctacaataaggccgtcgaaagatgtgccgcaacgctctgccttctggcatcgtt

SEQ ID NO: 1216 - RNA, 101 nt, synthetic construct
  source 1..101: mol_type = other RNA
tcctaccagcaaggggtcctgtctgttgtagctccctgaaaccgttgctacaataaggccgtcgaaagatgtgccgcaacgctctgccttctggcatcgtt

SEQ ID NO: 1217 - RNA, 101 nt, synthetic construct
  source 1..101: mol_type = other RNA
accatggccatcaacacaagggcggttgtagctccctgaaaccgttgctacaataaggccgtcgaaagatgtgccgcaacgctctgccttctggcatcgtt

SEQ ID NO: 1218 - RNA, 101 nt, synthetic construct
  source 1..101: mol_type = other RNA
ccatggtaagcaggagggcaggatgttgtagctccctgaaaccgttgctacaataaggccgtcgaaagatgtgccgcaacgctctgccttctggcatcgtt

SEQ ID NO: 1219 - RNA, 101 nt, synthetic construct
  source 1..101: mol_type = other RNA
ggtcaagagaaaggatttctgaaggttgtagctccctgaaaccgttgctacaataaggccgtcgaaagatgtgccgcaacgctctgccttctggcatcgtt

SEQ ID NO: 1220 - RNA, 101 nt, synthetic construct
  source 1..101: mol_type = other RNA
gtcaagagaaaggatttctgaagggttgtagctccctgaaaccgttgctacaataaggccgtcgaaagatgtgccgcaacgctctgccttctggcatcgtt

SEQ ID NO: 1221 - RNA, 101 nt, synthetic construct
  source 1..101: mol_type = other RNA
ggctgccttcagaaatcctttctcgttgtagctccctgaaaccgttgctacaataaggccgtcgaaagatgtgccgcaacgctctgccttctggcatcgtt

SEQ ID NO: 1222 - RNA, 101 nt, synthetic construct
  source 1..101: mol_type = other RNA
cccacacccaaaaggccacactgggttgtagctccctgaaaccgttgctacaataaggccgtcgaaagatgtgccgcaacgctctgccttctggcatcgtt

SEQ ID NO: 1223 - RNA, 101 nt, synthetic construct
  source 1..101: mol_type = other RNA
acccaaaaggccacactggtgtgcgttgtagctccctgaaaccgttgctacaataaggccgtcgaaagatgtgccgcaacgctctgccttctggcatcgtt

SEQ ID NO: 1224 - RNA, 101 nt, synthetic construct
  source 1..101: mol_type = other RNA
tccttcccattcacccaccagctcgttgtagctccctgaaaccgttgctacaataaggccgtcgaaagatgtgccgcaacgctctgccttctggcatcgtt

SEQ ID NO: 1225 - RNA, 101 nt, synthetic construct
  source 1..101: mol_type = other RNA
gacccgcagcccctcaaggagcaggttgtagctccctgaaaccgttgctacaataaggccgtcgaaagatgtgccgcaacgctctgccttctggcatcgtt

SEQ ID NO: 1226 - RNA, 101 nt, synthetic construct
  source 1..101: mol_type = other RNA
acccgcagcccctcaaggagcagcgttgtagctccctgaaaccgttgctacaataaggccgtcgaaagatgtgccgcaacgctctgccttctggcatcgtt

SEQ ID NO: 1227 - RNA, 101 nt, synthetic construct
  source 1..101: mol_type = other RNA
ctcaaggagcagcccgccctcaatgttgtagctccctgaaaccgttgctacaataaggccgtcgaaagatgtgccgcaacgctctgccttctggcatcgtt

SEQ ID NO: 1228 - RNA, 101 nt, synthetic construct
  source 1..101: mol_type = other RNA
agcccgccctcaatgactccagatgttgtagctccctgaaaccgttgctacaataaggccgtcgaaagatgtgccgcaacgctctgccttctggcatcgtt

SEQ ID NO: 1229 - RNA, 101 nt, synthetic construct
  source 1..101: mol_type = other RNA
cggccaccttctggcagaacccccgttgtagctccctgaaaccgttgctacaataaggccgtcgaaagatgtgccgcaacgctctgccttctggcatcgtt

SEQ ID NO: 1230 - RNA, 101 nt, synthetic construct
  source 1..101: mol_type = other RNA
gggggttctgccagaaggtggccggttgtagctccctgaaaccgttgctacaataaggccgtcgaaagatgtgccgcaacgctctgccttctggcatcgtt

SEQ ID NO: 1231 - RNA, 101 nt, synthetic construct
  source 1..101: mol_type = other RNA
cgggggttctgccagaaggtggccgttgtagctccctgaaaccgttgctacaataaggccgtcgaaagatgtgccgcaacgctctgccttctggcatcgtt

SEQ ID NO: 1232 - RNA, 101 nt, synthetic construct
  source 1..101: mol_type = other RNA
ccttctggcagaacccccgcaaccgttgtagctccctgaaaccgttgctacaataaggccgtcgaaagatgtgccgcaacgctctgccttctggcatcgtt

SEQ ID NO: 1233 - RNA, 101 nt, synthetic construct
  source 1..101: mol_type = other RNA
tggttgcgggggttctgccagaaggttgtagctccctgaaaccgttgctacaataaggccgtcgaaagatgtgccgcaacgctctgccttctggcatcgtt

SEQ ID NO: 1234 - RNA, 101 nt, synthetic construct
  source 1..101: mol_type = other RNA
ctgggtccactcgtcattctccgagttgtagctccctgaaaccgttgctacaataaggccgtcgaaagatgtgccgcaacgctctgccttctggcatcgtt

SEQ ID NO: 1235 - RNA, 101 nt, synthetic construct
  source 1..101: mol_type = other RNA
cctgggtccactcgtcattctccggttgtagctccctgaaaccgttgctacaataaggccgtcgaaagatgtgccgcaacgctctgccttctggcatcgtt

SEQ ID NO: 1236 - RNA, 101 nt, synthetic construct
  source 1..101: mol_type = other RNA
gagaatgacgagtggacccaggatgttgtagctccctgaaaccgttgctacaataaggccgtcgaaagatgtgccgcaacgctctgccttctggcatcgtt

SEQ ID NO: 1237 - RNA, 101 nt, synthetic construct
  source 1..101: mol_type = other RNA
tgacgagtggacccaggatagggcgttgtagctccctgaaaccgttgctacaataaggccgtcgaaagatgtgccgcaacgctctgccttctggcatcgtt

SEQ ID NO: 1238 - RNA, 101 nt, synthetic construct
  source 1..101: mol_type = other RNA
gccctatcctgggtccactcgtcagttgtagctccctgaaaccgttgctacaataaggccgtcgaaagatgtgccgcaacgctctgccttctggcatcgtt

SEQ ID NO: 1239 - RNA, 101 nt, synthetic construct
  source 1..101: mol_type = other RNA
aggcctggggtagagcaggtgagtgttgtagctccctgaaaccgttgctacaataaggccgtcgaaagatgtgccgcaacgctctgccttctggcatcgtt

SEQ ID NO: 1240 - RNA, 101 nt, synthetic construct
  source 1..101: mol_type = other RNA
aggccccactcacctgctctacccgttgtagctccctgaaaccgttgctacaataaggccgtcgaaagatgtgccgcaacgctctgccttctggcatcgtt

SEQ ID NO: 1241 - RNA, 101 nt, synthetic construct
  source 1..101: mol_type = other RNA
gagcaggtgagtggggcctggggagttgtagctccctgaaaccgttgctacaataaggccgtcgaaagatgtgccgcaacgctctgccttctggcatcgtt

SEQ ID NO: 1242 - RNA, 101 nt, synthetic construct
  source 1..101: mol_type = other RNA
tccccaggccccactcacctgctcgttgtagctccctgaaaccgttgctacaataaggccgtcgaaagatgtgccgcaacgctctgccttctggcatcgtt

SEQ ID NO: 1243 - RNA, 101 nt, synthetic construct
  source 1..101: mol_type = other RNA
ctccccaggccccactcacctgctgttgtagctccctgaaaccgttgctacaataaggccgtcgaaagatgtgccgcaacgctctgccttctggcatcgtt

SEQ ID NO: 1244 - RNA, 101 nt, synthetic construct
  source 1..101: mol_type = other RNA
tctccccaggccccactcacctgcgttgtagctccctgaaaccgttgctacaataaggccgtcgaaagatgtgccgcaacgctctgccttctggcatcgtt

SEQ ID NO: 1245 - RNA, 101 nt, synthetic construct
  source 1..101: mol_type = other RNA
accagcaaggggtcctgtctgccagttgtagctccctgaaaccgttgctacaataaggccgtcgaaagatgtgccgcaacgctctgccttctggcatcgtt

SEQ ID NO: 1246 - RNA, 91 nt, synthetic construct
  source 1..91: mol_type = other RNA
ccacacccaaaaggccacacgttttagagctagaaatagcaagttaaaataaggctagtccgttatcacgaaagggcaccgagtcggtgct

SEQ ID NO: 1247 - RNA, 101 nt, synthetic construct
  source 1..101: mol_type = other RNA
cacagacccgcagcccctcaaggagttgtagctccctgaaaccgttgctacaataaggccgtcgaaagatgtgccgcaacgctctgccttctggcatcgtt

SEQ ID NO: 1248 - RNA, 101 nt, synthetic construct
  source 1..101: mol_type = other RNA
acagacccgcagcccctcaaggaggttgtagctccctgaaaccgttgctacaataaggccgtcgaaagatgtgccgcaacgctctgccttctggcatcgtt

SEQ ID NO: 1249 - RNA, 101 nt, synthetic construct
  source 1..101: mol_type = other RNA
tggacccaggatagggccaaacctgttgtagctccctgaaaccgttgctacaataaggccgtcgaaagatgtgccgcaacgctctgccttctggcatcgtt

SEQ ID NO: 1250 - RNA, 101 nt, synthetic construct
  source 1..101: mol_type = other RNA
ggacccaggatagggccaaacctggttgtagctccctgaaaccgttgctacaataaggccgtcgaaagatgtgccgcaacgctctgccttctggcatcgtt

SEQ ID NO: 1251 - RNA, 101 nt, synthetic construct
  source 1..101: mol_type = other RNA
gccaaacctgtcacccagatcgtcgttgtagctccctgaaaccgttgctacaataaggccgtcgaaagatgtgccgcaacgctctgccttctggcatcgtt

SEQ ID NO: 1252 - RNA, 101 nt, synthetic construct
  source 1..101: mol_type = other RNA
cctgtcacccagatcgtcagcgccgttgtagctccctgaaaccgttgctacaataaggccgtcgaaagatgtgccgcaacgctctgccttctggcatcgtt

SEQ ID NO: 1253 - RNA, 101 nt, synthetic construct
  source 1..101: mol_type = other RNA
ccctgttttctttcagactgtggcgttgtagctccctgaaaccgttgctacaataaggccgtcgaaagatgtgccgcaacgctctgccttctggcatcgtt

SEQ ID NO: 1254 - RNA, 101 nt, synthetic construct
  source 1..101: mol_type = other RNA
tgttttctttcagactgtggcttcgttgtagctccctgaaaccgttgctacaataaggccgtcgaaagatgtgccgcaacgctctgccttctggcatcgtt

SEQ ID NO: 1255 - RNA, 101 nt, synthetic construct
  source 1..101: mol_type = other RNA
tggcttcacctccggtaagtgagtgttgtagctccctgaaaccgttgctacaataaggccgtcgaaagatgtgccgcaacgctctgccttctggcatcgtt

SEQ ID NO: 1256 - RNA, 101 nt, synthetic construct
  source 1..101: mol_type = other RNA
aggagagactcacttaccggaggtgttgtagctccctgaaaccgttgctacaataaggccgtcgaaagatgtgccgcaacgctctgccttctggcatcgtt

SEQ ID NO: 1257 - RNA, 101 nt, synthetic construct
  source 1..101: mol_type = other RNA
ctgttgacaagaacagagcatgtagttgtagctccctgaaaccgttgctacaataaggccgtcgaaagatgtgccgcaacgctctgccttctggcatcgtt

SEQ ID NO: 1258 - RNA, 101 nt, synthetic construct
  source 1..101: mol_type = other RNA
tgtcaacagagtcttaccagcaaggttgtagctccctgaaaccgttgctacaataaggccgtcgaaagatgtgccgcaacgctctgccttctggcatcgtt

SEQ ID NO: 1259 - RNA, 101 nt, synthetic construct
  source 1..101: mol_type = other RNA
gagtcttaccagcaaggggtcctggttgtagctccctgaaaccgttgctacaataaggccgtcgaaagatgtgccgcaacgctctgccttctggcatcgtt

SEQ ID NO: 1260 - RNA, 101 nt, synthetic construct
  source 1..101: mol_type = other RNA
tcttaccagcaaggggtcctgtctgttgtagctccctgaaaccgttgctacaataaggccgtcgaaagatgtgccgcaacgctctgccttctggcatcgtt

SEQ ID NO: 1261 - RNA, 101 nt, synthetic construct
  source 1..101: mol_type = other RNA
accatggccatcagcacgagggcagttgtagctccctgaaaccgttgctacaataaggccgtcgaaagatgtgccgcaacgctctgccttctggcatcgtt

SEQ ID NO: 1262 - RNA, 101 nt, synthetic construct
  source 1..101: mol_type = other RNA
tctcttccacaggtcaagagaaaggttgtagctccctgaaaccgttgctacaataaggccgtcgaaagatgtgccgcaacgctctgccttctggcatcgtt

SEQ ID NO: 1263 - RNA, 101 nt, synthetic construct
  source 1..101: mol_type = other RNA
tcaagagaaaggattccagaggctgttgtagctccctgaaaccgttgctacaataaggccgtcgaaagatgtgccgcaacgctctgccttctggcatcgtt

SEQ ID NO: 1264 - RNA, 101 nt, synthetic construct
  source 1..101: mol_type = other RNA
agctagcctctggaatcctttctcgttgtagctccctgaaaccgttgctacaataaggccgtcgaaagatgtgccgcaacgctctgccttctggcatcgtt

SEQ ID NO: 1265 - RNA, 101 nt, synthetic construct
  source 1..101: mol_type = other RNA
ggatggttttggagctagcctctggttgtagctccctgaaaccgttgctacaataaggccgtcgaaagatgtgccgcaacgctctgccttctggcatcgtt

SEQ ID NO: 1266-1300 - skipped (35 entries)

SEQ ID NO: 1301 - RNA, 101 nt, synthetic construct
  source 1..101: mol_type = other RNA
tcaaagtaccctacaggaggaccagttgtagctccctgaaaccgttgctacaataaggccgtcgaaagatgtgccgcaacgctctgccttctggcatcgtt

SEQ ID NO: 1302 - RNA, 101 nt, synthetic construct
  source 1..101: mol_type = other RNA
agtaccctacaggaggaccagttcgttgtagctccctgaaaccgttgctacaataaggccgtcgaaagatgtgccgcaacgctctgccttctggcatcgtt

SEQ ID NO: 1303 - skipped

SEQ ID NO: 1304 - RNA, 101 nt, synthetic construct
  source 1..101: mol_type = other RNA
tacctgtcagagccccaaggtaaagttgtagctccctgaaaccgttgctacaataaggccgtcgaaagatgtgccgcaacgctctgccttctggcatcgtt

SEQ ID NO: 1305 - RNA, 101 nt, synthetic construct
  source 1..101: mol_type = other RNA
tttaccttggggctctgacaggtagttgtagctccctgaaaccgttgctacaataaggccgtcgaaagatgtgccgcaacgctctgccttctggcatcgtt

SEQ ID NO: 1306 - RNA, 101 nt, synthetic construct
  source 1..101: mol_type = other RNA
ttttaccttggggctctgacaggtgttgtagctccctgaaaccgttgctacaataaggccgtcgaaagatgtgccgcaacgctctgccttctggcatcgtt

SEQ ID NO: 1307 - RNA, 101 nt, synthetic construct
  source 1..101: mol_type = other RNA
gcctgggagggaagacaatgctcagttgtagctccctgaaaccgttgctacaataaggccgtcgaaagatgtgccgcaacgctctgccttctggcatcgtt

SEQ ID NO: 1308 - RNA, 101 nt, synthetic construct
  source 1..101: mol_type = other RNA
tcttccctcccaggcagctcacaggttgtagctccctgaaaccgttgctacaataaggccgtcgaaagatgtgccgcaacgctctgccttctggcatcgtt

SEQ ID NO: 1309 - RNA, 101 nt, synthetic construct
  source 1..101: mol_type = other RNA
tccctcccaggcagctcacagtgtgttgtagctccctgaaaccgttgctacaataaggccgtcgaaagatgtgccgcaacgctctgccttctggcatcgtt

SEQ ID NO: 1310 - RNA, 101 nt, synthetic construct
  source 1..101: mol_type = other RNA
ctcacagtgtgccaccatggagttgttgtagctccctgaaaccgttgctacaataaggccgtcgaaagatgtgccgcaacgctctgccttctggcatcgtt

SEQ ID NO: 1311 - RNA, 101 nt, synthetic construct
  source 1..101: mol_type = other RNA
tcacagtgtgccaccatggagttggttgtagctccctgaaaccgttgctacaataaggccgtcgaaagatgtgccgcaacgctctgccttctggcatcgtt

SEQ ID NO: 1312 - RNA, 101 nt, synthetic construct
  source 1..101: mol_type = other RNA
cacagtgtgccaccatggagttgggttgtagctccctgaaaccgttgctacaataaggccgtcgaaagatgtgccgcaacgctctgccttctggcatcgtt

SEQ ID NO: 1313 - RNA, 101 nt, synthetic construct
  source 1..101: mol_type = other RNA
gaagagattgagctctactcaggtgttgtagctccctgaaaccgttgctacaataaggccgtcgaaagatgtgccgcaacgctctgccttctggcatcgtt

SEQ ID NO: 1314 - RNA, 101 nt, synthetic construct
  source 1..101: mol_type = other RNA
acctgagtagagctcaatctcttcgttgtagctccctgaaaccgttgctacaataaggccgtcgaaagatgtgccgcaacgctctgccttctggcatcgtt

SEQ ID NO: 1315 - RNA, 101 nt, synthetic construct
  source 1..101: mol_type = other RNA
gagattgagctctactcaggtggggttgtagctccctgaaaccgttgctacaataaggccgtcgaaagatgtgccgcaacgctctgccttctggcatcgtt

SEQ ID NO: 1316 - RNA, 101 nt, synthetic construct
  source 1..101: mol_type = other RNA
attgagctctactcaggtgggcccgttgtagctccctgaaaccgttgctacaataaggccgtcgaaagatgtgccgcaacgctctgccttctggcatcgtt

SEQ ID NO: 1317 - RNA, 101 nt, synthetic construct
  source 1..101: mol_type = other RNA
ttgagctctactcaggtgggccctgttgtagctccctgaaaccgttgctacaataaggccgtcgaaagatgtgccgcaacgctctgccttctggcatcgtt

SEQ ID NO: 1318 - RNA, 101 nt, synthetic construct
  source 1..101: mol_type = other RNA
aggtgggccctcctccctctggtcgttgtagctccctgaaaccgttgctacaataaggccgtcgaaagatgtgccgcaacgctctgccttctggcatcgtt

SEQ ID NO: 1319 - RNA, 101 nt, synthetic construct
  source 1..101: mol_type = other RNA
cttttcctcccagaacccgacacagttgtagctccctgaaaccgttgctacaataaggccgtcgaaagatgtgccgcaacgctctgccttctggcatcgtt

SEQ ID NO: 1320 - RNA, 101 nt, synthetic construct
  source 1..101: mol_type = other RNA
gtctgtgtcgggttctgggaggaagttgtagctccctgaaaccgttgctacaataaggccgtcgaaagatgtgccgcaacgctctgccttctggcatcgtt

SEQ ID NO: 1321 - RNA, 101 nt, synthetic construct
  source 1..101: mol_type = other RNA
aacccgacacagacaccatcaactgttgtagctccctgaaaccgttgctacaataaggccgtcgaaagatgtgccgcaacgctctgccttctggcatcgtt

SEQ ID NO: 1322 - RNA, 101 nt, synthetic construct
  source 1..101: mol_type = other RNA
ggcttatgccaatatcggtgaggagttgtagctccctgaaaccgttgctacaataaggccgtcgaaagatgtgccgcaacgctctgccttctggcatcgtt

SEQ ID NO: 1323 - RNA, 101 nt, synthetic construct
  source 1..101: mol_type = other RNA
cttcctcaccgatattggcataaggttgtagctccctgaaaccgttgctacaataaggccgtcgaaagatgtgccgcaacgctctgccttctggcatcgtt

SEQ ID NO: 1324 - RNA, 101 nt, synthetic construct
  source 1..101: mol_type = other RNA
gcttcctcaccgatattggcataagttgtagctccctgaaaccgttgctacaataaggccgtcgaaagatgtgccgcaacgctctgccttctggcatcgtt

SEQ ID NO: 1325 - RNA, 101 nt, synthetic construct
  source 1..101: mol_type = other RNA
tgccaatatcggtgaggaagcaccgttgtagctccctgaaaccgttgctacaataaggccgtcgaaagatgtgccgcaacgctctgccttctggcatcgtt

SEQ ID NO: 1326 - RNA, 101 nt, synthetic construct
  source 1..101: mol_type = other RNA
ggtgcttcctcaccgatattggcagttgtagctccctgaaaccgttgctacaataaggccgtcgaaagatgtgccgcaacgctctgccttctggcatcgtt

SEQ ID NO: 1327 - RNA, 101 nt, synthetic construct
  source 1..101: mol_type = other RNA
gccaatatcggtgaggaagcacctgttgtagctccctgaaaccgttgctacaataaggccgtcgaaagatgtgccgcaacgctctgccttctggcatcgtt

SEQ ID NO: 1328 - RNA, 101 nt, synthetic construct
  source 1..101: mol_type = other RNA
ttttccttgtctgggcagcggaacgttgtagctccctgaaaccgttgctacaataaggccgtcgaaagatgtgccgcaacgctctgccttctggcatcgtt

SEQ ID NO: 1329 - RNA, 101 nt, synthetic construct
  source 1..101: mol_type = other RNA
gggcagcggaactggaccagtatggttgtagctccctgaaaccgttgctacaataaggccgtcgaaagatgtgccgcaacgctctgccttctggcatcgtt

SEQ ID NO: 1330 - RNA, 101 nt, synthetic construct
  source 1..101: mol_type = other RNA
gaactggaccagtatgtcttccaggttgtagctccctgaaaccgttgctacaataaggccgtcgaaagatgtgccgcaacgctctgccttctggcatcgtt

SEQ ID NO: 1331 - RNA, 101 nt, synthetic construct
  source 1..101: mol_type = other RNA
aactggaccagtatgtcttccagggttgtagctccctgaaaccgttgctacaataaggccgtcgaaagatgtgccgcaacgctctgccttctggcatcgtt

SEQ ID NO: 1332 - RNA, 101 nt, synthetic construct
  source 1..101: mol_type = other RNA
atgtcttccaggactcccagctgggttgtagctccctgaaaccgttgctacaataaggccgtcgaaagatgtgccgcaacgctctgccttctggcatcgtt

SEQ ID NO: 1333 - RNA, 101 nt, synthetic construct
  source 1..101: mol_type = other RNA
ttactgaaaatgtccttgctcagggttgtagctccctgaaaccgttgctacaataaggccgtcgaaagatgtgccgcaacgctctgccttctggcatcgtt

SEQ ID NO: 1334 - RNA, 101 nt, synthetic construct
  source 1..101: mol_type = other RNA
aacttactgaaaatgtccttgctcgttgtagctccctgaaaccgttgctacaataaggccgtcgaaagatgtgccgcaacgctctgccttctggcatcgtt

SEQ ID NO: 1335 - RNA, 101 nt, synthetic construct
  source 1..101: mol_type = other RNA
aaacttactgaaaatgtccttgctgttgtagctccctgaaaccgttgctacaataaggccgtcgaaagatgtgccgcaacgctctgccttctggcatcgtt

SEQ ID NO: 1336 - RNA, 101 nt, synthetic construct
  source 1..101: mol_type = other RNA
ccacccaccacaaacttactgaaagttgtagctccctgaaaccgttgctacaataaggccgtcgaaagatgtgccgcaacgctctgccttctggcatcgtt

SEQ ID NO: 1337 - RNA, 101 nt, synthetic construct
  source 1..101: mol_type = other RNA
tgtgctctactttgagaaaaaccagttgtagctccctgaaaccgttgctacaataaggccgtcgaaagatgtgccgcaacgctctgccttctggcatcgtt

SEQ ID NO: 1338 - RNA, 101 nt, synthetic construct
  source 1..101: mol_type = other RNA
ggtttttctcaaagtagagcacatgttgtagctccctgaaaccgttgctacaataaggccgtcgaaagatgtgccgcaacgctctgccttctggcatcgtt

SEQ ID NO: 1339 - RNA, 101 nt, synthetic construct
  source 1..101: mol_type = other RNA
ggtcctatgtgctctactttgagagttgtagctccctgaaaccgttgctacaataaggccgtcgaaagatgtgccgcaacgctctgccttctggcatcgtt

SEQ ID NO: 1340 - RNA, 101 nt, synthetic construct
  source 1..101: mol_type = other RNA
cagaaaagtcagaaaagacgtgaggttgtagctccctgaaaccgttgctacaataaggccgtcgaaagatgtgccgcaacgctctgccttctggcatcgtt

SEQ ID NO: 1341 - RNA, 101 nt, synthetic construct
  source 1..101: mol_type = other RNA
agaaaagtcagaaaagacgtgagtgttgtagctccctgaaaccgttgctacaataaggccgtcgaaagatgtgccgcaacgctctgccttctggcatcgtt

SEQ ID NO: 1342 - RNA, 101 nt, synthetic construct
  source 1..101: mol_type = other RNA
gaaaagtcagaaaagacgtgagtggttgtagctccctgaaaccgttgctacaataaggccgtcgaaagatgtgccgcaacgctctgccttctggcatcgtt

SEQ ID NO: 1343 - RNA, 101 nt, synthetic construct
  source 1..101: mol_type = other RNA
tcactcacgtcttttctgacttttgttgtagctccctgaaaccgttgctacaataaggccgtcgaaagatgtgccgcaacgctctgccttctggcatcgtt

SEQ ID NO: 1344 - RNA, 101 nt, synthetic construct
  source 1..101: mol_type = other RNA
ctcactcacgtcttttctgactttgttgtagctccctgaaaccgttgctacaataaggccgtcgaaagatgtgccgcaacgctctgccttctggcatcgtt

SEQ ID NO: 1345 - RNA, 101 nt, synthetic construct
  source 1..101: mol_type = other RNA
aagtcagaaaagacgtgagtgagcgttgtagctccctgaaaccgttgctacaataaggccgtcgaaagatgtgccgcaacgctctgccttctggcatcgtt

SEQ ID NO: 1346 - RNA, 101 nt, synthetic construct
  source 1..101: mol_type = other RNA
agtcagaaaagacgtgagtgagccgttgtagctccctgaaaccgttgctacaataaggccgtcgaaagatgtgccgcaacgctctgccttctggcatcgtt

SEQ ID NO: 1347 - RNA, 101 nt, synthetic construct
  source 1..101: mol_type = other RNA
aaaagacgtgagtgagcccctcccgttgtagctccctgaaaccgttgctacaataaggccgtcgaaagatgtgccgcaacgctctgccttctggcatcgtt

SEQ ID NO: 1348 - RNA, 101 nt, synthetic construct
  source 1..101: mol_type = other RNA
gacgtgagtgagcccctccctgatgttgtagctccctgaaaccgttgctacaataaggccgtcgaaagatgtgccgcaacgctctgccttctggcatcgtt

SEQ ID NO: 1349 - RNA, 101 nt, synthetic construct
  source 1..101: mol_type = other RNA
ctgcagagaaaacatgtgatcagcgttgtagctccctgaaaccgttgctacaataaggccgtcgaaagatgtgccgcaacgctctgccttctggcatcgtt

SEQ ID NO: 1350 - RNA, 101 nt, synthetic construct
  source 1..101: mol_type = other RNA
gctgcagagaaaacatgtgatcaggttgtagctccctgaaaccgttgctacaataaggccgtcgaaagatgtgccgcaacgctctgccttctggcatcgtt

SEQ ID NO: 1351 - RNA, 101 nt, synthetic construct
  source 1..101: mol_type = other RNA
ggctgcagagaaaacatgtgatcagttgtagctccctgaaaccgttgctacaataaggccgtcgaaagatgtgccgcaacgctctgccttctggcatcgtt

SEQ ID NO: 1352 - RNA, 101 nt, synthetic construct
  source 1..101: mol_type = other RNA
tttctctgcagccttcccagaggagttgtagctccctgaaaccgttgctacaataaggccgtcgaaagatgtgccgcaacgctctgccttctggcatcgtt

SEQ ID NO: 1353 - RNA, 101 nt, synthetic construct
  source 1..101: mol_type = other RNA
cagccttcccagaggagcttccgggttgtagctccctgaaaccgttgctacaataaggccgtcgaaagatgtgccgcaacgctctgccttctggcatcgtt

SEQ ID NO: 1354 - RNA, 101 nt, synthetic construct
  source 1..101: mol_type = other RNA
ttccagtgcttcaggtctgccggagttgtagctccctgaaaccgttgctacaataaggccgtcgaaagatgtgccgcaacgctctgccttctggcatcgtt

SEQ ID NO: 1355 - RNA, 101 nt, synthetic construct
  source 1..101: mol_type = other RNA
acacctggcttccagtgcttcagggttgtagctccctgaaaccgttgctacaataaggccgtcgaaagatgtgccgcaacgctctgccttctggcatcgtt

SEQ ID NO: 1356 - RNA, 101 nt, synthetic construct
  source 1..101: mol_type = other RNA
cagcccacctgccctgcacacctggttgtagctccctgaaaccgttgctacaataaggccgtcgaaagatgtgccgcaacgctctgccttctggcatcgtt

SEQ ID NO: 1357 - RNA, 101 nt, synthetic construct
  source 1..101: mol_type = other RNA
cacagcccacttcctcacagctgagttgtagctccctgaaaccgttgctacaataaggccgtcgaaagatgtgccgcaacgctctgccttctggcatcgtt

SEQ ID NO: 1358 - RNA, 101 nt, synthetic construct
  source 1..101: mol_type = other RNA
acagcccacttcctcacagctgaggttgtagctccctgaaaccgttgctacaataaggccgtcgaaagatgtgccgcaacgctctgccttctggcatcgtt

SEQ ID NO: 1359 - RNA, 101 nt, synthetic construct
  source 1..101: mol_type = other RNA
ctgcctgcgctgttcaaccaggaggttgtagctccctgaaaccgttgctacaataaggccgtcgaaagatgtgccgcaacgctctgccttctggcatcgtt

SEQ ID NO: 1360 - RNA, 101 nt, synthetic construct
  source 1..101: mol_type = other RNA
cctgcgctgttcaaccaggagccagttgtagctccctgaaaccgttgctacaataaggccgtcgaaagatgtgccgcaacgctctgccttctggcatcgtt

SEQ ID NO: 1361 - RNA, 101 nt, synthetic construct
  source 1..101: mol_type = other RNA
cgctgttcaaccaggagccagcctgttgtagctccctgaaaccgttgctacaataaggccgtcgaaagatgtgccgcaacgctctgccttctggcatcgtt

SEQ ID NO: 1362 - RNA, 101 nt, synthetic construct
  source 1..101: mol_type = other RNA
accaggagccagcctccggccagagttgtagctccctgaaaccgttgctacaataaggccgtcgaaagatgtgccgcaacgctctgccttctggcatcgtt

SEQ ID NO: 1363 - RNA, 101 nt, synthetic construct
  source 1..101: mol_type = other RNA
gcctccggccagatgcgcctggaggttgtagctccctgaaaccgttgctacaataaggccgtcgaaagatgtgccgcaacgctctgccttctggcatcgtt

SEQ ID NO: 1364 - RNA, 101 nt, synthetic construct
  source 1..101: mol_type = other RNA
ccggccagatgcgcctggagaaaagttgtagctccctgaaaccgttgctacaataaggccgtcgaaagatgtgccgcaacgctctgccttctggcatcgtt

SEQ ID NO: 1365 - RNA, 101 nt, synthetic construct
  source 1..101: mol_type = other RNA
aacatactgggaatctggtcggttgttgtagctccctgaaaccgttgctacaataaggccgtcgaaagatgtgccgcaacgctctgccttctggcatcgtt

SEQ ID NO: 1366 - RNA, 101 nt, synthetic construct
  source 1..101: mol_type = other RNA
ctgcctttgtctcttgcagtgcctgttgtagctccctgaaaccgttgctacaataaggccgtcgaaagatgtgccgcaacgctctgccttctggcatcgtt

SEQ ID NO: 1367 - RNA, 101 nt, synthetic construct
  source 1..101: mol_type = other RNA
ttgtctcttgcagtgcctttctccgttgtagctccctgaaaccgttgctacaataaggccgtcgaaagatgtgccgcaacgctctgccttctggcatcgtt

SEQ ID NO: 1368 - RNA, 101 nt, synthetic construct
  source 1..101: mol_type = other RNA
tgcctttctccagttcctcgttgagttgtagctccctgaaaccgttgctacaataaggccgtcgaaagatgtgccgcaacgctctgccttctggcatcgtt

SEQ ID NO: 1369 - RNA, 101 nt, synthetic construct
  source 1..101: mol_type = other RNA
tctccctgagggacccatccagttgttgtagctccctgaaaccgttgctacaataaggccgtcgaaagatgtgccgcaacgctctgccttctggcatcgtt

SEQ ID NO: 1370 - RNA, 101 nt, synthetic construct
  source 1..101: mol_type = other RNA
ctccctgagggacccatccagtttgttgtagctccctgaaaccgttgctacaataaggccgtcgaaagatgtgccgcaacgctctgccttctggcatcgtt

SEQ ID NO: 1371 - RNA, 101 nt, synthetic construct
  source 1..101: mol_type = other RNA
cctgagggacccatccagtttgtcgttgtagctccctgaaaccgttgctacaataaggccgtcgaaagatgtgccgcaacgctctgccttctggcatcgtt

SEQ ID NO: 1372 - RNA, 101 nt, synthetic construct
  source 1..101: mol_type = other RNA
ggacccatccagtttgtccccaccgttgtagctccctgaaaccgttgctacaataaggccgtcgaaagatgtgccgcaacgctctgccttctggcatcgtt

SEQ ID NO: 1373 - RNA, 101 nt, synthetic construct
  source 1..101: mol_type = other RNA
ccagtttgtccccaccatctccacgttgtagctccctgaaaccgttgctacaataaggccgtcgaaagatgtgccgcaacgctctgccttctggcatcgtt

SEQ ID NO: 1374 - RNA, 101 nt, synthetic construct
  source 1..101: mol_type = other RNA
cagtttgtccccaccatctccactgttgtagctccctgaaaccgttgctacaataaggccgtcgaaagatgtgccgcaacgctctgccttctggcatcgtt

SEQ ID NO: 1375 - RNA, 101 nt, synthetic construct
  source 1..101: mol_type = other RNA
agtttgtccccaccatctccactcgttgtagctccctgaaaccgttgctacaataaggccgtcgaaagatgtgccgcaacgctctgccttctggcatcgtt

SEQ ID NO: 1376 - RNA, 101 nt, synthetic construct
  source 1..101: mol_type = other RNA
caaatctctgaggctggaacaggggttgtagctccctgaaaccgttgctacaataaggccgtcgaaagatgtgccgcaacgctctgccttctggcatcgtt

SEQ ID NO: 1377 - RNA, 101 nt, synthetic construct
  source 1..101: mol_type = other RNA
accatggtagatgaatatactggagttgtagctccctgaaaccgttgctacaataaggccgtcgaaagatgtgccgcaacgctctgccttctggcatcgtt

SEQ ID NO: 1378 - RNA, 101 nt, synthetic construct
  source 1..101: mol_type = other RNA
caccatggtagatgaatatactgggttgtagctccctgaaaccgttgctacaataaggccgtcgaaagatgtgccgcaacgctctgccttctggcatcgtt

SEQ ID NO: 1379 - RNA, 101 nt, synthetic construct
  source 1..101: mol_type = other RNA
tcaccatggtagatgaatatactggttgtagctccctgaaaccgttgctacaataaggccgtcgaaagatgtgccgcaacgctctgccttctggcatcgtt

SEQ ID NO: 1380 - RNA, 101 nt, synthetic construct
  source 1..101: mol_type = other RNA
tctaccatggtgagtgcggggcctgttgtagctccctgaaaccgttgctacaataaggccgtcgaaagatgtgccgcaacgctctgccttctggcatcgtt

SEQ ID NO: 1381 - RNA, 101 nt, synthetic construct
  source 1..101: mol_type = other RNA
ctaccatggtgagtgcggggcctggttgtagctccctgaaaccgttgctacaataaggccgtcgaaagatgtgccgcaacgctctgccttctggcatcgtt

SEQ ID NO: 1382 - RNA, 101 nt, synthetic construct
  source 1..101: mol_type = other RNA
taccatggtgagtgcggggcctgggttgtagctccctgaaaccgttgctacaataaggccgtcgaaagatgtgccgcaacgctctgccttctggcatcgtt

SEQ ID NO: 1383 - RNA, 101 nt, synthetic construct
  source 1..101: mol_type = other RNA
atggtgagtgcggggcctggctccgttgtagctccctgaaaccgttgctacaataaggccgtcgaaagatgtgccgcaacgctctgccttctggcatcgtt

SEQ ID NO: 1384 - RNA, 101 nt, synthetic construct
  source 1..101: mol_type = other RNA
gtgagtgcggggcctggctccccggttgtagctccctgaaaccgttgctacaataaggccgtcgaaagatgtgccgcaacgctctgccttctggcatcgtt

SEQ ID NO: 1385 - RNA, 101 nt, synthetic construct
  source 1..101: mol_type = other RNA
actctccacccccaatgtaggtgagttgtagctccctgaaaccgttgctacaataaggccgtcgaaagatgtgccgcaacgctctgccttctggcatcgtt

SEQ ID NO: 1386 - RNA, 101 nt, synthetic construct
  source 1..101: mol_type = other RNA
ctctccacccccaatgtaggtgaggttgtagctccctgaaaccgttgctacaataaggccgtcgaaagatgtgccgcaacgctctgccttctggcatcgtt

SEQ ID NO: 1387 - RNA, 101 nt, synthetic construct
  source 1..101: mol_type = other RNA
tctccacccccaatgtaggtgagggttgtagctccctgaaaccgttgctacaataaggccgtcgaaagatgtgccgcaacgctctgccttctggcatcgtt

SEQ ID NO: 1388 - RNA, 101 nt, synthetic construct
  source 1..101: mol_type = other RNA
acccccaatgtaggtgaggtgcccgttgtagctccctgaaaccgttgctacaataaggccgtcgaaagatgtgccgcaacgctctgccttctggcatcgtt

SEQ ID NO: 1389 - RNA, 101 nt, synthetic construct
  source 1..101: mol_type = other RNA
ccaatgtaggtgaggtgccccagggttgtagctccctgaaaccgttgctacaataaggccgtcgaaagatgtgccgcaacgctctgccttctggcatcgtt

SEQ ID NO: 1390 - RNA, 101 nt, synthetic construct
  source 1..101: mol_type = other RNA
aggtgaggtgccccaggccagccagttgtagctccctgaaaccgttgctacaataaggccgtcgaaagatgtgccgcaacgctctgccttctggcatcgtt

SEQ ID NO: 1391 - RNA, 101 nt, synthetic construct
  source 1..101: mol_type = other RNA
ggtgaggtgccccaggccagccaagttgtagctccctgaaaccgttgctacaataaggccgtcgaaagatgtgccgcaacgctctgccttctggcatcgtt

SEQ ID NO: 1392 - RNA, 101 nt, synthetic construct
  source 1..101: mol_type = other RNA
gtgaggtgccccaggccagccaaggttgtagctccctgaaaccgttgctacaataaggccgtcgaaagatgtgccgcaacgctctgccttctggcatcgtt

SEQ ID NO: 1393 - RNA, 101 nt, synthetic construct
  source 1..101: mol_type = other RNA
tgaggtgccccaggccagccaagtgttgtagctccctgaaaccgttgctacaataaggccgtcgaaagatgtgccgcaacgctctgccttctggcatcgtt

SEQ ID NO: 1394 - RNA, 101 nt, synthetic construct
  source 1..101: mol_type = other RNA
ggtgccccaggccagccaagtaccgttgtagctccctgaaaccgttgctacaataaggccgtcgaaagatgtgccgcaacgctctgccttctggcatcgtt

SEQ ID NO: 1395 - RNA, 101 nt, synthetic construct
  source 1..101: mol_type = other RNA
gtgccccaggccagccaagtacccgttgtagctccctgaaaccgttgctacaataaggccgtcgaaagatgtgccgcaacgctctgccttctggcatcgtt

SEQ ID NO: 1396 - RNA, 101 nt, synthetic construct
  source 1..101: mol_type = other RNA
aagtaccccctcccagtggattcagttgtagctccctgaaaccgttgctacaataaggccgtcgaaagatgtgccgcaacgctctgccttctggcatcgtt

SEQ ID NO: 1397 - RNA, 101 nt, synthetic construct
  source 1..101: mol_type = other RNA
cctcccgagcaaacatgacaggtagttgtagctccctgaaaccgttgctacaataaggccgtcgaaagatgtgccgcaacgctctgccttctggcatcgtt

SEQ ID NO: 1398 - RNA, 101 nt, synthetic construct
  source 1..101: mol_type = other RNA
ctcccgagcaaacatgacaggtaagttgtagctccctgaaaccgttgctacaataaggccgtcgaaagatgtgccgcaacgctctgccttctggcatcgtt

SEQ ID NO: 1399 - RNA, 101 nt, synthetic construct
  source 1..101: mol_type = other RNA
caaacatgacaggtaaggacccttgttgtagctccctgaaaccgttgctacaataaggccgtcgaaagatgtgccgcaacgctctgccttctggcatcgtt

SEQ ID NO: 1400 - RNA, 101 nt, synthetic construct
  source 1..101: mol_type = other RNA
ttgtgctctggagatggagaagcagttgtagctccctgaaaccgttgctacaataaggccgtcgaaagatgtgccgcaacgctctgccttctggcatcgtt

SEQ ID NO: 1401 - RNA, 101 nt, synthetic construct
  source 1..101: mol_type = other RNA
gcttctccatctccagagcacaaggttgtagctccctgaaaccgttgctacaataaggccgtcgaaagatgtgccgcaacgctctgccttctggcatcgtt

SEQ ID NO: 1402 - RNA, 101 nt, synthetic construct
  source 1..101: mol_type = other RNA
cttctccatctccagagcacaagagttgtagctccctgaaaccgttgctacaataaggccgtcgaaagatgtgccgcaacgctctgccttctggcatcgtt

SEQ ID NO: 1403 - RNA, 101 nt, synthetic construct
  source 1..101: mol_type = other RNA
ttctccatctccagagcacaagacgttgtagctccctgaaaccgttgctacaataaggccgtcgaaagatgtgccgcaacgctctgccttctggcatcgtt

SEQ ID NO: 1404 - RNA, 101 nt, synthetic construct
  source 1..101: mol_type = other RNA
tctccatctccagagcacaagacggttgtagctccctgaaaccgttgctacaataaggccgtcgaaagatgtgccgcaacgctctgccttctggcatcgtt

SEQ ID NO: 1405 - RNA, 101 nt, synthetic construct
  source 1..101: mol_type = other RNA
ccatctccagagcacaagacgtccgttgtagctccctgaaaccgttgctacaataaggccgtcgaaagatgtgccgcaacgctctgccttctggcatcgtt

SEQ ID NO: 1406 - RNA, 101 nt, synthetic construct
  source 1..101: mol_type = other RNA
catctccagagcacaagacgtcccgttgtagctccctgaaaccgttgctacaataaggccgtcgaaagatgtgccgcaacgctctgccttctggcatcgtt

SEQ ID NO: 1407 - RNA, 101 nt, synthetic construct
  source 1..101: mol_type = other RNA
agagcacaagacgtcccccacccagttgtagctccctgaaaccgttgctacaataaggccgtcgaaagatgtgccgcaacgctctgccttctggcatcgtt

SEQ ID NO: 1408 - RNA, 101 nt, synthetic construct
  source 1..101: mol_type = other RNA
acccaatgcccggcagctggagaggttgtagctccctgaaaccgttgctacaataaggccgtcgaaagatgtgccgcaacgctctgccttctggcatcgtt

SEQ ID NO: 1409 - RNA, 101 nt, synthetic construct
  source 1..101: mol_type = other RNA
ccattttggaagcttgttggagacgttgtagctccctgaaaccgttgctacaataaggccgtcgaaagatgtgccgcaacgctctgccttctggcatcgtt

SEQ ID NO: 1410 - RNA, 101 nt, synthetic construct
  source 1..101: mol_type = other RNA
ccaggccattttggaagcttgttggttgtagctccctgaaaccgttgctacaataaggccgtcgaaagatgtgccgcaacgctctgccttctggcatcgtt

SEQ ID NO: 1411 - RNA, 101 nt, synthetic construct
  source 1..101: mol_type = other RNA
gcctggtgagtgatgcgggatctcgttgtagctccctgaaaccgttgctacaataaggccgtcgaaagatgtgccgcaacgctctgccttctggcatcgtt

SEQ ID NO: 1412 - RNA, 101 nt, synthetic construct
  source 1..101: mol_type = other RNA
cctggtgagtgatgcgggatctctgttgtagctccctgaaaccgttgctacaataaggccgtcgaaagatgtgccgcaacgctctgccttctggcatcgtt

SEQ ID NO: 1413 - RNA, 101 nt, synthetic construct
  source 1..101: mol_type = other RNA
cctttgcagagccggtggagcagtgttgtagctccctgaaaccgttgctacaataaggccgtcgaaagatgtgccgcaacgctctgccttctggcatcgtt

SEQ ID NO: 1414 - RNA, 101 nt, synthetic construct
  source 1..101: mol_type = other RNA
tagaactgctccaccggctctgcagttgtagctccctgaaaccgttgctacaataaggccgtcgaaagatgtgccgcaacgctctgccttctggcatcgtt

SEQ ID NO: 1415 - RNA, 101 nt, synthetic construct
  source 1..101: mol_type = other RNA
taccgctcactgcaggacacgtatgttgtagctccctgaaaccgttgctacaataaggccgtcgaaagatgtgccgcaacgctctgccttctggcatcgtt

SEQ ID NO: 1416 - RNA, 101 nt, synthetic construct
  source 1..101: mol_type = other RNA
ctcactgcaggacacgtatggtgcgttgtagctccctgaaaccgttgctacaataaggccgtcgaaagatgtgccgcaacgctctgccttctggcatcgtt

SEQ ID NO: 1417 - RNA, 101 nt, synthetic construct
  source 1..101: mol_type = other RNA
tcactgcaggacacgtatggtgccgttgtagctccctgaaaccgttgctacaataaggccgtcgaaagatgtgccgcaacgctctgccttctggcatcgtt

SEQ ID NO: 1418 - RNA, 101 nt, synthetic construct
  source 1..101: mol_type = other RNA
aggacacgtatggtgccgagcccggttgtagctccctgaaaccgttgctacaataaggccgtcgaaagatgtgccgcaacgctctgccttctggcatcgtt

SEQ ID NO: 1419 - RNA, 101 nt, synthetic construct
  source 1..101: mol_type = other RNA
gcccagtccggggtggccagttccgttgtagctccctgaaaccgttgctacaataaggccgtcgaaagatgtgccgcaacgctctgccttctggcatcgtt

SEQ ID NO: 1420 - RNA, 101 nt, synthetic construct
  source 1..101: mol_type = other RNA
gttctgcccagtccggggtggccagttgtagctccctgaaaccgttgctacaataaggccgtcgaaagatgtgccgcaacgctctgccttctggcatcgtt

SEQ ID NO: 1421 - RNA, 101 nt, synthetic construct
  source 1..101: mol_type = other RNA
cgttctgcccagtccggggtggccgttgtagctccctgaaaccgttgctacaataaggccgtcgaaagatgtgccgcaacgctctgccttctggcatcgtt

SEQ ID NO: 1422 - RNA, 101 nt, synthetic construct
  source 1..101: mol_type = other RNA
agctgccgttctgcccagtccggggttgtagctccctgaaaccgttgctacaataaggccgtcgaaagatgtgccgcaacgctctgccttctggcatcgtt

SEQ ID NO: 1423 - RNA, 101 nt, synthetic construct
  source 1..101: mol_type = other RNA
gggcagaacggcagctggcccaaggttgtagctccctgaaaccgttgctacaataaggccgtcgaaagatgtgccgcaacgctctgccttctggcatcgtt

SEQ ID NO: 1424 - RNA, 101 nt, synthetic construct
  source 1..101: mol_type = other RNA
caatagctcttgccctgaccagctgttgtagctccctgaaaccgttgctacaataaggccgtcgaaagatgtgccgcaacgctctgccttctggcatcgtt

SEQ ID NO: 1425 - RNA, 101 nt, synthetic construct
  source 1..101: mol_type = other RNA
ccaatagctcttgccctgaccagcgttgtagctccctgaaaccgttgctacaataaggccgtcgaaagatgtgccgcaacgctctgccttctggcatcgtt

SEQ ID NO: 1426 - RNA, 101 nt, synthetic construct
  source 1..101: mol_type = other RNA
tgccccagcccaatagctcttgccgttgtagctccctgaaaccgttgctacaataaggccgtcgaaagatgtgccgcaacgctctgccttctggcatcgtt

SEQ ID NO: 1427 - RNA, 101 nt, synthetic construct
  source 1..101: mol_type = other RNA
ctcactgccccagcccaatagctcgttgtagctccctgaaaccgttgctacaataaggccgtcgaaagatgtgccgcaacgctctgccttctggcatcgtt

SEQ ID NO: 1428 - RNA, 101 nt, synthetic construct
  source 1..101: mol_type = other RNA
gctcactgccccagcccaatagctgttgtagctccctgaaaccgttgctacaataaggccgtcgaaagatgtgccgcaacgctctgccttctggcatcgtt

SEQ ID NO: 1429 - RNA, 101 nt, synthetic construct
  source 1..101: mol_type = other RNA
aagcccaggcccggctcactgcccgttgtagctccctgaaaccgttgctacaataaggccgtcgaaagatgtgccgcaacgctctgccttctggcatcgtt

SEQ ID NO: 1430 - RNA, 101 nt, synthetic construct
  source 1..101: mol_type = other RNA
caagcccaggcccggctcactgccgttgtagctccctgaaaccgttgctacaataaggccgtcgaaagatgtgccgcaacgctctgccttctggcatcgtt

SEQ ID NO: 1431 - RNA, 101 nt, synthetic construct
  source 1..101: mol_type = other RNA
gccacaagcccaggcccggctcacgttgtagctccctgaaaccgttgctacaataaggccgtcgaaagatgtgccgcaacgctctgccttctggcatcgtt

SEQ ID NO: 1432 - RNA, 101 nt, synthetic construct
  source 1..101: mol_type = other RNA
ggccacaagcccaggcccggctcagttgtagctccctgaaaccgttgctacaataaggccgtcgaaagatgtgccgcaacgctctgccttctggcatcgtt

SEQ ID NO: 1433 - RNA, 101 nt, synthetic construct
  source 1..101: mol_type = other RNA
cggccacaagcccaggcccggctcgttgtagctccctgaaaccgttgctacaataaggccgtcgaaagatgtgccgcaacgctctgccttctggcatcgtt

SEQ ID NO: 1434 - RNA, 101 nt, synthetic construct
  source 1..101: mol_type = other RNA
ttccccagtacgactttgtcttctgttgtagctccctgaaaccgttgctacaataaggccgtcgaaagatgtgccgcaacgctctgccttctggcatcgtt

SEQ ID NO: 1435 - RNA, 101 nt, synthetic construct
  source 1..101: mol_type = other RNA
tccccagtacgactttgtcttctcgttgtagctccctgaaaccgttgctacaataaggccgtcgaaagatgtgccgcaacgctctgccttctggcatcgtt

SEQ ID NO: 1436 - RNA, 101 nt, synthetic construct
  source 1..101: mol_type = other RNA
ccccagtacgactttgtcttctctgttgtagctccctgaaaccgttgctacaataaggccgtcgaaagatgtgccgcaacgctctgccttctggcatcgtt

SEQ ID NO: 1437 - RNA, 101 nt, synthetic construct
  source 1..101: mol_type = other RNA
agtacgactttgtcttctctgtccgttgtagctccctgaaaccgttgctacaataaggccgtcgaaagatgtgccgcaacgctctgccttctggcatcgtt

SEQ ID NO: 1438 - RNA, 101 nt, synthetic construct
  source 1..101: mol_type = other RNA
gcctatggcctgcaggatctgctcgttgtagctccctgaaaccgttgctacaataaggccgtcgaaagatgtgccgcaacgctctgccttctggcatcgtt

SEQ ID NO: 1439 - RNA, 101 nt, synthetic construct
  source 1..101: mol_type = other RNA
cctatggcctgcaggatctgctctgttgtagctccctgaaaccgttgctacaataaggccgtcgaaagatgtgccgcaacgctctgccttctggcatcgtt

SEQ ID NO: 1440 - RNA, 101 nt, synthetic construct
  source 1..101: mol_type = other RNA
gcctgcaggatctgctcttctcccgttgtagctccctgaaaccgttgctacaataaggccgtcgaaagatgtgccgcaacgctctgccttctggcatcgtt

SEQ ID NO: 1441 - RNA, 101 nt, synthetic construct
  source 1..101: mol_type = other RNA
cctgcaggatctgctcttctccctgttgtagctccctgaaaccgttgctacaataaggccgtcgaaagatgtgccgcaacgctctgccttctggcatcgtt

SEQ ID NO: 1442 - RNA, 101 nt, synthetic construct
  source 1..101: mol_type = other RNA
tccctgggcccacagccactcgtggttgtagctccctgaaaccgttgctacaataaggccgtcgaaagatgtgccgcaacgctctgccttctggcatcgtt

SEQ ID NO: 1443 - RNA, 101 nt, synthetic construct
  source 1..101: mol_type = other RNA
tcgaggagctggaagcgcaagatggttgtagctccctgaaaccgttgctacaataaggccgtcgaaagatgtgccgcaacgctctgccttctggcatcgtt

SEQ ID NO: 1444 - RNA, 101 nt, synthetic construct
  source 1..101: mol_type = other RNA
tggccggccttttccagaagaagcgttgtagctccctgaaaccgttgctacaataaggccgtcgaaagatgtgccgcaacgctctgccttctggcatcgtt

SEQ ID NO: 1445 - RNA, 101 nt, synthetic construct
  source 1..101: mol_type = other RNA
ttccagaagaagctgctccgaggtgttgtagctccctgaaaccgttgctacaataaggccgtcgaaagatgtgccgcaacgctctgccttctggcatcgtt

SEQ ID NO: 1446 - RNA, 101 nt, synthetic construct
  source 1..101: mol_type = other RNA
tccagaagaagctgctccgaggttgttgtagctccctgaaaccgttgctacaataaggccgtcgaaagatgtgccgcaacgctctgccttctggcatcgtt

SEQ ID NO: 1447 - RNA, 101 nt, synthetic construct
  source 1..101: mol_type = other RNA
agaagaagctgctccgaggttgcagttgtagctccctgaaaccgttgctacaataaggccgtcgaaagatgtgccgcaacgctctgccttctggcatcgtt

SEQ ID NO: 1448 - RNA, 101 nt, synthetic construct
  source 1..101: mol_type = other RNA
agaagctgctccgaggttgcacccgttgtagctccctgaaaccgttgctacaataaggccgtcgaaagatgtgccgcaacgctctgccttctggcatcgtt

SEQ ID NO: 1449 - RNA, 101 nt, synthetic construct
  source 1..101: mol_type = other RNA
ctccgaggttgcaccctcctcctcgttgtagctccctgaaaccgttgctacaataaggccgtcgaaagatgtgccgcaacgctctgccttctggcatcgtt

SEQ ID NO: 1450 - RNA, 101 nt, synthetic construct
  source 1..101: mol_type = other RNA
tccgaggttgcaccctcctcctcagttgtagctccctgaaaccgttgctacaataaggccgtcgaaagatgtgccgcaacgctctgccttctggcatcgtt

SEQ ID NO: 1451 - RNA, 101 nt, synthetic construct
  source 1..101: mol_type = other RNA
ctggtccagagcctgagcaaggccgttgtagctccctgaaaccgttgctacaataaggccgtcgaaagatgtgccgcaacgctctgccttctggcatcgtt

SEQ ID NO: 1452 - RNA, 101 nt, synthetic construct
  source 1..101: mol_type = other RNA
tggtccagagcctgagcaaggccggttgtagctccctgaaaccgttgctacaataaggccgtcgaaagatgtgccgcaacgctctgccttctggcatcgtt

SEQ ID NO: 1453 - RNA, 101 nt, synthetic construct
  source 1..101: mol_type = other RNA
tcagggatgacagagcaccaagacgttgtagctccctgaaaccgttgctacaataaggccgtcgaaagatgtgccgcaacgctctgccttctggcatcgtt

SEQ ID NO: 1454 - RNA, 101 nt, synthetic construct
  source 1..101: mol_type = other RNA
cagggatgacagagcaccaagacagttgtagctccctgaaaccgttgctacaataaggccgtcgaaagatgtgccgcaacgctctgccttctggcatcgtt

SEQ ID NO: 1455 - RNA, 101 nt, synthetic construct
  source 1..101: mol_type = other RNA
cagagcaccaagacagagccctgagttgtagctccctgaaaccgttgctacaataaggccgtcgaaagatgtgccgcaacgctctgccttctggcatcgtt

SEQ ID NO: 1456 - RNA, 101 nt, synthetic construct
  source 1..101: mol_type = other RNA
agcaccaagacagagccctgacgcgttgtagctccctgaaaccgttgctacaataaggccgtcgaaagatgtgccgcaacgctctgccttctggcatcgtt

SEQ ID NO: 1457 - RNA, 101 nt, synthetic construct
  source 1..101: mol_type = other RNA
aagacagagccctgacgctcctccgttgtagctccctgaaaccgttgctacaataaggccgtcgaaagatgtgccgcaacgctctgccttctggcatcgtt

SEQ ID NO: 1458 - RNA, 101 nt, synthetic construct
  source 1..101: mol_type = other RNA
tgccgggcagtgtgccagctctcagttgtagctccctgaaaccgttgctacaataaggccgtcgaaagatgtgccgcaacgctctgccttctggcatcgtt

SEQ ID NO: 1459 - RNA, 101 nt, synthetic construct
  source 1..101: mol_type = other RNA
gccgggcagtgtgccagctctcaggttgtagctccctgaaaccgttgctacaataaggccgtcgaaagatgtgccgcaacgctctgccttctggcatcgtt

SEQ ID NO: 1460 - RNA, 101 nt, synthetic construct
  source 1..101: mol_type = other RNA
caggccagcttggccagctctgccgttgtagctccctgaaaccgttgctacaataaggccgtcgaaagatgtgccgcaacgctctgccttctggcatcgtt

SEQ ID NO: 1461 - RNA, 101 nt, synthetic construct
  source 1..101: mol_type = other RNA
agctcccaggccagcttggccagcgttgtagctccctgaaaccgttgctacaataaggccgtcgaaagatgtgccgcaacgctctgccttctggcatcgtt

SEQ ID NO: 1462 - RNA, 101 nt, synthetic construct
  source 1..101: mol_type = other RNA
ctgcggcccagctcccaggccagcgttgtagctccctgaaaccgttgctacaataaggccgtcgaaagatgtgccgcaacgctctgccttctggcatcgtt

SEQ ID NO: 1463 - RNA, 101 nt, synthetic construct
  source 1..101: mol_type = other RNA
gcagacatcaaagtaccctacagggttgtagctccctgaaaccgttgctacaataaggccgtcgaaagatgtgccgcaacgctctgccttctggcatcgtt

SEQ ID NO: 1464 - RNA, 101 nt, synthetic construct
  source 1..101: mol_type = other RNA
atcaaagtaccctacaggaggaccgttgtagctccctgaaaccgttgctacaataaggccgtcgaaagatgtgccgcaacgctctgccttctggcatcgtt

SEQ ID NO: 1465 - RNA, 101 nt, synthetic construct
  source 1..101: mol_type = other RNA
gaccagttcccatccgcagacgtggttgtagctccctgaaaccgttgctacaataaggccgtcgaaagatgtgccgcaacgctctgccttctggcatcgtt

SEQ ID NO: 1466 - RNA, 101 nt, synthetic construct
  source 1..101: mol_type = other RNA
gatggccaaaggcttagtccaacagttgtagctccctgaaaccgttgctacaataaggccgtcgaaagatgtgccgcaacgctctgccttctggcatcgtt

SEQ ID NO: 1467 - RNA, 101 nt, synthetic construct
  source 1..101: mol_type = other RNA
aaaggcttagtccaacacccaccggttgtagctccctgaaaccgttgctacaataaggccgtcgaaagatgtgccgcaacgctctgccttctggcatcgtt

SEQ ID NO: 1468 - RNA, 101 nt, synthetic construct
  source 1..101: mol_type = other RNA
gtccaacacccaccgcgggccgcagttgtagctccctgaaaccgttgctacaataaggccgtcgaaagatgtgccgcaacgctctgccttctggcatcgtt

SEQ ID NO: 1469 - RNA, 101 nt, synthetic construct
  source 1..101: mol_type = other RNA
agcttcctcctgcaatgcttcctggttgtagctccctgaaaccgttgctacaataaggccgtcgaaagatgtgccgcaacgctctgccttctggcatcgtt

SEQ ID NO: 1470 - RNA, 101 nt, synthetic construct
  source 1..101: mol_type = other RNA
gcttcctcctgcaatgcttcctgggttgtagctccctgaaaccgttgctacaataaggccgtcgaaagatgtgccgcaacgctctgccttctggcatcgtt

SEQ ID NO: 1471 - RNA, 101 nt, synthetic construct
  source 1..101: mol_type = other RNA
tcgccactcagagccagccacagggttgtagctccctgaaaccgttgctacaataaggccgtcgaaagatgtgccgcaacgctctgccttctggcatcgtt

SEQ ID NO: 1472 - RNA, 101 nt, synthetic construct
  source 1..101: mol_type = other RNA
ttcgccactcagagccagccacaggttgtagctccctgaaaccgttgctacaataaggccgtcgaaagatgtgccgcaacgctctgccttctggcatcgtt

SEQ ID NO: 1473 - RNA, 101 nt, synthetic construct
  source 1..101: mol_type = other RNA
tttcgccactcagagccagccacagttgtagctccctgaaaccgttgctacaataaggccgtcgaaagatgtgccgcaacgctctgccttctggcatcgtt

SEQ ID NO: 1474 - RNA, 101 nt, synthetic construct
  source 1..101: mol_type = other RNA
atttcgccactcagagccagccacgttgtagctccctgaaaccgttgctacaataaggccgtcgaaagatgtgccgcaacgctctgccttctggcatcgtt

SEQ ID NO: 1475 - RNA, 101 nt, synthetic construct
  source 1..101: mol_type = other RNA
aaggagctcccgcagtacctagcagttgtagctccctgaaaccgttgctacaataaggccgtcgaaagatgtgccgcaacgctctgccttctggcatcgtt

SEQ ID NO: 1476 - RNA, 101 nt, synthetic construct
  source 1..101: mol_type = other RNA
aggagctcccgcagtacctagcatgttgtagctccctgaaaccgttgctacaataaggccgtcgaaagatgtgccgcaacgctctgccttctggcatcgtt

SEQ ID NO: 1477 - RNA, 101 nt, synthetic construct
  source 1..101: mol_type = other RNA
ggagctcccgcagtacctagcattgttgtagctccctgaaaccgttgctacaataaggccgtcgaaagatgtgccgcaacgctctgccttctggcatcgtt

SEQ ID NO: 1478 - RNA, 101 nt, synthetic construct
  source 1..101: mol_type = other RNA
ccagccagttgtcatagggcctctgttgtagctccctgaaaccgttgctacaataaggccgtcgaaagatgtgccgcaacgctctgccttctggcatcgtt

SEQ ID NO: 1479 - RNA, 101 nt, synthetic construct
  source 1..101: mol_type = other RNA
gcacgccctccagccagttgtcatgttgtagctccctgaaaccgttgctacaataaggccgtcgaaagatgtgccgcaacgctctgccttctggcatcgtt

SEQ ID NO: 1480 - RNA, 101 nt, synthetic construct
  source 1..101: mol_type = other RNA
ctggctgggctgatcttccagcctgttgtagctccctgaaaccgttgctacaataaggccgtcgaaagatgtgccgcaacgctctgccttctggcatcgtt

SEQ ID NO: 1481 - RNA, 101 nt, synthetic construct
  source 1..101: mol_type = other RNA
tggctgggctgatcttccagcctcgttgtagctccctgaaaccgttgctacaataaggccgtcgaaagatgtgccgcaacgctctgccttctggcatcgtt

SEQ ID NO: 1482 - RNA, 89 nt, synthetic construct
  source 1..89: mol_type = other RNA
taccgctcactgcaggacacgtatgttgtagctccctccgttgctacaataaggccgtcgatgtgccgcaacgctctgccggcatcgtt

SEQ ID NO: 1483 - RNA, 89 nt, synthetic construct
  source 1..89: mol_type = other RNA
ctcactgcaggacacgtatggtgcgttgtagctccctccgttgctacaataaggccgtcgatgtgccgcaacgctctgccggcatcgtt

SEQ ID NO: 1484 - RNA, 89 nt, synthetic construct
  source 1..89: mol_type = other RNA
tcactgcaggacacgtatggtgccgttgtagctccctccgttgctacaataaggccgtcgatgtgccgcaacgctctgccggcatcgtt

SEQ ID NO: 1485 - RNA, 89 nt, synthetic construct
  source 1..89: mol_type = other RNA
aggacacgtatggtgccgagcccggttgtagctccctccgttgctacaataaggccgtcgatgtgccgcaacgctctgccggcatcgtt

SEQ ID NO: 1486 - RNA, 89 nt, synthetic construct
  source 1..89: mol_type = other RNA
ggacacgtatggtgccgagcccgcgttgtagctccctccgttgctacaataaggccgtcgatgtgccgcaacgctctgccggcatcgtt

SEQ ID NO: 1487 - RNA, 89 nt, synthetic construct
  source 1..89: mol_type = other RNA
atcctagtggaggtggatctggtggttgtagctccctccgttgctacaataaggccgtcgatgtgccgcaacgctctgccggcatcgtt

SEQ ID NO: 1488 - RNA, 89 nt, synthetic construct
  source 1..89: mol_type = other RNA
gcaagagcctggagcgggaactgggttgtagctccctccgttgctacaataaggccgtcgatgtgccgcaacgctctgccggcatcgtt

SEQ ID NO: 1489 - RNA, 89 nt, synthetic construct
  source 1..89: mol_type = other RNA
caagagcctggagcgggaactggcgttgtagctccctccgttgctacaataaggccgtcgatgtgccgcaacgctctgccggcatcgtt

SEQ ID NO: 1490 - RNA, 89 nt, synthetic construct
  source 1..89: mol_type = other RNA
gggcagaacggcagctggcccaaggttgtagctccctccgttgctacaataaggccgtcgatgtgccgcaacgctctgccggcatcgtt

SEQ ID NO: 1491 - RNA, 89 nt, synthetic construct
  source 1..89: mol_type = other RNA
gcacagcaatcactcgtgtctcacgttgtagctccctccgttgctacaataaggccgtcgatgtgccgcaacgctctgccggcatcgtt

SEQ ID NO: 1492 - RNA, 89 nt, synthetic construct
  source 1..89: mol_type = other RNA
caatagctcttgccctgaccagctgttgtagctccctccgttgctacaataaggccgtcgatgtgccgcaacgctctgccggcatcgtt

SEQ ID NO: 1493 - RNA, 89 nt, synthetic construct
  source 1..89: mol_type = other RNA
ccaatagctcttgccctgaccagcgttgtagctccctccgttgctacaataaggccgtcgatgtgccgcaacgctctgccggcatcgtt

SEQ ID NO: 1494 - RNA, 89 nt, synthetic construct
  source 1..89: mol_type = other RNA
agccgggcctgggcttgtggccgggttgtagctccctccgttgctacaataaggccgtcgatgtgccgcaacgctctgccggcatcgtt

SEQ ID NO: 1495 - RNA, 89 nt, synthetic construct
  source 1..89: mol_type = other RNA
cagagaagacaaagtcgtactggggttgtagctccctccgttgctacaataaggccgtcgatgtgccgcaacgctctgccggcatcgtt

SEQ ID NO: 1496 - RNA, 89 nt, synthetic construct
  source 1..89: mol_type = other RNA
agtacgactttgtcttctctgtccgttgtagctccctccgttgctacaataaggccgtcgatgtgccgcaacgctctgccggcatcgtt

SEQ ID NO: 1497 - RNA, 89 nt, synthetic construct
  source 1..89: mol_type = other RNA
agcagatcctgcaggccataggcagttgtagctccctccgttgctacaataaggccgtcgatgtgccgcaacgctctgccggcatcgtt

SEQ ID NO: 1498 - RNA, 89 nt, synthetic construct
  source 1..89: mol_type = other RNA
gcctatggcctgcaggatctgctcgttgtagctccctccgttgctacaataaggccgtcgatgtgccgcaacgctctgccggcatcgtt

SEQ ID NO: 1499 - RNA, 89 nt, synthetic construct
  source 1..89: mol_type = other RNA
gagcagatcctgcaggccataggcgttgtagctccctccgttgctacaataaggccgtcgatgtgccgcaacgctctgccggcatcgtt

SEQ ID NO: 1500 - RNA, 89 nt, synthetic construct
  source 1..89: mol_type = other RNA
cctatggcctgcaggatctgctctgttgtagctccctccgttgctacaataaggccgtcgatgtgccgcaacgctctgccggcatcgtt

SEQ ID NO: 1501 - RNA, 89 nt, synthetic construct
  source 1..89: mol_type = other RNA
agagcagatcctgcaggccatagggttgtagctccctccgttgctacaataaggccgtcgatgtgccgcaacgctctgccggcatcgtt

SEQ ID NO: 1502 - RNA, 89 nt, synthetic construct
  source 1..89: mol_type = other RNA
aagagcagatcctgcaggccataggttgtagctccctccgttgctacaataaggccgtcgatgtgccgcaacgctctgccggcatcgtt

SEQ ID NO: 1503 - RNA, 89 nt, synthetic construct
  source 1..89: mol_type = other RNA
gcctgcaggatctgctcttctcccgttgtagctccctccgttgctacaataaggccgtcgatgtgccgcaacgctctgccggcatcgtt

SEQ ID NO: 1504 - RNA, 89 nt, synthetic construct
  source 1..89: mol_type = other RNA
ggatctgctcttctccctgggcccgttgtagctccctccgttgctacaataaggccgtcgatgtgccgcaacgctctgccggcatcgtt

SEQ ID NO: 1505 - RNA, 89 nt, synthetic construct
  source 1..89: mol_type = other RNA
cactcgtggcggccgatgaggtttgttgtagctccctccgttgctacaataaggccgtcgatgtgccgcaacgctctgccggcatcgtt

SEQ ID NO: 1506 - RNA, 89 nt, synthetic construct
  source 1..89: mol_type = other RNA
tgaggttttcagccacatcttgaagttgtagctccctccgttgctacaataaggccgtcgatgtgccgcaacgctctgccggcatcgtt

SEQ ID NO: 1507 - RNA, 89 nt, synthetic construct
  source 1..89: mol_type = other RNA
tgaagagacctgaccgcgttctgcgttgtagctccctccgttgctacaataaggccgtcgatgtgccgcaacgctctgccggcatcgtt

SEQ ID NO: 1508 - RNA, 89 nt, synthetic construct
  source 1..89: mol_type = other RNA
tcgaggagctggaagcgcaagatggttgtagctccctccgttgctacaataaggccgtcgatgtgccgcaacgctctgccggcatcgtt

SEQ ID NO: 1509 - RNA, 89 nt, synthetic construct
  source 1..89: mol_type = other RNA
agatggcttcctgcacagcacgtggttgtagctccctccgttgctacaataaggccgtcgatgtgccgcaacgctctgccggcatcgtt

SEQ ID NO: 1510 - RNA, 89 nt, synthetic construct
  source 1..89: mol_type = other RNA
tggccggccttttccagaagaagcgttgtagctccctccgttgctacaataaggccgtcgatgtgccgcaacgctctgccggcatcgtt

SEQ ID NO: 1511 - RNA, 89 nt, synthetic construct
  source 1..89: mol_type = other RNA
ttccagaagaagctgctccgaggtgttgtagctccctccgttgctacaataaggccgtcgatgtgccgcaacgctctgccggcatcgtt

SEQ ID NO: 1512 - RNA, 89 nt, synthetic construct
  source 1..89: mol_type = other RNA
tccagaagaagctgctccgaggttgttgtagctccctccgttgctacaataaggccgtcgatgtgccgcaacgctctgccggcatcgtt

SEQ ID NO: 1513 - RNA, 89 nt, synthetic construct
  source 1..89: mol_type = other RNA
agaagaagctgctccgaggttgcagttgtagctccctccgttgctacaataaggccgtcgatgtgccgcaacgctctgccggcatcgtt

SEQ ID NO: 1514 - RNA, 89 nt, synthetic construct
  source 1..89: mol_type = other RNA
agaagctgctccgaggttgcacccgttgtagctccctccgttgctacaataaggccgtcgatgtgccgcaacgctctgccggcatcgtt

SEQ ID NO: 1515 - RNA, 89 nt, synthetic construct
  source 1..89: mol_type = other RNA
ctccgaggttgcaccctcctcctcgttgtagctccctccgttgctacaataaggccgtcgatgtgccgcaacgctctgccggcatcgtt

SEQ ID NO: 1516 - RNA, 89 nt, synthetic construct
  source 1..89: mol_type = other RNA
aggttgcaccctcctcctcacagcgttgtagctccctccgttgctacaataaggccgtcgatgtgccgcaacgctctgccggcatcgtt

SEQ ID NO: 1517 - RNA, 89 nt, synthetic construct
  source 1..89: mol_type = other RNA
ctggtccagagcctgagcaaggccgttgtagctccctccgttgctacaataaggccgtcgatgtgccgcaacgctctgccggcatcgtt

SEQ ID NO: 1518 - RNA, 89 nt, synthetic construct
  source 1..89: mol_type = other RNA
tggtccagagcctgagcaaggccggttgtagctccctccgttgctacaataaggccgtcgatgtgccgcaacgctctgccggcatcgtt

SEQ ID NO: 1519 - RNA, 89 nt, synthetic construct
  source 1..89: mol_type = other RNA
agcaaggccgacgccctatttgaggttgtagctccctccgttgctacaataaggccgtcgatgtgccgcaacgctctgccggcatcgtt

SEQ ID NO: 1520 - RNA, 89 nt, synthetic construct
  source 1..89: mol_type = other RNA
gacgccctatttgagctgtccggcgttgtagctccctccgttgctacaataaggccgtcgatgtgccgcaacgctctgccggcatcgtt

SEQ ID NO: 1521 - RNA, 89 nt, synthetic construct
  source 1..89: mol_type = other RNA
aagccggacagctcaaatagggcggttgtagctccctccgttgctacaataaggccgtcgatgtgccgcaacgctctgccggcatcgtt

SEQ ID NO: 1522 - RNA, 89 nt, synthetic construct
  source 1..89: mol_type = other RNA
gagctgtccggcttctccatggaggttgtagctccctccgttgctacaataaggccgtcgatgtgccgcaacgctctgccggcatcgtt

SEQ ID NO: 1523 - RNA, 89 nt, synthetic construct
  source 1..89: mol_type = other RNA
agctgtccggcttctccatggagcgttgtagctccctccgttgctacaataaggccgtcgatgtgccgcaacgctctgccggcatcgtt

SEQ ID NO: 1524 - RNA, 89 nt, synthetic construct
  source 1..89: mol_type = other RNA
tcagggatgacagagcaccaagacgttgtagctccctccgttgctacaataaggccgtcgatgtgccgcaacgctctgccggcatcgtt

SEQ ID NO: 1525 - RNA, 89 nt, synthetic construct
  source 1..89: mol_type = other RNA
cagagcaccaagacagagccctgagttgtagctccctccgttgctacaataaggccgtcgatgtgccgcaacgctctgccggcatcgtt

SEQ ID NO: 1526 - RNA, 89 nt, synthetic construct
  source 1..89: mol_type = other RNA
agcaccaagacagagccctgacgcgttgtagctccctccgttgctacaataaggccgtcgatgtgccgcaacgctctgccggcatcgtt

SEQ ID NO: 1527 - RNA, 89 nt, synthetic construct
  source 1..89: mol_type = other RNA
gggaccggccacttcttctcagtcgttgtagctccctccgttgctacaataaggccgtcgatgtgccgcaacgctctgccggcatcgtt

SEQ ID NO: 1528 - RNA, 89 nt, synthetic construct
  source 1..89: mol_type = other RNA
ggccacttcttctcagtcacagccgttgtagctccctccgttgctacaataaggccgtcgatgtgccgcaacgctctgccggcatcgtt

SEQ ID NO: 1529 - RNA, 89 nt, synthetic construct
  source 1..89: mol_type = other RNA
acagccctactttgtgccgggcaggttgtagctccctccgttgctacaataaggccgtcgatgtgccgcaacgctctgccggcatcgtt

SEQ ID NO: 1530 - RNA, 89 nt, synthetic construct
  source 1..89: mol_type = other RNA
tgccgggcagtgtgccagctctcagttgtagctccctccgttgctacaataaggccgtcgatgtgccgcaacgctctgccggcatcgtt

SEQ ID NO: 1531 - RNA, 89 nt, synthetic construct
  source 1..89: mol_type = other RNA
gccgggcagtgtgccagctctcaggttgtagctccctccgttgctacaataaggccgtcgatgtgccgcaacgctctgccggcatcgtt

SEQ ID NO: 1532 - RNA, 89 nt, synthetic construct
  source 1..89: mol_type = other RNA
cctccacgctcacgggactctatggttgtagctccctccgttgctacaataaggccgtcgatgtgccgcaacgctctgccggcatcgtt

SEQ ID NO: 1533 - RNA, 89 nt, synthetic construct
  source 1..89: mol_type = other RNA
tcacgggactctatgtcggcctgcgttgtagctccctccgttgctacaataaggccgtcgatgtgccgcaacgctctgccggcatcgtt

SEQ ID NO: 1534 - RNA, 89 nt, synthetic construct
  source 1..89: mol_type = other RNA
tgggagctgggccgcagacatcaagttgtagctccctccgttgctacaataaggccgtcgatgtgccgcaacgctctgccggcatcgtt

SEQ ID NO: 1535 - RNA, 89 nt, synthetic construct
  source 1..89: mol_type = other RNA
gggagctgggccgcagacatcaaagttgtagctccctccgttgctacaataaggccgtcgatgtgccgcaacgctctgccggcatcgtt

SEQ ID NO: 1536 - RNA, 89 nt, synthetic construct
  source 1..89: mol_type = other RNA
gcagacatcaaagtaccctacagggttgtagctccctccgttgctacaataaggccgtcgatgtgccgcaacgctctgccggcatcgtt

SEQ ID NO: 1537 - RNA, 89 nt, synthetic construct
  source 1..89: mol_type = other RNA
atcaaagtaccctacaggaggaccgttgtagctccctccgttgctacaataaggccgtcgatgtgccgcaacgctctgccggcatcgtt

SEQ ID NO: 1538 - RNA, 89 nt, synthetic construct
  source 1..89: mol_type = other RNA
tcaaagtaccctacaggaggaccagttgtagctccctccgttgctacaataaggccgtcgatgtgccgcaacgctctgccggcatcgtt

SEQ ID NO: 1539 - RNA, 89 nt, synthetic construct
  source 1..89: mol_type = other RNA
agtaccctacaggaggaccagttcgttgtagctccctccgttgctacaataaggccgtcgatgtgccgcaacgctctgccggcatcgtt

SEQ ID NO: 1540 - RNA, 89 nt, synthetic construct
  source 1..89: mol_type = other RNA
tccgcagacgtgaggacctgggcggttgtagctccctccgttgctacaataaggccgtcgatgtgccgcaacgctctgccggcatcgtt

SEQ ID NO: 1541 - RNA, 89 nt, synthetic construct
  source 1..89: mol_type = other RNA
ggacctgggcgatggccaaaggctgttgtagctccctccgttgctacaataaggccgtcgatgtgccgcaacgctctgccggcatcgtt

SEQ ID NO: 1542 - RNA, 89 nt, synthetic construct
  source 1..89: mol_type = other RNA
gggcgatggccaaaggcttagtccgttgtagctccctccgttgctacaataaggccgtcgatgtgccgcaacgctctgccggcatcgtt

SEQ ID NO: 1543 - RNA, 89 nt, synthetic construct
  source 1..89: mol_type = other RNA
ggcgatggccaaaggcttagtccagttgtagctccctccgttgctacaataaggccgtcgatgtgccgcaacgctctgccggcatcgtt

SEQ ID NO: 1544 - RNA, 89 nt, synthetic construct
  source 1..89: mol_type = other RNA
cgcgggccgcagagtccgagctgggttgtagctccctccgttgctacaataaggccgtcgatgtgccgcaacgctctgccggcatcgtt

SEQ ID NO: 1545 - RNA, 89 nt, synthetic construct
  source 1..89: mol_type = other RNA
gcgggccgcagagtccgagctggcgttgtagctccctccgttgctacaataaggccgtcgatgtgccgcaacgctctgccggcatcgtt

SEQ ID NO: 1546 - RNA, 89 nt, synthetic construct
  source 1..89: mol_type = other RNA
cgggccgcagagtccgagctggccgttgtagctccctccgttgctacaataaggccgtcgatgtgccgcaacgctctgccggcatcgtt

SEQ ID NO: 1547 - RNA, 89 nt, synthetic construct
  source 1..89: mol_type = other RNA
tgagtggcgaaatcaaggacaagggttgtagctccctccgttgctacaataaggccgtcgatgtgccgcaacgctctgccggcatcgtt

SEQ ID NO: 1548 - RNA, 89 nt, synthetic construct
  source 1..89: mol_type = other RNA
gagtggcgaaatcaaggacaaggagttgtagctccctccgttgctacaataaggccgtcgatgtgccgcaacgctctgccggcatcgtt

SEQ ID NO: 1549 - RNA, 89 nt, synthetic construct
  source 1..89: mol_type = other RNA
aaatcaaggacaaggagctcccgcgttgtagctccctccgttgctacaataaggccgtcgatgtgccgcaacgctctgccggcatcgtt

SEQ ID NO: 1550 - RNA, 89 nt, synthetic construct
  source 1..89: mol_type = other RNA
aaggagctcccgcagtacctagcagttgtagctccctccgttgctacaataaggccgtcgatgtgccgcaacgctctgccggcatcgtt

SEQ ID NO: 1551 - RNA, 89 nt, synthetic construct
  source 1..89: mol_type = other RNA
aggagctcccgcagtacctagcatgttgtagctccctccgttgctacaataaggccgtcgatgtgccgcaacgctctgccggcatcgtt

SEQ ID NO: 1552 - RNA, 89 nt, synthetic construct
  source 1..89: mol_type = other RNA
ggagctcccgcagtacctagcattgttgtagctccctccgttgctacaataaggccgtcgatgtgccgcaacgctctgccggcatcgtt

SEQ ID NO: 1553 - RNA, 89 nt, synthetic construct
  source 1..89: mol_type = other RNA
gccctatgacaactggctggaggggttgtagctccctccgttgctacaataaggccgtcgatgtgccgcaacgctctgccggcatcgtt

SEQ ID NO: 1554 - RNA, 89 nt, synthetic construct
  source 1..89: mol_type = other RNA
tgccacgctttctggctgggctgagttgtagctccctccgttgctacaataaggccgtcgatgtgccgcaacgctctgccggcatcgtt

SEQ ID NO: 1555 - RNA, 89 nt, synthetic construct
  source 1..89: mol_type = other RNA
acgctttctggctgggctgatcttgttgtagctccctccgttgctacaataaggccgtcgatgtgccgcaacgctctgccggcatcgtt

SEQ ID NO: 1556 - RNA, 89 nt, synthetic construct
  source 1..89: mol_type = other RNA
ctttctggctgggctgatcttccagttgtagctccctccgttgctacaataaggccgtcgatgtgccgcaacgctctgccggcatcgtt

SEQ ID NO: 1557 - RNA, 89 nt, synthetic construct
  source 1..89: mol_type = other RNA
ctggctgggctgatcttccagcctgttgtagctccctccgttgctacaataaggccgtcgatgtgccgcaacgctctgccggcatcgtt

SEQ ID NO: 1558 - RNA, 89 nt, synthetic construct
  source 1..89: mol_type = other RNA
tggctgggctgatcttccagcctcgttgtagctccctccgttgctacaataaggccgtcgatgtgccgcaacgctctgccggcatcgtt

SEQ ID NO: 1559 - RNA, 89 nt, synthetic construct
  source 1..89: mol_type = other RNA
ggagccctactcgggccatcggcggttgtagctccctccgttgctacaataaggccgtcgatgtgccgcaacgctctgccggcatcgtt

SEQ ID NO: 1560 - RNA, 89 nt, synthetic construct
  source 1..89: mol_type = other RNA
acaggaagcagaaggtgcttgcgagttgtagctccctccgttgctacaataaggccgtcgatgtgccgcaacgctctgccggcatcgtt

SEQ ID NO: 1561 - RNA, 89 nt, synthetic construct
  source 1..89: mol_type = other RNA
gcttgcgaggtacctgaagcggctgttgtagctccctccgttgctacaataaggccgtcgatgtgccgcaacgctctgccggcatcgtt

SEQ ID NO: 1562 - RNA, 89 nt, synthetic construct
  source 1..89: mol_type = other RNA
gaatttggcagcacgtggtacagggttgtagctccctccgttgctacaataaggccgtcgatgtgccgcaacgctctgccggcatcgtt

SEQ ID NO: 1563 - RNA, 89 nt, synthetic construct
  source 1..89: mol_type = other RNA
aatttggcagcacgtggtacaggagttgtagctccctccgttgctacaataaggccgtcgatgtgccgcaacgctctgccggcatcgtt

SEQ ID NO: 1564 - RNA, 89 nt, synthetic construct
  source 1..89: mol_type = other RNA
atttggcagcacgtggtacaggaggttgtagctccctccgttgctacaataaggccgtcgatgtgccgcaacgctctgccggcatcgtt

SEQ ID NO: 1565 - RNA, 89 nt, synthetic construct
  source 1..89: mol_type = other RNA
ccggccgcctctcttttctgggcagttgtagctccctccgttgctacaataaggccgtcgatgtgccgcaacgctctgccggcatcgtt

SEQ ID NO: 1566 - RNA, 89 nt, synthetic construct
  source 1..89: mol_type = other RNA
cctctcttttctgggcacccgcctgttgtagctccctccgttgctacaataaggccgtcgatgtgccgcaacgctctgccggcatcgtt

SEQ ID NO: 1567 - RNA, 89 nt, synthetic construct
  source 1..89: mol_type = other RNA
cctcctgatgcacatgtactgggcgttgtagctccctccgttgctacaataaggccgtcgatgtgccgcaacgctctgccggcatcgtt

SEQ ID NO: 1568 - RNA, 89 nt, synthetic construct
  source 1..89: mol_type = other RNA
gccttggaggcggcgggccaagacgttgtagctccctccgttgctacaataaggccgtcgatgtgccgcaacgctctgccggcatcgtt

SEQ ID NO: 1569 - RNA, 89 nt, synthetic construct
  source 1..89: mol_type = other RNA
ccttggaggcggcgggccaagactgttgtagctccctccgttgctacaataaggccgtcgatgtgccgcaacgctctgccggcatcgtt

SEQ ID NO: 1570 - RNA, 89 nt, synthetic construct
  source 1..89: mol_type = other RNA
aggcggcgggccaagacttctcccgttgtagctccctccgttgctacaataaggccgtcgatgtgccgcaacgctctgccggcatcgtt

SEQ ID NO: 1571 - RNA, 89 nt, synthetic construct
  source 1..89: mol_type = other RNA
cggcgggccaagacttctccctgggttgtagctccctccgttgctacaataaggccgtcgatgtgccgcaacgctctgccggcatcgtt

SEQ ID NO: 1572 - RNA, 89 nt, synthetic construct
  source 1..89: mol_type = other RNA
ccctggacctccgcagcactggcagttgtagctccctccgttgctacaataaggccgtcgatgtgccgcaacgctctgccggcatcgtt

SEQ ID NO: 1573 - RNA, 89 nt, synthetic construct
  source 1..89: mol_type = other RNA
cctggacctccgcagcactggcatgttgtagctccctccgttgctacaataaggccgtcgatgtgccgcaacgctctgccggcatcgtt

SEQ ID NO: 1574 - RNA, 89 nt, synthetic construct
  source 1..89: mol_type = other RNA
ctggacctccgcagcactggcattgttgtagctccctccgttgctacaataaggccgtcgatgtgccgcaacgctctgccggcatcgtt

SEQ ID NO: 1575 - RNA, 89 nt, synthetic construct
  source 1..89: mol_type = other RNA
gggagcctcgtgggactcagctgtgttgtagctccctccgttgctacaataaggccgtcgatgtgccgcaacgctctgccggcatcgtt

SEQ ID NO: 1576 - RNA, 89 nt, synthetic construct
  source 1..89: mol_type = other RNA
ggagcctcgtgggactcagctgtggttgtagctccctccgttgctacaataaggccgtcgatgtgccgcaacgctctgccggcatcgtt

SEQ ID NO: 1577-1600 - skipped (24 entries)

SEQ ID NO: 1601 - RNA, 101 nt, synthetic construct; identical to SEQ ID NO: 1101
  source 1..101: mol_type = other RNA

SEQ ID NO: 1602 - RNA, 101 nt, synthetic construct; identical to SEQ ID NO: 805
  source 1..101: mol_type = other RNA

SEQ ID NO: 1603 - RNA, 101 nt, synthetic construct; identical to SEQ ID NO: 806
  source 1..101: mol_type = other RNA

SEQ ID NO: 1604 - RNA, 101 nt, synthetic construct; identical to SEQ ID NO: 807
  source 1..101: mol_type = other RNA

SEQ ID NO: 1605 - RNA, 101 nt, synthetic construct; identical to SEQ ID NO: 808
  source 1..101: mol_type = other RNA

SEQ ID NO: 1606 - RNA, 101 nt, synthetic construct; identical to SEQ ID NO: 809
  source 1..101: mol_type = other RNA

SEQ ID NO: 1607 - RNA, 101 nt, synthetic construct; identical to SEQ ID NO: 810
  source 1..101: mol_type = other RNA

SEQ ID NO: 1608 - RNA, 101 nt, synthetic construct; identical to SEQ ID NO: 811
  source 1..101: mol_type = other RNA

SEQ ID NO: 1609 - RNA, 101 nt, synthetic construct
  source 1..101: mol_type = other RNA
aagagaaagggagtagaggcggccgttgtagctccctgaaaccgttgctacaataaggccgtcgaaagatgtgccgcaacgctctgccttctggcatcgtt

SEQ ID NO: 1610 - RNA, 101 nt, synthetic construct
  source 1..101: mol_type = other RNA
agtagaggcggccacgacctggtggttgtagctccctgaaaccgttgctacaataaggccgtcgaaagatgtgccgcaacgctctgccttctggcatcgtt

SEQ ID NO: 1611 - RNA, 101 nt, synthetic construct
  source 1..101: mol_type = other RNA
ccacgacctggtgaacacctaggagttgtagctccctgaaaccgttgctacaataaggccgtcgaaagatgtgccgcaacgctctgccttctggcatcgtt

SEQ ID NO: 1612 - RNA, 101 nt, synthetic construct
  source 1..101: mol_type = other RNA
gacgcaccattctcacaaagggaggttgtagctccctgaaaccgttgctacaataaggccgtcgaaagatgtgccgcaacgctctgccttctggcatcgtt

SEQ ID NO: 1613 - RNA, 101 nt, synthetic construct
  source 1..101: mol_type = other RNA
ctcacaaagggagttttccacacggttgtagctccctgaaaccgttgctacaataaggccgtcgaaagatgtgccgcaacgctctgccttctggcatcgtt

SEQ ID NO: 1614 - RNA, 101 nt, synthetic construct
  source 1..101: mol_type = other RNA
tcacaaagggagttttccacacgggttgtagctccctgaaaccgttgctacaataaggccgtcgaaagatgtgccgcaacgctctgccttctggcatcgtt

SEQ ID NO: 1615 - RNA, 101 nt, synthetic construct
  source 1..101: mol_type = other RNA
cacaaagggagttttccacacggagttgtagctccctgaaaccgttgctacaataaggccgtcgaaagatgtgccgcaacgctctgccttctggcatcgtt

SEQ ID NO: 1616 - RNA, 101 nt, synthetic construct
  source 1..101: mol_type = other RNA
acaaagggagttttccacacggacgttgtagctccctgaaaccgttgctacaataaggccgtcgaaagatgtgccgcaacgctctgccttctggcatcgtt

SEQ ID NO: 1617 - RNA, 101 nt, synthetic construct
  source 1..101: mol_type = other RNA
caaagggagttttccacacggacagttgtagctccctgaaaccgttgctacaataaggccgtcgaaagatgtgccgcaacgctctgccttctggcatcgtt

SEQ ID NO: 1618 - RNA, 101 nt, synthetic construct
  source 1..101: mol_type = other RNA
agggagttttccacacggacacccgttgtagctccctgaaaccgttgctacaataaggccgtcgaaagatgtgccgcaacgctctgccttctggcatcgtt

SEQ ID NO: 1619 - RNA, 101 nt, synthetic construct
  source 1..101: mol_type = other RNA
gttttccacacggacacccccctcgttgtagctccctgaaaccgttgctacaataaggccgtcgaaagatgtgccgcaacgctctgccttctggcatcgtt

SEQ ID NO: 1620 - RNA, 101 nt, synthetic construct
  source 1..101: mol_type = other RNA
cacacggacacccccctcctcaccgttgtagctccctgaaaccgttgctacaataaggccgtcgaaagatgtgccgcaacgctctgccttctggcatcgtt

SEQ ID NO: 1621 - RNA, 101 nt, synthetic construct
  source 1..101: mol_type = other RNA
acacggacacccccctcctcaccagttgtagctccctgaaaccgttgctacaataaggccgtcgaaagatgtgccgcaacgctctgccttctggcatcgtt

SEQ ID NO: 1622 - RNA, 101 nt, synthetic construct
  source 1..101: mol_type = other RNA
ggacacccccctcctcaccacagcgttgtagctccctgaaaccgttgctacaataaggccgtcgaaagatgtgccgcaacgctctgccttctggcatcgtt

SEQ ID NO: 1623 - RNA, 101 nt, synthetic construct
  source 1..101: mol_type = other RNA
gccctgccaggacggggctggctagttgtagctccctgaaaccgttgctacaataaggccgtcgaaagatgtgccgcaacgctctgccttctggcatcgtt

SEQ ID NO: 1624 - RNA, 101 nt, synthetic construct
  source 1..101: mol_type = other RNA
ggtgaagagccaaagttagaactcgttgtagctccctgaaaccgttgctacaataaggccgtcgaaagatgtgccgcaacgctctgccttctggcatcgtt

SEQ ID NO: 1625 - RNA, 101 nt, synthetic construct
  source 1..101: mol_type = other RNA
tcttgggaagtgtaaggaagctgcgttgtagctccctgaaaccgttgctacaataaggccgtcgaaagatgtgccgcaacgctctgccttctggcatcgtt

SEQ ID NO: 1626 - RNA, 101 nt, synthetic construct
  source 1..101: mol_type = other RNA
gctgcagcaccaggatcagtgaaagttgtagctccctgaaaccgttgctacaataaggccgtcgaaagatgtgccgcaacgctctgccttctggcatcgtt

SEQ ID NO: 1627 - RNA, 101 nt, synthetic construct
  source 1..101: mol_type = other RNA
accaggatcagtgaaacgcaccaggttgtagctccctgaaaccgttgctacaataaggccgtcgaaagatgtgccgcaacgctctgccttctggcatcgtt

SEQ ID NO: 1628 - RNA, 101 nt, synthetic construct
  source 1..101: mol_type = other RNA
ggttctgggagagggtagcgcagggttgtagctccctgaaaccgttgctacaataaggccgtcgaaagatgtgccgcaacgctctgccttctggcatcgtt

SEQ ID NO: 1629 - RNA, 101 nt, synthetic construct
  source 1..101: mol_type = other RNA
gagggtagcgcagggtggccactggttgtagctccctgaaaccgttgctacaataaggccgtcgaaagatgtgccgcaacgctctgccttctggcatcgtt

SEQ ID NO: 1630 - RNA, 101 nt, synthetic construct
  source 1..101: mol_type = other RNA
gccactgagaaccgggcaggtcacgttgtagctccctgaaaccgttgctacaataaggccgtcgaaagatgtgccgcaacgctctgccttctggcatcgtt

SEQ ID NO: 1631 - RNA, 101 nt, synthetic construct
  source 1..101: mol_type = other RNA
ccactgagaaccgggcaggtcacggttgtagctccctgaaaccgttgctacaataaggccgtcgaaagatgtgccgcaacgctctgccttctggcatcgtt

SEQ ID NO: 1632 - RNA, 101 nt, synthetic construct
  source 1..101: mol_type = other RNA
cactgagaaccgggcaggtcacgcgttgtagctccctgaaaccgttgctacaataaggccgtcgaaagatgtgccgcaacgctctgccttctggcatcgtt

SEQ ID NO: 1633 - RNA, 101 nt, synthetic construct
  source 1..101: mol_type = other RNA
actgagaaccgggcaggtcacgcagttgtagctccctgaaaccgttgctacaataaggccgtcgaaagatgtgccgcaacgctctgccttctggcatcgtt

SEQ ID NO: 1634 - RNA, 101 nt, synthetic construct
  source 1..101: mol_type = other RNA
aaccgggcaggtcacgcatcccccgttgtagctccctgaaaccgttgctacaataaggccgtcgaaagatgtgccgcaacgctctgccttctggcatcgtt

SEQ ID NO: 1635 - RNA, 101 nt, synthetic construct
  source 1..101: mol_type = other RNA
accgggcaggtcacgcatccccccgttgtagctccctgaaaccgttgctacaataaggccgtcgaaagatgtgccgcaacgctctgccttctggcatcgtt

SEQ ID NO: 1636 - RNA, 101 nt, synthetic construct
  source 1..101: mol_type = other RNA
gggcaggtcacgcatcccccccttgttgtagctccctgaaaccgttgctacaataaggccgtcgaaagatgtgccgcaacgctctgccttctggcatcgtt

SEQ ID NO: 1637 - RNA, 101 nt, synthetic construct
  source 1..101: mol_type = other RNA
ggcaggtcacgcatcccccccttcgttgtagctccctgaaaccgttgctacaataaggccgtcgaaagatgtgccgcaacgctctgccttctggcatcgtt

SEQ ID NO: 1638 - RNA, 101 nt, synthetic construct
  source 1..101: mol_type = other RNA
ccttccctcccaccccctgccaaggttgtagctccctgaaaccgttgctacaataaggccgtcgaaagatgtgccgcaacgctctgccttctggcatcgtt

SEQ ID NO: 1639 - RNA, 101 nt, synthetic construct
  source 1..101: mol_type = other RNA
cttccctcccaccccctgccaagcgttgtagctccctgaaaccgttgctacaataaggccgtcgaaagatgtgccgcaacgctctgccttctggcatcgtt

SEQ ID NO: 1640 - RNA, 101 nt, synthetic construct
  source 1..101: mol_type = other RNA
ccccctgccaagctctccctcccagttgtagctccctgaaaccgttgctacaataaggccgtcgaaagatgtgccgcaacgctctgccttctggcatcgtt

SEQ ID NO: 1641 - RNA, 101 nt, synthetic construct
  source 1..101: mol_type = other RNA
gatcctctctggctccatcgtaaggttgtagctccctgaaaccgttgctacaataaggccgtcgaaagatgtgccgcaacgctctgccttctggcatcgtt

SEQ ID NO: 1642 - RNA, 101 nt, synthetic construct
  source 1..101: mol_type = other RNA
agaggttctggcaaggagagagatgttgtagctccctgaaaccgttgctacaataaggccgtcgaaagatgtgccgcaacgctctgccttctggcatcgtt

SEQ ID NO: 1643 - RNA, 101 nt, synthetic construct
  source 1..101: mol_type = other RNA
gggggtgtgtcaccagataaggaagttgtagctccctgaaaccgttgctacaataaggccgtcgaaagatgtgccgcaacgctctgccttctggcatcgtt

SEQ ID NO: 1644 - RNA, 101 nt, synthetic construct
  source 1..101: mol_type = other RNA
caatatcaggagactaggaaggaggttgtagctccctgaaaccgttgctacaataaggccgtcgaaagatgtgccgcaacgctctgccttctggcatcgtt

SEQ ID NO: 1645 - RNA, 101 nt, synthetic construct
  source 1..101: mol_type = other RNA
atggggcttttctgtcaccaatccgttgtagctccctgaaaccgttgctacaataaggccgtcgaaagatgtgccgcaacgctctgccttctggcatcgtt

SEQ ID NO: 1646 - RNA, 101 nt, synthetic construct
  source 1..101: mol_type = other RNA
tttctgtcaccaatcctgtccctagttgtagctccctgaaaccgttgctacaataaggccgtcgaaagatgtgccgcaacgctctgccttctggcatcgtt

SEQ ID NO: 1647 - RNA, 101 nt, synthetic construct
  source 1..101: mol_type = other RNA
ttctgtcaccaatcctgtccctaggttgtagctccctgaaaccgttgctacaataaggccgtcgaaagatgtgccgcaacgctctgccttctggcatcgtt

SEQ ID NO: 1648 - RNA, 101 nt, synthetic construct
  source 1..101: mol_type = other RNA
tctgtcaccaatcctgtccctagtgttgtagctccctgaaaccgttgctacaataaggccgtcgaaagatgtgccgcaacgctctgccttctggcatcgtt

SEQ ID NO: 1649 - RNA, 101 nt, synthetic construct
  source 1..101: mol_type = other RNA
gtggggtggaggggacagataaaagttgtagctccctgaaaccgttgctacaataaggccgtcgaaagatgtgccgcaacgctctgccttctggcatcgtt

SEQ ID NO: 1650 - RNA, 101 nt, synthetic construct
  source 1..101: mol_type = other RNA
tggaggggacagataaaagtacccgttgtagctccctgaaaccgttgctacaataaggccgtcgaaagatgtgccgcaacgctctgccttctggcatcgtt

SEQ ID NO: 1651 - RNA, 101 nt, synthetic construct
  source 1..101: mol_type = other RNA
ggacagataaaagtacccagaaccgttgtagctccctgaaaccgttgctacaataaggccgtcgaaagatgtgccgcaacgctctgccttctggcatcgtt

SEQ ID NO: 1652 - RNA, 101 nt, synthetic construct
  source 1..101: mol_type = other RNA
aaagtacccagaaccagagccacagttgtagctccctgaaaccgttgctacaataaggccgtcgaaagatgtgccgcaacgctctgccttctggcatcgtt

SEQ ID NO: 1653 - RNA, 101 nt, synthetic construct
  source 1..101: mol_type = other RNA
tacccagaaccagagccacattaagttgtagctccctgaaaccgttgctacaataaggccgtcgaaagatgtgccgcaacgctctgccttctggcatcgtt

SEQ ID NO: 1654 - RNA, 101 nt, synthetic construct
  source 1..101: mol_type = other RNA
acccagaaccagagccacattaacgttgtagctccctgaaaccgttgctacaataaggccgtcgaaagatgtgccgcaacgctctgccttctggcatcgtt

SEQ ID NO: 1655 - RNA, 101 nt, synthetic construct
  source 1..101: mol_type = other RNA
ttaaccggccctgggaatataagggttgtagctccctgaaaccgttgctacaataaggccgtcgaaagatgtgccgcaacgctctgccttctggcatcgtt

SEQ ID NO: 1656 - RNA, 101 nt, synthetic construct
  source 1..101: mol_type = other RNA
taaccggccctgggaatataaggtgttgtagctccctgaaaccgttgctacaataaggccgtcgaaagatgtgccgcaacgctctgccttctggcatcgtt

SEQ ID NO: 1657 - RNA, 101 nt, synthetic construct
  source 1..101: mol_type = other RNA
aggtggtcccagctcggggacacagttgtagctccctgaaaccgttgctacaataaggccgtcgaaagatgtgccgcaacgctctgccttctggcatcgtt

SEQ ID NO: 1658 - RNA, 101 nt, synthetic construct
  source 1..101: mol_type = other RNA
ggatccctggaggcagcaaacatggttgtagctccctgaaaccgttgctacaataaggccgtcgaaagatgtgccgcaacgctctgccttctggcatcgtt

SEQ ID NO: 1659 - RNA, 101 nt, synthetic construct
  source 1..101: mol_type = other RNA
acatgctgtcctgaagtggacatagttgtagctccctgaaaccgttgctacaataaggccgtcgaaagatgtgccgcaacgctctgccttctggcatcgtt

SEQ ID NO: 1660 - RNA, 101 nt, synthetic construct
  source 1..101: mol_type = other RNA
catgctgtcctgaagtggacataggttgtagctccctgaaaccgttgctacaataaggccgtcgaaagatgtgccgcaacgctctgccttctggcatcgtt

SEQ ID NO: 1661 - RNA, 101 nt, synthetic construct
  source 1..101: mol_type = other RNA
gaggaagaagactagctgagctctgttgtagctccctgaaaccgttgctacaataaggccgtcgaaagatgtgccgcaacgctctgccttctggcatcgtt

SEQ ID NO: 1662 - RNA, 101 nt, synthetic construct
  source 1..101: mol_type = other RNA
aggaagaagactagctgagctctcgttgtagctccctgaaaccgttgctacaataaggccgtcgaaagatgtgccgcaacgctctgccttctggcatcgtt

SEQ ID NO: 1663 - RNA, 101 nt, synthetic construct
  source 1..101: mol_type = other RNA
ggaagaagactagctgagctctcggttgtagctccctgaaaccgttgctacaataaggccgtcgaaagatgtgccgcaacgctctgccttctggcatcgtt

SEQ ID NO: 1664 - RNA, 101 nt, synthetic construct
  source 1..101: mol_type = other RNA
agctgagctctcggacccctggaagttgtagctccctgaaaccgttgctacaataaggccgtcgaaagatgtgccgcaacgctctgccttctggcatcgtt

SEQ ID NO: 1665 - RNA, 101 nt, synthetic construct
  source 1..101: mol_type = other RNA
ctgcccaaatgaaaggagtgagaggttgtagctccctgaaaccgttgctacaataaggccgtcgaaagatgtgccgcaacgctctgccttctggcatcgtt

SEQ ID NO: 1666 - RNA, 101 nt, synthetic construct
  source 1..101: mol_type = other RNA
tgcccaaatgaaaggagtgagagggttgtagctccctgaaaccgttgctacaataaggccgtcgaaagatgtgccgcaacgctctgccttctggcatcgtt

SEQ ID NO: 1667 - RNA, 101 nt, synthetic construct
  source 1..101: mol_type = other RNA
aatgaaaggagtgagaggtgacccgttgtagctccctgaaaccgttgctacaataaggccgtcgaaagatgtgccgcaacgctctgccttctggcatcgtt

SEQ ID NO: 1668 - RNA, 101 nt, synthetic construct
  source 1..101: mol_type = other RNA
gacccgaatccacaggagaacggggttgtagctccctgaaaccgttgctacaataaggccgtcgaaagatgtgccgcaacgctctgccttctggcatcgtt

SEQ ID NO: 1669 - RNA, 101 nt, synthetic construct
  source 1..101: mol_type = other RNA
aagcaagaggatggagaggtggctgttgtagctccctgaaaccgttgctacaataaggccgtcgaaagatgtgccgcaacgctctgccttctggcatcgtt

SEQ ID NO: 1670 - RNA, 101 nt, synthetic construct
  source 1..101: mol_type = other RNA
ttgtccagaaaaacggtgatgatggttgtagctccctgaaaccgttgctacaataaggccgtcgaaagatgtgccgcaacgctctgccttctggcatcgtt

SEQ ID NO: 1671 - RNA, 101 nt, synthetic construct
  source 1..101: mol_type = other RNA
tggccgcctctactccctttctctgttgtagctccctgaaaccgttgctacaataaggccgtcgaaagatgtgccgcaacgctctgccttctggcatcgtt

SEQ ID NO: 1672 - RNA, 101 nt, synthetic construct
  source 1..101: mol_type = other RNA
gttcaccaggtcgtggccgcctctgttgtagctccctgaaaccgttgctacaataaggccgtcgaaagatgtgccgcaacgctctgccttctggcatcgtt

SEQ ID NO: 1673 - RNA, 101 nt, synthetic construct
  source 1..101: mol_type = other RNA
tgttcaccaggtcgtggccgcctcgttgtagctccctgaaaccgttgctacaataaggccgtcgaaagatgtgccgcaacgctctgccttctggcatcgtt

SEQ ID NO: 1674 - RNA, 101 nt, synthetic construct
  source 1..101: mol_type = other RNA
gtcctaggtgttcaccaggtcgtggttgtagctccctgaaaccgttgctacaataaggccgtcgaaagatgtgccgcaacgctctgccttctggcatcgtt

SEQ ID NO: 1675 - RNA, 101 nt, synthetic construct
  source 1..101: mol_type = other RNA
tgcgtcctaggtgttcaccaggtcgttgtagctccctgaaaccgttgctacaataaggccgtcgaaagatgtgccgcaacgctctgccttctggcatcgtt

SEQ ID NO: 1676 - RNA, 101 nt, synthetic construct
  source 1..101: mol_type = other RNA
tgtgagaatggtgcgtcctaggtggttgtagctccctgaaaccgttgctacaataaggccgtcgaaagatgtgccgcaacgctctgccttctggcatcgtt

SEQ ID NO: 1677 - RNA, 101 nt, synthetic construct
  source 1..101: mol_type = other RNA
gaaaactccctttgtgagaatggtgttgtagctccctgaaaccgttgctacaataaggccgtcgaaagatgtgccgcaacgctctgccttctggcatcgtt

SEQ ID NO: 1678 - RNA, 101 nt, synthetic construct
  source 1..101: mol_type = other RNA
acctgtgagataaggccagtagccgttgtagctccctgaaaccgttgctacaataaggccgtcgaaagatgtgccgcaacgctctgccttctggcatcgtt

SEQ ID NO: 1679 - RNA, 101 nt, synthetic construct
  source 1..101: mol_type = other RNA
tacctgtgagataaggccagtagcgttgtagctccctgaaaccgttgctacaataaggccgtcgaaagatgtgccgcaacgctctgccttctggcatcgtt

SEQ ID NO: 1680 - RNA, 101 nt, synthetic construct
  source 1..101: mol_type = other RNA
ttacctgtgagataaggccagtaggttgtagctccctgaaaccgttgctacaataaggccgtcgaaagatgtgccgcaacgctctgccttctggcatcgtt

SEQ ID NO: 1681 - RNA, 101 nt, synthetic construct
  source 1..101: mol_type = other RNA
agttttacctgtgagataaggccagttgtagctccctgaaaccgttgctacaataaggccgtcgaaagatgtgccgcaacgctctgccttctggcatcgtt

SEQ ID NO: 1682 - RNA, 101 nt, synthetic construct
  source 1..101: mol_type = other RNA
gtgcgtcagttttacctgtgagatgttgtagctccctgaaaccgttgctacaataaggccgtcgaaagatgtgccgcaacgctctgccttctggcatcgtt

SEQ ID NO: 1683 - RNA, 101 nt, synthetic construct
  source 1..101: mol_type = other RNA
tatattgttcctccgtgcgtcagtgttgtagctccctgaaaccgttgctacaataaggccgtcgaaagatgtgccgcaacgctctgccttctggcatcgtt

SEQ ID NO: 1684 - RNA, 101 nt, synthetic construct
  source 1..101: mol_type = other RNA
taactttggctcttcacctttctagttgtagctccctgaaaccgttgctacaataaggccgtcgaaagatgtgccgcaacgctctgccttctggcatcgtt

SEQ ID NO: 1685 - RNA, 101 nt, synthetic construct
  source 1..101: mol_type = other RNA
ctaactttggctcttcacctttctgttgtagctccctgaaaccgttgctacaataaggccgtcgaaagatgtgccgcaacgctctgccttctggcatcgtt

SEQ ID NO: 1686 - RNA, 101 nt, synthetic construct
  source 1..101: mol_type = other RNA
tctaactttggctcttcacctttcgttgtagctccctgaaaccgttgctacaataaggccgtcgaaagatgtgccgcaacgctctgccttctggcatcgtt

SEQ ID NO: 1687 - RNA, 101 nt, synthetic construct
  source 1..101: mol_type = other RNA
ggtcctgagttctaactttggctcgttgtagctccctgaaaccgttgctacaataaggccgtcgaaagatgtgccgcaacgctctgccttctggcatcgtt

SEQ ID NO: 1688 - RNA, 101 nt, synthetic construct
  source 1..101: mol_type = other RNA
tcctggtgctgcagcttccttacagttgtagctccctgaaaccgttgctacaataaggccgtcgaaagatgtgccgcaacgctctgccttctggcatcgtt

SEQ ID NO: 1689 - RNA, 101 nt, synthetic construct
  source 1..101: mol_type = other RNA
cagctagtcttcttcctccaacccgttgtagctccctgaaaccgttgctacaataaggccgtcgaaagatgtgccgcaacgctctgccttctggcatcgtt

SEQ ID NO: 1690 - RNA, 101 nt, synthetic construct
  source 1..101: mol_type = other RNA
gcgtgacctgcccggttctcagtggttgtagctccctgaaaccgttgctacaataaggccgtcgaaagatgtgccgcaacgctctgccttctggcatcgtt

SEQ ID NO: 1691 - RNA, 101 nt, synthetic construct
  source 1..101: mol_type = other RNA
gatgcgtgacctgcccggttctcagttgtagctccctgaaaccgttgctacaataaggccgtcgaaagatgtgccgcaacgctctgccttctggcatcgtt

SEQ ID NO: 1692 - RNA, 101 nt, synthetic construct
  source 1..101: mol_type = other RNA
gtttgcttacgatggagccagagagttgtagctccctgaaaccgttgctacaataaggccgtcgaaagatgtgccgcaacgctctgccttctggcatcgtt

SEQ ID NO: 1693 - RNA, 101 nt, synthetic construct
  source 1..101: mol_type = other RNA
gaacctctaaggtttgcttacgatgttgtagctccctgaaaccgttgctacaataaggccgtcgaaagatgtgccgcaacgctctgccttctggcatcgtt

SEQ ID NO: 1694 - RNA, 101 nt, synthetic construct
  source 1..101: mol_type = other RNA
cctggagccatctctctccttgccgttgtagctccctgaaaccgttgctacaataaggccgtcgaaagatgtgccgcaacgctctgccttctggcatcgtt

SEQ ID NO: 1695 - RNA, 101 nt, synthetic construct
  source 1..101: mol_type = other RNA
cacccccatttcctggagccatctgttgtagctccctgaaaccgttgctacaataaggccgtcgaaagatgtgccgcaacgctctgccttctggcatcgtt

SEQ ID NO: 1696 - RNA, 101 nt, synthetic construct
  source 1..101: mol_type = other RNA
tctggtgacacacccccatttcctgttgtagctccctgaaaccgttgctacaataaggccgtcgaaagatgtgccgcaacgctctgccttctggcatcgtt

SEQ ID NO: 1697 - RNA, 101 nt, synthetic construct
  source 1..101: mol_type = other RNA
ttccttatctggtgacacacccccgttgtagctccctgaaaccgttgctacaataaggccgtcgaaagatgtgccgcaacgctctgccttctggcatcgtt

SEQ ID NO: 1698 - RNA, 101 nt, synthetic construct
  source 1..101: mol_type = other RNA
ggcagattccttatctggtgacacgttgtagctccctgaaaccgttgctacaataaggccgtcgaaagatgtgccgcaacgctctgccttctggcatcgtt

SEQ ID NO: 1699 - RNA, 101 nt, synthetic construct
  source 1..101: mol_type = other RNA
aggcagattccttatctggtgacagttgtagctccctgaaaccgttgctacaataaggccgtcgaaagatgtgccgcaacgctctgccttctggcatcgtt

SEQ ID NO: 1700 - RNA, 101 nt, synthetic construct
  source 1..101: mol_type = other RNA
taggcagattccttatctggtgacgttgtagctccctgaaaccgttgctacaataaggccgtcgaaagatgtgccgcaacgctctgccttctggcatcgtt

SEQ ID NO: 1701 - RNA, 101 nt, synthetic construct
  source 1..101: mol_type = other RNA
ttaggcagattccttatctggtgagttgtagctccctgaaaccgttgctacaataaggccgtcgaaagatgtgccgcaacgctctgccttctggcatcgtt

SEQ ID NO: 1702 - RNA, 101 nt, synthetic construct
  source 1..101: mol_type = other RNA
ctaacccccacctcctgttaggcagttgtagctccctgaaaccgttgctacaataaggccgtcgaaagatgtgccgcaacgctctgccttctggcatcgtt

SEQ ID NO: 1703 - RNA, 101 nt, synthetic construct
  source 1..101: mol_type = other RNA
ctcctgatattgggtctaacccccgttgtagctccctgaaaccgttgctacaataaggccgtcgaaagatgtgccgcaacgctctgccttctggcatcgtt

SEQ ID NO: 1704 - RNA, 101 nt, synthetic construct
  source 1..101: mol_type = other RNA
agtctcctgatattgggtctaaccgttgtagctccctgaaaccgttgctacaataaggccgtcgaaagatgtgccgcaacgctctgccttctggcatcgtt

SEQ ID NO: 1705 - RNA, 101 nt, synthetic construct
  source 1..101: mol_type = other RNA
cctagtctcctgatattgggtctagttgtagctccctgaaaccgttgctacaataaggccgtcgaaagatgtgccgcaacgctctgccttctggcatcgtt

SEQ ID NO: 1706 - RNA, 101 nt, synthetic construct
  source 1..101: mol_type = other RNA
tcctagtctcctgatattgggtctgttgtagctccctgaaaccgttgctacaataaggccgtcgaaagatgtgccgcaacgctctgccttctggcatcgtt

SEQ ID NO: 1707 - RNA, 101 nt, synthetic construct
  source 1..101: mol_type = other RNA
ttcctagtctcctgatattgggtcgttgtagctccctgaaaccgttgctacaataaggccgtcgaaagatgtgccgcaacgctctgccttctggcatcgtt

SEQ ID NO: 1708 - RNA, 101 nt, synthetic construct
  source 1..101: mol_type = other RNA
cttcctagtctcctgatattgggtgttgtagctccctgaaaccgttgctacaataaggccgtcgaaagatgtgccgcaacgctctgccttctggcatcgtt

SEQ ID NO: 1709 - RNA, 101 nt, synthetic construct
  source 1..101: mol_type = other RNA
catccttaggcctcctccttcctagttgtagctccctgaaaccgttgctacaataaggccgtcgaaagatgtgccgcaacgctctgccttctggcatcgtt

SEQ ID NO: 1710 - RNA, 101 nt, synthetic construct
  source 1..101: mol_type = other RNA
aaaagccccatccttaggcctcctgttgtagctccctgaaaccgttgctacaataaggccgtcgaaagatgtgccgcaacgctctgccttctggcatcgtt

SEQ ID NO: 1711 - RNA, 101 nt, synthetic construct
  source 1..101: mol_type = other RNA
gtgacagaaaagccccatccttaggttgtagctccctgaaaccgttgctacaataaggccgtcgaaagatgtgccgcaacgctctgccttctggcatcgtt

SEQ ID NO: 1712 - RNA, 101 nt, synthetic construct
  source 1..101: mol_type = other RNA
ttggtgacagaaaagccccatcctgttgtagctccctgaaaccgttgctacaataaggccgtcgaaagatgtgccgcaacgctctgccttctggcatcgtt

SEQ ID NO: 1713 - RNA, 101 nt, synthetic construct
  source 1..101: mol_type = other RNA
gacaggattggtgacagaaaagccgttgtagctccctgaaaccgttgctacaataaggccgtcgaaagatgtgccgcaacgctctgccttctggcatcgtt

SEQ ID NO: 1714 - RNA, 101 nt, synthetic construct
  source 1..101: mol_type = other RNA
tagggacaggattggtgacagaaagttgtagctccctgaaaccgttgctacaataaggccgtcgaaagatgtgccgcaacgctctgccttctggcatcgtt

SEQ ID NO: 1715 - RNA, 101 nt, synthetic construct
  source 1..101: mol_type = other RNA
ctagggacaggattggtgacagaagttgtagctccctgaaaccgttgctacaataaggccgtcgaaagatgtgccgcaacgctctgccttctggcatcgtt

SEQ ID NO: 1716 - RNA, 101 nt, synthetic construct
  source 1..101: mol_type = other RNA
actagggacaggattggtgacagagttgtagctccctgaaaccgttgctacaataaggccgtcgaaagatgtgccgcaacgctctgccttctggcatcgtt

SEQ ID NO: 1717 - RNA, 101 nt, synthetic construct
  source 1..101: mol_type = other RNA
ctgggtacttttatctgtcccctcgttgtagctccctgaaaccgttgctacaataaggccgtcgaaagatgtgccgcaacgctctgccttctggcatcgtt

SEQ ID NO: 1718 - RNA, 101 nt, synthetic construct
  source 1..101: mol_type = other RNA
tctgggtacttttatctgtcccctgttgtagctccctgaaaccgttgctacaataaggccgtcgaaagatgtgccgcaacgctctgccttctggcatcgtt

SEQ ID NO: 1719 - RNA, 101 nt, synthetic construct
  source 1..101: mol_type = other RNA
ttctgggtacttttatctgtccccgttgtagctccctgaaaccgttgctacaataaggccgtcgaaagatgtgccgcaacgctctgccttctggcatcgtt

SEQ ID NO: 1720 - RNA, 101 nt, synthetic construct
  source 1..101: mol_type = other RNA
tggttctgggtacttttatctgtcgttgtagctccctgaaaccgttgctacaataaggccgtcgaaagatgtgccgcaacgctctgccttctggcatcgtt

SEQ ID NO: 1721 - RNA, 101 nt, synthetic construct
  source 1..101: mol_type = other RNA
ctctggttctgggtacttttatctgttgtagctccctgaaaccgttgctacaataaggccgtcgaaagatgtgccgcaacgctctgccttctggcatcgtt

SEQ ID NO: 1722 - RNA, 101 nt, synthetic construct
  source 1..101: mol_type = other RNA
gctctggttctgggtacttttatcgttgtagctccctgaaaccgttgctacaataaggccgtcgaaagatgtgccgcaacgctctgccttctggcatcgtt

SEQ ID NO: 1723 - RNA, 101 nt, synthetic construct
  source 1..101: mol_type = other RNA
ggctctggttctgggtacttttatgttgtagctccctgaaaccgttgctacaataaggccgtcgaaagatgtgccgcaacgctctgccttctggcatcgtt

SEQ ID NO: 1724 - RNA, 101 nt, synthetic construct
  source 1..101: mol_type = other RNA
gagctgggaccaccttatattcccgttgtagctccctgaaaccgttgctacaataaggccgtcgaaagatgtgccgcaacgctctgccttctggcatcgtt

SEQ ID NO: 1725 - RNA, 101 nt, synthetic construct
  source 1..101: mol_type = other RNA
gtccccgagctgggaccaccttatgttgtagctccctgaaaccgttgctacaataaggccgtcgaaagatgtgccgcaacgctctgccttctggcatcgtt

SEQ ID NO: 1726 - RNA, 101 nt, synthetic construct
  source 1..101: mol_type = other RNA
tgtccccgagctgggaccaccttagttgtagctccctgaaaccgttgctacaataaggccgtcgaaagatgtgccgcaacgctctgccttctggcatcgtt

SEQ ID NO: 1727 - RNA, 101 nt, synthetic construct
  source 1..101: mol_type = other RNA
ccagggatcctgtgtccccgagctgttgtagctccctgaaaccgttgctacaataaggccgtcgaaagatgtgccgcaacgctctgccttctggcatcgtt

SEQ ID NO: 1728 - RNA, 101 nt, synthetic construct
  source 1..101: mol_type = other RNA
gtttgctgcctccagggatcctgtgttgtagctccctgaaaccgttgctacaataaggccgtcgaaagatgtgccgcaacgctctgccttctggcatcgtt

SEQ ID NO: 1729 - RNA, 101 nt, synthetic construct
  source 1..101: mol_type = other RNA
tgtttgctgcctccagggatcctggttgtagctccctgaaaccgttgctacaataaggccgtcgaaagatgtgccgcaacgctctgccttctggcatcgtt

SEQ ID NO: 1730 - RNA, 101 nt, synthetic construct
  source 1..101: mol_type = other RNA
atgtttgctgcctccagggatcctgttgtagctccctgaaaccgttgctacaataaggccgtcgaaagatgtgccgcaacgctctgccttctggcatcgtt

SEQ ID NO: 1731 - RNA, 101 nt, synthetic construct
  source 1..101: mol_type = other RNA
ggacagcatgtttgctgcctccaggttgtagctccctgaaaccgttgctacaataaggccgtcgaaagatgtgccgcaacgctctgccttctggcatcgtt

SEQ ID NO: 1732 - RNA, 101 nt, synthetic construct
  source 1..101: mol_type = other RNA
ccacttcaggacagcatgtttgctgttgtagctccctgaaaccgttgctacaataaggccgtcgaaagatgtgccgcaacgctctgccttctggcatcgtt

SEQ ID NO: 1733 - RNA, 101 nt, synthetic construct
  source 1..101: mol_type = other RNA
tgtccacttcaggacagcatgtttgttgtagctccctgaaaccgttgctacaataaggccgtcgaaagatgtgccgcaacgctctgccttctggcatcgtt

SEQ ID NO: 1734 - RNA, 101 nt, synthetic construct
  source 1..101: mol_type = other RNA
cttcttcctccaacccgggcccctgttgtagctccctgaaaccgttgctacaataaggccgtcgaaagatgtgccgcaacgctctgccttctggcatcgtt

SEQ ID NO: 1735 - RNA, 101 nt, synthetic construct
  source 1..101: mol_type = other RNA
tcagctagtcttcttcctccaaccgttgtagctccctgaaaccgttgctacaataaggccgtcgaaagatgtgccgcaacgctctgccttctggcatcgtt

SEQ ID NO: 1736 - RNA, 101 nt, synthetic construct
  source 1..101: mol_type = other RNA
agagctcagctagtcttcttcctcgttgtagctccctgaaaccgttgctacaataaggccgtcgaaagatgtgccgcaacgctctgccttctggcatcgtt

SEQ ID NO: 1737 - RNA, 101 nt, synthetic construct
  source 1..101: mol_type = other RNA
gagagctcagctagtcttcttcctgttgtagctccctgaaaccgttgctacaataaggccgtcgaaagatgtgccgcaacgctctgccttctggcatcgtt

SEQ ID NO: 1738 - RNA, 101 nt, synthetic construct
  source 1..101: mol_type = other RNA
gtccgagagctcagctagtcttctgttgtagctccctgaaaccgttgctacaataaggccgtcgaaagatgtgccgcaacgctctgccttctggcatcgtt

SEQ ID NO: 1739 - RNA, 101 nt, synthetic construct
  source 1..101: mol_type = other RNA
gccccctgtcatggcatcttccaggttgtagctccctgaaaccgttgctacaataaggccgtcgaaagatgtgccgcaacgctctgccttctggcatcgtt

SEQ ID NO: 1740 - RNA, 101 nt, synthetic construct
  source 1..101: mol_type = other RNA
ctcttccagccccctgtcatggcagttgtagctccctgaaaccgttgctacaataaggccgtcgaaagatgtgccgcaacgctctgccttctggcatcgtt

SEQ ID NO: 1741 - RNA, 101 nt, synthetic construct
  source 1..101: mol_type = other RNA
ctctagtctgtgctagctcttccagttgtagctccctgaaaccgttgctacaataaggccgtcgaaagatgtgccgcaacgctctgccttctggcatcgtt

SEQ ID NO: 1742 - RNA, 101 nt, synthetic construct
  source 1..101: mol_type = other RNA
tctctagtctgtgctagctcttccgttgtagctccctgaaaccgttgctacaataaggccgtcgaaagatgtgccgcaacgctctgccttctggcatcgtt

SEQ ID NO: 1743 - RNA, 101 nt, synthetic construct
  source 1..101: mol_type = other RNA
ctctctagtctgtgctagctcttcgttgtagctccctgaaaccgttgctacaataaggccgtcgaaagatgtgccgcaacgctctgccttctggcatcgtt

SEQ ID NO: 1744 - RNA, 101 nt, synthetic construct
  source 1..101: mol_type = other RNA
cctctctagtctgtgctagctcttgttgtagctccctgaaaccgttgctacaataaggccgtcgaaagatgtgccgcaacgctctgccttctggcatcgtt

SEQ ID NO: 1745 - RNA, 101 nt, synthetic construct
  source 1..101: mol_type = other RNA
cttacctctctagtctgtgctagcgttgtagctccctgaaaccgttgctacaataaggccgtcgaaagatgtgccgcaacgctctgccttctggcatcgtt

SEQ ID NO: 1746 - RNA, 101 nt, synthetic construct
  source 1..101: mol_type = other RNA
catttgggcagctcccctacccccgttgtagctccctgaaaccgttgctacaataaggccgtcgaaagatgtgccgcaacgctctgccttctggcatcgtt

SEQ ID NO: 1747 - RNA, 101 nt, synthetic construct
  source 1..101: mol_type = other RNA
ctcctttcatttgggcagctccccgttgtagctccctgaaaccgttgctacaataaggccgtcgaaagatgtgccgcaacgctctgccttctggcatcgtt

SEQ ID NO: 1748 - RNA, 101 nt, synthetic construct
  source 1..101: mol_type = other RNA
actcctttcatttgggcagctcccgttgtagctccctgaaaccgttgctacaataaggccgtcgaaagatgtgccgcaacgctctgccttctggcatcgtt

SEQ ID NO: 1749 - RNA, 101 nt, synthetic construct
  source 1..101: mol_type = other RNA
cactcctttcatttgggcagctccgttgtagctccctgaaaccgttgctacaataaggccgtcgaaagatgtgccgcaacgctctgccttctggcatcgtt

SEQ ID NO: 1750 - RNA, 101 nt, synthetic construct
  source 1..101: mol_type = other RNA
ctctcactcctttcatttgggcaggttgtagctccctgaaaccgttgctacaataaggccgtcgaaagatgtgccgcaacgctctgccttctggcatcgtt

SEQ ID NO: 1751 - RNA, 101 nt, synthetic construct
  source 1..101: mol_type = other RNA
cctctcactcctttcatttgggcagttgtagctccctgaaaccgttgctacaataaggccgtcgaaagatgtgccgcaacgctctgccttctggcatcgtt

SEQ ID NO: 1752 - RNA, 101 nt, synthetic construct
  source 1..101: mol_type = other RNA
acctctcactcctttcatttgggcgttgtagctccctgaaaccgttgctacaataaggccgtcgaaagatgtgccgcaacgctctgccttctggcatcgtt

SEQ ID NO: 1753 - RNA, 101 nt, synthetic construct
  source 1..101: mol_type = other RNA
ctcctgtggattcgggtcacctctgttgtagctccctgaaaccgttgctacaataaggccgtcgaaagatgtgccgcaacgctctgccttctggcatcgtt

SEQ ID NO: 1754 - RNA, 101 nt, synthetic construct
  source 1..101: mol_type = other RNA
caccccgttctcctgtggattcgggttgtagctccctgaaaccgttgctacaataaggccgtcgaaagatgtgccgcaacgctctgccttctggcatcgtt

SEQ ID NO: 1755 - RNA, 101 nt, synthetic construct
  source 1..101: mol_type = other RNA
tgctttctttgcctggacaccccggttgtagctccctgaaaccgttgctacaataaggccgtcgaaagatgtgccgcaacgctctgccttctggcatcgtt

SEQ ID NO: 1756 - RNA, 101 nt, synthetic construct
  source 1..101: mol_type = other RNA
atcctcttgctttctttgcctggagttgtagctccctgaaaccgttgctacaataaggccgtcgaaagatgtgccgcaacgctctgccttctggcatcgtt

SEQ ID NO: 1757 - RNA, 101 nt, synthetic construct
  source 1..101: mol_type = other RNA
catcctcttgctttctttgcctgggttgtagctccctgaaaccgttgctacaataaggccgtcgaaagatgtgccgcaacgctctgccttctggcatcgtt

SEQ ID NO: 1758 - RNA, 101 nt, synthetic construct
  source 1..101: mol_type = other RNA
ccatcctcttgctttctttgcctggttgtagctccctgaaaccgttgctacaataaggccgtcgaaagatgtgccgcaacgctctgccttctggcatcgtt

SEQ ID NO: 1759 - RNA, 101 nt, synthetic construct
  source 1..101: mol_type = other RNA
ccacctctccatcctcttgctttcgttgtagctccctgaaaccgttgctacaataaggccgtcgaaagatgtgccgcaacgctctgccttctggcatcgtt

SEQ ID NO: 1760 - RNA, 101 nt, synthetic construct
  source 1..101: mol_type = other RNA
gtctccctggctttagccacctctgttgtagctccctgaaaccgttgctacaataaggccgtcgaaagatgtgccgcaacgctctgccttctggcatcgtt

SEQ ID NO: 1761 - RNA, 101 nt, synthetic construct
  source 1..101: mol_type = other RNA
ccccgtctccctggctttagccacgttgtagctccctgaaaccgttgctacaataaggccgtcgaaagatgtgccgcaacgctctgccttctggcatcgtt

SEQ ID NO: 1762 - RNA, 101 nt, synthetic construct
  source 1..101: mol_type = other RNA
aagtaccccgtctccctggctttagttgtagctccctgaaaccgttgctacaataaggccgtcgaaagatgtgccgcaacgctctgccttctggcatcgtt

SEQ ID NO: 1763 - RNA, 101 nt, synthetic construct
  source 1..101: mol_type = other RNA
ccaaagtaccccgtctccctggctgttgtagctccctgaaaccgttgctacaataaggccgtcgaaagatgtgccgcaacgctctgccttctggcatcgtt

SEQ ID NO: 1764 - RNA, 101 nt, synthetic construct
  source 1..101: mol_type = other RNA
tctggacaaccccaaagtaccccggttgtagctccctgaaaccgttgctacaataaggccgtcgaaagatgtgccgcaacgctctgccttctggcatcgtt

SEQ ID NO: 1765 - RNA, 101 nt, synthetic construct
  source 1..101: mol_type = other RNA
ttctggacaaccccaaagtaccccgttgtagctccctgaaaccgttgctacaataaggccgtcgaaagatgtgccgcaacgctctgccttctggcatcgtt

SEQ ID NO: 1766 - RNA, 101 nt, synthetic construct
  source 1..101: mol_type = other RNA
ccgtttttctggacaaccccaaaggttgtagctccctgaaaccgttgctacaataaggccgtcgaaagatgtgccgcaacgctctgccttctggcatcgtt

SEQ ID NO: 1767 - RNA, 101 nt, synthetic construct
  source 1..101: mol_type = other RNA
accgtttttctggacaaccccaaagttgtagctccctgaaaccgttgctacaataaggccgtcgaaagatgtgccgcaacgctctgccttctggcatcgtt

SEQ ID NO: 1768 - RNA, 101 nt, synthetic construct
  source 1..101: mol_type = other RNA
caccgtttttctggacaaccccaagttgtagctccctgaaaccgttgctacaataaggccgtcgaaagatgtgccgcaacgctctgccttctggcatcgtt

SEQ ID NO: 1769 - RNA, 101 nt, synthetic construct
  source 1..101: mol_type = other RNA
tgcatcatcaccgtttttctggacgttgtagctccctgaaaccgttgctacaataaggccgtcgaaagatgtgccgcaacgctctgccttctggcatcgtt

SEQ ID NO: 1770 - RNA, 101 nt, synthetic construct
  source 1..101: mol_type = other RNA
ctgcatcatcaccgtttttctggagttgtagctccctgaaaccgttgctacaataaggccgtcgaaagatgtgccgcaacgctctgccttctggcatcgtt

SEQ ID NO: 1771 - RNA, 101 nt, synthetic construct
  source 1..101: mol_type = other RNA
cctgcatcatcaccgtttttctgggttgtagctccctgaaaccgttgctacaataaggccgtcgaaagatgtgccgcaacgctctgccttctggcatcgtt

SEQ ID NO: 1772 - RNA, 101 nt, synthetic construct
  source 1..101: mol_type = other RNA
ctccccttcttgtaggcctgcatcgttgtagctccctgaaaccgttgctacaataaggccgtcgaaagatgtgccgcaacgctctgccttctggcatcgtt

SEQ ID NO: 1773 - RNA, 101 nt, synthetic construct
  source 1..101: mol_type = other RNA
cttgcgtcccgcctccccttcttggttgtagctccctgaaaccgttgctacaataaggccgtcgaaagatgtgccgcaacgctctgccttctggcatcgtt

SEQ ID NO: 1774 - RNA, 101 nt, synthetic construct
  source 1..101: mol_type = other RNA
ctccgacggatgtctcccttgcgtgttgtagctccctgaaaccgttgctacaataaggccgtcgaaagatgtgccgcaacgctctgccttctggcatcgtt

SEQ ID NO: 1775-1827 - skipped (53 entries)

SEQ ID NO: 1828 - RNA, 101 nt, synthetic construct
  source 1..101: mol_type = other RNA
tctgggaaaggaggggaagatgaggttgtagctccctgaaaccgttgctacaataaggccgtcgaaagatgtgccgcaacgctctgccttctggcatcgtt

SEQ ID NO: 1829 - RNA, 101 nt, synthetic construct
  source 1..101: mol_type = other RNA
ctctgggaaaggaggggaagatgagttgtagctccctgaaaccgttgctacaataaggccgtcgaaagatgtgccgcaacgctctgccttctggcatcgtt

SEQ ID NO: 1830 - RNA, 101 nt, synthetic construct
  source 1..101: mol_type = other RNA
tcccagagccgtcttcccagtccagttgtagctccctgaaaccgttgctacaataaggccgtcgaaagatgtgccgcaacgctctgccttctggcatcgtt

SEQ ID NO: 1831 - RNA, 101 nt, synthetic construct
  source 1..101: mol_type = other RNA
gcatgggcaggggctggggtgcacgttgtagctccctgaaaccgttgctacaataaggccgtcgaaagatgtgccgcaacgctctgccttctggcatcgtt

SEQ ID NO: 1832 - RNA, 101 nt, synthetic construct
  source 1..101: mol_type = other RNA
gaatggcaggcggaggttgtactggttgtagctccctgaaaccgttgctacaataaggccgtcgaaagatgtgccgcaacgctctgccttctggcatcgtt

SEQ ID NO: 1833 - RNA, 101 nt, synthetic construct
  source 1..101: mol_type = other RNA
gtgagcaggcacctgtgccaacatgttgtagctccctgaaaccgttgctacaataaggccgtcgaaagatgtgccgcaacgctctgccttctggcatcgtt

SEQ ID NO: 1834-2001 - skipped (168 entries)

SEQ ID NO: 2002 - RNA, 101 nt, synthetic construct; identical to SEQ ID NO: 1002
  source 1..101: mol_type = other RNA
  modified_base 1: mod_base = OTHER; note = 2'-O-methyl modified nucleotide with phosphorothioate linkage
  modified_base 2: mod_base = OTHER; note = 2'-O-methyl modified nucleotide with phosphorothioate linkage
  modified_base 3: mod_base = OTHER; note = 2'-O-methyl modified nucleotide with phosphorothioate linkage
  modified_base 4: mod_base = OTHER; note = 2'-O-methyl modified nucleotide
  modified_base 5: mod_base = OTHER; note = 2'-O-methyl modified nucleotide
  modified_base 8: mod_base = OTHER; note = 2'-O-methyl modified nucleotide
  modified_base 9: mod_base = OTHER; note = 2'-O-methyl modified nucleotide
  modified_base 11: mod_base = OTHER; note = 2'-O-methyl modified nucleotide
  modified_base 13: mod_base = OTHER; note = 2'-O-methyl modified nucleotide
  modified_base 18: mod_base = OTHER; note = 2'-O-methyl modified nucleotide
  modified_base 22: mod_base = OTHER; note = 2'-O-methyl modified nucleotide
  modified_base 25: mod_base = OTHER; note = 2'-O-methyl modified nucleotide
  modified_base 29: mod_base = OTHER; note = 2'-O-methyl modified nucleotide
  modified_base 30: mod_base = OTHER; note = 2'-O-methyl modified nucleotide
  modified_base 31: mod_base = OTHER; note = 2'-O-methyl modified nucleotide
  modified_base 32: mod_base = OTHER; note = 2'-O-methyl modified nucleotide
  modified_base 37: mod_base = OTHER; note = 2'-O-methyl modified nucleotide
  modified_base 38: mod_base = OTHER; note = 2'-O-methyl modified nucleotide
  modified_base 39: mod_base = OTHER; note = 2'-O-methyl modified nucleotide
  modified_base 40: mod_base = OTHER; note = 2'-O-methyl modified nucleotide
  modified_base 41: mod_base = OTHER; note = 2'-O-methyl modified nucleotide
  modified_base 42: mod_base = OTHER; note = 2'-O-methyl modified nucleotide
  modified_base 43: mod_base = OTHER; note = 2'-O-methyl modified nucleotide
  modified_base 47: mod_base = OTHER; note = 2'-O-methyl modified nucleotide
  modified_base 48: mod_base = OTHER; note = 2'-O-methyl modified nucleotide
  modified_base 51: mod_base = OTHER; note = 2'-O-methyl modified nucleotide
  modified_base 54: mod_base = OTHER; note = nucleotide with phosphorothioate linkage
  modified_base 58: mod_base = OTHER; note = 2'-O-methyl modified nucleotide
  modified_base 59: mod_base = OTHER; note = 2'-O-methyl modified nucleotide
  modified_base 61: mod_base = OTHER; note = 2'-O-methyl modified nucleotide
  modified_base 62: mod_base = OTHER; note = 2'-O-methyl modified nucleotide
  modified_base 63: mod_base = OTHER; note = 2'-O-methyl modified nucleotide
  modified_base 64: mod_base = OTHER; note = 2'-O-methyl modified nucleotide
  modified_base 65: mod_base = OTHER; note = 2'-O-methyl modified nucleotide
  modified_base 66: mod_base = OTHER; note = 2'-O-methyl modified nucleotide
  modified_base 67: mod_base = OTHER; note = 2'-O-methyl modified nucleotide
  modified_base 68: mod_base = OTHER; note = 2'-O-methyl modified nucleotide
  modified_base 69: mod_base = OTHER; note = 2'-O-methyl modified nucleotide
  modified_base 70: mod_base = OTHER; note = 2'-O-methyl modified nucleotide
  modified_base 75: mod_base = OTHER; note = 2'-O-methyl modified nucleotide
  modified_base 77: mod_base = OTHER; note = 2'-O-methyl modified nucleotide
  modified_base 80: mod_base = OTHER; note = 2'-O-methyl modified nucleotide
  modified_base 86: mod_base = OTHER; note = 2'-O-methyl modified nucleotide
  modified_base 87: mod_base = OTHER; note = 2'-O-methyl modified nucleotide
  modified_base 89: mod_base = OTHER; note = 2'-O-methyl modified nucleotide
  modified_base 90: mod_base = OTHER; note = 2'-O-methyl modified nucleotide
  modified_base 91: mod_base = OTHER; note = 2'-O-methyl modified nucleotide
  modified_base 92: mod_base = OTHER; note = 2'-O-methyl modified nucleotide
  modified_base 99: mod_base = OTHER; note = nucleotide with phosphorothioate linkage
  modified_base 100: mod_base = OTHER; note = 2'-O-methyl modified nucleotide with phosphorothioate linkage
  modified_base 101: mod_base = OTHER; note = 2'-O-methyl modified nucleotide

SEQ ID NO: 2003 - RNA, 101 nt, synthetic construct; identical to SEQ ID NO: 1003
  source 1..101: mol_type = other RNA
  modified_base 1: mod_base = OTHER; note = 2'-O-methyl modified nucleotide with phosphorothioate linkage
  modified_base 2: mod_base = OTHER; note = 2'-O-methyl modified nucleotide with phosphorothioate linkage
  modified_base 3: mod_base = OTHER; note = 2'-O-methyl modified nucleotide with phosphorothioate linkage
  modified_base 4: mod_base = OTHER; note = 2'-O-methyl modified nucleotide
  modified_base 5: mod_base = OTHER; note = 2'-O-methyl modified nucleotide
  modified_base 8: mod_base = OTHER; note = 2'-O-methyl modified nucleotide
  modified_base 9: mod_base = OTHER; note = 2'-O-methyl modified nucleotide
  modified_base 11: mod_base = OTHER; note = 2'-O-methyl modified nucleotide
  modified_base 13: mod_base = OTHER; note = 2'-O-methyl modified nucleotide
  modified_base 18: mod_base = OTHER; note = 2'-O-methyl modified nucleotide
  modified_base 22: mod_base = OTHER; note = 2'-O-methyl modified nucleotide
  modified_base 25: mod_base = OTHER; note = 2'-O-methyl modified nucleotide
  modified_base 29: mod_base = OTHER; note = 2'-O-methyl modified nucleotide
  modified_base 30: mod_base = OTHER; note = 2'-O-methyl modified nucleotide
  modified_base 31: mod_base = OTHER; note = 2'-O-methyl modified nucleotide
  modified_base 32: mod_base = OTHER; note = 2'-O-methyl modified nucleotide
  modified_base 37: mod_base = OTHER; note = 2'-O-methyl modified nucleotide
  modified_base 38: mod_base = OTHER; note = 2'-O-methyl modified nucleotide
  modified_base 39: mod_base = OTHER; note = 2'-O-methyl modified nucleotide
  modified_base 40: mod_base = OTHER; note = 2'-O-methyl modified nucleotide
  modified_base 41: mod_base = OTHER; note = 2'-O-methyl modified nucleotide
  modified_base 42: mod_base = OTHER; note = 2'-O-methyl modified nucleotide
  modified_base 43: mod_base = OTHER; note = 2'-O-methyl modified nucleotide
  modified_base 47: mod_base = OTHER; note = 2'-O-methyl modified nucleotide
  modified_base 48: mod_base = OTHER; note = 2'-O-methyl modified nucleotide
  modified_base 51: mod_base = OTHER; note = 2'-O-methyl modified nucleotide
  modified_base 54: mod_base = OTHER; note = nucleotide with phosphorothioate linkage
  modified_base 58: mod_base = OTHER; note = 2'-O-methyl modified nucleotide
  modified_base 59: mod_base = OTHER; note = 2'-O-methyl modified nucleotide
  modified_base 61: mod_base = OTHER; note = 2'-O-methyl modified nucleotide
  modified_base 62: mod_base = OTHER; note = 2'-O-methyl modified nucleotide
  modified_base 63: mod_base = OTHER; note = 2'-O-methyl modified nucleotide
  modified_base 64: mod_base = OTHER; note = 2'-O-methyl modified nucleotide
  modified_base 65: mod_base = OTHER; note = 2'-O-methyl modified nucleotide
  modified_base 66: mod_base = OTHER; note = 2'-O-methyl modified nucleotide
  modified_base 67: mod_base = OTHER; note = 2'-O-methyl modified nucleotide
  modified_base 68: mod_base = OTHER; note = 2'-O-methyl modified nucleotide
  modified_base 69: mod_base = OTHER; note = 2'-O-methyl modified nucleotide
  modified_base 70: mod_base = OTHER; note = 2'-O-methyl modified nucleotide
  modified_base 75: mod_base = OTHER; note = 2'-O-methyl modified nucleotide
  modified_base 77: mod_base = OTHER; note = 2'-O-methyl modified nucleotide
  modified_base 80: mod_base = OTHER; note = 2'-O-methyl modified nucleotide
  modified_base 86: mod_base = OTHER; note = 2'-O-methyl modified nucleotide
  modified_base 87: mod_base = OTHER; note = 2'-O-methyl modified nucleotide
  modified_base 89: mod_base = OTHER; note = 2'-O-methyl modified nucleotide
  modified_base 90: mod_base = OTHER; note = 2'-O-methyl modified nucleotide
  modified_base 91: mod_base = OTHER; note = 2'-O-methyl modified nucleotide
  modified_base 92: mod_base = OTHER; note = 2'-O-methyl modified nucleotide
  modified_base 99: mod_base = OTHER; note = nucleotide with phosphorothioate linkage
  modified_base 100: mod_base = OTHER; note = 2'-O-methyl modified nucleotide with phosphorothioate linkage
  modified_base 101: mod_base = OTHER; note = 2'-O-methyl modified nucleotide

SEQ ID NO: 2004 - RNA, 101 nt, synthetic construct; identical to SEQ ID NO: 1004
  source 1..101: mol_type = other RNA
  modified_base 1: mod_base = OTHER; note = 2'-O-methyl modified nucleotide with phosphorothioate linkage
  modified_base 2: mod_base = OTHER; note = 2'-O-methyl modified nucleotide with phosphorothioate linkage
  modified_base 3: mod_base = OTHER; note = 2'-O-methyl modified nucleotide with phosphorothioate linkage
  modified_base 4: mod_base = OTHER; note = 2'-O-methyl modified nucleotide
  modified_base 5: mod_base = OTHER; note = 2'-O-methyl modified nucleotide
  modified_base 8: mod_base = OTHER; note = 2'-O-methyl modified nucleotide
  modified_base 9: mod_base = OTHER; note = 2'-O-methyl modified nucleotide
  modified_base 11: mod_base = OTHER; note = 2'-O-methyl modified nucleotide
  modified_base 13: mod_base = OTHER; note = 2'-O-methyl modified nucleotide
  modified_base 18: mod_base = OTHER; note = 2'-O-methyl modified nucleotide
  modified_base 22: mod_base = OTHER; note = 2'-O-methyl modified nucleotide
  modified_base 25: mod_base = OTHER; note = 2'-O-methyl modified nucleotide
  modified_base 29: mod_base = OTHER; note = 2'-O-methyl modified nucleotide
  modified_base 30: mod_base = OTHER; note = 2'-O-methyl modified nucleotide
  modified_base 31: mod_base = OTHER; note = 2'-O-methyl modified nucleotide
  modified_base 32: mod_base = OTHER; note = 2'-O-methyl modified nucleotide
  modified_base 37: mod_base = OTHER; note = 2'-O-methyl modified nucleotide
  modified_base 38: mod_base = OTHER; note = 2'-O-methyl modified nucleotide
  modified_base 39: mod_base = OTHER; note = 2'-O-methyl modified nucleotide
  modified_base 40: mod_base = OTHER; note = 2'-O-methyl modified nucleotide
  modified_base 41: mod_base = OTHER; note = 2'-O-methyl modified nucleotide
  modified_base 42: mod_base = OTHER; note = 2'-O-methyl modified nucleotide
  modified_base 43: mod_base = OTHER; note = 2'-O-methyl modified nucleotide
  modified_base 47: mod_base = OTHER; note = 2'-O-methyl modified nucleotide
  modified_base 48: mod_base = OTHER; note = 2'-O-methyl modified nucleotide
  modified_base 51: mod_base = OTHER; note = 2'-O-methyl modified nucleotide
  modified_base 54: mod_base = OTHER; note = nucleotide with phosphorothioate linkage
  modified_base 58: mod_base = OTHER; note = 2'-O-methyl modified nucleotide
  modified_base 59: mod_base = OTHER; note = 2'-O-methyl modified nucleotide
  modified_base 61: mod_base = OTHER; note = 2'-O-methyl modified nucleotide
  modified_base 62: mod_base = OTHER; note = 2'-O-methyl modified nucleotide
  modified_base 63: mod_base = OTHER; note = 2'-O-methyl modified nucleotide
  modified_base 64: mod_base = OTHER; note = 2'-O-methyl modified nucleotide
  modified_base 65: mod_base = OTHER; note = 2'-O-methyl modified nucleotide
  modified_base 66: mod_base = OTHER; note = 2'-O-methyl modified nucleotide
  modified_base 67: mod_base = OTHER; note = 2'-O-methyl modified nucleotide
  modified_base 68: mod_base = OTHER; note = 2'-O-methyl modified nucleotide
  modified_base 69: mod_base = OTHER; note = 2'-O-methyl modified nucleotide
  modified_base 70: mod_base = OTHER; note = 2'-O-methyl modified nucleotide
  modified_base 75: mod_base = OTHER; note = 2'-O-methyl modified nucleotide
  modified_base 77: mod_base = OTHER; note = 2'-O-methyl modified nucleotide
  modified_base 80: mod_base = OTHER; note = 2'-O-methyl modified nucleotide
  modified_base 86: mod_base = OTHER; note = 2'-O-methyl modified nucleotide
  modified_base 87: mod_base = OTHER; note = 2'-O-methyl modified nucleotide
  modified_base 89: mod_base = OTHER; note = 2'-O-methyl modified nucleotide
  modified_base 90: mod_base = OTHER; note = 2'-O-methyl modified nucleotide
  modified_base 91: mod_base = OTHER; note = 2'-O-methyl modified nucleotide
  modified_base 92: mod_base = OTHER; note = 2'-O-methyl modified nucleotide
  modified_base 99: mod_base = OTHER; note = nucleotide with phosphorothioate linkage
  modified_base 100: mod_base = OTHER; note = 2'-O-methyl modified nucleotide with phosphorothioate linkage
  modified_base 101: mod_base = OTHER; note = 2'-O-methyl modified nucleotide

SEQ ID NO: 2005 - RNA, 101 nt, synthetic construct; identical to SEQ ID NO: 1005
  source 1..101: mol_type = other RNA
  modified_base 1: mod_base = OTHER; note = 2'-O-methyl modified nucleotide with phosphorothioate linkage
  modified_base 2: mod_base = OTHER; note = 2'-O-methyl modified nucleotide with phosphorothioate linkage
  modified_base 3: mod_base = OTHER; note = 2'-O-methyl modified nucleotide with phosphorothioate linkage
  modified_base 4: mod_base = OTHER; note = 2'-O-methyl modified nucleotide
  modified_base 5: mod_base = OTHER; note = 2'-O-methyl modified nucleotide
  modified_base 8: mod_base = OTHER; note = 2'-O-methyl modified nucleotide
  modified_base 9: mod_base = OTHER; note = 2'-O-methyl modified nucleotide
  modified_base 11: mod_base = OTHER; note = 2'-O-methyl modified nucleotide
  modified_base 13: mod_base = OTHER; note = 2'-O-methyl modified nucleotide
  modified_base 18: mod_base = OTHER; note = 2'-O-methyl modified nucleotide
  modified_base 22: mod_base = OTHER; note = 2'-O-methyl modified nucleotide
  modified_base 25: mod_base = OTHER; note = 2'-O-methyl modified nucleotide
  modified_base 29: mod_base = OTHER; note = 2'-O-methyl modified nucleotide
  modified_base 30: mod_base = OTHER; note = 2'-O-methyl modified nucleotide
  modified_base 31: mod_base = OTHER; note = 2'-O-methyl modified nucleotide
  modified_base 32: mod_base = OTHER; note = 2'-O-methyl modified nucleotide
  modified_base 37: mod_base = OTHER; note = 2'-O-methyl modified nucleotide
  modified_base 38: mod_base = OTHER; note = 2'-O-methyl modified nucleotide
  modified_base 39: mod_base = OTHER; note = 2'-O-methyl modified nucleotide
  modified_base 40: mod_base = OTHER; note = 2'-O-methyl modified nucleotide
  modified_base 41: mod_base = OTHER; note = 2'-O-methyl modified nucleotide
  modified_base 42: mod_base = OTHER; note = 2'-O-methyl modified nucleotide
  modified_base 43: mod_base = OTHER; note = 2'-O-methyl modified nucleotide
  modified_base 47: mod_base = OTHER; note = 2'-O-methyl modified nucleotide
  modified_base 48: mod_base = OTHER; note = 2'-O-methyl modified nucleotide
  modified_base 51: mod_base = OTHER; note = 2'-O-methyl modified nucleotide
  modified_base 54: mod_base = OTHER; note = nucleotide with phosphorothioate linkage
  modified_base 58: mod_base = OTHER; note = 2'-O-methyl modified nucleotide
  modified_base 59: mod_base = OTHER; note = 2'-O-methyl modified nucleotide
  modified_base 61: mod_base = OTHER; note = 2'-O-methyl modified nucleotide
  modified_base 62: mod_base = OTHER; note = 2'-O-methyl modified nucleotide
  modified_base 63: mod_base = OTHER; note = 2'-O-methyl modified nucleotide
  modified_base 64: mod_base = OTHER; note = 2'-O-methyl modified nucleotide
  modified_base 65: mod_base = OTHER; note = 2'-O-methyl modified nucleotide
  modified_base 66: mod_base = OTHER; note = 2'-O-methyl modified nucleotide
  modified_base 67: mod_base = OTHER; note = 2'-O-methyl modified nucleotide
  modified_base 68: mod_base = OTHER; note = 2'-O-methyl modified nucleotide
  modified_base 69: mod_base = OTHER; note = 2'-O-methyl modified nucleotide
  modified_base 70: mod_base = OTHER; note = 2'-O-methyl modified nucleotide
  modified_base 75: mod_base = OTHER; note = 2'-O-methyl modified nucleotide
  modified_base 77: mod_base = OTHER; note = 2'-O-methyl modified nucleotide
  modified_base 80: mod_base = OTHER; note = 2'-O-methyl modified nucleotide
  modified_base 86: mod_base = OTHER; note = 2'-O-methyl modified nucleotide
  modified_base 87: mod_base = OTHER; note = 2'-O-methyl modified nucleotide
  modified_base 89: mod_base = OTHER; note = 2'-O-methyl modified nucleotide
  modified_base 90: mod_base = OTHER; note = 2'-O-methyl modified nucleotide
  modified_base 91: mod_base = OTHER; note = 2'-O-methyl modified nucleotide
  modified_base 92: mod_base = OTHER; note = 2'-O-methyl modified nucleotide
  modified_base 99: mod_base = OTHER; note = nucleotide with phosphorothioate linkage
  modified_base 100: mod_base = OTHER; note = 2'-O-methyl modified nucleotide with phosphorothioate linkage
  modified_base 101: mod_base = OTHER; note = 2'-O-methyl modified nucleotide

SEQ ID NO: 2006 - RNA, 101 nt, synthetic construct; identical to SEQ ID NO: 1006
  source 1..101: mol_type = other RNA
  modified_base 1: mod_base = OTHER; note = 2'-O-methyl modified nucleotide with phosphorothioate linkage
  modified_base 2: mod_base = OTHER; note = 2'-O-methyl modified nucleotide with phosphorothioate linkage
  modified_base 3: mod_base = OTHER; note = 2'-O-methyl modified nucleotide with phosphorothioate linkage
  modified_base 4: mod_base = OTHER; note = 2'-O-methyl modified nucleotide
  modified_base 5: mod_base = OTHER; note = 2'-O-methyl modified nucleotide
  modified_base 8: mod_base = OTHER; note = 2'-O-methyl modified nucleotide
  modified_base 9: mod_base = OTHER; note = 2'-O-methyl modified nucleotide
  modified_base 11: mod_base = OTHER; note = 2'-O-methyl modified nucleotide
  modified_base 13: mod_base = OTHER; note = 2'-O-methyl modified nucleotide
  modified_base 18: mod_base = OTHER; note = 2'-O-methyl modified nucleotide
  modified_base 22: mod_base = OTHER; note = 2'-O-methyl modified nucleotide
  modified_base 25: mod_base = OTHER; note = 2'-O-methyl modified nucleotide
  modified_base 29: mod_base = OTHER; note = 2'-O-methyl modified nucleotide
  modified_base 30: mod_base = OTHER; note = 2'-O-methyl modified nucleotide
  modified_base 31: mod_base = OTHER; note = 2'-O-methyl modified nucleotide
  modified_base 32: mod_base = OTHER; note = 2'-O-methyl modified nucleotide
  modified_base 37: mod_base = OTHER; note = 2'-O-methyl modified nucleotide
  modified_base 38: mod_base = OTHER; note = 2'-O-methyl modified nucleotide
  modified_base 39: mod_base = OTHER; note = 2'-O-methyl modified nucleotide
  modified_base 40: mod_base = OTHER; note = 2'-O-methyl modified nucleotide
  modified_base 41: mod_base = OTHER; note = 2'-O-methyl modified nucleotide
  modified_base 42: mod_base = OTHER; note = 2'-O-methyl modified nucleotide
  modified_base 43: mod_base = OTHER; note = 2'-O-methyl modified nucleotide
  modified_base 47: mod_base = OTHER; note = 2'-O-methyl modified nucleotide
  modified_base 48: mod_base = OTHER; note = 2'-O-methyl modified nucleotide
  modified_base 51: mod_base = OTHER; note = 2'-O-methyl modified nucleotide
  modified_base 54: mod_base = OTHER; note = nucleotide with phosphorothioate linkage
  modified_base 58: mod_base = OTHER; note = 2'-O-methyl modified nucleotide
  modified_base 59: mod_base = OTHER; note = 2'-O-methyl modified nucleotide
  modified_base 61: mod_base = OTHER; note = 2'-O-methyl modified nucleotide
  modified_base 62: mod_base = OTHER; note = 2'-O-methyl modified nucleotide
  modified_base 63: mod_base = OTHER; note = 2'-O-methyl modified nucleotide
  modified_base 64: mod_base = OTHER; note = 2'-O-methyl modified nucleotide
  modified_base 65: mod_base = OTHER; note = 2'-O-methyl modified nucleotide
  modified_base 66: mod_base = OTHER; note = 2'-O-methyl modified nucleotide
  modified_base 67: mod_base = OTHER; note = 2'-O-methyl modified nucleotide
  modified_base 68: mod_base = OTHER; note = 2'-O-methyl modified nucleotide
  modified_base 69: mod_base = OTHER; note = 2'-O-methyl modified nucleotide
  modified_base 70: mod_base = OTHER; note = 2'-O-methyl modified nucleotide
  modified_base 75: mod_base = OTHER; note = 2'-O-methyl modified nucleotide
  modified_base 77: mod_base = OTHER; note = 2'-O-methyl modified nucleotide
  modified_base 80: mod_base = OTHER; note = 2'-O-methyl modified nucleotide
  modified_base 86: mod_base = OTHER; note = 2'-O-methyl modified nucleotide
  modified_base 87: mod_base = OTHER; note = 2'-O-methyl modified nucleotide
  modified_base 89: mod_base = OTHER; note = 2'-O-methyl modified nucleotide
  modified_base 90: mod_base = OTHER; note = 2'-O-methyl modified nucleotide
  modified_base 91: mod_base = OTHER; note = 2'-O-methyl modified nucleotide
  modified_base 92: mod_base = OTHER; note = 2'-O-methyl modified nucleotide
  modified_base 99: mod_base = OTHER; note = nucleotide with phosphorothioate linkage
  modified_base 100: mod_base = OTHER; note = 2'-O-methyl modified nucleotide with phosphorothioate linkage
  modified_base 101: mod_base = OTHER; note = 2'-O-methyl modified nucleotide

SEQ ID NO: 2007 - RNA, 101 nt, synthetic construct; identical to SEQ ID NO: 1007
  source 1..101: mol_type = other RNA
  modified_base 1: mod_base = OTHER; note = 2'-O-methyl modified nucleotide with phosphorothioate linkage
  modified_base 2: mod_base = OTHER; note = 2'-O-methyl modified nucleotide with phosphorothioate linkage
  modified_base 3: mod_base = OTHER; note = 2'-O-methyl modified nucleotide with phosphorothioate linkage
  modified_base 4: mod_base = OTHER; note = 2'-O-methyl modified nucleotide
  modified_base 5: mod_base = OTHER; note = 2'-O-methyl modified nucleotide
  modified_base 8: mod_base = OTHER; note = 2'-O-methyl modified nucleotide
  modified_base 9: mod_base = OTHER; note = 2'-O-methyl modified nucleotide
  modified_base 11: mod_base = OTHER; note = 2'-O-methyl modified nucleotide
  modified_base 13: mod_base = OTHER; note = 2'-O-methyl modified nucleotide
  modified_base 18: mod_base = OTHER; note = 2'-O-methyl modified nucleotide
  modified_base 22: mod_base = OTHER; note = 2'-O-methyl modified nucleotide
  modified_base 25: mod_base = OTHER; note = 2'-O-methyl modified nucleotide
  modified_base 29: mod_base = OTHER; note = 2'-O-methyl modified nucleotide
  modified_base 30: mod_base = OTHER; note = 2'-O-methyl modified nucleotide
  modified_base 31: mod_base = OTHER; note = 2'-O-methyl modified nucleotide
  modified_base 32: mod_base = OTHER; note = 2'-O-methyl modified nucleotide
  modified_base 37: mod_base = OTHER; note = 2'-O-methyl modified nucleotide
  modified_base 38: mod_base = OTHER; note = 2'-O-methyl modified nucleotide
  modified_base 39: mod_base = OTHER; note = 2'-O-methyl modified nucleotide
  modified_base 40: mod_base = OTHER; note = 2'-O-methyl modified nucleotide
  modified_base 41: mod_base = OTHER; note = 2'-O-methyl modified nucleotide
  modified_base 42: mod_base = OTHER; note = 2'-O-methyl modified nucleotide
  modified_base 43: mod_base = OTHER; note = 2'-O-methyl modified nucleotide
  modified_base 47: mod_base = OTHER; note = 2'-O-methyl modified nucleotide
  modified_base 48: mod_base = OTHER; note = 2'-O-methyl modified nucleotide
  modified_base 51: mod_base = OTHER; note = 2'-O-methyl modified nucleotide
  modified_base 54: mod_base = OTHER; note = nucleotide with phosphorothioate linkage
  modified_base 58: mod_base = OTHER; note = 2'-O-methyl modified nucleotide
  modified_base 59: mod_base = OTHER; note = 2'-O-methyl modified nucleotide
  modified_base 61: mod_base = OTHER; note = 2'-O-methyl modified nucleotide
  modified_base 62: mod_base = OTHER; note = 2'-O-methyl modified nucleotide
  modified_base 63: mod_base = OTHER; note = 2'-O-methyl modified nucleotide
  modified_base 64: mod_base = OTHER; note = 2'-O-methyl modified nucleotide
  modified_base 65: mod_base = OTHER; note = 2'-O-methyl modified nucleotide
  modified_base 66: mod_base = OTHER; note = 2'-O-methyl modified nucleotide
  modified_base 67: mod_base = OTHER; note = 2'-O-methyl modified nucleotide
  modified_base 68: mod_base = OTHER; note = 2'-O-methyl modified nucleotide
  modified_base 69: mod_base = OTHER; note = 2'-O-methyl modified nucleotide
  modified_base 70: mod_base = OTHER; note = 2'-O-methyl modified nucleotide
  modified_base 75: mod_base = OTHER; note = 2'-O-methyl modified nucleotide
  modified_base 77: mod_base = OTHER; note = 2'-O-methyl modified nucleotide
  modified_base 80: mod_base = OTHER; note = 2'-O-methyl modified nucleotide
  modified_base 86: mod_base = OTHER; note = 2'-O-methyl modified nucleotide
  modified_base 87: mod_base = OTHER; note = 2'-O-methyl modified nucleotide
  modified_base 89: mod_base = OTHER; note = 2'-O-methyl modified nucleotide
  modified_base 90: mod_base = OTHER; note = 2'-O-methyl modified nucleotide
  modified_base 91: mod_base = OTHER; note = 2'-O-methyl modified nucleotide
  modified_base 92: mod_base = OTHER; note = 2'-O-methyl modified nucleotide
  modified_base 99: mod_base = OTHER; note = nucleotide with phosphorothioate linkage
  modified_base 100: mod_base = OTHER; note = 2'-O-methyl modified nucleotide with phosphorothioate linkage
  modified_base 101: mod_base = OTHER; note = 2'-O-methyl modified nucleotide

SEQ ID NO: 2008 - RNA, 101 nt, synthetic construct; identical to SEQ ID NO: 1008
  source 1..101: mol_type = other RNA
  modified_base 1: mod_base = OTHER; note = 2'-O-methyl modified nucleotide with phosphorothioate linkage
  modified_base 2: mod_base = OTHER; note = 2'-O-methyl modified nucleotide with phosphorothioate linkage
  modified_base 3: mod_base = OTHER; note = 2'-O-methyl modified nucleotide with phosphorothioate linkage
  modified_base 4: mod_base = OTHER; note = 2'-O-methyl modified nucleotide
  modified_base 5: mod_base = OTHER; note = 2'-O-methyl modified nucleotide
  modified_base 8: mod_base = OTHER; note = 2'-O-methyl modified nucleotide
  modified_base 9: mod_base = OTHER; note = 2'-O-methyl modified nucleotide
  modified_base 11: mod_base = OTHER; note = 2'-O-methyl modified nucleotide
  modified_base 13: mod_base = OTHER; note = 2'-O-methyl modified nucleotide
  modified_base 18: mod_base = OTHER; note = 2'-O-methyl modified nucleotide
  modified_base 22: mod_base = OTHER; note = 2'-O-methyl modified nucleotide
  modified_base 25: mod_base = OTHER; note = 2'-O-methyl modified nucleotide
  modified_base 29: mod_base = OTHER; note = 2'-O-methyl modified nucleotide
  modified_base 30: mod_base = OTHER; note = 2'-O-methyl modified nucleotide
  modified_base 31: mod_base = OTHER; note = 2'-O-methyl modified nucleotide
  modified_base 32: mod_base = OTHER; note = 2'-O-methyl modified nucleotide
  modified_base 37: mod_base = OTHER; note = 2'-O-methyl modified nucleotide
  modified_base 38: mod_base = OTHER; note = 2'-O-methyl modified nucleotide
  modified_base 39: mod_base = OTHER; note = 2'-O-methyl modified nucleotide
  modified_base 40: mod_base = OTHER; note = 2'-O-methyl modified nucleotide
  modified_base 41: mod_base = OTHER; note = 2'-O-methyl modified nucleotide
  modified_base 42: mod_base = OTHER; note = 2'-O-methyl modified nucleotide
  modified_base 43: mod_base = OTHER; note = 2'-O-methyl modified nucleotide
  modified_base 47: mod_base = OTHER; note = 2'-O-methyl modified nucleotide
  modified_base 48: mod_base = OTHER; note = 2'-O-methyl modified nucleotide
  modified_base 51: mod_base = OTHER; note = 2'-O-methyl modified nucleotide
  modified_base 54: mod_base = OTHER; note = nucleotide with phosphorothioate linkage
  modified_base 58: mod_base = OTHER; note = 2'-O-methyl modified nucleotide
  modified_base 59: mod_base = OTHER; note = 2'-O-methyl modified nucleotide
  modified_base 61: mod_base = OTHER; note = 2'-O-methyl modified nucleotide
  modified_base 62: mod_base = OTHER; note = 2'-O-methyl modified nucleotide
  modified_base 63: mod_base = OTHER; note = 2'-O-methyl modified nucleotide
  modified_base 64: mod_base = OTHER; note = 2'-O-methyl modified nucleotide
  modified_base 65: mod_base = OTHER; note = 2'-O-methyl modified nucleotide
  modified_base 66: mod_base = OTHER; note = 2'-O-methyl modified nucleotide
  modified_base 67: mod_base = OTHER; note = 2'-O-methyl modified nucleotide
  modified_base 68: mod_base = OTHER; note = 2'-O-methyl modified nucleotide
  modified_base 69: mod_base = OTHER; note = 2'-O-methyl modified nucleotide
  modified_base 70: mod_base = OTHER; note = 2'-O-methyl modified nucleotide
  modified_base 75: mod_base = OTHER; note = 2'-O-methyl modified nucleotide
  modified_base 77: mod_base = OTHER; note = 2'-O-methyl modified nucleotide
  modified_base 80: mod_base = OTHER; note = 2'-O-methyl modified nucleotide
  modified_base 86: mod_base = OTHER; note = 2'-O-methyl modified nucleotide
  modified_base 87: mod_base = OTHER; note = 2'-O-methyl modified nucleotide
  modified_base 89: mod_base = OTHER; note = 2'-O-methyl modified nucleotide
  modified_base 90: mod_base = OTHER; note = 2'-O-methyl modified nucleotide
  modified_base 91: mod_base = OTHER; note = 2'-O-methyl modified nucleotide
  modified_base 92: mod_base = OTHER; note = 2'-O-methyl modified nucleotide
  modified_base 99: mod_base = OTHER; note = nucleotide with phosphorothioate linkage
  modified_base 100: mod_base = OTHER; note = 2'-O-methyl modified nucleotide with phosphorothioate linkage
  modified_base 101: mod_base = OTHER; note = 2'-O-methyl modified nucleotide

SEQ ID NO: 2009 - RNA, 101 nt, synthetic construct; identical to SEQ ID NO: 1009
  source 1..101: mol_type = other RNA
  modified_base 1: mod_base = OTHER; note = 2'-O-methyl modified nucleotide with phosphorothioate linkage
  modified_base 2: mod_base = OTHER; note = 2'-O-methyl modified nucleotide with phosphorothioate linkage
  modified_base 3: mod_base = OTHER; note = 2'-O-methyl modified nucleotide with phosphorothioate linkage
  modified_base 4: mod_base = OTHER; note = 2'-O-methyl modified nucleotide
  modified_base 5: mod_base = OTHER; note = 2'-O-methyl modified nucleotide
  modified_base 8: mod_base = OTHER; note = 2'-O-methyl modified nucleotide
  modified_base 9: mod_base = OTHER; note = 2'-O-methyl modified nucleotide
  modified_base 11: mod_base = OTHER; note = 2'-O-methyl modified nucleotide
  modified_base 13: mod_base = OTHER; note = 2'-O-methyl modified nucleotide
  modified_base 18: mod_base = OTHER; note = 2'-O-methyl modified nucleotide
  modified_base 22: mod_base = OTHER; note = 2'-O-methyl modified nucleotide
  modified_base 25: mod_base = OTHER; note = 2'-O-methyl modified nucleotide
  modified_base 29: mod_base = OTHER; note = 2'-O-methyl modified nucleotide
  modified_base 30: mod_base = OTHER; note = 2'-O-methyl modified nucleotide
  modified_base 31: mod_base = OTHER; note = 2'-O-methyl modified nucleotide
  modified_base 32: mod_base = OTHER; note = 2'-O-methyl modified nucleotide
  modified_base 37: mod_base = OTHER; note = 2'-O-methyl modified nucleotide
  modified_base 38: mod_base = OTHER; note = 2'-O-methyl modified nucleotide
  modified_base 39: mod_base = OTHER; note = 2'-O-methyl modified nucleotide
  modified_base 40: mod_base = OTHER; note = 2'-O-methyl modified nucleotide
  modified_base 41: mod_base = OTHER; note = 2'-O-methyl modified nucleotide
  modified_base 42: mod_base = OTHER; note = 2'-O-methyl modified nucleotide
  modified_base 43: mod_base = OTHER; note = 2'-O-methyl modified nucleotide
  modified_base 47: mod_base = OTHER; note = 2'-O-methyl modified nucleotide
  modified_base 48: mod_base = OTHER; note = 2'-O-methyl modified nucleotide
  modified_base 51: mod_base = OTHER; note = 2'-O-methyl modified nucleotide
  modified_base 54: mod_base = OTHER; note = nucleotide with phosphorothioate linkage
  modified_base 58: mod_base = OTHER; note = 2'-O-methyl modified nucleotide
  modified_base 59: mod_base = OTHER; note = 2'-O-methyl modified nucleotide
  modified_base 61: mod_base = OTHER; note = 2'-O-methyl modified nucleotide
  modified_base 62: mod_base = OTHER; note = 2'-O-methyl modified nucleotide
  modified_base 63: mod_base = OTHER; note = 2'-O-methyl modified nucleotide
  modified_base 64: mod_base = OTHER; note = 2'-O-methyl modified nucleotide
  modified_base 65: mod_base = OTHER; note = 2'-O-methyl modified nucleotide
  modified_base 66: mod_base = OTHER; note = 2'-O-methyl modified nucleotide
  modified_base 67: mod_base = OTHER; note = 2'-O-methyl modified nucleotide
  modified_base 68: mod_base = OTHER; note = 2'-O-methyl modified nucleotide
  modified_base 69: mod_base = OTHER; note = 2'-O-methyl modified nucleotide
  modified_base 70: mod_base = OTHER; note = 2'-O-methyl modified nucleotide
  modified_base 75: mod_base = OTHER; note = 2'-O-methyl modified nucleotide
  modified_base 77: mod_base = OTHER; note = 2'-O-methyl modified nucleotide
  modified_base 80: mod_base = OTHER; note = 2'-O-methyl modified nucleotide
  modified_base 86: mod_base = OTHER; note = 2'-O-methyl modified nucleotide
  modified_base 87: mod_base = OTHER; note = 2'-O-methyl modified nucleotide
  modified_base 89: mod_base = OTHER; note = 2'-O-methyl modified nucleotide
  modified_base 90: mod_base = OTHER; note = 2'-O-methyl modified nucleotide
  modified_base 91: mod_base = OTHER; note = 2'-O-methyl modified nucleotide
  modified_base 92: mod_base = OTHER; note = 2'-O-methyl modified nucleotide
  modified_base 99: mod_base = OTHER; note = nucleotide with phosphorothioate linkage
  modified_base 100: mod_base = OTHER; note = 2'-O-methyl modified nucleotide with phosphorothioate linkage
  modified_base 101: mod_base = OTHER; note = 2'-O-methyl modified nucleotide

SEQ ID NO: 2010 - RNA, 101 nt, synthetic construct; identical to SEQ ID NO: 1010
  source 1..101: mol_type = other RNA
  modified_base 1: mod_base = OTHER; note = 2'-O-methyl modified nucleotide with phosphorothioate linkage
  modified_base 2: mod_base = OTHER; note = 2'-O-methyl modified nucleotide with phosphorothioate linkage
  modified_base 3: mod_base = OTHER; note = 2'-O-methyl modified nucleotide with phosphorothioate linkage
  modified_base 4: mod_base = OTHER; note = 2'-O-methyl modified nucleotide
  modified_base 5: mod_base = OTHER; note = 2'-O-methyl modified nucleotide
  modified_base 8: mod_base = OTHER; note = 2'-O-methyl modified nucleotide
  modified_base 9: mod_base = OTHER; note = 2'-O-methyl modified nucleotide
  modified_base 11: mod_base = OTHER; note = 2'-O-methyl modified nucleotide
  modified_base 13: mod_base = OTHER; note = 2'-O-methyl modified nucleotide
  modified_base 18: mod_base = OTHER; note = 2'-O-methyl modified nucleotide
  modified_base 22: mod_base = OTHER; note = 2'-O-methyl modified nucleotide
  modified_base 25: mod_base = OTHER; note = 2'-O-methyl modified nucleotide
  modified_base 29: mod_base = OTHER; note = 2'-O-methyl modified nucleotide
  modified_base 30: mod_base = OTHER; note = 2'-O-methyl modified nucleotide
  modified_base 31: mod_base = OTHER; note = 2'-O-methyl modified nucleotide
  modified_base 32: mod_base = OTHER; note = 2'-O-methyl modified nucleotide
  modified_base 37: mod_base = OTHER; note = 2'-O-methyl modified nucleotide
  modified_base 38: mod_base = OTHER; note = 2'-O-methyl modified nucleotide
  modified_base 39: mod_base = OTHER; note = 2'-O-methyl modified nucleotide
  modified_base 40: mod_base = OTHER; note = 2'-O-methyl modified nucleotide
  modified_base 41: mod_base = OTHER; note = 2'-O-methyl modified nucleotide
  modified_base 42: mod_base = OTHER; note = 2'-O-methyl modified nucleotide
  modified_base 43: mod_base = OTHER; note = 2'-O-methyl modified nucleotide
  modified_base 47: mod_base = OTHER; note = 2'-O-methyl modified nucleotide
  modified_base 48: mod_base = OTHER; note = 2'-O-methyl modified nucleotide
  modified_base 51: mod_base = OTHER; note = 2'-O-methyl modified nucleotide
  modified_base 54: mod_base = OTHER; note = nucleotide with phosphorothioate linkage
  modified_base 58: mod_base = OTHER; note = 2'-O-methyl modified nucleotide
  modified_base 59: mod_base = OTHER; note = 2'-O-methyl modified nucleotide
  modified_base 61: mod_base = OTHER; note = 2'-O-methyl modified nucleotide
  modified_base 62: mod_base = OTHER; note = 2'-O-methyl modified nucleotide
  modified_base 63: mod_base = OTHER; note = 2'-O-methyl modified nucleotide
  modified_base 64: mod_base = OTHER; note = 2'-O-methyl modified nucleotide
  modified_base 65: mod_base = OTHER; note = 2'-O-methyl modified nucleotide
  modified_base 66: mod_base = OTHER; note = 2'-O-methyl modified nucleotide
  modified_base 67: mod_base = OTHER; note = 2'-O-methyl modified nucleotide
  modified_base 68: mod_base = OTHER; note = 2'-O-methyl modified nucleotide
  modified_base 69: mod_base = OTHER; note = 2'-O-methyl modified nucleotide
  modified_base 70: mod_base = OTHER; note = 2'-O-methyl modified nucleotide
  modified_base 75: mod_base = OTHER; note = 2'-O-methyl modified nucleotide
  modified_base 77: mod_base = OTHER; note = 2'-O-methyl modified nucleotide
  modified_base 80: mod_base = OTHER; note = 2'-O-methyl modified nucleotide
  modified_base 86: mod_base = OTHER; note = 2'-O-methyl modified nucleotide
  modified_base 87: mod_base = OTHER; note = 2'-O-methyl modified nucleotide
  modified_base 89: mod_base = OTHER; note = 2'-O-methyl modified nucleotide
  modified_base 90: mod_base = OTHER; note = 2'-O-methyl modified nucleotide
  modified_base 91: mod_base = OTHER; note = 2'-O-methyl modified nucleotide
  modified_base 92: mod_base = OTHER; note = 2'-O-methyl modified nucleotide
  modified_base 99: mod_base = OTHER; note = nucleotide with phosphorothioate linkage
  modified_base 100: mod_base = OTHER; note = 2'-O-methyl modified nucleotide with phosphorothioate linkage
  modified_base 101: mod_base = OTHER; note = 2'-O-methyl modified nucleotide

SEQ ID NO: 2011 - RNA, 101 nt, synthetic construct; identical to SEQ ID NO: 1011
  source 1..101: mol_type = other RNA
  modified_base 1: mod_base = OTHER; note = 2'-O-methyl modified nucleotide with phosphorothioate linkage
  modified_base 2: mod_base = OTHER; note = 2'-O-methyl modified nucleotide with phosphorothioate linkage
  modified_base 3: mod_base = OTHER; note = 2'-O-methyl modified nucleotide with phosphorothioate linkage
  modified_base 4: mod_base = OTHER; note = 2'-O-methyl modified nucleotide
  modified_base 5: mod_base = OTHER; note = 2'-O-methyl modified nucleotide
  modified_base 8: mod_base = OTHER; note = 2'-O-methyl modified nucleotide
  modified_base 9: mod_base = OTHER; note = 2'-O-methyl modified nucleotide
  modified_base 11: mod_base = OTHER; note = 2'-O-methyl modified nucleotide
  modified_base 13: mod_base = OTHER; note = 2'-O-methyl modified nucleotide
  modified_base 18: mod_base = OTHER; note = 2'-O-methyl modified nucleotide
  modified_base 22: mod_base = OTHER; note = 2'-O-methyl modified nucleotide
  modified_base 25: mod_base = OTHER; note = 2'-O-methyl modified nucleotide
  modified_base 29: mod_base = OTHER; note = 2'-O-methyl modified nucleotide
  modified_base 30: mod_base = OTHER; note = 2'-O-methyl modified nucleotide
  modified_base 31: mod_base = OTHER; note = 2'-O-methyl modified nucleotide
  modified_base 32: mod_base = OTHER; note = 2'-O-methyl modified nucleotide
  modified_base 37: mod_base = OTHER; note = 2'-O-methyl modified nucleotide
  modified_base 38: mod_base = OTHER; note = 2'-O-methyl modified nucleotide
  modified_base 39: mod_base = OTHER; note = 2'-O-methyl modified nucleotide
  modified_base 40: mod_base = OTHER; note = 2'-O-methyl modified nucleotide
  modified_base 41: mod_base = OTHER; note = 2'-O-methyl modified nucleotide
  modified_base 42: mod_base = OTHER; note = 2'-O-methyl modified nucleotide
  modified_base 43: mod_base = OTHER; note = 2'-O-methyl modified nucleotide
  modified_base 47: mod_base = OTHER; note = 2'-O-methyl modified nucleotide
  modified_base 48: mod_base = OTHER; note = 2'-O-methyl modified nucleotide
  modified_base 51: mod_base = OTHER; note = 2'-O-methyl modified nucleotide
  modified_base 54: mod_base = OTHER; note = nucleotide with phosphorothioate linkage
  modified_base 58: mod_base = OTHER; note = 2'-O-methyl modified nucleotide
  modified_base 59: mod_base = OTHER; note = 2'-O-methyl modified nucleotide
  modified_base 61: mod_base = OTHER; note = 2'-O-methyl modified nucleotide
  modified_base 62: mod_base = OTHER; note = 2'-O-methyl modified nucleotide
  modified_base 63: mod_base = OTHER; note = 2'-O-methyl modified nucleotide
  modified_base 64: mod_base = OTHER; note = 2'-O-methyl modified nucleotide
  modified_base 65: mod_base = OTHER; note = 2'-O-methyl modified nucleotide
  modified_base 66: mod_base = OTHER; note = 2'-O-methyl modified nucleotide
  modified_base 67: mod_base = OTHER; note = 2'-O-methyl modified nucleotide
  modified_base 68: mod_base = OTHER; note = 2'-O-methyl modified nucleotide
  modified_base 69: mod_base = OTHER; note = 2'-O-methyl modified nucleotide
  modified_base 70: mod_base = OTHER; note = 2'-O-methyl modified nucleotide
  modified_base 75: mod_base = OTHER; note = 2'-O-methyl modified nucleotide
  modified_base 77: mod_base = OTHER; note = 2'-O-methyl modified nucleotide
  modified_base 80: mod_base = OTHER; note = 2'-O-methyl modified nucleotide
  modified_base 86: mod_base = OTHER; note = 2'-O-methyl modified nucleotide
  modified_base 87: mod_base = OTHER; note = 2'-O-methyl modified nucleotide
  modified_base 89: mod_base = OTHER; note = 2'-O-methyl modified nucleotide
  modified_base 90: mod_base = OTHER; note = 2'-O-methyl modified nucleotide
  modified_base 91: mod_base = OTHER; note = 2'-O-methyl modified nucleotide
  modified_base 92: mod_base = OTHER; note = 2'-O-methyl modified nucleotide
  modified_base 99: mod_base = OTHER; note = nucleotide with phosphorothioate linkage
  modified_base 100: mod_base = OTHER; note = 2'-O-methyl modified nucleotide with phosphorothioate linkage
  modified_base 101: mod_base = OTHER; note = 2'-O-methyl modified nucleotide

SEQ ID NO: 2012 - RNA, 101 nt, synthetic construct; identical to SEQ ID NO: 1012
  source 1..101: mol_type = other RNA
  modified_base 1: mod_base = OTHER; note = 2'-O-methyl modified nucleotide with phosphorothioate linkage
  modified_base 2: mod_base = OTHER; note = 2'-O-methyl modified nucleotide with phosphorothioate linkage
  modified_base 3: mod_base = OTHER; note = 2'-O-methyl modified nucleotide with phosphorothioate linkage
  modified_base 4: mod_base = OTHER; note = 2'-O-methyl modified nucleotide
  modified_base 5: mod_base = OTHER; note = 2'-O-methyl modified nucleotide
  modified_base 8: mod_base = OTHER; note = 2'-O-methyl modified nucleotide
  modified_base 9: mod_base = OTHER; note = 2'-O-methyl modified nucleotide
  modified_base 11: mod_base = OTHER; note = 2'-O-methyl modified nucleotide
  modified_base 13: mod_base = OTHER; note = 2'-O-methyl modified nucleotide
  modified_base 18: mod_base = OTHER; note = 2'-O-methyl modified nucleotide
  modified_base 22: mod_base = OTHER; note = 2'-O-methyl modified nucleotide
  modified_base 25: mod_base = OTHER; note = 2'-O-methyl modified nucleotide
  modified_base 29: mod_base = OTHER; note = 2'-O-methyl modified nucleotide
  modified_base 30: mod_base = OTHER; note = 2'-O-methyl modified nucleotide
  modified_base 31: mod_base = OTHER; note = 2'-O-methyl modified nucleotide
  modified_base 32: mod_base = OTHER; note = 2'-O-methyl modified nucleotide
  modified_base 37: mod_base = OTHER; note = 2'-O-methyl modified nucleotide
  modified_base 38: mod_base = OTHER; note = 2'-O-methyl modified nucleotide
  modified_base 39: mod_base = OTHER; note = 2'-O-methyl modified nucleotide
  modified_base 40: mod_base = OTHER; note = 2'-O-methyl modified nucleotide
  modified_base 41: mod_base = OTHER; note = 2'-O-methyl modified nucleotide
  modified_base 42: mod_base = OTHER; note = 2'-O-methyl modified nucleotide
  modified_base 43: mod_base = OTHER; note = 2'-O-methyl modified nucleotide
  modified_base 47: mod_base = OTHER; note = 2'-O-methyl modified nucleotide
  modified_base 48: mod_base = OTHER; note = 2'-O-methyl modified nucleotide
  modified_base 51: mod_base = OTHER; note = 2'-O-methyl modified nucleotide
  modified_base 54: mod_base = OTHER; note = nucleotide with phosphorothioate linkage
  modified_base 58: mod_base = OTHER; note = 2'-O-methyl modified nucleotide
  modified_base 59: mod_base = OTHER; note = 2'-O-methyl modified nucleotide
  modified_base 61: mod_base = OTHER; note = 2'-O-methyl modified nucleotide
  modified_base 62: mod_base = OTHER; note = 2'-O-methyl modified nucleotide
  modified_base 63: mod_base = OTHER; note = 2'-O-methyl modified nucleotide
  modified_base 64: mod_base = OTHER; note = 2'-O-methyl modified nucleotide
  modified_base 65: mod_base = OTHER; note = 2'-O-methyl modified nucleotide
  modified_base 66: mod_base = OTHER; note = 2'-O-methyl modified nucleotide
  modified_base 67: mod_base = OTHER; note = 2'-O-methyl modified nucleotide
  modified_base 68: mod_base = OTHER; note = 2'-O-methyl modified nucleotide
  modified_base 69: mod_base = OTHER; note = 2'-O-methyl modified nucleotide
  modified_base 70: mod_base = OTHER; note = 2'-O-methyl modified nucleotide
  modified_base 75: mod_base = OTHER; note = 2'-O-methyl modified nucleotide
  modified_base 77: mod_base = OTHER; note = 2'-O-methyl modified nucleotide
  modified_base 80: mod_base = OTHER; note = 2'-O-methyl modified nucleotide
  modified_base 86: mod_base = OTHER; note = 2'-O-methyl modified nucleotide
  modified_base 87: mod_base = OTHER; note = 2'-O-methyl modified nucleotide
  modified_base 89: mod_base = OTHER; note = 2'-O-methyl modified nucleotide
  modified_base 90: mod_base = OTHER; note = 2'-O-methyl modified nucleotide
  modified_base 91: mod_base = OTHER; note = 2'-O-methyl modified nucleotide
  modified_base 92: mod_base = OTHER; note = 2'-O-methyl modified nucleotide
  modified_base 99: mod_base = OTHER; note = nucleotide with phosphorothioate linkage
  modified_base 100: mod_base = OTHER; note = 2'-O-methyl modified nucleotide with phosphorothioate linkage
  modified_base 101: mod_base = OTHER; note = 2'-O-methyl modified nucleotide

SEQ ID NO: 2013 - RNA, 101 nt, synthetic construct; identical to SEQ ID NO: 1013
  source 1..101: mol_type = other RNA
  modified_base 1: mod_base = OTHER; note = 2'-O-methyl modified nucleotide with phosphorothioate linkage
  modified_base 2: mod_base = OTHER; note = 2'-O-methyl modified nucleotide with phosphorothioate linkage
  modified_base 3: mod_base = OTHER; note = 2'-O-methyl modified nucleotide with phosphorothioate linkage
  modified_base 4: mod_base = OTHER; note = 2'-O-methyl modified nucleotide
  modified_base 5: mod_base = OTHER; note = 2'-O-methyl modified nucleotide
  modified_base 8: mod_base = OTHER; note = 2'-O-methyl modified nucleotide
  modified_base 9: mod_base = OTHER; note = 2'-O-methyl modified nucleotide
  modified_base 11: mod_base = OTHER; note = 2'-O-methyl modified nucleotide
  modified_base 13: mod_base = OTHER; note = 2'-O-methyl modified nucleotide
  modified_base 18: mod_base = OTHER; note = 2'-O-methyl modified nucleotide
  modified_base 22: mod_base = OTHER; note = 2'-O-methyl modified nucleotide
  modified_base 25: mod_base = OTHER; note = 2'-O-methyl modified nucleotide
  modified_base 29: mod_base = OTHER; note = 2'-O-methyl modified nucleotide
  modified_base 30: mod_base = OTHER; note = 2'-O-methyl modified nucleotide
  modified_base 31: mod_base = OTHER; note = 2'-O-methyl modified nucleotide
  modified_base 32: mod_base = OTHER; note = 2'-O-methyl modified nucleotide
  modified_base 37: mod_base = OTHER; note = 2'-O-methyl modified nucleotide
  modified_base 38: mod_base = OTHER; note = 2'-O-methyl modified nucleotide
  modified_base 39: mod_base = OTHER; note = 2'-O-methyl modified nucleotide
  modified_base 40: mod_base = OTHER; note = 2'-O-methyl modified nucleotide
  modified_base 41: mod_base = OTHER; note = 2'-O-methyl modified nucleotide
  modified_base 42: mod_base = OTHER; note = 2'-O-methyl modified nucleotide
  modified_base 43: mod_base = OTHER; note = 2'-O-methyl modified nucleotide
  modified_base 47: mod_base = OTHER; note = 2'-O-methyl modified nucleotide
  modified_base 48: mod_base = OTHER; note = 2'-O-methyl modified nucleotide
  modified_base 51: mod_base = OTHER; note = 2'-O-methyl modified nucleotide
  modified_base 54: mod_base = OTHER; note = nucleotide with phosphorothioate linkage
  modified_base 58: mod_base = OTHER; note = 2'-O-methyl modified nucleotide
  modified_base 59: mod_base = OTHER; note = 2'-O-methyl modified nucleotide
  modified_base 61: mod_base = OTHER; note = 2'-O-methyl modified nucleotide
  modified_base 62: mod_base = OTHER; note = 2'-O-methyl modified nucleotide
  modified_base 63: mod_base = OTHER; note = 2'-O-methyl modified nucleotide
  modified_base 64: mod_base = OTHER; note = 2'-O-methyl modified nucleotide
  modified_base 65: mod_base = OTHER; note = 2'-O-methyl modified nucleotide
  modified_base 66: mod_base = OTHER; note = 2'-O-methyl modified nucleotide
  modified_base 67: mod_base = OTHER; note = 2'-O-methyl modified nucleotide
  modified_base 68: mod_base = OTHER; note = 2'-O-methyl modified nucleotide
  modified_base 69: mod_base = OTHER; note = 2'-O-methyl modified nucleotide
  modified_base 70: mod_base = OTHER; note = 2'-O-methyl modified nucleotide
  modified_base 75: mod_base = OTHER; note = 2'-O-methyl modified nucleotide
  modified_base 77: mod_base = OTHER; note = 2'-O-methyl modified nucleotide
  modified_base 80: mod_base = OTHER; note = 2'-O-methyl modified nucleotide
  modified_base 86: mod_base = OTHER; note = 2'-O-methyl modified nucleotide
  modified_base 87: mod_base = OTHER; note = 2'-O-methyl modified nucleotide
  modified_base 89: mod_base = OTHER; note = 2'-O-methyl modified nucleotide
  modified_base 90: mod_base = OTHER; note = 2'-O-methyl modified nucleotide
  modified_base 91: mod_base = OTHER; note = 2'-O-methyl modified nucleotide
  modified_base 92: mod_base = OTHER; note = 2'-O-methyl modified nucleotide
  modified_base 99: mod_base = OTHER; note = nucleotide with phosphorothioate linkage
  modified_base 100: mod_base = OTHER; note = 2'-O-methyl modified nucleotide with phosphorothioate linkage
  modified_base 101: mod_base = OTHER; note = 2'-O-methyl modified nucleotide

SEQ ID NO: 2014 - RNA, 101 nt, synthetic construct; identical to SEQ ID NO: 1014
  source 1..101: mol_type = other RNA
  modified_base 1: mod_base = OTHER; note = 2'-O-methyl modified nucleotide with phosphorothioate linkage
  modified_base 2: mod_base = OTHER; note = 2'-O-methyl modified nucleotide with phosphorothioate linkage
  modified_base 3: mod_base = OTHER; note = 2'-O-methyl modified nucleotide with phosphorothioate linkage
  modified_base 4: mod_base = OTHER; note = 2'-O-methyl modified nucleotide
  modified_base 5: mod_base = OTHER; note = 2'-O-methyl modified nucleotide
  modified_base 8: mod_base = OTHER; note = 2'-O-methyl modified nucleotide
  modified_base 9: mod_base = OTHER; note = 2'-O-methyl modified nucleotide
  modified_base 11: mod_base = OTHER; note = 2'-O-methyl modified nucleotide
  modified_base 13: mod_base = OTHER; note = 2'-O-methyl modified nucleotide
  modified_base 18: mod_base = OTHER; note = 2'-O-methyl modified nucleotide
  modified_base 22: mod_base = OTHER; note = 2'-O-methyl modified nucleotide
  modified_base 25: mod_base = OTHER; note = 2'-O-methyl modified nucleotide
  modified_base 29: mod_base = OTHER; note = 2'-O-methyl modified nucleotide
  modified_base 30: mod_base = OTHER; note = 2'-O-methyl modified nucleotide
  modified_base 31: mod_base = OTHER; note = 2'-O-methyl modified nucleotide
  modified_base 32: mod_base = OTHER; note = 2'-O-methyl modified nucleotide
  modified_base 37: mod_base = OTHER; note = 2'-O-methyl modified nucleotide
  modified_base 38: mod_base = OTHER; note = 2'-O-methyl modified nucleotide
  modified_base 39: mod_base = OTHER; note = 2'-O-methyl modified nucleotide
  modified_base 40: mod_base = OTHER; note = 2'-O-methyl modified nucleotide
  modified_base 41: mod_base = OTHER; note = 2'-O-methyl modified nucleotide
  modified_base 42: mod_base = OTHER; note = 2'-O-methyl modified nucleotide
  modified_base 43: mod_base = OTHER; note = 2'-O-methyl modified nucleotide
  modified_base 47: mod_base = OTHER; note = 2'-O-methyl modified nucleotide
  modified_base 48: mod_base = OTHER; note = 2'-O-methyl modified nucleotide
  modified_base 51: mod_base = OTHER; note = 2'-O-methyl modified nucleotide
  modified_base 54: mod_base = OTHER; note = nucleotide with phosphorothioate linkage
  modified_base 58: mod_base = OTHER; note = 2'-O-methyl modified nucleotide
  modified_base 59: mod_base = OTHER; note = 2'-O-methyl modified nucleotide
  modified_base 61: mod_base = OTHER; note = 2'-O-methyl modified nucleotide
  modified_base 62: mod_base = OTHER; note = 2'-O-methyl modified nucleotide
  modified_base 63: mod_base = OTHER; note = 2'-O-methyl modified nucleotide
  modified_base 64: mod_base = OTHER; note = 2'-O-methyl modified nucleotide
  modified_base 65: mod_base = OTHER; note = 2'-O-methyl modified nucleotide
  modified_base 66: mod_base = OTHER; note = 2'-O-methyl modified nucleotide
  modified_base 67: mod_base = OTHER; note = 2'-O-methyl modified nucleotide
  modified_base 68: mod_base = OTHER; note = 2'-O-methyl modified nucleotide
  modified_base 69: mod_base = OTHER; note = 2'-O-methyl modified nucleotide
  modified_base 70: mod_base = OTHER; note = 2'-O-methyl modified nucleotide
  modified_base 75: mod_base = OTHER; note = 2'-O-methyl modified nucleotide
  modified_base 77: mod_base = OTHER; note = 2'-O-methyl modified nucleotide
  modified_base 80: mod_base = OTHER; note = 2'-O-methyl modified nucleotide
  modified_base 86: mod_base = OTHER; note = 2'-O-methyl modified nucleotide
  modified_base 87: mod_base = OTHER; note = 2'-O-methyl modified nucleotide
  modified_base 89: mod_base = OTHER; note = 2'-O-methyl modified nucleotide
  modified_base 90: mod_base = OTHER; note = 2'-O-methyl modified nucleotide
  modified_base 91: mod_base = OTHER; note = 2'-O-methyl modified nucleotide
  modified_base 92: mod_base = OTHER; note = 2'-O-methyl modified nucleotide
  modified_base 99: mod_base = OTHER; note = nucleotide with phosphorothioate linkage
  modified_base 100: mod_base = OTHER; note = 2'-O-methyl modified nucleotide with phosphorothioate linkage
  modified_base 101: mod_base = OTHER; note = 2'-O-methyl modified nucleotide

SEQ ID NO: 2015 - RNA, 101 nt, synthetic construct; identical to SEQ ID NO: 1015
  source 1..101: mol_type = other RNA
  modified_base 1: mod_base = OTHER; note = 2'-O-methyl modified nucleotide with phosphorothioate linkage
  modified_base 2: mod_base = OTHER; note = 2'-O-methyl modified nucleotide with phosphorothioate linkage
  modified_base 3: mod_base = OTHER; note = 2'-O-methyl modified nucleotide with phosphorothioate linkage
  modified_base 4: mod_base = OTHER; note = 2'-O-methyl modified nucleotide
  modified_base 5: mod_base = OTHER; note = 2'-O-methyl modified nucleotide
  modified_base 8: mod_base = OTHER; note = 2'-O-methyl modified nucleotide
  modified_base 9: mod_base = OTHER; note = 2'-O-methyl modified nucleotide
  modified_base 11: mod_base = OTHER; note = 2'-O-methyl modified nucleotide
  modified_base 13: mod_base = OTHER; note = 2'-O-methyl modified nucleotide
  modified_base 18: mod_base = OTHER; note = 2'-O-methyl modified nucleotide
  modified_base 22: mod_base = OTHER; note = 2'-O-methyl modified nucleotide
  modified_base 25: mod_base = OTHER; note = 2'-O-methyl modified nucleotide
  modified_base 29: mod_base = OTHER; note = 2'-O-methyl modified nucleotide
  modified_base 30: mod_base = OTHER; note = 2'-O-methyl modified nucleotide
  modified_base 31: mod_base = OTHER; note = 2'-O-methyl modified nucleotide
  modified_base 32: mod_base = OTHER; note = 2'-O-methyl modified nucleotide
  modified_base 37: mod_base = OTHER; note = 2'-O-methyl modified nucleotide
  modified_base 38: mod_base = OTHER; note = 2'-O-methyl modified nucleotide
  modified_base 39: mod_base = OTHER; note = 2'-O-methyl modified nucleotide
  modified_base 40: mod_base = OTHER; note = 2'-O-methyl modified nucleotide
  modified_base 41: mod_base = OTHER; note = 2'-O-methyl modified nucleotide
  modified_base 42: mod_base = OTHER; note = 2'-O-methyl modified nucleotide
  modified_base 43: mod_base = OTHER; note = 2'-O-methyl modified nucleotide
  modified_base 47: mod_base = OTHER; note = 2'-O-methyl modified nucleotide
  modified_base 48: mod_base = OTHER; note = 2'-O-methyl modified nucleotide
  modified_base 51: mod_base = OTHER; note = 2'-O-methyl modified nucleotide
  modified_base 54: mod_base = OTHER; note = nucleotide with phosphorothioate linkage
  modified_base 58: mod_base = OTHER; note = 2'-O-methyl modified nucleotide
  modified_base 59: mod_base = OTHER; note = 2'-O-methyl modified nucleotide
  modified_base 61: mod_base = OTHER; note = 2'-O-methyl modified nucleotide
  modified_base 62: mod_base = OTHER; note = 2'-O-methyl modified nucleotide
  modified_base 63: mod_base = OTHER; note = 2'-O-methyl modified nucleotide
  modified_base 64: mod_base = OTHER; note = 2'-O-methyl modified nucleotide
  modified_base 65: mod_base = OTHER; note = 2'-O-methyl modified nucleotide
  modified_base 66: mod_base = OTHER; note = 2'-O-methyl modified nucleotide
  modified_base 67: mod_base = OTHER; note = 2'-O-methyl modified nucleotide
  modified_base 68: mod_base = OTHER; note = 2'-O-methyl modified nucleotide
  modified_base 69: mod_base = OTHER; note = 2'-O-methyl modified nucleotide
  modified_base 70: mod_base = OTHER; note = 2'-O-methyl modified nucleotide
  modified_base 75: mod_base = OTHER; note = 2'-O-methyl modified nucleotide
  modified_base 77: mod_base = OTHER; note = 2'-O-methyl modified nucleotide
  modified_base 80: mod_base = OTHER; note = 2'-O-methyl modified nucleotide
  modified_base 86: mod_base = OTHER; note = 2'-O-methyl modified nucleotide
  modified_base 87: mod_base = OTHER; note = 2'-O-methyl modified nucleotide
  modified_base 89: mod_base = OTHER; note = 2'-O-methyl modified nucleotide
  modified_base 90: mod_base = OTHER; note = 2'-O-methyl modified nucleotide
  modified_base 91: mod_base = OTHER; note = 2'-O-methyl modified nucleotide
  modified_base 92: mod_base = OTHER; note = 2'-O-methyl modified nucleotide
  modified_base 99: mod_base = OTHER; note = nucleotide with phosphorothioate linkage
  modified_base 100: mod_base = OTHER; note = 2'-O-methyl modified nucleotide with phosphorothioate linkage
  modified_base 101: mod_base = OTHER; note = 2'-O-methyl modified nucleotide

SEQ ID NO: 2016 - RNA, 101 nt, synthetic construct; identical to SEQ ID NO: 1016
  source 1..101: mol_type = other RNA
  modified_base 1: mod_base = OTHER; note = 2'-O-methyl modified nucleotide with phosphorothioate linkage
  modified_base 2: mod_base = OTHER; note = 2'-O-methyl modified nucleotide with phosphorothioate linkage
  modified_base 3: mod_base = OTHER; note = 2'-O-methyl modified nucleotide with phosphorothioate linkage
  modified_base 4: mod_base = OTHER; note = 2'-O-methyl modified nucleotide
  modified_base 5: mod_base = OTHER; note = 2'-O-methyl modified nucleotide
  modified_base 8: mod_base = OTHER; note = 2'-O-methyl modified nucleotide
  modified_base 9: mod_base = OTHER; note = 2'-O-methyl modified nucleotide
  modified_base 11: mod_base = OTHER; note = 2'-O-methyl modified nucleotide
  modified_base 13: mod_base = OTHER; note = 2'-O-methyl modified nucleotide
  modified_base 18: mod_base = OTHER; note = 2'-O-methyl modified nucleotide
  modified_base 22: mod_base = OTHER; note = 2'-O-methyl modified nucleotide
  modified_base 25: mod_base = OTHER; note = 2'-O-methyl modified nucleotide
  modified_base 29: mod_base = OTHER; note = 2'-O-methyl modified nucleotide
  modified_base 30: mod_base = OTHER; note = 2'-O-methyl modified nucleotide
  modified_base 31: mod_base = OTHER; note = 2'-O-methyl modified nucleotide
  modified_base 32: mod_base = OTHER; note = 2'-O-methyl modified nucleotide
  modified_base 37: mod_base = OTHER; note = 2'-O-methyl modified nucleotide
  modified_base 38: mod_base = OTHER; note = 2'-O-methyl modified nucleotide
  modified_base 39: mod_base = OTHER; note = 2'-O-methyl modified nucleotide
  modified_base 40: mod_base = OTHER; note = 2'-O-methyl modified nucleotide
  modified_base 41: mod_base = OTHER; note = 2'-O-methyl modified nucleotide
  modified_base 42: mod_base = OTHER; note = 2'-O-methyl modified nucleotide
  modified_base 43: mod_base = OTHER; note = 2'-O-methyl modified nucleotide
  modified_base 47: mod_base = OTHER; note = 2'-O-methyl modified nucleotide
  modified_base 48: mod_base = OTHER; note = 2'-O-methyl modified nucleotide
  modified_base 51: mod_base = OTHER; note = 2'-O-methyl modified nucleotide
  modified_base 54: mod_base = OTHER; note = nucleotide with phosphorothioate linkage
  modified_base 58: mod_base = OTHER; note = 2'-O-methyl modified nucleotide
  modified_base 59: mod_base = OTHER; note = 2'-O-methyl modified nucleotide
  modified_base 61: mod_base = OTHER; note = 2'-O-methyl modified nucleotide
  modified_base 62: mod_base = OTHER; note = 2'-O-methyl modified nucleotide
  modified_base 63: mod_base = OTHER; note = 2'-O-methyl modified nucleotide
  modified_base 64: mod_base = OTHER; note = 2'-O-methyl modified nucleotide
  modified_base 65: mod_base = OTHER; note = 2'-O-methyl modified nucleotide
  modified_base 66: mod_base = OTHER; note = 2'-O-methyl modified nucleotide
  modified_base 67: mod_base = OTHER; note = 2'-O-methyl modified nucleotide
  modified_base 68: mod_base = OTHER; note = 2'-O-methyl modified nucleotide
  modified_base 69: mod_base = OTHER; note = 2'-O-methyl modified nucleotide
  modified_base 70: mod_base = OTHER; note = 2'-O-methyl modified nucleotide
  modified_base 75: mod_base = OTHER; note = 2'-O-methyl modified nucleotide
  modified_base 77: mod_base = OTHER; note = 2'-O-methyl modified nucleotide
  modified_base 80: mod_base = OTHER; note = 2'-O-methyl modified nucleotide
  modified_base 86: mod_base = OTHER; note = 2'-O-methyl modified nucleotide
  modified_base 87: mod_base = OTHER; note = 2'-O-methyl modified nucleotide
  modified_base 89: mod_base = OTHER; note = 2'-O-methyl modified nucleotide
  modified_base 90: mod_base = OTHER; note = 2'-O-methyl modified nucleotide
  modified_base 91: mod_base = OTHER; note = 2'-O-methyl modified nucleotide
  modified_base 92: mod_base = OTHER; note = 2'-O-methyl modified nucleotide
  modified_base 99: mod_base = OTHER; note = nucleotide with phosphorothioate linkage
  modified_base 100: mod_base = OTHER; note = 2'-O-methyl modified nucleotide with phosphorothioate linkage
  modified_base 101: mod_base = OTHER; note = 2'-O-methyl modified nucleotide

SEQ ID NO: 2017 - RNA, 101 nt, synthetic construct; identical to SEQ ID NO: 1017
  source 1..101: mol_type = other RNA
  modified_base 1: mod_base = OTHER; note = 2'-O-methyl modified nucleotide with phosphorothioate linkage
  modified_base 2: mod_base = OTHER; note = 2'-O-methyl modified nucleotide with phosphorothioate linkage
  modified_base 3: mod_base = OTHER; note = 2'-O-methyl modified nucleotide with phosphorothioate linkage
  modified_base 4: mod_base = OTHER; note = 2'-O-methyl modified nucleotide
  modified_base 5: mod_base = OTHER; note = 2'-O-methyl modified nucleotide
  modified_base 8: mod_base = OTHER; note = 2'-O-methyl modified nucleotide
  modified_base 9: mod_base = OTHER; note = 2'-O-methyl modified nucleotide
  modified_base 11: mod_base = OTHER; note = 2'-O-methyl modified nucleotide
  modified_base 13: mod_base = OTHER; note = 2'-O-methyl modified nucleotide
  modified_base 18: mod_base = OTHER; note = 2'-O-methyl modified nucleotide
  modified_base 22: mod_base = OTHER; note = 2'-O-methyl modified nucleotide
  modified_base 25: mod_base = OTHER; note = 2'-O-methyl modified nucleotide
  modified_base 29: mod_base = OTHER; note = 2'-O-methyl modified nucleotide
  modified_base 30: mod_base = OTHER; note = 2'-O-methyl modified nucleotide
  modified_base 31: mod_base = OTHER; note = 2'-O-methyl modified nucleotide
  modified_base 32: mod_base = OTHER; note = 2'-O-methyl modified nucleotide
  modified_base 37: mod_base = OTHER; note = 2'-O-methyl modified nucleotide
  modified_base 38: mod_base = OTHER; note = 2'-O-methyl modified nucleotide
  modified_base 39: mod_base = OTHER; note = 2'-O-methyl modified nucleotide
  modified_base 40: mod_base = OTHER; note = 2'-O-methyl modified nucleotide
  modified_base 41: mod_base = OTHER; note = 2'-O-methyl modified nucleotide
  modified_base 42: mod_base = OTHER; note = 2'-O-methyl modified nucleotide
  modified_base 43: mod_base = OTHER; note = 2'-O-methyl modified nucleotide
  modified_base 47: mod_base = OTHER; note = 2'-O-methyl modified nucleotide
  modified_base 48: mod_base = OTHER; note = 2'-O-methyl modified nucleotide
  modified_base 51: mod_base = OTHER; note = 2'-O-methyl modified nucleotide
  modified_base 54: mod_base = OTHER; note = nucleotide with phosphorothioate linkage
  modified_base 58: mod_base = OTHER; note = 2'-O-methyl modified nucleotide
  modified_base 59: mod_base = OTHER; note = 2'-O-methyl modified nucleotide
  modified_base 61: mod_base = OTHER; note = 2'-O-methyl modified nucleotide
  modified_base 62: mod_base = OTHER; note = 2'-O-methyl modified nucleotide
  modified_base 63: mod_base = OTHER; note = 2'-O-methyl modified nucleotide
  modified_base 64: mod_base = OTHER; note = 2'-O-methyl modified nucleotide
  modified_base 65: mod_base = OTHER; note = 2'-O-methyl modified nucleotide
  modified_base 66: mod_base = OTHER; note = 2'-O-methyl modified nucleotide
  modified_base 67: mod_base = OTHER; note = 2'-O-methyl modified nucleotide
  modified_base 68: mod_base = OTHER; note = 2'-O-methyl modified nucleotide
  modified_base 69: mod_base = OTHER; note = 2'-O-methyl modified nucleotide
  modified_base 70: mod_base = OTHER; note = 2'-O-methyl modified nucleotide
  modified_base 75: mod_base = OTHER; note = 2'-O-methyl modified nucleotide
  modified_base 77: mod_base = OTHER; note = 2'-O-methyl modified nucleotide
  modified_base 80: mod_base = OTHER; note = 2'-O-methyl modified nucleotide
  modified_base 86: mod_base = OTHER; note = 2'-O-methyl modified nucleotide
  modified_base 87: mod_base = OTHER; note = 2'-O-methyl modified nucleotide
  modified_base 89: mod_base = OTHER; note = 2'-O-methyl modified nucleotide
  modified_base 90: mod_base = OTHER; note = 2'-O-methyl modified nucleotide
  modified_base 91: mod_base = OTHER; note = 2'-O-methyl modified nucleotide
  modified_base 92: mod_base = OTHER; note = 2'-O-methyl modified nucleotide
  modified_base 99: mod_base = OTHER; note = nucleotide with phosphorothioate linkage
  modified_base 100: mod_base = OTHER; note = 2'-O-methyl modified nucleotide with phosphorothioate linkage
  modified_base 101: mod_base = OTHER; note = 2'-O-methyl modified nucleotide

SEQ ID NO: 2018 - RNA, 101 nt, synthetic construct; identical to SEQ ID NO: 1018
  source 1..101: mol_type = other RNA
  modified_base 1: mod_base = OTHER; note = 2'-O-methyl modified nucleotide with phosphorothioate linkage
  modified_base 2: mod_base = OTHER; note = 2'-O-methyl modified nucleotide with phosphorothioate linkage
  modified_base 3: mod_base = OTHER; note = 2'-O-methyl modified nucleotide with phosphorothioate linkage
  modified_base 4: mod_base = OTHER; note = 2'-O-methyl modified nucleotide
  modified_base 5: mod_base = OTHER; note = 2'-O-methyl modified nucleotide
  modified_base 8: mod_base = OTHER; note = 2'-O-methyl modified nucleotide
  modified_base 9: mod_base = OTHER; note = 2'-O-methyl modified nucleotide
  modified_base 11: mod_base = OTHER; note = 2'-O-methyl modified nucleotide
  modified_base 13: mod_base = OTHER; note = 2'-O-methyl modified nucleotide
  modified_base 18: mod_base = OTHER; note = 2'-O-methyl modified nucleotide
  modified_base 22: mod_base = OTHER; note = 2'-O-methyl modified nucleotide
  modified_base 25: mod_base = OTHER; note = 2'-O-methyl modified nucleotide
  modified_base 29: mod_base = OTHER; note = 2'-O-methyl modified nucleotide
  modified_base 30: mod_base = OTHER; note = 2'-O-methyl modified nucleotide
  modified_base 31: mod_base = OTHER; note = 2'-O-methyl modified nucleotide
  modified_base 32: mod_base = OTHER; note = 2'-O-methyl modified nucleotide
  modified_base 37: mod_base = OTHER; note = 2'-O-methyl modified nucleotide
  modified_base 38: mod_base = OTHER; note = 2'-O-methyl modified nucleotide
  modified_base 39: mod_base = OTHER; note = 2'-O-methyl modified nucleotide
  modified_base 40: mod_base = OTHER; note = 2'-O-methyl modified nucleotide
  modified_base 41: mod_base = OTHER; note = 2'-O-methyl modified nucleotide
  modified_base 42: mod_base = OTHER; note = 2'-O-methyl modified nucleotide
  modified_base 43: mod_base = OTHER; note = 2'-O-methyl modified nucleotide
  modified_base 47: mod_base = OTHER; note = 2'-O-methyl modified nucleotide
  modified_base 48: mod_base = OTHER; note = 2'-O-methyl modified nucleotide
  modified_base 51: mod_base = OTHER; note = 2'-O-methyl modified nucleotide
  modified_base 54: mod_base = OTHER; note = nucleotide with phosphorothioate linkage
  modified_base 58: mod_base = OTHER; note = 2'-O-methyl modified nucleotide
  modified_base 59: mod_base = OTHER; note = 2'-O-methyl modified nucleotide
  modified_base 61: mod_base = OTHER; note = 2'-O-methyl modified nucleotide
  modified_base 62: mod_base = OTHER; note = 2'-O-methyl modified nucleotide
  modified_base 63: mod_base = OTHER; note = 2'-O-methyl modified nucleotide
  modified_base 64: mod_base = OTHER; note = 2'-O-methyl modified nucleotide
  modified_base 65: mod_base = OTHER; note = 2'-O-methyl modified nucleotide
  modified_base 66: mod_base = OTHER; note = 2'-O-methyl modified nucleotide
  modified_base 67: mod_base = OTHER; note = 2'-O-methyl modified nucleotide
  modified_base 68: mod_base = OTHER; note = 2'-O-methyl modified nucleotide
  modified_base 69: mod_base = OTHER; note = 2'-O-methyl modified nucleotide
  modified_base 70: mod_base = OTHER; note = 2'-O-methyl modified nucleotide
  modified_base 75: mod_base = OTHER; note = 2'-O-methyl modified nucleotide
  modified_base 77: mod_base = OTHER; note = 2'-O-methyl modified nucleotide
  modified_base 80: mod_base = OTHER; note = 2'-O-methyl modified nucleotide
  modified_base 86: mod_base = OTHER; note = 2'-O-methyl modified nucleotide
  modified_base 87: mod_base = OTHER; note = 2'-O-methyl modified nucleotide
  modified_base 89: mod_base = OTHER; note = 2'-O-methyl modified nucleotide
  modified_base 90: mod_base = OTHER; note = 2'-O-methyl modified nucleotide
  modified_base 91: mod_base = OTHER; note = 2'-O-methyl modified nucleotide
  modified_base 92: mod_base = OTHER; note = 2'-O-methyl modified nucleotide
  modified_base 99: mod_base = OTHER; note = nucleotide with phosphorothioate linkage
  modified_base 100: mod_base = OTHER; note = 2'-O-methyl modified nucleotide with phosphorothioate linkage
  modified_base 101: mod_base = OTHER; note = 2'-O-methyl modified nucleotide

SEQ ID NO: 2019 - RNA, 101 nt, synthetic construct; identical to SEQ ID NO: 1019
  source 1..101: mol_type = other RNA
  modified_base 1: mod_base = OTHER; note = 2'-O-methyl modified nucleotide with phosphorothioate linkage
  modified_base 2: mod_base = OTHER; note = 2'-O-methyl modified nucleotide with phosphorothioate linkage
  modified_base 3: mod_base = OTHER; note = 2'-O-methyl modified nucleotide with phosphorothioate linkage
  modified_base 4: mod_base = OTHER; note = 2'-O-methyl modified nucleotide
  modified_base 5: mod_base = OTHER; note = 2'-O-methyl modified nucleotide
  modified_base 8: mod_base = OTHER; note = 2'-O-methyl modified nucleotide
  modified_base 9: mod_base = OTHER; note = 2'-O-methyl modified nucleotide
  modified_base 11: mod_base = OTHER; note = 2'-O-methyl modified nucleotide
  modified_base 13: mod_base = OTHER; note = 2'-O-methyl modified nucleotide
  modified_base 18: mod_base = OTHER; note = 2'-O-methyl modified nucleotide
  modified_base 22: mod_base = OTHER; note = 2'-O-methyl modified nucleotide
  modified_base 25: mod_base = OTHER; note = 2'-O-methyl modified nucleotide
  modified_base 29: mod_base = OTHER; note = 2'-O-methyl modified nucleotide
  modified_base 30: mod_base = OTHER; note = 2'-O-methyl modified nucleotide
  modified_base 31: mod_base = OTHER; note = 2'-O-methyl modified nucleotide
  modified_base 32: mod_base = OTHER; note = 2'-O-methyl modified nucleotide
  modified_base 37: mod_base = OTHER; note = 2'-O-methyl modified nucleotide
  modified_base 38: mod_base = OTHER; note = 2'-O-methyl modified nucleotide
  modified_base 39: mod_base = OTHER; note = 2'-O-methyl modified nucleotide
  modified_base 40: mod_base = OTHER; note = 2'-O-methyl modified nucleotide
  modified_base 41: mod_base = OTHER; note = 2'-O-methyl modified nucleotide
  modified_base 42: mod_base = OTHER; note = 2'-O-methyl modified nucleotide
  modified_base 43: mod_base = OTHER; note = 2'-O-methyl modified nucleotide
  modified_base 47: mod_base = OTHER; note = 2'-O-methyl modified nucleotide
  modified_base 48: mod_base = OTHER; note = 2'-O-methyl modified nucleotide
  modified_base 51: mod_base = OTHER; note = 2'-O-methyl modified nucleotide
  modified_base 54: mod_base = OTHER; note = nucleotide with phosphorothioate linkage
  modified_base 58: mod_base = OTHER; note = 2'-O-methyl modified nucleotide
  modified_base 59: mod_base = OTHER; note = 2'-O-methyl modified nucleotide
  modified_base 61: mod_base = OTHER; note = 2'-O-methyl modified nucleotide
  modified_base 62: mod_base = OTHER; note = 2'-O-methyl modified nucleotide
  modified_base 63: mod_base = OTHER; note = 2'-O-methyl modified nucleotide
  modified_base 64: mod_base = OTHER; note = 2'-O-methyl modified nucleotide
  modified_base 65: mod_base = OTHER; note = 2'-O-methyl modified nucleotide
  modified_base 66: mod_base = OTHER; note = 2'-O-methyl modified nucleotide
  modified_base 67: mod_base = OTHER; note = 2'-O-methyl modified nucleotide
  modified_base 68: mod_base = OTHER; note = 2'-O-methyl modified nucleotide
  modified_base 69: mod_base = OTHER; note = 2'-O-methyl modified nucleotide
  modified_base 70: mod_base = OTHER; note = 2'-O-methyl modified nucleotide
  modified_base 75: mod_base = OTHER; note = 2'-O-methyl modified nucleotide
  modified_base 77: mod_base = OTHER; note = 2'-O-methyl modified nucleotide
  modified_base 80: mod_base = OTHER; note = 2'-O-methyl modified nucleotide
  modified_base 86: mod_base = OTHER; note = 2'-O-methyl modified nucleotide
  modified_base 87: mod_base = OTHER; note = 2'-O-methyl modified nucleotide
  modified_base 89: mod_base = OTHER; note = 2'-O-methyl modified nucleotide
  modified_base 90: mod_base = OTHER; note = 2'-O-methyl modified nucleotide
  modified_base 91: mod_base = OTHER; note = 2'-O-methyl modified nucleotide
  modified_base 92: mod_base = OTHER; note = 2'-O-methyl modified nucleotide
  modified_base 99: mod_base = OTHER; note = nucleotide with phosphorothioate linkage
  modified_base 100: mod_base = OTHER; note = 2'-O-methyl modified nucleotide with phosphorothioate linkage
  modified_base 101: mod_base = OTHER; note = 2'-O-methyl modified nucleotide

SEQ ID NO: 2020 - RNA, 101 nt, synthetic construct; identical to SEQ ID NO: 1020
  source 1..101: mol_type = other RNA
  modified_base 1: mod_base = OTHER; note = 2'-O-methyl modified nucleotide with phosphorothioate linkage
  modified_base 2: mod_base = OTHER; note = 2'-O-methyl modified nucleotide with phosphorothioate linkage
  modified_base 3: mod_base = OTHER; note = 2'-O-methyl modified nucleotide with phosphorothioate linkage
  modified_base 4: mod_base = OTHER; note = 2'-O-methyl modified nucleotide
  modified_base 5: mod_base = OTHER; note = 2'-O-methyl modified nucleotide
  modified_base 8: mod_base = OTHER; note = 2'-O-methyl modified nucleotide
  modified_base 9: mod_base = OTHER; note = 2'-O-methyl modified nucleotide
  modified_base 11: mod_base = OTHER; note = 2'-O-methyl modified nucleotide
  modified_base 13: mod_base = OTHER; note = 2'-O-methyl modified nucleotide
  modified_base 18: mod_base = OTHER; note = 2'-O-methyl modified nucleotide
  modified_base 22: mod_base = OTHER; note = 2'-O-methyl modified nucleotide
  modified_base 25: mod_base = OTHER; note = 2'-O-methyl modified nucleotide
  modified_base 29: mod_base = OTHER; note = 2'-O-methyl modified nucleotide
  modified_base 30: mod_base = OTHER; note = 2'-O-methyl modified nucleotide
  modified_base 31: mod_base = OTHER; note = 2'-O-methyl modified nucleotide
  modified_base 32: mod_base = OTHER; note = 2'-O-methyl modified nucleotide
  modified_base 37: mod_base = OTHER; note = 2'-O-methyl modified nucleotide
  modified_base 38: mod_base = OTHER; note = 2'-O-methyl modified nucleotide
  modified_base 39: mod_base = OTHER; note = 2'-O-methyl modified nucleotide
  modified_base 40: mod_base = OTHER; note = 2'-O-methyl modified nucleotide
  modified_base 41: mod_base = OTHER; note = 2'-O-methyl modified nucleotide
  modified_base 42: mod_base = OTHER; note = 2'-O-methyl modified nucleotide
  modified_base 43: mod_base = OTHER; note = 2'-O-methyl modified nucleotide
  modified_base 47: mod_base = OTHER; note = 2'-O-methyl modified nucleotide
  modified_base 48: mod_base = OTHER; note = 2'-O-methyl modified nucleotide
  modified_base 51: mod_base = OTHER; note = 2'-O-methyl modified nucleotide
  modified_base 54: mod_base = OTHER; note = nucleotide with phosphorothioate linkage
  modified_base 58: mod_base = OTHER; note = 2'-O-methyl modified nucleotide
  modified_base 59: mod_base = OTHER; note = 2'-O-methyl modified nucleotide
  modified_base 61: mod_base = OTHER; note = 2'-O-methyl modified nucleotide
  modified_base 62: mod_base = OTHER; note = 2'-O-methyl modified nucleotide
  modified_base 63: mod_base = OTHER; note = 2'-O-methyl modified nucleotide
  modified_base 64: mod_base = OTHER; note = 2'-O-methyl modified nucleotide
  modified_base 65: mod_base = OTHER; note = 2'-O-methyl modified nucleotide
  modified_base 66: mod_base = OTHER; note = 2'-O-methyl modified nucleotide
  modified_base 67: mod_base = OTHER; note = 2'-O-methyl modified nucleotide
  modified_base 68: mod_base = OTHER; note = 2'-O-methyl modified nucleotide
  modified_base 69: mod_base = OTHER; note = 2'-O-methyl modified nucleotide
  modified_base 70: mod_base = OTHER; note = 2'-O-methyl modified nucleotide
  modified_base 75: mod_base = OTHER; note = 2'-O-methyl modified nucleotide
  modified_base 77: mod_base = OTHER; note = 2'-O-methyl modified nucleotide
  modified_base 80: mod_base = OTHER; note = 2'-O-methyl modified nucleotide
  modified_base 86: mod_base = OTHER; note = 2'-O-methyl modified nucleotide
  modified_base 87: mod_base = OTHER; note = 2'-O-methyl modified nucleotide
  modified_base 89: mod_base = OTHER; note = 2'-O-methyl modified nucleotide
  modified_base 90: mod_base = OTHER; note = 2'-O-methyl modified nucleotide
  modified_base 91: mod_base = OTHER; note = 2'-O-methyl modified nucleotide
  modified_base 92: mod_base = OTHER; note = 2'-O-methyl modified nucleotide
  modified_base 99: mod_base = OTHER; note = nucleotide with phosphorothioate linkage
  modified_base 100: mod_base = OTHER; note = 2'-O-methyl modified nucleotide with phosphorothioate linkage
  modified_base 101: mod_base = OTHER; note = 2'-O-methyl modified nucleotide

SEQ ID NO: 2021 - RNA, 101 nt, synthetic construct; identical to SEQ ID NO: 1021
  source 1..101: mol_type = other RNA
  modified_base 1: mod_base = OTHER; note = 2'-O-methyl modified nucleotide with phosphorothioate linkage
  modified_base 2: mod_base = OTHER; note = 2'-O-methyl modified nucleotide with phosphorothioate linkage
  modified_base 3: mod_base = OTHER; note = 2'-O-methyl modified nucleotide with phosphorothioate linkage
  modified_base 4: mod_base = OTHER; note = 2'-O-methyl modified nucleotide
  modified_base 5: mod_base = OTHER; note = 2'-O-methyl modified nucleotide
  modified_base 8: mod_base = OTHER; note = 2'-O-methyl modified nucleotide
  modified_base 9: mod_base = OTHER; note = 2'-O-methyl modified nucleotide
  modified_base 11: mod_base = OTHER; note = 2'-O-methyl modified nucleotide
  modified_base 13: mod_base = OTHER; note = 2'-O-methyl modified nucleotide
  modified_base 18: mod_base = OTHER; note = 2'-O-methyl modified nucleotide
  modified_base 22: mod_base = OTHER; note = 2'-O-methyl modified nucleotide
  modified_base 25: mod_base = OTHER; note = 2'-O-methyl modified nucleotide
  modified_base 29: mod_base = OTHER; note = 2'-O-methyl modified nucleotide
  modified_base 30: mod_base = OTHER; note = 2'-O-methyl modified nucleotide
  modified_base 31: mod_base = OTHER; note = 2'-O-methyl modified nucleotide
  modified_base 32: mod_base = OTHER; note = 2'-O-methyl modified nucleotide
  modified_base 37: mod_base = OTHER; note = 2'-O-methyl modified nucleotide
  modified_base 38: mod_base = OTHER; note = 2'-O-methyl modified nucleotide
  modified_base 39: mod_base = OTHER; note = 2'-O-methyl modified nucleotide
  modified_base 40: mod_base = OTHER; note = 2'-O-methyl modified nucleotide
  modified_base 41: mod_base = OTHER; note = 2'-O-methyl modified nucleotide
  modified_base 42: mod_base = OTHER; note = 2'-O-methyl modified nucleotide
  modified_base 43: mod_base = OTHER; note = 2'-O-methyl modified nucleotide
  modified_base 47: mod_base = OTHER; note = 2'-O-methyl modified nucleotide
  modified_base 48: mod_base = OTHER; note = 2'-O-methyl modified nucleotide
  modified_base 51: mod_base = OTHER; note = 2'-O-methyl modified nucleotide
  modified_base 54: mod_base = OTHER; note = nucleotide with phosphorothioate linkage
  modified_base 58: mod_base = OTHER; note = 2'-O-methyl modified nucleotide
  modified_base 59: mod_base = OTHER; note = 2'-O-methyl modified nucleotide
  modified_base 61: mod_base = OTHER; note = 2'-O-methyl modified nucleotide
  modified_base 62: mod_base = OTHER; note = 2'-O-methyl modified nucleotide
  modified_base 63: mod_base = OTHER; note = 2'-O-methyl modified nucleotide
  modified_base 64: mod_base = OTHER; note = 2'-O-methyl modified nucleotide
  modified_base 65: mod_base = OTHER; note = 2'-O-methyl modified nucleotide
  modified_base 66: mod_base = OTHER; note = 2'-O-methyl modified nucleotide
  modified_base 67: mod_base = OTHER; note = 2'-O-methyl modified nucleotide
  modified_base 68: mod_base = OTHER; note = 2'-O-methyl modified nucleotide
  modified_base 69: mod_base = OTHER; note = 2'-O-methyl modified nucleotide
  modified_base 70: mod_base = OTHER; note = 2'-O-methyl modified nucleotide
  modified_base 75: mod_base = OTHER; note = 2'-O-methyl modified nucleotide
  modified_base 77: mod_base = OTHER; note = 2'-O-methyl modified nucleotide
  modified_base 80: mod_base = OTHER; note = 2'-O-methyl modified nucleotide
  modified_base 86: mod_base = OTHER; note = 2'-O-methyl modified nucleotide
  modified_base 87: mod_base = OTHER; note = 2'-O-methyl modified nucleotide
  modified_base 89: mod_base = OTHER; note = 2'-O-methyl modified nucleotide
  modified_base 90: mod_base = OTHER; note = 2'-O-methyl modified nucleotide
  modified_base 91: mod_base = OTHER; note = 2'-O-methyl modified nucleotide
  modified_base 92: mod_base = OTHER; note = 2'-O-methyl modified nucleotide
  modified_base 99: mod_base = OTHER; note = nucleotide with phosphorothioate linkage
  modified_base 100: mod_base = OTHER; note = 2'-O-methyl modified nucleotide with phosphorothioate linkage
  modified_base 101: mod_base = OTHER; note = 2'-O-methyl modified nucleotide

SEQ ID NO: 2022 - RNA, 101 nt, synthetic construct; identical to SEQ ID NO: 1022
  source 1..101: mol_type = other RNA
  modified_base 1: mod_base = OTHER; note = 2'-O-methyl modified nucleotide with phosphorothioate linkage
  modified_base 2: mod_base = OTHER; note = 2'-O-methyl modified nucleotide with phosphorothioate linkage
  modified_base 3: mod_base = OTHER; note = 2'-O-methyl modified nucleotide with phosphorothioate linkage
  modified_base 4: mod_base = OTHER; note = 2'-O-methyl modified nucleotide
  modified_base 5: mod_base = OTHER; note = 2'-O-methyl modified nucleotide
  modified_base 8: mod_base = OTHER; note = 2'-O-methyl modified nucleotide
  modified_base 9: mod_base = OTHER; note = 2'-O-methyl modified nucleotide
  modified_base 11: mod_base = OTHER; note = 2'-O-methyl modified nucleotide
  modified_base 13: mod_base = OTHER; note = 2'-O-methyl modified nucleotide
  modified_base 18: mod_base = OTHER; note = 2'-O-methyl modified nucleotide
  modified_base 22: mod_base = OTHER; note = 2'-O-methyl modified nucleotide
  modified_base 25: mod_base = OTHER; note = 2'-O-methyl modified nucleotide
  modified_base 29: mod_base = OTHER; note = 2'-O-methyl modified nucleotide
  modified_base 30: mod_base = OTHER; note = 2'-O-methyl modified nucleotide
  modified_base 31: mod_base = OTHER; note = 2'-O-methyl modified nucleotide
  modified_base 32: mod_base = OTHER; note = 2'-O-methyl modified nucleotide
  modified_base 37: mod_base = OTHER; note = 2'-O-methyl modified nucleotide
  modified_base 38: mod_base = OTHER; note = 2'-O-methyl modified nucleotide
  modified_base 39: mod_base = OTHER; note = 2'-O-methyl modified nucleotide
  modified_base 40: mod_base = OTHER; note = 2'-O-methyl modified nucleotide
  modified_base 41: mod_base = OTHER; note = 2'-O-methyl modified nucleotide
  modified_base 42: mod_base = OTHER; note = 2'-O-methyl modified nucleotide
  modified_base 43: mod_base = OTHER; note = 2'-O-methyl modified nucleotide
  modified_base 47: mod_base = OTHER; note = 2'-O-methyl modified nucleotide
  modified_base 48: mod_base = OTHER; note = 2'-O-methyl modified nucleotide
  modified_base 51: mod_base = OTHER; note = 2'-O-methyl modified nucleotide
  modified_base 54: mod_base = OTHER; note = nucleotide with phosphorothioate linkage
  modified_base 58: mod_base = OTHER; note = 2'-O-methyl modified nucleotide
  modified_base 59: mod_base = OTHER; note = 2'-O-methyl modified nucleotide
  modified_base 61: mod_base = OTHER; note = 2'-O-methyl modified nucleotide
  modified_base 62: mod_base = OTHER; note = 2'-O-methyl modified nucleotide
  modified_base 63: mod_base = OTHER; note = 2'-O-methyl modified nucleotide
  modified_base 64: mod_base = OTHER; note = 2'-O-methyl modified nucleotide
  modified_base 65: mod_base = OTHER; note = 2'-O-methyl modified nucleotide
  modified_base 66: mod_base = OTHER; note = 2'-O-methyl modified nucleotide
  modified_base 67: mod_base = OTHER; note = 2'-O-methyl modified nucleotide
  modified_base 68: mod_base = OTHER; note = 2'-O-methyl modified nucleotide
  modified_base 69: mod_base = OTHER; note = 2'-O-methyl modified nucleotide
  modified_base 70: mod_base = OTHER; note = 2'-O-methyl modified nucleotide
  modified_base 75: mod_base = OTHER; note = 2'-O-methyl modified nucleotide
  modified_base 77: mod_base = OTHER; note = 2'-O-methyl modified nucleotide
  modified_base 80: mod_base = OTHER; note = 2'-O-methyl modified nucleotide
  modified_base 86: mod_base = OTHER; note = 2'-O-methyl modified nucleotide
  modified_base 87: mod_base = OTHER; note = 2'-O-methyl modified nucleotide
  modified_base 89: mod_base = OTHER; note = 2'-O-methyl modified nucleotide
  modified_base 90: mod_base = OTHER; note = 2'-O-methyl modified nucleotide
  modified_base 91: mod_base = OTHER; note = 2'-O-methyl modified nucleotide
  modified_base 92: mod_base = OTHER; note = 2'-O-methyl modified nucleotide
  modified_base 99: mod_base = OTHER; note = nucleotide with phosphorothioate linkage
  modified_base 100: mod_base = OTHER; note = 2'-O-methyl modified nucleotide with phosphorothioate linkage
  modified_base 101: mod_base = OTHER; note = 2'-O-methyl modified nucleotide

SEQ ID NO: 2023 - RNA, 101 nt, synthetic construct; identical to SEQ ID NO: 1023
  source 1..101: mol_type = other RNA
  modified_base 1: mod_base = OTHER; note = 2'-O-methyl modified nucleotide with phosphorothioate linkage
  modified_base 2: mod_base = OTHER; note = 2'-O-methyl modified nucleotide with phosphorothioate linkage
  modified_base 3: mod_base = OTHER; note = 2'-O-methyl modified nucleotide with phosphorothioate linkage
  modified_base 4: mod_base = OTHER; note = 2'-O-methyl modified nucleotide
  modified_base 5: mod_base = OTHER; note = 2'-O-methyl modified nucleotide
  modified_base 8: mod_base = OTHER; note = 2'-O-methyl modified nucleotide
  modified_base 9: mod_base = OTHER; note = 2'-O-methyl modified nucleotide
  modified_base 11: mod_base = OTHER; note = 2'-O-methyl modified nucleotide
  modified_base 13: mod_base = OTHER; note = 2'-O-methyl modified nucleotide
  modified_base 18: mod_base = OTHER; note = 2'-O-methyl modified nucleotide
  modified_base 22: mod_base = OTHER; note = 2'-O-methyl modified nucleotide
  modified_base 25: mod_base = OTHER; note = 2'-O-methyl modified nucleotide
  modified_base 29: mod_base = OTHER; note = 2'-O-methyl modified nucleotide
  modified_base 30: mod_base = OTHER; note = 2'-O-methyl modified nucleotide
  modified_base 31: mod_base = OTHER; note = 2'-O-methyl modified nucleotide
  modified_base 32: mod_base = OTHER; note = 2'-O-methyl modified nucleotide
  modified_base 37: mod_base = OTHER; note = 2'-O-methyl modified nucleotide
  modified_base 38: mod_base = OTHER; note = 2'-O-methyl modified nucleotide
  modified_base 39: mod_base = OTHER; note = 2'-O-methyl modified nucleotide
  modified_base 40: mod_base = OTHER; note = 2'-O-methyl modified nucleotide
  modified_base 41: mod_base = OTHER; note = 2'-O-methyl modified nucleotide
  modified_base 42: mod_base = OTHER; note = 2'-O-methyl modified nucleotide
  modified_base 43: mod_base = OTHER; note = 2'-O-methyl modified nucleotide
  modified_base 47: mod_base = OTHER; note = 2'-O-methyl modified nucleotide
  modified_base 48: mod_base = OTHER; note = 2'-O-methyl modified nucleotide
  modified_base 51: mod_base = OTHER; note = 2'-O-methyl modified nucleotide
  modified_base 54: mod_base = OTHER; note = nucleotide with phosphorothioate linkage
  modified_base 58: mod_base = OTHER; note = 2'-O-methyl modified nucleotide
  modified_base 59: mod_base = OTHER; note = 2'-O-methyl modified nucleotide
  modified_base 61: mod_base = OTHER; note = 2'-O-methyl modified nucleotide
  modified_base 62: mod_base = OTHER; note = 2'-O-methyl modified nucleotide
  modified_base 63: mod_base = OTHER; note = 2'-O-methyl modified nucleotide
  modified_base 64: mod_base = OTHER; note = 2'-O-methyl modified nucleotide
  modified_base 65: mod_base = OTHER; note = 2'-O-methyl modified nucleotide
  modified_base 66: mod_base = OTHER; note = 2'-O-methyl modified nucleotide
  modified_base 67: mod_base = OTHER; note = 2'-O-methyl modified nucleotide
  modified_base 68: mod_base = OTHER; note = 2'-O-methyl modified nucleotide
  modified_base 69: mod_base = OTHER; note = 2'-O-methyl modified nucleotide
  modified_base 70: mod_base = OTHER; note = 2'-O-methyl modified nucleotide
  modified_base 75: mod_base = OTHER; note = 2'-O-methyl modified nucleotide
  modified_base 77: mod_base = OTHER; note = 2'-O-methyl modified nucleotide
  modified_base 80: mod_base = OTHER; note = 2'-O-methyl modified nucleotide
  modified_base 86: mod_base = OTHER; note = 2'-O-methyl modified nucleotide
  modified_base 87: mod_base = OTHER; note = 2'-O-methyl modified nucleotide
  modified_base 89: mod_base = OTHER; note = 2'-O-methyl modified nucleotide
  modified_base 90: mod_base = OTHER; note = 2'-O-methyl modified nucleotide
  modified_base 91: mod_base = OTHER; note = 2'-O-methyl modified nucleotide
  modified_base 92: mod_base = OTHER; note = 2'-O-methyl modified nucleotide
  modified_base 99: mod_base = OTHER; note = nucleotide with phosphorothioate linkage
  modified_base 100: mod_base = OTHER; note = 2'-O-methyl modified nucleotide with phosphorothioate linkage
  modified_base 101: mod_base = OTHER; note = 2'-O-methyl modified nucleotide

SEQ ID NO: 2024 - RNA, 101 nt, synthetic construct; identical to SEQ ID NO: 1024
  source 1..101: mol_type = other RNA
  modified_base 1: mod_base = OTHER; note = 2'-O-methyl modified nucleotide with phosphorothioate linkage
  modified_base 2: mod_base = OTHER; note = 2'-O-methyl modified nucleotide with phosphorothioate linkage
  modified_base 3: mod_base = OTHER; note = 2'-O-methyl modified nucleotide with phosphorothioate linkage
  modified_base 4: mod_base = OTHER; note = 2'-O-methyl modified nucleotide
  modified_base 5: mod_base = OTHER; note = 2'-O-methyl modified nucleotide
  modified_base 8: mod_base = OTHER; note = 2'-O-methyl modified nucleotide
  modified_base 9: mod_base = OTHER; note = 2'-O-methyl modified nucleotide
  modified_base 11: mod_base = OTHER; note = 2'-O-methyl modified nucleotide
  modified_base 13: mod_base = OTHER; note = 2'-O-methyl modified nucleotide
  modified_base 18: mod_base = OTHER; note = 2'-O-methyl modified nucleotide
  modified_base 22: mod_base = OTHER; note = 2'-O-methyl modified nucleotide
  modified_base 25: mod_base = OTHER; note = 2'-O-methyl modified nucleotide
  modified_base 29: mod_base = OTHER; note = 2'-O-methyl modified nucleotide
  modified_base 30: mod_base = OTHER; note = 2'-O-methyl modified nucleotide
  modified_base 31: mod_base = OTHER; note = 2'-O-methyl modified nucleotide
  modified_base 32: mod_base = OTHER; note = 2'-O-methyl modified nucleotide
  modified_base 37: mod_base = OTHER; note = 2'-O-methyl modified nucleotide
  modified_base 38: mod_base = OTHER; note = 2'-O-methyl modified nucleotide
  modified_base 39: mod_base = OTHER; note = 2'-O-methyl modified nucleotide
  modified_base 40: mod_base = OTHER; note = 2'-O-methyl modified nucleotide
  modified_base 41: mod_base = OTHER; note = 2'-O-methyl modified nucleotide
  modified_base 42: mod_base = OTHER; note = 2'-O-methyl modified nucleotide
  modified_base 43: mod_base = OTHER; note = 2'-O-methyl modified nucleotide
  modified_base 47: mod_base = OTHER; note = 2'-O-methyl modified nucleotide
  modified_base 48: mod_base = OTHER; note = 2'-O-methyl modified nucleotide
  modified_base 51: mod_base = OTHER; note = 2'-O-methyl modified nucleotide
  modified_base 54: mod_base = OTHER; note = nucleotide with phosphorothioate linkage
  modified_base 58: mod_base = OTHER; note = 2'-O-methyl modified nucleotide
  modified_base 59: mod_base = OTHER; note = 2'-O-methyl modified nucleotide
  modified_base 61: mod_base = OTHER; note = 2'-O-methyl modified nucleotide
  modified_base 62: mod_base = OTHER; note = 2'-O-methyl modified nucleotide
  modified_base 63: mod_base = OTHER; note = 2'-O-methyl modified nucleotide
  modified_base 64: mod_base = OTHER; note = 2'-O-methyl modified nucleotide
  modified_base 65: mod_base = OTHER; note = 2'-O-methyl modified nucleotide
  modified_base 66: mod_base = OTHER; note = 2'-O-methyl modified nucleotide
  modified_base 67: mod_base = OTHER; note = 2'-O-methyl modified nucleotide
  modified_base 68: mod_base = OTHER; note = 2'-O-methyl modified nucleotide
  modified_base 69: mod_base = OTHER; note = 2'-O-methyl modified nucleotide
  modified_base 70: mod_base = OTHER; note = 2'-O-methyl modified nucleotide
  modified_base 75: mod_base = OTHER; note = 2'-O-methyl modified nucleotide
  modified_base 77: mod_base = OTHER; note = 2'-O-methyl modified nucleotide
  modified_base 80: mod_base = OTHER; note = 2'-O-methyl modified nucleotide
  modified_base 86: mod_base = OTHER; note = 2'-O-methyl modified nucleotide
  modified_base 87: mod_base = OTHER; note = 2'-O-methyl modified nucleotide
  modified_base 89: mod_base = OTHER; note = 2'-O-methyl modified nucleotide
  modified_base 90: mod_base = OTHER; note = 2'-O-methyl modified nucleotide
  modified_base 91: mod_base = OTHER; note = 2'-O-methyl modified nucleotide
  modified_base 92: mod_base = OTHER; note = 2'-O-methyl modified nucleotide
  modified_base 99: mod_base = OTHER; note = nucleotide with phosphorothioate linkage
  modified_base 100: mod_base = OTHER; note = 2'-O-methyl modified nucleotide with phosphorothioate linkage
  modified_base 101: mod_base = OTHER; note = 2'-O-methyl modified nucleotide

SEQ ID NO: 2025 - RNA, 101 nt, synthetic construct; identical to SEQ ID NO: 1025
  source 1..101: mol_type = other RNA
  modified_base 1: mod_base = OTHER; note = 2'-O-methyl modified nucleotide with phosphorothioate linkage
  modified_base 2: mod_base = OTHER; note = 2'-O-methyl modified nucleotide with phosphorothioate linkage
  modified_base 3: mod_base = OTHER; note = 2'-O-methyl modified nucleotide with phosphorothioate linkage
  modified_base 4: mod_base = OTHER; note = 2'-O-methyl modified nucleotide
  modified_base 5: mod_base = OTHER; note = 2'-O-methyl modified nucleotide
  modified_base 8: mod_base = OTHER; note = 2'-O-methyl modified nucleotide
  modified_base 9: mod_base = OTHER; note = 2'-O-methyl modified nucleotide
  modified_base 11: mod_base = OTHER; note = 2'-O-methyl modified nucleotide
  modified_base 13: mod_base = OTHER; note = 2'-O-methyl modified nucleotide
  modified_base 18: mod_base = OTHER; note = 2'-O-methyl modified nucleotide
  modified_base 22: mod_base = OTHER; note = 2'-O-methyl modified nucleotide
  modified_base 25: mod_base = OTHER; note = 2'-O-methyl modified nucleotide
  modified_base 29: mod_base = OTHER; note = 2'-O-methyl modified nucleotide
  modified_base 30: mod_base = OTHER; note = 2'-O-methyl modified nucleotide
  modified_base 31: mod_base = OTHER; note = 2'-O-methyl modified nucleotide
  modified_base 32: mod_base = OTHER; note = 2'-O-methyl modified nucleotide
  modified_base 37: mod_base = OTHER; note = 2'-O-methyl modified nucleotide
  modified_base 38: mod_base = OTHER; note = 2'-O-methyl modified nucleotide
  modified_base 39: mod_base = OTHER; note = 2'-O-methyl modified nucleotide
  modified_base 40: mod_base = OTHER; note = 2'-O-methyl modified nucleotide
  modified_base 41: mod_base = OTHER; note = 2'-O-methyl modified nucleotide
  modified_base 42: mod_base = OTHER; note = 2'-O-methyl modified nucleotide
  modified_base 43: mod_base = OTHER; note = 2'-O-methyl modified nucleotide
  modified_base 47: mod_base = OTHER; note = 2'-O-methyl modified nucleotide
  modified_base 48: mod_base = OTHER; note = 2'-O-methyl modified nucleotide
  modified_base 51: mod_base = OTHER; note = 2'-O-methyl modified nucleotide
  modified_base 54: mod_base = OTHER; note = nucleotide with phosphorothioate linkage
  modified_base 58: mod_base = OTHER; note = 2'-O-methyl modified nucleotide
  modified_base 59: mod_base = OTHER; note = 2'-O-methyl modified nucleotide
  modified_base 61: mod_base = OTHER; note = 2'-O-methyl modified nucleotide
  modified_base 62: mod_base = OTHER; note = 2'-O-methyl modified nucleotide
  modified_base 63: mod_base = OTHER; note = 2'-O-methyl modified nucleotide
  modified_base 64: mod_base = OTHER; note = 2'-O-methyl modified nucleotide
  modified_base 65: mod_base = OTHER; note = 2'-O-methyl modified nucleotide
  modified_base 66: mod_base = OTHER; note = 2'-O-methyl modified nucleotide
  modified_base 67: mod_base = OTHER; note = 2'-O-methyl modified nucleotide
  modified_base 68: mod_base = OTHER; note = 2'-O-methyl modified nucleotide
  modified_base 69: mod_base = OTHER; note = 2'-O-methyl modified nucleotide
  modified_base 70: mod_base = OTHER; note = 2'-O-methyl modified nucleotide
  modified_base 75: mod_base = OTHER; note = 2'-O-methyl modified nucleotide
  modified_base 77: mod_base = OTHER; note = 2'-O-methyl modified nucleotide
  modified_base 80: mod_base = OTHER; note = 2'-O-methyl modified nucleotide
  modified_base 86: mod_base = OTHER; note = 2'-O-methyl modified nucleotide
  modified_base 87: mod_base = OTHER; note = 2'-O-methyl modified nucleotide
  modified_base 89: mod_base = OTHER; note = 2'-O-methyl modified nucleotide
  modified_base 90: mod_base = OTHER; note = 2'-O-methyl modified nucleotide
  modified_base 91: mod_base = OTHER; note = 2'-O-methyl modified nucleotide
  modified_base 92: mod_base = OTHER; note = 2'-O-methyl modified nucleotide
  modified_base 99: mod_base = OTHER; note = nucleotide with phosphorothioate linkage
  modified_base 100: mod_base = OTHER; note = 2'-O-methyl modified nucleotide with phosphorothioate linkage
  modified_base 101: mod_base = OTHER; note = 2'-O-methyl modified nucleotide

SEQ ID NO: 2026 - RNA, 101 nt, synthetic construct; identical to SEQ ID NO: 1026
  source 1..101: mol_type = other RNA
  modified_base 1: mod_base = OTHER; note = 2'-O-methyl modified nucleotide with phosphorothioate linkage
  modified_base 2: mod_base = OTHER; note = 2'-O-methyl modified nucleotide with phosphorothioate linkage
  modified_base 3: mod_base = OTHER; note = 2'-O-methyl modified nucleotide with phosphorothioate linkage
  modified_base 4: mod_base = OTHER; note = 2'-O-methyl modified nucleotide
  modified_base 5: mod_base = OTHER; note = 2'-O-methyl modified nucleotide
  modified_base 8: mod_base = OTHER; note = 2'-O-methyl modified nucleotide
  modified_base 9: mod_base = OTHER; note = 2'-O-methyl modified nucleotide
  modified_base 11: mod_base = OTHER; note = 2'-O-methyl modified nucleotide
  modified_base 13: mod_base = OTHER; note = 2'-O-methyl modified nucleotide
  modified_base 18: mod_base = OTHER; note = 2'-O-methyl modified nucleotide
  modified_base 22: mod_base = OTHER; note = 2'-O-methyl modified nucleotide
  modified_base 25: mod_base = OTHER; note = 2'-O-methyl modified nucleotide
  modified_base 29: mod_base = OTHER; note = 2'-O-methyl modified nucleotide
  modified_base 30: mod_base = OTHER; note = 2'-O-methyl modified nucleotide
  modified_base 31: mod_base = OTHER; note = 2'-O-methyl modified nucleotide
  modified_base 32: mod_base = OTHER; note = 2'-O-methyl modified nucleotide
  modified_base 37: mod_base = OTHER; note = 2'-O-methyl modified nucleotide
  modified_base 38: mod_base = OTHER; note = 2'-O-methyl modified nucleotide
  modified_base 39: mod_base = OTHER; note = 2'-O-methyl modified nucleotide
  modified_base 40: mod_base = OTHER; note = 2'-O-methyl modified nucleotide
  modified_base 41: mod_base = OTHER; note = 2'-O-methyl modified nucleotide
  modified_base 42: mod_base = OTHER; note = 2'-O-methyl modified nucleotide
  modified_base 43: mod_base = OTHER; note = 2'-O-methyl modified nucleotide
  modified_base 47: mod_base = OTHER; note = 2'-O-methyl modified nucleotide
  modified_base 48: mod_base = OTHER; note = 2'-O-methyl modified nucleotide
  modified_base 51: mod_base = OTHER; note = 2'-O-methyl modified nucleotide
  modified_base 54: mod_base = OTHER; note = nucleotide with phosphorothioate linkage
  modified_base 58: mod_base = OTHER; note = 2'-O-methyl modified nucleotide
  modified_base 59: mod_base = OTHER; note = 2'-O-methyl modified nucleotide
  modified_base 61: mod_base = OTHER; note = 2'-O-methyl modified nucleotide
  modified_base 62: mod_base = OTHER; note = 2'-O-methyl modified nucleotide
  modified_base 63: mod_base = OTHER; note = 2'-O-methyl modified nucleotide
  modified_base 64: mod_base = OTHER; note = 2'-O-methyl modified nucleotide
  modified_base 65: mod_base = OTHER; note = 2'-O-methyl modified nucleotide
  modified_base 66: mod_base = OTHER; note = 2'-O-methyl modified nucleotide
  modified_base 67: mod_base = OTHER; note = 2'-O-methyl modified nucleotide
  modified_base 68: mod_base = OTHER; note = 2'-O-methyl modified nucleotide
  modified_base 69: mod_base = OTHER; note = 2'-O-methyl modified nucleotide
  modified_base 70: mod_base = OTHER; note = 2'-O-methyl modified nucleotide
  modified_base 75: mod_base = OTHER; note = 2'-O-methyl modified nucleotide
  modified_base 77: mod_base = OTHER; note = 2'-O-methyl modified nucleotide
  modified_base 80: mod_base = OTHER; note = 2'-O-methyl modified nucleotide
  modified_base 86: mod_base = OTHER; note = 2'-O-methyl modified nucleotide
  modified_base 87: mod_base = OTHER; note = 2'-O-methyl modified nucleotide
  modified_base 89: mod_base = OTHER; note = 2'-O-methyl modified nucleotide
  modified_base 90: mod_base = OTHER; note = 2'-O-methyl modified nucleotide
  modified_base 91: mod_base = OTHER; note = 2'-O-methyl modified nucleotide
  modified_base 92: mod_base = OTHER; note = 2'-O-methyl modified nucleotide
  modified_base 99: mod_base = OTHER; note = nucleotide with phosphorothioate linkage
  modified_base 100: mod_base = OTHER; note = 2'-O-methyl modified nucleotide with phosphorothioate linkage
  modified_base 101: mod_base = OTHER; note = 2'-O-methyl modified nucleotide

SEQ ID NO: 2027 - RNA, 101 nt, synthetic construct; identical to SEQ ID NO: 1027
  source 1..101: mol_type = other RNA
  modified_base 1: mod_base = OTHER; note = 2'-O-methyl modified nucleotide with phosphorothioate linkage
  modified_base 2: mod_base = OTHER; note = 2'-O-methyl modified nucleotide with phosphorothioate linkage
  modified_base 3: mod_base = OTHER; note = 2'-O-methyl modified nucleotide with phosphorothioate linkage
  modified_base 4: mod_base = OTHER; note = 2'-O-methyl modified nucleotide
  modified_base 5: mod_base = OTHER; note = 2'-O-methyl modified nucleotide
  modified_base 8: mod_base = OTHER; note = 2'-O-methyl modified nucleotide
  modified_base 9: mod_base = OTHER; note = 2'-O-methyl modified nucleotide
  modified_base 11: mod_base = OTHER; note = 2'-O-methyl modified nucleotide
  modified_base 13: mod_base = OTHER; note = 2'-O-methyl modified nucleotide
  modified_base 18: mod_base = OTHER; note = 2'-O-methyl modified nucleotide
  modified_base 22: mod_base = OTHER; note = 2'-O-methyl modified nucleotide
  modified_base 25: mod_base = OTHER; note = 2'-O-methyl modified nucleotide
  modified_base 29: mod_base = OTHER; note = 2'-O-methyl modified nucleotide
  modified_base 30: mod_base = OTHER; note = 2'-O-methyl modified nucleotide
  modified_base 31: mod_base = OTHER; note = 2'-O-methyl modified nucleotide
  modified_base 32: mod_base = OTHER; note = 2'-O-methyl modified nucleotide
  modified_base 37: mod_base = OTHER; note = 2'-O-methyl modified nucleotide
  modified_base 38: mod_base = OTHER; note = 2'-O-methyl modified nucleotide
  modified_base 39: mod_base = OTHER; note = 2'-O-methyl modified nucleotide
  modified_base 40: mod_base = OTHER; note = 2'-O-methyl modified nucleotide
  modified_base 41: mod_base = OTHER; note = 2'-O-methyl modified nucleotide
  modified_base 42: mod_base = OTHER; note = 2'-O-methyl modified nucleotide
  modified_base 43: mod_base = OTHER; note = 2'-O-methyl modified nucleotide
  modified_base 47: mod_base = OTHER; note = 2'-O-methyl modified nucleotide
  modified_base 48: mod_base = OTHER; note = 2'-O-methyl modified nucleotide
  modified_base 51: mod_base = OTHER; note = 2'-O-methyl modified nucleotide
  modified_base 54: mod_base = OTHER; note = nucleotide with phosphorothioate linkage
  modified_base 58: mod_base = OTHER; note = 2'-O-methyl modified nucleotide
  modified_base 59: mod_base = OTHER; note = 2'-O-methyl modified nucleotide
  modified_base 61: mod_base = OTHER; note = 2'-O-methyl modified nucleotide
  modified_base 62: mod_base = OTHER; note = 2'-O-methyl modified nucleotide
  modified_base 63: mod_base = OTHER; note = 2'-O-methyl modified nucleotide
  modified_base 64: mod_base = OTHER; note = 2'-O-methyl modified nucleotide
  modified_base 65: mod_base = OTHER; note = 2'-O-methyl modified nucleotide
  modified_base 66: mod_base = OTHER; note = 2'-O-methyl modified nucleotide
  modified_base 67: mod_base = OTHER; note = 2'-O-methyl modified nucleotide
  modified_base 68: mod_base = OTHER; note = 2'-O-methyl modified nucleotide
  modified_base 69: mod_base = OTHER; note = 2'-O-methyl modified nucleotide
  modified_base 70: mod_base = OTHER; note = 2'-O-methyl modified nucleotide
  modified_base 75: mod_base = OTHER; note = 2'-O-methyl modified nucleotide
  modified_base 77: mod_base = OTHER; note = 2'-O-methyl modified nucleotide
  modified_base 80: mod_base = OTHER; note = 2'-O-methyl modified nucleotide
  modified_base 86: mod_base = OTHER; note = 2'-O-methyl modified nucleotide
  modified_base 87: mod_base = OTHER; note = 2'-O-methyl modified nucleotide
  modified_base 89: mod_base = OTHER; note = 2'-O-methyl modified nucleotide
  modified_base 90: mod_base = OTHER; note = 2'-O-methyl modified nucleotide
  modified_base 91: mod_base = OTHER; note = 2'-O-methyl modified nucleotide
  modified_base 92: mod_base = OTHER; note = 2'-O-methyl modified nucleotide
  modified_base 99: mod_base = OTHER; note = nucleotide with phosphorothioate linkage
  modified_base 100: mod_base = OTHER; note = 2'-O-methyl modified nucleotide with phosphorothioate linkage
  modified_base 101: mod_base = OTHER; note = 2'-O-methyl modified nucleotide

SEQ ID NO: 2028 - RNA, 101 nt, synthetic construct; identical to SEQ ID NO: 1028
  source 1..101: mol_type = other RNA
  modified_base 1: mod_base = OTHER; note = 2'-O-methyl modified nucleotide with phosphorothioate linkage
  modified_base 2: mod_base = OTHER; note = 2'-O-methyl modified nucleotide with phosphorothioate linkage
  modified_base 3: mod_base = OTHER; note = 2'-O-methyl modified nucleotide with phosphorothioate linkage
  modified_base 4: mod_base = OTHER; note = 2'-O-methyl modified nucleotide
  modified_base 5: mod_base = OTHER; note = 2'-O-methyl modified nucleotide
  modified_base 8: mod_base = OTHER; note = 2'-O-methyl modified nucleotide
  modified_base 9: mod_base = OTHER; note = 2'-O-methyl modified nucleotide
  modified_base 11: mod_base = OTHER; note = 2'-O-methyl modified nucleotide
  modified_base 13: mod_base = OTHER; note = 2'-O-methyl modified nucleotide
  modified_base 18: mod_base = OTHER; note = 2'-O-methyl modified nucleotide
  modified_base 22: mod_base = OTHER; note = 2'-O-methyl modified nucleotide
  modified_base 25: mod_base = OTHER; note = 2'-O-methyl modified nucleotide
  modified_base 29: mod_base = OTHER; note = 2'-O-methyl modified nucleotide
  modified_base 30: mod_base = OTHER; note = 2'-O-methyl modified nucleotide
  modified_base 31: mod_base = OTHER; note = 2'-O-methyl modified nucleotide
  modified_base 32: mod_base = OTHER; note = 2'-O-methyl modified nucleotide
  modified_base 37: mod_base = OTHER; note = 2'-O-methyl modified nucleotide
  modified_base 38: mod_base = OTHER; note = 2'-O-methyl modified nucleotide
  modified_base 39: mod_base = OTHER; note = 2'-O-methyl modified nucleotide
  modified_base 40: mod_base = OTHER; note = 2'-O-methyl modified nucleotide
  modified_base 41: mod_base = OTHER; note = 2'-O-methyl modified nucleotide
  modified_base 42: mod_base = OTHER; note = 2'-O-methyl modified nucleotide
  modified_base 43: mod_base = OTHER; note = 2'-O-methyl modified nucleotide
  modified_base 47: mod_base = OTHER; note = 2'-O-methyl modified nucleotide
  modified_base 48: mod_base = OTHER; note = 2'-O-methyl modified nucleotide
  modified_base 51: mod_base = OTHER; note = 2'-O-methyl modified nucleotide
  modified_base 54: mod_base = OTHER; note = nucleotide with phosphorothioate linkage
  modified_base 58: mod_base = OTHER; note = 2'-O-methyl modified nucleotide
  modified_base 59: mod_base = OTHER; note = 2'-O-methyl modified nucleotide
  modified_base 61: mod_base = OTHER; note = 2'-O-methyl modified nucleotide
  modified_base 62: mod_base = OTHER; note = 2'-O-methyl modified nucleotide
  modified_base 63: mod_base = OTHER; note = 2'-O-methyl modified nucleotide
  modified_base 64: mod_base = OTHER; note = 2'-O-methyl modified nucleotide
  modified_base 65: mod_base = OTHER; note = 2'-O-methyl modified nucleotide
  modified_base 66: mod_base = OTHER; note = 2'-O-methyl modified nucleotide
  modified_base 67: mod_base = OTHER; note = 2'-O-methyl modified nucleotide
  modified_base 68: mod_base = OTHER; note = 2'-O-methyl modified nucleotide
  modified_base 69: mod_base = OTHER; note = 2'-O-methyl modified nucleotide
  modified_base 70: mod_base = OTHER; note = 2'-O-methyl modified nucleotide
  modified_base 75: mod_base = OTHER; note = 2'-O-methyl modified nucleotide
  modified_base 77: mod_base = OTHER; note = 2'-O-methyl modified nucleotide
  modified_base 80: mod_base = OTHER; note = 2'-O-methyl modified nucleotide
  modified_base 86: mod_base = OTHER; note = 2'-O-methyl modified nucleotide
  modified_base 87: mod_base = OTHER; note = 2'-O-methyl modified nucleotide
  modified_base 89: mod_base = OTHER; note = 2'-O-methyl modified nucleotide
  modified_base 90: mod_base = OTHER; note = 2'-O-methyl modified nucleotide
  modified_base 91: mod_base = OTHER; note = 2'-O-methyl modified nucleotide
  modified_base 92: mod_base = OTHER; note = 2'-O-methyl modified nucleotide
  modified_base 99: mod_base = OTHER; note = nucleotide with phosphorothioate linkage
  modified_base 100: mod_base = OTHER; note = 2'-O-methyl modified nucleotide with phosphorothioate linkage
  modified_base 101: mod_base = OTHER; note = 2'-O-methyl modified nucleotide

SEQ ID NO: 2029 - RNA, 101 nt, synthetic construct; identical to SEQ ID NO: 1029
  source 1..101: mol_type = other RNA
  modified_base 1: mod_base = OTHER; note = 2'-O-methyl modified nucleotide with phosphorothioate linkage
  modified_base 2: mod_base = OTHER; note = 2'-O-methyl modified nucleotide with phosphorothioate linkage
  modified_base 3: mod_base = OTHER; note = 2'-O-methyl modified nucleotide with phosphorothioate linkage
  modified_base 4: mod_base = OTHER; note = 2'-O-methyl modified nucleotide
  modified_base 5: mod_base = OTHER; note = 2'-O-methyl modified nucleotide
  modified_base 8: mod_base = OTHER; note = 2'-O-methyl modified nucleotide
  modified_base 9: mod_base = OTHER; note = 2'-O-methyl modified nucleotide
  modified_base 11: mod_base = OTHER; note = 2'-O-methyl modified nucleotide
  modified_base 13: mod_base = OTHER; note = 2'-O-methyl modified nucleotide
  modified_base 18: mod_base = OTHER; note = 2'-O-methyl modified nucleotide
  modified_base 22: mod_base = OTHER; note = 2'-O-methyl modified nucleotide
  modified_base 25: mod_base = OTHER; note = 2'-O-methyl modified nucleotide
  modified_base 29: mod_base = OTHER; note = 2'-O-methyl modified nucleotide
  modified_base 30: mod_base = OTHER; note = 2'-O-methyl modified nucleotide
  modified_base 31: mod_base = OTHER; note = 2'-O-methyl modified nucleotide
  modified_base 32: mod_base = OTHER; note = 2'-O-methyl modified nucleotide
  modified_base 37: mod_base = OTHER; note = 2'-O-methyl modified nucleotide
  modified_base 38: mod_base = OTHER; note = 2'-O-methyl modified nucleotide
  modified_base 39: mod_base = OTHER; note = 2'-O-methyl modified nucleotide
  modified_base 40: mod_base = OTHER; note = 2'-O-methyl modified nucleotide
  modified_base 41: mod_base = OTHER; note = 2'-O-methyl modified nucleotide
  modified_base 42: mod_base = OTHER; note = 2'-O-methyl modified nucleotide
  modified_base 43: mod_base = OTHER; note = 2'-O-methyl modified nucleotide
  modified_base 47: mod_base = OTHER; note = 2'-O-methyl modified nucleotide
  modified_base 48: mod_base = OTHER; note = 2'-O-methyl modified nucleotide
  modified_base 51: mod_base = OTHER; note = 2'-O-methyl modified nucleotide
  modified_base 54: mod_base = OTHER; note = nucleotide with phosphorothioate linkage
  modified_base 58: mod_base = OTHER; note = 2'-O-methyl modified nucleotide
  modified_base 59: mod_base = OTHER; note = 2'-O-methyl modified nucleotide
  modified_base 61: mod_base = OTHER; note = 2'-O-methyl modified nucleotide
  modified_base 62: mod_base = OTHER; note = 2'-O-methyl modified nucleotide
  modified_base 63: mod_base = OTHER; note = 2'-O-methyl modified nucleotide
  modified_base 64: mod_base = OTHER; note = 2'-O-methyl modified nucleotide
  modified_base 65: mod_base = OTHER; note = 2'-O-methyl modified nucleotide
  modified_base 66: mod_base = OTHER; note = 2'-O-methyl modified nucleotide
  modified_base 67: mod_base = OTHER; note = 2'-O-methyl modified nucleotide
  modified_base 68: mod_base = OTHER; note = 2'-O-methyl modified nucleotide
  modified_base 69: mod_base = OTHER; note = 2'-O-methyl modified nucleotide
  modified_base 70: mod_base = OTHER; note = 2'-O-methyl modified nucleotide
  modified_base 75: mod_base = OTHER; note = 2'-O-methyl modified nucleotide
  modified_base 77: mod_base = OTHER; note = 2'-O-methyl modified nucleotide
  modified_base 80: mod_base = OTHER; note = 2'-O-methyl modified nucleotide
  modified_base 86: mod_base = OTHER; note = 2'-O-methyl modified nucleotide
  modified_base 87: mod_base = OTHER; note = 2'-O-methyl modified nucleotide
  modified_base 89: mod_base = OTHER; note = 2'-O-methyl modified nucleotide
  modified_base 90: mod_base = OTHER; note = 2'-O-methyl modified nucleotide
  modified_base 91: mod_base = OTHER; note = 2'-O-methyl modified nucleotide
  modified_base 92: mod_base = OTHER; note = 2'-O-methyl modified nucleotide
  modified_base 99: mod_base = OTHER; note = nucleotide with phosphorothioate linkage
  modified_base 100: mod_base = OTHER; note = 2'-O-methyl modified nucleotide with phosphorothioate linkage
  modified_base 101: mod_base = OTHER; note = 2'-O-methyl modified nucleotide

SEQ ID NO: 2030 - RNA, 101 nt, synthetic construct; identical to SEQ ID NO: 1030
  source 1..101: mol_type = other RNA
  modified_base 1: mod_base = OTHER; note = 2'-O-methyl modified nucleotide with phosphorothioate linkage
  modified_base 2: mod_base = OTHER; note = 2'-O-methyl modified nucleotide with phosphorothioate linkage
  modified_base 3: mod_base = OTHER; note = 2'-O-methyl modified nucleotide with phosphorothioate linkage
  modified_base 4: mod_base = OTHER; note = 2'-O-methyl modified nucleotide
  modified_base 5: mod_base = OTHER; note = 2'-O-methyl modified nucleotide
  modified_base 8: mod_base = OTHER; note = 2'-O-methyl modified nucleotide
  modified_base 9: mod_base = OTHER; note = 2'-O-methyl modified nucleotide
  modified_base 11: mod_base = OTHER; note = 2'-O-methyl modified nucleotide
  modified_base 13: mod_base = OTHER; note = 2'-O-methyl modified nucleotide
  modified_base 18: mod_base = OTHER; note = 2'-O-methyl modified nucleotide
  modified_base 22: mod_base = OTHER; note = 2'-O-methyl modified nucleotide
  modified_base 25: mod_base = OTHER; note = 2'-O-methyl modified nucleotide
  modified_base 29: mod_base = OTHER; note = 2'-O-methyl modified nucleotide
  modified_base 30: mod_base = OTHER; note = 2'-O-methyl modified nucleotide
  modified_base 31: mod_base = OTHER; note = 2'-O-methyl modified nucleotide
  modified_base 32: mod_base = OTHER; note = 2'-O-methyl modified nucleotide
  modified_base 37: mod_base = OTHER; note = 2'-O-methyl modified nucleotide
  modified_base 38: mod_base = OTHER; note = 2'-O-methyl modified nucleotide
  modified_base 39: mod_base = OTHER; note = 2'-O-methyl modified nucleotide
  modified_base 40: mod_base = OTHER; note = 2'-O-methyl modified nucleotide
  modified_base 41: mod_base = OTHER; note = 2'-O-methyl modified nucleotide
  modified_base 42: mod_base = OTHER; note = 2'-O-methyl modified nucleotide
  modified_base 43: mod_base = OTHER; note = 2'-O-methyl modified nucleotide
  modified_base 47: mod_base = OTHER; note = 2'-O-methyl modified nucleotide
  modified_base 48: mod_base = OTHER; note = 2'-O-methyl modified nucleotide
  modified_base 51: mod_base = OTHER; note = 2'-O-methyl modified nucleotide
  modified_base 54: mod_base = OTHER; note = nucleotide with phosphorothioate linkage
  modified_base 58: mod_base = OTHER; note = 2'-O-methyl modified nucleotide
  modified_base 59: mod_base = OTHER; note = 2'-O-methyl modified nucleotide
  modified_base 61: mod_base = OTHER; note = 2'-O-methyl modified nucleotide
  modified_base 62: mod_base = OTHER; note = 2'-O-methyl modified nucleotide
  modified_base 63: mod_base = OTHER; note = 2'-O-methyl modified nucleotide
  modified_base 64: mod_base = OTHER; note = 2'-O-methyl modified nucleotide
  modified_base 65: mod_base = OTHER; note = 2'-O-methyl modified nucleotide
  modified_base 66: mod_base = OTHER; note = 2'-O-methyl modified nucleotide
  modified_base 67: mod_base = OTHER; note = 2'-O-methyl modified nucleotide
  modified_base 68: mod_base = OTHER; note = 2'-O-methyl modified nucleotide
  modified_base 69: mod_base = OTHER; note = 2'-O-methyl modified nucleotide
  modified_base 70: mod_base = OTHER; note = 2'-O-methyl modified nucleotide
  modified_base 75: mod_base = OTHER; note = 2'-O-methyl modified nucleotide
  modified_base 77: mod_base = OTHER; note = 2'-O-methyl modified nucleotide
  modified_base 80: mod_base = OTHER; note = 2'-O-methyl modified nucleotide
  modified_base 86: mod_base = OTHER; note = 2'-O-methyl modified nucleotide
  modified_base 87: mod_base = OTHER; note = 2'-O-methyl modified nucleotide
  modified_base 89: mod_base = OTHER; note = 2'-O-methyl modified nucleotide
  modified_base 90: mod_base = OTHER; note = 2'-O-methyl modified nucleotide
  modified_base 91: mod_base = OTHER; note = 2'-O-methyl modified nucleotide
  modified_base 92: mod_base = OTHER; note = 2'-O-methyl modified nucleotide
  modified_base 99: mod_base = OTHER; note = nucleotide with phosphorothioate linkage
  modified_base 100: mod_base = OTHER; note = 2'-O-methyl modified nucleotide with phosphorothioate linkage
  modified_base 101: mod_base = OTHER; note = 2'-O-methyl modified nucleotide

SEQ ID NO: 2031 - RNA, 101 nt, synthetic construct; identical to SEQ ID NO: 1031
  source 1..101: mol_type = other RNA
  modified_base 1: mod_base = OTHER; note = 2'-O-methyl modified nucleotide with phosphorothioate linkage
  modified_base 2: mod_base = OTHER; note = 2'-O-methyl modified nucleotide with phosphorothioate linkage
  modified_base 3: mod_base = OTHER; note = 2'-O-methyl modified nucleotide with phosphorothioate linkage
  modified_base 4: mod_base = OTHER; note = 2'-O-methyl modified nucleotide
  modified_base 5: mod_base = OTHER; note = 2'-O-methyl modified nucleotide
  modified_base 8: mod_base = OTHER; note = 2'-O-methyl modified nucleotide
  modified_base 9: mod_base = OTHER; note = 2'-O-methyl modified nucleotide
  modified_base 11: mod_base = OTHER; note = 2'-O-methyl modified nucleotide
  modified_base 13: mod_base = OTHER; note = 2'-O-methyl modified nucleotide
  modified_base 18: mod_base = OTHER; note = 2'-O-methyl modified nucleotide
  modified_base 22: mod_base = OTHER; note = 2'-O-methyl modified nucleotide
  modified_base 25: mod_base = OTHER; note = 2'-O-methyl modified nucleotide
  modified_base 29: mod_base = OTHER; note = 2'-O-methyl modified nucleotide
  modified_base 30: mod_base = OTHER; note = 2'-O-methyl modified nucleotide
  modified_base 31: mod_base = OTHER; note = 2'-O-methyl modified nucleotide
  modified_base 32: mod_base = OTHER; note = 2'-O-methyl modified nucleotide
  modified_base 37: mod_base = OTHER; note = 2'-O-methyl modified nucleotide
  modified_base 38: mod_base = OTHER; note = 2'-O-methyl modified nucleotide
  modified_base 39: mod_base = OTHER; note = 2'-O-methyl modified nucleotide
  modified_base 40: mod_base = OTHER; note = 2'-O-methyl modified nucleotide
  modified_base 41: mod_base = OTHER; note = 2'-O-methyl modified nucleotide
  modified_base 42: mod_base = OTHER; note = 2'-O-methyl modified nucleotide
  modified_base 43: mod_base = OTHER; note = 2'-O-methyl modified nucleotide
  modified_base 47: mod_base = OTHER; note = 2'-O-methyl modified nucleotide
  modified_base 48: mod_base = OTHER; note = 2'-O-methyl modified nucleotide
  modified_base 51: mod_base = OTHER; note = 2'-O-methyl modified nucleotide
  modified_base 54: mod_base = OTHER; note = nucleotide with phosphorothioate linkage
  modified_base 58: mod_base = OTHER; note = 2'-O-methyl modified nucleotide
  modified_base 59: mod_base = OTHER; note = 2'-O-methyl modified nucleotide
  modified_base 61: mod_base = OTHER; note = 2'-O-methyl modified nucleotide
  modified_base 62: mod_base = OTHER; note = 2'-O-methyl modified nucleotide
  modified_base 63: mod_base = OTHER; note = 2'-O-methyl modified nucleotide
  modified_base 64: mod_base = OTHER; note = 2'-O-methyl modified nucleotide
  modified_base 65: mod_base = OTHER; note = 2'-O-methyl modified nucleotide
  modified_base 66: mod_base = OTHER; note = 2'-O-methyl modified nucleotide
  modified_base 67: mod_base = OTHER; note = 2'-O-methyl modified nucleotide
  modified_base 68: mod_base = OTHER; note = 2'-O-methyl modified nucleotide
  modified_base 69: mod_base = OTHER; note = 2'-O-methyl modified nucleotide
  modified_base 70: mod_base = OTHER; note = 2'-O-methyl modified nucleotide
  modified_base 75: mod_base = OTHER; note = 2'-O-methyl modified nucleotide
  modified_base 77: mod_base = OTHER; note = 2'-O-methyl modified nucleotide
  modified_base 80: mod_base = OTHER; note = 2'-O-methyl modified nucleotide
  modified_base 86: mod_base = OTHER; note = 2'-O-methyl modified nucleotide
  modified_base 87: mod_base = OTHER; note = 2'-O-methyl modified nucleotide
  modified_base 89: mod_base = OTHER; note = 2'-O-methyl modified nucleotide
  modified_base 90: mod_base = OTHER; note = 2'-O-methyl modified nucleotide
  modified_base 91: mod_base = OTHER; note = 2'-O-methyl modified nucleotide
  modified_base 92: mod_base = OTHER; note = 2'-O-methyl modified nucleotide
  modified_base 99: mod_base = OTHER; note = nucleotide with phosphorothioate linkage
  modified_base 100: mod_base = OTHER; note = 2'-O-methyl modified nucleotide with phosphorothioate linkage
  modified_base 101: mod_base = OTHER; note = 2'-O-methyl modified nucleotide

SEQ ID NO: 2032 - RNA, 101 nt, synthetic construct; identical to SEQ ID NO: 1032
  source 1..101: mol_type = other RNA
  modified_base 1: mod_base = OTHER; note = 2'-O-methyl modified nucleotide with phosphorothioate linkage
  modified_base 2: mod_base = OTHER; note = 2'-O-methyl modified nucleotide with phosphorothioate linkage
  modified_base 3: mod_base = OTHER; note = 2'-O-methyl modified nucleotide with phosphorothioate linkage
  modified_base 4: mod_base = OTHER; note = 2'-O-methyl modified nucleotide
  modified_base 5: mod_base = OTHER; note = 2'-O-methyl modified nucleotide
  modified_base 8: mod_base = OTHER; note = 2'-O-methyl modified nucleotide
  modified_base 9: mod_base = OTHER; note = 2'-O-methyl modified nucleotide
  modified_base 11: mod_base = OTHER; note = 2'-O-methyl modified nucleotide
  modified_base 13: mod_base = OTHER; note = 2'-O-methyl modified nucleotide
  modified_base 18: mod_base = OTHER; note = 2'-O-methyl modified nucleotide
  modified_base 22: mod_base = OTHER; note = 2'-O-methyl modified nucleotide
  modified_base 25: mod_base = OTHER; note = 2'-O-methyl modified nucleotide
  modified_base 29: mod_base = OTHER; note = 2'-O-methyl modified nucleotide
  modified_base 30: mod_base = OTHER; note = 2'-O-methyl modified nucleotide
  modified_base 31: mod_base = OTHER; note = 2'-O-methyl modified nucleotide
  modified_base 32: mod_base = OTHER; note = 2'-O-methyl modified nucleotide
  modified_base 37: mod_base = OTHER; note = 2'-O-methyl modified nucleotide
  modified_base 38: mod_base = OTHER; note = 2'-O-methyl modified nucleotide
  modified_base 39: mod_base = OTHER; note = 2'-O-methyl modified nucleotide
  modified_base 40: mod_base = OTHER; note = 2'-O-methyl modified nucleotide
  modified_base 41: mod_base = OTHER; note = 2'-O-methyl modified nucleotide
  modified_base 42: mod_base = OTHER; note = 2'-O-methyl modified nucleotide
  modified_base 43: mod_base = OTHER; note = 2'-O-methyl modified nucleotide
  modified_base 47: mod_base = OTHER; note = 2'-O-methyl modified nucleotide
  modified_base 48: mod_base = OTHER; note = 2'-O-methyl modified nucleotide
  modified_base 51: mod_base = OTHER; note = 2'-O-methyl modified nucleotide
  modified_base 54: mod_base = OTHER; note = nucleotide with phosphorothioate linkage
  modified_base 58: mod_base = OTHER; note = 2'-O-methyl modified nucleotide
  modified_base 59: mod_base = OTHER; note = 2'-O-methyl modified nucleotide
  modified_base 61: mod_base = OTHER; note = 2'-O-methyl modified nucleotide
  modified_base 62: mod_base = OTHER; note = 2'-O-methyl modified nucleotide
  modified_base 63: mod_base = OTHER; note = 2'-O-methyl modified nucleotide
  modified_base 64: mod_base = OTHER; note = 2'-O-methyl modified nucleotide
  modified_base 65: mod_base = OTHER; note = 2'-O-methyl modified nucleotide
  modified_base 66: mod_base = OTHER; note = 2'-O-methyl modified nucleotide
  modified_base 67: mod_base = OTHER; note = 2'-O-methyl modified nucleotide
  modified_base 68: mod_base = OTHER; note = 2'-O-methyl modified nucleotide
  modified_base 69: mod_base = OTHER; note = 2'-O-methyl modified nucleotide
  modified_base 70: mod_base = OTHER; note = 2'-O-methyl modified nucleotide
  modified_base 75: mod_base = OTHER; note = 2'-O-methyl modified nucleotide
  modified_base 77: mod_base = OTHER; note = 2'-O-methyl modified nucleotide
  modified_base 80: mod_base = OTHER; note = 2'-O-methyl modified nucleotide
  modified_base 86: mod_base = OTHER; note = 2'-O-methyl modified nucleotide
  modified_base 87: mod_base = OTHER; note = 2'-O-methyl modified nucleotide
  modified_base 89: mod_base = OTHER; note = 2'-O-methyl modified nucleotide
  modified_base 90: mod_base = OTHER; note = 2'-O-methyl modified nucleotide
  modified_base 91: mod_base = OTHER; note = 2'-O-methyl modified nucleotide
  modified_base 92: mod_base = OTHER; note = 2'-O-methyl modified nucleotide
  modified_base 99: mod_base = OTHER; note = nucleotide with phosphorothioate linkage
  modified_base 100: mod_base = OTHER; note = 2'-O-methyl modified nucleotide with phosphorothioate linkage
  modified_base 101: mod_base = OTHER; note = 2'-O-methyl modified nucleotide

SEQ ID NO: 2033 - RNA, 101 nt, synthetic construct; identical to SEQ ID NO: 1033
  source 1..101: mol_type = other RNA
  modified_base 1: mod_base = OTHER; note = 2'-O-methyl modified nucleotide with phosphorothioate linkage
  modified_base 2: mod_base = OTHER; note = 2'-O-methyl modified nucleotide with phosphorothioate linkage
  modified_base 3: mod_base = OTHER; note = 2'-O-methyl modified nucleotide with phosphorothioate linkage
  modified_base 4: mod_base = OTHER; note = 2'-O-methyl modified nucleotide
  modified_base 5: mod_base = OTHER; note = 2'-O-methyl modified nucleotide
  modified_base 8: mod_base = OTHER; note = 2'-O-methyl modified nucleotide
  modified_base 9: mod_base = OTHER; note = 2'-O-methyl modified nucleotide
  modified_base 11: mod_base = OTHER; note = 2'-O-methyl modified nucleotide
  modified_base 13: mod_base = OTHER; note = 2'-O-methyl modified nucleotide
  modified_base 18: mod_base = OTHER; note = 2'-O-methyl modified nucleotide
  modified_base 22: mod_base = OTHER; note = 2'-O-methyl modified nucleotide
  modified_base 25: mod_base = OTHER; note = 2'-O-methyl modified nucleotide
  modified_base 29: mod_base = OTHER; note = 2'-O-methyl modified nucleotide
  modified_base 30: mod_base = OTHER; note = 2'-O-methyl modified nucleotide
  modified_base 31: mod_base = OTHER; note = 2'-O-methyl modified nucleotide
  modified_base 32: mod_base = OTHER; note = 2'-O-methyl modified nucleotide
  modified_base 37: mod_base = OTHER; note = 2'-O-methyl modified nucleotide
  modified_base 38: mod_base = OTHER; note = 2'-O-methyl modified nucleotide
  modified_base 39: mod_base = OTHER; note = 2'-O-methyl modified nucleotide
  modified_base 40: mod_base = OTHER; note = 2'-O-methyl modified nucleotide
  modified_base 41: mod_base = OTHER; note = 2'-O-methyl modified nucleotide
  modified_base 42: mod_base = OTHER; note = 2'-O-methyl modified nucleotide
  modified_base 43: mod_base = OTHER; note = 2'-O-methyl modified nucleotide
  modified_base 47: mod_base = OTHER; note = 2'-O-methyl modified nucleotide
  modified_base 48: mod_base = OTHER; note = 2'-O-methyl modified nucleotide
  modified_base 51: mod_base = OTHER; note = 2'-O-methyl modified nucleotide
  modified_base 54: mod_base = OTHER; note = nucleotide with phosphorothioate linkage
  modified_base 58: mod_base = OTHER; note = 2'-O-methyl modified nucleotide
  modified_base 59: mod_base = OTHER; note = 2'-O-methyl modified nucleotide
  modified_base 61: mod_base = OTHER; note = 2'-O-methyl modified nucleotide
  modified_base 62: mod_base = OTHER; note = 2'-O-methyl modified nucleotide
  modified_base 63: mod_base = OTHER; note = 2'-O-methyl modified nucleotide
  modified_base 64: mod_base = OTHER; note = 2'-O-methyl modified nucleotide
  modified_base 65: mod_base = OTHER; note = 2'-O-methyl modified nucleotide
  modified_base 66: mod_base = OTHER; note = 2'-O-methyl modified nucleotide
  modified_base 67: mod_base = OTHER; note = 2'-O-methyl modified nucleotide
  modified_base 68: mod_base = OTHER; note = 2'-O-methyl modified nucleotide
  modified_base 69: mod_base = OTHER; note = 2'-O-methyl modified nucleotide
  modified_base 70: mod_base = OTHER; note = 2'-O-methyl modified nucleotide
  modified_base 75: mod_base = OTHER; note = 2'-O-methyl modified nucleotide
  modified_base 77: mod_base = OTHER; note = 2'-O-methyl modified nucleotide
  modified_base 80: mod_base = OTHER; note = 2'-O-methyl modified nucleotide
  modified_base 86: mod_base = OTHER; note = 2'-O-methyl modified nucleotide
  modified_base 87: mod_base = OTHER; note = 2'-O-methyl modified nucleotide
  modified_base 89: mod_base = OTHER; note = 2'-O-methyl modified nucleotide
  modified_base 90: mod_base = OTHER; note = 2'-O-methyl modified nucleotide
  modified_base 91: mod_base = OTHER; note = 2'-O-methyl modified nucleotide
  modified_base 92: mod_base = OTHER; note = 2'-O-methyl modified nucleotide
  modified_base 99: mod_base = OTHER; note = nucleotide with phosphorothioate linkage
  modified_base 100: mod_base = OTHER; note = 2'-O-methyl modified nucleotide with phosphorothioate linkage
  modified_base 101: mod_base = OTHER; note = 2'-O-methyl modified nucleotide

SEQ ID NO: 2034 - RNA, 101 nt, synthetic construct; identical to SEQ ID NO: 1034
  source 1..101: mol_type = other RNA
  modified_base 1: mod_base = OTHER; note = 2'-O-methyl modified nucleotide with phosphorothioate linkage
  modified_base 2: mod_base = OTHER; note = 2'-O-methyl modified nucleotide with phosphorothioate linkage
  modified_base 3: mod_base = OTHER; note = 2'-O-methyl modified nucleotide with phosphorothioate linkage
  modified_base 4: mod_base = OTHER; note = 2'-O-methyl modified nucleotide
  modified_base 5: mod_base = OTHER; note = 2'-O-methyl modified nucleotide
  modified_base 8: mod_base = OTHER; note = 2'-O-methyl modified nucleotide
  modified_base 9: mod_base = OTHER; note = 2'-O-methyl modified nucleotide
  modified_base 11: mod_base = OTHER; note = 2'-O-methyl modified nucleotide
  modified_base 13: mod_base = OTHER; note = 2'-O-methyl modified nucleotide
  modified_base 18: mod_base = OTHER; note = 2'-O-methyl modified nucleotide
  modified_base 22: mod_base = OTHER; note = 2'-O-methyl modified nucleotide
  modified_base 25: mod_base = OTHER; note = 2'-O-methyl modified nucleotide
  modified_base 29: mod_base = OTHER; note = 2'-O-methyl modified nucleotide
  modified_base 30: mod_base = OTHER; note = 2'-O-methyl modified nucleotide
  modified_base 31: mod_base = OTHER; note = 2'-O-methyl modified nucleotide
  modified_base 32: mod_base = OTHER; note = 2'-O-methyl modified nucleotide
  modified_base 37: mod_base = OTHER; note = 2'-O-methyl modified nucleotide
  modified_base 38: mod_base = OTHER; note = 2'-O-methyl modified nucleotide
  modified_base 39: mod_base = OTHER; note = 2'-O-methyl modified nucleotide
  modified_base 40: mod_base = OTHER; note = 2'-O-methyl modified nucleotide
  modified_base 41: mod_base = OTHER; note = 2'-O-methyl modified nucleotide
  modified_base 42: mod_base = OTHER; note = 2'-O-methyl modified nucleotide
  modified_base 43: mod_base = OTHER; note = 2'-O-methyl modified nucleotide
  modified_base 47: mod_base = OTHER; note = 2'-O-methyl modified nucleotide
  modified_base 48: mod_base = OTHER; note = 2'-O-methyl modified nucleotide
  modified_base 51: mod_base = OTHER; note = 2'-O-methyl modified nucleotide
  modified_base 54: mod_base = OTHER; note = nucleotide with phosphorothioate linkage
  modified_base 58: mod_base = OTHER; note = 2'-O-methyl modified nucleotide
  modified_base 59: mod_base = OTHER; note = 2'-O-methyl modified nucleotide
  modified_base 61: mod_base = OTHER; note = 2'-O-methyl modified nucleotide
  modified_base 62: mod_base = OTHER; note = 2'-O-methyl modified nucleotide
  modified_base 63: mod_base = OTHER; note = 2'-O-methyl modified nucleotide
  modified_base 64: mod_base = OTHER; note = 2'-O-methyl modified nucleotide
  modified_base 65: mod_base = OTHER; note = 2'-O-methyl modified nucleotide
  modified_base 66: mod_base = OTHER; note = 2'-O-methyl modified nucleotide
  modified_base 67: mod_base = OTHER; note = 2'-O-methyl modified nucleotide
  modified_base 68: mod_base = OTHER; note = 2'-O-methyl modified nucleotide
  modified_base 69: mod_base = OTHER; note = 2'-O-methyl modified nucleotide
  modified_base 70: mod_base = OTHER; note = 2'-O-methyl modified nucleotide
  modified_base 75: mod_base = OTHER; note = 2'-O-methyl modified nucleotide
  modified_base 77: mod_base = OTHER; note = 2'-O-methyl modified nucleotide
  modified_base 80: mod_base = OTHER; note = 2'-O-methyl modified nucleotide
  modified_base 86: mod_base = OTHER; note = 2'-O-methyl modified nucleotide
  modified_base 87: mod_base = OTHER; note = 2'-O-methyl modified nucleotide
  modified_base 89: mod_base = OTHER; note = 2'-O-methyl modified nucleotide
  modified_base 90: mod_base = OTHER; note = 2'-O-methyl modified nucleotide
  modified_base 91: mod_base = OTHER; note = 2'-O-methyl modified nucleotide
  modified_base 92: mod_base = OTHER; note = 2'-O-methyl modified nucleotide
  modified_base 99: mod_base = OTHER; note = nucleotide with phosphorothioate linkage
  modified_base 100: mod_base = OTHER; note = 2'-O-methyl modified nucleotide with phosphorothioate linkage
  modified_base 101: mod_base = OTHER; note = 2'-O-methyl modified nucleotide

SEQ ID NO: 2035 - RNA, 101 nt, synthetic construct; identical to SEQ ID NO: 1035
  source 1..101: mol_type = other RNA
  modified_base 1: mod_base = OTHER; note = 2'-O-methyl modified nucleotide with phosphorothioate linkage
  modified_base 2: mod_base = OTHER; note = 2'-O-methyl modified nucleotide with phosphorothioate linkage
  modified_base 3: mod_base = OTHER; note = 2'-O-methyl modified nucleotide with phosphorothioate linkage
  modified_base 4: mod_base = OTHER; note = 2'-O-methyl modified nucleotide
  modified_base 5: mod_base = OTHER; note = 2'-O-methyl modified nucleotide
  modified_base 8: mod_base = OTHER; note = 2'-O-methyl modified nucleotide
  modified_base 9: mod_base = OTHER; note = 2'-O-methyl modified nucleotide
  modified_base 11: mod_base = OTHER; note = 2'-O-methyl modified nucleotide
  modified_base 13: mod_base = OTHER; note = 2'-O-methyl modified nucleotide
  modified_base 18: mod_base = OTHER; note = 2'-O-methyl modified nucleotide
  modified_base 22: mod_base = OTHER; note = 2'-O-methyl modified nucleotide
  modified_base 25: mod_base = OTHER; note = 2'-O-methyl modified nucleotide
  modified_base 29: mod_base = OTHER; note = 2'-O-methyl modified nucleotide
  modified_base 30: mod_base = OTHER; note = 2'-O-methyl modified nucleotide
  modified_base 31: mod_base = OTHER; note = 2'-O-methyl modified nucleotide
  modified_base 32: mod_base = OTHER; note = 2'-O-methyl modified nucleotide
  modified_base 37: mod_base = OTHER; note = 2'-O-methyl modified nucleotide
  modified_base 38: mod_base = OTHER; note = 2'-O-methyl modified nucleotide
  modified_base 39: mod_base = OTHER; note = 2'-O-methyl modified nucleotide
  modified_base 40: mod_base = OTHER; note = 2'-O-methyl modified nucleotide
  modified_base 41: mod_base = OTHER; note = 2'-O-methyl modified nucleotide
  modified_base 42: mod_base = OTHER; note = 2'-O-methyl modified nucleotide
  modified_base 43: mod_base = OTHER; note = 2'-O-methyl modified nucleotide
  modified_base 47: mod_base = OTHER; note = 2'-O-methyl modified nucleotide
  modified_base 48: mod_base = OTHER; note = 2'-O-methyl modified nucleotide
  modified_base 51: mod_base = OTHER; note = 2'-O-methyl modified nucleotide
  modified_base 54: mod_base = OTHER; note = nucleotide with phosphorothioate linkage
  modified_base 58: mod_base = OTHER; note = 2'-O-methyl modified nucleotide
  modified_base 59: mod_base = OTHER; note = 2'-O-methyl modified nucleotide
  modified_base 61: mod_base = OTHER; note = 2'-O-methyl modified nucleotide
  modified_base 62: mod_base = OTHER; note = 2'-O-methyl modified nucleotide
  modified_base 63: mod_base = OTHER; note = 2'-O-methyl modified nucleotide
  modified_base 64: mod_base = OTHER; note = 2'-O-methyl modified nucleotide
  modified_base 65: mod_base = OTHER; note = 2'-O-methyl modified nucleotide
  modified_base 66: mod_base = OTHER; note = 2'-O-methyl modified nucleotide
  modified_base 67: mod_base = OTHER; note = 2'-O-methyl modified nucleotide
  modified_base 68: mod_base = OTHER; note = 2'-O-methyl modified nucleotide
  modified_base 69: mod_base = OTHER; note = 2'-O-methyl modified nucleotide
  modified_base 70: mod_base = OTHER; note = 2'-O-methyl modified nucleotide
  modified_base 75: mod_base = OTHER; note = 2'-O-methyl modified nucleotide
  modified_base 77: mod_base = OTHER; note = 2'-O-methyl modified nucleotide
  modified_base 80: mod_base = OTHER; note = 2'-O-methyl modified nucleotide
  modified_base 86: mod_base = OTHER; note = 2'-O-methyl modified nucleotide
  modified_base 87: mod_base = OTHER; note = 2'-O-methyl modified nucleotide
  modified_base 89: mod_base = OTHER; note = 2'-O-methyl modified nucleotide
  modified_base 90: mod_base = OTHER; note = 2'-O-methyl modified nucleotide
  modified_base 91: mod_base = OTHER; note = 2'-O-methyl modified nucleotide
  modified_base 92: mod_base = OTHER; note = 2'-O-methyl modified nucleotide
  modified_base 99: mod_base = OTHER; note = nucleotide with phosphorothioate linkage
  modified_base 100: mod_base = OTHER; note = 2'-O-methyl modified nucleotide with phosphorothioate linkage
  modified_base 101: mod_base = OTHER; note = 2'-O-methyl modified nucleotide

SEQ ID NO: 2036 - RNA, 101 nt, synthetic construct; identical to SEQ ID NO: 1036
  source 1..101: mol_type = other RNA
  modified_base 1: mod_base = OTHER; note = 2'-O-methyl modified nucleotide with phosphorothioate linkage
  modified_base 2: mod_base = OTHER; note = 2'-O-methyl modified nucleotide with phosphorothioate linkage
  modified_base 3: mod_base = OTHER; note = 2'-O-methyl modified nucleotide with phosphorothioate linkage
  modified_base 4: mod_base = OTHER; note = 2'-O-methyl modified nucleotide
  modified_base 5: mod_base = OTHER; note = 2'-O-methyl modified nucleotide
  modified_base 8: mod_base = OTHER; note = 2'-O-methyl modified nucleotide
  modified_base 9: mod_base = OTHER; note = 2'-O-methyl modified nucleotide
  modified_base 11: mod_base = OTHER; note = 2'-O-methyl modified nucleotide
  modified_base 13: mod_base = OTHER; note = 2'-O-methyl modified nucleotide
  modified_base 18: mod_base = OTHER; note = 2'-O-methyl modified nucleotide
  modified_base 22: mod_base = OTHER; note = 2'-O-methyl modified nucleotide
  modified_base 25: mod_base = OTHER; note = 2'-O-methyl modified nucleotide
  modified_base 29: mod_base = OTHER; note = 2'-O-methyl modified nucleotide
  modified_base 30: mod_base = OTHER; note = 2'-O-methyl modified nucleotide
  modified_base 31: mod_base = OTHER; note = 2'-O-methyl modified nucleotide
  modified_base 32: mod_base = OTHER; note = 2'-O-methyl modified nucleotide
  modified_base 37: mod_base = OTHER; note = 2'-O-methyl modified nucleotide
  modified_base 38: mod_base = OTHER; note = 2'-O-methyl modified nucleotide
  modified_base 39: mod_base = OTHER; note = 2'-O-methyl modified nucleotide
  modified_base 40: mod_base = OTHER; note = 2'-O-methyl modified nucleotide
  modified_base 41: mod_base = OTHER; note = 2'-O-methyl modified nucleotide
  modified_base 42: mod_base = OTHER; note = 2'-O-methyl modified nucleotide
  modified_base 43: mod_base = OTHER; note = 2'-O-methyl modified nucleotide
  modified_base 47: mod_base = OTHER; note = 2'-O-methyl modified nucleotide
  modified_base 48: mod_base = OTHER; note = 2'-O-methyl modified nucleotide
  modified_base 51: mod_base = OTHER; note = 2'-O-methyl modified nucleotide
  modified_base 54: mod_base = OTHER; note = nucleotide with phosphorothioate linkage
  modified_base 58: mod_base = OTHER; note = 2'-O-methyl modified nucleotide
  modified_base 59: mod_base = OTHER; note = 2'-O-methyl modified nucleotide
  modified_base 61: mod_base = OTHER; note = 2'-O-methyl modified nucleotide
  modified_base 62: mod_base = OTHER; note = 2'-O-methyl modified nucleotide
  modified_base 63: mod_base = OTHER; note = 2'-O-methyl modified nucleotide
  modified_base 64: mod_base = OTHER; note = 2'-O-methyl modified nucleotide
  modified_base 65: mod_base = OTHER; note = 2'-O-methyl modified nucleotide
  modified_base 66: mod_base = OTHER; note = 2'-O-methyl modified nucleotide
  modified_base 67: mod_base = OTHER; note = 2'-O-methyl modified nucleotide
  modified_base 68: mod_base = OTHER; note = 2'-O-methyl modified nucleotide
  modified_base 69: mod_base = OTHER; note = 2'-O-methyl modified nucleotide
  modified_base 70: mod_base = OTHER; note = 2'-O-methyl modified nucleotide
  modified_base 75: mod_base = OTHER; note = 2'-O-methyl modified nucleotide
  modified_base 77: mod_base = OTHER; note = 2'-O-methyl modified nucleotide
  modified_base 80: mod_base = OTHER; note = 2'-O-methyl modified nucleotide
  modified_base 86: mod_base = OTHER; note = 2'-O-methyl modified nucleotide
  modified_base 87: mod_base = OTHER; note = 2'-O-methyl modified nucleotide
  modified_base 89: mod_base = OTHER; note = 2'-O-methyl modified nucleotide
  modified_base 90: mod_base = OTHER; note = 2'-O-methyl modified nucleotide
  modified_base 91: mod_base = OTHER; note = 2'-O-methyl modified nucleotide
  modified_base 92: mod_base = OTHER; note = 2'-O-methyl modified nucleotide
  modified_base 99: mod_base = OTHER; note = nucleotide with phosphorothioate linkage
  modified_base 100: mod_base = OTHER; note = 2'-O-methyl modified nucleotide with phosphorothioate linkage
  modified_base 101: mod_base = OTHER; note = 2'-O-methyl modified nucleotide

SEQ ID NO: 2037 - RNA, 101 nt, synthetic construct; identical to SEQ ID NO: 1037
  source 1..101: mol_type = other RNA
  modified_base 1: mod_base = OTHER; note = 2'-O-methyl modified nucleotide with phosphorothioate linkage
  modified_base 2: mod_base = OTHER; note = 2'-O-methyl modified nucleotide with phosphorothioate linkage
  modified_base 3: mod_base = OTHER; note = 2'-O-methyl modified nucleotide with phosphorothioate linkage
  modified_base 4: mod_base = OTHER; note = 2'-O-methyl modified nucleotide
  modified_base 5: mod_base = OTHER; note = 2'-O-methyl modified nucleotide
  modified_base 8: mod_base = OTHER; note = 2'-O-methyl modified nucleotide
  modified_base 9: mod_base = OTHER; note = 2'-O-methyl modified nucleotide
  modified_base 11: mod_base = OTHER; note = 2'-O-methyl modified nucleotide
  modified_base 13: mod_base = OTHER; note = 2'-O-methyl modified nucleotide
  modified_base 18: mod_base = OTHER; note = 2'-O-methyl modified nucleotide
  modified_base 22: mod_base = OTHER; note = 2'-O-methyl modified nucleotide
  modified_base 25: mod_base = OTHER; note = 2'-O-methyl modified nucleotide
  modified_base 29: mod_base = OTHER; note = 2'-O-methyl modified nucleotide
  modified_base 30: mod_base = OTHER; note = 2'-O-methyl modified nucleotide
  modified_base 31: mod_base = OTHER; note = 2'-O-methyl modified nucleotide
  modified_base 32: mod_base = OTHER; note = 2'-O-methyl modified nucleotide
  modified_base 37: mod_base = OTHER; note = 2'-O-methyl modified nucleotide
  modified_base 38: mod_base = OTHER; note = 2'-O-methyl modified nucleotide
  modified_base 39: mod_base = OTHER; note = 2'-O-methyl modified nucleotide
  modified_base 40: mod_base = OTHER; note = 2'-O-methyl modified nucleotide
  modified_base 41: mod_base = OTHER; note = 2'-O-methyl modified nucleotide
  modified_base 42: mod_base = OTHER; note = 2'-O-methyl modified nucleotide
  modified_base 43: mod_base = OTHER; note = 2'-O-methyl modified nucleotide
  modified_base 47: mod_base = OTHER; note = 2'-O-methyl modified nucleotide
  modified_base 48: mod_base = OTHER; note = 2'-O-methyl modified nucleotide
  modified_base 51: mod_base = OTHER; note = 2'-O-methyl modified nucleotide
  modified_base 54: mod_base = OTHER; note = nucleotide with phosphorothioate linkage
  modified_base 58: mod_base = OTHER; note = 2'-O-methyl modified nucleotide
  modified_base 59: mod_base = OTHER; note = 2'-O-methyl modified nucleotide
  modified_base 61: mod_base = OTHER; note = 2'-O-methyl modified nucleotide
  modified_base 62: mod_base = OTHER; note = 2'-O-methyl modified nucleotide
  modified_base 63: mod_base = OTHER; note = 2'-O-methyl modified nucleotide
  modified_base 64: mod_base = OTHER; note = 2'-O-methyl modified nucleotide
  modified_base 65: mod_base = OTHER; note = 2'-O-methyl modified nucleotide
  modified_base 66: mod_base = OTHER; note = 2'-O-methyl modified nucleotide
  modified_base 67: mod_base = OTHER; note = 2'-O-methyl modified nucleotide
  modified_base 68: mod_base = OTHER; note = 2'-O-methyl modified nucleotide
  modified_base 69: mod_base = OTHER; note = 2'-O-methyl modified nucleotide
  modified_base 70: mod_base = OTHER; note = 2'-O-methyl modified nucleotide
  modified_base 75: mod_base = OTHER; note = 2'-O-methyl modified nucleotide
  modified_base 77: mod_base = OTHER; note = 2'-O-methyl modified nucleotide
  modified_base 80: mod_base = OTHER; note = 2'-O-methyl modified nucleotide
  modified_base 86: mod_base = OTHER; note = 2'-O-methyl modified nucleotide
  modified_base 87: mod_base = OTHER; note = 2'-O-methyl modified nucleotide
  modified_base 89: mod_base = OTHER; note = 2'-O-methyl modified nucleotide
  modified_base 90: mod_base = OTHER; note = 2'-O-methyl modified nucleotide
  modified_base 91: mod_base = OTHER; note = 2'-O-methyl modified nucleotide
  modified_base 92: mod_base = OTHER; note = 2'-O-methyl modified nucleotide
  modified_base 99: mod_base = OTHER; note = nucleotide with phosphorothioate linkage
  modified_base 100: mod_base = OTHER; note = 2'-O-methyl modified nucleotide with phosphorothioate linkage
  modified_base 101: mod_base = OTHER; note = 2'-O-methyl modified nucleotide

SEQ ID NO: 2038 - RNA, 101 nt, synthetic construct; identical to SEQ ID NO: 1038
  source 1..101: mol_type = other RNA
  modified_base 1: mod_base = OTHER; note = 2'-O-methyl modified nucleotide with phosphorothioate linkage
  modified_base 2: mod_base = OTHER; note = 2'-O-methyl modified nucleotide with phosphorothioate linkage
  modified_base 3: mod_base = OTHER; note = 2'-O-methyl modified nucleotide with phosphorothioate linkage
  modified_base 4: mod_base = OTHER; note = 2'-O-methyl modified nucleotide
  modified_base 5: mod_base = OTHER; note = 2'-O-methyl modified nucleotide
  modified_base 8: mod_base = OTHER; note = 2'-O-methyl modified nucleotide
  modified_base 9: mod_base = OTHER; note = 2'-O-methyl modified nucleotide
  modified_base 11: mod_base = OTHER; note = 2'-O-methyl modified nucleotide
  modified_base 13: mod_base = OTHER; note = 2'-O-methyl modified nucleotide
  modified_base 18: mod_base = OTHER; note = 2'-O-methyl modified nucleotide
  modified_base 22: mod_base = OTHER; note = 2'-O-methyl modified nucleotide
  modified_base 25: mod_base = OTHER; note = 2'-O-methyl modified nucleotide
  modified_base 29: mod_base = OTHER; note = 2'-O-methyl modified nucleotide
  modified_base 30: mod_base = OTHER; note = 2'-O-methyl modified nucleotide
  modified_base 31: mod_base = OTHER; note = 2'-O-methyl modified nucleotide
  modified_base 32: mod_base = OTHER; note = 2'-O-methyl modified nucleotide
  modified_base 37: mod_base = OTHER; note = 2'-O-methyl modified nucleotide
  modified_base 38: mod_base = OTHER; note = 2'-O-methyl modified nucleotide
  modified_base 39: mod_base = OTHER; note = 2'-O-methyl modified nucleotide
  modified_base 40: mod_base = OTHER; note = 2'-O-methyl modified nucleotide
  modified_base 41: mod_base = OTHER; note = 2'-O-methyl modified nucleotide
  modified_base 42: mod_base = OTHER; note = 2'-O-methyl modified nucleotide
  modified_base 43: mod_base = OTHER; note = 2'-O-methyl modified nucleotide
  modified_base 47: mod_base = OTHER; note = 2'-O-methyl modified nucleotide
  modified_base 48: mod_base = OTHER; note = 2'-O-methyl modified nucleotide
  modified_base 51: mod_base = OTHER; note = 2'-O-methyl modified nucleotide
  modified_base 54: mod_base = OTHER; note = nucleotide with phosphorothioate linkage
  modified_base 58: mod_base = OTHER; note = 2'-O-methyl modified nucleotide
  modified_base 59: mod_base = OTHER; note = 2'-O-methyl modified nucleotide
  modified_base 61: mod_base = OTHER; note = 2'-O-methyl modified nucleotide
  modified_base 62: mod_base = OTHER; note = 2'-O-methyl modified nucleotide
  modified_base 63: mod_base = OTHER; note = 2'-O-methyl modified nucleotide
  modified_base 64: mod_base = OTHER; note = 2'-O-methyl modified nucleotide
  modified_base 65: mod_base = OTHER; note = 2'-O-methyl modified nucleotide
  modified_base 66: mod_base = OTHER; note = 2'-O-methyl modified nucleotide
  modified_base 67: mod_base = OTHER; note = 2'-O-methyl modified nucleotide
  modified_base 68: mod_base = OTHER; note = 2'-O-methyl modified nucleotide
  modified_base 69: mod_base = OTHER; note = 2'-O-methyl modified nucleotide
  modified_base 70: mod_base = OTHER; note = 2'-O-methyl modified nucleotide
  modified_base 75: mod_base = OTHER; note = 2'-O-methyl modified nucleotide
  modified_base 77: mod_base = OTHER; note = 2'-O-methyl modified nucleotide
  modified_base 80: mod_base = OTHER; note = 2'-O-methyl modified nucleotide
  modified_base 86: mod_base = OTHER; note = 2'-O-methyl modified nucleotide
  modified_base 87: mod_base = OTHER; note = 2'-O-methyl modified nucleotide
  modified_base 89: mod_base = OTHER; note = 2'-O-methyl modified nucleotide
  modified_base 90: mod_base = OTHER; note = 2'-O-methyl modified nucleotide
  modified_base 91: mod_base = OTHER; note = 2'-O-methyl modified nucleotide
  modified_base 92: mod_base = OTHER; note = 2'-O-methyl modified nucleotide
  modified_base 99: mod_base = OTHER; note = nucleotide with phosphorothioate linkage
  modified_base 100: mod_base = OTHER; note = 2'-O-methyl modified nucleotide with phosphorothioate linkage
  modified_base 101: mod_base = OTHER; note = 2'-O-methyl modified nucleotide

SEQ ID NO: 2039 - RNA, 101 nt, synthetic construct; identical to SEQ ID NO: 1039
  source 1..101: mol_type = other RNA
  modified_base 1: mod_base = OTHER; note = 2'-O-methyl modified nucleotide with phosphorothioate linkage
  modified_base 2: mod_base = OTHER; note = 2'-O-methyl modified nucleotide with phosphorothioate linkage
  modified_base 3: mod_base = OTHER; note = 2'-O-methyl modified nucleotide with phosphorothioate linkage
  modified_base 4: mod_base = OTHER; note = 2'-O-methyl modified nucleotide
  modified_base 5: mod_base = OTHER; note = 2'-O-methyl modified nucleotide
  modified_base 8: mod_base = OTHER; note = 2'-O-methyl modified nucleotide
  modified_base 9: mod_base = OTHER; note = 2'-O-methyl modified nucleotide
  modified_base 11: mod_base = OTHER; note = 2'-O-methyl modified nucleotide
  modified_base 13: mod_base = OTHER; note = 2'-O-methyl modified nucleotide
  modified_base 18: mod_base = OTHER; note = 2'-O-methyl modified nucleotide
  modified_base 22: mod_base = OTHER; note = 2'-O-methyl modified nucleotide
  modified_base 25: mod_base = OTHER; note = 2'-O-methyl modified nucleotide
  modified_base 29: mod_base = OTHER; note = 2'-O-methyl modified nucleotide
  modified_base 30: mod_base = OTHER; note = 2'-O-methyl modified nucleotide
  modified_base 31: mod_base = OTHER; note = 2'-O-methyl modified nucleotide
  modified_base 32: mod_base = OTHER; note = 2'-O-methyl modified nucleotide
  modified_base 37: mod_base = OTHER; note = 2'-O-methyl modified nucleotide
  modified_base 38: mod_base = OTHER; note = 2'-O-methyl modified nucleotide
  modified_base 39: mod_base = OTHER; note = 2'-O-methyl modified nucleotide
  modified_base 40: mod_base = OTHER; note = 2'-O-methyl modified nucleotide
  modified_base 41: mod_base = OTHER; note = 2'-O-methyl modified nucleotide
  modified_base 42: mod_base = OTHER; note = 2'-O-methyl modified nucleotide
  modified_base 43: mod_base = OTHER; note = 2'-O-methyl modified nucleotide
  modified_base 47: mod_base = OTHER; note = 2'-O-methyl modified nucleotide
  modified_base 48: mod_base = OTHER; note = 2'-O-methyl modified nucleotide
  modified_base 51: mod_base = OTHER; note = 2'-O-methyl modified nucleotide
  modified_base 54: mod_base = OTHER; note = nucleotide with phosphorothioate linkage
  modified_base 58: mod_base = OTHER; note = 2'-O-methyl modified nucleotide
  modified_base 59: mod_base = OTHER; note = 2'-O-methyl modified nucleotide
  modified_base 61: mod_base = OTHER; note = 2'-O-methyl modified nucleotide
  modified_base 62: mod_base = OTHER; note = 2'-O-methyl modified nucleotide
  modified_base 63: mod_base = OTHER; note = 2'-O-methyl modified nucleotide
  modified_base 64: mod_base = OTHER; note = 2'-O-methyl modified nucleotide
  modified_base 65: mod_base = OTHER; note = 2'-O-methyl modified nucleotide
  modified_base 66: mod_base = OTHER; note = 2'-O-methyl modified nucleotide
  modified_base 67: mod_base = OTHER; note = 2'-O-methyl modified nucleotide
  modified_base 68: mod_base = OTHER; note = 2'-O-methyl modified nucleotide
  modified_base 69: mod_base = OTHER; note = 2'-O-methyl modified nucleotide
  modified_base 70: mod_base = OTHER; note = 2'-O-methyl modified nucleotide
  modified_base 75: mod_base = OTHER; note = 2'-O-methyl modified nucleotide
  modified_base 77: mod_base = OTHER; note = 2'-O-methyl modified nucleotide
  modified_base 80: mod_base = OTHER; note = 2'-O-methyl modified nucleotide
  modified_base 86: mod_base = OTHER; note = 2'-O-methyl modified nucleotide
  modified_base 87: mod_base = OTHER; note = 2'-O-methyl modified nucleotide
  modified_base 89: mod_base = OTHER; note = 2'-O-methyl modified nucleotide
  modified_base 90: mod_base = OTHER; note = 2'-O-methyl modified nucleotide
  modified_base 91: mod_base = OTHER; note = 2'-O-methyl modified nucleotide
  modified_base 92: mod_base = OTHER; note = 2'-O-methyl modified nucleotide
  modified_base 99: mod_base = OTHER; note = nucleotide with phosphorothioate linkage
  modified_base 100: mod_base = OTHER; note = 2'-O-methyl modified nucleotide with phosphorothioate linkage
  modified_base 101: mod_base = OTHER; note = 2'-O-methyl modified nucleotide

SEQ ID NO: 2040 - RNA, 101 nt, synthetic construct; identical to SEQ ID NO: 1040
  source 1..101: mol_type = other RNA
  modified_base 1: mod_base = OTHER; note = 2'-O-methyl modified nucleotide with phosphorothioate linkage
  modified_base 2: mod_base = OTHER; note = 2'-O-methyl modified nucleotide with phosphorothioate linkage
  modified_base 3: mod_base = OTHER; note = 2'-O-methyl modified nucleotide with phosphorothioate linkage
  modified_base 4: mod_base = OTHER; note = 2'-O-methyl modified nucleotide
  modified_base 5: mod_base = OTHER; note = 2'-O-methyl modified nucleotide
  modified_base 8: mod_base = OTHER; note = 2'-O-methyl modified nucleotide
  modified_base 9: mod_base = OTHER; note = 2'-O-methyl modified nucleotide
  modified_base 11: mod_base = OTHER; note = 2'-O-methyl modified nucleotide
  modified_base 13: mod_base = OTHER; note = 2'-O-methyl modified nucleotide
  modified_base 18: mod_base = OTHER; note = 2'-O-methyl modified nucleotide
  modified_base 22: mod_base = OTHER; note = 2'-O-methyl modified nucleotide
  modified_base 25: mod_base = OTHER; note = 2'-O-methyl modified nucleotide
  modified_base 29: mod_base = OTHER; note = 2'-O-methyl modified nucleotide
  modified_base 30: mod_base = OTHER; note = 2'-O-methyl modified nucleotide
  modified_base 31: mod_base = OTHER; note = 2'-O-methyl modified nucleotide
  modified_base 32: mod_base = OTHER; note = 2'-O-methyl modified nucleotide
  modified_base 37: mod_base = OTHER; note = 2'-O-methyl modified nucleotide
  modified_base 38: mod_base = OTHER; note = 2'-O-methyl modified nucleotide
  modified_base 39: mod_base = OTHER; note = 2'-O-methyl modified nucleotide
  modified_base 40: mod_base = OTHER; note = 2'-O-methyl modified nucleotide
  modified_base 41: mod_base = OTHER; note = 2'-O-methyl modified nucleotide
  modified_base 42: mod_base = OTHER; note = 2'-O-methyl modified nucleotide
  modified_base 43: mod_base = OTHER; note = 2'-O-methyl modified nucleotide
  modified_base 47: mod_base = OTHER; note = 2'-O-methyl modified nucleotide
  modified_base 48: mod_base = OTHER; note = 2'-O-methyl modified nucleotide
  modified_base 51: mod_base = OTHER; note = 2'-O-methyl modified nucleotide
  modified_base 54: mod_base = OTHER; note = nucleotide with phosphorothioate linkage
  modified_base 58: mod_base = OTHER; note = 2'-O-methyl modified nucleotide
  modified_base 59: mod_base = OTHER; note = 2'-O-methyl modified nucleotide
  modified_base 61: mod_base = OTHER; note = 2'-O-methyl modified nucleotide
  modified_base 62: mod_base = OTHER; note = 2'-O-methyl modified nucleotide
  modified_base 63: mod_base = OTHER; note = 2'-O-methyl modified nucleotide
  modified_base 64: mod_base = OTHER; note = 2'-O-methyl modified nucleotide
  modified_base 65: mod_base = OTHER; note = 2'-O-methyl modified nucleotide
  modified_base 66: mod_base = OTHER; note = 2'-O-methyl modified nucleotide
  modified_base 67: mod_base = OTHER; note = 2'-O-methyl modified nucleotide
  modified_base 68: mod_base = OTHER; note = 2'-O-methyl modified nucleotide
  modified_base 69: mod_base = OTHER; note = 2'-O-methyl modified nucleotide
  modified_base 70: mod_base = OTHER; note = 2'-O-methyl modified nucleotide
  modified_base 75: mod_base = OTHER; note = 2'-O-methyl modified nucleotide
  modified_base 77: mod_base = OTHER; note = 2'-O-methyl modified nucleotide
  modified_base 80: mod_base = OTHER; note = 2'-O-methyl modified nucleotide
  modified_base 86: mod_base = OTHER; note = 2'-O-methyl modified nucleotide
  modified_base 87: mod_base = OTHER; note = 2'-O-methyl modified nucleotide
  modified_base 89: mod_base = OTHER; note = 2'-O-methyl modified nucleotide
  modified_base 90: mod_base = OTHER; note = 2'-O-methyl modified nucleotide
  modified_base 91: mod_base = OTHER; note = 2'-O-methyl modified nucleotide
  modified_base 92: mod_base = OTHER; note = 2'-O-methyl modified nucleotide
  modified_base 99: mod_base = OTHER; note = nucleotide with phosphorothioate linkage
  modified_base 100: mod_base = OTHER; note = 2'-O-methyl modified nucleotide with phosphorothioate linkage
  modified_base 101: mod_base = OTHER; note = 2'-O-methyl modified nucleotide

SEQ ID NO: 2041 - RNA, 101 nt, synthetic construct; identical to SEQ ID NO: 1041
  source 1..101: mol_type = other RNA
  modified_base 1: mod_base = OTHER; note = 2'-O-methyl modified nucleotide with phosphorothioate linkage
  modified_base 2: mod_base = OTHER; note = 2'-O-methyl modified nucleotide with phosphorothioate linkage
  modified_base 3: mod_base = OTHER; note = 2'-O-methyl modified nucleotide with phosphorothioate linkage
  modified_base 4: mod_base = OTHER; note = 2'-O-methyl modified nucleotide
  modified_base 5: mod_base = OTHER; note = 2'-O-methyl modified nucleotide
  modified_base 8: mod_base = OTHER; note = 2'-O-methyl modified nucleotide
  modified_base 9: mod_base = OTHER; note = 2'-O-methyl modified nucleotide
  modified_base 11: mod_base = OTHER; note = 2'-O-methyl modified nucleotide
  modified_base 13: mod_base = OTHER; note = 2'-O-methyl modified nucleotide
  modified_base 18: mod_base = OTHER; note = 2'-O-methyl modified nucleotide
  modified_base 22: mod_base = OTHER; note = 2'-O-methyl modified nucleotide
  modified_base 25: mod_base = OTHER; note = 2'-O-methyl modified nucleotide
  modified_base 29: mod_base = OTHER; note = 2'-O-methyl modified nucleotide
  modified_base 30: mod_base = OTHER; note = 2'-O-methyl modified nucleotide
  modified_base 31: mod_base = OTHER; note = 2'-O-methyl modified nucleotide
  modified_base 32: mod_base = OTHER; note = 2'-O-methyl modified nucleotide
  modified_base 37: mod_base = OTHER; note = 2'-O-methyl modified nucleotide
  modified_base 38: mod_base = OTHER; note = 2'-O-methyl modified nucleotide
  modified_base 39: mod_base = OTHER; note = 2'-O-methyl modified nucleotide
  modified_base 40: mod_base = OTHER; note = 2'-O-methyl modified nucleotide
  modified_base 41: mod_base = OTHER; note = 2'-O-methyl modified nucleotide
  modified_base 42: mod_base = OTHER; note = 2'-O-methyl modified nucleotide
  modified_base 43: mod_base = OTHER; note = 2'-O-methyl modified nucleotide
  modified_base 47: mod_base = OTHER; note = 2'-O-methyl modified nucleotide
  modified_base 48: mod_base = OTHER; note = 2'-O-methyl modified nucleotide
  modified_base 51: mod_base = OTHER; note = 2'-O-methyl modified nucleotide
  modified_base 54: mod_base = OTHER; note = nucleotide with phosphorothioate linkage
  modified_base 58: mod_base = OTHER; note = 2'-O-methyl modified nucleotide
  modified_base 59: mod_base = OTHER; note = 2'-O-methyl modified nucleotide
  modified_base 61: mod_base = OTHER; note = 2'-O-methyl modified nucleotide
  modified_base 62: mod_base = OTHER; note = 2'-O-methyl modified nucleotide
  modified_base 63: mod_base = OTHER; note = 2'-O-methyl modified nucleotide
  modified_base 64: mod_base = OTHER; note = 2'-O-methyl modified nucleotide
  modified_base 65: mod_base = OTHER; note = 2'-O-methyl modified nucleotide
  modified_base 66: mod_base = OTHER; note = 2'-O-methyl modified nucleotide
  modified_base 67: mod_base = OTHER; note = 2'-O-methyl modified nucleotide
  modified_base 68: mod_base = OTHER; note = 2'-O-methyl modified nucleotide
  modified_base 69: mod_base = OTHER; note = 2'-O-methyl modified nucleotide
  modified_base 70: mod_base = OTHER; note = 2'-O-methyl modified nucleotide
  modified_base 75: mod_base = OTHER; note = 2'-O-methyl modified nucleotide
  modified_base 77: mod_base = OTHER; note = 2'-O-methyl modified nucleotide
  modified_base 80: mod_base = OTHER; note = 2'-O-methyl modified nucleotide
  modified_base 86: mod_base = OTHER; note = 2'-O-methyl modified nucleotide
  modified_base 87: mod_base = OTHER; note = 2'-O-methyl modified nucleotide
  modified_base 89: mod_base = OTHER; note = 2'-O-methyl modified nucleotide
  modified_base 90: mod_base = OTHER; note = 2'-O-methyl modified nucleotide
  modified_base 91: mod_base = OTHER; note = 2'-O-methyl modified nucleotide
  modified_base 92: mod_base = OTHER; note = 2'-O-methyl modified nucleotide
  modified_base 99: mod_base = OTHER; note = nucleotide with phosphorothioate linkage
  modified_base 100: mod_base = OTHER; note = 2'-O-methyl modified nucleotide with phosphorothioate linkage
  modified_base 101: mod_base = OTHER; note = 2'-O-methyl modified nucleotide

SEQ ID NO: 2042 - RNA, 101 nt, synthetic construct; identical to SEQ ID NO: 1042
  source 1..101: mol_type = other RNA
  modified_base 1: mod_base = OTHER; note = 2'-O-methyl modified nucleotide with phosphorothioate linkage
  modified_base 2: mod_base = OTHER; note = 2'-O-methyl modified nucleotide with phosphorothioate linkage
  modified_base 3: mod_base = OTHER; note = 2'-O-methyl modified nucleotide with phosphorothioate linkage
  modified_base 4: mod_base = OTHER; note = 2'-O-methyl modified nucleotide
  modified_base 5: mod_base = OTHER; note = 2'-O-methyl modified nucleotide
  modified_base 8: mod_base = OTHER; note = 2'-O-methyl modified nucleotide
  modified_base 9: mod_base = OTHER; note = 2'-O-methyl modified nucleotide
  modified_base 11: mod_base = OTHER; note = 2'-O-methyl modified nucleotide
  modified_base 13: mod_base = OTHER; note = 2'-O-methyl modified nucleotide
  modified_base 18: mod_base = OTHER; note = 2'-O-methyl modified nucleotide
  modified_base 22: mod_base = OTHER; note = 2'-O-methyl modified nucleotide
  modified_base 25: mod_base = OTHER; note = 2'-O-methyl modified nucleotide
  modified_base 29: mod_base = OTHER; note = 2'-O-methyl modified nucleotide
  modified_base 30: mod_base = OTHER; note = 2'-O-methyl modified nucleotide
  modified_base 31: mod_base = OTHER; note = 2'-O-methyl modified nucleotide
  modified_base 32: mod_base = OTHER; note = 2'-O-methyl modified nucleotide
  modified_base 37: mod_base = OTHER; note = 2'-O-methyl modified nucleotide
  modified_base 38: mod_base = OTHER; note = 2'-O-methyl modified nucleotide
  modified_base 39: mod_base = OTHER; note = 2'-O-methyl modified nucleotide
  modified_base 40: mod_base = OTHER; note = 2'-O-methyl modified nucleotide
  modified_base 41: mod_base = OTHER; note = 2'-O-methyl modified nucleotide
  modified_base 42: mod_base = OTHER; note = 2'-O-methyl modified nucleotide
  modified_base 43: mod_base = OTHER; note = 2'-O-methyl modified nucleotide
  modified_base 47: mod_base = OTHER; note = 2'-O-methyl modified nucleotide
  modified_base 48: mod_base = OTHER; note = 2'-O-methyl modified nucleotide
  modified_base 51: mod_base = OTHER; note = 2'-O-methyl modified nucleotide
  modified_base 54: mod_base = OTHER; note = nucleotide with phosphorothioate linkage
  modified_base 58: mod_base = OTHER; note = 2'-O-methyl modified nucleotide
  modified_base 59: mod_base = OTHER; note = 2'-O-methyl modified nucleotide
  modified_base 61: mod_base = OTHER; note = 2'-O-methyl modified nucleotide
  modified_base 62: mod_base = OTHER; note = 2'-O-methyl modified nucleotide
  modified_base 63: mod_base = OTHER; note = 2'-O-methyl modified nucleotide
  modified_base 64: mod_base = OTHER; note = 2'-O-methyl modified nucleotide
  modified_base 65: mod_base = OTHER; note = 2'-O-methyl modified nucleotide
  modified_base 66: mod_base = OTHER; note = 2'-O-methyl modified nucleotide
  modified_base 67: mod_base = OTHER; note = 2'-O-methyl modified nucleotide
  modified_base 68: mod_base = OTHER; note = 2'-O-methyl modified nucleotide
  modified_base 69: mod_base = OTHER; note = 2'-O-methyl modified nucleotide
  modified_base 70: mod_base = OTHER; note = 2'-O-methyl modified nucleotide
  modified_base 75: mod_base = OTHER; note = 2'-O-methyl modified nucleotide
  modified_base 77: mod_base = OTHER; note = 2'-O-methyl modified nucleotide
  modified_base 80: mod_base = OTHER; note = 2'-O-methyl modified nucleotide
  modified_base 86: mod_base = OTHER; note = 2'-O-methyl modified nucleotide
  modified_base 87: mod_base = OTHER; note = 2'-O-methyl modified nucleotide
  modified_base 89: mod_base = OTHER; note = 2'-O-methyl modified nucleotide
  modified_base 90: mod_base = OTHER; note = 2'-O-methyl modified nucleotide
  modified_base 91: mod_base = OTHER; note = 2'-O-methyl modified nucleotide
  modified_base 92: mod_base = OTHER; note = 2'-O-methyl modified nucleotide
  modified_base 99: mod_base = OTHER; note = nucleotide with phosphorothioate linkage
  modified_base 100: mod_base = OTHER; note = 2'-O-methyl modified nucleotide with phosphorothioate linkage
  modified_base 101: mod_base = OTHER; note = 2'-O-methyl modified nucleotide

SEQ ID NO: 2043 - RNA, 101 nt, synthetic construct; identical to SEQ ID NO: 1043
  source 1..101: mol_type = other RNA
  modified_base 1: mod_base = OTHER; note = 2'-O-methyl modified nucleotide with phosphorothioate linkage
  modified_base 2: mod_base = OTHER; note = 2'-O-methyl modified nucleotide with phosphorothioate linkage
  modified_base 3: mod_base = OTHER; note = 2'-O-methyl modified nucleotide with phosphorothioate linkage
  modified_base 4: mod_base = OTHER; note = 2'-O-methyl modified nucleotide
  modified_base 5: mod_base = OTHER; note = 2'-O-methyl modified nucleotide
  modified_base 8: mod_base = OTHER; note = 2'-O-methyl modified nucleotide
  modified_base 9: mod_base = OTHER; note = 2'-O-methyl modified nucleotide
  modified_base 11: mod_base = OTHER; note = 2'-O-methyl modified nucleotide
  modified_base 13: mod_base = OTHER; note = 2'-O-methyl modified nucleotide
  modified_base 18: mod_base = OTHER; note = 2'-O-methyl modified nucleotide
  modified_base 22: mod_base = OTHER; note = 2'-O-methyl modified nucleotide
  modified_base 25: mod_base = OTHER; note = 2'-O-methyl modified nucleotide
  modified_base 29: mod_base = OTHER; note = 2'-O-methyl modified nucleotide
  modified_base 30: mod_base = OTHER; note = 2'-O-methyl modified nucleotide
  modified_base 31: mod_base = OTHER; note = 2'-O-methyl modified nucleotide
  modified_base 32: mod_base = OTHER; note = 2'-O-methyl modified nucleotide
  modified_base 37: mod_base = OTHER; note = 2'-O-methyl modified nucleotide
  modified_base 38: mod_base = OTHER; note = 2'-O-methyl modified nucleotide
  modified_base 39: mod_base = OTHER; note = 2'-O-methyl modified nucleotide
  modified_base 40: mod_base = OTHER; note = 2'-O-methyl modified nucleotide
  modified_base 41: mod_base = OTHER; note = 2'-O-methyl modified nucleotide
  modified_base 42: mod_base = OTHER; note = 2'-O-methyl modified nucleotide
  modified_base 43: mod_base = OTHER; note = 2'-O-methyl modified nucleotide
  modified_base 47: mod_base = OTHER; note = 2'-O-methyl modified nucleotide
  modified_base 48: mod_base = OTHER; note = 2'-O-methyl modified nucleotide
  modified_base 51: mod_base = OTHER; note = 2'-O-methyl modified nucleotide
  modified_base 54: mod_base = OTHER; note = nucleotide with phosphorothioate linkage
  modified_base 58: mod_base = OTHER; note = 2'-O-methyl modified nucleotide
  modified_base 59: mod_base = OTHER; note = 2'-O-methyl modified nucleotide
  modified_base 61: mod_base = OTHER; note = 2'-O-methyl modified nucleotide
  modified_base 62: mod_base = OTHER; note = 2'-O-methyl modified nucleotide
  modified_base 63: mod_base = OTHER; note = 2'-O-methyl modified nucleotide
  modified_base 64: mod_base = OTHER; note = 2'-O-methyl modified nucleotide
  modified_base 65: mod_base = OTHER; note = 2'-O-methyl modified nucleotide
  modified_base 66: mod_base = OTHER; note = 2'-O-methyl modified nucleotide
  modified_base 67: mod_base = OTHER; note = 2'-O-methyl modified nucleotide
  modified_base 68: mod_base = OTHER; note = 2'-O-methyl modified nucleotide
  modified_base 69: mod_base = OTHER; note = 2'-O-methyl modified nucleotide
  modified_base 70: mod_base = OTHER; note = 2'-O-methyl modified nucleotide
  modified_base 75: mod_base = OTHER; note = 2'-O-methyl modified nucleotide
  modified_base 77: mod_base = OTHER; note = 2'-O-methyl modified nucleotide
  modified_base 80: mod_base = OTHER; note = 2'-O-methyl modified nucleotide
  modified_base 86: mod_base = OTHER; note = 2'-O-methyl modified nucleotide
  modified_base 87: mod_base = OTHER; note = 2'-O-methyl modified nucleotide
  modified_base 89: mod_base = OTHER; note = 2'-O-methyl modified nucleotide
  modified_base 90: mod_base = OTHER; note = 2'-O-methyl modified nucleotide
  modified_base 91: mod_base = OTHER; note = 2'-O-methyl modified nucleotide
  modified_base 92: mod_base = OTHER; note = 2'-O-methyl modified nucleotide
  modified_base 99: mod_base = OTHER; note = nucleotide with phosphorothioate linkage
  modified_base 100: mod_base = OTHER; note = 2'-O-methyl modified nucleotide with phosphorothioate linkage
  modified_base 101: mod_base = OTHER; note = 2'-O-methyl modified nucleotide

SEQ ID NO: 2044 - RNA, 101 nt, synthetic construct; identical to SEQ ID NO: 1044
  source 1..101: mol_type = other RNA
  modified_base 1: mod_base = OTHER; note = 2'-O-methyl modified nucleotide with phosphorothioate linkage
  modified_base 2: mod_base = OTHER; note = 2'-O-methyl modified nucleotide with phosphorothioate linkage
  modified_base 3: mod_base = OTHER; note = 2'-O-methyl modified nucleotide with phosphorothioate linkage
  modified_base 4: mod_base = OTHER; note = 2'-O-methyl modified nucleotide
  modified_base 5: mod_base = OTHER; note = 2'-O-methyl modified nucleotide
  modified_base 8: mod_base = OTHER; note = 2'-O-methyl modified nucleotide
  modified_base 9: mod_base = OTHER; note = 2'-O-methyl modified nucleotide
  modified_base 11: mod_base = OTHER; note = 2'-O-methyl modified nucleotide
  modified_base 13: mod_base = OTHER; note = 2'-O-methyl modified nucleotide
  modified_base 18: mod_base = OTHER; note = 2'-O-methyl modified nucleotide
  modified_base 22: mod_base = OTHER; note = 2'-O-methyl modified nucleotide
  modified_base 25: mod_base = OTHER; note = 2'-O-methyl modified nucleotide
  modified_base 29: mod_base = OTHER; note = 2'-O-methyl modified nucleotide
  modified_base 30: mod_base = OTHER; note = 2'-O-methyl modified nucleotide
  modified_base 31: mod_base = OTHER; note = 2'-O-methyl modified nucleotide
  modified_base 32: mod_base = OTHER; note = 2'-O-methyl modified nucleotide
  modified_base 37: mod_base = OTHER; note = 2'-O-methyl modified nucleotide
  modified_base 38: mod_base = OTHER; note = 2'-O-methyl modified nucleotide
  modified_base 39: mod_base = OTHER; note = 2'-O-methyl modified nucleotide
  modified_base 40: mod_base = OTHER; note = 2'-O-methyl modified nucleotide
  modified_base 41: mod_base = OTHER; note = 2'-O-methyl modified nucleotide
  modified_base 42: mod_base = OTHER; note = 2'-O-methyl modified nucleotide
  modified_base 43: mod_base = OTHER; note = 2'-O-methyl modified nucleotide
  modified_base 47: mod_base = OTHER; note = 2'-O-methyl modified nucleotide
  modified_base 48: mod_base = OTHER; note = 2'-O-methyl modified nucleotide
  modified_base 51: mod_base = OTHER; note = 2'-O-methyl modified nucleotide
  modified_base 54: mod_base = OTHER; note = nucleotide with phosphorothioate linkage
  modified_base 58: mod_base = OTHER; note = 2'-O-methyl modified nucleotide
  modified_base 59: mod_base = OTHER; note = 2'-O-methyl modified nucleotide
  modified_base 61: mod_base = OTHER; note = 2'-O-methyl modified nucleotide
  modified_base 62: mod_base = OTHER; note = 2'-O-methyl modified nucleotide
  modified_base 63: mod_base = OTHER; note = 2'-O-methyl modified nucleotide
  modified_base 64: mod_base = OTHER; note = 2'-O-methyl modified nucleotide
  modified_base 65: mod_base = OTHER; note = 2'-O-methyl modified nucleotide
  modified_base 66: mod_base = OTHER; note = 2'-O-methyl modified nucleotide
  modified_base 67: mod_base = OTHER; note = 2'-O-methyl modified nucleotide
  modified_base 68: mod_base = OTHER; note = 2'-O-methyl modified nucleotide
  modified_base 69: mod_base = OTHER; note = 2'-O-methyl modified nucleotide
  modified_base 70: mod_base = OTHER; note = 2'-O-methyl modified nucleotide
  modified_base 75: mod_base = OTHER; note = 2'-O-methyl modified nucleotide
  modified_base 77: mod_base = OTHER; note = 2'-O-methyl modified nucleotide
  modified_base 80: mod_base = OTHER; note = 2'-O-methyl modified nucleotide
  modified_base 86: mod_base = OTHER; note = 2'-O-methyl modified nucleotide
  modified_base 87: mod_base = OTHER; note = 2'-O-methyl modified nucleotide
  modified_base 89: mod_base = OTHER; note = 2'-O-methyl modified nucleotide
  modified_base 90: mod_base = OTHER; note = 2'-O-methyl modified nucleotide
  modified_base 91: mod_base = OTHER; note = 2'-O-methyl modified nucleotide
  modified_base 92: mod_base = OTHER; note = 2'-O-methyl modified nucleotide
  modified_base 99: mod_base = OTHER; note = nucleotide with phosphorothioate linkage
  modified_base 100: mod_base = OTHER; note = 2'-O-methyl modified nucleotide with phosphorothioate linkage
  modified_base 101: mod_base = OTHER; note = 2'-O-methyl modified nucleotide

SEQ ID NO: 2045 - RNA, 101 nt, synthetic construct; identical to SEQ ID NO: 1045
  source 1..101: mol_type = other RNA
  modified_base 1: mod_base = OTHER; note = 2'-O-methyl modified nucleotide with phosphorothioate linkage
  modified_base 2: mod_base = OTHER; note = 2'-O-methyl modified nucleotide with phosphorothioate linkage
  modified_base 3: mod_base = OTHER; note = 2'-O-methyl modified nucleotide with phosphorothioate linkage
  modified_base 4: mod_base = OTHER; note = 2'-O-methyl modified nucleotide
  modified_base 5: mod_base = OTHER; note = 2'-O-methyl modified nucleotide
  modified_base 8: mod_base = OTHER; note = 2'-O-methyl modified nucleotide
  modified_base 9: mod_base = OTHER; note = 2'-O-methyl modified nucleotide
  modified_base 11: mod_base = OTHER; note = 2'-O-methyl modified nucleotide
  modified_base 13: mod_base = OTHER; note = 2'-O-methyl modified nucleotide
  modified_base 18: mod_base = OTHER; note = 2'-O-methyl modified nucleotide
  modified_base 22: mod_base = OTHER; note = 2'-O-methyl modified nucleotide
  modified_base 25: mod_base = OTHER; note = 2'-O-methyl modified nucleotide
  modified_base 29: mod_base = OTHER; note = 2'-O-methyl modified nucleotide
  modified_base 30: mod_base = OTHER; note = 2'-O-methyl modified nucleotide
  modified_base 31: mod_base = OTHER; note = 2'-O-methyl modified nucleotide
  modified_base 32: mod_base = OTHER; note = 2'-O-methyl modified nucleotide
  modified_base 37: mod_base = OTHER; note = 2'-O-methyl modified nucleotide
  modified_base 38: mod_base = OTHER; note = 2'-O-methyl modified nucleotide
  modified_base 39: mod_base = OTHER; note = 2'-O-methyl modified nucleotide
  modified_base 40: mod_base = OTHER; note = 2'-O-methyl modified nucleotide
  modified_base 41: mod_base = OTHER; note = 2'-O-methyl modified nucleotide
  modified_base 42: mod_base = OTHER; note = 2'-O-methyl modified nucleotide
  modified_base 43: mod_base = OTHER; note = 2'-O-methyl modified nucleotide
  modified_base 47: mod_base = OTHER; note = 2'-O-methyl modified nucleotide
  modified_base 48: mod_base = OTHER; note = 2'-O-methyl modified nucleotide
  modified_base 51: mod_base = OTHER; note = 2'-O-methyl modified nucleotide
  modified_base 54: mod_base = OTHER; note = nucleotide with phosphorothioate linkage
  modified_base 58: mod_base = OTHER; note = 2'-O-methyl modified nucleotide
  modified_base 59: mod_base = OTHER; note = 2'-O-methyl modified nucleotide
  modified_base 61: mod_base = OTHER; note = 2'-O-methyl modified nucleotide
  modified_base 62: mod_base = OTHER; note = 2'-O-methyl modified nucleotide
  modified_base 63: mod_base = OTHER; note = 2'-O-methyl modified nucleotide
  modified_base 64: mod_base = OTHER; note = 2'-O-methyl modified nucleotide
  modified_base 65: mod_base = OTHER; note = 2'-O-methyl modified nucleotide
  modified_base 66: mod_base = OTHER; note = 2'-O-methyl modified nucleotide
  modified_base 67: mod_base = OTHER; note = 2'-O-methyl modified nucleotide
  modified_base 68: mod_base = OTHER; note = 2'-O-methyl modified nucleotide
  modified_base 69: mod_base = OTHER; note = 2'-O-methyl modified nucleotide
  modified_base 70: mod_base = OTHER; note = 2'-O-methyl modified nucleotide
  modified_base 75: mod_base = OTHER; note = 2'-O-methyl modified nucleotide
  modified_base 77: mod_base = OTHER; note = 2'-O-methyl modified nucleotide
  modified_base 80: mod_base = OTHER; note = 2'-O-methyl modified nucleotide
  modified_base 86: mod_base = OTHER; note = 2'-O-methyl modified nucleotide
  modified_base 87: mod_base = OTHER; note = 2'-O-methyl modified nucleotide
  modified_base 89: mod_base = OTHER; note = 2'-O-methyl modified nucleotide
  modified_base 90: mod_base = OTHER; note = 2'-O-methyl modified nucleotide
  modified_base 91: mod_base = OTHER; note = 2'-O-methyl modified nucleotide
  modified_base 92: mod_base = OTHER; note = 2'-O-methyl modified nucleotide
  modified_base 99: mod_base = OTHER; note = nucleotide with phosphorothioate linkage
  modified_base 100: mod_base = OTHER; note = 2'-O-methyl modified nucleotide with phosphorothioate linkage
  modified_base 101: mod_base = OTHER; note = 2'-O-methyl modified nucleotide

SEQ ID NO: 2046 - RNA, 101 nt, synthetic construct; identical to SEQ ID NO: 1046
  source 1..101: mol_type = other RNA
  modified_base 1: mod_base = OTHER; note = 2'-O-methyl modified nucleotide with phosphorothioate linkage
  modified_base 2: mod_base = OTHER; note = 2'-O-methyl modified nucleotide with phosphorothioate linkage
  modified_base 3: mod_base = OTHER; note = 2'-O-methyl modified nucleotide with phosphorothioate linkage
  modified_base 4: mod_base = OTHER; note = 2'-O-methyl modified nucleotide
  modified_base 5: mod_base = OTHER; note = 2'-O-methyl modified nucleotide
  modified_base 8: mod_base = OTHER; note = 2'-O-methyl modified nucleotide
  modified_base 9: mod_base = OTHER; note = 2'-O-methyl modified nucleotide
  modified_base 11: mod_base = OTHER; note = 2'-O-methyl modified nucleotide
  modified_base 13: mod_base = OTHER; note = 2'-O-methyl modified nucleotide
  modified_base 18: mod_base = OTHER; note = 2'-O-methyl modified nucleotide
  modified_base 22: mod_base = OTHER; note = 2'-O-methyl modified nucleotide
  modified_base 25: mod_base = OTHER; note = 2'-O-methyl modified nucleotide
  modified_base 29: mod_base = OTHER; note = 2'-O-methyl modified nucleotide
  modified_base 30: mod_base = OTHER; note = 2'-O-methyl modified nucleotide
  modified_base 31: mod_base = OTHER; note = 2'-O-methyl modified nucleotide
  modified_base 32: mod_base = OTHER; note = 2'-O-methyl modified nucleotide
  modified_base 37: mod_base = OTHER; note = 2'-O-methyl modified nucleotide
  modified_base 38: mod_base = OTHER; note = 2'-O-methyl modified nucleotide
  modified_base 39: mod_base = OTHER; note = 2'-O-methyl modified nucleotide
  modified_base 40: mod_base = OTHER; note = 2'-O-methyl modified nucleotide
  modified_base 41: mod_base = OTHER; note = 2'-O-methyl modified nucleotide
  modified_base 42: mod_base = OTHER; note = 2'-O-methyl modified nucleotide
  modified_base 43: mod_base = OTHER; note = 2'-O-methyl modified nucleotide
  modified_base 47: mod_base = OTHER; note = 2'-O-methyl modified nucleotide
  modified_base 48: mod_base = OTHER; note = 2'-O-methyl modified nucleotide
  modified_base 51: mod_base = OTHER; note = 2'-O-methyl modified nucleotide
  modified_base 54: mod_base = OTHER; note = nucleotide with phosphorothioate linkage
  modified_base 58: mod_base = OTHER; note = 2'-O-methyl modified nucleotide
  modified_base 59: mod_base = OTHER; note = 2'-O-methyl modified nucleotide
  modified_base 61: mod_base = OTHER; note = 2'-O-methyl modified nucleotide
  modified_base 62: mod_base = OTHER; note = 2'-O-methyl modified nucleotide
  modified_base 63: mod_base = OTHER; note = 2'-O-methyl modified nucleotide
  modified_base 64: mod_base = OTHER; note = 2'-O-methyl modified nucleotide
  modified_base 65: mod_base = OTHER; note = 2'-O-methyl modified nucleotide
  modified_base 66: mod_base = OTHER; note = 2'-O-methyl modified nucleotide
  modified_base 67: mod_base = OTHER; note = 2'-O-methyl modified nucleotide
  modified_base 68: mod_base = OTHER; note = 2'-O-methyl modified nucleotide
  modified_base 69: mod_base = OTHER; note = 2'-O-methyl modified nucleotide
  modified_base 70: mod_base = OTHER; note = 2'-O-methyl modified nucleotide
  modified_base 75: mod_base = OTHER; note = 2'-O-methyl modified nucleotide
  modified_base 77: mod_base = OTHER; note = 2'-O-methyl modified nucleotide
  modified_base 80: mod_base = OTHER; note = 2'-O-methyl modified nucleotide
  modified_base 86: mod_base = OTHER; note = 2'-O-methyl modified nucleotide
  modified_base 87: mod_base = OTHER; note = 2'-O-methyl modified nucleotide
  modified_base 89: mod_base = OTHER; note = 2'-O-methyl modified nucleotide
  modified_base 90: mod_base = OTHER; note = 2'-O-methyl modified nucleotide
  modified_base 91: mod_base = OTHER; note = 2'-O-methyl modified nucleotide
  modified_base 92: mod_base = OTHER; note = 2'-O-methyl modified nucleotide
  modified_base 99: mod_base = OTHER; note = nucleotide with phosphorothioate linkage
  modified_base 100: mod_base = OTHER; note = 2'-O-methyl modified nucleotide with phosphorothioate linkage
  modified_base 101: mod_base = OTHER; note = 2'-O-methyl modified nucleotide

SEQ ID NO: 2047 - RNA, 101 nt, synthetic construct; identical to SEQ ID NO: 1047
  source 1..101: mol_type = other RNA
  modified_base 1: mod_base = OTHER; note = 2'-O-methyl modified nucleotide with phosphorothioate linkage
  modified_base 2: mod_base = OTHER; note = 2'-O-methyl modified nucleotide with phosphorothioate linkage
  modified_base 3: mod_base = OTHER; note = 2'-O-methyl modified nucleotide with phosphorothioate linkage
  modified_base 4: mod_base = OTHER; note = 2'-O-methyl modified nucleotide
  modified_base 5: mod_base = OTHER; note = 2'-O-methyl modified nucleotide
  modified_base 8: mod_base = OTHER; note = 2'-O-methyl modified nucleotide
  modified_base 9: mod_base = OTHER; note = 2'-O-methyl modified nucleotide
  modified_base 11: mod_base = OTHER; note = 2'-O-methyl modified nucleotide
  modified_base 13: mod_base = OTHER; note = 2'-O-methyl modified nucleotide
  modified_base 18: mod_base = OTHER; note = 2'-O-methyl modified nucleotide
  modified_base 22: mod_base = OTHER; note = 2'-O-methyl modified nucleotide
  modified_base 25: mod_base = OTHER; note = 2'-O-methyl modified nucleotide
  modified_base 29: mod_base = OTHER; note = 2'-O-methyl modified nucleotide
  modified_base 30: mod_base = OTHER; note = 2'-O-methyl modified nucleotide
  modified_base 31: mod_base = OTHER; note = 2'-O-methyl modified nucleotide
  modified_base 32: mod_base = OTHER; note = 2'-O-methyl modified nucleotide
  modified_base 37: mod_base = OTHER; note = 2'-O-methyl modified nucleotide
  modified_base 38: mod_base = OTHER; note = 2'-O-methyl modified nucleotide
  modified_base 39: mod_base = OTHER; note = 2'-O-methyl modified nucleotide
  modified_base 40: mod_base = OTHER; note = 2'-O-methyl modified nucleotide
  modified_base 41: mod_base = OTHER; note = 2'-O-methyl modified nucleotide
  modified_base 42: mod_base = OTHER; note = 2'-O-methyl modified nucleotide
  modified_base 43: mod_base = OTHER; note = 2'-O-methyl modified nucleotide
  modified_base 47: mod_base = OTHER; note = 2'-O-methyl modified nucleotide
  modified_base 48: mod_base = OTHER; note = 2'-O-methyl modified nucleotide
  modified_base 51: mod_base = OTHER; note = 2'-O-methyl modified nucleotide
  modified_base 54: mod_base = OTHER; note = nucleotide with phosphorothioate linkage
  modified_base 58: mod_base = OTHER; note = 2'-O-methyl modified nucleotide
  modified_base 59: mod_base = OTHER; note = 2'-O-methyl modified nucleotide
  modified_base 61: mod_base = OTHER; note = 2'-O-methyl modified nucleotide
  modified_base 62: mod_base = OTHER; note = 2'-O-methyl modified nucleotide
  modified_base 63: mod_base = OTHER; note = 2'-O-methyl modified nucleotide
  modified_base 64: mod_base = OTHER; note = 2'-O-methyl modified nucleotide
  modified_base 65: mod_base = OTHER; note = 2'-O-methyl modified nucleotide
  modified_base 66: mod_base = OTHER; note = 2'-O-methyl modified nucleotide
  modified_base 67: mod_base = OTHER; note = 2'-O-methyl modified nucleotide
  modified_base 68: mod_base = OTHER; note = 2'-O-methyl modified nucleotide
  modified_base 69: mod_base = OTHER; note = 2'-O-methyl modified nucleotide
  modified_base 70: mod_base = OTHER; note = 2'-O-methyl modified nucleotide
  modified_base 75: mod_base = OTHER; note = 2'-O-methyl modified nucleotide
  modified_base 77: mod_base = OTHER; note = 2'-O-methyl modified nucleotide
  modified_base 80: mod_base = OTHER; note = 2'-O-methyl modified nucleotide
  modified_base 86: mod_base = OTHER; note = 2'-O-methyl modified nucleotide
  modified_base 87: mod_base = OTHER; note = 2'-O-methyl modified nucleotide
  modified_base 89: mod_base = OTHER; note = 2'-O-methyl modified nucleotide
  modified_base 90: mod_base = OTHER; note = 2'-O-methyl modified nucleotide
  modified_base 91: mod_base = OTHER; note = 2'-O-methyl modified nucleotide
  modified_base 92: mod_base = OTHER; note = 2'-O-methyl modified nucleotide
  modified_base 99: mod_base = OTHER; note = nucleotide with phosphorothioate linkage
  modified_base 100: mod_base = OTHER; note = 2'-O-methyl modified nucleotide with phosphorothioate linkage
  modified_base 101: mod_base = OTHER; note = 2'-O-methyl modified nucleotide

SEQ ID NO: 2048 - RNA, 101 nt, synthetic construct; identical to SEQ ID NO: 1048
  source 1..101: mol_type = other RNA
  modified_base 1: mod_base = OTHER; note = 2'-O-methyl modified nucleotide with phosphorothioate linkage
  modified_base 2: mod_base = OTHER; note = 2'-O-methyl modified nucleotide with phosphorothioate linkage
  modified_base 3: mod_base = OTHER; note = 2'-O-methyl modified nucleotide with phosphorothioate linkage
  modified_base 4: mod_base = OTHER; note = 2'-O-methyl modified nucleotide
  modified_base 5: mod_base = OTHER; note = 2'-O-methyl modified nucleotide
  modified_base 8: mod_base = OTHER; note = 2'-O-methyl modified nucleotide
  modified_base 9: mod_base = OTHER; note = 2'-O-methyl modified nucleotide
  modified_base 11: mod_base = OTHER; note = 2'-O-methyl modified nucleotide
  modified_base 13: mod_base = OTHER; note = 2'-O-methyl modified nucleotide
  modified_base 18: mod_base = OTHER; note = 2'-O-methyl modified nucleotide
  modified_base 22: mod_base = OTHER; note = 2'-O-methyl modified nucleotide
  modified_base 25: mod_base = OTHER; note = 2'-O-methyl modified nucleotide
  modified_base 29: mod_base = OTHER; note = 2'-O-methyl modified nucleotide
  modified_base 30: mod_base = OTHER; note = 2'-O-methyl modified nucleotide
  modified_base 31: mod_base = OTHER; note = 2'-O-methyl modified nucleotide
  modified_base 32: mod_base = OTHER; note = 2'-O-methyl modified nucleotide
  modified_base 37: mod_base = OTHER; note = 2'-O-methyl modified nucleotide
  modified_base 38: mod_base = OTHER; note = 2'-O-methyl modified nucleotide
  modified_base 39: mod_base = OTHER; note = 2'-O-methyl modified nucleotide
  modified_base 40: mod_base = OTHER; note = 2'-O-methyl modified nucleotide
  modified_base 41: mod_base = OTHER; note = 2'-O-methyl modified nucleotide
  modified_base 42: mod_base = OTHER; note = 2'-O-methyl modified nucleotide
  modified_base 43: mod_base = OTHER; note = 2'-O-methyl modified nucleotide
  modified_base 47: mod_base = OTHER; note = 2'-O-methyl modified nucleotide
  modified_base 48: mod_base = OTHER; note = 2'-O-methyl modified nucleotide
  modified_base 51: mod_base = OTHER; note = 2'-O-methyl modified nucleotide
  modified_base 54: mod_base = OTHER; note = nucleotide with phosphorothioate linkage
  modified_base 58: mod_base = OTHER; note = 2'-O-methyl modified nucleotide
  modified_base 59: mod_base = OTHER; note = 2'-O-methyl modified nucleotide
  modified_base 61: mod_base = OTHER; note = 2'-O-methyl modified nucleotide
  modified_base 62: mod_base = OTHER; note = 2'-O-methyl modified nucleotide
  modified_base 63: mod_base = OTHER; note = 2'-O-methyl modified nucleotide
  modified_base 64: mod_base = OTHER; note = 2'-O-methyl modified nucleotide
  modified_base 65: mod_base = OTHER; note = 2'-O-methyl modified nucleotide
  modified_base 66: mod_base = OTHER; note = 2'-O-methyl modified nucleotide
  modified_base 67: mod_base = OTHER; note = 2'-O-methyl modified nucleotide
  modified_base 68: mod_base = OTHER; note = 2'-O-methyl modified nucleotide
  modified_base 69: mod_base = OTHER; note = 2'-O-methyl modified nucleotide
  modified_base 70: mod_base = OTHER; note = 2'-O-methyl modified nucleotide
  modified_base 75: mod_base = OTHER; note = 2'-O-methyl modified nucleotide
  modified_base 77: mod_base = OTHER; note = 2'-O-methyl modified nucleotide
  modified_base 80: mod_base = OTHER; note = 2'-O-methyl modified nucleotide
  modified_base 86: mod_base = OTHER; note = 2'-O-methyl modified nucleotide
  modified_base 87: mod_base = OTHER; note = 2'-O-methyl modified nucleotide
  modified_base 89: mod_base = OTHER; note = 2'-O-methyl modified nucleotide
  modified_base 90: mod_base = OTHER; note = 2'-O-methyl modified nucleotide
  modified_base 91: mod_base = OTHER; note = 2'-O-methyl modified nucleotide
  modified_base 92: mod_base = OTHER; note = 2'-O-methyl modified nucleotide
  modified_base 99: mod_base = OTHER; note = nucleotide with phosphorothioate linkage
  modified_base 100: mod_base = OTHER; note = 2'-O-methyl modified nucleotide with phosphorothioate linkage
  modified_base 101: mod_base = OTHER; note = 2'-O-methyl modified nucleotide

SEQ ID NO: 2049 - RNA, 101 nt, synthetic construct; identical to SEQ ID NO: 1049
  source 1..101: mol_type = other RNA
  modified_base 1: mod_base = OTHER; note = 2'-O-methyl modified nucleotide with phosphorothioate linkage
  modified_base 2: mod_base = OTHER; note = 2'-O-methyl modified nucleotide with phosphorothioate linkage
  modified_base 3: mod_base = OTHER; note = 2'-O-methyl modified nucleotide with phosphorothioate linkage
  modified_base 4: mod_base = OTHER; note = 2'-O-methyl modified nucleotide
  modified_base 5: mod_base = OTHER; note = 2'-O-methyl modified nucleotide
  modified_base 8: mod_base = OTHER; note = 2'-O-methyl modified nucleotide
  modified_base 9: mod_base = OTHER; note = 2'-O-methyl modified nucleotide
  modified_base 11: mod_base = OTHER; note = 2'-O-methyl modified nucleotide
  modified_base 13: mod_base = OTHER; note = 2'-O-methyl modified nucleotide
  modified_base 18: mod_base = OTHER; note = 2'-O-methyl modified nucleotide
  modified_base 22: mod_base = OTHER; note = 2'-O-methyl modified nucleotide
  modified_base 25: mod_base = OTHER; note = 2'-O-methyl modified nucleotide
  modified_base 29: mod_base = OTHER; note = 2'-O-methyl modified nucleotide
  modified_base 30: mod_base = OTHER; note = 2'-O-methyl modified nucleotide
  modified_base 31: mod_base = OTHER; note = 2'-O-methyl modified nucleotide
  modified_base 32: mod_base = OTHER; note = 2'-O-methyl modified nucleotide
  modified_base 37: mod_base = OTHER; note = 2'-O-methyl modified nucleotide
  modified_base 38: mod_base = OTHER; note = 2'-O-methyl modified nucleotide
  modified_base 39: mod_base = OTHER; note = 2'-O-methyl modified nucleotide
  modified_base 40: mod_base = OTHER; note = 2'-O-methyl modified nucleotide
  modified_base 41: mod_base = OTHER; note = 2'-O-methyl modified nucleotide
  modified_base 42: mod_base = OTHER; note = 2'-O-methyl modified nucleotide
  modified_base 43: mod_base = OTHER; note = 2'-O-methyl modified nucleotide
  modified_base 47: mod_base = OTHER; note = 2'-O-methyl modified nucleotide
  modified_base 48: mod_base = OTHER; note = 2'-O-methyl modified nucleotide
  modified_base 51: mod_base = OTHER; note = 2'-O-methyl modified nucleotide
  modified_base 54: mod_base = OTHER; note = nucleotide with phosphorothioate linkage
  modified_base 58: mod_base = OTHER; note = 2'-O-methyl modified nucleotide
  modified_base 59: mod_base = OTHER; note = 2'-O-methyl modified nucleotide
  modified_base 61: mod_base = OTHER; note = 2'-O-methyl modified nucleotide
  modified_base 62: mod_base = OTHER; note = 2'-O-methyl modified nucleotide
  modified_base 63: mod_base = OTHER; note = 2'-O-methyl modified nucleotide
  modified_base 64: mod_base = OTHER; note = 2'-O-methyl modified nucleotide
  modified_base 65: mod_base = OTHER; note = 2'-O-methyl modified nucleotide
  modified_base 66: mod_base = OTHER; note = 2'-O-methyl modified nucleotide
  modified_base 67: mod_base = OTHER; note = 2'-O-methyl modified nucleotide
  modified_base 68: mod_base = OTHER; note = 2'-O-methyl modified nucleotide
  modified_base 69: mod_base = OTHER; note = 2'-O-methyl modified nucleotide
  modified_base 70: mod_base = OTHER; note = 2'-O-methyl modified nucleotide
  modified_base 75: mod_base = OTHER; note = 2'-O-methyl modified nucleotide
  modified_base 77: mod_base = OTHER; note = 2'-O-methyl modified nucleotide
  modified_base 80: mod_base = OTHER; note = 2'-O-methyl modified nucleotide
  modified_base 86: mod_base = OTHER; note = 2'-O-methyl modified nucleotide
  modified_base 87: mod_base = OTHER; note = 2'-O-methyl modified nucleotide
  modified_base 89: mod_base = OTHER; note = 2'-O-methyl modified nucleotide
  modified_base 90: mod_base = OTHER; note = 2'-O-methyl modified nucleotide
  modified_base 91: mod_base = OTHER; note = 2'-O-methyl modified nucleotide
  modified_base 92: mod_base = OTHER; note = 2'-O-methyl modified nucleotide
  modified_base 99: mod_base = OTHER; note = nucleotide with phosphorothioate linkage
  modified_base 100: mod_base = OTHER; note = 2'-O-methyl modified nucleotide with phosphorothioate linkage
  modified_base 101: mod_base = OTHER; note = 2'-O-methyl modified nucleotide

SEQ ID NO: 2050 - RNA, 101 nt, synthetic construct; identical to SEQ ID NO: 1050
  source 1..101: mol_type = other RNA
  modified_base 1: mod_base = OTHER; note = 2'-O-methyl modified nucleotide with phosphorothioate linkage
  modified_base 2: mod_base = OTHER; note = 2'-O-methyl modified nucleotide with phosphorothioate linkage
  modified_base 3: mod_base = OTHER; note = 2'-O-methyl modified nucleotide with phosphorothioate linkage
  modified_base 4: mod_base = OTHER; note = 2'-O-methyl modified nucleotide
  modified_base 5: mod_base = OTHER; note = 2'-O-methyl modified nucleotide
  modified_base 8: mod_base = OTHER; note = 2'-O-methyl modified nucleotide
  modified_base 9: mod_base = OTHER; note = 2'-O-methyl modified nucleotide
  modified_base 11: mod_base = OTHER; note = 2'-O-methyl modified nucleotide
  modified_base 13: mod_base = OTHER; note = 2'-O-methyl modified nucleotide
  modified_base 18: mod_base = OTHER; note = 2'-O-methyl modified nucleotide
  modified_base 22: mod_base = OTHER; note = 2'-O-methyl modified nucleotide
  modified_base 25: mod_base = OTHER; note = 2'-O-methyl modified nucleotide
  modified_base 29: mod_base = OTHER; note = 2'-O-methyl modified nucleotide
  modified_base 30: mod_base = OTHER; note = 2'-O-methyl modified nucleotide
  modified_base 31: mod_base = OTHER; note = 2'-O-methyl modified nucleotide
  modified_base 32: mod_base = OTHER; note = 2'-O-methyl modified nucleotide
  modified_base 37: mod_base = OTHER; note = 2'-O-methyl modified nucleotide
  modified_base 38: mod_base = OTHER; note = 2'-O-methyl modified nucleotide
  modified_base 39: mod_base = OTHER; note = 2'-O-methyl modified nucleotide
  modified_base 40: mod_base = OTHER; note = 2'-O-methyl modified nucleotide
  modified_base 41: mod_base = OTHER; note = 2'-O-methyl modified nucleotide
  modified_base 42: mod_base = OTHER; note = 2'-O-methyl modified nucleotide
  modified_base 43: mod_base = OTHER; note = 2'-O-methyl modified nucleotide
  modified_base 47: mod_base = OTHER; note = 2'-O-methyl modified nucleotide
  modified_base 48: mod_base = OTHER; note = 2'-O-methyl modified nucleotide
  modified_base 51: mod_base = OTHER; note = 2'-O-methyl modified nucleotide
  modified_base 54: mod_base = OTHER; note = nucleotide with phosphorothioate linkage
  modified_base 58: mod_base = OTHER; note = 2'-O-methyl modified nucleotide
  modified_base 59: mod_base = OTHER; note = 2'-O-methyl modified nucleotide
  modified_base 61: mod_base = OTHER; note = 2'-O-methyl modified nucleotide
  modified_base 62: mod_base = OTHER; note = 2'-O-methyl modified nucleotide
  modified_base 63: mod_base = OTHER; note = 2'-O-methyl modified nucleotide
  modified_base 64: mod_base = OTHER; note = 2'-O-methyl modified nucleotide
  modified_base 65: mod_base = OTHER; note = 2'-O-methyl modified nucleotide
  modified_base 66: mod_base = OTHER; note = 2'-O-methyl modified nucleotide
  modified_base 67: mod_base = OTHER; note = 2'-O-methyl modified nucleotide
  modified_base 68: mod_base = OTHER; note = 2'-O-methyl modified nucleotide
  modified_base 69: mod_base = OTHER; note = 2'-O-methyl modified nucleotide
  modified_base 70: mod_base = OTHER; note = 2'-O-methyl modified nucleotide
  modified_base 75: mod_base = OTHER; note = 2'-O-methyl modified nucleotide
  modified_base 77: mod_base = OTHER; note = 2'-O-methyl modified nucleotide
  modified_base 80: mod_base = OTHER; note = 2'-O-methyl modified nucleotide
  modified_base 86: mod_base = OTHER; note = 2'-O-methyl modified nucleotide
  modified_base 87: mod_base = OTHER; note = 2'-O-methyl modified nucleotide
  modified_base 89: mod_base = OTHER; note = 2'-O-methyl modified nucleotide
  modified_base 90: mod_base = OTHER; note = 2'-O-methyl modified nucleotide
  modified_base 91: mod_base = OTHER; note = 2'-O-methyl modified nucleotide
  modified_base 92: mod_base = OTHER; note = 2'-O-methyl modified nucleotide
  modified_base 99: mod_base = OTHER; note = nucleotide with phosphorothioate linkage
  modified_base 100: mod_base = OTHER; note = 2'-O-methyl modified nucleotide with phosphorothioate linkage
  modified_base 101: mod_base = OTHER; note = 2'-O-methyl modified nucleotide

SEQ ID NO: 2051 - RNA, 101 nt, synthetic construct; identical to SEQ ID NO: 1051
  source 1..101: mol_type = other RNA
  modified_base 1: mod_base = OTHER; note = 2'-O-methyl modified nucleotide with phosphorothioate linkage
  modified_base 2: mod_base = OTHER; note = 2'-O-methyl modified nucleotide with phosphorothioate linkage
  modified_base 3: mod_base = OTHER; note = 2'-O-methyl modified nucleotide with phosphorothioate linkage
  modified_base 4: mod_base = OTHER; note = 2'-O-methyl modified nucleotide
  modified_base 5: mod_base = OTHER; note = 2'-O-methyl modified nucleotide
  modified_base 8: mod_base = OTHER; note = 2'-O-methyl modified nucleotide
  modified_base 9: mod_base = OTHER; note = 2'-O-methyl modified nucleotide
  modified_base 11: mod_base = OTHER; note = 2'-O-methyl modified nucleotide
  modified_base 13: mod_base = OTHER; note = 2'-O-methyl modified nucleotide
  modified_base 18: mod_base = OTHER; note = 2'-O-methyl modified nucleotide
  modified_base 22: mod_base = OTHER; note = 2'-O-methyl modified nucleotide
  modified_base 25: mod_base = OTHER; note = 2'-O-methyl modified nucleotide
  modified_base 29: mod_base = OTHER; note = 2'-O-methyl modified nucleotide
  modified_base 30: mod_base = OTHER; note = 2'-O-methyl modified nucleotide
  modified_base 31: mod_base = OTHER; note = 2'-O-methyl modified nucleotide
  modified_base 32: mod_base = OTHER; note = 2'-O-methyl modified nucleotide
  modified_base 37: mod_base = OTHER; note = 2'-O-methyl modified nucleotide
  modified_base 38: mod_base = OTHER; note = 2'-O-methyl modified nucleotide
  modified_base 39: mod_base = OTHER; note = 2'-O-methyl modified nucleotide
  modified_base 40: mod_base = OTHER; note = 2'-O-methyl modified nucleotide
  modified_base 41: mod_base = OTHER; note = 2'-O-methyl modified nucleotide
  modified_base 42: mod_base = OTHER; note = 2'-O-methyl modified nucleotide
  modified_base 43: mod_base = OTHER; note = 2'-O-methyl modified nucleotide
  modified_base 47: mod_base = OTHER; note = 2'-O-methyl modified nucleotide
  modified_base 48: mod_base = OTHER; note = 2'-O-methyl modified nucleotide
  modified_base 51: mod_base = OTHER; note = 2'-O-methyl modified nucleotide
  modified_base 54: mod_base = OTHER; note = nucleotide with phosphorothioate linkage
  modified_base 58: mod_base = OTHER; note = 2'-O-methyl modified nucleotide
  modified_base 59: mod_base = OTHER; note = 2'-O-methyl modified nucleotide
  modified_base 61: mod_base = OTHER; note = 2'-O-methyl modified nucleotide
  modified_base 62: mod_base = OTHER; note = 2'-O-methyl modified nucleotide
  modified_base 63: mod_base = OTHER; note = 2'-O-methyl modified nucleotide
  modified_base 64: mod_base = OTHER; note = 2'-O-methyl modified nucleotide
  modified_base 65: mod_base = OTHER; note = 2'-O-methyl modified nucleotide
  modified_base 66: mod_base = OTHER; note = 2'-O-methyl modified nucleotide
  modified_base 67: mod_base = OTHER; note = 2'-O-methyl modified nucleotide
  modified_base 68: mod_base = OTHER; note = 2'-O-methyl modified nucleotide
  modified_base 69: mod_base = OTHER; note = 2'-O-methyl modified nucleotide
  modified_base 70: mod_base = OTHER; note = 2'-O-methyl modified nucleotide
  modified_base 75: mod_base = OTHER; note = 2'-O-methyl modified nucleotide
  modified_base 77: mod_base = OTHER; note = 2'-O-methyl modified nucleotide
  modified_base 80: mod_base = OTHER; note = 2'-O-methyl modified nucleotide
  modified_base 86: mod_base = OTHER; note = 2'-O-methyl modified nucleotide
  modified_base 87: mod_base = OTHER; note = 2'-O-methyl modified nucleotide
  modified_base 89: mod_base = OTHER; note = 2'-O-methyl modified nucleotide
  modified_base 90: mod_base = OTHER; note = 2'-O-methyl modified nucleotide
  modified_base 91: mod_base = OTHER; note = 2'-O-methyl modified nucleotide
  modified_base 92: mod_base = OTHER; note = 2'-O-methyl modified nucleotide
  modified_base 99: mod_base = OTHER; note = nucleotide with phosphorothioate linkage
  modified_base 100: mod_base = OTHER; note = 2'-O-methyl modified nucleotide with phosphorothioate linkage
  modified_base 101: mod_base = OTHER; note = 2'-O-methyl modified nucleotide

SEQ ID NO: 2052 - RNA, 101 nt, synthetic construct; identical to SEQ ID NO: 1052
  source 1..101: mol_type = other RNA
  modified_base 1: mod_base = OTHER; note = 2'-O-methyl modified nucleotide with phosphorothioate linkage
  modified_base 2: mod_base = OTHER; note = 2'-O-methyl modified nucleotide with phosphorothioate linkage
  modified_base 3: mod_base = OTHER; note = 2'-O-methyl modified nucleotide with phosphorothioate linkage
  modified_base 4: mod_base = OTHER; note = 2'-O-methyl modified nucleotide
  modified_base 5: mod_base = OTHER; note = 2'-O-methyl modified nucleotide
  modified_base 8: mod_base = OTHER; note = 2'-O-methyl modified nucleotide
  modified_base 9: mod_base = OTHER; note = 2'-O-methyl modified nucleotide
  modified_base 11: mod_base = OTHER; note = 2'-O-methyl modified nucleotide
  modified_base 13: mod_base = OTHER; note = 2'-O-methyl modified nucleotide
  modified_base 18: mod_base = OTHER; note = 2'-O-methyl modified nucleotide
  modified_base 22: mod_base = OTHER; note = 2'-O-methyl modified nucleotide
  modified_base 25: mod_base = OTHER; note = 2'-O-methyl modified nucleotide
  modified_base 29: mod_base = OTHER; note = 2'-O-methyl modified nucleotide
  modified_base 30: mod_base = OTHER; note = 2'-O-methyl modified nucleotide
  modified_base 31: mod_base = OTHER; note = 2'-O-methyl modified nucleotide
  modified_base 32: mod_base = OTHER; note = 2'-O-methyl modified nucleotide
  modified_base 37: mod_base = OTHER; note = 2'-O-methyl modified nucleotide
  modified_base 38: mod_base = OTHER; note = 2'-O-methyl modified nucleotide
  modified_base 39: mod_base = OTHER; note = 2'-O-methyl modified nucleotide
  modified_base 40: mod_base = OTHER; note = 2'-O-methyl modified nucleotide
  modified_base 41: mod_base = OTHER; note = 2'-O-methyl modified nucleotide
  modified_base 42: mod_base = OTHER; note = 2'-O-methyl modified nucleotide
  modified_base 43: mod_base = OTHER; note = 2'-O-methyl modified nucleotide
  modified_base 47: mod_base = OTHER; note = 2'-O-methyl modified nucleotide
  modified_base 48: mod_base = OTHER; note = 2'-O-methyl modified nucleotide
  modified_base 51: mod_base = OTHER; note = 2'-O-methyl modified nucleotide
  modified_base 54: mod_base = OTHER; note = nucleotide with phosphorothioate linkage
  modified_base 58: mod_base = OTHER; note = 2'-O-methyl modified nucleotide
  modified_base 59: mod_base = OTHER; note = 2'-O-methyl modified nucleotide
  modified_base 61: mod_base = OTHER; note = 2'-O-methyl modified nucleotide
  modified_base 62: mod_base = OTHER; note = 2'-O-methyl modified nucleotide
  modified_base 63: mod_base = OTHER; note = 2'-O-methyl modified nucleotide
  modified_base 64: mod_base = OTHER; note = 2'-O-methyl modified nucleotide
  modified_base 65: mod_base = OTHER; note = 2'-O-methyl modified nucleotide
  modified_base 66: mod_base = OTHER; note = 2'-O-methyl modified nucleotide
  modified_base 67: mod_base = OTHER; note = 2'-O-methyl modified nucleotide
  modified_base 68: mod_base = OTHER; note = 2'-O-methyl modified nucleotide
  modified_base 69: mod_base = OTHER; note = 2'-O-methyl modified nucleotide
  modified_base 70: mod_base = OTHER; note = 2'-O-methyl modified nucleotide
  modified_base 75: mod_base = OTHER; note = 2'-O-methyl modified nucleotide
  modified_base 77: mod_base = OTHER; note = 2'-O-methyl modified nucleotide
  modified_base 80: mod_base = OTHER; note = 2'-O-methyl modified nucleotide
  modified_base 86: mod_base = OTHER; note = 2'-O-methyl modified nucleotide
  modified_base 87: mod_base = OTHER; note = 2'-O-methyl modified nucleotide
  modified_base 89: mod_base = OTHER; note = 2'-O-methyl modified nucleotide
  modified_base 90: mod_base = OTHER; note = 2'-O-methyl modified nucleotide
  modified_base 91: mod_base = OTHER; note = 2'-O-methyl modified nucleotide
  modified_base 92: mod_base = OTHER; note = 2'-O-methyl modified nucleotide
  modified_base 99: mod_base = OTHER; note = nucleotide with phosphorothioate linkage
  modified_base 100: mod_base = OTHER; note = 2'-O-methyl modified nucleotide with phosphorothioate linkage
  modified_base 101: mod_base = OTHER; note = 2'-O-methyl modified nucleotide

SEQ ID NO: 2053 - RNA, 101 nt, synthetic construct; identical to SEQ ID NO: 1053
  source 1..101: mol_type = other RNA
  modified_base 1: mod_base = OTHER; note = 2'-O-methyl modified nucleotide with phosphorothioate linkage
  modified_base 2: mod_base = OTHER; note = 2'-O-methyl modified nucleotide with phosphorothioate linkage
  modified_base 3: mod_base = OTHER; note = 2'-O-methyl modified nucleotide with phosphorothioate linkage
  modified_base 4: mod_base = OTHER; note = 2'-O-methyl modified nucleotide
  modified_base 5: mod_base = OTHER; note = 2'-O-methyl modified nucleotide
  modified_base 8: mod_base = OTHER; note = 2'-O-methyl modified nucleotide
  modified_base 9: mod_base = OTHER; note = 2'-O-methyl modified nucleotide
  modified_base 11: mod_base = OTHER; note = 2'-O-methyl modified nucleotide
  modified_base 13: mod_base = OTHER; note = 2'-O-methyl modified nucleotide
  modified_base 18: mod_base = OTHER; note = 2'-O-methyl modified nucleotide
  modified_base 22: mod_base = OTHER; note = 2'-O-methyl modified nucleotide
  modified_base 25: mod_base = OTHER; note = 2'-O-methyl modified nucleotide
  modified_base 29: mod_base = OTHER; note = 2'-O-methyl modified nucleotide
  modified_base 30: mod_base = OTHER; note = 2'-O-methyl modified nucleotide
  modified_base 31: mod_base = OTHER; note = 2'-O-methyl modified nucleotide
  modified_base 32: mod_base = OTHER; note = 2'-O-methyl modified nucleotide
  modified_base 37: mod_base = OTHER; note = 2'-O-methyl modified nucleotide
  modified_base 38: mod_base = OTHER; note = 2'-O-methyl modified nucleotide
  modified_base 39: mod_base = OTHER; note = 2'-O-methyl modified nucleotide
  modified_base 40: mod_base = OTHER; note = 2'-O-methyl modified nucleotide
  modified_base 41: mod_base = OTHER; note = 2'-O-methyl modified nucleotide
  modified_base 42: mod_base = OTHER; note = 2'-O-methyl modified nucleotide
  modified_base 43: mod_base = OTHER; note = 2'-O-methyl modified nucleotide
  modified_base 47: mod_base = OTHER; note = 2'-O-methyl modified nucleotide
  modified_base 48: mod_base = OTHER; note = 2'-O-methyl modified nucleotide
  modified_base 51: mod_base = OTHER; note = 2'-O-methyl modified nucleotide
  modified_base 54: mod_base = OTHER; note = nucleotide with phosphorothioate linkage
  modified_base 58: mod_base = OTHER; note = 2'-O-methyl modified nucleotide
  modified_base 59: mod_base = OTHER; note = 2'-O-methyl modified nucleotide
  modified_base 61: mod_base = OTHER; note = 2'-O-methyl modified nucleotide
  modified_base 62: mod_base = OTHER; note = 2'-O-methyl modified nucleotide
  modified_base 63: mod_base = OTHER; note = 2'-O-methyl modified nucleotide
  modified_base 64: mod_base = OTHER; note = 2'-O-methyl modified nucleotide
  modified_base 65: mod_base = OTHER; note = 2'-O-methyl modified nucleotide
  modified_base 66: mod_base = OTHER; note = 2'-O-methyl modified nucleotide
  modified_base 67: mod_base = OTHER; note = 2'-O-methyl modified nucleotide
  modified_base 68: mod_base = OTHER; note = 2'-O-methyl modified nucleotide
  modified_base 69: mod_base = OTHER; note = 2'-O-methyl modified nucleotide
  modified_base 70: mod_base = OTHER; note = 2'-O-methyl modified nucleotide
  modified_base 75: mod_base = OTHER; note = 2'-O-methyl modified nucleotide
  modified_base 77: mod_base = OTHER; note = 2'-O-methyl modified nucleotide
  modified_base 80: mod_base = OTHER; note = 2'-O-methyl modified nucleotide
  modified_base 86: mod_base = OTHER; note = 2'-O-methyl modified nucleotide
  modified_base 87: mod_base = OTHER; note = 2'-O-methyl modified nucleotide
  modified_base 89: mod_base = OTHER; note = 2'-O-methyl modified nucleotide
  modified_base 90: mod_base = OTHER; note = 2'-O-methyl modified nucleotide
  modified_base 91: mod_base = OTHER; note = 2'-O-methyl modified nucleotide
  modified_base 92: mod_base = OTHER; note = 2'-O-methyl modified nucleotide
  modified_base 99: mod_base = OTHER; note = nucleotide with phosphorothioate linkage
  modified_base 100: mod_base = OTHER; note = 2'-O-methyl modified nucleotide with phosphorothioate linkage
  modified_base 101: mod_base = OTHER; note = 2'-O-methyl modified nucleotide

SEQ ID NO: 2054 - RNA, 101 nt, synthetic construct; identical to SEQ ID NO: 1054
  source 1..101: mol_type = other RNA
  modified_base 1: mod_base = OTHER; note = 2'-O-methyl modified nucleotide with phosphorothioate linkage
  modified_base 2: mod_base = OTHER; note = 2'-O-methyl modified nucleotide with phosphorothioate linkage
  modified_base 3: mod_base = OTHER; note = 2'-O-methyl modified nucleotide with phosphorothioate linkage
  modified_base 4: mod_base = OTHER; note = 2'-O-methyl modified nucleotide
  modified_base 5: mod_base = OTHER; note = 2'-O-methyl modified nucleotide
  modified_base 8: mod_base = OTHER; note = 2'-O-methyl modified nucleotide
  modified_base 9: mod_base = OTHER; note = 2'-O-methyl modified nucleotide
  modified_base 11: mod_base = OTHER; note = 2'-O-methyl modified nucleotide
  modified_base 13: mod_base = OTHER; note = 2'-O-methyl modified nucleotide
  modified_base 18: mod_base = OTHER; note = 2'-O-methyl modified nucleotide
  modified_base 22: mod_base = OTHER; note = 2'-O-methyl modified nucleotide
  modified_base 25: mod_base = OTHER; note = 2'-O-methyl modified nucleotide
  modified_base 29: mod_base = OTHER; note = 2'-O-methyl modified nucleotide
  modified_base 30: mod_base = OTHER; note = 2'-O-methyl modified nucleotide
  modified_base 31: mod_base = OTHER; note = 2'-O-methyl modified nucleotide
  modified_base 32: mod_base = OTHER; note = 2'-O-methyl modified nucleotide
  modified_base 37: mod_base = OTHER; note = 2'-O-methyl modified nucleotide
  modified_base 38: mod_base = OTHER; note = 2'-O-methyl modified nucleotide
  modified_base 39: mod_base = OTHER; note = 2'-O-methyl modified nucleotide
  modified_base 40: mod_base = OTHER; note = 2'-O-methyl modified nucleotide
  modified_base 41: mod_base = OTHER; note = 2'-O-methyl modified nucleotide
  modified_base 42: mod_base = OTHER; note = 2'-O-methyl modified nucleotide
  modified_base 43: mod_base = OTHER; note = 2'-O-methyl modified nucleotide
  modified_base 47: mod_base = OTHER; note = 2'-O-methyl modified nucleotide
  modified_base 48: mod_base = OTHER; note = 2'-O-methyl modified nucleotide
  modified_base 51: mod_base = OTHER; note = 2'-O-methyl modified nucleotide
  modified_base 54: mod_base = OTHER; note = nucleotide with phosphorothioate linkage
  modified_base 58: mod_base = OTHER; note = 2'-O-methyl modified nucleotide
  modified_base 59: mod_base = OTHER; note = 2'-O-methyl modified nucleotide
  modified_base 61: mod_base = OTHER; note = 2'-O-methyl modified nucleotide
  modified_base 62: mod_base = OTHER; note = 2'-O-methyl modified nucleotide
  modified_base 63: mod_base = OTHER; note = 2'-O-methyl modified nucleotide
  modified_base 64: mod_base = OTHER; note = 2'-O-methyl modified nucleotide
  modified_base 65: mod_base = OTHER; note = 2'-O-methyl modified nucleotide
  modified_base 66: mod_base = OTHER; note = 2'-O-methyl modified nucleotide
  modified_base 67: mod_base = OTHER; note = 2'-O-methyl modified nucleotide
  modified_base 68: mod_base = OTHER; note = 2'-O-methyl modified nucleotide
  modified_base 69: mod_base = OTHER; note = 2'-O-methyl modified nucleotide
  modified_base 70: mod_base = OTHER; note = 2'-O-methyl modified nucleotide
  modified_base 75: mod_base = OTHER; note = 2'-O-methyl modified nucleotide
  modified_base 77: mod_base = OTHER; note = 2'-O-methyl modified nucleotide
  modified_base 80: mod_base = OTHER; note = 2'-O-methyl modified nucleotide
  modified_base 86: mod_base = OTHER; note = 2'-O-methyl modified nucleotide
  modified_base 87: mod_base = OTHER; note = 2'-O-methyl modified nucleotide
  modified_base 89: mod_base = OTHER; note = 2'-O-methyl modified nucleotide
  modified_base 90: mod_base = OTHER; note = 2'-O-methyl modified nucleotide
  modified_base 91: mod_base = OTHER; note = 2'-O-methyl modified nucleotide
  modified_base 92: mod_base = OTHER; note = 2'-O-methyl modified nucleotide
  modified_base 99: mod_base = OTHER; note = nucleotide with phosphorothioate linkage
  modified_base 100: mod_base = OTHER; note = 2'-O-methyl modified nucleotide with phosphorothioate linkage
  modified_base 101: mod_base = OTHER; note = 2'-O-methyl modified nucleotide

SEQ ID NO: 2055 - RNA, 101 nt, synthetic construct; identical to SEQ ID NO: 1055
  source 1..101: mol_type = other RNA
  modified_base 1: mod_base = OTHER; note = 2'-O-methyl modified nucleotide with phosphorothioate linkage
  modified_base 2: mod_base = OTHER; note = 2'-O-methyl modified nucleotide with phosphorothioate linkage
  modified_base 3: mod_base = OTHER; note = 2'-O-methyl modified nucleotide with phosphorothioate linkage
  modified_base 4: mod_base = OTHER; note = 2'-O-methyl modified nucleotide
  modified_base 5: mod_base = OTHER; note = 2'-O-methyl modified nucleotide
  modified_base 8: mod_base = OTHER; note = 2'-O-methyl modified nucleotide
  modified_base 9: mod_base = OTHER; note = 2'-O-methyl modified nucleotide
  modified_base 11: mod_base = OTHER; note = 2'-O-methyl modified nucleotide
  modified_base 13: mod_base = OTHER; note = 2'-O-methyl modified nucleotide
  modified_base 18: mod_base = OTHER; note = 2'-O-methyl modified nucleotide
  modified_base 22: mod_base = OTHER; note = 2'-O-methyl modified nucleotide
  modified_base 25: mod_base = OTHER; note = 2'-O-methyl modified nucleotide
  modified_base 29: mod_base = OTHER; note = 2'-O-methyl modified nucleotide
  modified_base 30: mod_base = OTHER; note = 2'-O-methyl modified nucleotide
  modified_base 31: mod_base = OTHER; note = 2'-O-methyl modified nucleotide
  modified_base 32: mod_base = OTHER; note = 2'-O-methyl modified nucleotide
  modified_base 37: mod_base = OTHER; note = 2'-O-methyl modified nucleotide
  modified_base 38: mod_base = OTHER; note = 2'-O-methyl modified nucleotide
  modified_base 39: mod_base = OTHER; note = 2'-O-methyl modified nucleotide
  modified_base 40: mod_base = OTHER; note = 2'-O-methyl modified nucleotide
  modified_base 41: mod_base = OTHER; note = 2'-O-methyl modified nucleotide
  modified_base 42: mod_base = OTHER; note = 2'-O-methyl modified nucleotide
  modified_base 43: mod_base = OTHER; note = 2'-O-methyl modified nucleotide
  modified_base 47: mod_base = OTHER; note = 2'-O-methyl modified nucleotide
  modified_base 48: mod_base = OTHER; note = 2'-O-methyl modified nucleotide
  modified_base 51: mod_base = OTHER; note = 2'-O-methyl modified nucleotide
  modified_base 54: mod_base = OTHER; note = nucleotide with phosphorothioate linkage
  modified_base 58: mod_base = OTHER; note = 2'-O-methyl modified nucleotide
  modified_base 59: mod_base = OTHER; note = 2'-O-methyl modified nucleotide
  modified_base 61: mod_base = OTHER; note = 2'-O-methyl modified nucleotide
  modified_base 62: mod_base = OTHER; note = 2'-O-methyl modified nucleotide
  modified_base 63: mod_base = OTHER; note = 2'-O-methyl modified nucleotide
  modified_base 64: mod_base = OTHER; note = 2'-O-methyl modified nucleotide
  modified_base 65: mod_base = OTHER; note = 2'-O-methyl modified nucleotide
  modified_base 66: mod_base = OTHER; note = 2'-O-methyl modified nucleotide
  modified_base 67: mod_base = OTHER; note = 2'-O-methyl modified nucleotide
  modified_base 68: mod_base = OTHER; note = 2'-O-methyl modified nucleotide
  modified_base 69: mod_base = OTHER; note = 2'-O-methyl modified nucleotide
  modified_base 70: mod_base = OTHER; note = 2'-O-methyl modified nucleotide
  modified_base 75: mod_base = OTHER; note = 2'-O-methyl modified nucleotide
  modified_base 77: mod_base = OTHER; note = 2'-O-methyl modified nucleotide
  modified_base 80: mod_base = OTHER; note = 2'-O-methyl modified nucleotide
  modified_base 86: mod_base = OTHER; note = 2'-O-methyl modified nucleotide
  modified_base 87: mod_base = OTHER; note = 2'-O-methyl modified nucleotide
  modified_base 89: mod_base = OTHER; note = 2'-O-methyl modified nucleotide
  modified_base 90: mod_base = OTHER; note = 2'-O-methyl modified nucleotide
  modified_base 91: mod_base = OTHER; note = 2'-O-methyl modified nucleotide
  modified_base 92: mod_base = OTHER; note = 2'-O-methyl modified nucleotide
  modified_base 99: mod_base = OTHER; note = nucleotide with phosphorothioate linkage
  modified_base 100: mod_base = OTHER; note = 2'-O-methyl modified nucleotide with phosphorothioate linkage
  modified_base 101: mod_base = OTHER; note = 2'-O-methyl modified nucleotide

SEQ ID NO: 2056 - RNA, 101 nt, synthetic construct; identical to SEQ ID NO: 1056
  source 1..101: mol_type = other RNA
  modified_base 1: mod_base = OTHER; note = 2'-O-methyl modified nucleotide with phosphorothioate linkage
  modified_base 2: mod_base = OTHER; note = 2'-O-methyl modified nucleotide with phosphorothioate linkage
  modified_base 3: mod_base = OTHER; note = 2'-O-methyl modified nucleotide with phosphorothioate linkage
  modified_base 4: mod_base = OTHER; note = 2'-O-methyl modified nucleotide
  modified_base 5: mod_base = OTHER; note = 2'-O-methyl modified nucleotide
  modified_base 8: mod_base = OTHER; note = 2'-O-methyl modified nucleotide
  modified_base 9: mod_base = OTHER; note = 2'-O-methyl modified nucleotide
  modified_base 11: mod_base = OTHER; note = 2'-O-methyl modified nucleotide
  modified_base 13: mod_base = OTHER; note = 2'-O-methyl modified nucleotide
  modified_base 18: mod_base = OTHER; note = 2'-O-methyl modified nucleotide
  modified_base 22: mod_base = OTHER; note = 2'-O-methyl modified nucleotide
  modified_base 25: mod_base = OTHER; note = 2'-O-methyl modified nucleotide
  modified_base 29: mod_base = OTHER; note = 2'-O-methyl modified nucleotide
  modified_base 30: mod_base = OTHER; note = 2'-O-methyl modified nucleotide
  modified_base 31: mod_base = OTHER; note = 2'-O-methyl modified nucleotide
  modified_base 32: mod_base = OTHER; note = 2'-O-methyl modified nucleotide
  modified_base 37: mod_base = OTHER; note = 2'-O-methyl modified nucleotide
  modified_base 38: mod_base = OTHER; note = 2'-O-methyl modified nucleotide
  modified_base 39: mod_base = OTHER; note = 2'-O-methyl modified nucleotide
  modified_base 40: mod_base = OTHER; note = 2'-O-methyl modified nucleotide
  modified_base 41: mod_base = OTHER; note = 2'-O-methyl modified nucleotide
  modified_base 42: mod_base = OTHER; note = 2'-O-methyl modified nucleotide
  modified_base 43: mod_base = OTHER; note = 2'-O-methyl modified nucleotide
  modified_base 47: mod_base = OTHER; note = 2'-O-methyl modified nucleotide
  modified_base 48: mod_base = OTHER; note = 2'-O-methyl modified nucleotide
  modified_base 51: mod_base = OTHER; note = 2'-O-methyl modified nucleotide
  modified_base 54: mod_base = OTHER; note = nucleotide with phosphorothioate linkage
  modified_base 58: mod_base = OTHER; note = 2'-O-methyl modified nucleotide
  modified_base 59: mod_base = OTHER; note = 2'-O-methyl modified nucleotide
  modified_base 61: mod_base = OTHER; note = 2'-O-methyl modified nucleotide
  modified_base 62: mod_base = OTHER; note = 2'-O-methyl modified nucleotide
  modified_base 63: mod_base = OTHER; note = 2'-O-methyl modified nucleotide
  modified_base 64: mod_base = OTHER; note = 2'-O-methyl modified nucleotide
  modified_base 65: mod_base = OTHER; note = 2'-O-methyl modified nucleotide
  modified_base 66: mod_base = OTHER; note = 2'-O-methyl modified nucleotide
  modified_base 67: mod_base = OTHER; note = 2'-O-methyl modified nucleotide
  modified_base 68: mod_base = OTHER; note = 2'-O-methyl modified nucleotide
  modified_base 69: mod_base = OTHER; note = 2'-O-methyl modified nucleotide
  modified_base 70: mod_base = OTHER; note = 2'-O-methyl modified nucleotide
  modified_base 75: mod_base = OTHER; note = 2'-O-methyl modified nucleotide
  modified_base 77: mod_base = OTHER; note = 2'-O-methyl modified nucleotide
  modified_base 80: mod_base = OTHER; note = 2'-O-methyl modified nucleotide
  modified_base 86: mod_base = OTHER; note = 2'-O-methyl modified nucleotide
  modified_base 87: mod_base = OTHER; note = 2'-O-methyl modified nucleotide
  modified_base 89: mod_base = OTHER; note = 2'-O-methyl modified nucleotide
  modified_base 90: mod_base = OTHER; note = 2'-O-methyl modified nucleotide
  modified_base 91: mod_base = OTHER; note = 2'-O-methyl modified nucleotide
  modified_base 92: mod_base = OTHER; note = 2'-O-methyl modified nucleotide
  modified_base 99: mod_base = OTHER; note = nucleotide with phosphorothioate linkage
  modified_base 100: mod_base = OTHER; note = 2'-O-methyl modified nucleotide with phosphorothioate linkage
  modified_base 101: mod_base = OTHER; note = 2'-O-methyl modified nucleotide

SEQ ID NO: 2057 - RNA, 101 nt, synthetic construct; identical to SEQ ID NO: 1057
  source 1..101: mol_type = other RNA
  modified_base 1: mod_base = OTHER; note = 2'-O-methyl modified nucleotide with phosphorothioate linkage
  modified_base 2: mod_base = OTHER; note = 2'-O-methyl modified nucleotide with phosphorothioate linkage
  modified_base 3: mod_base = OTHER; note = 2'-O-methyl modified nucleotide with phosphorothioate linkage
  modified_base 4: mod_base = OTHER; note = 2'-O-methyl modified nucleotide
  modified_base 5: mod_base = OTHER; note = 2'-O-methyl modified nucleotide
  modified_base 8: mod_base = OTHER; note = 2'-O-methyl modified nucleotide
  modified_base 9: mod_base = OTHER; note = 2'-O-methyl modified nucleotide
  modified_base 11: mod_base = OTHER; note = 2'-O-methyl modified nucleotide
  modified_base 13: mod_base = OTHER; note = 2'-O-methyl modified nucleotide
  modified_base 18: mod_base = OTHER; note = 2'-O-methyl modified nucleotide
  modified_base 22: mod_base = OTHER; note = 2'-O-methyl modified nucleotide
  modified_base 25: mod_base = OTHER; note = 2'-O-methyl modified nucleotide
  modified_base 29: mod_base = OTHER; note = 2'-O-methyl modified nucleotide
  modified_base 30: mod_base = OTHER; note = 2'-O-methyl modified nucleotide
  modified_base 31: mod_base = OTHER; note = 2'-O-methyl modified nucleotide
  modified_base 32: mod_base = OTHER; note = 2'-O-methyl modified nucleotide
  modified_base 37: mod_base = OTHER; note = 2'-O-methyl modified nucleotide
  modified_base 38: mod_base = OTHER; note = 2'-O-methyl modified nucleotide
  modified_base 39: mod_base = OTHER; note = 2'-O-methyl modified nucleotide
  modified_base 40: mod_base = OTHER; note = 2'-O-methyl modified nucleotide
  modified_base 41: mod_base = OTHER; note = 2'-O-methyl modified nucleotide
  modified_base 42: mod_base = OTHER; note = 2'-O-methyl modified nucleotide
  modified_base 43: mod_base = OTHER; note = 2'-O-methyl modified nucleotide
  modified_base 47: mod_base = OTHER; note = 2'-O-methyl modified nucleotide
  modified_base 48: mod_base = OTHER; note = 2'-O-methyl modified nucleotide
  modified_base 51: mod_base = OTHER; note = 2'-O-methyl modified nucleotide
  modified_base 54: mod_base = OTHER; note = nucleotide with phosphorothioate linkage
  modified_base 58: mod_base = OTHER; note = 2'-O-methyl modified nucleotide
  modified_base 59: mod_base = OTHER; note = 2'-O-methyl modified nucleotide
  modified_base 61: mod_base = OTHER; note = 2'-O-methyl modified nucleotide
  modified_base 62: mod_base = OTHER; note = 2'-O-methyl modified nucleotide
  modified_base 63: mod_base = OTHER; note = 2'-O-methyl modified nucleotide
  modified_base 64: mod_base = OTHER; note = 2'-O-methyl modified nucleotide
  modified_base 65: mod_base = OTHER; note = 2'-O-methyl modified nucleotide
  modified_base 66: mod_base = OTHER; note = 2'-O-methyl modified nucleotide
  modified_base 67: mod_base = OTHER; note = 2'-O-methyl modified nucleotide
  modified_base 68: mod_base = OTHER; note = 2'-O-methyl modified nucleotide
  modified_base 69: mod_base = OTHER; note = 2'-O-methyl modified nucleotide
  modified_base 70: mod_base = OTHER; note = 2'-O-methyl modified nucleotide
  modified_base 75: mod_base = OTHER; note = 2'-O-methyl modified nucleotide
  modified_base 77: mod_base = OTHER; note = 2'-O-methyl modified nucleotide
  modified_base 80: mod_base = OTHER; note = 2'-O-methyl modified nucleotide
  modified_base 86: mod_base = OTHER; note = 2'-O-methyl modified nucleotide
  modified_base 87: mod_base = OTHER; note = 2'-O-methyl modified nucleotide
  modified_base 89: mod_base = OTHER; note = 2'-O-methyl modified nucleotide
  modified_base 90: mod_base = OTHER; note = 2'-O-methyl modified nucleotide
  modified_base 91: mod_base = OTHER; note = 2'-O-methyl modified nucleotide
  modified_base 92: mod_base = OTHER; note = 2'-O-methyl modified nucleotide
  modified_base 99: mod_base = OTHER; note = nucleotide with phosphorothioate linkage
  modified_base 100: mod_base = OTHER; note = 2'-O-methyl modified nucleotide with phosphorothioate linkage
  modified_base 101: mod_base = OTHER; note = 2'-O-methyl modified nucleotide

SEQ ID NO: 2058 - RNA, 101 nt, synthetic construct; identical to SEQ ID NO: 1058
  source 1..101: mol_type = other RNA
  modified_base 1: mod_base = OTHER; note = 2'-O-methyl modified nucleotide with phosphorothioate linkage
  modified_base 2: mod_base = OTHER; note = 2'-O-methyl modified nucleotide with phosphorothioate linkage
  modified_base 3: mod_base = OTHER; note = 2'-O-methyl modified nucleotide with phosphorothioate linkage
  modified_base 4: mod_base = OTHER; note = 2'-O-methyl modified nucleotide
  modified_base 5: mod_base = OTHER; note = 2'-O-methyl modified nucleotide
  modified_base 8: mod_base = OTHER; note = 2'-O-methyl modified nucleotide
  modified_base 9: mod_base = OTHER; note = 2'-O-methyl modified nucleotide
  modified_base 11: mod_base = OTHER; note = 2'-O-methyl modified nucleotide
  modified_base 13: mod_base = OTHER; note = 2'-O-methyl modified nucleotide
  modified_base 18: mod_base = OTHER; note = 2'-O-methyl modified nucleotide
  modified_base 22: mod_base = OTHER; note = 2'-O-methyl modified nucleotide
  modified_base 25: mod_base = OTHER; note = 2'-O-methyl modified nucleotide
  modified_base 29: mod_base = OTHER; note = 2'-O-methyl modified nucleotide
  modified_base 30: mod_base = OTHER; note = 2'-O-methyl modified nucleotide
  modified_base 31: mod_base = OTHER; note = 2'-O-methyl modified nucleotide
  modified_base 32: mod_base = OTHER; note = 2'-O-methyl modified nucleotide
  modified_base 37: mod_base = OTHER; note = 2'-O-methyl modified nucleotide
  modified_base 38: mod_base = OTHER; note = 2'-O-methyl modified nucleotide
  modified_base 39: mod_base = OTHER; note = 2'-O-methyl modified nucleotide
  modified_base 40: mod_base = OTHER; note = 2'-O-methyl modified nucleotide
  modified_base 41: mod_base = OTHER; note = 2'-O-methyl modified nucleotide
  modified_base 42: mod_base = OTHER; note = 2'-O-methyl modified nucleotide
  modified_base 43: mod_base = OTHER; note = 2'-O-methyl modified nucleotide
  modified_base 47: mod_base = OTHER; note = 2'-O-methyl modified nucleotide
  modified_base 48: mod_base = OTHER; note = 2'-O-methyl modified nucleotide
  modified_base 51: mod_base = OTHER; note = 2'-O-methyl modified nucleotide
  modified_base 54: mod_base = OTHER; note = nucleotide with phosphorothioate linkage
  modified_base 58: mod_base = OTHER; note = 2'-O-methyl modified nucleotide
  modified_base 59: mod_base = OTHER; note = 2'-O-methyl modified nucleotide
  modified_base 61: mod_base = OTHER; note = 2'-O-methyl modified nucleotide
  modified_base 62: mod_base = OTHER; note = 2'-O-methyl modified nucleotide
  modified_base 63: mod_base = OTHER; note = 2'-O-methyl modified nucleotide
  modified_base 64: mod_base = OTHER; note = 2'-O-methyl modified nucleotide
  modified_base 65: mod_base = OTHER; note = 2'-O-methyl modified nucleotide
  modified_base 66: mod_base = OTHER; note = 2'-O-methyl modified nucleotide
  modified_base 67: mod_base = OTHER; note = 2'-O-methyl modified nucleotide
  modified_base 68: mod_base = OTHER; note = 2'-O-methyl modified nucleotide
  modified_base 69: mod_base = OTHER; note = 2'-O-methyl modified nucleotide
  modified_base 70: mod_base = OTHER; note = 2'-O-methyl modified nucleotide
  modified_base 75: mod_base = OTHER; note = 2'-O-methyl modified nucleotide
  modified_base 77: mod_base = OTHER; note = 2'-O-methyl modified nucleotide
  modified_base 80: mod_base = OTHER; note = 2'-O-methyl modified nucleotide
  modified_base 86: mod_base = OTHER; note = 2'-O-methyl modified nucleotide
  modified_base 87: mod_base = OTHER; note = 2'-O-methyl modified nucleotide
  modified_base 89: mod_base = OTHER; note = 2'-O-methyl modified nucleotide
  modified_base 90: mod_base = OTHER; note = 2'-O-methyl modified nucleotide
  modified_base 91: mod_base = OTHER; note = 2'-O-methyl modified nucleotide
  modified_base 92: mod_base = OTHER; note = 2'-O-methyl modified nucleotide
  modified_base 99: mod_base = OTHER; note = nucleotide with phosphorothioate linkage
  modified_base 100: mod_base = OTHER; note = 2'-O-methyl modified nucleotide with phosphorothioate linkage
  modified_base 101: mod_base = OTHER; note = 2'-O-methyl modified nucleotide

SEQ ID NO: 2059 - RNA, 101 nt, synthetic construct; identical to SEQ ID NO: 1059
  source 1..101: mol_type = other RNA
  modified_base 1: mod_base = OTHER; note = 2'-O-methyl modified nucleotide with phosphorothioate linkage
  modified_base 2: mod_base = OTHER; note = 2'-O-methyl modified nucleotide with phosphorothioate linkage
  modified_base 3: mod_base = OTHER; note = 2'-O-methyl modified nucleotide with phosphorothioate linkage
  modified_base 4: mod_base = OTHER; note = 2'-O-methyl modified nucleotide
  modified_base 5: mod_base = OTHER; note = 2'-O-methyl modified nucleotide
  modified_base 8: mod_base = OTHER; note = 2'-O-methyl modified nucleotide
  modified_base 9: mod_base = OTHER; note = 2'-O-methyl modified nucleotide
  modified_base 11: mod_base = OTHER; note = 2'-O-methyl modified nucleotide
  modified_base 13: mod_base = OTHER; note = 2'-O-methyl modified nucleotide
  modified_base 18: mod_base = OTHER; note = 2'-O-methyl modified nucleotide
  modified_base 22: mod_base = OTHER; note = 2'-O-methyl modified nucleotide
  modified_base 25: mod_base = OTHER; note = 2'-O-methyl modified nucleotide
  modified_base 29: mod_base = OTHER; note = 2'-O-methyl modified nucleotide
  modified_base 30: mod_base = OTHER; note = 2'-O-methyl modified nucleotide
  modified_base 31: mod_base = OTHER; note = 2'-O-methyl modified nucleotide
  modified_base 32: mod_base = OTHER; note = 2'-O-methyl modified nucleotide
  modified_base 37: mod_base = OTHER; note = 2'-O-methyl modified nucleotide
  modified_base 38: mod_base = OTHER; note = 2'-O-methyl modified nucleotide
  modified_base 39: mod_base = OTHER; note = 2'-O-methyl modified nucleotide
  modified_base 40: mod_base = OTHER; note = 2'-O-methyl modified nucleotide
  modified_base 41: mod_base = OTHER; note = 2'-O-methyl modified nucleotide
  modified_base 42: mod_base = OTHER; note = 2'-O-methyl modified nucleotide
  modified_base 43: mod_base = OTHER; note = 2'-O-methyl modified nucleotide
  modified_base 47: mod_base = OTHER; note = 2'-O-methyl modified nucleotide
  modified_base 48: mod_base = OTHER; note = 2'-O-methyl modified nucleotide
  modified_base 51: mod_base = OTHER; note = 2'-O-methyl modified nucleotide
  modified_base 54: mod_base = OTHER; note = nucleotide with phosphorothioate linkage
  modified_base 58: mod_base = OTHER; note = 2'-O-methyl modified nucleotide
  modified_base 59: mod_base = OTHER; note = 2'-O-methyl modified nucleotide
  modified_base 61: mod_base = OTHER; note = 2'-O-methyl modified nucleotide
  modified_base 62: mod_base = OTHER; note = 2'-O-methyl modified nucleotide
  modified_base 63: mod_base = OTHER; note = 2'-O-methyl modified nucleotide
  modified_base 64: mod_base = OTHER; note = 2'-O-methyl modified nucleotide
  modified_base 65: mod_base = OTHER; note = 2'-O-methyl modified nucleotide
  modified_base 66: mod_base = OTHER; note = 2'-O-methyl modified nucleotide
  modified_base 67: mod_base = OTHER; note = 2'-O-methyl modified nucleotide
  modified_base 68: mod_base = OTHER; note = 2'-O-methyl modified nucleotide
  modified_base 69: mod_base = OTHER; note = 2'-O-methyl modified nucleotide
  modified_base 70: mod_base = OTHER; note = 2'-O-methyl modified nucleotide
  modified_base 75: mod_base = OTHER; note = 2'-O-methyl modified nucleotide
  modified_base 77: mod_base = OTHER; note = 2'-O-methyl modified nucleotide
  modified_base 80: mod_base = OTHER; note = 2'-O-methyl modified nucleotide
  modified_base 86: mod_base = OTHER; note = 2'-O-methyl modified nucleotide
  modified_base 87: mod_base = OTHER; note = 2'-O-methyl modified nucleotide
  modified_base 89: mod_base = OTHER; note = 2'-O-methyl modified nucleotide
  modified_base 90: mod_base = OTHER; note = 2'-O-methyl modified nucleotide
  modified_base 91: mod_base = OTHER; note = 2'-O-methyl modified nucleotide
  modified_base 92: mod_base = OTHER; note = 2'-O-methyl modified nucleotide
  modified_base 99: mod_base = OTHER; note = nucleotide with phosphorothioate linkage
  modified_base 100: mod_base = OTHER; note = 2'-O-methyl modified nucleotide with phosphorothioate linkage
  modified_base 101: mod_base = OTHER; note = 2'-O-methyl modified nucleotide

SEQ ID NO: 2060 - RNA, 101 nt, synthetic construct; identical to SEQ ID NO: 1060
  source 1..101: mol_type = other RNA
  modified_base 1: mod_base = OTHER; note = 2'-O-methyl modified nucleotide with phosphorothioate linkage
  modified_base 2: mod_base = OTHER; note = 2'-O-methyl modified nucleotide with phosphorothioate linkage
  modified_base 3: mod_base = OTHER; note = 2'-O-methyl modified nucleotide with phosphorothioate linkage
  modified_base 4: mod_base = OTHER; note = 2'-O-methyl modified nucleotide
  modified_base 5: mod_base = OTHER; note = 2'-O-methyl modified nucleotide
  modified_base 8: mod_base = OTHER; note = 2'-O-methyl modified nucleotide
  modified_base 9: mod_base = OTHER; note = 2'-O-methyl modified nucleotide
  modified_base 11: mod_base = OTHER; note = 2'-O-methyl modified nucleotide
  modified_base 13: mod_base = OTHER; note = 2'-O-methyl modified nucleotide
  modified_base 18: mod_base = OTHER; note = 2'-O-methyl modified nucleotide
  modified_base 22: mod_base = OTHER; note = 2'-O-methyl modified nucleotide
  modified_base 25: mod_base = OTHER; note = 2'-O-methyl modified nucleotide
  modified_base 29: mod_base = OTHER; note = 2'-O-methyl modified nucleotide
  modified_base 30: mod_base = OTHER; note = 2'-O-methyl modified nucleotide
  modified_base 31: mod_base = OTHER; note = 2'-O-methyl modified nucleotide
  modified_base 32: mod_base = OTHER; note = 2'-O-methyl modified nucleotide
  modified_base 37: mod_base = OTHER; note = 2'-O-methyl modified nucleotide
  modified_base 38: mod_base = OTHER; note = 2'-O-methyl modified nucleotide
  modified_base 39: mod_base = OTHER; note = 2'-O-methyl modified nucleotide
  modified_base 40: mod_base = OTHER; note = 2'-O-methyl modified nucleotide
  modified_base 41: mod_base = OTHER; note = 2'-O-methyl modified nucleotide
  modified_base 42: mod_base = OTHER; note = 2'-O-methyl modified nucleotide
  modified_base 43: mod_base = OTHER; note = 2'-O-methyl modified nucleotide
  modified_base 47: mod_base = OTHER; note = 2'-O-methyl modified nucleotide
  modified_base 48: mod_base = OTHER; note = 2'-O-methyl modified nucleotide
  modified_base 51: mod_base = OTHER; note = 2'-O-methyl modified nucleotide
  modified_base 54: mod_base = OTHER; note = nucleotide with phosphorothioate linkage
  modified_base 58: mod_base = OTHER; note = 2'-O-methyl modified nucleotide
  modified_base 59: mod_base = OTHER; note = 2'-O-methyl modified nucleotide
  modified_base 61: mod_base = OTHER; note = 2'-O-methyl modified nucleotide
  modified_base 62: mod_base = OTHER; note = 2'-O-methyl modified nucleotide
  modified_base 63: mod_base = OTHER; note = 2'-O-methyl modified nucleotide
  modified_base 64: mod_base = OTHER; note = 2'-O-methyl modified nucleotide
  modified_base 65: mod_base = OTHER; note = 2'-O-methyl modified nucleotide
  modified_base 66: mod_base = OTHER; note = 2'-O-methyl modified nucleotide
  modified_base 67: mod_base = OTHER; note = 2'-O-methyl modified nucleotide
  modified_base 68: mod_base = OTHER; note = 2'-O-methyl modified nucleotide
  modified_base 69: mod_base = OTHER; note = 2'-O-methyl modified nucleotide
  modified_base 70: mod_base = OTHER; note = 2'-O-methyl modified nucleotide
  modified_base 75: mod_base = OTHER; note = 2'-O-methyl modified nucleotide
  modified_base 77: mod_base = OTHER; note = 2'-O-methyl modified nucleotide
  modified_base 80: mod_base = OTHER; note = 2'-O-methyl modified nucleotide
  modified_base 86: mod_base = OTHER; note = 2'-O-methyl modified nucleotide
  modified_base 87: mod_base = OTHER; note = 2'-O-methyl modified nucleotide
  modified_base 89: mod_base = OTHER; note = 2'-O-methyl modified nucleotide
  modified_base 90: mod_base = OTHER; note = 2'-O-methyl modified nucleotide
  modified_base 91: mod_base = OTHER; note = 2'-O-methyl modified nucleotide
  modified_base 92: mod_base = OTHER; note = 2'-O-methyl modified nucleotide
  modified_base 99: mod_base = OTHER; note = nucleotide with phosphorothioate linkage
  modified_base 100: mod_base = OTHER; note = 2'-O-methyl modified nucleotide with phosphorothioate linkage
  modified_base 101: mod_base = OTHER; note = 2'-O-methyl modified nucleotide

SEQ ID NO: 2061 - RNA, 101 nt, synthetic construct; identical to SEQ ID NO: 1061
  source 1..101: mol_type = other RNA
  modified_base 1: mod_base = OTHER; note = 2'-O-methyl modified nucleotide with phosphorothioate linkage
  modified_base 2: mod_base = OTHER; note = 2'-O-methyl modified nucleotide with phosphorothioate linkage
  modified_base 3: mod_base = OTHER; note = 2'-O-methyl modified nucleotide with phosphorothioate linkage
  modified_base 4: mod_base = OTHER; note = 2'-O-methyl modified nucleotide
  modified_base 5: mod_base = OTHER; note = 2'-O-methyl modified nucleotide
  modified_base 8: mod_base = OTHER; note = 2'-O-methyl modified nucleotide
  modified_base 9: mod_base = OTHER; note = 2'-O-methyl modified nucleotide
  modified_base 11: mod_base = OTHER; note = 2'-O-methyl modified nucleotide
  modified_base 13: mod_base = OTHER; note = 2'-O-methyl modified nucleotide
  modified_base 18: mod_base = OTHER; note = 2'-O-methyl modified nucleotide
  modified_base 22: mod_base = OTHER; note = 2'-O-methyl modified nucleotide
  modified_base 25: mod_base = OTHER; note = 2'-O-methyl modified nucleotide
  modified_base 29: mod_base = OTHER; note = 2'-O-methyl modified nucleotide
  modified_base 30: mod_base = OTHER; note = 2'-O-methyl modified nucleotide
  modified_base 31: mod_base = OTHER; note = 2'-O-methyl modified nucleotide
  modified_base 32: mod_base = OTHER; note = 2'-O-methyl modified nucleotide
  modified_base 37: mod_base = OTHER; note = 2'-O-methyl modified nucleotide
  modified_base 38: mod_base = OTHER; note = 2'-O-methyl modified nucleotide
  modified_base 39: mod_base = OTHER; note = 2'-O-methyl modified nucleotide
  modified_base 40: mod_base = OTHER; note = 2'-O-methyl modified nucleotide
  modified_base 41: mod_base = OTHER; note = 2'-O-methyl modified nucleotide
  modified_base 42: mod_base = OTHER; note = 2'-O-methyl modified nucleotide
  modified_base 43: mod_base = OTHER; note = 2'-O-methyl modified nucleotide
  modified_base 47: mod_base = OTHER; note = 2'-O-methyl modified nucleotide
  modified_base 48: mod_base = OTHER; note = 2'-O-methyl modified nucleotide
  modified_base 51: mod_base = OTHER; note = 2'-O-methyl modified nucleotide
  modified_base 54: mod_base = OTHER; note = nucleotide with phosphorothioate linkage
  modified_base 58: mod_base = OTHER; note = 2'-O-methyl modified nucleotide
  modified_base 59: mod_base = OTHER; note = 2'-O-methyl modified nucleotide
  modified_base 61: mod_base = OTHER; note = 2'-O-methyl modified nucleotide
  modified_base 62: mod_base = OTHER; note = 2'-O-methyl modified nucleotide
  modified_base 63: mod_base = OTHER; note = 2'-O-methyl modified nucleotide
  modified_base 64: mod_base = OTHER; note = 2'-O-methyl modified nucleotide
  modified_base 65: mod_base = OTHER; note = 2'-O-methyl modified nucleotide
  modified_base 66: mod_base = OTHER; note = 2'-O-methyl modified nucleotide
  modified_base 67: mod_base = OTHER; note = 2'-O-methyl modified nucleotide
  modified_base 68: mod_base = OTHER; note = 2'-O-methyl modified nucleotide
  modified_base 69: mod_base = OTHER; note = 2'-O-methyl modified nucleotide
  modified_base 70: mod_base = OTHER; note = 2'-O-methyl modified nucleotide
  modified_base 75: mod_base = OTHER; note = 2'-O-methyl modified nucleotide
  modified_base 77: mod_base = OTHER; note = 2'-O-methyl modified nucleotide
  modified_base 80: mod_base = OTHER; note = 2'-O-methyl modified nucleotide
  modified_base 86: mod_base = OTHER; note = 2'-O-methyl modified nucleotide
  modified_base 87: mod_base = OTHER; note = 2'-O-methyl modified nucleotide
  modified_base 89: mod_base = OTHER; note = 2'-O-methyl modified nucleotide
  modified_base 90: mod_base = OTHER; note = 2'-O-methyl modified nucleotide
  modified_base 91: mod_base = OTHER; note = 2'-O-methyl modified nucleotide
  modified_base 92: mod_base = OTHER; note = 2'-O-methyl modified nucleotide
  modified_base 99: mod_base = OTHER; note = nucleotide with phosphorothioate linkage
  modified_base 100: mod_base = OTHER; note = 2'-O-methyl modified nucleotide with phosphorothioate linkage
  modified_base 101: mod_base = OTHER; note = 2'-O-methyl modified nucleotide

SEQ ID NO: 2062 - RNA, 101 nt, synthetic construct; identical to SEQ ID NO: 1062
  source 1..101: mol_type = other RNA
  modified_base 1: mod_base = OTHER; note = 2'-O-methyl modified nucleotide with phosphorothioate linkage
  modified_base 2: mod_base = OTHER; note = 2'-O-methyl modified nucleotide with phosphorothioate linkage
  modified_base 3: mod_base = OTHER; note = 2'-O-methyl modified nucleotide with phosphorothioate linkage
  modified_base 4: mod_base = OTHER; note = 2'-O-methyl modified nucleotide
  modified_base 5: mod_base = OTHER; note = 2'-O-methyl modified nucleotide
  modified_base 8: mod_base = OTHER; note = 2'-O-methyl modified nucleotide
  modified_base 9: mod_base = OTHER; note = 2'-O-methyl modified nucleotide
  modified_base 11: mod_base = OTHER; note = 2'-O-methyl modified nucleotide
  modified_base 13: mod_base = OTHER; note = 2'-O-methyl modified nucleotide
  modified_base 18: mod_base = OTHER; note = 2'-O-methyl modified nucleotide
  modified_base 22: mod_base = OTHER; note = 2'-O-methyl modified nucleotide
  modified_base 25: mod_base = OTHER; note = 2'-O-methyl modified nucleotide
  modified_base 29: mod_base = OTHER; note = 2'-O-methyl modified nucleotide
  modified_base 30: mod_base = OTHER; note = 2'-O-methyl modified nucleotide
  modified_base 31: mod_base = OTHER; note = 2'-O-methyl modified nucleotide
  modified_base 32: mod_base = OTHER; note = 2'-O-methyl modified nucleotide
  modified_base 37: mod_base = OTHER; note = 2'-O-methyl modified nucleotide
  modified_base 38: mod_base = OTHER; note = 2'-O-methyl modified nucleotide
  modified_base 39: mod_base = OTHER; note = 2'-O-methyl modified nucleotide
  modified_base 40: mod_base = OTHER; note = 2'-O-methyl modified nucleotide
  modified_base 41: mod_base = OTHER; note = 2'-O-methyl modified nucleotide
  modified_base 42: mod_base = OTHER; note = 2'-O-methyl modified nucleotide
  modified_base 43: mod_base = OTHER; note = 2'-O-methyl modified nucleotide
  modified_base 47: mod_base = OTHER; note = 2'-O-methyl modified nucleotide
  modified_base 48: mod_base = OTHER; note = 2'-O-methyl modified nucleotide
  modified_base 51: mod_base = OTHER; note = 2'-O-methyl modified nucleotide
  modified_base 54: mod_base = OTHER; note = nucleotide with phosphorothioate linkage
  modified_base 58: mod_base = OTHER; note = 2'-O-methyl modified nucleotide
  modified_base 59: mod_base = OTHER; note = 2'-O-methyl modified nucleotide
  modified_base 61: mod_base = OTHER; note = 2'-O-methyl modified nucleotide
  modified_base 62: mod_base = OTHER; note = 2'-O-methyl modified nucleotide
  modified_base 63: mod_base = OTHER; note = 2'-O-methyl modified nucleotide
  modified_base 64: mod_base = OTHER; note = 2'-O-methyl modified nucleotide
  modified_base 65: mod_base = OTHER; note = 2'-O-methyl modified nucleotide
  modified_base 66: mod_base = OTHER; note = 2'-O-methyl modified nucleotide
  modified_base 67: mod_base = OTHER; note = 2'-O-methyl modified nucleotide
  modified_base 68: mod_base = OTHER; note = 2'-O-methyl modified nucleotide
  modified_base 69: mod_base = OTHER; note = 2'-O-methyl modified nucleotide
  modified_base 70: mod_base = OTHER; note = 2'-O-methyl modified nucleotide
  modified_base 75: mod_base = OTHER; note = 2'-O-methyl modified nucleotide
  modified_base 77: mod_base = OTHER; note = 2'-O-methyl modified nucleotide
  modified_base 80: mod_base = OTHER; note = 2'-O-methyl modified nucleotide
  modified_base 86: mod_base = OTHER; note = 2'-O-methyl modified nucleotide
  modified_base 87: mod_base = OTHER; note = 2'-O-methyl modified nucleotide
  modified_base 89: mod_base = OTHER; note = 2'-O-methyl modified nucleotide
  modified_base 90: mod_base = OTHER; note = 2'-O-methyl modified nucleotide
  modified_base 91: mod_base = OTHER; note = 2'-O-methyl modified nucleotide
  modified_base 92: mod_base = OTHER; note = 2'-O-methyl modified nucleotide
  modified_base 99: mod_base = OTHER; note = nucleotide with phosphorothioate linkage
  modified_base 100: mod_base = OTHER; note = 2'-O-methyl modified nucleotide with phosphorothioate linkage
  modified_base 101: mod_base = OTHER; note = 2'-O-methyl modified nucleotide

SEQ ID NO: 2063 - RNA, 101 nt, synthetic construct; identical to SEQ ID NO: 1063
  source 1..101: mol_type = other RNA
  modified_base 1: mod_base = OTHER; note = 2'-O-methyl modified nucleotide with phosphorothioate linkage
  modified_base 2: mod_base = OTHER; note = 2'-O-methyl modified nucleotide with phosphorothioate linkage
  modified_base 3: mod_base = OTHER; note = 2'-O-methyl modified nucleotide with phosphorothioate linkage
  modified_base 4: mod_base = OTHER; note = 2'-O-methyl modified nucleotide
  modified_base 5: mod_base = OTHER; note = 2'-O-methyl modified nucleotide
  modified_base 8: mod_base = OTHER; note = 2'-O-methyl modified nucleotide
  modified_base 9: mod_base = OTHER; note = 2'-O-methyl modified nucleotide
  modified_base 11: mod_base = OTHER; note = 2'-O-methyl modified nucleotide
  modified_base 13: mod_base = OTHER; note = 2'-O-methyl modified nucleotide
  modified_base 18: mod_base = OTHER; note = 2'-O-methyl modified nucleotide
  modified_base 22: mod_base = OTHER; note = 2'-O-methyl modified nucleotide
  modified_base 25: mod_base = OTHER; note = 2'-O-methyl modified nucleotide
  modified_base 29: mod_base = OTHER; note = 2'-O-methyl modified nucleotide
  modified_base 30: mod_base = OTHER; note = 2'-O-methyl modified nucleotide
  modified_base 31: mod_base = OTHER; note = 2'-O-methyl modified nucleotide
  modified_base 32: mod_base = OTHER; note = 2'-O-methyl modified nucleotide
  modified_base 37: mod_base = OTHER; note = 2'-O-methyl modified nucleotide
  modified_base 38: mod_base = OTHER; note = 2'-O-methyl modified nucleotide
  modified_base 39: mod_base = OTHER; note = 2'-O-methyl modified nucleotide
  modified_base 40: mod_base = OTHER; note = 2'-O-methyl modified nucleotide
  modified_base 41: mod_base = OTHER; note = 2'-O-methyl modified nucleotide
  modified_base 42: mod_base = OTHER; note = 2'-O-methyl modified nucleotide
  modified_base 43: mod_base = OTHER; note = 2'-O-methyl modified nucleotide
  modified_base 47: mod_base = OTHER; note = 2'-O-methyl modified nucleotide
  modified_base 48: mod_base = OTHER; note = 2'-O-methyl modified nucleotide
  modified_base 51: mod_base = OTHER; note = 2'-O-methyl modified nucleotide
  modified_base 54: mod_base = OTHER; note = nucleotide with phosphorothioate linkage
  modified_base 58: mod_base = OTHER; note = 2'-O-methyl modified nucleotide
  modified_base 59: mod_base = OTHER; note = 2'-O-methyl modified nucleotide
  modified_base 61: mod_base = OTHER; note = 2'-O-methyl modified nucleotide
  modified_base 62: mod_base = OTHER; note = 2'-O-methyl modified nucleotide
  modified_base 63: mod_base = OTHER; note = 2'-O-methyl modified nucleotide
  modified_base 64: mod_base = OTHER; note = 2'-O-methyl modified nucleotide
  modified_base 65: mod_base = OTHER; note = 2'-O-methyl modified nucleotide
  modified_base 66: mod_base = OTHER; note = 2'-O-methyl modified nucleotide
  modified_base 67: mod_base = OTHER; note = 2'-O-methyl modified nucleotide
  modified_base 68: mod_base = OTHER; note = 2'-O-methyl modified nucleotide
  modified_base 69: mod_base = OTHER; note = 2'-O-methyl modified nucleotide
  modified_base 70: mod_base = OTHER; note = 2'-O-methyl modified nucleotide
  modified_base 75: mod_base = OTHER; note = 2'-O-methyl modified nucleotide
  modified_base 77: mod_base = OTHER; note = 2'-O-methyl modified nucleotide
  modified_base 80: mod_base = OTHER; note = 2'-O-methyl modified nucleotide
  modified_base 86: mod_base = OTHER; note = 2'-O-methyl modified nucleotide
  modified_base 87: mod_base = OTHER; note = 2'-O-methyl modified nucleotide
  modified_base 89: mod_base = OTHER; note = 2'-O-methyl modified nucleotide
  modified_base 90: mod_base = OTHER; note = 2'-O-methyl modified nucleotide
  modified_base 91: mod_base = OTHER; note = 2'-O-methyl modified nucleotide
  modified_base 92: mod_base = OTHER; note = 2'-O-methyl modified nucleotide
  modified_base 99: mod_base = OTHER; note = nucleotide with phosphorothioate linkage
  modified_base 100: mod_base = OTHER; note = 2'-O-methyl modified nucleotide with phosphorothioate linkage
  modified_base 101: mod_base = OTHER; note = 2'-O-methyl modified nucleotide

SEQ ID NO: 2064 - RNA, 101 nt, synthetic construct; identical to SEQ ID NO: 1064
  source 1..101: mol_type = other RNA
  modified_base 1: mod_base = OTHER; note = 2'-O-methyl modified nucleotide with phosphorothioate linkage
  modified_base 2: mod_base = OTHER; note = 2'-O-methyl modified nucleotide with phosphorothioate linkage
  modified_base 3: mod_base = OTHER; note = 2'-O-methyl modified nucleotide with phosphorothioate linkage
  modified_base 4: mod_base = OTHER; note = 2'-O-methyl modified nucleotide
  modified_base 5: mod_base = OTHER; note = 2'-O-methyl modified nucleotide
  modified_base 8: mod_base = OTHER; note = 2'-O-methyl modified nucleotide
  modified_base 9: mod_base = OTHER; note = 2'-O-methyl modified nucleotide
  modified_base 11: mod_base = OTHER; note = 2'-O-methyl modified nucleotide
  modified_base 13: mod_base = OTHER; note = 2'-O-methyl modified nucleotide
  modified_base 18: mod_base = OTHER; note = 2'-O-methyl modified nucleotide
  modified_base 22: mod_base = OTHER; note = 2'-O-methyl modified nucleotide
  modified_base 25: mod_base = OTHER; note = 2'-O-methyl modified nucleotide
  modified_base 29: mod_base = OTHER; note = 2'-O-methyl modified nucleotide
  modified_base 30: mod_base = OTHER; note = 2'-O-methyl modified nucleotide
  modified_base 31: mod_base = OTHER; note = 2'-O-methyl modified nucleotide
  modified_base 32: mod_base = OTHER; note = 2'-O-methyl modified nucleotide
  modified_base 37: mod_base = OTHER; note = 2'-O-methyl modified nucleotide
  modified_base 38: mod_base = OTHER; note = 2'-O-methyl modified nucleotide
  modified_base 39: mod_base = OTHER; note = 2'-O-methyl modified nucleotide
  modified_base 40: mod_base = OTHER; note = 2'-O-methyl modified nucleotide
  modified_base 41: mod_base = OTHER; note = 2'-O-methyl modified nucleotide
  modified_base 42: mod_base = OTHER; note = 2'-O-methyl modified nucleotide
  modified_base 43: mod_base = OTHER; note = 2'-O-methyl modified nucleotide
  modified_base 47: mod_base = OTHER; note = 2'-O-methyl modified nucleotide
  modified_base 48: mod_base = OTHER; note = 2'-O-methyl modified nucleotide
  modified_base 51: mod_base = OTHER; note = 2'-O-methyl modified nucleotide
  modified_base 54: mod_base = OTHER; note = nucleotide with phosphorothioate linkage
  modified_base 58: mod_base = OTHER; note = 2'-O-methyl modified nucleotide
  modified_base 59: mod_base = OTHER; note = 2'-O-methyl modified nucleotide
  modified_base 61: mod_base = OTHER; note = 2'-O-methyl modified nucleotide
  modified_base 62: mod_base = OTHER; note = 2'-O-methyl modified nucleotide
  modified_base 63: mod_base = OTHER; note = 2'-O-methyl modified nucleotide
  modified_base 64: mod_base = OTHER; note = 2'-O-methyl modified nucleotide
  modified_base 65: mod_base = OTHER; note = 2'-O-methyl modified nucleotide
  modified_base 66: mod_base = OTHER; note = 2'-O-methyl modified nucleotide
  modified_base 67: mod_base = OTHER; note = 2'-O-methyl modified nucleotide
  modified_base 68: mod_base = OTHER; note = 2'-O-methyl modified nucleotide
  modified_base 69: mod_base = OTHER; note = 2'-O-methyl modified nucleotide
  modified_base 70: mod_base = OTHER; note = 2'-O-methyl modified nucleotide
  modified_base 75: mod_base = OTHER; note = 2'-O-methyl modified nucleotide
  modified_base 77: mod_base = OTHER; note = 2'-O-methyl modified nucleotide
  modified_base 80: mod_base = OTHER; note = 2'-O-methyl modified nucleotide
  modified_base 86: mod_base = OTHER; note = 2'-O-methyl modified nucleotide
  modified_base 87: mod_base = OTHER; note = 2'-O-methyl modified nucleotide
  modified_base 89: mod_base = OTHER; note = 2'-O-methyl modified nucleotide
  modified_base 90: mod_base = OTHER; note = 2'-O-methyl modified nucleotide
  modified_base 91: mod_base = OTHER; note = 2'-O-methyl modified nucleotide
  modified_base 92: mod_base = OTHER; note = 2'-O-methyl modified nucleotide
  modified_base 99: mod_base = OTHER; note = nucleotide with phosphorothioate linkage
  modified_base 100: mod_base = OTHER; note = 2'-O-methyl modified nucleotide with phosphorothioate linkage
  modified_base 101: mod_base = OTHER; note = 2'-O-methyl modified nucleotide

SEQ ID NO: 2065 - RNA, 101 nt, synthetic construct; identical to SEQ ID NO: 1065
  source 1..101: mol_type = other RNA
  modified_base 1: mod_base = OTHER; note = 2'-O-methyl modified nucleotide with phosphorothioate linkage
  modified_base 2: mod_base = OTHER; note = 2'-O-methyl modified nucleotide with phosphorothioate linkage
  modified_base 3: mod_base = OTHER; note = 2'-O-methyl modified nucleotide with phosphorothioate linkage
  modified_base 4: mod_base = OTHER; note = 2'-O-methyl modified nucleotide
  modified_base 5: mod_base = OTHER; note = 2'-O-methyl modified nucleotide
  modified_base 8: mod_base = OTHER; note = 2'-O-methyl modified nucleotide
  modified_base 9: mod_base = OTHER; note = 2'-O-methyl modified nucleotide
  modified_base 11: mod_base = OTHER; note = 2'-O-methyl modified nucleotide
  modified_base 13: mod_base = OTHER; note = 2'-O-methyl modified nucleotide
  modified_base 18: mod_base = OTHER; note = 2'-O-methyl modified nucleotide
  modified_base 22: mod_base = OTHER; note = 2'-O-methyl modified nucleotide
  modified_base 25: mod_base = OTHER; note = 2'-O-methyl modified nucleotide
  modified_base 29: mod_base = OTHER; note = 2'-O-methyl modified nucleotide
  modified_base 30: mod_base = OTHER; note = 2'-O-methyl modified nucleotide
  modified_base 31: mod_base = OTHER; note = 2'-O-methyl modified nucleotide
  modified_base 32: mod_base = OTHER; note = 2'-O-methyl modified nucleotide
  modified_base 37: mod_base = OTHER; note = 2'-O-methyl modified nucleotide
  modified_base 38: mod_base = OTHER; note = 2'-O-methyl modified nucleotide
  modified_base 39: mod_base = OTHER; note = 2'-O-methyl modified nucleotide
  modified_base 40: mod_base = OTHER; note = 2'-O-methyl modified nucleotide
  modified_base 41: mod_base = OTHER; note = 2'-O-methyl modified nucleotide
  modified_base 42: mod_base = OTHER; note = 2'-O-methyl modified nucleotide
  modified_base 43: mod_base = OTHER; note = 2'-O-methyl modified nucleotide
  modified_base 47: mod_base = OTHER; note = 2'-O-methyl modified nucleotide
  modified_base 48: mod_base = OTHER; note = 2'-O-methyl modified nucleotide
  modified_base 51: mod_base = OTHER; note = 2'-O-methyl modified nucleotide
  modified_base 54: mod_base = OTHER; note = nucleotide with phosphorothioate linkage
  modified_base 58: mod_base = OTHER; note = 2'-O-methyl modified nucleotide
  modified_base 59: mod_base = OTHER; note = 2'-O-methyl modified nucleotide
  modified_base 61: mod_base = OTHER; note = 2'-O-methyl modified nucleotide
  modified_base 62: mod_base = OTHER; note = 2'-O-methyl modified nucleotide
  modified_base 63: mod_base = OTHER; note = 2'-O-methyl modified nucleotide
  modified_base 64: mod_base = OTHER; note = 2'-O-methyl modified nucleotide
  modified_base 65: mod_base = OTHER; note = 2'-O-methyl modified nucleotide
  modified_base 66: mod_base = OTHER; note = 2'-O-methyl modified nucleotide
  modified_base 67: mod_base = OTHER; note = 2'-O-methyl modified nucleotide
  modified_base 68: mod_base = OTHER; note = 2'-O-methyl modified nucleotide
  modified_base 69: mod_base = OTHER; note = 2'-O-methyl modified nucleotide
  modified_base 70: mod_base = OTHER; note = 2'-O-methyl modified nucleotide
  modified_base 75: mod_base = OTHER; note = 2'-O-methyl modified nucleotide
  modified_base 77: mod_base = OTHER; note = 2'-O-methyl modified nucleotide
  modified_base 80: mod_base = OTHER; note = 2'-O-methyl modified nucleotide
  modified_base 86: mod_base = OTHER; note = 2'-O-methyl modified nucleotide
  modified_base 87: mod_base = OTHER; note = 2'-O-methyl modified nucleotide
  modified_base 89: mod_base = OTHER; note = 2'-O-methyl modified nucleotide
  modified_base 90: mod_base = OTHER; note = 2'-O-methyl modified nucleotide
  modified_base 91: mod_base = OTHER; note = 2'-O-methyl modified nucleotide
  modified_base 92: mod_base = OTHER; note = 2'-O-methyl modified nucleotide
  modified_base 99: mod_base = OTHER; note = nucleotide with phosphorothioate linkage
  modified_base 100: mod_base = OTHER; note = 2'-O-methyl modified nucleotide with phosphorothioate linkage
  modified_base 101: mod_base = OTHER; note = 2'-O-methyl modified nucleotide

SEQ ID NO: 2066 - RNA, 101 nt, synthetic construct; identical to SEQ ID NO: 1066
  source 1..101: mol_type = other RNA
  modified_base 1: mod_base = OTHER; note = 2'-O-methyl modified nucleotide with phosphorothioate linkage
  modified_base 2: mod_base = OTHER; note = 2'-O-methyl modified nucleotide with phosphorothioate linkage
  modified_base 3: mod_base = OTHER; note = 2'-O-methyl modified nucleotide with phosphorothioate linkage
  modified_base 4: mod_base = OTHER; note = 2'-O-methyl modified nucleotide
  modified_base 5: mod_base = OTHER; note = 2'-O-methyl modified nucleotide
  modified_base 8: mod_base = OTHER; note = 2'-O-methyl modified nucleotide
  modified_base 9: mod_base = OTHER; note = 2'-O-methyl modified nucleotide
  modified_base 11: mod_base = OTHER; note = 2'-O-methyl modified nucleotide
  modified_base 13: mod_base = OTHER; note = 2'-O-methyl modified nucleotide
  modified_base 18: mod_base = OTHER; note = 2'-O-methyl modified nucleotide
  modified_base 22: mod_base = OTHER; note = 2'-O-methyl modified nucleotide
  modified_base 25: mod_base = OTHER; note = 2'-O-methyl modified nucleotide
  modified_base 29: mod_base = OTHER; note = 2'-O-methyl modified nucleotide
  modified_base 30: mod_base = OTHER; note = 2'-O-methyl modified nucleotide
  modified_base 31: mod_base = OTHER; note = 2'-O-methyl modified nucleotide
  modified_base 32: mod_base = OTHER; note = 2'-O-methyl modified nucleotide
  modified_base 37: mod_base = OTHER; note = 2'-O-methyl modified nucleotide
  modified_base 38: mod_base = OTHER; note = 2'-O-methyl modified nucleotide
  modified_base 39: mod_base = OTHER; note = 2'-O-methyl modified nucleotide
  modified_base 40: mod_base = OTHER; note = 2'-O-methyl modified nucleotide
  modified_base 41: mod_base = OTHER; note = 2'-O-methyl modified nucleotide
  modified_base 42: mod_base = OTHER; note = 2'-O-methyl modified nucleotide
  modified_base 43: mod_base = OTHER; note = 2'-O-methyl modified nucleotide
  modified_base 47: mod_base = OTHER; note = 2'-O-methyl modified nucleotide
  modified_base 48: mod_base = OTHER; note = 2'-O-methyl modified nucleotide
  modified_base 51: mod_base = OTHER; note = 2'-O-methyl modified nucleotide
  modified_base 54: mod_base = OTHER; note = nucleotide with phosphorothioate linkage
  modified_base 58: mod_base = OTHER; note = 2'-O-methyl modified nucleotide
  modified_base 59: mod_base = OTHER; note = 2'-O-methyl modified nucleotide
  modified_base 61: mod_base = OTHER; note = 2'-O-methyl modified nucleotide
  modified_base 62: mod_base = OTHER; note = 2'-O-methyl modified nucleotide
  modified_base 63: mod_base = OTHER; note = 2'-O-methyl modified nucleotide
  modified_base 64: mod_base = OTHER; note = 2'-O-methyl modified nucleotide
  modified_base 65: mod_base = OTHER; note = 2'-O-methyl modified nucleotide
  modified_base 66: mod_base = OTHER; note = 2'-O-methyl modified nucleotide
  modified_base 67: mod_base = OTHER; note = 2'-O-methyl modified nucleotide
  modified_base 68: mod_base = OTHER; note = 2'-O-methyl modified nucleotide
  modified_base 69: mod_base = OTHER; note = 2'-O-methyl modified nucleotide
  modified_base 70: mod_base = OTHER; note = 2'-O-methyl modified nucleotide
  modified_base 75: mod_base = OTHER; note = 2'-O-methyl modified nucleotide
  modified_base 77: mod_base = OTHER; note = 2'-O-methyl modified nucleotide
  modified_base 80: mod_base = OTHER; note = 2'-O-methyl modified nucleotide
  modified_base 86: mod_base = OTHER; note = 2'-O-methyl modified nucleotide
  modified_base 87: mod_base = OTHER; note = 2'-O-methyl modified nucleotide
  modified_base 89: mod_base = OTHER; note = 2'-O-methyl modified nucleotide
  modified_base 90: mod_base = OTHER; note = 2'-O-methyl modified nucleotide
  modified_base 91: mod_base = OTHER; note = 2'-O-methyl modified nucleotide
  modified_base 92: mod_base = OTHER; note = 2'-O-methyl modified nucleotide
  modified_base 99: mod_base = OTHER; note = nucleotide with phosphorothioate linkage
  modified_base 100: mod_base = OTHER; note = 2'-O-methyl modified nucleotide with phosphorothioate linkage
  modified_base 101: mod_base = OTHER; note = 2'-O-methyl modified nucleotide

SEQ ID NO: 2067 - RNA, 101 nt, synthetic construct; identical to SEQ ID NO: 1067
  source 1..101: mol_type = other RNA
  modified_base 1: mod_base = OTHER; note = 2'-O-methyl modified nucleotide with phosphorothioate linkage
  modified_base 2: mod_base = OTHER; note = 2'-O-methyl modified nucleotide with phosphorothioate linkage
  modified_base 3: mod_base = OTHER; note = 2'-O-methyl modified nucleotide with phosphorothioate linkage
  modified_base 4: mod_base = OTHER; note = 2'-O-methyl modified nucleotide
  modified_base 5: mod_base = OTHER; note = 2'-O-methyl modified nucleotide
  modified_base 8: mod_base = OTHER; note = 2'-O-methyl modified nucleotide
  modified_base 9: mod_base = OTHER; note = 2'-O-methyl modified nucleotide
  modified_base 11: mod_base = OTHER; note = 2'-O-methyl modified nucleotide
  modified_base 13: mod_base = OTHER; note = 2'-O-methyl modified nucleotide
  modified_base 18: mod_base = OTHER; note = 2'-O-methyl modified nucleotide
  modified_base 22: mod_base = OTHER; note = 2'-O-methyl modified nucleotide
  modified_base 25: mod_base = OTHER; note = 2'-O-methyl modified nucleotide
  modified_base 29: mod_base = OTHER; note = 2'-O-methyl modified nucleotide
  modified_base 30: mod_base = OTHER; note = 2'-O-methyl modified nucleotide
  modified_base 31: mod_base = OTHER; note = 2'-O-methyl modified nucleotide
  modified_base 32: mod_base = OTHER; note = 2'-O-methyl modified nucleotide
  modified_base 37: mod_base = OTHER; note = 2'-O-methyl modified nucleotide
  modified_base 38: mod_base = OTHER; note = 2'-O-methyl modified nucleotide
  modified_base 39: mod_base = OTHER; note = 2'-O-methyl modified nucleotide
  modified_base 40: mod_base = OTHER; note = 2'-O-methyl modified nucleotide
  modified_base 41: mod_base = OTHER; note = 2'-O-methyl modified nucleotide
  modified_base 42: mod_base = OTHER; note = 2'-O-methyl modified nucleotide
  modified_base 43: mod_base = OTHER; note = 2'-O-methyl modified nucleotide
  modified_base 47: mod_base = OTHER; note = 2'-O-methyl modified nucleotide
  modified_base 48: mod_base = OTHER; note = 2'-O-methyl modified nucleotide
  modified_base 51: mod_base = OTHER; note = 2'-O-methyl modified nucleotide
  modified_base 54: mod_base = OTHER; note = nucleotide with phosphorothioate linkage
  modified_base 58: mod_base = OTHER; note = 2'-O-methyl modified nucleotide
  modified_base 59: mod_base = OTHER; note = 2'-O-methyl modified nucleotide
  modified_base 61: mod_base = OTHER; note = 2'-O-methyl modified nucleotide
  modified_base 62: mod_base = OTHER; note = 2'-O-methyl modified nucleotide
  modified_base 63: mod_base = OTHER; note = 2'-O-methyl modified nucleotide
  modified_base 64: mod_base = OTHER; note = 2'-O-methyl modified nucleotide
  modified_base 65: mod_base = OTHER; note = 2'-O-methyl modified nucleotide
  modified_base 66: mod_base = OTHER; note = 2'-O-methyl modified nucleotide
  modified_base 67: mod_base = OTHER; note = 2'-O-methyl modified nucleotide
  modified_base 68: mod_base = OTHER; note = 2'-O-methyl modified nucleotide
  modified_base 69: mod_base = OTHER; note = 2'-O-methyl modified nucleotide
  modified_base 70: mod_base = OTHER; note = 2'-O-methyl modified nucleotide
  modified_base 75: mod_base = OTHER; note = 2'-O-methyl modified nucleotide
  modified_base 77: mod_base = OTHER; note = 2'-O-methyl modified nucleotide
  modified_base 80: mod_base = OTHER; note = 2'-O-methyl modified nucleotide
  modified_base 86: mod_base = OTHER; note = 2'-O-methyl modified nucleotide
  modified_base 87: mod_base = OTHER; note = 2'-O-methyl modified nucleotide
  modified_base 89: mod_base = OTHER; note = 2'-O-methyl modified nucleotide
  modified_base 90: mod_base = OTHER; note = 2'-O-methyl modified nucleotide
  modified_base 91: mod_base = OTHER; note = 2'-O-methyl modified nucleotide
  modified_base 92: mod_base = OTHER; note = 2'-O-methyl modified nucleotide
  modified_base 99: mod_base = OTHER; note = nucleotide with phosphorothioate linkage
  modified_base 100: mod_base = OTHER; note = 2'-O-methyl modified nucleotide with phosphorothioate linkage
  modified_base 101: mod_base = OTHER; note = 2'-O-methyl modified nucleotide

SEQ ID NO: 2068 - RNA, 101 nt, synthetic construct; identical to SEQ ID NO: 1068
  source 1..101: mol_type = other RNA
  modified_base 1: mod_base = OTHER; note = 2'-O-methyl modified nucleotide with phosphorothioate linkage
  modified_base 2: mod_base = OTHER; note = 2'-O-methyl modified nucleotide with phosphorothioate linkage
  modified_base 3: mod_base = OTHER; note = 2'-O-methyl modified nucleotide with phosphorothioate linkage
  modified_base 4: mod_base = OTHER; note = 2'-O-methyl modified nucleotide
  modified_base 5: mod_base = OTHER; note = 2'-O-methyl modified nucleotide
  modified_base 8: mod_base = OTHER; note = 2'-O-methyl modified nucleotide
  modified_base 9: mod_base = OTHER; note = 2'-O-methyl modified nucleotide
  modified_base 11: mod_base = OTHER; note = 2'-O-methyl modified nucleotide
  modified_base 13: mod_base = OTHER; note = 2'-O-methyl modified nucleotide
  modified_base 18: mod_base = OTHER; note = 2'-O-methyl modified nucleotide
  modified_base 22: mod_base = OTHER; note = 2'-O-methyl modified nucleotide
  modified_base 25: mod_base = OTHER; note = 2'-O-methyl modified nucleotide
  modified_base 29: mod_base = OTHER; note = 2'-O-methyl modified nucleotide
  modified_base 30: mod_base = OTHER; note = 2'-O-methyl modified nucleotide
  modified_base 31: mod_base = OTHER; note = 2'-O-methyl modified nucleotide
  modified_base 32: mod_base = OTHER; note = 2'-O-methyl modified nucleotide
  modified_base 37: mod_base = OTHER; note = 2'-O-methyl modified nucleotide
  modified_base 38: mod_base = OTHER; note = 2'-O-methyl modified nucleotide
  modified_base 39: mod_base = OTHER; note = 2'-O-methyl modified nucleotide
  modified_base 40: mod_base = OTHER; note = 2'-O-methyl modified nucleotide
  modified_base 41: mod_base = OTHER; note = 2'-O-methyl modified nucleotide
  modified_base 42: mod_base = OTHER; note = 2'-O-methyl modified nucleotide
  modified_base 43: mod_base = OTHER; note = 2'-O-methyl modified nucleotide
  modified_base 47: mod_base = OTHER; note = 2'-O-methyl modified nucleotide
  modified_base 48: mod_base = OTHER; note = 2'-O-methyl modified nucleotide
  modified_base 51: mod_base = OTHER; note = 2'-O-methyl modified nucleotide
  modified_base 54: mod_base = OTHER; note = nucleotide with phosphorothioate linkage
  modified_base 58: mod_base = OTHER; note = 2'-O-methyl modified nucleotide
  modified_base 59: mod_base = OTHER; note = 2'-O-methyl modified nucleotide
  modified_base 61: mod_base = OTHER; note = 2'-O-methyl modified nucleotide
  modified_base 62: mod_base = OTHER; note = 2'-O-methyl modified nucleotide
  modified_base 63: mod_base = OTHER; note = 2'-O-methyl modified nucleotide
  modified_base 64: mod_base = OTHER; note = 2'-O-methyl modified nucleotide
  modified_base 65: mod_base = OTHER; note = 2'-O-methyl modified nucleotide
  modified_base 66: mod_base = OTHER; note = 2'-O-methyl modified nucleotide
  modified_base 67: mod_base = OTHER; note = 2'-O-methyl modified nucleotide
  modified_base 68: mod_base = OTHER; note = 2'-O-methyl modified nucleotide
  modified_base 69: mod_base = OTHER; note = 2'-O-methyl modified nucleotide
  modified_base 70: mod_base = OTHER; note = 2'-O-methyl modified nucleotide
  modified_base 75: mod_base = OTHER; note = 2'-O-methyl modified nucleotide
  modified_base 77: mod_base = OTHER; note = 2'-O-methyl modified nucleotide
  modified_base 80: mod_base = OTHER; note = 2'-O-methyl modified nucleotide
  modified_base 86: mod_base = OTHER; note = 2'-O-methyl modified nucleotide
  modified_base 87: mod_base = OTHER; note = 2'-O-methyl modified nucleotide
  modified_base 89: mod_base = OTHER; note = 2'-O-methyl modified nucleotide
  modified_base 90: mod_base = OTHER; note = 2'-O-methyl modified nucleotide
  modified_base 91: mod_base = OTHER; note = 2'-O-methyl modified nucleotide
  modified_base 92: mod_base = OTHER; note = 2'-O-methyl modified nucleotide
  modified_base 99: mod_base = OTHER; note = nucleotide with phosphorothioate linkage
  modified_base 100: mod_base = OTHER; note = 2'-O-methyl modified nucleotide with phosphorothioate linkage
  modified_base 101: mod_base = OTHER; note = 2'-O-methyl modified nucleotide

SEQ ID NO: 2069 - RNA, 101 nt, synthetic construct; identical to SEQ ID NO: 1069
  source 1..101: mol_type = other RNA
  modified_base 1: mod_base = OTHER; note = 2'-O-methyl modified nucleotide with phosphorothioate linkage
  modified_base 2: mod_base = OTHER; note = 2'-O-methyl modified nucleotide with phosphorothioate linkage
  modified_base 3: mod_base = OTHER; note = 2'-O-methyl modified nucleotide with phosphorothioate linkage
  modified_base 4: mod_base = OTHER; note = 2'-O-methyl modified nucleotide
  modified_base 5: mod_base = OTHER; note = 2'-O-methyl modified nucleotide
  modified_base 8: mod_base = OTHER; note = 2'-O-methyl modified nucleotide
  modified_base 9: mod_base = OTHER; note = 2'-O-methyl modified nucleotide
  modified_base 11: mod_base = OTHER; note = 2'-O-methyl modified nucleotide
  modified_base 13: mod_base = OTHER; note = 2'-O-methyl modified nucleotide
  modified_base 18: mod_base = OTHER; note = 2'-O-methyl modified nucleotide
  modified_base 22: mod_base = OTHER; note = 2'-O-methyl modified nucleotide
  modified_base 25: mod_base = OTHER; note = 2'-O-methyl modified nucleotide
  modified_base 29: mod_base = OTHER; note = 2'-O-methyl modified nucleotide
  modified_base 30: mod_base = OTHER; note = 2'-O-methyl modified nucleotide
  modified_base 31: mod_base = OTHER; note = 2'-O-methyl modified nucleotide
  modified_base 32: mod_base = OTHER; note = 2'-O-methyl modified nucleotide
  modified_base 37: mod_base = OTHER; note = 2'-O-methyl modified nucleotide
  modified_base 38: mod_base = OTHER; note = 2'-O-methyl modified nucleotide
  modified_base 39: mod_base = OTHER; note = 2'-O-methyl modified nucleotide
  modified_base 40: mod_base = OTHER; note = 2'-O-methyl modified nucleotide
  modified_base 41: mod_base = OTHER; note = 2'-O-methyl modified nucleotide
  modified_base 42: mod_base = OTHER; note = 2'-O-methyl modified nucleotide
  modified_base 43: mod_base = OTHER; note = 2'-O-methyl modified nucleotide
  modified_base 47: mod_base = OTHER; note = 2'-O-methyl modified nucleotide
  modified_base 48: mod_base = OTHER; note = 2'-O-methyl modified nucleotide
  modified_base 51: mod_base = OTHER; note = 2'-O-methyl modified nucleotide
  modified_base 54: mod_base = OTHER; note = nucleotide with phosphorothioate linkage
  modified_base 58: mod_base = OTHER; note = 2'-O-methyl modified nucleotide
  modified_base 59: mod_base = OTHER; note = 2'-O-methyl modified nucleotide
  modified_base 61: mod_base = OTHER; note = 2'-O-methyl modified nucleotide
  modified_base 62: mod_base = OTHER; note = 2'-O-methyl modified nucleotide
  modified_base 63: mod_base = OTHER; note = 2'-O-methyl modified nucleotide
  modified_base 64: mod_base = OTHER; note = 2'-O-methyl modified nucleotide
  modified_base 65: mod_base = OTHER; note = 2'-O-methyl modified nucleotide
  modified_base 66: mod_base = OTHER; note = 2'-O-methyl modified nucleotide
  modified_base 67: mod_base = OTHER; note = 2'-O-methyl modified nucleotide
  modified_base 68: mod_base = OTHER; note = 2'-O-methyl modified nucleotide
  modified_base 69: mod_base = OTHER; note = 2'-O-methyl modified nucleotide
  modified_base 70: mod_base = OTHER; note = 2'-O-methyl modified nucleotide
  modified_base 75: mod_base = OTHER; note = 2'-O-methyl modified nucleotide
  modified_base 77: mod_base = OTHER; note = 2'-O-methyl modified nucleotide
  modified_base 80: mod_base = OTHER; note = 2'-O-methyl modified nucleotide
  modified_base 86: mod_base = OTHER; note = 2'-O-methyl modified nucleotide
  modified_base 87: mod_base = OTHER; note = 2'-O-methyl modified nucleotide
  modified_base 89: mod_base = OTHER; note = 2'-O-methyl modified nucleotide
  modified_base 90: mod_base = OTHER; note = 2'-O-methyl modified nucleotide
  modified_base 91: mod_base = OTHER; note = 2'-O-methyl modified nucleotide
  modified_base 92: mod_base = OTHER; note = 2'-O-methyl modified nucleotide
  modified_base 99: mod_base = OTHER; note = nucleotide with phosphorothioate linkage
  modified_base 100: mod_base = OTHER; note = 2'-O-methyl modified nucleotide with phosphorothioate linkage
  modified_base 101: mod_base = OTHER; note = 2'-O-methyl modified nucleotide

SEQ ID NO: 2070 - RNA, 101 nt, synthetic construct; identical to SEQ ID NO: 1070
  source 1..101: mol_type = other RNA
  modified_base 1: mod_base = OTHER; note = 2'-O-methyl modified nucleotide with phosphorothioate linkage
  modified_base 2: mod_base = OTHER; note = 2'-O-methyl modified nucleotide with phosphorothioate linkage
  modified_base 3: mod_base = OTHER; note = 2'-O-methyl modified nucleotide with phosphorothioate linkage
  modified_base 4: mod_base = OTHER; note = 2'-O-methyl modified nucleotide
  modified_base 5: mod_base = OTHER; note = 2'-O-methyl modified nucleotide
  modified_base 8: mod_base = OTHER; note = 2'-O-methyl modified nucleotide
  modified_base 9: mod_base = OTHER; note = 2'-O-methyl modified nucleotide
  modified_base 11: mod_base = OTHER; note = 2'-O-methyl modified nucleotide
  modified_base 13: mod_base = OTHER; note = 2'-O-methyl modified nucleotide
  modified_base 18: mod_base = OTHER; note = 2'-O-methyl modified nucleotide
  modified_base 22: mod_base = OTHER; note = 2'-O-methyl modified nucleotide
  modified_base 25: mod_base = OTHER; note = 2'-O-methyl modified nucleotide
  modified_base 29: mod_base = OTHER; note = 2'-O-methyl modified nucleotide
  modified_base 30: mod_base = OTHER; note = 2'-O-methyl modified nucleotide
  modified_base 31: mod_base = OTHER; note = 2'-O-methyl modified nucleotide
  modified_base 32: mod_base = OTHER; note = 2'-O-methyl modified nucleotide
  modified_base 37: mod_base = OTHER; note = 2'-O-methyl modified nucleotide
  modified_base 38: mod_base = OTHER; note = 2'-O-methyl modified nucleotide
  modified_base 39: mod_base = OTHER; note = 2'-O-methyl modified nucleotide
  modified_base 40: mod_base = OTHER; note = 2'-O-methyl modified nucleotide
  modified_base 41: mod_base = OTHER; note = 2'-O-methyl modified nucleotide
  modified_base 42: mod_base = OTHER; note = 2'-O-methyl modified nucleotide
  modified_base 43: mod_base = OTHER; note = 2'-O-methyl modified nucleotide
  modified_base 47: mod_base = OTHER; note = 2'-O-methyl modified nucleotide
  modified_base 48: mod_base = OTHER; note = 2'-O-methyl modified nucleotide
  modified_base 51: mod_base = OTHER; note = 2'-O-methyl modified nucleotide
  modified_base 54: mod_base = OTHER; note = nucleotide with phosphorothioate linkage
  modified_base 58: mod_base = OTHER; note = 2'-O-methyl modified nucleotide
  modified_base 59: mod_base = OTHER; note = 2'-O-methyl modified nucleotide
  modified_base 61: mod_base = OTHER; note = 2'-O-methyl modified nucleotide
  modified_base 62: mod_base = OTHER; note = 2'-O-methyl modified nucleotide
  modified_base 63: mod_base = OTHER; note = 2'-O-methyl modified nucleotide
  modified_base 64: mod_base = OTHER; note = 2'-O-methyl modified nucleotide
  modified_base 65: mod_base = OTHER; note = 2'-O-methyl modified nucleotide
  modified_base 66: mod_base = OTHER; note = 2'-O-methyl modified nucleotide
  modified_base 67: mod_base = OTHER; note = 2'-O-methyl modified nucleotide
  modified_base 68: mod_base = OTHER; note = 2'-O-methyl modified nucleotide
  modified_base 69: mod_base = OTHER; note = 2'-O-methyl modified nucleotide
  modified_base 70: mod_base = OTHER; note = 2'-O-methyl modified nucleotide
  modified_base 75: mod_base = OTHER; note = 2'-O-methyl modified nucleotide
  modified_base 77: mod_base = OTHER; note = 2'-O-methyl modified nucleotide
  modified_base 80: mod_base = OTHER; note = 2'-O-methyl modified nucleotide
  modified_base 86: mod_base = OTHER; note = 2'-O-methyl modified nucleotide
  modified_base 87: mod_base = OTHER; note = 2'-O-methyl modified nucleotide
  modified_base 89: mod_base = OTHER; note = 2'-O-methyl modified nucleotide
  modified_base 90: mod_base = OTHER; note = 2'-O-methyl modified nucleotide
  modified_base 91: mod_base = OTHER; note = 2'-O-methyl modified nucleotide
  modified_base 92: mod_base = OTHER; note = 2'-O-methyl modified nucleotide
  modified_base 99: mod_base = OTHER; note = nucleotide with phosphorothioate linkage
  modified_base 100: mod_base = OTHER; note = 2'-O-methyl modified nucleotide with phosphorothioate linkage
  modified_base 101: mod_base = OTHER; note = 2'-O-methyl modified nucleotide

SEQ ID NO: 2071 - RNA, 101 nt, synthetic construct; identical to SEQ ID NO: 1071
  source 1..101: mol_type = other RNA
  modified_base 1: mod_base = OTHER; note = 2'-O-methyl modified nucleotide with phosphorothioate linkage
  modified_base 2: mod_base = OTHER; note = 2'-O-methyl modified nucleotide with phosphorothioate linkage
  modified_base 3: mod_base = OTHER; note = 2'-O-methyl modified nucleotide with phosphorothioate linkage
  modified_base 4: mod_base = OTHER; note = 2'-O-methyl modified nucleotide
  modified_base 5: mod_base = OTHER; note = 2'-O-methyl modified nucleotide
  modified_base 8: mod_base = OTHER; note = 2'-O-methyl modified nucleotide
  modified_base 9: mod_base = OTHER; note = 2'-O-methyl modified nucleotide
  modified_base 11: mod_base = OTHER; note = 2'-O-methyl modified nucleotide
  modified_base 13: mod_base = OTHER; note = 2'-O-methyl modified nucleotide
  modified_base 18: mod_base = OTHER; note = 2'-O-methyl modified nucleotide
  modified_base 22: mod_base = OTHER; note = 2'-O-methyl modified nucleotide
  modified_base 25: mod_base = OTHER; note = 2'-O-methyl modified nucleotide
  modified_base 29: mod_base = OTHER; note = 2'-O-methyl modified nucleotide
  modified_base 30: mod_base = OTHER; note = 2'-O-methyl modified nucleotide
  modified_base 31: mod_base = OTHER; note = 2'-O-methyl modified nucleotide
  modified_base 32: mod_base = OTHER; note = 2'-O-methyl modified nucleotide
  modified_base 37: mod_base = OTHER; note = 2'-O-methyl modified nucleotide
  modified_base 38: mod_base = OTHER; note = 2'-O-methyl modified nucleotide
  modified_base 39: mod_base = OTHER; note = 2'-O-methyl modified nucleotide
  modified_base 40: mod_base = OTHER; note = 2'-O-methyl modified nucleotide
  modified_base 41: mod_base = OTHER; note = 2'-O-methyl modified nucleotide
  modified_base 42: mod_base = OTHER; note = 2'-O-methyl modified nucleotide
  modified_base 43: mod_base = OTHER; note = 2'-O-methyl modified nucleotide
  modified_base 47: mod_base = OTHER; note = 2'-O-methyl modified nucleotide
  modified_base 48: mod_base = OTHER; note = 2'-O-methyl modified nucleotide
  modified_base 51: mod_base = OTHER; note = 2'-O-methyl modified nucleotide
  modified_base 54: mod_base = OTHER; note = nucleotide with phosphorothioate linkage
  modified_base 58: mod_base = OTHER; note = 2'-O-methyl modified nucleotide
  modified_base 59: mod_base = OTHER; note = 2'-O-methyl modified nucleotide
  modified_base 61: mod_base = OTHER; note = 2'-O-methyl modified nucleotide
  modified_base 62: mod_base = OTHER; note = 2'-O-methyl modified nucleotide
  modified_base 63: mod_base = OTHER; note = 2'-O-methyl modified nucleotide
  modified_base 64: mod_base = OTHER; note = 2'-O-methyl modified nucleotide
  modified_base 65: mod_base = OTHER; note = 2'-O-methyl modified nucleotide
  modified_base 66: mod_base = OTHER; note = 2'-O-methyl modified nucleotide
  modified_base 67: mod_base = OTHER; note = 2'-O-methyl modified nucleotide
  modified_base 68: mod_base = OTHER; note = 2'-O-methyl modified nucleotide
  modified_base 69: mod_base = OTHER; note = 2'-O-methyl modified nucleotide
  modified_base 70: mod_base = OTHER; note = 2'-O-methyl modified nucleotide
  modified_base 75: mod_base = OTHER; note = 2'-O-methyl modified nucleotide
  modified_base 77: mod_base = OTHER; note = 2'-O-methyl modified nucleotide
  modified_base 80: mod_base = OTHER; note = 2'-O-methyl modified nucleotide
  modified_base 86: mod_base = OTHER; note = 2'-O-methyl modified nucleotide
  modified_base 87: mod_base = OTHER; note = 2'-O-methyl modified nucleotide
  modified_base 89: mod_base = OTHER; note = 2'-O-methyl modified nucleotide
  modified_base 90: mod_base = OTHER; note = 2'-O-methyl modified nucleotide
  modified_base 91: mod_base = OTHER; note = 2'-O-methyl modified nucleotide
  modified_base 92: mod_base = OTHER; note = 2'-O-methyl modified nucleotide
  modified_base 99: mod_base = OTHER; note = nucleotide with phosphorothioate linkage
  modified_base 100: mod_base = OTHER; note = 2'-O-methyl modified nucleotide with phosphorothioate linkage
  modified_base 101: mod_base = OTHER; note = 2'-O-methyl modified nucleotide

SEQ ID NO: 2072 - RNA, 101 nt, synthetic construct; identical to SEQ ID NO: 1072
  source 1..101: mol_type = other RNA
  modified_base 1: mod_base = OTHER; note = 2'-O-methyl modified nucleotide with phosphorothioate linkage
  modified_base 2: mod_base = OTHER; note = 2'-O-methyl modified nucleotide with phosphorothioate linkage
  modified_base 3: mod_base = OTHER; note = 2'-O-methyl modified nucleotide with phosphorothioate linkage
  modified_base 4: mod_base = OTHER; note = 2'-O-methyl modified nucleotide
  modified_base 5: mod_base = OTHER; note = 2'-O-methyl modified nucleotide
  modified_base 8: mod_base = OTHER; note = 2'-O-methyl modified nucleotide
  modified_base 9: mod_base = OTHER; note = 2'-O-methyl modified nucleotide
  modified_base 11: mod_base = OTHER; note = 2'-O-methyl modified nucleotide
  modified_base 13: mod_base = OTHER; note = 2'-O-methyl modified nucleotide
  modified_base 18: mod_base = OTHER; note = 2'-O-methyl modified nucleotide
  modified_base 22: mod_base = OTHER; note = 2'-O-methyl modified nucleotide
  modified_base 25: mod_base = OTHER; note = 2'-O-methyl modified nucleotide
  modified_base 29: mod_base = OTHER; note = 2'-O-methyl modified nucleotide
  modified_base 30: mod_base = OTHER; note = 2'-O-methyl modified nucleotide
  modified_base 31: mod_base = OTHER; note = 2'-O-methyl modified nucleotide
  modified_base 32: mod_base = OTHER; note = 2'-O-methyl modified nucleotide
  modified_base 37: mod_base = OTHER; note = 2'-O-methyl modified nucleotide
  modified_base 38: mod_base = OTHER; note = 2'-O-methyl modified nucleotide
  modified_base 39: mod_base = OTHER; note = 2'-O-methyl modified nucleotide
  modified_base 40: mod_base = OTHER; note = 2'-O-methyl modified nucleotide
  modified_base 41: mod_base = OTHER; note = 2'-O-methyl modified nucleotide
  modified_base 42: mod_base = OTHER; note = 2'-O-methyl modified nucleotide
  modified_base 43: mod_base = OTHER; note = 2'-O-methyl modified nucleotide
  modified_base 47: mod_base = OTHER; note = 2'-O-methyl modified nucleotide
  modified_base 48: mod_base = OTHER; note = 2'-O-methyl modified nucleotide
  modified_base 51: mod_base = OTHER; note = 2'-O-methyl modified nucleotide
  modified_base 54: mod_base = OTHER; note = nucleotide with phosphorothioate linkage
  modified_base 58: mod_base = OTHER; note = 2'-O-methyl modified nucleotide
  modified_base 59: mod_base = OTHER; note = 2'-O-methyl modified nucleotide
  modified_base 61: mod_base = OTHER; note = 2'-O-methyl modified nucleotide
  modified_base 62: mod_base = OTHER; note = 2'-O-methyl modified nucleotide
  modified_base 63: mod_base = OTHER; note = 2'-O-methyl modified nucleotide
  modified_base 64: mod_base = OTHER; note = 2'-O-methyl modified nucleotide
  modified_base 65: mod_base = OTHER; note = 2'-O-methyl modified nucleotide
  modified_base 66: mod_base = OTHER; note = 2'-O-methyl modified nucleotide
  modified_base 67: mod_base = OTHER; note = 2'-O-methyl modified nucleotide
  modified_base 68: mod_base = OTHER; note = 2'-O-methyl modified nucleotide
  modified_base 69: mod_base = OTHER; note = 2'-O-methyl modified nucleotide
  modified_base 70: mod_base = OTHER; note = 2'-O-methyl modified nucleotide
  modified_base 75: mod_base = OTHER; note = 2'-O-methyl modified nucleotide
  modified_base 77: mod_base = OTHER; note = 2'-O-methyl modified nucleotide
  modified_base 80: mod_base = OTHER; note = 2'-O-methyl modified nucleotide
  modified_base 86: mod_base = OTHER; note = 2'-O-methyl modified nucleotide
  modified_base 87: mod_base = OTHER; note = 2'-O-methyl modified nucleotide
  modified_base 89: mod_base = OTHER; note = 2'-O-methyl modified nucleotide
  modified_base 90: mod_base = OTHER; note = 2'-O-methyl modified nucleotide
  modified_base 91: mod_base = OTHER; note = 2'-O-methyl modified nucleotide
  modified_base 92: mod_base = OTHER; note = 2'-O-methyl modified nucleotide
  modified_base 99: mod_base = OTHER; note = nucleotide with phosphorothioate linkage
  modified_base 100: mod_base = OTHER; note = 2'-O-methyl modified nucleotide with phosphorothioate linkage
  modified_base 101: mod_base = OTHER; note = 2'-O-methyl modified nucleotide

SEQ ID NO: 2073 - RNA, 101 nt, synthetic construct; identical to SEQ ID NO: 1073
  source 1..101: mol_type = other RNA
  modified_base 1: mod_base = OTHER; note = 2'-O-methyl modified nucleotide with phosphorothioate linkage
  modified_base 2: mod_base = OTHER; note = 2'-O-methyl modified nucleotide with phosphorothioate linkage
  modified_base 3: mod_base = OTHER; note = 2'-O-methyl modified nucleotide with phosphorothioate linkage
  modified_base 4: mod_base = OTHER; note = 2'-O-methyl modified nucleotide
  modified_base 5: mod_base = OTHER; note = 2'-O-methyl modified nucleotide
  modified_base 8: mod_base = OTHER; note = 2'-O-methyl modified nucleotide
  modified_base 9: mod_base = OTHER; note = 2'-O-methyl modified nucleotide
  modified_base 11: mod_base = OTHER; note = 2'-O-methyl modified nucleotide
  modified_base 13: mod_base = OTHER; note = 2'-O-methyl modified nucleotide
  modified_base 18: mod_base = OTHER; note = 2'-O-methyl modified nucleotide
  modified_base 22: mod_base = OTHER; note = 2'-O-methyl modified nucleotide
  modified_base 25: mod_base = OTHER; note = 2'-O-methyl modified nucleotide
  modified_base 29: mod_base = OTHER; note = 2'-O-methyl modified nucleotide
  modified_base 30: mod_base = OTHER; note = 2'-O-methyl modified nucleotide
  modified_base 31: mod_base = OTHER; note = 2'-O-methyl modified nucleotide
  modified_base 32: mod_base = OTHER; note = 2'-O-methyl modified nucleotide
  modified_base 37: mod_base = OTHER; note = 2'-O-methyl modified nucleotide
  modified_base 38: mod_base = OTHER; note = 2'-O-methyl modified nucleotide
  modified_base 39: mod_base = OTHER; note = 2'-O-methyl modified nucleotide
  modified_base 40: mod_base = OTHER; note = 2'-O-methyl modified nucleotide
  modified_base 41: mod_base = OTHER; note = 2'-O-methyl modified nucleotide
  modified_base 42: mod_base = OTHER; note = 2'-O-methyl modified nucleotide
  modified_base 43: mod_base = OTHER; note = 2'-O-methyl modified nucleotide
  modified_base 47: mod_base = OTHER; note = 2'-O-methyl modified nucleotide
  modified_base 48: mod_base = OTHER; note = 2'-O-methyl modified nucleotide
  modified_base 51: mod_base = OTHER; note = 2'-O-methyl modified nucleotide
  modified_base 54: mod_base = OTHER; note = nucleotide with phosphorothioate linkage
  modified_base 58: mod_base = OTHER; note = 2'-O-methyl modified nucleotide
  modified_base 59: mod_base = OTHER; note = 2'-O-methyl modified nucleotide
  modified_base 61: mod_base = OTHER; note = 2'-O-methyl modified nucleotide
  modified_base 62: mod_base = OTHER; note = 2'-O-methyl modified nucleotide
  modified_base 63: mod_base = OTHER; note = 2'-O-methyl modified nucleotide
  modified_base 64: mod_base = OTHER; note = 2'-O-methyl modified nucleotide
  modified_base 65: mod_base = OTHER; note = 2'-O-methyl modified nucleotide
  modified_base 66: mod_base = OTHER; note = 2'-O-methyl modified nucleotide
  modified_base 67: mod_base = OTHER; note = 2'-O-methyl modified nucleotide
  modified_base 68: mod_base = OTHER; note = 2'-O-methyl modified nucleotide
  modified_base 69: mod_base = OTHER; note = 2'-O-methyl modified nucleotide
  modified_base 70: mod_base = OTHER; note = 2'-O-methyl modified nucleotide
  modified_base 75: mod_base = OTHER; note = 2'-O-methyl modified nucleotide
  modified_base 77: mod_base = OTHER; note = 2'-O-methyl modified nucleotide
  modified_base 80: mod_base = OTHER; note = 2'-O-methyl modified nucleotide
  modified_base 86: mod_base = OTHER; note = 2'-O-methyl modified nucleotide
  modified_base 87: mod_base = OTHER; note = 2'-O-methyl modified nucleotide
  modified_base 89: mod_base = OTHER; note = 2'-O-methyl modified nucleotide
  modified_base 90: mod_base = OTHER; note = 2'-O-methyl modified nucleotide
  modified_base 91: mod_base = OTHER; note = 2'-O-methyl modified nucleotide
  modified_base 92: mod_base = OTHER; note = 2'-O-methyl modified nucleotide
  modified_base 99: mod_base = OTHER; note = nucleotide with phosphorothioate linkage
  modified_base 100: mod_base = OTHER; note = 2'-O-methyl modified nucleotide with phosphorothioate linkage
  modified_base 101: mod_base = OTHER; note = 2'-O-methyl modified nucleotide

SEQ ID NO: 2074 - RNA, 101 nt, synthetic construct; identical to SEQ ID NO: 1074
  source 1..101: mol_type = other RNA
  modified_base 1: mod_base = OTHER; note = 2'-O-methyl modified nucleotide with phosphorothioate linkage
  modified_base 2: mod_base = OTHER; note = 2'-O-methyl modified nucleotide with phosphorothioate linkage
  modified_base 3: mod_base = OTHER; note = 2'-O-methyl modified nucleotide with phosphorothioate linkage
  modified_base 4: mod_base = OTHER; note = 2'-O-methyl modified nucleotide
  modified_base 5: mod_base = OTHER; note = 2'-O-methyl modified nucleotide
  modified_base 8: mod_base = OTHER; note = 2'-O-methyl modified nucleotide
  modified_base 9: mod_base = OTHER; note = 2'-O-methyl modified nucleotide
  modified_base 11: mod_base = OTHER; note = 2'-O-methyl modified nucleotide
  modified_base 13: mod_base = OTHER; note = 2'-O-methyl modified nucleotide
  modified_base 18: mod_base = OTHER; note = 2'-O-methyl modified nucleotide
  modified_base 22: mod_base = OTHER; note = 2'-O-methyl modified nucleotide
  modified_base 25: mod_base = OTHER; note = 2'-O-methyl modified nucleotide
  modified_base 29: mod_base = OTHER; note = 2'-O-methyl modified nucleotide
  modified_base 30: mod_base = OTHER; note = 2'-O-methyl modified nucleotide
  modified_base 31: mod_base = OTHER; note = 2'-O-methyl modified nucleotide
  modified_base 32: mod_base = OTHER; note = 2'-O-methyl modified nucleotide
  modified_base 37: mod_base = OTHER; note = 2'-O-methyl modified nucleotide
  modified_base 38: mod_base = OTHER; note = 2'-O-methyl modified nucleotide
  modified_base 39: mod_base = OTHER; note = 2'-O-methyl modified nucleotide
  modified_base 40: mod_base = OTHER; note = 2'-O-methyl modified nucleotide
  modified_base 41: mod_base = OTHER; note = 2'-O-methyl modified nucleotide
  modified_base 42: mod_base = OTHER; note = 2'-O-methyl modified nucleotide
  modified_base 43: mod_base = OTHER; note = 2'-O-methyl modified nucleotide
  modified_base 47: mod_base = OTHER; note = 2'-O-methyl modified nucleotide
  modified_base 48: mod_base = OTHER; note = 2'-O-methyl modified nucleotide
  modified_base 51: mod_base = OTHER; note = 2'-O-methyl modified nucleotide
  modified_base 54: mod_base = OTHER; note = nucleotide with phosphorothioate linkage
  modified_base 58: mod_base = OTHER; note = 2'-O-methyl modified nucleotide
  modified_base 59: mod_base = OTHER; note = 2'-O-methyl modified nucleotide
  modified_base 61: mod_base = OTHER; note = 2'-O-methyl modified nucleotide
  modified_base 62: mod_base = OTHER; note = 2'-O-methyl modified nucleotide
  modified_base 63: mod_base = OTHER; note = 2'-O-methyl modified nucleotide
  modified_base 64: mod_base = OTHER; note = 2'-O-methyl modified nucleotide
  modified_base 65: mod_base = OTHER; note = 2'-O-methyl modified nucleotide
  modified_base 66: mod_base = OTHER; note = 2'-O-methyl modified nucleotide
  modified_base 67: mod_base = OTHER; note = 2'-O-methyl modified nucleotide
  modified_base 68: mod_base = OTHER; note = 2'-O-methyl modified nucleotide
  modified_base 69: mod_base = OTHER; note = 2'-O-methyl modified nucleotide
  modified_base 70: mod_base = OTHER; note = 2'-O-methyl modified nucleotide
  modified_base 75: mod_base = OTHER; note = 2'-O-methyl modified nucleotide
  modified_base 77: mod_base = OTHER; note = 2'-O-methyl modified nucleotide
  modified_base 80: mod_base = OTHER; note = 2'-O-methyl modified nucleotide
  modified_base 86: mod_base = OTHER; note = 2'-O-methyl modified nucleotide
  modified_base 87: mod_base = OTHER; note = 2'-O-methyl modified nucleotide
  modified_base 89: mod_base = OTHER; note = 2'-O-methyl modified nucleotide
  modified_base 90: mod_base = OTHER; note = 2'-O-methyl modified nucleotide
  modified_base 91: mod_base = OTHER; note = 2'-O-methyl modified nucleotide
  modified_base 92: mod_base = OTHER; note = 2'-O-methyl modified nucleotide
  modified_base 99: mod_base = OTHER; note = nucleotide with phosphorothioate linkage
  modified_base 100: mod_base = OTHER; note = 2'-O-methyl modified nucleotide with phosphorothioate linkage
  modified_base 101: mod_base = OTHER; note = 2'-O-methyl modified nucleotide

SEQ ID NO: 2075 - RNA, 101 nt, synthetic construct; identical to SEQ ID NO: 1075
  source 1..101: mol_type = other RNA
  modified_base 1: mod_base = OTHER; note = 2'-O-methyl modified nucleotide with phosphorothioate linkage
  modified_base 2: mod_base = OTHER; note = 2'-O-methyl modified nucleotide with phosphorothioate linkage
  modified_base 3: mod_base = OTHER; note = 2'-O-methyl modified nucleotide with phosphorothioate linkage
  modified_base 4: mod_base = OTHER; note = 2'-O-methyl modified nucleotide
  modified_base 5: mod_base = OTHER; note = 2'-O-methyl modified nucleotide
  modified_base 8: mod_base = OTHER; note = 2'-O-methyl modified nucleotide
  modified_base 9: mod_base = OTHER; note = 2'-O-methyl modified nucleotide
  modified_base 11: mod_base = OTHER; note = 2'-O-methyl modified nucleotide
  modified_base 13: mod_base = OTHER; note = 2'-O-methyl modified nucleotide
  modified_base 18: mod_base = OTHER; note = 2'-O-methyl modified nucleotide
  modified_base 22: mod_base = OTHER; note = 2'-O-methyl modified nucleotide
  modified_base 25: mod_base = OTHER; note = 2'-O-methyl modified nucleotide
  modified_base 29: mod_base = OTHER; note = 2'-O-methyl modified nucleotide
  modified_base 30: mod_base = OTHER; note = 2'-O-methyl modified nucleotide
  modified_base 31: mod_base = OTHER; note = 2'-O-methyl modified nucleotide
  modified_base 32: mod_base = OTHER; note = 2'-O-methyl modified nucleotide
  modified_base 37: mod_base = OTHER; note = 2'-O-methyl modified nucleotide
  modified_base 38: mod_base = OTHER; note = 2'-O-methyl modified nucleotide
  modified_base 39: mod_base = OTHER; note = 2'-O-methyl modified nucleotide
  modified_base 40: mod_base = OTHER; note = 2'-O-methyl modified nucleotide
  modified_base 41: mod_base = OTHER; note = 2'-O-methyl modified nucleotide
  modified_base 42: mod_base = OTHER; note = 2'-O-methyl modified nucleotide
  modified_base 43: mod_base = OTHER; note = 2'-O-methyl modified nucleotide
  modified_base 47: mod_base = OTHER; note = 2'-O-methyl modified nucleotide
  modified_base 48: mod_base = OTHER; note = 2'-O-methyl modified nucleotide
  modified_base 51: mod_base = OTHER; note = 2'-O-methyl modified nucleotide
  modified_base 54: mod_base = OTHER; note = nucleotide with phosphorothioate linkage
  modified_base 58: mod_base = OTHER; note = 2'-O-methyl modified nucleotide
  modified_base 59: mod_base = OTHER; note = 2'-O-methyl modified nucleotide
  modified_base 61: mod_base = OTHER; note = 2'-O-methyl modified nucleotide
  modified_base 62: mod_base = OTHER; note = 2'-O-methyl modified nucleotide
  modified_base 63: mod_base = OTHER; note = 2'-O-methyl modified nucleotide
  modified_base 64: mod_base = OTHER; note = 2'-O-methyl modified nucleotide
  modified_base 65: mod_base = OTHER; note = 2'-O-methyl modified nucleotide
  modified_base 66: mod_base = OTHER; note = 2'-O-methyl modified nucleotide
  modified_base 67: mod_base = OTHER; note = 2'-O-methyl modified nucleotide
  modified_base 68: mod_base = OTHER; note = 2'-O-methyl modified nucleotide
  modified_base 69: mod_base = OTHER; note = 2'-O-methyl modified nucleotide
  modified_base 70: mod_base = OTHER; note = 2'-O-methyl modified nucleotide
  modified_base 75: mod_base = OTHER; note = 2'-O-methyl modified nucleotide
  modified_base 77: mod_base = OTHER; note = 2'-O-methyl modified nucleotide
  modified_base 80: mod_base = OTHER; note = 2'-O-methyl modified nucleotide
  modified_base 86: mod_base = OTHER; note = 2'-O-methyl modified nucleotide
  modified_base 87: mod_base = OTHER; note = 2'-O-methyl modified nucleotide
  modified_base 89: mod_base = OTHER; note = 2'-O-methyl modified nucleotide
  modified_base 90: mod_base = OTHER; note = 2'-O-methyl modified nucleotide
  modified_base 91: mod_base = OTHER; note = 2'-O-methyl modified nucleotide
  modified_base 92: mod_base = OTHER; note = 2'-O-methyl modified nucleotide
  modified_base 99: mod_base = OTHER; note = nucleotide with phosphorothioate linkage
  modified_base 100: mod_base = OTHER; note = 2'-O-methyl modified nucleotide with phosphorothioate linkage
  modified_base 101: mod_base = OTHER; note = 2'-O-methyl modified nucleotide

SEQ ID NO: 2076 - RNA, 101 nt, synthetic construct; identical to SEQ ID NO: 1076
  source 1..101: mol_type = other RNA
  modified_base 1: mod_base = OTHER; note = 2'-O-methyl modified nucleotide with phosphorothioate linkage
  modified_base 2: mod_base = OTHER; note = 2'-O-methyl modified nucleotide with phosphorothioate linkage
  modified_base 3: mod_base = OTHER; note = 2'-O-methyl modified nucleotide with phosphorothioate linkage
  modified_base 4: mod_base = OTHER; note = 2'-O-methyl modified nucleotide
  modified_base 5: mod_base = OTHER; note = 2'-O-methyl modified nucleotide
  modified_base 8: mod_base = OTHER; note = 2'-O-methyl modified nucleotide
  modified_base 9: mod_base = OTHER; note = 2'-O-methyl modified nucleotide
  modified_base 11: mod_base = OTHER; note = 2'-O-methyl modified nucleotide
  modified_base 13: mod_base = OTHER; note = 2'-O-methyl modified nucleotide
  modified_base 18: mod_base = OTHER; note = 2'-O-methyl modified nucleotide
  modified_base 22: mod_base = OTHER; note = 2'-O-methyl modified nucleotide
  modified_base 25: mod_base = OTHER; note = 2'-O-methyl modified nucleotide
  modified_base 29: mod_base = OTHER; note = 2'-O-methyl modified nucleotide
  modified_base 30: mod_base = OTHER; note = 2'-O-methyl modified nucleotide
  modified_base 31: mod_base = OTHER; note = 2'-O-methyl modified nucleotide
  modified_base 32: mod_base = OTHER; note = 2'-O-methyl modified nucleotide
  modified_base 37: mod_base = OTHER; note = 2'-O-methyl modified nucleotide
  modified_base 38: mod_base = OTHER; note = 2'-O-methyl modified nucleotide
  modified_base 39: mod_base = OTHER; note = 2'-O-methyl modified nucleotide
  modified_base 40: mod_base = OTHER; note = 2'-O-methyl modified nucleotide
  modified_base 41: mod_base = OTHER; note = 2'-O-methyl modified nucleotide
  modified_base 42: mod_base = OTHER; note = 2'-O-methyl modified nucleotide
  modified_base 43: mod_base = OTHER; note = 2'-O-methyl modified nucleotide
  modified_base 47: mod_base = OTHER; note = 2'-O-methyl modified nucleotide
  modified_base 48: mod_base = OTHER; note = 2'-O-methyl modified nucleotide
  modified_base 51: mod_base = OTHER; note = 2'-O-methyl modified nucleotide
  modified_base 54: mod_base = OTHER; note = nucleotide with phosphorothioate linkage
  modified_base 58: mod_base = OTHER; note = 2'-O-methyl modified nucleotide
  modified_base 59: mod_base = OTHER; note = 2'-O-methyl modified nucleotide
  modified_base 61: mod_base = OTHER; note = 2'-O-methyl modified nucleotide
  modified_base 62: mod_base = OTHER; note = 2'-O-methyl modified nucleotide
  modified_base 63: mod_base = OTHER; note = 2'-O-methyl modified nucleotide
  modified_base 64: mod_base = OTHER; note = 2'-O-methyl modified nucleotide
  modified_base 65: mod_base = OTHER; note = 2'-O-methyl modified nucleotide
  modified_base 66: mod_base = OTHER; note = 2'-O-methyl modified nucleotide
  modified_base 67: mod_base = OTHER; note = 2'-O-methyl modified nucleotide
  modified_base 68: mod_base = OTHER; note = 2'-O-methyl modified nucleotide
  modified_base 69: mod_base = OTHER; note = 2'-O-methyl modified nucleotide
  modified_base 70: mod_base = OTHER; note = 2'-O-methyl modified nucleotide
  modified_base 75: mod_base = OTHER; note = 2'-O-methyl modified nucleotide
  modified_base 77: mod_base = OTHER; note = 2'-O-methyl modified nucleotide
  modified_base 80: mod_base = OTHER; note = 2'-O-methyl modified nucleotide
  modified_base 86: mod_base = OTHER; note = 2'-O-methyl modified nucleotide
  modified_base 87: mod_base = OTHER; note = 2'-O-methyl modified nucleotide
  modified_base 89: mod_base = OTHER; note = 2'-O-methyl modified nucleotide
  modified_base 90: mod_base = OTHER; note = 2'-O-methyl modified nucleotide
  modified_base 91: mod_base = OTHER; note = 2'-O-methyl modified nucleotide
  modified_base 92: mod_base = OTHER; note = 2'-O-methyl modified nucleotide
  modified_base 99: mod_base = OTHER; note = nucleotide with phosphorothioate linkage
  modified_base 100: mod_base = OTHER; note = 2'-O-methyl modified nucleotide with phosphorothioate linkage
  modified_base 101: mod_base = OTHER; note = 2'-O-methyl modified nucleotide

SEQ ID NO: 2077 - RNA, 101 nt, synthetic construct; identical to SEQ ID NO: 1077
  source 1..101: mol_type = other RNA
  modified_base 1: mod_base = OTHER; note = 2'-O-methyl modified nucleotide with phosphorothioate linkage
  modified_base 2: mod_base = OTHER; note = 2'-O-methyl modified nucleotide with phosphorothioate linkage
  modified_base 3: mod_base = OTHER; note = 2'-O-methyl modified nucleotide with phosphorothioate linkage
  modified_base 4: mod_base = OTHER; note = 2'-O-methyl modified nucleotide
  modified_base 5: mod_base = OTHER; note = 2'-O-methyl modified nucleotide
  modified_base 8: mod_base = OTHER; note = 2'-O-methyl modified nucleotide
  modified_base 9: mod_base = OTHER; note = 2'-O-methyl modified nucleotide
  modified_base 11: mod_base = OTHER; note = 2'-O-methyl modified nucleotide
  modified_base 13: mod_base = OTHER; note = 2'-O-methyl modified nucleotide
  modified_base 18: mod_base = OTHER; note = 2'-O-methyl modified nucleotide
  modified_base 22: mod_base = OTHER; note = 2'-O-methyl modified nucleotide
  modified_base 25: mod_base = OTHER; note = 2'-O-methyl modified nucleotide
  modified_base 29: mod_base = OTHER; note = 2'-O-methyl modified nucleotide
  modified_base 30: mod_base = OTHER; note = 2'-O-methyl modified nucleotide
  modified_base 31: mod_base = OTHER; note = 2'-O-methyl modified nucleotide
  modified_base 32: mod_base = OTHER; note = 2'-O-methyl modified nucleotide
  modified_base 37: mod_base = OTHER; note = 2'-O-methyl modified nucleotide
  modified_base 38: mod_base = OTHER; note = 2'-O-methyl modified nucleotide
  modified_base 39: mod_base = OTHER; note = 2'-O-methyl modified nucleotide
  modified_base 40: mod_base = OTHER; note = 2'-O-methyl modified nucleotide
  modified_base 41: mod_base = OTHER; note = 2'-O-methyl modified nucleotide
  modified_base 42: mod_base = OTHER; note = 2'-O-methyl modified nucleotide
  modified_base 43: mod_base = OTHER; note = 2'-O-methyl modified nucleotide
  modified_base 47: mod_base = OTHER; note = 2'-O-methyl modified nucleotide
  modified_base 48: mod_base = OTHER; note = 2'-O-methyl modified nucleotide
  modified_base 51: mod_base = OTHER; note = 2'-O-methyl modified nucleotide
  modified_base 54: mod_base = OTHER; note = nucleotide with phosphorothioate linkage
  modified_base 58: mod_base = OTHER; note = 2'-O-methyl modified nucleotide
  modified_base 59: mod_base = OTHER; note = 2'-O-methyl modified nucleotide
  modified_base 61: mod_base = OTHER; note = 2'-O-methyl modified nucleotide
  modified_base 62: mod_base = OTHER; note = 2'-O-methyl modified nucleotide
  modified_base 63: mod_base = OTHER; note = 2'-O-methyl modified nucleotide
  modified_base 64: mod_base = OTHER; note = 2'-O-methyl modified nucleotide
  modified_base 65: mod_base = OTHER; note = 2'-O-methyl modified nucleotide
  modified_base 66: mod_base = OTHER; note = 2'-O-methyl modified nucleotide
  modified_base 67: mod_base = OTHER; note = 2'-O-methyl modified nucleotide
  modified_base 68: mod_base = OTHER; note = 2'-O-methyl modified nucleotide
  modified_base 69: mod_base = OTHER; note = 2'-O-methyl modified nucleotide
  modified_base 70: mod_base = OTHER; note = 2'-O-methyl modified nucleotide
  modified_base 75: mod_base = OTHER; note = 2'-O-methyl modified nucleotide
  modified_base 77: mod_base = OTHER; note = 2'-O-methyl modified nucleotide
  modified_base 80: mod_base = OTHER; note = 2'-O-methyl modified nucleotide
  modified_base 86: mod_base = OTHER; note = 2'-O-methyl modified nucleotide
  modified_base 87: mod_base = OTHER; note = 2'-O-methyl modified nucleotide
  modified_base 89: mod_base = OTHER; note = 2'-O-methyl modified nucleotide
  modified_base 90: mod_base = OTHER; note = 2'-O-methyl modified nucleotide
  modified_base 91: mod_base = OTHER; note = 2'-O-methyl modified nucleotide
  modified_base 92: mod_base = OTHER; note = 2'-O-methyl modified nucleotide
  modified_base 99: mod_base = OTHER; note = nucleotide with phosphorothioate linkage
  modified_base 100: mod_base = OTHER; note = 2'-O-methyl modified nucleotide with phosphorothioate linkage
  modified_base 101: mod_base = OTHER; note = 2'-O-methyl modified nucleotide

SEQ ID NO: 2078 - RNA, 101 nt, synthetic construct; identical to SEQ ID NO: 1078
  source 1..101: mol_type = other RNA
  modified_base 1: mod_base = OTHER; note = 2'-O-methyl modified nucleotide with phosphorothioate linkage
  modified_base 2: mod_base = OTHER; note = 2'-O-methyl modified nucleotide with phosphorothioate linkage
  modified_base 3: mod_base = OTHER; note = 2'-O-methyl modified nucleotide with phosphorothioate linkage
  modified_base 4: mod_base = OTHER; note = 2'-O-methyl modified nucleotide
  modified_base 5: mod_base = OTHER; note = 2'-O-methyl modified nucleotide
  modified_base 8: mod_base = OTHER; note = 2'-O-methyl modified nucleotide
  modified_base 9: mod_base = OTHER; note = 2'-O-methyl modified nucleotide
  modified_base 11: mod_base = OTHER; note = 2'-O-methyl modified nucleotide
  modified_base 13: mod_base = OTHER; note = 2'-O-methyl modified nucleotide
  modified_base 18: mod_base = OTHER; note = 2'-O-methyl modified nucleotide
  modified_base 22: mod_base = OTHER; note = 2'-O-methyl modified nucleotide
  modified_base 25: mod_base = OTHER; note = 2'-O-methyl modified nucleotide
  modified_base 29: mod_base = OTHER; note = 2'-O-methyl modified nucleotide
  modified_base 30: mod_base = OTHER; note = 2'-O-methyl modified nucleotide
  modified_base 31: mod_base = OTHER; note = 2'-O-methyl modified nucleotide
  modified_base 32: mod_base = OTHER; note = 2'-O-methyl modified nucleotide
  modified_base 37: mod_base = OTHER; note = 2'-O-methyl modified nucleotide
  modified_base 38: mod_base = OTHER; note = 2'-O-methyl modified nucleotide
  modified_base 39: mod_base = OTHER; note = 2'-O-methyl modified nucleotide
  modified_base 40: mod_base = OTHER; note = 2'-O-methyl modified nucleotide
  modified_base 41: mod_base = OTHER; note = 2'-O-methyl modified nucleotide
  modified_base 42: mod_base = OTHER; note = 2'-O-methyl modified nucleotide
  modified_base 43: mod_base = OTHER; note = 2'-O-methyl modified nucleotide
  modified_base 47: mod_base = OTHER; note = 2'-O-methyl modified nucleotide
  modified_base 48: mod_base = OTHER; note = 2'-O-methyl modified nucleotide
  modified_base 51: mod_base = OTHER; note = 2'-O-methyl modified nucleotide
  modified_base 54: mod_base = OTHER; note = nucleotide with phosphorothioate linkage
  modified_base 58: mod_base = OTHER; note = 2'-O-methyl modified nucleotide
  modified_base 59: mod_base = OTHER; note = 2'-O-methyl modified nucleotide
  modified_base 61: mod_base = OTHER; note = 2'-O-methyl modified nucleotide
  modified_base 62: mod_base = OTHER; note = 2'-O-methyl modified nucleotide
  modified_base 63: mod_base = OTHER; note = 2'-O-methyl modified nucleotide
  modified_base 64: mod_base = OTHER; note = 2'-O-methyl modified nucleotide
  modified_base 65: mod_base = OTHER; note = 2'-O-methyl modified nucleotide
  modified_base 66: mod_base = OTHER; note = 2'-O-methyl modified nucleotide
  modified_base 67: mod_base = OTHER; note = 2'-O-methyl modified nucleotide
  modified_base 68: mod_base = OTHER; note = 2'-O-methyl modified nucleotide
  modified_base 69: mod_base = OTHER; note = 2'-O-methyl modified nucleotide
  modified_base 70: mod_base = OTHER; note = 2'-O-methyl modified nucleotide
  modified_base 75: mod_base = OTHER; note = 2'-O-methyl modified nucleotide
  modified_base 77: mod_base = OTHER; note = 2'-O-methyl modified nucleotide
  modified_base 80: mod_base = OTHER; note = 2'-O-methyl modified nucleotide
  modified_base 86: mod_base = OTHER; note = 2'-O-methyl modified nucleotide
  modified_base 87: mod_base = OTHER; note = 2'-O-methyl modified nucleotide
  modified_base 89: mod_base = OTHER; note = 2'-O-methyl modified nucleotide
  modified_base 90: mod_base = OTHER; note = 2'-O-methyl modified nucleotide
  modified_base 91: mod_base = OTHER; note = 2'-O-methyl modified nucleotide
  modified_base 92: mod_base = OTHER; note = 2'-O-methyl modified nucleotide
  modified_base 99: mod_base = OTHER; note = nucleotide with phosphorothioate linkage
  modified_base 100: mod_base = OTHER; note = 2'-O-methyl modified nucleotide with phosphorothioate linkage
  modified_base 101: mod_base = OTHER; note = 2'-O-methyl modified nucleotide

SEQ ID NO: 2079 - RNA, 101 nt, synthetic construct; identical to SEQ ID NO: 1079
  source 1..101: mol_type = other RNA
  modified_base 1: mod_base = OTHER; note = 2'-O-methyl modified nucleotide with phosphorothioate linkage
  modified_base 2: mod_base = OTHER; note = 2'-O-methyl modified nucleotide with phosphorothioate linkage
  modified_base 3: mod_base = OTHER; note = 2'-O-methyl modified nucleotide with phosphorothioate linkage
  modified_base 4: mod_base = OTHER; note = 2'-O-methyl modified nucleotide
  modified_base 5: mod_base = OTHER; note = 2'-O-methyl modified nucleotide
  modified_base 8: mod_base = OTHER; note = 2'-O-methyl modified nucleotide
  modified_base 9: mod_base = OTHER; note = 2'-O-methyl modified nucleotide
  modified_base 11: mod_base = OTHER; note = 2'-O-methyl modified nucleotide
  modified_base 13: mod_base = OTHER; note = 2'-O-methyl modified nucleotide
  modified_base 18: mod_base = OTHER; note = 2'-O-methyl modified nucleotide
  modified_base 22: mod_base = OTHER; note = 2'-O-methyl modified nucleotide
  modified_base 25: mod_base = OTHER; note = 2'-O-methyl modified nucleotide
  modified_base 29: mod_base = OTHER; note = 2'-O-methyl modified nucleotide
  modified_base 30: mod_base = OTHER; note = 2'-O-methyl modified nucleotide
  modified_base 31: mod_base = OTHER; note = 2'-O-methyl modified nucleotide
  modified_base 32: mod_base = OTHER; note = 2'-O-methyl modified nucleotide
  modified_base 37: mod_base = OTHER; note = 2'-O-methyl modified nucleotide
  modified_base 38: mod_base = OTHER; note = 2'-O-methyl modified nucleotide
  modified_base 39: mod_base = OTHER; note = 2'-O-methyl modified nucleotide
  modified_base 40: mod_base = OTHER; note = 2'-O-methyl modified nucleotide
  modified_base 41: mod_base = OTHER; note = 2'-O-methyl modified nucleotide
  modified_base 42: mod_base = OTHER; note = 2'-O-methyl modified nucleotide
  modified_base 43: mod_base = OTHER; note = 2'-O-methyl modified nucleotide
  modified_base 47: mod_base = OTHER; note = 2'-O-methyl modified nucleotide
  modified_base 48: mod_base = OTHER; note = 2'-O-methyl modified nucleotide
  modified_base 51: mod_base = OTHER; note = 2'-O-methyl modified nucleotide
  modified_base 54: mod_base = OTHER; note = nucleotide with phosphorothioate linkage
  modified_base 58: mod_base = OTHER; note = 2'-O-methyl modified nucleotide
  modified_base 59: mod_base = OTHER; note = 2'-O-methyl modified nucleotide
  modified_base 61: mod_base = OTHER; note = 2'-O-methyl modified nucleotide
  modified_base 62: mod_base = OTHER; note = 2'-O-methyl modified nucleotide
  modified_base 63: mod_base = OTHER; note = 2'-O-methyl modified nucleotide
  modified_base 64: mod_base = OTHER; note = 2'-O-methyl modified nucleotide
  modified_base 65: mod_base = OTHER; note = 2'-O-methyl modified nucleotide
  modified_base 66: mod_base = OTHER; note = 2'-O-methyl modified nucleotide
  modified_base 67: mod_base = OTHER; note = 2'-O-methyl modified nucleotide
  modified_base 68: mod_base = OTHER; note = 2'-O-methyl modified nucleotide
  modified_base 69: mod_base = OTHER; note = 2'-O-methyl modified nucleotide
  modified_base 70: mod_base = OTHER; note = 2'-O-methyl modified nucleotide
  modified_base 75: mod_base = OTHER; note = 2'-O-methyl modified nucleotide
  modified_base 77: mod_base = OTHER; note = 2'-O-methyl modified nucleotide
  modified_base 80: mod_base = OTHER; note = 2'-O-methyl modified nucleotide
  modified_base 86: mod_base = OTHER; note = 2'-O-methyl modified nucleotide
  modified_base 87: mod_base = OTHER; note = 2'-O-methyl modified nucleotide
  modified_base 89: mod_base = OTHER; note = 2'-O-methyl modified nucleotide
  modified_base 90: mod_base = OTHER; note = 2'-O-methyl modified nucleotide
  modified_base 91: mod_base = OTHER; note = 2'-O-methyl modified nucleotide
  modified_base 92: mod_base = OTHER; note = 2'-O-methyl modified nucleotide
  modified_base 99: mod_base = OTHER; note = nucleotide with phosphorothioate linkage
  modified_base 100: mod_base = OTHER; note = 2'-O-methyl modified nucleotide with phosphorothioate linkage
  modified_base 101: mod_base = OTHER; note = 2'-O-methyl modified nucleotide

SEQ ID NO: 2080 - RNA, 101 nt, synthetic construct; identical to SEQ ID NO: 1080
  source 1..101: mol_type = other RNA
  modified_base 1: mod_base = OTHER; note = 2'-O-methyl modified nucleotide with phosphorothioate linkage
  modified_base 2: mod_base = OTHER; note = 2'-O-methyl modified nucleotide with phosphorothioate linkage
  modified_base 3: mod_base = OTHER; note = 2'-O-methyl modified nucleotide with phosphorothioate linkage
  modified_base 4: mod_base = OTHER; note = 2'-O-methyl modified nucleotide
  modified_base 5: mod_base = OTHER; note = 2'-O-methyl modified nucleotide
  modified_base 8: mod_base = OTHER; note = 2'-O-methyl modified nucleotide
  modified_base 9: mod_base = OTHER; note = 2'-O-methyl modified nucleotide
  modified_base 11: mod_base = OTHER; note = 2'-O-methyl modified nucleotide
  modified_base 13: mod_base = OTHER; note = 2'-O-methyl modified nucleotide
  modified_base 18: mod_base = OTHER; note = 2'-O-methyl modified nucleotide
  modified_base 22: mod_base = OTHER; note = 2'-O-methyl modified nucleotide
  modified_base 25: mod_base = OTHER; note = 2'-O-methyl modified nucleotide
  modified_base 29: mod_base = OTHER; note = 2'-O-methyl modified nucleotide
  modified_base 30: mod_base = OTHER; note = 2'-O-methyl modified nucleotide
  modified_base 31: mod_base = OTHER; note = 2'-O-methyl modified nucleotide
  modified_base 32: mod_base = OTHER; note = 2'-O-methyl modified nucleotide
  modified_base 37: mod_base = OTHER; note = 2'-O-methyl modified nucleotide
  modified_base 38: mod_base = OTHER; note = 2'-O-methyl modified nucleotide
  modified_base 39: mod_base = OTHER; note = 2'-O-methyl modified nucleotide
  modified_base 40: mod_base = OTHER; note = 2'-O-methyl modified nucleotide
  modified_base 41: mod_base = OTHER; note = 2'-O-methyl modified nucleotide
  modified_base 42: mod_base = OTHER; note = 2'-O-methyl modified nucleotide
  modified_base 43: mod_base = OTHER; note = 2'-O-methyl modified nucleotide
  modified_base 47: mod_base = OTHER; note = 2'-O-methyl modified nucleotide
  modified_base 48: mod_base = OTHER; note = 2'-O-methyl modified nucleotide
  modified_base 51: mod_base = OTHER; note = 2'-O-methyl modified nucleotide
  modified_base 54: mod_base = OTHER; note = nucleotide with phosphorothioate linkage
  modified_base 58: mod_base = OTHER; note = 2'-O-methyl modified nucleotide
  modified_base 59: mod_base = OTHER; note = 2'-O-methyl modified nucleotide
  modified_base 61: mod_base = OTHER; note = 2'-O-methyl modified nucleotide
  modified_base 62: mod_base = OTHER; note = 2'-O-methyl modified nucleotide
  modified_base 63: mod_base = OTHER; note = 2'-O-methyl modified nucleotide
  modified_base 64: mod_base = OTHER; note = 2'-O-methyl modified nucleotide
  modified_base 65: mod_base = OTHER; note = 2'-O-methyl modified nucleotide
  modified_base 66: mod_base = OTHER; note = 2'-O-methyl modified nucleotide
  modified_base 67: mod_base = OTHER; note = 2'-O-methyl modified nucleotide
  modified_base 68: mod_base = OTHER; note = 2'-O-methyl modified nucleotide
  modified_base 69: mod_base = OTHER; note = 2'-O-methyl modified nucleotide
  modified_base 70: mod_base = OTHER; note = 2'-O-methyl modified nucleotide
  modified_base 75: mod_base = OTHER; note = 2'-O-methyl modified nucleotide
  modified_base 77: mod_base = OTHER; note = 2'-O-methyl modified nucleotide
  modified_base 80: mod_base = OTHER; note = 2'-O-methyl modified nucleotide
  modified_base 86: mod_base = OTHER; note = 2'-O-methyl modified nucleotide
  modified_base 87: mod_base = OTHER; note = 2'-O-methyl modified nucleotide
  modified_base 89: mod_base = OTHER; note = 2'-O-methyl modified nucleotide
  modified_base 90: mod_base = OTHER; note = 2'-O-methyl modified nucleotide
  modified_base 91: mod_base = OTHER; note = 2'-O-methyl modified nucleotide
  modified_base 92: mod_base = OTHER; note = 2'-O-methyl modified nucleotide
  modified_base 99: mod_base = OTHER; note = nucleotide with phosphorothioate linkage
  modified_base 100: mod_base = OTHER; note = 2'-O-methyl modified nucleotide with phosphorothioate linkage
  modified_base 101: mod_base = OTHER; note = 2'-O-methyl modified nucleotide

SEQ ID NO: 2081-2100 - skipped (20 entries)

SEQ ID NO: 2101 - RNA, 101 nt, synthetic construct; identical to SEQ ID NO: 1101
  source 1..101: mol_type = other RNA
  modified_base 1: mod_base = OTHER; note = 2'-O-methyl modified nucleotide with phosphorothioate linkage
  modified_base 2: mod_base = OTHER; note = 2'-O-methyl modified nucleotide with phosphorothioate linkage
  modified_base 3: mod_base = OTHER; note = 2'-O-methyl modified nucleotide with phosphorothioate linkage
  modified_base 4: mod_base = OTHER; note = 2'-O-methyl modified nucleotide
  modified_base 5: mod_base = OTHER; note = 2'-O-methyl modified nucleotide
  modified_base 8: mod_base = OTHER; note = 2'-O-methyl modified nucleotide
  modified_base 9: mod_base = OTHER; note = 2'-O-methyl modified nucleotide
  modified_base 11: mod_base = OTHER; note = 2'-O-methyl modified nucleotide
  modified_base 13: mod_base = OTHER; note = 2'-O-methyl modified nucleotide
  modified_base 18: mod_base = OTHER; note = 2'-O-methyl modified nucleotide
  modified_base 22: mod_base = OTHER; note = 2'-O-methyl modified nucleotide
  modified_base 25: mod_base = OTHER; note = 2'-O-methyl modified nucleotide
  modified_base 29: mod_base = OTHER; note = 2'-O-methyl modified nucleotide
  modified_base 30: mod_base = OTHER; note = 2'-O-methyl modified nucleotide
  modified_base 31: mod_base = OTHER; note = 2'-O-methyl modified nucleotide
  modified_base 32: mod_base = OTHER; note = 2'-O-methyl modified nucleotide
  modified_base 37: mod_base = OTHER; note = 2'-O-methyl modified nucleotide
  modified_base 38: mod_base = OTHER; note = 2'-O-methyl modified nucleotide
  modified_base 39: mod_base = OTHER; note = 2'-O-methyl modified nucleotide
  modified_base 40: mod_base = OTHER; note = 2'-O-methyl modified nucleotide
  modified_base 41: mod_base = OTHER; note = 2'-O-methyl modified nucleotide
  modified_base 42: mod_base = OTHER; note = 2'-O-methyl modified nucleotide
  modified_base 43: mod_base = OTHER; note = 2'-O-methyl modified nucleotide
  modified_base 47: mod_base = OTHER; note = 2'-O-methyl modified nucleotide
  modified_base 48: mod_base = OTHER; note = 2'-O-methyl modified nucleotide
  modified_base 51: mod_base = OTHER; note = 2'-O-methyl modified nucleotide
  modified_base 54: mod_base = OTHER; note = nucleotide with phosphorothioate linkage
  modified_base 58: mod_base = OTHER; note = 2'-O-methyl modified nucleotide
  modified_base 59: mod_base = OTHER; note = 2'-O-methyl modified nucleotide
  modified_base 61: mod_base = OTHER; note = 2'-O-methyl modified nucleotide
  modified_base 62: mod_base = OTHER; note = 2'-O-methyl modified nucleotide
  modified_base 63: mod_base = OTHER; note = 2'-O-methyl modified nucleotide
  modified_base 64: mod_base = OTHER; note = 2'-O-methyl modified nucleotide
  modified_base 65: mod_base = OTHER; note = 2'-O-methyl modified nucleotide
  modified_base 66: mod_base = OTHER; note = 2'-O-methyl modified nucleotide
  modified_base 67: mod_base = OTHER; note = 2'-O-methyl modified nucleotide
  modified_base 68: mod_base = OTHER; note = 2'-O-methyl modified nucleotide
  modified_base 69: mod_base = OTHER; note = 2'-O-methyl modified nucleotide
  modified_base 70: mod_base = OTHER; note = 2'-O-methyl modified nucleotide
  modified_base 75: mod_base = OTHER; note = 2'-O-methyl modified nucleotide
  modified_base 77: mod_base = OTHER; note = 2'-O-methyl modified nucleotide
  modified_base 80: mod_base = OTHER; note = 2'-O-methyl modified nucleotide
  modified_base 86: mod_base = OTHER; note = 2'-O-methyl modified nucleotide
  modified_base 87: mod_base = OTHER; note = 2'-O-methyl modified nucleotide
  modified_base 89: mod_base = OTHER; note = 2'-O-methyl modified nucleotide
  modified_base 90: mod_base = OTHER; note = 2'-O-methyl modified nucleotide
  modified_base 91: mod_base = OTHER; note = 2'-O-methyl modified nucleotide
  modified_base 92: mod_base = OTHER; note = 2'-O-methyl modified nucleotide
  modified_base 99: mod_base = OTHER; note = nucleotide with phosphorothioate linkage
  modified_base 100: mod_base = OTHER; note = 2'-O-methyl modified nucleotide with phosphorothioate linkage
  modified_base 101: mod_base = OTHER; note = 2'-O-methyl modified nucleotide

SEQ ID NO: 2102 - RNA, 101 nt, synthetic construct; identical to SEQ ID NO: 811
  source 1..101: mol_type = other RNA
  modified_base 1: mod_base = OTHER; note = 2'-O-methyl modified nucleotide with phosphorothioate linkage
  modified_base 2: mod_base = OTHER; note = 2'-O-methyl modified nucleotide with phosphorothioate linkage
  modified_base 3: mod_base = OTHER; note = 2'-O-methyl modified nucleotide with phosphorothioate linkage
  modified_base 4: mod_base = OTHER; note = 2'-O-methyl modified nucleotide
  modified_base 5: mod_base = OTHER; note = 2'-O-methyl modified nucleotide
  modified_base 8: mod_base = OTHER; note = 2'-O-methyl modified nucleotide
  modified_base 9: mod_base = OTHER; note = 2'-O-methyl modified nucleotide
  modified_base 11: mod_base = OTHER; note = 2'-O-methyl modified nucleotide
  modified_base 13: mod_base = OTHER; note = 2'-O-methyl modified nucleotide
  modified_base 18: mod_base = OTHER; note = 2'-O-methyl modified nucleotide
  modified_base 22: mod_base = OTHER; note = 2'-O-methyl modified nucleotide
  modified_base 25: mod_base = OTHER; note = 2'-O-methyl modified nucleotide
  modified_base 29: mod_base = OTHER; note = 2'-O-methyl modified nucleotide
  modified_base 30: mod_base = OTHER; note = 2'-O-methyl modified nucleotide
  modified_base 31: mod_base = OTHER; note = 2'-O-methyl modified nucleotide
  modified_base 32: mod_base = OTHER; note = 2'-O-methyl modified nucleotide
  modified_base 37: mod_base = OTHER; note = 2'-O-methyl modified nucleotide
  modified_base 38: mod_base = OTHER; note = 2'-O-methyl modified nucleotide
  modified_base 39: mod_base = OTHER; note = 2'-O-methyl modified nucleotide
  modified_base 40: mod_base = OTHER; note = 2'-O-methyl modified nucleotide
  modified_base 41: mod_base = OTHER; note = 2'-O-methyl modified nucleotide
  modified_base 42: mod_base = OTHER; note = 2'-O-methyl modified nucleotide
  modified_base 43: mod_base = OTHER; note = 2'-O-methyl modified nucleotide
  modified_base 47: mod_base = OTHER; note = 2'-O-methyl modified nucleotide
  modified_base 48: mod_base = OTHER; note = 2'-O-methyl modified nucleotide
  modified_base 51: mod_base = OTHER; note = 2'-O-methyl modified nucleotide
  modified_base 54: mod_base = OTHER; note = nucleotide with phosphorothioate linkage
  modified_base 58: mod_base = OTHER; note = 2'-O-methyl modified nucleotide
  modified_base 59: mod_base = OTHER; note = 2'-O-methyl modified nucleotide
  modified_base 61: mod_base = OTHER; note = 2'-O-methyl modified nucleotide
  modified_base 62: mod_base = OTHER; note = 2'-O-methyl modified nucleotide
  modified_base 63: mod_base = OTHER; note = 2'-O-methyl modified nucleotide
  modified_base 64: mod_base = OTHER; note = 2'-O-methyl modified nucleotide
  modified_base 65: mod_base = OTHER; note = 2'-O-methyl modified nucleotide
  modified_base 66: mod_base = OTHER; note = 2'-O-methyl modified nucleotide
  modified_base 67: mod_base = OTHER; note = 2'-O-methyl modified nucleotide
  modified_base 68: mod_base = OTHER; note = 2'-O-methyl modified nucleotide
  modified_base 69: mod_base = OTHER; note = 2'-O-methyl modified nucleotide
  modified_base 70: mod_base = OTHER; note = 2'-O-methyl modified nucleotide
  modified_base 75: mod_base = OTHER; note = 2'-O-methyl modified nucleotide
  modified_base 77: mod_base = OTHER; note = 2'-O-methyl modified nucleotide
  modified_base 80: mod_base = OTHER; note = 2'-O-methyl modified nucleotide
  modified_base 86: mod_base = OTHER; note = 2'-O-methyl modified nucleotide
  modified_base 87: mod_base = OTHER; note = 2'-O-methyl modified nucleotide
  modified_base 89: mod_base = OTHER; note = 2'-O-methyl modified nucleotide
  modified_base 90: mod_base = OTHER; note = 2'-O-methyl modified nucleotide
  modified_base 91: mod_base = OTHER; note = 2'-O-methyl modified nucleotide
  modified_base 92: mod_base = OTHER; note = 2'-O-methyl modified nucleotide
  modified_base 99: mod_base = OTHER; note = nucleotide with phosphorothioate linkage
  modified_base 100: mod_base = OTHER; note = 2'-O-methyl modified nucleotide with phosphorothioate linkage
  modified_base 101: mod_base = OTHER; note = 2'-O-methyl modified nucleotide

SEQ ID NO: 2103 - RNA, 101 nt, synthetic construct; identical to SEQ ID NO: 1103
  source 1..101: mol_type = other RNA
  modified_base 1: mod_base = OTHER; note = 2'-O-methyl modified nucleotide with phosphorothioate linkage
  modified_base 2: mod_base = OTHER; note = 2'-O-methyl modified nucleotide with phosphorothioate linkage
  modified_base 3: mod_base = OTHER; note = 2'-O-methyl modified nucleotide with phosphorothioate linkage
  modified_base 4: mod_base = OTHER; note = 2'-O-methyl modified nucleotide
  modified_base 5: mod_base = OTHER; note = 2'-O-methyl modified nucleotide
  modified_base 8: mod_base = OTHER; note = 2'-O-methyl modified nucleotide
  modified_base 9: mod_base = OTHER; note = 2'-O-methyl modified nucleotide
  modified_base 11: mod_base = OTHER; note = 2'-O-methyl modified nucleotide
  modified_base 13: mod_base = OTHER; note = 2'-O-methyl modified nucleotide
  modified_base 18: mod_base = OTHER; note = 2'-O-methyl modified nucleotide
  modified_base 22: mod_base = OTHER; note = 2'-O-methyl modified nucleotide
  modified_base 25: mod_base = OTHER; note = 2'-O-methyl modified nucleotide
  modified_base 29: mod_base = OTHER; note = 2'-O-methyl modified nucleotide
  modified_base 30: mod_base = OTHER; note = 2'-O-methyl modified nucleotide
  modified_base 31: mod_base = OTHER; note = 2'-O-methyl modified nucleotide
  modified_base 32: mod_base = OTHER; note = 2'-O-methyl modified nucleotide
  modified_base 37: mod_base = OTHER; note = 2'-O-methyl modified nucleotide
  modified_base 38: mod_base = OTHER; note = 2'-O-methyl modified nucleotide
  modified_base 39: mod_base = OTHER; note = 2'-O-methyl modified nucleotide
  modified_base 40: mod_base = OTHER; note = 2'-O-methyl modified nucleotide
  modified_base 41: mod_base = OTHER; note = 2'-O-methyl modified nucleotide
  modified_base 42: mod_base = OTHER; note = 2'-O-methyl modified nucleotide
  modified_base 43: mod_base = OTHER; note = 2'-O-methyl modified nucleotide
  modified_base 47: mod_base = OTHER; note = 2'-O-methyl modified nucleotide
  modified_base 48: mod_base = OTHER; note = 2'-O-methyl modified nucleotide
  modified_base 51: mod_base = OTHER; note = 2'-O-methyl modified nucleotide
  modified_base 54: mod_base = OTHER; note = nucleotide with phosphorothioate linkage
  modified_base 58: mod_base = OTHER; note = 2'-O-methyl modified nucleotide
  modified_base 59: mod_base = OTHER; note = 2'-O-methyl modified nucleotide
  modified_base 61: mod_base = OTHER; note = 2'-O-methyl modified nucleotide
  modified_base 62: mod_base = OTHER; note = 2'-O-methyl modified nucleotide
  modified_base 63: mod_base = OTHER; note = 2'-O-methyl modified nucleotide
  modified_base 64: mod_base = OTHER; note = 2'-O-methyl modified nucleotide
  modified_base 65: mod_base = OTHER; note = 2'-O-methyl modified nucleotide
  modified_base 66: mod_base = OTHER; note = 2'-O-methyl modified nucleotide
  modified_base 67: mod_base = OTHER; note = 2'-O-methyl modified nucleotide
  modified_base 68: mod_base = OTHER; note = 2'-O-methyl modified nucleotide
  modified_base 69: mod_base = OTHER; note = 2'-O-methyl modified nucleotide
  modified_base 70: mod_base = OTHER; note = 2'-O-methyl modified nucleotide
  modified_base 75: mod_base = OTHER; note = 2'-O-methyl modified nucleotide
  modified_base 77: mod_base = OTHER; note = 2'-O-methyl modified nucleotide
  modified_base 80: mod_base = OTHER; note = 2'-O-methyl modified nucleotide
  modified_base 86: mod_base = OTHER; note = 2'-O-methyl modified nucleotide
  modified_base 87: mod_base = OTHER; note = 2'-O-methyl modified nucleotide
  modified_base 89: mod_base = OTHER; note = 2'-O-methyl modified nucleotide
  modified_base 90: mod_base = OTHER; note = 2'-O-methyl modified nucleotide
  modified_base 91: mod_base = OTHER; note = 2'-O-methyl modified nucleotide
  modified_base 92: mod_base = OTHER; note = 2'-O-methyl modified nucleotide
  modified_base 99: mod_base = OTHER; note = nucleotide with phosphorothioate linkage
  modified_base 100: mod_base = OTHER; note = 2'-O-methyl modified nucleotide with phosphorothioate linkage
  modified_base 101: mod_base = OTHER; note = 2'-O-methyl modified nucleotide

SEQ ID NO: 2104 - RNA, 101 nt, synthetic construct; identical to SEQ ID NO: 1104
  source 1..101: mol_type = other RNA
  modified_base 1: mod_base = OTHER; note = 2'-O-methyl modified nucleotide with phosphorothioate linkage
  modified_base 2: mod_base = OTHER; note = 2'-O-methyl modified nucleotide with phosphorothioate linkage
  modified_base 3: mod_base = OTHER; note = 2'-O-methyl modified nucleotide with phosphorothioate linkage
  modified_base 4: mod_base = OTHER; note = 2'-O-methyl modified nucleotide
  modified_base 5: mod_base = OTHER; note = 2'-O-methyl modified nucleotide
  modified_base 8: mod_base = OTHER; note = 2'-O-methyl modified nucleotide
  modified_base 9: mod_base = OTHER; note = 2'-O-methyl modified nucleotide
  modified_base 11: mod_base = OTHER; note = 2'-O-methyl modified nucleotide
  modified_base 13: mod_base = OTHER; note = 2'-O-methyl modified nucleotide
  modified_base 18: mod_base = OTHER; note = 2'-O-methyl modified nucleotide
  modified_base 22: mod_base = OTHER; note = 2'-O-methyl modified nucleotide
  modified_base 25: mod_base = OTHER; note = 2'-O-methyl modified nucleotide
  modified_base 29: mod_base = OTHER; note = 2'-O-methyl modified nucleotide
  modified_base 30: mod_base = OTHER; note = 2'-O-methyl modified nucleotide
  modified_base 31: mod_base = OTHER; note = 2'-O-methyl modified nucleotide
  modified_base 32: mod_base = OTHER; note = 2'-O-methyl modified nucleotide
  modified_base 37: mod_base = OTHER; note = 2'-O-methyl modified nucleotide
  modified_base 38: mod_base = OTHER; note = 2'-O-methyl modified nucleotide
  modified_base 39: mod_base = OTHER; note = 2'-O-methyl modified nucleotide
  modified_base 40: mod_base = OTHER; note = 2'-O-methyl modified nucleotide
  modified_base 41: mod_base = OTHER; note = 2'-O-methyl modified nucleotide
  modified_base 42: mod_base = OTHER; note = 2'-O-methyl modified nucleotide
  modified_base 43: mod_base = OTHER; note = 2'-O-methyl modified nucleotide
  modified_base 47: mod_base = OTHER; note = 2'-O-methyl modified nucleotide
  modified_base 48: mod_base = OTHER; note = 2'-O-methyl modified nucleotide
  modified_base 51: mod_base = OTHER; note = 2'-O-methyl modified nucleotide
  modified_base 54: mod_base = OTHER; note = nucleotide with phosphorothioate linkage
  modified_base 58: mod_base = OTHER; note = 2'-O-methyl modified nucleotide
  modified_base 59: mod_base = OTHER; note = 2'-O-methyl modified nucleotide
  modified_base 61: mod_base = OTHER; note = 2'-O-methyl modified nucleotide
  modified_base 62: mod_base = OTHER; note = 2'-O-methyl modified nucleotide
  modified_base 63: mod_base = OTHER; note = 2'-O-methyl modified nucleotide
  modified_base 64: mod_base = OTHER; note = 2'-O-methyl modified nucleotide
  modified_base 65: mod_base = OTHER; note = 2'-O-methyl modified nucleotide
  modified_base 66: mod_base = OTHER; note = 2'-O-methyl modified nucleotide
  modified_base 67: mod_base = OTHER; note = 2'-O-methyl modified nucleotide
  modified_base 68: mod_base = OTHER; note = 2'-O-methyl modified nucleotide
  modified_base 69: mod_base = OTHER; note = 2'-O-methyl modified nucleotide
  modified_base 70: mod_base = OTHER; note = 2'-O-methyl modified nucleotide
  modified_base 75: mod_base = OTHER; note = 2'-O-methyl modified nucleotide
  modified_base 77: mod_base = OTHER; note = 2'-O-methyl modified nucleotide
  modified_base 80: mod_base = OTHER; note = 2'-O-methyl modified nucleotide
  modified_base 86: mod_base = OTHER; note = 2'-O-methyl modified nucleotide
  modified_base 87: mod_base = OTHER; note = 2'-O-methyl modified nucleotide
  modified_base 89: mod_base = OTHER; note = 2'-O-methyl modified nucleotide
  modified_base 90: mod_base = OTHER; note = 2'-O-methyl modified nucleotide
  modified_base 91: mod_base = OTHER; note = 2'-O-methyl modified nucleotide
  modified_base 92: mod_base = OTHER; note = 2'-O-methyl modified nucleotide
  modified_base 99: mod_base = OTHER; note = nucleotide with phosphorothioate linkage
  modified_base 100: mod_base = OTHER; note = 2'-O-methyl modified nucleotide with phosphorothioate linkage
  modified_base 101: mod_base = OTHER; note = 2'-O-methyl modified nucleotide

SEQ ID NO: 2105 - RNA, 101 nt, synthetic construct; identical to SEQ ID NO: 1105
  source 1..101: mol_type = other RNA
  modified_base 1: mod_base = OTHER; note = 2'-O-methyl modified nucleotide with phosphorothioate linkage
  modified_base 2: mod_base = OTHER; note = 2'-O-methyl modified nucleotide with phosphorothioate linkage
  modified_base 3: mod_base = OTHER; note = 2'-O-methyl modified nucleotide with phosphorothioate linkage
  modified_base 4: mod_base = OTHER; note = 2'-O-methyl modified nucleotide
  modified_base 5: mod_base = OTHER; note = 2'-O-methyl modified nucleotide
  modified_base 8: mod_base = OTHER; note = 2'-O-methyl modified nucleotide
  modified_base 9: mod_base = OTHER; note = 2'-O-methyl modified nucleotide
  modified_base 11: mod_base = OTHER; note = 2'-O-methyl modified nucleotide
  modified_base 13: mod_base = OTHER; note = 2'-O-methyl modified nucleotide
  modified_base 18: mod_base = OTHER; note = 2'-O-methyl modified nucleotide
  modified_base 22: mod_base = OTHER; note = 2'-O-methyl modified nucleotide
  modified_base 25: mod_base = OTHER; note = 2'-O-methyl modified nucleotide
  modified_base 29: mod_base = OTHER; note = 2'-O-methyl modified nucleotide
  modified_base 30: mod_base = OTHER; note = 2'-O-methyl modified nucleotide
  modified_base 31: mod_base = OTHER; note = 2'-O-methyl modified nucleotide
  modified_base 32: mod_base = OTHER; note = 2'-O-methyl modified nucleotide
  modified_base 37: mod_base = OTHER; note = 2'-O-methyl modified nucleotide
  modified_base 38: mod_base = OTHER; note = 2'-O-methyl modified nucleotide
  modified_base 39: mod_base = OTHER; note = 2'-O-methyl modified nucleotide
  modified_base 40: mod_base = OTHER; note = 2'-O-methyl modified nucleotide
  modified_base 41: mod_base = OTHER; note = 2'-O-methyl modified nucleotide
  modified_base 42: mod_base = OTHER; note = 2'-O-methyl modified nucleotide
  modified_base 43: mod_base = OTHER; note = 2'-O-methyl modified nucleotide
  modified_base 47: mod_base = OTHER; note = 2'-O-methyl modified nucleotide
  modified_base 48: mod_base = OTHER; note = 2'-O-methyl modified nucleotide
  modified_base 51: mod_base = OTHER; note = 2'-O-methyl modified nucleotide
  modified_base 54: mod_base = OTHER; note = nucleotide with phosphorothioate linkage
  modified_base 58: mod_base = OTHER; note = 2'-O-methyl modified nucleotide
  modified_base 59: mod_base = OTHER; note = 2'-O-methyl modified nucleotide
  modified_base 61: mod_base = OTHER; note = 2'-O-methyl modified nucleotide
  modified_base 62: mod_base = OTHER; note = 2'-O-methyl modified nucleotide
  modified_base 63: mod_base = OTHER; note = 2'-O-methyl modified nucleotide
  modified_base 64: mod_base = OTHER; note = 2'-O-methyl modified nucleotide
  modified_base 65: mod_base = OTHER; note = 2'-O-methyl modified nucleotide
  modified_base 66: mod_base = OTHER; note = 2'-O-methyl modified nucleotide
  modified_base 67: mod_base = OTHER; note = 2'-O-methyl modified nucleotide
  modified_base 68: mod_base = OTHER; note = 2'-O-methyl modified nucleotide
  modified_base 69: mod_base = OTHER; note = 2'-O-methyl modified nucleotide
  modified_base 70: mod_base = OTHER; note = 2'-O-methyl modified nucleotide
  modified_base 75: mod_base = OTHER; note = 2'-O-methyl modified nucleotide
  modified_base 77: mod_base = OTHER; note = 2'-O-methyl modified nucleotide
  modified_base 80: mod_base = OTHER; note = 2'-O-methyl modified nucleotide
  modified_base 86: mod_base = OTHER; note = 2'-O-methyl modified nucleotide
  modified_base 87: mod_base = OTHER; note = 2'-O-methyl modified nucleotide
  modified_base 89: mod_base = OTHER; note = 2'-O-methyl modified nucleotide
  modified_base 90: mod_base = OTHER; note = 2'-O-methyl modified nucleotide
  modified_base 91: mod_base = OTHER; note = 2'-O-methyl modified nucleotide
  modified_base 92: mod_base = OTHER; note = 2'-O-methyl modified nucleotide
  modified_base 99: mod_base = OTHER; note = nucleotide with phosphorothioate linkage
  modified_base 100: mod_base = OTHER; note = 2'-O-methyl modified nucleotide with phosphorothioate linkage
  modified_base 101: mod_base = OTHER; note = 2'-O-methyl modified nucleotide

SEQ ID NO: 2106 - RNA, 101 nt, synthetic construct; identical to SEQ ID NO: 1106
  source 1..101: mol_type = other RNA
  modified_base 1: mod_base = OTHER; note = 2'-O-methyl modified nucleotide with phosphorothioate linkage
  modified_base 2: mod_base = OTHER; note = 2'-O-methyl modified nucleotide with phosphorothioate linkage
  modified_base 3: mod_base = OTHER; note = 2'-O-methyl modified nucleotide with phosphorothioate linkage
  modified_base 4: mod_base = OTHER; note = 2'-O-methyl modified nucleotide
  modified_base 5: mod_base = OTHER; note = 2'-O-methyl modified nucleotide
  modified_base 8: mod_base = OTHER; note = 2'-O-methyl modified nucleotide
  modified_base 9: mod_base = OTHER; note = 2'-O-methyl modified nucleotide
  modified_base 11: mod_base = OTHER; note = 2'-O-methyl modified nucleotide
  modified_base 13: mod_base = OTHER; note = 2'-O-methyl modified nucleotide
  modified_base 18: mod_base = OTHER; note = 2'-O-methyl modified nucleotide
  modified_base 22: mod_base = OTHER; note = 2'-O-methyl modified nucleotide
  modified_base 25: mod_base = OTHER; note = 2'-O-methyl modified nucleotide
  modified_base 29: mod_base = OTHER; note = 2'-O-methyl modified nucleotide
  modified_base 30: mod_base = OTHER; note = 2'-O-methyl modified nucleotide
  modified_base 31: mod_base = OTHER; note = 2'-O-methyl modified nucleotide
  modified_base 32: mod_base = OTHER; note = 2'-O-methyl modified nucleotide
  modified_base 37: mod_base = OTHER; note = 2'-O-methyl modified nucleotide
  modified_base 38: mod_base = OTHER; note = 2'-O-methyl modified nucleotide
  modified_base 39: mod_base = OTHER; note = 2'-O-methyl modified nucleotide
  modified_base 40: mod_base = OTHER; note = 2'-O-methyl modified nucleotide
  modified_base 41: mod_base = OTHER; note = 2'-O-methyl modified nucleotide
  modified_base 42: mod_base = OTHER; note = 2'-O-methyl modified nucleotide
  modified_base 43: mod_base = OTHER; note = 2'-O-methyl modified nucleotide
  modified_base 47: mod_base = OTHER; note = 2'-O-methyl modified nucleotide
  modified_base 48: mod_base = OTHER; note = 2'-O-methyl modified nucleotide
  modified_base 51: mod_base = OTHER; note = 2'-O-methyl modified nucleotide
  modified_base 54: mod_base = OTHER; note = nucleotide with phosphorothioate linkage
  modified_base 58: mod_base = OTHER; note = 2'-O-methyl modified nucleotide
  modified_base 59: mod_base = OTHER; note = 2'-O-methyl modified nucleotide
  modified_base 61: mod_base = OTHER; note = 2'-O-methyl modified nucleotide
  modified_base 62: mod_base = OTHER; note = 2'-O-methyl modified nucleotide
  modified_base 63: mod_base = OTHER; note = 2'-O-methyl modified nucleotide
  modified_base 64: mod_base = OTHER; note = 2'-O-methyl modified nucleotide
  modified_base 65: mod_base = OTHER; note = 2'-O-methyl modified nucleotide
  modified_base 66: mod_base = OTHER; note = 2'-O-methyl modified nucleotide
  modified_base 67: mod_base = OTHER; note = 2'-O-methyl modified nucleotide
  modified_base 68: mod_base = OTHER; note = 2'-O-methyl modified nucleotide
  modified_base 69: mod_base = OTHER; note = 2'-O-methyl modified nucleotide
  modified_base 70: mod_base = OTHER; note = 2'-O-methyl modified nucleotide
  modified_base 75: mod_base = OTHER; note = 2'-O-methyl modified nucleotide
  modified_base 77: mod_base = OTHER; note = 2'-O-methyl modified nucleotide
  modified_base 80: mod_base = OTHER; note = 2'-O-methyl modified nucleotide
  modified_base 86: mod_base = OTHER; note = 2'-O-methyl modified nucleotide
  modified_base 87: mod_base = OTHER; note = 2'-O-methyl modified nucleotide
  modified_base 89: mod_base = OTHER; note = 2'-O-methyl modified nucleotide
  modified_base 90: mod_base = OTHER; note = 2'-O-methyl modified nucleotide
  modified_base 91: mod_base = OTHER; note = 2'-O-methyl modified nucleotide
  modified_base 92: mod_base = OTHER; note = 2'-O-methyl modified nucleotide
  modified_base 99: mod_base = OTHER; note = nucleotide with phosphorothioate linkage
  modified_base 100: mod_base = OTHER; note = 2'-O-methyl modified nucleotide with phosphorothioate linkage
  modified_base 101: mod_base = OTHER; note = 2'-O-methyl modified nucleotide

SEQ ID NO: 2107 - RNA, 101 nt, synthetic construct; identical to SEQ ID NO: 1107
  source 1..101: mol_type = other RNA
  modified_base 1: mod_base = OTHER; note = 2'-O-methyl modified nucleotide with phosphorothioate linkage
  modified_base 2: mod_base = OTHER; note = 2'-O-methyl modified nucleotide with phosphorothioate linkage
  modified_base 3: mod_base = OTHER; note = 2'-O-methyl modified nucleotide with phosphorothioate linkage
  modified_base 4: mod_base = OTHER; note = 2'-O-methyl modified nucleotide
  modified_base 5: mod_base = OTHER; note = 2'-O-methyl modified nucleotide
  modified_base 8: mod_base = OTHER; note = 2'-O-methyl modified nucleotide
  modified_base 9: mod_base = OTHER; note = 2'-O-methyl modified nucleotide
  modified_base 11: mod_base = OTHER; note = 2'-O-methyl modified nucleotide
  modified_base 13: mod_base = OTHER; note = 2'-O-methyl modified nucleotide
  modified_base 18: mod_base = OTHER; note = 2'-O-methyl modified nucleotide
  modified_base 22: mod_base = OTHER; note = 2'-O-methyl modified nucleotide
  modified_base 25: mod_base = OTHER; note = 2'-O-methyl modified nucleotide
  modified_base 29: mod_base = OTHER; note = 2'-O-methyl modified nucleotide
  modified_base 30: mod_base = OTHER; note = 2'-O-methyl modified nucleotide
  modified_base 31: mod_base = OTHER; note = 2'-O-methyl modified nucleotide
  modified_base 32: mod_base = OTHER; note = 2'-O-methyl modified nucleotide
  modified_base 37: mod_base = OTHER; note = 2'-O-methyl modified nucleotide
  modified_base 38: mod_base = OTHER; note = 2'-O-methyl modified nucleotide
  modified_base 39: mod_base = OTHER; note = 2'-O-methyl modified nucleotide
  modified_base 40: mod_base = OTHER; note = 2'-O-methyl modified nucleotide
  modified_base 41: mod_base = OTHER; note = 2'-O-methyl modified nucleotide
  modified_base 42: mod_base = OTHER; note = 2'-O-methyl modified nucleotide
  modified_base 43: mod_base = OTHER; note = 2'-O-methyl modified nucleotide
  modified_base 47: mod_base = OTHER; note = 2'-O-methyl modified nucleotide
  modified_base 48: mod_base = OTHER; note = 2'-O-methyl modified nucleotide
  modified_base 51: mod_base = OTHER; note = 2'-O-methyl modified nucleotide
  modified_base 54: mod_base = OTHER; note = nucleotide with phosphorothioate linkage
  modified_base 58: mod_base = OTHER; note = 2'-O-methyl modified nucleotide
  modified_base 59: mod_base = OTHER; note = 2'-O-methyl modified nucleotide
  modified_base 61: mod_base = OTHER; note = 2'-O-methyl modified nucleotide
  modified_base 62: mod_base = OTHER; note = 2'-O-methyl modified nucleotide
  modified_base 63: mod_base = OTHER; note = 2'-O-methyl modified nucleotide
  modified_base 64: mod_base = OTHER; note = 2'-O-methyl modified nucleotide
  modified_base 65: mod_base = OTHER; note = 2'-O-methyl modified nucleotide
  modified_base 66: mod_base = OTHER; note = 2'-O-methyl modified nucleotide
  modified_base 67: mod_base = OTHER; note = 2'-O-methyl modified nucleotide
  modified_base 68: mod_base = OTHER; note = 2'-O-methyl modified nucleotide
  modified_base 69: mod_base = OTHER; note = 2'-O-methyl modified nucleotide
  modified_base 70: mod_base = OTHER; note = 2'-O-methyl modified nucleotide
  modified_base 75: mod_base = OTHER; note = 2'-O-methyl modified nucleotide
  modified_base 77: mod_base = OTHER; note = 2'-O-methyl modified nucleotide
  modified_base 80: mod_base = OTHER; note = 2'-O-methyl modified nucleotide
  modified_base 86: mod_base = OTHER; note = 2'-O-methyl modified nucleotide
  modified_base 87: mod_base = OTHER; note = 2'-O-methyl modified nucleotide
  modified_base 89: mod_base = OTHER; note = 2'-O-methyl modified nucleotide
  modified_base 90: mod_base = OTHER; note = 2'-O-methyl modified nucleotide
  modified_base 91: mod_base = OTHER; note = 2'-O-methyl modified nucleotide
  modified_base 92: mod_base = OTHER; note = 2'-O-methyl modified nucleotide
  modified_base 99: mod_base = OTHER; note = nucleotide with phosphorothioate linkage
  modified_base 100: mod_base = OTHER; note = 2'-O-methyl modified nucleotide with phosphorothioate linkage
  modified_base 101: mod_base = OTHER; note = 2'-O-methyl modified nucleotide

SEQ ID NO: 2108 - RNA, 101 nt, synthetic construct; identical to SEQ ID NO: 1108
  source 1..101: mol_type = other RNA
  modified_base 1: mod_base = OTHER; note = 2'-O-methyl modified nucleotide with phosphorothioate linkage
  modified_base 2: mod_base = OTHER; note = 2'-O-methyl modified nucleotide with phosphorothioate linkage
  modified_base 3: mod_base = OTHER; note = 2'-O-methyl modified nucleotide with phosphorothioate linkage
  modified_base 4: mod_base = OTHER; note = 2'-O-methyl modified nucleotide
  modified_base 5: mod_base = OTHER; note = 2'-O-methyl modified nucleotide
  modified_base 8: mod_base = OTHER; note = 2'-O-methyl modified nucleotide
  modified_base 9: mod_base = OTHER; note = 2'-O-methyl modified nucleotide
  modified_base 11: mod_base = OTHER; note = 2'-O-methyl modified nucleotide
  modified_base 13: mod_base = OTHER; note = 2'-O-methyl modified nucleotide
  modified_base 18: mod_base = OTHER; note = 2'-O-methyl modified nucleotide
  modified_base 22: mod_base = OTHER; note = 2'-O-methyl modified nucleotide
  modified_base 25: mod_base = OTHER; note = 2'-O-methyl modified nucleotide
  modified_base 29: mod_base = OTHER; note = 2'-O-methyl modified nucleotide
  modified_base 30: mod_base = OTHER; note = 2'-O-methyl modified nucleotide
  modified_base 31: mod_base = OTHER; note = 2'-O-methyl modified nucleotide
  modified_base 32: mod_base = OTHER; note = 2'-O-methyl modified nucleotide
  modified_base 37: mod_base = OTHER; note = 2'-O-methyl modified nucleotide
  modified_base 38: mod_base = OTHER; note = 2'-O-methyl modified nucleotide
  modified_base 39: mod_base = OTHER; note = 2'-O-methyl modified nucleotide
  modified_base 40: mod_base = OTHER; note = 2'-O-methyl modified nucleotide
  modified_base 41: mod_base = OTHER; note = 2'-O-methyl modified nucleotide
  modified_base 42: mod_base = OTHER; note = 2'-O-methyl modified nucleotide
  modified_base 43: mod_base = OTHER; note = 2'-O-methyl modified nucleotide
  modified_base 47: mod_base = OTHER; note = 2'-O-methyl modified nucleotide
  modified_base 48: mod_base = OTHER; note = 2'-O-methyl modified nucleotide
  modified_base 51: mod_base = OTHER; note = 2'-O-methyl modified nucleotide
  modified_base 54: mod_base = OTHER; note = nucleotide with phosphorothioate linkage
  modified_base 58: mod_base = OTHER; note = 2'-O-methyl modified nucleotide
  modified_base 59: mod_base = OTHER; note = 2'-O-methyl modified nucleotide
  modified_base 61: mod_base = OTHER; note = 2'-O-methyl modified nucleotide
  modified_base 62: mod_base = OTHER; note = 2'-O-methyl modified nucleotide
  modified_base 63: mod_base = OTHER; note = 2'-O-methyl modified nucleotide
  modified_base 64: mod_base = OTHER; note = 2'-O-methyl modified nucleotide
  modified_base 65: mod_base = OTHER; note = 2'-O-methyl modified nucleotide
  modified_base 66: mod_base = OTHER; note = 2'-O-methyl modified nucleotide
  modified_base 67: mod_base = OTHER; note = 2'-O-methyl modified nucleotide
  modified_base 68: mod_base = OTHER; note = 2'-O-methyl modified nucleotide
  modified_base 69: mod_base = OTHER; note = 2'-O-methyl modified nucleotide
  modified_base 70: mod_base = OTHER; note = 2'-O-methyl modified nucleotide
  modified_base 75: mod_base = OTHER; note = 2'-O-methyl modified nucleotide
  modified_base 77: mod_base = OTHER; note = 2'-O-methyl modified nucleotide
  modified_base 80: mod_base = OTHER; note = 2'-O-methyl modified nucleotide
  modified_base 86: mod_base = OTHER; note = 2'-O-methyl modified nucleotide
  modified_base 87: mod_base = OTHER; note = 2'-O-methyl modified nucleotide
  modified_base 89: mod_base = OTHER; note = 2'-O-methyl modified nucleotide
  modified_base 90: mod_base = OTHER; note = 2'-O-methyl modified nucleotide
  modified_base 91: mod_base = OTHER; note = 2'-O-methyl modified nucleotide
  modified_base 92: mod_base = OTHER; note = 2'-O-methyl modified nucleotide
  modified_base 99: mod_base = OTHER; note = nucleotide with phosphorothioate linkage
  modified_base 100: mod_base = OTHER; note = 2'-O-methyl modified nucleotide with phosphorothioate linkage
  modified_base 101: mod_base = OTHER; note = 2'-O-methyl modified nucleotide

SEQ ID NO: 2109 - RNA, 101 nt, synthetic construct; identical to SEQ ID NO: 1109
  source 1..101: mol_type = other RNA
  modified_base 1: mod_base = OTHER; note = 2'-O-methyl modified nucleotide with phosphorothioate linkage
  modified_base 2: mod_base = OTHER; note = 2'-O-methyl modified nucleotide with phosphorothioate linkage
  modified_base 3: mod_base = OTHER; note = 2'-O-methyl modified nucleotide with phosphorothioate linkage
  modified_base 4: mod_base = OTHER; note = 2'-O-methyl modified nucleotide
  modified_base 5: mod_base = OTHER; note = 2'-O-methyl modified nucleotide
  modified_base 8: mod_base = OTHER; note = 2'-O-methyl modified nucleotide
  modified_base 9: mod_base = OTHER; note = 2'-O-methyl modified nucleotide
  modified_base 11: mod_base = OTHER; note = 2'-O-methyl modified nucleotide
  modified_base 13: mod_base = OTHER; note = 2'-O-methyl modified nucleotide
  modified_base 18: mod_base = OTHER; note = 2'-O-methyl modified nucleotide
  modified_base 22: mod_base = OTHER; note = 2'-O-methyl modified nucleotide
  modified_base 25: mod_base = OTHER; note = 2'-O-methyl modified nucleotide
  modified_base 29: mod_base = OTHER; note = 2'-O-methyl modified nucleotide
  modified_base 30: mod_base = OTHER; note = 2'-O-methyl modified nucleotide
  modified_base 31: mod_base = OTHER; note = 2'-O-methyl modified nucleotide
  modified_base 32: mod_base = OTHER; note = 2'-O-methyl modified nucleotide
  modified_base 37: mod_base = OTHER; note = 2'-O-methyl modified nucleotide
  modified_base 38: mod_base = OTHER; note = 2'-O-methyl modified nucleotide
  modified_base 39: mod_base = OTHER; note = 2'-O-methyl modified nucleotide
  modified_base 40: mod_base = OTHER; note = 2'-O-methyl modified nucleotide
  modified_base 41: mod_base = OTHER; note = 2'-O-methyl modified nucleotide
  modified_base 42: mod_base = OTHER; note = 2'-O-methyl modified nucleotide
  modified_base 43: mod_base = OTHER; note = 2'-O-methyl modified nucleotide
  modified_base 47: mod_base = OTHER; note = 2'-O-methyl modified nucleotide
  modified_base 48: mod_base = OTHER; note = 2'-O-methyl modified nucleotide
  modified_base 51: mod_base = OTHER; note = 2'-O-methyl modified nucleotide
  modified_base 54: mod_base = OTHER; note = nucleotide with phosphorothioate linkage
  modified_base 58: mod_base = OTHER; note = 2'-O-methyl modified nucleotide
  modified_base 59: mod_base = OTHER; note = 2'-O-methyl modified nucleotide
  modified_base 61: mod_base = OTHER; note = 2'-O-methyl modified nucleotide
  modified_base 62: mod_base = OTHER; note = 2'-O-methyl modified nucleotide
  modified_base 63: mod_base = OTHER; note = 2'-O-methyl modified nucleotide
  modified_base 64: mod_base = OTHER; note = 2'-O-methyl modified nucleotide
  modified_base 65: mod_base = OTHER; note = 2'-O-methyl modified nucleotide
  modified_base 66: mod_base = OTHER; note = 2'-O-methyl modified nucleotide
  modified_base 67: mod_base = OTHER; note = 2'-O-methyl modified nucleotide
  modified_base 68: mod_base = OTHER; note = 2'-O-methyl modified nucleotide
  modified_base 69: mod_base = OTHER; note = 2'-O-methyl modified nucleotide
  modified_base 70: mod_base = OTHER; note = 2'-O-methyl modified nucleotide
  modified_base 75: mod_base = OTHER; note = 2'-O-methyl modified nucleotide
  modified_base 77: mod_base = OTHER; note = 2'-O-methyl modified nucleotide
  modified_base 80: mod_base = OTHER; note = 2'-O-methyl modified nucleotide
  modified_base 86: mod_base = OTHER; note = 2'-O-methyl modified nucleotide
  modified_base 87: mod_base = OTHER; note = 2'-O-methyl modified nucleotide
  modified_base 89: mod_base = OTHER; note = 2'-O-methyl modified nucleotide
  modified_base 90: mod_base = OTHER; note = 2'-O-methyl modified nucleotide
  modified_base 91: mod_base = OTHER; note = 2'-O-methyl modified nucleotide
  modified_base 92: mod_base = OTHER; note = 2'-O-methyl modified nucleotide
  modified_base 99: mod_base = OTHER; note = nucleotide with phosphorothioate linkage
  modified_base 100: mod_base = OTHER; note = 2'-O-methyl modified nucleotide with phosphorothioate linkage
  modified_base 101: mod_base = OTHER; note = 2'-O-methyl modified nucleotide

SEQ ID NO: 2110 - RNA, 101 nt, synthetic construct; identical to SEQ ID NO: 1110
  source 1..101: mol_type = other RNA
  modified_base 1: mod_base = OTHER; note = 2'-O-methyl modified nucleotide with phosphorothioate linkage
  modified_base 2: mod_base = OTHER; note = 2'-O-methyl modified nucleotide with phosphorothioate linkage
  modified_base 3: mod_base = OTHER; note = 2'-O-methyl modified nucleotide with phosphorothioate linkage
  modified_base 4: mod_base = OTHER; note = 2'-O-methyl modified nucleotide
  modified_base 5: mod_base = OTHER; note = 2'-O-methyl modified nucleotide
  modified_base 8: mod_base = OTHER; note = 2'-O-methyl modified nucleotide
  modified_base 9: mod_base = OTHER; note = 2'-O-methyl modified nucleotide
  modified_base 11: mod_base = OTHER; note = 2'-O-methyl modified nucleotide
  modified_base 13: mod_base = OTHER; note = 2'-O-methyl modified nucleotide
  modified_base 18: mod_base = OTHER; note = 2'-O-methyl modified nucleotide
  modified_base 22: mod_base = OTHER; note = 2'-O-methyl modified nucleotide
  modified_base 25: mod_base = OTHER; note = 2'-O-methyl modified nucleotide
  modified_base 29: mod_base = OTHER; note = 2'-O-methyl modified nucleotide
  modified_base 30: mod_base = OTHER; note = 2'-O-methyl modified nucleotide
  modified_base 31: mod_base = OTHER; note = 2'-O-methyl modified nucleotide
  modified_base 32: mod_base = OTHER; note = 2'-O-methyl modified nucleotide
  modified_base 37: mod_base = OTHER; note = 2'-O-methyl modified nucleotide
  modified_base 38: mod_base = OTHER; note = 2'-O-methyl modified nucleotide
  modified_base 39: mod_base = OTHER; note = 2'-O-methyl modified nucleotide
  modified_base 40: mod_base = OTHER; note = 2'-O-methyl modified nucleotide
  modified_base 41: mod_base = OTHER; note = 2'-O-methyl modified nucleotide
  modified_base 42: mod_base = OTHER; note = 2'-O-methyl modified nucleotide
  modified_base 43: mod_base = OTHER; note = 2'-O-methyl modified nucleotide
  modified_base 47: mod_base = OTHER; note = 2'-O-methyl modified nucleotide
  modified_base 48: mod_base = OTHER; note = 2'-O-methyl modified nucleotide
  modified_base 51: mod_base = OTHER; note = 2'-O-methyl modified nucleotide
  modified_base 54: mod_base = OTHER; note = nucleotide with phosphorothioate linkage
  modified_base 58: mod_base = OTHER; note = 2'-O-methyl modified nucleotide
  modified_base 59: mod_base = OTHER; note = 2'-O-methyl modified nucleotide
  modified_base 61: mod_base = OTHER; note = 2'-O-methyl modified nucleotide
  modified_base 62: mod_base = OTHER; note = 2'-O-methyl modified nucleotide
  modified_base 63: mod_base = OTHER; note = 2'-O-methyl modified nucleotide
  modified_base 64: mod_base = OTHER; note = 2'-O-methyl modified nucleotide
  modified_base 65: mod_base = OTHER; note = 2'-O-methyl modified nucleotide
  modified_base 66: mod_base = OTHER; note = 2'-O-methyl modified nucleotide
  modified_base 67: mod_base = OTHER; note = 2'-O-methyl modified nucleotide
  modified_base 68: mod_base = OTHER; note = 2'-O-methyl modified nucleotide
  modified_base 69: mod_base = OTHER; note = 2'-O-methyl modified nucleotide
  modified_base 70: mod_base = OTHER; note = 2'-O-methyl modified nucleotide
  modified_base 75: mod_base = OTHER; note = 2'-O-methyl modified nucleotide
  modified_base 77: mod_base = OTHER; note = 2'-O-methyl modified nucleotide
  modified_base 80: mod_base = OTHER; note = 2'-O-methyl modified nucleotide
  modified_base 86: mod_base = OTHER; note = 2'-O-methyl modified nucleotide
  modified_base 87: mod_base = OTHER; note = 2'-O-methyl modified nucleotide
  modified_base 89: mod_base = OTHER; note = 2'-O-methyl modified nucleotide
  modified_base 90: mod_base = OTHER; note = 2'-O-methyl modified nucleotide
  modified_base 91: mod_base = OTHER; note = 2'-O-methyl modified nucleotide
  modified_base 92: mod_base = OTHER; note = 2'-O-methyl modified nucleotide
  modified_base 99: mod_base = OTHER; note = nucleotide with phosphorothioate linkage
  modified_base 100: mod_base = OTHER; note = 2'-O-methyl modified nucleotide with phosphorothioate linkage
  modified_base 101: mod_base = OTHER; note = 2'-O-methyl modified nucleotide

SEQ ID NO: 2111 - RNA, 101 nt, synthetic construct; identical to SEQ ID NO: 1111
  source 1..101: mol_type = other RNA
  modified_base 1: mod_base = OTHER; note = 2'-O-methyl modified nucleotide with phosphorothioate linkage
  modified_base 2: mod_base = OTHER; note = 2'-O-methyl modified nucleotide with phosphorothioate linkage
  modified_base 3: mod_base = OTHER; note = 2'-O-methyl modified nucleotide with phosphorothioate linkage
  modified_base 4: mod_base = OTHER; note = 2'-O-methyl modified nucleotide
  modified_base 5: mod_base = OTHER; note = 2'-O-methyl modified nucleotide
  modified_base 8: mod_base = OTHER; note = 2'-O-methyl modified nucleotide
  modified_base 9: mod_base = OTHER; note = 2'-O-methyl modified nucleotide
  modified_base 11: mod_base = OTHER; note = 2'-O-methyl modified nucleotide
  modified_base 13: mod_base = OTHER; note = 2'-O-methyl modified nucleotide
  modified_base 18: mod_base = OTHER; note = 2'-O-methyl modified nucleotide
  modified_base 22: mod_base = OTHER; note = 2'-O-methyl modified nucleotide
  modified_base 25: mod_base = OTHER; note = 2'-O-methyl modified nucleotide
  modified_base 29: mod_base = OTHER; note = 2'-O-methyl modified nucleotide
  modified_base 30: mod_base = OTHER; note = 2'-O-methyl modified nucleotide
  modified_base 31: mod_base = OTHER; note = 2'-O-methyl modified nucleotide
  modified_base 32: mod_base = OTHER; note = 2'-O-methyl modified nucleotide
  modified_base 37: mod_base = OTHER; note = 2'-O-methyl modified nucleotide
  modified_base 38: mod_base = OTHER; note = 2'-O-methyl modified nucleotide
  modified_base 39: mod_base = OTHER; note = 2'-O-methyl modified nucleotide
  modified_base 40: mod_base = OTHER; note = 2'-O-methyl modified nucleotide
  modified_base 41: mod_base = OTHER; note = 2'-O-methyl modified nucleotide
  modified_base 42: mod_base = OTHER; note = 2'-O-methyl modified nucleotide
  modified_base 43: mod_base = OTHER; note = 2'-O-methyl modified nucleotide
  modified_base 47: mod_base = OTHER; note = 2'-O-methyl modified nucleotide
  modified_base 48: mod_base = OTHER; note = 2'-O-methyl modified nucleotide
  modified_base 51: mod_base = OTHER; note = 2'-O-methyl modified nucleotide
  modified_base 54: mod_base = OTHER; note = nucleotide with phosphorothioate linkage
  modified_base 58: mod_base = OTHER; note = 2'-O-methyl modified nucleotide
  modified_base 59: mod_base = OTHER; note = 2'-O-methyl modified nucleotide
  modified_base 61: mod_base = OTHER; note = 2'-O-methyl modified nucleotide
  modified_base 62: mod_base = OTHER; note = 2'-O-methyl modified nucleotide
  modified_base 63: mod_base = OTHER; note = 2'-O-methyl modified nucleotide
  modified_base 64: mod_base = OTHER; note = 2'-O-methyl modified nucleotide
  modified_base 65: mod_base = OTHER; note = 2'-O-methyl modified nucleotide
  modified_base 66: mod_base = OTHER; note = 2'-O-methyl modified nucleotide
  modified_base 67: mod_base = OTHER; note = 2'-O-methyl modified nucleotide
  modified_base 68: mod_base = OTHER; note = 2'-O-methyl modified nucleotide
  modified_base 69: mod_base = OTHER; note = 2'-O-methyl modified nucleotide
  modified_base 70: mod_base = OTHER; note = 2'-O-methyl modified nucleotide
  modified_base 75: mod_base = OTHER; note = 2'-O-methyl modified nucleotide
  modified_base 77: mod_base = OTHER; note = 2'-O-methyl modified nucleotide
  modified_base 80: mod_base = OTHER; note = 2'-O-methyl modified nucleotide
  modified_base 86: mod_base = OTHER; note = 2'-O-methyl modified nucleotide
  modified_base 87: mod_base = OTHER; note = 2'-O-methyl modified nucleotide
  modified_base 89: mod_base = OTHER; note = 2'-O-methyl modified nucleotide
  modified_base 90: mod_base = OTHER; note = 2'-O-methyl modified nucleotide
  modified_base 91: mod_base = OTHER; note = 2'-O-methyl modified nucleotide
  modified_base 92: mod_base = OTHER; note = 2'-O-methyl modified nucleotide
  modified_base 99: mod_base = OTHER; note = nucleotide with phosphorothioate linkage
  modified_base 100: mod_base = OTHER; note = 2'-O-methyl modified nucleotide with phosphorothioate linkage
  modified_base 101: mod_base = OTHER; note = 2'-O-methyl modified nucleotide

SEQ ID NO: 2112 - RNA, 101 nt, synthetic construct; identical to SEQ ID NO: 1112
  source 1..101: mol_type = other RNA
  modified_base 1: mod_base = OTHER; note = 2'-O-methyl modified nucleotide with phosphorothioate linkage
  modified_base 2: mod_base = OTHER; note = 2'-O-methyl modified nucleotide with phosphorothioate linkage
  modified_base 3: mod_base = OTHER; note = 2'-O-methyl modified nucleotide with phosphorothioate linkage
  modified_base 4: mod_base = OTHER; note = 2'-O-methyl modified nucleotide
  modified_base 5: mod_base = OTHER; note = 2'-O-methyl modified nucleotide
  modified_base 8: mod_base = OTHER; note = 2'-O-methyl modified nucleotide
  modified_base 9: mod_base = OTHER; note = 2'-O-methyl modified nucleotide
  modified_base 11: mod_base = OTHER; note = 2'-O-methyl modified nucleotide
  modified_base 13: mod_base = OTHER; note = 2'-O-methyl modified nucleotide
  modified_base 18: mod_base = OTHER; note = 2'-O-methyl modified nucleotide
  modified_base 22: mod_base = OTHER; note = 2'-O-methyl modified nucleotide
  modified_base 25: mod_base = OTHER; note = 2'-O-methyl modified nucleotide
  modified_base 29: mod_base = OTHER; note = 2'-O-methyl modified nucleotide
  modified_base 30: mod_base = OTHER; note = 2'-O-methyl modified nucleotide
  modified_base 31: mod_base = OTHER; note = 2'-O-methyl modified nucleotide
  modified_base 32: mod_base = OTHER; note = 2'-O-methyl modified nucleotide
  modified_base 37: mod_base = OTHER; note = 2'-O-methyl modified nucleotide
  modified_base 38: mod_base = OTHER; note = 2'-O-methyl modified nucleotide
  modified_base 39: mod_base = OTHER; note = 2'-O-methyl modified nucleotide
  modified_base 40: mod_base = OTHER; note = 2'-O-methyl modified nucleotide
  modified_base 41: mod_base = OTHER; note = 2'-O-methyl modified nucleotide
  modified_base 42: mod_base = OTHER; note = 2'-O-methyl modified nucleotide
  modified_base 43: mod_base = OTHER; note = 2'-O-methyl modified nucleotide
  modified_base 47: mod_base = OTHER; note = 2'-O-methyl modified nucleotide
  modified_base 48: mod_base = OTHER; note = 2'-O-methyl modified nucleotide
  modified_base 51: mod_base = OTHER; note = 2'-O-methyl modified nucleotide
  modified_base 54: mod_base = OTHER; note = nucleotide with phosphorothioate linkage
  modified_base 58: mod_base = OTHER; note = 2'-O-methyl modified nucleotide
  modified_base 59: mod_base = OTHER; note = 2'-O-methyl modified nucleotide
  modified_base 61: mod_base = OTHER; note = 2'-O-methyl modified nucleotide
  modified_base 62: mod_base = OTHER; note = 2'-O-methyl modified nucleotide
  modified_base 63: mod_base = OTHER; note = 2'-O-methyl modified nucleotide
  modified_base 64: mod_base = OTHER; note = 2'-O-methyl modified nucleotide
  modified_base 65: mod_base = OTHER; note = 2'-O-methyl modified nucleotide
  modified_base 66: mod_base = OTHER; note = 2'-O-methyl modified nucleotide
  modified_base 67: mod_base = OTHER; note = 2'-O-methyl modified nucleotide
  modified_base 68: mod_base = OTHER; note = 2'-O-methyl modified nucleotide
  modified_base 69: mod_base = OTHER; note = 2'-O-methyl modified nucleotide
  modified_base 70: mod_base = OTHER; note = 2'-O-methyl modified nucleotide
  modified_base 75: mod_base = OTHER; note = 2'-O-methyl modified nucleotide
  modified_base 77: mod_base = OTHER; note = 2'-O-methyl modified nucleotide
  modified_base 80: mod_base = OTHER; note = 2'-O-methyl modified nucleotide
  modified_base 86: mod_base = OTHER; note = 2'-O-methyl modified nucleotide
  modified_base 87: mod_base = OTHER; note = 2'-O-methyl modified nucleotide
  modified_base 89: mod_base = OTHER; note = 2'-O-methyl modified nucleotide
  modified_base 90: mod_base = OTHER; note = 2'-O-methyl modified nucleotide
  modified_base 91: mod_base = OTHER; note = 2'-O-methyl modified nucleotide
  modified_base 92: mod_base = OTHER; note = 2'-O-methyl modified nucleotide
  modified_base 99: mod_base = OTHER; note = nucleotide with phosphorothioate linkage
  modified_base 100: mod_base = OTHER; note = 2'-O-methyl modified nucleotide with phosphorothioate linkage
  modified_base 101: mod_base = OTHER; note = 2'-O-methyl modified nucleotide

SEQ ID NO: 2113 - RNA, 101 nt, synthetic construct; identical to SEQ ID NO: 1113
  source 1..101: mol_type = other RNA
  modified_base 1: mod_base = OTHER; note = 2'-O-methyl modified nucleotide with phosphorothioate linkage
  modified_base 2: mod_base = OTHER; note = 2'-O-methyl modified nucleotide with phosphorothioate linkage
  modified_base 3: mod_base = OTHER; note = 2'-O-methyl modified nucleotide with phosphorothioate linkage
  modified_base 4: mod_base = OTHER; note = 2'-O-methyl modified nucleotide
  modified_base 5: mod_base = OTHER; note = 2'-O-methyl modified nucleotide
  modified_base 8: mod_base = OTHER; note = 2'-O-methyl modified nucleotide
  modified_base 9: mod_base = OTHER; note = 2'-O-methyl modified nucleotide
  modified_base 11: mod_base = OTHER; note = 2'-O-methyl modified nucleotide
  modified_base 13: mod_base = OTHER; note = 2'-O-methyl modified nucleotide
  modified_base 18: mod_base = OTHER; note = 2'-O-methyl modified nucleotide
  modified_base 22: mod_base = OTHER; note = 2'-O-methyl modified nucleotide
  modified_base 25: mod_base = OTHER; note = 2'-O-methyl modified nucleotide
  modified_base 29: mod_base = OTHER; note = 2'-O-methyl modified nucleotide
  modified_base 30: mod_base = OTHER; note = 2'-O-methyl modified nucleotide
  modified_base 31: mod_base = OTHER; note = 2'-O-methyl modified nucleotide
  modified_base 32: mod_base = OTHER; note = 2'-O-methyl modified nucleotide
  modified_base 37: mod_base = OTHER; note = 2'-O-methyl modified nucleotide
  modified_base 38: mod_base = OTHER; note = 2'-O-methyl modified nucleotide
  modified_base 39: mod_base = OTHER; note = 2'-O-methyl modified nucleotide
  modified_base 40: mod_base = OTHER; note = 2'-O-methyl modified nucleotide
  modified_base 41: mod_base = OTHER; note = 2'-O-methyl modified nucleotide
  modified_base 42: mod_base = OTHER; note = 2'-O-methyl modified nucleotide
  modified_base 43: mod_base = OTHER; note = 2'-O-methyl modified nucleotide
  modified_base 47: mod_base = OTHER; note = 2'-O-methyl modified nucleotide
  modified_base 48: mod_base = OTHER; note = 2'-O-methyl modified nucleotide
  modified_base 51: mod_base = OTHER; note = 2'-O-methyl modified nucleotide
  modified_base 54: mod_base = OTHER; note = nucleotide with phosphorothioate linkage
  modified_base 58: mod_base = OTHER; note = 2'-O-methyl modified nucleotide
  modified_base 59: mod_base = OTHER; note = 2'-O-methyl modified nucleotide
  modified_base 61: mod_base = OTHER; note = 2'-O-methyl modified nucleotide
  modified_base 62: mod_base = OTHER; note = 2'-O-methyl modified nucleotide
  modified_base 63: mod_base = OTHER; note = 2'-O-methyl modified nucleotide
  modified_base 64: mod_base = OTHER; note = 2'-O-methyl modified nucleotide
  modified_base 65: mod_base = OTHER; note = 2'-O-methyl modified nucleotide
  modified_base 66: mod_base = OTHER; note = 2'-O-methyl modified nucleotide
  modified_base 67: mod_base = OTHER; note = 2'-O-methyl modified nucleotide
  modified_base 68: mod_base = OTHER; note = 2'-O-methyl modified nucleotide
  modified_base 69: mod_base = OTHER; note = 2'-O-methyl modified nucleotide
  modified_base 70: mod_base = OTHER; note = 2'-O-methyl modified nucleotide
  modified_base 75: mod_base = OTHER; note = 2'-O-methyl modified nucleotide
  modified_base 77: mod_base = OTHER; note = 2'-O-methyl modified nucleotide
  modified_base 80: mod_base = OTHER; note = 2'-O-methyl modified nucleotide
  modified_base 86: mod_base = OTHER; note = 2'-O-methyl modified nucleotide
  modified_base 87: mod_base = OTHER; note = 2'-O-methyl modified nucleotide
  modified_base 89: mod_base = OTHER; note = 2'-O-methyl modified nucleotide
  modified_base 90: mod_base = OTHER; note = 2'-O-methyl modified nucleotide
  modified_base 91: mod_base = OTHER; note = 2'-O-methyl modified nucleotide
  modified_base 92: mod_base = OTHER; note = 2'-O-methyl modified nucleotide
  modified_base 99: mod_base = OTHER; note = nucleotide with phosphorothioate linkage
  modified_base 100: mod_base = OTHER; note = 2'-O-methyl modified nucleotide with phosphorothioate linkage
  modified_base 101: mod_base = OTHER; note = 2'-O-methyl modified nucleotide

SEQ ID NO: 2114 - RNA, 101 nt, synthetic construct; identical to SEQ ID NO: 1114
  source 1..101: mol_type = other RNA
  modified_base 1: mod_base = OTHER; note = 2'-O-methyl modified nucleotide with phosphorothioate linkage
  modified_base 2: mod_base = OTHER; note = 2'-O-methyl modified nucleotide with phosphorothioate linkage
  modified_base 3: mod_base = OTHER; note = 2'-O-methyl modified nucleotide with phosphorothioate linkage
  modified_base 4: mod_base = OTHER; note = 2'-O-methyl modified nucleotide
  modified_base 5: mod_base = OTHER; note = 2'-O-methyl modified nucleotide
  modified_base 8: mod_base = OTHER; note = 2'-O-methyl modified nucleotide
  modified_base 9: mod_base = OTHER; note = 2'-O-methyl modified nucleotide
  modified_base 11: mod_base = OTHER; note = 2'-O-methyl modified nucleotide
  modified_base 13: mod_base = OTHER; note = 2'-O-methyl modified nucleotide
  modified_base 18: mod_base = OTHER; note = 2'-O-methyl modified nucleotide
  modified_base 22: mod_base = OTHER; note = 2'-O-methyl modified nucleotide
  modified_base 25: mod_base = OTHER; note = 2'-O-methyl modified nucleotide
  modified_base 29: mod_base = OTHER; note = 2'-O-methyl modified nucleotide
  modified_base 30: mod_base = OTHER; note = 2'-O-methyl modified nucleotide
  modified_base 31: mod_base = OTHER; note = 2'-O-methyl modified nucleotide
  modified_base 32: mod_base = OTHER; note = 2'-O-methyl modified nucleotide
  modified_base 37: mod_base = OTHER; note = 2'-O-methyl modified nucleotide
  modified_base 38: mod_base = OTHER; note = 2'-O-methyl modified nucleotide
  modified_base 39: mod_base = OTHER; note = 2'-O-methyl modified nucleotide
  modified_base 40: mod_base = OTHER; note = 2'-O-methyl modified nucleotide
  modified_base 41: mod_base = OTHER; note = 2'-O-methyl modified nucleotide
  modified_base 42: mod_base = OTHER; note = 2'-O-methyl modified nucleotide
  modified_base 43: mod_base = OTHER; note = 2'-O-methyl modified nucleotide
  modified_base 47: mod_base = OTHER; note = 2'-O-methyl modified nucleotide
  modified_base 48: mod_base = OTHER; note = 2'-O-methyl modified nucleotide
  modified_base 51: mod_base = OTHER; note = 2'-O-methyl modified nucleotide
  modified_base 54: mod_base = OTHER; note = nucleotide with phosphorothioate linkage
  modified_base 58: mod_base = OTHER; note = 2'-O-methyl modified nucleotide
  modified_base 59: mod_base = OTHER; note = 2'-O-methyl modified nucleotide
  modified_base 61: mod_base = OTHER; note = 2'-O-methyl modified nucleotide
  modified_base 62: mod_base = OTHER; note = 2'-O-methyl modified nucleotide
  modified_base 63: mod_base = OTHER; note = 2'-O-methyl modified nucleotide
  modified_base 64: mod_base = OTHER; note = 2'-O-methyl modified nucleotide
  modified_base 65: mod_base = OTHER; note = 2'-O-methyl modified nucleotide
  modified_base 66: mod_base = OTHER; note = 2'-O-methyl modified nucleotide
  modified_base 67: mod_base = OTHER; note = 2'-O-methyl modified nucleotide
  modified_base 68: mod_base = OTHER; note = 2'-O-methyl modified nucleotide
  modified_base 69: mod_base = OTHER; note = 2'-O-methyl modified nucleotide
  modified_base 70: mod_base = OTHER; note = 2'-O-methyl modified nucleotide
  modified_base 75: mod_base = OTHER; note = 2'-O-methyl modified nucleotide
  modified_base 77: mod_base = OTHER; note = 2'-O-methyl modified nucleotide
  modified_base 80: mod_base = OTHER; note = 2'-O-methyl modified nucleotide
  modified_base 86: mod_base = OTHER; note = 2'-O-methyl modified nucleotide
  modified_base 87: mod_base = OTHER; note = 2'-O-methyl modified nucleotide
  modified_base 89: mod_base = OTHER; note = 2'-O-methyl modified nucleotide
  modified_base 90: mod_base = OTHER; note = 2'-O-methyl modified nucleotide
  modified_base 91: mod_base = OTHER; note = 2'-O-methyl modified nucleotide
  modified_base 92: mod_base = OTHER; note = 2'-O-methyl modified nucleotide
  modified_base 99: mod_base = OTHER; note = nucleotide with phosphorothioate linkage
  modified_base 100: mod_base = OTHER; note = 2'-O-methyl modified nucleotide with phosphorothioate linkage
  modified_base 101: mod_base = OTHER; note = 2'-O-methyl modified nucleotide

SEQ ID NO: 2115 - RNA, 101 nt, synthetic construct; identical to SEQ ID NO: 1115
  source 1..101: mol_type = other RNA
  modified_base 1: mod_base = OTHER; note = 2'-O-methyl modified nucleotide with phosphorothioate linkage
  modified_base 2: mod_base = OTHER; note = 2'-O-methyl modified nucleotide with phosphorothioate linkage
  modified_base 3: mod_base = OTHER; note = 2'-O-methyl modified nucleotide with phosphorothioate linkage
  modified_base 4: mod_base = OTHER; note = 2'-O-methyl modified nucleotide
  modified_base 5: mod_base = OTHER; note = 2'-O-methyl modified nucleotide
  modified_base 8: mod_base = OTHER; note = 2'-O-methyl modified nucleotide
  modified_base 9: mod_base = OTHER; note = 2'-O-methyl modified nucleotide
  modified_base 11: mod_base = OTHER; note = 2'-O-methyl modified nucleotide
  modified_base 13: mod_base = OTHER; note = 2'-O-methyl modified nucleotide
  modified_base 18: mod_base = OTHER; note = 2'-O-methyl modified nucleotide
  modified_base 22: mod_base = OTHER; note = 2'-O-methyl modified nucleotide
  modified_base 25: mod_base = OTHER; note = 2'-O-methyl modified nucleotide
  modified_base 29: mod_base = OTHER; note = 2'-O-methyl modified nucleotide
  modified_base 30: mod_base = OTHER; note = 2'-O-methyl modified nucleotide
  modified_base 31: mod_base = OTHER; note = 2'-O-methyl modified nucleotide
  modified_base 32: mod_base = OTHER; note = 2'-O-methyl modified nucleotide
  modified_base 37: mod_base = OTHER; note = 2'-O-methyl modified nucleotide
  modified_base 38: mod_base = OTHER; note = 2'-O-methyl modified nucleotide
  modified_base 39: mod_base = OTHER; note = 2'-O-methyl modified nucleotide
  modified_base 40: mod_base = OTHER; note = 2'-O-methyl modified nucleotide
  modified_base 41: mod_base = OTHER; note = 2'-O-methyl modified nucleotide
  modified_base 42: mod_base = OTHER; note = 2'-O-methyl modified nucleotide
  modified_base 43: mod_base = OTHER; note = 2'-O-methyl modified nucleotide
  modified_base 47: mod_base = OTHER; note = 2'-O-methyl modified nucleotide
  modified_base 48: mod_base = OTHER; note = 2'-O-methyl modified nucleotide
  modified_base 51: mod_base = OTHER; note = 2'-O-methyl modified nucleotide
  modified_base 54: mod_base = OTHER; note = nucleotide with phosphorothioate linkage
  modified_base 58: mod_base = OTHER; note = 2'-O-methyl modified nucleotide
  modified_base 59: mod_base = OTHER; note = 2'-O-methyl modified nucleotide
  modified_base 61: mod_base = OTHER; note = 2'-O-methyl modified nucleotide
  modified_base 62: mod_base = OTHER; note = 2'-O-methyl modified nucleotide
  modified_base 63: mod_base = OTHER; note = 2'-O-methyl modified nucleotide
  modified_base 64: mod_base = OTHER; note = 2'-O-methyl modified nucleotide
  modified_base 65: mod_base = OTHER; note = 2'-O-methyl modified nucleotide
  modified_base 66: mod_base = OTHER; note = 2'-O-methyl modified nucleotide
  modified_base 67: mod_base = OTHER; note = 2'-O-methyl modified nucleotide
  modified_base 68: mod_base = OTHER; note = 2'-O-methyl modified nucleotide
  modified_base 69: mod_base = OTHER; note = 2'-O-methyl modified nucleotide
  modified_base 70: mod_base = OTHER; note = 2'-O-methyl modified nucleotide
  modified_base 75: mod_base = OTHER; note = 2'-O-methyl modified nucleotide
  modified_base 77: mod_base = OTHER; note = 2'-O-methyl modified nucleotide
  modified_base 80: mod_base = OTHER; note = 2'-O-methyl modified nucleotide
  modified_base 86: mod_base = OTHER; note = 2'-O-methyl modified nucleotide
  modified_base 87: mod_base = OTHER; note = 2'-O-methyl modified nucleotide
  modified_base 89: mod_base = OTHER; note = 2'-O-methyl modified nucleotide
  modified_base 90: mod_base = OTHER; note = 2'-O-methyl modified nucleotide
  modified_base 91: mod_base = OTHER; note = 2'-O-methyl modified nucleotide
  modified_base 92: mod_base = OTHER; note = 2'-O-methyl modified nucleotide
  modified_base 99: mod_base = OTHER; note = nucleotide with phosphorothioate linkage
  modified_base 100: mod_base = OTHER; note = 2'-O-methyl modified nucleotide with phosphorothioate linkage
  modified_base 101: mod_base = OTHER; note = 2'-O-methyl modified nucleotide

SEQ ID NO: 2116 - RNA, 101 nt, synthetic construct; identical to SEQ ID NO: 1116
  source 1..101: mol_type = other RNA
  modified_base 1: mod_base = OTHER; note = 2'-O-methyl modified nucleotide with phosphorothioate linkage
  modified_base 2: mod_base = OTHER; note = 2'-O-methyl modified nucleotide with phosphorothioate linkage
  modified_base 3: mod_base = OTHER; note = 2'-O-methyl modified nucleotide with phosphorothioate linkage
  modified_base 4: mod_base = OTHER; note = 2'-O-methyl modified nucleotide
  modified_base 5: mod_base = OTHER; note = 2'-O-methyl modified nucleotide
  modified_base 8: mod_base = OTHER; note = 2'-O-methyl modified nucleotide
  modified_base 9: mod_base = OTHER; note = 2'-O-methyl modified nucleotide
  modified_base 11: mod_base = OTHER; note = 2'-O-methyl modified nucleotide
  modified_base 13: mod_base = OTHER; note = 2'-O-methyl modified nucleotide
  modified_base 18: mod_base = OTHER; note = 2'-O-methyl modified nucleotide
  modified_base 22: mod_base = OTHER; note = 2'-O-methyl modified nucleotide
  modified_base 25: mod_base = OTHER; note = 2'-O-methyl modified nucleotide
  modified_base 29: mod_base = OTHER; note = 2'-O-methyl modified nucleotide
  modified_base 30: mod_base = OTHER; note = 2'-O-methyl modified nucleotide
  modified_base 31: mod_base = OTHER; note = 2'-O-methyl modified nucleotide
  modified_base 32: mod_base = OTHER; note = 2'-O-methyl modified nucleotide
  modified_base 37: mod_base = OTHER; note = 2'-O-methyl modified nucleotide
  modified_base 38: mod_base = OTHER; note = 2'-O-methyl modified nucleotide
  modified_base 39: mod_base = OTHER; note = 2'-O-methyl modified nucleotide
  modified_base 40: mod_base = OTHER; note = 2'-O-methyl modified nucleotide
  modified_base 41: mod_base = OTHER; note = 2'-O-methyl modified nucleotide
  modified_base 42: mod_base = OTHER; note = 2'-O-methyl modified nucleotide
  modified_base 43: mod_base = OTHER; note = 2'-O-methyl modified nucleotide
  modified_base 47: mod_base = OTHER; note = 2'-O-methyl modified nucleotide
  modified_base 48: mod_base = OTHER; note = 2'-O-methyl modified nucleotide
  modified_base 51: mod_base = OTHER; note = 2'-O-methyl modified nucleotide
  modified_base 54: mod_base = OTHER; note = nucleotide with phosphorothioate linkage
  modified_base 58: mod_base = OTHER; note = 2'-O-methyl modified nucleotide
  modified_base 59: mod_base = OTHER; note = 2'-O-methyl modified nucleotide
  modified_base 61: mod_base = OTHER; note = 2'-O-methyl modified nucleotide
  modified_base 62: mod_base = OTHER; note = 2'-O-methyl modified nucleotide
  modified_base 63: mod_base = OTHER; note = 2'-O-methyl modified nucleotide
  modified_base 64: mod_base = OTHER; note = 2'-O-methyl modified nucleotide
  modified_base 65: mod_base = OTHER; note = 2'-O-methyl modified nucleotide
  modified_base 66: mod_base = OTHER; note = 2'-O-methyl modified nucleotide
  modified_base 67: mod_base = OTHER; note = 2'-O-methyl modified nucleotide
  modified_base 68: mod_base = OTHER; note = 2'-O-methyl modified nucleotide
  modified_base 69: mod_base = OTHER; note = 2'-O-methyl modified nucleotide
  modified_base 70: mod_base = OTHER; note = 2'-O-methyl modified nucleotide
  modified_base 75: mod_base = OTHER; note = 2'-O-methyl modified nucleotide
  modified_base 77: mod_base = OTHER; note = 2'-O-methyl modified nucleotide
  modified_base 80: mod_base = OTHER; note = 2'-O-methyl modified nucleotide
  modified_base 86: mod_base = OTHER; note = 2'-O-methyl modified nucleotide
  modified_base 87: mod_base = OTHER; note = 2'-O-methyl modified nucleotide
  modified_base 89: mod_base = OTHER; note = 2'-O-methyl modified nucleotide
  modified_base 90: mod_base = OTHER; note = 2'-O-methyl modified nucleotide
  modified_base 91: mod_base = OTHER; note = 2'-O-methyl modified nucleotide
  modified_base 92: mod_base = OTHER; note = 2'-O-methyl modified nucleotide
  modified_base 99: mod_base = OTHER; note = nucleotide with phosphorothioate linkage
  modified_base 100: mod_base = OTHER; note = 2'-O-methyl modified nucleotide with phosphorothioate linkage
  modified_base 101: mod_base = OTHER; note = 2'-O-methyl modified nucleotide

SEQ ID NO: 2117 - RNA, 101 nt, synthetic construct; identical to SEQ ID NO: 810
  source 1..101: mol_type = other RNA
  modified_base 1: mod_base = OTHER; note = 2'-O-methyl modified nucleotide with phosphorothioate linkage
  modified_base 2: mod_base = OTHER; note = 2'-O-methyl modified nucleotide with phosphorothioate linkage
  modified_base 3: mod_base = OTHER; note = 2'-O-methyl modified nucleotide with phosphorothioate linkage
  modified_base 4: mod_base = OTHER; note = 2'-O-methyl modified nucleotide
  modified_base 5: mod_base = OTHER; note = 2'-O-methyl modified nucleotide
  modified_base 8: mod_base = OTHER; note = 2'-O-methyl modified nucleotide
  modified_base 9: mod_base = OTHER; note = 2'-O-methyl modified nucleotide
  modified_base 11: mod_base = OTHER; note = 2'-O-methyl modified nucleotide
  modified_base 13: mod_base = OTHER; note = 2'-O-methyl modified nucleotide
  modified_base 18: mod_base = OTHER; note = 2'-O-methyl modified nucleotide
  modified_base 22: mod_base = OTHER; note = 2'-O-methyl modified nucleotide
  modified_base 25: mod_base = OTHER; note = 2'-O-methyl modified nucleotide
  modified_base 29: mod_base = OTHER; note = 2'-O-methyl modified nucleotide
  modified_base 30: mod_base = OTHER; note = 2'-O-methyl modified nucleotide
  modified_base 31: mod_base = OTHER; note = 2'-O-methyl modified nucleotide
  modified_base 32: mod_base = OTHER; note = 2'-O-methyl modified nucleotide
  modified_base 37: mod_base = OTHER; note = 2'-O-methyl modified nucleotide
  modified_base 38: mod_base = OTHER; note = 2'-O-methyl modified nucleotide
  modified_base 39: mod_base = OTHER; note = 2'-O-methyl modified nucleotide
  modified_base 40: mod_base = OTHER; note = 2'-O-methyl modified nucleotide
  modified_base 41: mod_base = OTHER; note = 2'-O-methyl modified nucleotide
  modified_base 42: mod_base = OTHER; note = 2'-O-methyl modified nucleotide
  modified_base 43: mod_base = OTHER; note = 2'-O-methyl modified nucleotide
  modified_base 47: mod_base = OTHER; note = 2'-O-methyl modified nucleotide
  modified_base 48: mod_base = OTHER; note = 2'-O-methyl modified nucleotide
  modified_base 51: mod_base = OTHER; note = 2'-O-methyl modified nucleotide
  modified_base 54: mod_base = OTHER; note = nucleotide with phosphorothioate linkage
  modified_base 58: mod_base = OTHER; note = 2'-O-methyl modified nucleotide
  modified_base 59: mod_base = OTHER; note = 2'-O-methyl modified nucleotide
  modified_base 61: mod_base = OTHER; note = 2'-O-methyl modified nucleotide
  modified_base 62: mod_base = OTHER; note = 2'-O-methyl modified nucleotide
  modified_base 63: mod_base = OTHER; note = 2'-O-methyl modified nucleotide
  modified_base 64: mod_base = OTHER; note = 2'-O-methyl modified nucleotide
  modified_base 65: mod_base = OTHER; note = 2'-O-methyl modified nucleotide
  modified_base 66: mod_base = OTHER; note = 2'-O-methyl modified nucleotide
  modified_base 67: mod_base = OTHER; note = 2'-O-methyl modified nucleotide
  modified_base 68: mod_base = OTHER; note = 2'-O-methyl modified nucleotide
  modified_base 69: mod_base = OTHER; note = 2'-O-methyl modified nucleotide
  modified_base 70: mod_base = OTHER; note = 2'-O-methyl modified nucleotide
  modified_base 75: mod_base = OTHER; note = 2'-O-methyl modified nucleotide
  modified_base 77: mod_base = OTHER; note = 2'-O-methyl modified nucleotide
  modified_base 80: mod_base = OTHER; note = 2'-O-methyl modified nucleotide
  modified_base 86: mod_base = OTHER; note = 2'-O-methyl modified nucleotide
  modified_base 87: mod_base = OTHER; note = 2'-O-methyl modified nucleotide
  modified_base 89: mod_base = OTHER; note = 2'-O-methyl modified nucleotide
  modified_base 90: mod_base = OTHER; note = 2'-O-methyl modified nucleotide
  modified_base 91: mod_base = OTHER; note = 2'-O-methyl modified nucleotide
  modified_base 92: mod_base = OTHER; note = 2'-O-methyl modified nucleotide
  modified_base 99: mod_base = OTHER; note = nucleotide with phosphorothioate linkage
  modified_base 100: mod_base = OTHER; note = 2'-O-methyl modified nucleotide with phosphorothioate linkage
  modified_base 101: mod_base = OTHER; note = 2'-O-methyl modified nucleotide

SEQ ID NO: 2118 - RNA, 101 nt, synthetic construct; identical to SEQ ID NO: 1118
  source 1..101: mol_type = other RNA
  modified_base 1: mod_base = OTHER; note = 2'-O-methyl modified nucleotide with phosphorothioate linkage
  modified_base 2: mod_base = OTHER; note = 2'-O-methyl modified nucleotide with phosphorothioate linkage
  modified_base 3: mod_base = OTHER; note = 2'-O-methyl modified nucleotide with phosphorothioate linkage
  modified_base 4: mod_base = OTHER; note = 2'-O-methyl modified nucleotide
  modified_base 5: mod_base = OTHER; note = 2'-O-methyl modified nucleotide
  modified_base 8: mod_base = OTHER; note = 2'-O-methyl modified nucleotide
  modified_base 9: mod_base = OTHER; note = 2'-O-methyl modified nucleotide
  modified_base 11: mod_base = OTHER; note = 2'-O-methyl modified nucleotide
  modified_base 13: mod_base = OTHER; note = 2'-O-methyl modified nucleotide
  modified_base 18: mod_base = OTHER; note = 2'-O-methyl modified nucleotide
  modified_base 22: mod_base = OTHER; note = 2'-O-methyl modified nucleotide
  modified_base 25: mod_base = OTHER; note = 2'-O-methyl modified nucleotide
  modified_base 29: mod_base = OTHER; note = 2'-O-methyl modified nucleotide
  modified_base 30: mod_base = OTHER; note = 2'-O-methyl modified nucleotide
  modified_base 31: mod_base = OTHER; note = 2'-O-methyl modified nucleotide
  modified_base 32: mod_base = OTHER; note = 2'-O-methyl modified nucleotide
  modified_base 37: mod_base = OTHER; note = 2'-O-methyl modified nucleotide
  modified_base 38: mod_base = OTHER; note = 2'-O-methyl modified nucleotide
  modified_base 39: mod_base = OTHER; note = 2'-O-methyl modified nucleotide
  modified_base 40: mod_base = OTHER; note = 2'-O-methyl modified nucleotide
  modified_base 41: mod_base = OTHER; note = 2'-O-methyl modified nucleotide
  modified_base 42: mod_base = OTHER; note = 2'-O-methyl modified nucleotide
  modified_base 43: mod_base = OTHER; note = 2'-O-methyl modified nucleotide
  modified_base 47: mod_base = OTHER; note = 2'-O-methyl modified nucleotide
  modified_base 48: mod_base = OTHER; note = 2'-O-methyl modified nucleotide
  modified_base 51: mod_base = OTHER; note = 2'-O-methyl modified nucleotide
  modified_base 54: mod_base = OTHER; note = nucleotide with phosphorothioate linkage
  modified_base 58: mod_base = OTHER; note = 2'-O-methyl modified nucleotide
  modified_base 59: mod_base = OTHER; note = 2'-O-methyl modified nucleotide
  modified_base 61: mod_base = OTHER; note = 2'-O-methyl modified nucleotide
  modified_base 62: mod_base = OTHER; note = 2'-O-methyl modified nucleotide
  modified_base 63: mod_base = OTHER; note = 2'-O-methyl modified nucleotide
  modified_base 64: mod_base = OTHER; note = 2'-O-methyl modified nucleotide
  modified_base 65: mod_base = OTHER; note = 2'-O-methyl modified nucleotide
  modified_base 66: mod_base = OTHER; note = 2'-O-methyl modified nucleotide
  modified_base 67: mod_base = OTHER; note = 2'-O-methyl modified nucleotide
  modified_base 68: mod_base = OTHER; note = 2'-O-methyl modified nucleotide
  modified_base 69: mod_base = OTHER; note = 2'-O-methyl modified nucleotide
  modified_base 70: mod_base = OTHER; note = 2'-O-methyl modified nucleotide
  modified_base 75: mod_base = OTHER; note = 2'-O-methyl modified nucleotide
  modified_base 77: mod_base = OTHER; note = 2'-O-methyl modified nucleotide
  modified_base 80: mod_base = OTHER; note = 2'-O-methyl modified nucleotide
  modified_base 86: mod_base = OTHER; note = 2'-O-methyl modified nucleotide
  modified_base 87: mod_base = OTHER; note = 2'-O-methyl modified nucleotide
  modified_base 89: mod_base = OTHER; note = 2'-O-methyl modified nucleotide
  modified_base 90: mod_base = OTHER; note = 2'-O-methyl modified nucleotide
  modified_base 91: mod_base = OTHER; note = 2'-O-methyl modified nucleotide
  modified_base 92: mod_base = OTHER; note = 2'-O-methyl modified nucleotide
  modified_base 99: mod_base = OTHER; note = nucleotide with phosphorothioate linkage
  modified_base 100: mod_base = OTHER; note = 2'-O-methyl modified nucleotide with phosphorothioate linkage
  modified_base 101: mod_base = OTHER; note = 2'-O-methyl modified nucleotide

SEQ ID NO: 2119 - RNA, 101 nt, synthetic construct; identical to SEQ ID NO: 1119
  source 1..101: mol_type = other RNA
  modified_base 1: mod_base = OTHER; note = 2'-O-methyl modified nucleotide with phosphorothioate linkage
  modified_base 2: mod_base = OTHER; note = 2'-O-methyl modified nucleotide with phosphorothioate linkage
  modified_base 3: mod_base = OTHER; note = 2'-O-methyl modified nucleotide with phosphorothioate linkage
  modified_base 4: mod_base = OTHER; note = 2'-O-methyl modified nucleotide
  modified_base 5: mod_base = OTHER; note = 2'-O-methyl modified nucleotide
  modified_base 8: mod_base = OTHER; note = 2'-O-methyl modified nucleotide
  modified_base 9: mod_base = OTHER; note = 2'-O-methyl modified nucleotide
  modified_base 11: mod_base = OTHER; note = 2'-O-methyl modified nucleotide
  modified_base 13: mod_base = OTHER; note = 2'-O-methyl modified nucleotide
  modified_base 18: mod_base = OTHER; note = 2'-O-methyl modified nucleotide
  modified_base 22: mod_base = OTHER; note = 2'-O-methyl modified nucleotide
  modified_base 25: mod_base = OTHER; note = 2'-O-methyl modified nucleotide
  modified_base 29: mod_base = OTHER; note = 2'-O-methyl modified nucleotide
  modified_base 30: mod_base = OTHER; note = 2'-O-methyl modified nucleotide
  modified_base 31: mod_base = OTHER; note = 2'-O-methyl modified nucleotide
  modified_base 32: mod_base = OTHER; note = 2'-O-methyl modified nucleotide
  modified_base 37: mod_base = OTHER; note = 2'-O-methyl modified nucleotide
  modified_base 38: mod_base = OTHER; note = 2'-O-methyl modified nucleotide
  modified_base 39: mod_base = OTHER; note = 2'-O-methyl modified nucleotide
  modified_base 40: mod_base = OTHER; note = 2'-O-methyl modified nucleotide
  modified_base 41: mod_base = OTHER; note = 2'-O-methyl modified nucleotide
  modified_base 42: mod_base = OTHER; note = 2'-O-methyl modified nucleotide
  modified_base 43: mod_base = OTHER; note = 2'-O-methyl modified nucleotide
  modified_base 47: mod_base = OTHER; note = 2'-O-methyl modified nucleotide
  modified_base 48: mod_base = OTHER; note = 2'-O-methyl modified nucleotide
  modified_base 51: mod_base = OTHER; note = 2'-O-methyl modified nucleotide
  modified_base 54: mod_base = OTHER; note = nucleotide with phosphorothioate linkage
  modified_base 58: mod_base = OTHER; note = 2'-O-methyl modified nucleotide
  modified_base 59: mod_base = OTHER; note = 2'-O-methyl modified nucleotide
  modified_base 61: mod_base = OTHER; note = 2'-O-methyl modified nucleotide
  modified_base 62: mod_base = OTHER; note = 2'-O-methyl modified nucleotide
  modified_base 63: mod_base = OTHER; note = 2'-O-methyl modified nucleotide
  modified_base 64: mod_base = OTHER; note = 2'-O-methyl modified nucleotide
  modified_base 65: mod_base = OTHER; note = 2'-O-methyl modified nucleotide
  modified_base 66: mod_base = OTHER; note = 2'-O-methyl modified nucleotide
  modified_base 67: mod_base = OTHER; note = 2'-O-methyl modified nucleotide
  modified_base 68: mod_base = OTHER; note = 2'-O-methyl modified nucleotide
  modified_base 69: mod_base = OTHER; note = 2'-O-methyl modified nucleotide
  modified_base 70: mod_base = OTHER; note = 2'-O-methyl modified nucleotide
  modified_base 75: mod_base = OTHER; note = 2'-O-methyl modified nucleotide
  modified_base 77: mod_base = OTHER; note = 2'-O-methyl modified nucleotide
  modified_base 80: mod_base = OTHER; note = 2'-O-methyl modified nucleotide
  modified_base 86: mod_base = OTHER; note = 2'-O-methyl modified nucleotide
  modified_base 87: mod_base = OTHER; note = 2'-O-methyl modified nucleotide
  modified_base 89: mod_base = OTHER; note = 2'-O-methyl modified nucleotide
  modified_base 90: mod_base = OTHER; note = 2'-O-methyl modified nucleotide
  modified_base 91: mod_base = OTHER; note = 2'-O-methyl modified nucleotide
  modified_base 92: mod_base = OTHER; note = 2'-O-methyl modified nucleotide
  modified_base 99: mod_base = OTHER; note = nucleotide with phosphorothioate linkage
  modified_base 100: mod_base = OTHER; note = 2'-O-methyl modified nucleotide with phosphorothioate linkage
  modified_base 101: mod_base = OTHER; note = 2'-O-methyl modified nucleotide

SEQ ID NO: 2120 - RNA, 101 nt, synthetic construct; identical to SEQ ID NO: 1120
  source 1..101: mol_type = other RNA
  modified_base 1: mod_base = OTHER; note = 2'-O-methyl modified nucleotide with phosphorothioate linkage
  modified_base 2: mod_base = OTHER; note = 2'-O-methyl modified nucleotide with phosphorothioate linkage
  modified_base 3: mod_base = OTHER; note = 2'-O-methyl modified nucleotide with phosphorothioate linkage
  modified_base 4: mod_base = OTHER; note = 2'-O-methyl modified nucleotide
  modified_base 5: mod_base = OTHER; note = 2'-O-methyl modified nucleotide
  modified_base 8: mod_base = OTHER; note = 2'-O-methyl modified nucleotide
  modified_base 9: mod_base = OTHER; note = 2'-O-methyl modified nucleotide
  modified_base 11: mod_base = OTHER; note = 2'-O-methyl modified nucleotide
  modified_base 13: mod_base = OTHER; note = 2'-O-methyl modified nucleotide
  modified_base 18: mod_base = OTHER; note = 2'-O-methyl modified nucleotide
  modified_base 22: mod_base = OTHER; note = 2'-O-methyl modified nucleotide
  modified_base 25: mod_base = OTHER; note = 2'-O-methyl modified nucleotide
  modified_base 29: mod_base = OTHER; note = 2'-O-methyl modified nucleotide
  modified_base 30: mod_base = OTHER; note = 2'-O-methyl modified nucleotide
  modified_base 31: mod_base = OTHER; note = 2'-O-methyl modified nucleotide
  modified_base 32: mod_base = OTHER; note = 2'-O-methyl modified nucleotide
  modified_base 37: mod_base = OTHER; note = 2'-O-methyl modified nucleotide
  modified_base 38: mod_base = OTHER; note = 2'-O-methyl modified nucleotide
  modified_base 39: mod_base = OTHER; note = 2'-O-methyl modified nucleotide
  modified_base 40: mod_base = OTHER; note = 2'-O-methyl modified nucleotide
  modified_base 41: mod_base = OTHER; note = 2'-O-methyl modified nucleotide
  modified_base 42: mod_base = OTHER; note = 2'-O-methyl modified nucleotide
  modified_base 43: mod_base = OTHER; note = 2'-O-methyl modified nucleotide
  modified_base 47: mod_base = OTHER; note = 2'-O-methyl modified nucleotide
  modified_base 48: mod_base = OTHER; note = 2'-O-methyl modified nucleotide
  modified_base 51: mod_base = OTHER; note = 2'-O-methyl modified nucleotide
  modified_base 54: mod_base = OTHER; note = nucleotide with phosphorothioate linkage
  modified_base 58: mod_base = OTHER; note = 2'-O-methyl modified nucleotide
  modified_base 59: mod_base = OTHER; note = 2'-O-methyl modified nucleotide
  modified_base 61: mod_base = OTHER; note = 2'-O-methyl modified nucleotide
  modified_base 62: mod_base = OTHER; note = 2'-O-methyl modified nucleotide
  modified_base 63: mod_base = OTHER; note = 2'-O-methyl modified nucleotide
  modified_base 64: mod_base = OTHER; note = 2'-O-methyl modified nucleotide
  modified_base 65: mod_base = OTHER; note = 2'-O-methyl modified nucleotide
  modified_base 66: mod_base = OTHER; note = 2'-O-methyl modified nucleotide
  modified_base 67: mod_base = OTHER; note = 2'-O-methyl modified nucleotide
  modified_base 68: mod_base = OTHER; note = 2'-O-methyl modified nucleotide
  modified_base 69: mod_base = OTHER; note = 2'-O-methyl modified nucleotide
  modified_base 70: mod_base = OTHER; note = 2'-O-methyl modified nucleotide
  modified_base 75: mod_base = OTHER; note = 2'-O-methyl modified nucleotide
  modified_base 77: mod_base = OTHER; note = 2'-O-methyl modified nucleotide
  modified_base 80: mod_base = OTHER; note = 2'-O-methyl modified nucleotide
  modified_base 86: mod_base = OTHER; note = 2'-O-methyl modified nucleotide
  modified_base 87: mod_base = OTHER; note = 2'-O-methyl modified nucleotide
  modified_base 89: mod_base = OTHER; note = 2'-O-methyl modified nucleotide
  modified_base 90: mod_base = OTHER; note = 2'-O-methyl modified nucleotide
  modified_base 91: mod_base = OTHER; note = 2'-O-methyl modified nucleotide
  modified_base 92: mod_base = OTHER; note = 2'-O-methyl modified nucleotide
  modified_base 99: mod_base = OTHER; note = nucleotide with phosphorothioate linkage
  modified_base 100: mod_base = OTHER; note = 2'-O-methyl modified nucleotide with phosphorothioate linkage
  modified_base 101: mod_base = OTHER; note = 2'-O-methyl modified nucleotide

SEQ ID NO: 2121-2200 - skipped (80 entries)

SEQ ID NO: 2201 - RNA, 101 nt, synthetic construct; identical to SEQ ID NO: 1201
  source 1..101: mol_type = other RNA
  modified_base 1: mod_base = OTHER; note = 2'-O-methyl modified nucleotide with phosphorothioate linkage
  modified_base 2: mod_base = OTHER; note = 2'-O-methyl modified nucleotide with phosphorothioate linkage
  modified_base 3: mod_base = OTHER; note = 2'-O-methyl modified nucleotide with phosphorothioate linkage
  modified_base 4: mod_base = OTHER; note = 2'-O-methyl modified nucleotide
  modified_base 5: mod_base = OTHER; note = 2'-O-methyl modified nucleotide
  modified_base 8: mod_base = OTHER; note = 2'-O-methyl modified nucleotide
  modified_base 9: mod_base = OTHER; note = 2'-O-methyl modified nucleotide
  modified_base 11: mod_base = OTHER; note = 2'-O-methyl modified nucleotide
  modified_base 13: mod_base = OTHER; note = 2'-O-methyl modified nucleotide
  modified_base 18: mod_base = OTHER; note = 2'-O-methyl modified nucleotide
  modified_base 22: mod_base = OTHER; note = 2'-O-methyl modified nucleotide
  modified_base 25: mod_base = OTHER; note = 2'-O-methyl modified nucleotide
  modified_base 29: mod_base = OTHER; note = 2'-O-methyl modified nucleotide
  modified_base 30: mod_base = OTHER; note = 2'-O-methyl modified nucleotide
  modified_base 31: mod_base = OTHER; note = 2'-O-methyl modified nucleotide
  modified_base 32: mod_base = OTHER; note = 2'-O-methyl modified nucleotide
  modified_base 37: mod_base = OTHER; note = 2'-O-methyl modified nucleotide
  modified_base 38: mod_base = OTHER; note = 2'-O-methyl modified nucleotide
  modified_base 39: mod_base = OTHER; note = 2'-O-methyl modified nucleotide
  modified_base 40: mod_base = OTHER; note = 2'-O-methyl modified nucleotide
  modified_base 41: mod_base = OTHER; note = 2'-O-methyl modified nucleotide
  modified_base 42: mod_base = OTHER; note = 2'-O-methyl modified nucleotide
  modified_base 43: mod_base = OTHER; note = 2'-O-methyl modified nucleotide
  modified_base 47: mod_base = OTHER; note = 2'-O-methyl modified nucleotide
  modified_base 48: mod_base = OTHER; note = 2'-O-methyl modified nucleotide
  modified_base 51: mod_base = OTHER; note = 2'-O-methyl modified nucleotide
  modified_base 54: mod_base = OTHER; note = nucleotide with phosphorothioate linkage
  modified_base 58: mod_base = OTHER; note = 2'-O-methyl modified nucleotide
  modified_base 59: mod_base = OTHER; note = 2'-O-methyl modified nucleotide
  modified_base 61: mod_base = OTHER; note = 2'-O-methyl modified nucleotide
  modified_base 62: mod_base = OTHER; note = 2'-O-methyl modified nucleotide
  modified_base 63: mod_base = OTHER; note = 2'-O-methyl modified nucleotide
  modified_base 64: mod_base = OTHER; note = 2'-O-methyl modified nucleotide
  modified_base 65: mod_base = OTHER; note = 2'-O-methyl modified nucleotide
  modified_base 66: mod_base = OTHER; note = 2'-O-methyl modified nucleotide
  modified_base 67: mod_base = OTHER; note = 2'-O-methyl modified nucleotide
  modified_base 68: mod_base = OTHER; note = 2'-O-methyl modified nucleotide
  modified_base 69: mod_base = OTHER; note = 2'-O-methyl modified nucleotide
  modified_base 70: mod_base = OTHER; note = 2'-O-methyl modified nucleotide
  modified_base 75: mod_base = OTHER; note = 2'-O-methyl modified nucleotide
  modified_base 77: mod_base = OTHER; note = 2'-O-methyl modified nucleotide
  modified_base 80: mod_base = OTHER; note = 2'-O-methyl modified nucleotide
  modified_base 86: mod_base = OTHER; note = 2'-O-methyl modified nucleotide
  modified_base 87: mod_base = OTHER; note = 2'-O-methyl modified nucleotide
  modified_base 89: mod_base = OTHER; note = 2'-O-methyl modified nucleotide
  modified_base 90: mod_base = OTHER; note = 2'-O-methyl modified nucleotide
  modified_base 91: mod_base = OTHER; note = 2'-O-methyl modified nucleotide
  modified_base 92: mod_base = OTHER; note = 2'-O-methyl modified nucleotide
  modified_base 99: mod_base = OTHER; note = nucleotide with phosphorothioate linkage
  modified_base 100: mod_base = OTHER; note = 2'-O-methyl modified nucleotide with phosphorothioate linkage
  modified_base 101: mod_base = OTHER; note = 2'-O-methyl modified nucleotide

SEQ ID NO: 2202 - RNA, 101 nt, synthetic construct; identical to SEQ ID NO: 1202
  source 1..101: mol_type = other RNA
  modified_base 1: mod_base = OTHER; note = 2'-O-methyl modified nucleotide with phosphorothioate linkage
  modified_base 2: mod_base = OTHER; note = 2'-O-methyl modified nucleotide with phosphorothioate linkage
  modified_base 3: mod_base = OTHER; note = 2'-O-methyl modified nucleotide with phosphorothioate linkage
  modified_base 4: mod_base = OTHER; note = 2'-O-methyl modified nucleotide
  modified_base 5: mod_base = OTHER; note = 2'-O-methyl modified nucleotide
  modified_base 8: mod_base = OTHER; note = 2'-O-methyl modified nucleotide
  modified_base 9: mod_base = OTHER; note = 2'-O-methyl modified nucleotide
  modified_base 11: mod_base = OTHER; note = 2'-O-methyl modified nucleotide
  modified_base 13: mod_base = OTHER; note = 2'-O-methyl modified nucleotide
  modified_base 18: mod_base = OTHER; note = 2'-O-methyl modified nucleotide
  modified_base 22: mod_base = OTHER; note = 2'-O-methyl modified nucleotide
  modified_base 25: mod_base = OTHER; note = 2'-O-methyl modified nucleotide
  modified_base 29: mod_base = OTHER; note = 2'-O-methyl modified nucleotide
  modified_base 30: mod_base = OTHER; note = 2'-O-methyl modified nucleotide
  modified_base 31: mod_base = OTHER; note = 2'-O-methyl modified nucleotide
  modified_base 32: mod_base = OTHER; note = 2'-O-methyl modified nucleotide
  modified_base 37: mod_base = OTHER; note = 2'-O-methyl modified nucleotide
  modified_base 38: mod_base = OTHER; note = 2'-O-methyl modified nucleotide
  modified_base 39: mod_base = OTHER; note = 2'-O-methyl modified nucleotide
  modified_base 40: mod_base = OTHER; note = 2'-O-methyl modified nucleotide
  modified_base 41: mod_base = OTHER; note = 2'-O-methyl modified nucleotide
  modified_base 42: mod_base = OTHER; note = 2'-O-methyl modified nucleotide
  modified_base 43: mod_base = OTHER; note = 2'-O-methyl modified nucleotide
  modified_base 47: mod_base = OTHER; note = 2'-O-methyl modified nucleotide
  modified_base 48: mod_base = OTHER; note = 2'-O-methyl modified nucleotide
  modified_base 51: mod_base = OTHER; note = 2'-O-methyl modified nucleotide
  modified_base 54: mod_base = OTHER; note = nucleotide with phosphorothioate linkage
  modified_base 58: mod_base = OTHER; note = 2'-O-methyl modified nucleotide
  modified_base 59: mod_base = OTHER; note = 2'-O-methyl modified nucleotide
  modified_base 61: mod_base = OTHER; note = 2'-O-methyl modified nucleotide
  modified_base 62: mod_base = OTHER; note = 2'-O-methyl modified nucleotide
  modified_base 63: mod_base = OTHER; note = 2'-O-methyl modified nucleotide
  modified_base 64: mod_base = OTHER; note = 2'-O-methyl modified nucleotide
  modified_base 65: mod_base = OTHER; note = 2'-O-methyl modified nucleotide
  modified_base 66: mod_base = OTHER; note = 2'-O-methyl modified nucleotide
  modified_base 67: mod_base = OTHER; note = 2'-O-methyl modified nucleotide
  modified_base 68: mod_base = OTHER; note = 2'-O-methyl modified nucleotide
  modified_base 69: mod_base = OTHER; note = 2'-O-methyl modified nucleotide
  modified_base 70: mod_base = OTHER; note = 2'-O-methyl modified nucleotide
  modified_base 75: mod_base = OTHER; note = 2'-O-methyl modified nucleotide
  modified_base 77: mod_base = OTHER; note = 2'-O-methyl modified nucleotide
  modified_base 80: mod_base = OTHER; note = 2'-O-methyl modified nucleotide
  modified_base 86: mod_base = OTHER; note = 2'-O-methyl modified nucleotide
  modified_base 87: mod_base = OTHER; note = 2'-O-methyl modified nucleotide
  modified_base 89: mod_base = OTHER; note = 2'-O-methyl modified nucleotide
  modified_base 90: mod_base = OTHER; note = 2'-O-methyl modified nucleotide
  modified_base 91: mod_base = OTHER; note = 2'-O-methyl modified nucleotide
  modified_base 92: mod_base = OTHER; note = 2'-O-methyl modified nucleotide
  modified_base 99: mod_base = OTHER; note = nucleotide with phosphorothioate linkage
  modified_base 100: mod_base = OTHER; note = 2'-O-methyl modified nucleotide with phosphorothioate linkage
  modified_base 101: mod_base = OTHER; note = 2'-O-methyl modified nucleotide

SEQ ID NO: 2203 - RNA, 101 nt, synthetic construct; identical to SEQ ID NO: 1203
  source 1..101: mol_type = other RNA
  modified_base 1: mod_base = OTHER; note = 2'-O-methyl modified nucleotide with phosphorothioate linkage
  modified_base 2: mod_base = OTHER; note = 2'-O-methyl modified nucleotide with phosphorothioate linkage
  modified_base 3: mod_base = OTHER; note = 2'-O-methyl modified nucleotide with phosphorothioate linkage
  modified_base 4: mod_base = OTHER; note = 2'-O-methyl modified nucleotide
  modified_base 5: mod_base = OTHER; note = 2'-O-methyl modified nucleotide
  modified_base 8: mod_base = OTHER; note = 2'-O-methyl modified nucleotide
  modified_base 9: mod_base = OTHER; note = 2'-O-methyl modified nucleotide
  modified_base 11: mod_base = OTHER; note = 2'-O-methyl modified nucleotide
  modified_base 13: mod_base = OTHER; note = 2'-O-methyl modified nucleotide
  modified_base 18: mod_base = OTHER; note = 2'-O-methyl modified nucleotide
  modified_base 22: mod_base = OTHER; note = 2'-O-methyl modified nucleotide
  modified_base 25: mod_base = OTHER; note = 2'-O-methyl modified nucleotide
  modified_base 29: mod_base = OTHER; note = 2'-O-methyl modified nucleotide
  modified_base 30: mod_base = OTHER; note = 2'-O-methyl modified nucleotide
  modified_base 31: mod_base = OTHER; note = 2'-O-methyl modified nucleotide
  modified_base 32: mod_base = OTHER; note = 2'-O-methyl modified nucleotide
  modified_base 37: mod_base = OTHER; note = 2'-O-methyl modified nucleotide
  modified_base 38: mod_base = OTHER; note = 2'-O-methyl modified nucleotide
  modified_base 39: mod_base = OTHER; note = 2'-O-methyl modified nucleotide
  modified_base 40: mod_base = OTHER; note = 2'-O-methyl modified nucleotide
  modified_base 41: mod_base = OTHER; note = 2'-O-methyl modified nucleotide
  modified_base 42: mod_base = OTHER; note = 2'-O-methyl modified nucleotide
  modified_base 43: mod_base = OTHER; note = 2'-O-methyl modified nucleotide
  modified_base 47: mod_base = OTHER; note = 2'-O-methyl modified nucleotide
  modified_base 48: mod_base = OTHER; note = 2'-O-methyl modified nucleotide
  modified_base 51: mod_base = OTHER; note = 2'-O-methyl modified nucleotide
  modified_base 54: mod_base = OTHER; note = nucleotide with phosphorothioate linkage
  modified_base 58: mod_base = OTHER; note = 2'-O-methyl modified nucleotide
  modified_base 59: mod_base = OTHER; note = 2'-O-methyl modified nucleotide
  modified_base 61: mod_base = OTHER; note = 2'-O-methyl modified nucleotide
  modified_base 62: mod_base = OTHER; note = 2'-O-methyl modified nucleotide
  modified_base 63: mod_base = OTHER; note = 2'-O-methyl modified nucleotide
  modified_base 64: mod_base = OTHER; note = 2'-O-methyl modified nucleotide
  modified_base 65: mod_base = OTHER; note = 2'-O-methyl modified nucleotide
  modified_base 66: mod_base = OTHER; note = 2'-O-methyl modified nucleotide
  modified_base 67: mod_base = OTHER; note = 2'-O-methyl modified nucleotide
  modified_base 68: mod_base = OTHER; note = 2'-O-methyl modified nucleotide
  modified_base 69: mod_base = OTHER; note = 2'-O-methyl modified nucleotide
  modified_base 70: mod_base = OTHER; note = 2'-O-methyl modified nucleotide
  modified_base 75: mod_base = OTHER; note = 2'-O-methyl modified nucleotide
  modified_base 77: mod_base = OTHER; note = 2'-O-methyl modified nucleotide
  modified_base 80: mod_base = OTHER; note = 2'-O-methyl modified nucleotide
  modified_base 86: mod_base = OTHER; note = 2'-O-methyl modified nucleotide
  modified_base 87: mod_base = OTHER; note = 2'-O-methyl modified nucleotide
  modified_base 89: mod_base = OTHER; note = 2'-O-methyl modified nucleotide
  modified_base 90: mod_base = OTHER; note = 2'-O-methyl modified nucleotide
  modified_base 91: mod_base = OTHER; note = 2'-O-methyl modified nucleotide
  modified_base 92: mod_base = OTHER; note = 2'-O-methyl modified nucleotide
  modified_base 99: mod_base = OTHER; note = nucleotide with phosphorothioate linkage
  modified_base 100: mod_base = OTHER; note = 2'-O-methyl modified nucleotide with phosphorothioate linkage
  modified_base 101: mod_base = OTHER; note = 2'-O-methyl modified nucleotide

SEQ ID NO: 2204 - RNA, 101 nt, synthetic construct; identical to SEQ ID NO: 1204
  source 1..101: mol_type = other RNA
  modified_base 1: mod_base = OTHER; note = 2'-O-methyl modified nucleotide with phosphorothioate linkage
  modified_base 2: mod_base = OTHER; note = 2'-O-methyl modified nucleotide with phosphorothioate linkage
  modified_base 3: mod_base = OTHER; note = 2'-O-methyl modified nucleotide with phosphorothioate linkage
  modified_base 4: mod_base = OTHER; note = 2'-O-methyl modified nucleotide
  modified_base 5: mod_base = OTHER; note = 2'-O-methyl modified nucleotide
  modified_base 8: mod_base = OTHER; note = 2'-O-methyl modified nucleotide
  modified_base 9: mod_base = OTHER; note = 2'-O-methyl modified nucleotide
  modified_base 11: mod_base = OTHER; note = 2'-O-methyl modified nucleotide
  modified_base 13: mod_base = OTHER; note = 2'-O-methyl modified nucleotide
  modified_base 18: mod_base = OTHER; note = 2'-O-methyl modified nucleotide
  modified_base 22: mod_base = OTHER; note = 2'-O-methyl modified nucleotide
  modified_base 25: mod_base = OTHER; note = 2'-O-methyl modified nucleotide
  modified_base 29: mod_base = OTHER; note = 2'-O-methyl modified nucleotide
  modified_base 30: mod_base = OTHER; note = 2'-O-methyl modified nucleotide
  modified_base 31: mod_base = OTHER; note = 2'-O-methyl modified nucleotide
  modified_base 32: mod_base = OTHER; note = 2'-O-methyl modified nucleotide
  modified_base 37: mod_base = OTHER; note = 2'-O-methyl modified nucleotide
  modified_base 38: mod_base = OTHER; note = 2'-O-methyl modified nucleotide
  modified_base 39: mod_base = OTHER; note = 2'-O-methyl modified nucleotide
  modified_base 40: mod_base = OTHER; note = 2'-O-methyl modified nucleotide
  modified_base 41: mod_base = OTHER; note = 2'-O-methyl modified nucleotide
  modified_base 42: mod_base = OTHER; note = 2'-O-methyl modified nucleotide
  modified_base 43: mod_base = OTHER; note = 2'-O-methyl modified nucleotide
  modified_base 47: mod_base = OTHER; note = 2'-O-methyl modified nucleotide
  modified_base 48: mod_base = OTHER; note = 2'-O-methyl modified nucleotide
  modified_base 51: mod_base = OTHER; note = 2'-O-methyl modified nucleotide
  modified_base 54: mod_base = OTHER; note = nucleotide with phosphorothioate linkage
  modified_base 58: mod_base = OTHER; note = 2'-O-methyl modified nucleotide
  modified_base 59: mod_base = OTHER; note = 2'-O-methyl modified nucleotide
  modified_base 61: mod_base = OTHER; note = 2'-O-methyl modified nucleotide
  modified_base 62: mod_base = OTHER; note = 2'-O-methyl modified nucleotide
  modified_base 63: mod_base = OTHER; note = 2'-O-methyl modified nucleotide
  modified_base 64: mod_base = OTHER; note = 2'-O-methyl modified nucleotide
  modified_base 65: mod_base = OTHER; note = 2'-O-methyl modified nucleotide
  modified_base 66: mod_base = OTHER; note = 2'-O-methyl modified nucleotide
  modified_base 67: mod_base = OTHER; note = 2'-O-methyl modified nucleotide
  modified_base 68: mod_base = OTHER; note = 2'-O-methyl modified nucleotide
  modified_base 69: mod_base = OTHER; note = 2'-O-methyl modified nucleotide
  modified_base 70: mod_base = OTHER; note = 2'-O-methyl modified nucleotide
  modified_base 75: mod_base = OTHER; note = 2'-O-methyl modified nucleotide
  modified_base 77: mod_base = OTHER; note = 2'-O-methyl modified nucleotide
  modified_base 80: mod_base = OTHER; note = 2'-O-methyl modified nucleotide
  modified_base 86: mod_base = OTHER; note = 2'-O-methyl modified nucleotide
  modified_base 87: mod_base = OTHER; note = 2'-O-methyl modified nucleotide
  modified_base 89: mod_base = OTHER; note = 2'-O-methyl modified nucleotide
  modified_base 90: mod_base = OTHER; note = 2'-O-methyl modified nucleotide
  modified_base 91: mod_base = OTHER; note = 2'-O-methyl modified nucleotide
  modified_base 92: mod_base = OTHER; note = 2'-O-methyl modified nucleotide
  modified_base 99: mod_base = OTHER; note = nucleotide with phosphorothioate linkage
  modified_base 100: mod_base = OTHER; note = 2'-O-methyl modified nucleotide with phosphorothioate linkage
  modified_base 101: mod_base = OTHER; note = 2'-O-methyl modified nucleotide

SEQ ID NO: 2205 - RNA, 101 nt, synthetic construct; identical to SEQ ID NO: 1205
  source 1..101: mol_type = other RNA
  modified_base 1: mod_base = OTHER; note = 2'-O-methyl modified nucleotide with phosphorothioate linkage
  modified_base 2: mod_base = OTHER; note = 2'-O-methyl modified nucleotide with phosphorothioate linkage
  modified_base 3: mod_base = OTHER; note = 2'-O-methyl modified nucleotide with phosphorothioate linkage
  modified_base 4: mod_base = OTHER; note = 2'-O-methyl modified nucleotide
  modified_base 5: mod_base = OTHER; note = 2'-O-methyl modified nucleotide
  modified_base 8: mod_base = OTHER; note = 2'-O-methyl modified nucleotide
  modified_base 9: mod_base = OTHER; note = 2'-O-methyl modified nucleotide
  modified_base 11: mod_base = OTHER; note = 2'-O-methyl modified nucleotide
  modified_base 13: mod_base = OTHER; note = 2'-O-methyl modified nucleotide
  modified_base 18: mod_base = OTHER; note = 2'-O-methyl modified nucleotide
  modified_base 22: mod_base = OTHER; note = 2'-O-methyl modified nucleotide
  modified_base 25: mod_base = OTHER; note = 2'-O-methyl modified nucleotide
  modified_base 29: mod_base = OTHER; note = 2'-O-methyl modified nucleotide
  modified_base 30: mod_base = OTHER; note = 2'-O-methyl modified nucleotide
  modified_base 31: mod_base = OTHER; note = 2'-O-methyl modified nucleotide
  modified_base 32: mod_base = OTHER; note = 2'-O-methyl modified nucleotide
  modified_base 37: mod_base = OTHER; note = 2'-O-methyl modified nucleotide
  modified_base 38: mod_base = OTHER; note = 2'-O-methyl modified nucleotide
  modified_base 39: mod_base = OTHER; note = 2'-O-methyl modified nucleotide
  modified_base 40: mod_base = OTHER; note = 2'-O-methyl modified nucleotide
  modified_base 41: mod_base = OTHER; note = 2'-O-methyl modified nucleotide
  modified_base 42: mod_base = OTHER; note = 2'-O-methyl modified nucleotide
  modified_base 43: mod_base = OTHER; note = 2'-O-methyl modified nucleotide
  modified_base 47: mod_base = OTHER; note = 2'-O-methyl modified nucleotide
  modified_base 48: mod_base = OTHER; note = 2'-O-methyl modified nucleotide
  modified_base 51: mod_base = OTHER; note = 2'-O-methyl modified nucleotide
  modified_base 54: mod_base = OTHER; note = nucleotide with phosphorothioate linkage
  modified_base 58: mod_base = OTHER; note = 2'-O-methyl modified nucleotide
  modified_base 59: mod_base = OTHER; note = 2'-O-methyl modified nucleotide
  modified_base 61: mod_base = OTHER; note = 2'-O-methyl modified nucleotide
  modified_base 62: mod_base = OTHER; note = 2'-O-methyl modified nucleotide
  modified_base 63: mod_base = OTHER; note = 2'-O-methyl modified nucleotide
  modified_base 64: mod_base = OTHER; note = 2'-O-methyl modified nucleotide
  modified_base 65: mod_base = OTHER; note = 2'-O-methyl modified nucleotide
  modified_base 66: mod_base = OTHER; note = 2'-O-methyl modified nucleotide
  modified_base 67: mod_base = OTHER; note = 2'-O-methyl modified nucleotide
  modified_base 68: mod_base = OTHER; note = 2'-O-methyl modified nucleotide
  modified_base 69: mod_base = OTHER; note = 2'-O-methyl modified nucleotide
  modified_base 70: mod_base = OTHER; note = 2'-O-methyl modified nucleotide
  modified_base 75: mod_base = OTHER; note = 2'-O-methyl modified nucleotide
  modified_base 77: mod_base = OTHER; note = 2'-O-methyl modified nucleotide
  modified_base 80: mod_base = OTHER; note = 2'-O-methyl modified nucleotide
  modified_base 86: mod_base = OTHER; note = 2'-O-methyl modified nucleotide
  modified_base 87: mod_base = OTHER; note = 2'-O-methyl modified nucleotide
  modified_base 89: mod_base = OTHER; note = 2'-O-methyl modified nucleotide
  modified_base 90: mod_base = OTHER; note = 2'-O-methyl modified nucleotide
  modified_base 91: mod_base = OTHER; note = 2'-O-methyl modified nucleotide
  modified_base 92: mod_base = OTHER; note = 2'-O-methyl modified nucleotide
  modified_base 99: mod_base = OTHER; note = nucleotide with phosphorothioate linkage
  modified_base 100: mod_base = OTHER; note = 2'-O-methyl modified nucleotide with phosphorothioate linkage
  modified_base 101: mod_base = OTHER; note = 2'-O-methyl modified nucleotide

SEQ ID NO: 2206 - RNA, 101 nt, synthetic construct; identical to SEQ ID NO: 1206
  source 1..101: mol_type = other RNA
  modified_base 1: mod_base = OTHER; note = 2'-O-methyl modified nucleotide with phosphorothioate linkage
  modified_base 2: mod_base = OTHER; note = 2'-O-methyl modified nucleotide with phosphorothioate linkage
  modified_base 3: mod_base = OTHER; note = 2'-O-methyl modified nucleotide with phosphorothioate linkage
  modified_base 4: mod_base = OTHER; note = 2'-O-methyl modified nucleotide
  modified_base 5: mod_base = OTHER; note = 2'-O-methyl modified nucleotide
  modified_base 8: mod_base = OTHER; note = 2'-O-methyl modified nucleotide
  modified_base 9: mod_base = OTHER; note = 2'-O-methyl modified nucleotide
  modified_base 11: mod_base = OTHER; note = 2'-O-methyl modified nucleotide
  modified_base 13: mod_base = OTHER; note = 2'-O-methyl modified nucleotide
  modified_base 18: mod_base = OTHER; note = 2'-O-methyl modified nucleotide
  modified_base 22: mod_base = OTHER; note = 2'-O-methyl modified nucleotide
  modified_base 25: mod_base = OTHER; note = 2'-O-methyl modified nucleotide
  modified_base 29: mod_base = OTHER; note = 2'-O-methyl modified nucleotide
  modified_base 30: mod_base = OTHER; note = 2'-O-methyl modified nucleotide
  modified_base 31: mod_base = OTHER; note = 2'-O-methyl modified nucleotide
  modified_base 32: mod_base = OTHER; note = 2'-O-methyl modified nucleotide
  modified_base 37: mod_base = OTHER; note = 2'-O-methyl modified nucleotide
  modified_base 38: mod_base = OTHER; note = 2'-O-methyl modified nucleotide
  modified_base 39: mod_base = OTHER; note = 2'-O-methyl modified nucleotide
  modified_base 40: mod_base = OTHER; note = 2'-O-methyl modified nucleotide
  modified_base 41: mod_base = OTHER; note = 2'-O-methyl modified nucleotide
  modified_base 42: mod_base = OTHER; note = 2'-O-methyl modified nucleotide
  modified_base 43: mod_base = OTHER; note = 2'-O-methyl modified nucleotide
  modified_base 47: mod_base = OTHER; note = 2'-O-methyl modified nucleotide
  modified_base 48: mod_base = OTHER; note = 2'-O-methyl modified nucleotide
  modified_base 51: mod_base = OTHER; note = 2'-O-methyl modified nucleotide
  modified_base 54: mod_base = OTHER; note = nucleotide with phosphorothioate linkage
  modified_base 58: mod_base = OTHER; note = 2'-O-methyl modified nucleotide
  modified_base 59: mod_base = OTHER; note = 2'-O-methyl modified nucleotide
  modified_base 61: mod_base = OTHER; note = 2'-O-methyl modified nucleotide
  modified_base 62: mod_base = OTHER; note = 2'-O-methyl modified nucleotide
  modified_base 63: mod_base = OTHER; note = 2'-O-methyl modified nucleotide
  modified_base 64: mod_base = OTHER; note = 2'-O-methyl modified nucleotide
  modified_base 65: mod_base = OTHER; note = 2'-O-methyl modified nucleotide
  modified_base 66: mod_base = OTHER; note = 2'-O-methyl modified nucleotide
  modified_base 67: mod_base = OTHER; note = 2'-O-methyl modified nucleotide
  modified_base 68: mod_base = OTHER; note = 2'-O-methyl modified nucleotide
  modified_base 69: mod_base = OTHER; note = 2'-O-methyl modified nucleotide
  modified_base 70: mod_base = OTHER; note = 2'-O-methyl modified nucleotide
  modified_base 75: mod_base = OTHER; note = 2'-O-methyl modified nucleotide
  modified_base 77: mod_base = OTHER; note = 2'-O-methyl modified nucleotide
  modified_base 80: mod_base = OTHER; note = 2'-O-methyl modified nucleotide
  modified_base 86: mod_base = OTHER; note = 2'-O-methyl modified nucleotide
  modified_base 87: mod_base = OTHER; note = 2'-O-methyl modified nucleotide
  modified_base 89: mod_base = OTHER; note = 2'-O-methyl modified nucleotide
  modified_base 90: mod_base = OTHER; note = 2'-O-methyl modified nucleotide
  modified_base 91: mod_base = OTHER; note = 2'-O-methyl modified nucleotide
  modified_base 92: mod_base = OTHER; note = 2'-O-methyl modified nucleotide
  modified_base 99: mod_base = OTHER; note = nucleotide with phosphorothioate linkage
  modified_base 100: mod_base = OTHER; note = 2'-O-methyl modified nucleotide with phosphorothioate linkage
  modified_base 101: mod_base = OTHER; note = 2'-O-methyl modified nucleotide

SEQ ID NO: 2207 - RNA, 101 nt, synthetic construct; identical to SEQ ID NO: 1207
  source 1..101: mol_type = other RNA
  modified_base 1: mod_base = OTHER; note = 2'-O-methyl modified nucleotide with phosphorothioate linkage
  modified_base 2: mod_base = OTHER; note = 2'-O-methyl modified nucleotide with phosphorothioate linkage
  modified_base 3: mod_base = OTHER; note = 2'-O-methyl modified nucleotide with phosphorothioate linkage
  modified_base 4: mod_base = OTHER; note = 2'-O-methyl modified nucleotide
  modified_base 5: mod_base = OTHER; note = 2'-O-methyl modified nucleotide
  modified_base 8: mod_base = OTHER; note = 2'-O-methyl modified nucleotide
  modified_base 9: mod_base = OTHER; note = 2'-O-methyl modified nucleotide
  modified_base 11: mod_base = OTHER; note = 2'-O-methyl modified nucleotide
  modified_base 13: mod_base = OTHER; note = 2'-O-methyl modified nucleotide
  modified_base 18: mod_base = OTHER; note = 2'-O-methyl modified nucleotide
  modified_base 22: mod_base = OTHER; note = 2'-O-methyl modified nucleotide
  modified_base 25: mod_base = OTHER; note = 2'-O-methyl modified nucleotide
  modified_base 29: mod_base = OTHER; note = 2'-O-methyl modified nucleotide
  modified_base 30: mod_base = OTHER; note = 2'-O-methyl modified nucleotide
  modified_base 31: mod_base = OTHER; note = 2'-O-methyl modified nucleotide
  modified_base 32: mod_base = OTHER; note = 2'-O-methyl modified nucleotide
  modified_base 37: mod_base = OTHER; note = 2'-O-methyl modified nucleotide
  modified_base 38: mod_base = OTHER; note = 2'-O-methyl modified nucleotide
  modified_base 39: mod_base = OTHER; note = 2'-O-methyl modified nucleotide
  modified_base 40: mod_base = OTHER; note = 2'-O-methyl modified nucleotide
  modified_base 41: mod_base = OTHER; note = 2'-O-methyl modified nucleotide
  modified_base 42: mod_base = OTHER; note = 2'-O-methyl modified nucleotide
  modified_base 43: mod_base = OTHER; note = 2'-O-methyl modified nucleotide
  modified_base 47: mod_base = OTHER; note = 2'-O-methyl modified nucleotide
  modified_base 48: mod_base = OTHER; note = 2'-O-methyl modified nucleotide
  modified_base 51: mod_base = OTHER; note = 2'-O-methyl modified nucleotide
  modified_base 54: mod_base = OTHER; note = nucleotide with phosphorothioate linkage
  modified_base 58: mod_base = OTHER; note = 2'-O-methyl modified nucleotide
  modified_base 59: mod_base = OTHER; note = 2'-O-methyl modified nucleotide
  modified_base 61: mod_base = OTHER; note = 2'-O-methyl modified nucleotide
  modified_base 62: mod_base = OTHER; note = 2'-O-methyl modified nucleotide
  modified_base 63: mod_base = OTHER; note = 2'-O-methyl modified nucleotide
  modified_base 64: mod_base = OTHER; note = 2'-O-methyl modified nucleotide
  modified_base 65: mod_base = OTHER; note = 2'-O-methyl modified nucleotide
  modified_base 66: mod_base = OTHER; note = 2'-O-methyl modified nucleotide
  modified_base 67: mod_base = OTHER; note = 2'-O-methyl modified nucleotide
  modified_base 68: mod_base = OTHER; note = 2'-O-methyl modified nucleotide
  modified_base 69: mod_base = OTHER; note = 2'-O-methyl modified nucleotide
  modified_base 70: mod_base = OTHER; note = 2'-O-methyl modified nucleotide
  modified_base 75: mod_base = OTHER; note = 2'-O-methyl modified nucleotide
  modified_base 77: mod_base = OTHER; note = 2'-O-methyl modified nucleotide
  modified_base 80: mod_base = OTHER; note = 2'-O-methyl modified nucleotide
  modified_base 86: mod_base = OTHER; note = 2'-O-methyl modified nucleotide
  modified_base 87: mod_base = OTHER; note = 2'-O-methyl modified nucleotide
  modified_base 89: mod_base = OTHER; note = 2'-O-methyl modified nucleotide
  modified_base 90: mod_base = OTHER; note = 2'-O-methyl modified nucleotide
  modified_base 91: mod_base = OTHER; note = 2'-O-methyl modified nucleotide
  modified_base 92: mod_base = OTHER; note = 2'-O-methyl modified nucleotide
  modified_base 99: mod_base = OTHER; note = nucleotide with phosphorothioate linkage
  modified_base 100: mod_base = OTHER; note = 2'-O-methyl modified nucleotide with phosphorothioate linkage
  modified_base 101: mod_base = OTHER; note = 2'-O-methyl modified nucleotide

SEQ ID NO: 2208 - RNA, 101 nt, synthetic construct; identical to SEQ ID NO: 1208
  source 1..101: mol_type = other RNA
  modified_base 1: mod_base = OTHER; note = 2'-O-methyl modified nucleotide with phosphorothioate linkage
  modified_base 2: mod_base = OTHER; note = 2'-O-methyl modified nucleotide with phosphorothioate linkage
  modified_base 3: mod_base = OTHER; note = 2'-O-methyl modified nucleotide with phosphorothioate linkage
  modified_base 4: mod_base = OTHER; note = 2'-O-methyl modified nucleotide
  modified_base 5: mod_base = OTHER; note = 2'-O-methyl modified nucleotide
  modified_base 8: mod_base = OTHER; note = 2'-O-methyl modified nucleotide
  modified_base 9: mod_base = OTHER; note = 2'-O-methyl modified nucleotide
  modified_base 11: mod_base = OTHER; note = 2'-O-methyl modified nucleotide
  modified_base 13: mod_base = OTHER; note = 2'-O-methyl modified nucleotide
  modified_base 18: mod_base = OTHER; note = 2'-O-methyl modified nucleotide
  modified_base 22: mod_base = OTHER; note = 2'-O-methyl modified nucleotide
  modified_base 25: mod_base = OTHER; note = 2'-O-methyl modified nucleotide
  modified_base 29: mod_base = OTHER; note = 2'-O-methyl modified nucleotide
  modified_base 30: mod_base = OTHER; note = 2'-O-methyl modified nucleotide
  modified_base 31: mod_base = OTHER; note = 2'-O-methyl modified nucleotide
  modified_base 32: mod_base = OTHER; note = 2'-O-methyl modified nucleotide
  modified_base 37: mod_base = OTHER; note = 2'-O-methyl modified nucleotide
  modified_base 38: mod_base = OTHER; note = 2'-O-methyl modified nucleotide
  modified_base 39: mod_base = OTHER; note = 2'-O-methyl modified nucleotide
  modified_base 40: mod_base = OTHER; note = 2'-O-methyl modified nucleotide
  modified_base 41: mod_base = OTHER; note = 2'-O-methyl modified nucleotide
  modified_base 42: mod_base = OTHER; note = 2'-O-methyl modified nucleotide
  modified_base 43: mod_base = OTHER; note = 2'-O-methyl modified nucleotide
  modified_base 47: mod_base = OTHER; note = 2'-O-methyl modified nucleotide
  modified_base 48: mod_base = OTHER; note = 2'-O-methyl modified nucleotide
  modified_base 51: mod_base = OTHER; note = 2'-O-methyl modified nucleotide
  modified_base 54: mod_base = OTHER; note = nucleotide with phosphorothioate linkage
  modified_base 58: mod_base = OTHER; note = 2'-O-methyl modified nucleotide
  modified_base 59: mod_base = OTHER; note = 2'-O-methyl modified nucleotide
  modified_base 61: mod_base = OTHER; note = 2'-O-methyl modified nucleotide
  modified_base 62: mod_base = OTHER; note = 2'-O-methyl modified nucleotide
  modified_base 63: mod_base = OTHER; note = 2'-O-methyl modified nucleotide
  modified_base 64: mod_base = OTHER; note = 2'-O-methyl modified nucleotide
  modified_base 65: mod_base = OTHER; note = 2'-O-methyl modified nucleotide
  modified_base 66: mod_base = OTHER; note = 2'-O-methyl modified nucleotide
  modified_base 67: mod_base = OTHER; note = 2'-O-methyl modified nucleotide
  modified_base 68: mod_base = OTHER; note = 2'-O-methyl modified nucleotide
  modified_base 69: mod_base = OTHER; note = 2'-O-methyl modified nucleotide
  modified_base 70: mod_base = OTHER; note = 2'-O-methyl modified nucleotide
  modified_base 75: mod_base = OTHER; note = 2'-O-methyl modified nucleotide
  modified_base 77: mod_base = OTHER; note = 2'-O-methyl modified nucleotide
  modified_base 80: mod_base = OTHER; note = 2'-O-methyl modified nucleotide
  modified_base 86: mod_base = OTHER; note = 2'-O-methyl modified nucleotide
  modified_base 87: mod_base = OTHER; note = 2'-O-methyl modified nucleotide
  modified_base 89: mod_base = OTHER; note = 2'-O-methyl modified nucleotide
  modified_base 90: mod_base = OTHER; note = 2'-O-methyl modified nucleotide
  modified_base 91: mod_base = OTHER; note = 2'-O-methyl modified nucleotide
  modified_base 92: mod_base = OTHER; note = 2'-O-methyl modified nucleotide
  modified_base 99: mod_base = OTHER; note = nucleotide with phosphorothioate linkage
  modified_base 100: mod_base = OTHER; note = 2'-O-methyl modified nucleotide with phosphorothioate linkage
  modified_base 101: mod_base = OTHER; note = 2'-O-methyl modified nucleotide

SEQ ID NO: 2209 - RNA, 101 nt, synthetic construct; identical to SEQ ID NO: 1209
  source 1..101: mol_type = other RNA
  modified_base 1: mod_base = OTHER; note = 2'-O-methyl modified nucleotide with phosphorothioate linkage
  modified_base 2: mod_base = OTHER; note = 2'-O-methyl modified nucleotide with phosphorothioate linkage
  modified_base 3: mod_base = OTHER; note = 2'-O-methyl modified nucleotide with phosphorothioate linkage
  modified_base 4: mod_base = OTHER; note = 2'-O-methyl modified nucleotide
  modified_base 5: mod_base = OTHER; note = 2'-O-methyl modified nucleotide
  modified_base 8: mod_base = OTHER; note = 2'-O-methyl modified nucleotide
  modified_base 9: mod_base = OTHER; note = 2'-O-methyl modified nucleotide
  modified_base 11: mod_base = OTHER; note = 2'-O-methyl modified nucleotide
  modified_base 13: mod_base = OTHER; note = 2'-O-methyl modified nucleotide
  modified_base 18: mod_base = OTHER; note = 2'-O-methyl modified nucleotide
  modified_base 22: mod_base = OTHER; note = 2'-O-methyl modified nucleotide
  modified_base 25: mod_base = OTHER; note = 2'-O-methyl modified nucleotide
  modified_base 29: mod_base = OTHER; note = 2'-O-methyl modified nucleotide
  modified_base 30: mod_base = OTHER; note = 2'-O-methyl modified nucleotide
  modified_base 31: mod_base = OTHER; note = 2'-O-methyl modified nucleotide
  modified_base 32: mod_base = OTHER; note = 2'-O-methyl modified nucleotide
  modified_base 37: mod_base = OTHER; note = 2'-O-methyl modified nucleotide
  modified_base 38: mod_base = OTHER; note = 2'-O-methyl modified nucleotide
  modified_base 39: mod_base = OTHER; note = 2'-O-methyl modified nucleotide
  modified_base 40: mod_base = OTHER; note = 2'-O-methyl modified nucleotide
  modified_base 41: mod_base = OTHER; note = 2'-O-methyl modified nucleotide
  modified_base 42: mod_base = OTHER; note = 2'-O-methyl modified nucleotide
  modified_base 43: mod_base = OTHER; note = 2'-O-methyl modified nucleotide
  modified_base 47: mod_base = OTHER; note = 2'-O-methyl modified nucleotide
  modified_base 48: mod_base = OTHER; note = 2'-O-methyl modified nucleotide
  modified_base 51: mod_base = OTHER; note = 2'-O-methyl modified nucleotide
  modified_base 54: mod_base = OTHER; note = nucleotide with phosphorothioate linkage
  modified_base 58: mod_base = OTHER; note = 2'-O-methyl modified nucleotide
  modified_base 59: mod_base = OTHER; note = 2'-O-methyl modified nucleotide
  modified_base 61: mod_base = OTHER; note = 2'-O-methyl modified nucleotide
  modified_base 62: mod_base = OTHER; note = 2'-O-methyl modified nucleotide
  modified_base 63: mod_base = OTHER; note = 2'-O-methyl modified nucleotide
  modified_base 64: mod_base = OTHER; note = 2'-O-methyl modified nucleotide
  modified_base 65: mod_base = OTHER; note = 2'-O-methyl modified nucleotide
  modified_base 66: mod_base = OTHER; note = 2'-O-methyl modified nucleotide
  modified_base 67: mod_base = OTHER; note = 2'-O-methyl modified nucleotide
  modified_base 68: mod_base = OTHER; note = 2'-O-methyl modified nucleotide
  modified_base 69: mod_base = OTHER; note = 2'-O-methyl modified nucleotide
  modified_base 70: mod_base = OTHER; note = 2'-O-methyl modified nucleotide
  modified_base 75: mod_base = OTHER; note = 2'-O-methyl modified nucleotide
  modified_base 77: mod_base = OTHER; note = 2'-O-methyl modified nucleotide
  modified_base 80: mod_base = OTHER; note = 2'-O-methyl modified nucleotide
  modified_base 86: mod_base = OTHER; note = 2'-O-methyl modified nucleotide
  modified_base 87: mod_base = OTHER; note = 2'-O-methyl modified nucleotide
  modified_base 89: mod_base = OTHER; note = 2'-O-methyl modified nucleotide
  modified_base 90: mod_base = OTHER; note = 2'-O-methyl modified nucleotide
  modified_base 91: mod_base = OTHER; note = 2'-O-methyl modified nucleotide
  modified_base 92: mod_base = OTHER; note = 2'-O-methyl modified nucleotide
  modified_base 99: mod_base = OTHER; note = nucleotide with phosphorothioate linkage
  modified_base 100: mod_base = OTHER; note = 2'-O-methyl modified nucleotide with phosphorothioate linkage
  modified_base 101: mod_base = OTHER; note = 2'-O-methyl modified nucleotide

SEQ ID NO: 2210 - RNA, 101 nt, synthetic construct; identical to SEQ ID NO: 1210
  source 1..101: mol_type = other RNA
  modified_base 1: mod_base = OTHER; note = 2'-O-methyl modified nucleotide with phosphorothioate linkage
  modified_base 2: mod_base = OTHER; note = 2'-O-methyl modified nucleotide with phosphorothioate linkage
  modified_base 3: mod_base = OTHER; note = 2'-O-methyl modified nucleotide with phosphorothioate linkage
  modified_base 4: mod_base = OTHER; note = 2'-O-methyl modified nucleotide
  modified_base 5: mod_base = OTHER; note = 2'-O-methyl modified nucleotide
  modified_base 8: mod_base = OTHER; note = 2'-O-methyl modified nucleotide
  modified_base 9: mod_base = OTHER; note = 2'-O-methyl modified nucleotide
  modified_base 11: mod_base = OTHER; note = 2'-O-methyl modified nucleotide
  modified_base 13: mod_base = OTHER; note = 2'-O-methyl modified nucleotide
  modified_base 18: mod_base = OTHER; note = 2'-O-methyl modified nucleotide
  modified_base 22: mod_base = OTHER; note = 2'-O-methyl modified nucleotide
  modified_base 25: mod_base = OTHER; note = 2'-O-methyl modified nucleotide
  modified_base 29: mod_base = OTHER; note = 2'-O-methyl modified nucleotide
  modified_base 30: mod_base = OTHER; note = 2'-O-methyl modified nucleotide
  modified_base 31: mod_base = OTHER; note = 2'-O-methyl modified nucleotide
  modified_base 32: mod_base = OTHER; note = 2'-O-methyl modified nucleotide
  modified_base 37: mod_base = OTHER; note = 2'-O-methyl modified nucleotide
  modified_base 38: mod_base = OTHER; note = 2'-O-methyl modified nucleotide
  modified_base 39: mod_base = OTHER; note = 2'-O-methyl modified nucleotide
  modified_base 40: mod_base = OTHER; note = 2'-O-methyl modified nucleotide
  modified_base 41: mod_base = OTHER; note = 2'-O-methyl modified nucleotide
  modified_base 42: mod_base = OTHER; note = 2'-O-methyl modified nucleotide
  modified_base 43: mod_base = OTHER; note = 2'-O-methyl modified nucleotide
  modified_base 47: mod_base = OTHER; note = 2'-O-methyl modified nucleotide
  modified_base 48: mod_base = OTHER; note = 2'-O-methyl modified nucleotide
  modified_base 51: mod_base = OTHER; note = 2'-O-methyl modified nucleotide
  modified_base 54: mod_base = OTHER; note = nucleotide with phosphorothioate linkage
  modified_base 58: mod_base = OTHER; note = 2'-O-methyl modified nucleotide
  modified_base 59: mod_base = OTHER; note = 2'-O-methyl modified nucleotide
  modified_base 61: mod_base = OTHER; note = 2'-O-methyl modified nucleotide
  modified_base 62: mod_base = OTHER; note = 2'-O-methyl modified nucleotide
  modified_base 63: mod_base = OTHER; note = 2'-O-methyl modified nucleotide
  modified_base 64: mod_base = OTHER; note = 2'-O-methyl modified nucleotide
  modified_base 65: mod_base = OTHER; note = 2'-O-methyl modified nucleotide
  modified_base 66: mod_base = OTHER; note = 2'-O-methyl modified nucleotide
  modified_base 67: mod_base = OTHER; note = 2'-O-methyl modified nucleotide
  modified_base 68: mod_base = OTHER; note = 2'-O-methyl modified nucleotide
  modified_base 69: mod_base = OTHER; note = 2'-O-methyl modified nucleotide
  modified_base 70: mod_base = OTHER; note = 2'-O-methyl modified nucleotide
  modified_base 75: mod_base = OTHER; note = 2'-O-methyl modified nucleotide
  modified_base 77: mod_base = OTHER; note = 2'-O-methyl modified nucleotide
  modified_base 80: mod_base = OTHER; note = 2'-O-methyl modified nucleotide
  modified_base 86: mod_base = OTHER; note = 2'-O-methyl modified nucleotide
  modified_base 87: mod_base = OTHER; note = 2'-O-methyl modified nucleotide
  modified_base 89: mod_base = OTHER; note = 2'-O-methyl modified nucleotide
  modified_base 90: mod_base = OTHER; note = 2'-O-methyl modified nucleotide
  modified_base 91: mod_base = OTHER; note = 2'-O-methyl modified nucleotide
  modified_base 92: mod_base = OTHER; note = 2'-O-methyl modified nucleotide
  modified_base 99: mod_base = OTHER; note = nucleotide with phosphorothioate linkage
  modified_base 100: mod_base = OTHER; note = 2'-O-methyl modified nucleotide with phosphorothioate linkage
  modified_base 101: mod_base = OTHER; note = 2'-O-methyl modified nucleotide

SEQ ID NO: 2211 - RNA, 101 nt, synthetic construct; identical to SEQ ID NO: 1211
  source 1..101: mol_type = other RNA
  modified_base 1: mod_base = OTHER; note = 2'-O-methyl modified nucleotide with phosphorothioate linkage
  modified_base 2: mod_base = OTHER; note = 2'-O-methyl modified nucleotide with phosphorothioate linkage
  modified_base 3: mod_base = OTHER; note = 2'-O-methyl modified nucleotide with phosphorothioate linkage
  modified_base 4: mod_base = OTHER; note = 2'-O-methyl modified nucleotide
  modified_base 5: mod_base = OTHER; note = 2'-O-methyl modified nucleotide
  modified_base 8: mod_base = OTHER; note = 2'-O-methyl modified nucleotide
  modified_base 9: mod_base = OTHER; note = 2'-O-methyl modified nucleotide
  modified_base 11: mod_base = OTHER; note = 2'-O-methyl modified nucleotide
  modified_base 13: mod_base = OTHER; note = 2'-O-methyl modified nucleotide
  modified_base 18: mod_base = OTHER; note = 2'-O-methyl modified nucleotide
  modified_base 22: mod_base = OTHER; note = 2'-O-methyl modified nucleotide
  modified_base 25: mod_base = OTHER; note = 2'-O-methyl modified nucleotide
  modified_base 29: mod_base = OTHER; note = 2'-O-methyl modified nucleotide
  modified_base 30: mod_base = OTHER; note = 2'-O-methyl modified nucleotide
  modified_base 31: mod_base = OTHER; note = 2'-O-methyl modified nucleotide
  modified_base 32: mod_base = OTHER; note = 2'-O-methyl modified nucleotide
  modified_base 37: mod_base = OTHER; note = 2'-O-methyl modified nucleotide
  modified_base 38: mod_base = OTHER; note = 2'-O-methyl modified nucleotide
  modified_base 39: mod_base = OTHER; note = 2'-O-methyl modified nucleotide
  modified_base 40: mod_base = OTHER; note = 2'-O-methyl modified nucleotide
  modified_base 41: mod_base = OTHER; note = 2'-O-methyl modified nucleotide
  modified_base 42: mod_base = OTHER; note = 2'-O-methyl modified nucleotide
  modified_base 43: mod_base = OTHER; note = 2'-O-methyl modified nucleotide
  modified_base 47: mod_base = OTHER; note = 2'-O-methyl modified nucleotide
  modified_base 48: mod_base = OTHER; note = 2'-O-methyl modified nucleotide
  modified_base 51: mod_base = OTHER; note = 2'-O-methyl modified nucleotide
  modified_base 54: mod_base = OTHER; note = nucleotide with phosphorothioate linkage
  modified_base 58: mod_base = OTHER; note = 2'-O-methyl modified nucleotide
  modified_base 59: mod_base = OTHER; note = 2'-O-methyl modified nucleotide
  modified_base 61: mod_base = OTHER; note = 2'-O-methyl modified nucleotide
  modified_base 62: mod_base = OTHER; note = 2'-O-methyl modified nucleotide
  modified_base 63: mod_base = OTHER; note = 2'-O-methyl modified nucleotide
  modified_base 64: mod_base = OTHER; note = 2'-O-methyl modified nucleotide
  modified_base 65: mod_base = OTHER; note = 2'-O-methyl modified nucleotide
  modified_base 66: mod_base = OTHER; note = 2'-O-methyl modified nucleotide
  modified_base 67: mod_base = OTHER; note = 2'-O-methyl modified nucleotide
  modified_base 68: mod_base = OTHER; note = 2'-O-methyl modified nucleotide
  modified_base 69: mod_base = OTHER; note = 2'-O-methyl modified nucleotide
  modified_base 70: mod_base = OTHER; note = 2'-O-methyl modified nucleotide
  modified_base 75: mod_base = OTHER; note = 2'-O-methyl modified nucleotide
  modified_base 77: mod_base = OTHER; note = 2'-O-methyl modified nucleotide
  modified_base 80: mod_base = OTHER; note = 2'-O-methyl modified nucleotide
  modified_base 86: mod_base = OTHER; note = 2'-O-methyl modified nucleotide
  modified_base 87: mod_base = OTHER; note = 2'-O-methyl modified nucleotide
  modified_base 89: mod_base = OTHER; note = 2'-O-methyl modified nucleotide
  modified_base 90: mod_base = OTHER; note = 2'-O-methyl modified nucleotide
  modified_base 91: mod_base = OTHER; note = 2'-O-methyl modified nucleotide
  modified_base 92: mod_base = OTHER; note = 2'-O-methyl modified nucleotide
  modified_base 99: mod_base = OTHER; note = nucleotide with phosphorothioate linkage
  modified_base 100: mod_base = OTHER; note = 2'-O-methyl modified nucleotide with phosphorothioate linkage
  modified_base 101: mod_base = OTHER; note = 2'-O-methyl modified nucleotide

SEQ ID NO: 2212 - RNA, 101 nt, synthetic construct; identical to SEQ ID NO: 1212
  source 1..101: mol_type = other RNA
  modified_base 1: mod_base = OTHER; note = 2'-O-methyl modified nucleotide with phosphorothioate linkage
  modified_base 2: mod_base = OTHER; note = 2'-O-methyl modified nucleotide with phosphorothioate linkage
  modified_base 3: mod_base = OTHER; note = 2'-O-methyl modified nucleotide with phosphorothioate linkage
  modified_base 4: mod_base = OTHER; note = 2'-O-methyl modified nucleotide
  modified_base 5: mod_base = OTHER; note = 2'-O-methyl modified nucleotide
  modified_base 8: mod_base = OTHER; note = 2'-O-methyl modified nucleotide
  modified_base 9: mod_base = OTHER; note = 2'-O-methyl modified nucleotide
  modified_base 11: mod_base = OTHER; note = 2'-O-methyl modified nucleotide
  modified_base 13: mod_base = OTHER; note = 2'-O-methyl modified nucleotide
  modified_base 18: mod_base = OTHER; note = 2'-O-methyl modified nucleotide
  modified_base 22: mod_base = OTHER; note = 2'-O-methyl modified nucleotide
  modified_base 25: mod_base = OTHER; note = 2'-O-methyl modified nucleotide
  modified_base 29: mod_base = OTHER; note = 2'-O-methyl modified nucleotide
  modified_base 30: mod_base = OTHER; note = 2'-O-methyl modified nucleotide
  modified_base 31: mod_base = OTHER; note = 2'-O-methyl modified nucleotide
  modified_base 32: mod_base = OTHER; note = 2'-O-methyl modified nucleotide
  modified_base 37: mod_base = OTHER; note = 2'-O-methyl modified nucleotide
  modified_base 38: mod_base = OTHER; note = 2'-O-methyl modified nucleotide
  modified_base 39: mod_base = OTHER; note = 2'-O-methyl modified nucleotide
  modified_base 40: mod_base = OTHER; note = 2'-O-methyl modified nucleotide
  modified_base 41: mod_base = OTHER; note = 2'-O-methyl modified nucleotide
  modified_base 42: mod_base = OTHER; note = 2'-O-methyl modified nucleotide
  modified_base 43: mod_base = OTHER; note = 2'-O-methyl modified nucleotide
  modified_base 47: mod_base = OTHER; note = 2'-O-methyl modified nucleotide
  modified_base 48: mod_base = OTHER; note = 2'-O-methyl modified nucleotide
  modified_base 51: mod_base = OTHER; note = 2'-O-methyl modified nucleotide
  modified_base 54: mod_base = OTHER; note = nucleotide with phosphorothioate linkage
  modified_base 58: mod_base = OTHER; note = 2'-O-methyl modified nucleotide
  modified_base 59: mod_base = OTHER; note = 2'-O-methyl modified nucleotide
  modified_base 61: mod_base = OTHER; note = 2'-O-methyl modified nucleotide
  modified_base 62: mod_base = OTHER; note = 2'-O-methyl modified nucleotide
  modified_base 63: mod_base = OTHER; note = 2'-O-methyl modified nucleotide
  modified_base 64: mod_base = OTHER; note = 2'-O-methyl modified nucleotide
  modified_base 65: mod_base = OTHER; note = 2'-O-methyl modified nucleotide
  modified_base 66: mod_base = OTHER; note = 2'-O-methyl modified nucleotide
  modified_base 67: mod_base = OTHER; note = 2'-O-methyl modified nucleotide
  modified_base 68: mod_base = OTHER; note = 2'-O-methyl modified nucleotide
  modified_base 69: mod_base = OTHER; note = 2'-O-methyl modified nucleotide
  modified_base 70: mod_base = OTHER; note = 2'-O-methyl modified nucleotide
  modified_base 75: mod_base = OTHER; note = 2'-O-methyl modified nucleotide
  modified_base 77: mod_base = OTHER; note = 2'-O-methyl modified nucleotide
  modified_base 80: mod_base = OTHER; note = 2'-O-methyl modified nucleotide
  modified_base 86: mod_base = OTHER; note = 2'-O-methyl modified nucleotide
  modified_base 87: mod_base = OTHER; note = 2'-O-methyl modified nucleotide
  modified_base 89: mod_base = OTHER; note = 2'-O-methyl modified nucleotide
  modified_base 90: mod_base = OTHER; note = 2'-O-methyl modified nucleotide
  modified_base 91: mod_base = OTHER; note = 2'-O-methyl modified nucleotide
  modified_base 92: mod_base = OTHER; note = 2'-O-methyl modified nucleotide
  modified_base 99: mod_base = OTHER; note = nucleotide with phosphorothioate linkage
  modified_base 100: mod_base = OTHER; note = 2'-O-methyl modified nucleotide with phosphorothioate linkage
  modified_base 101: mod_base = OTHER; note = 2'-O-methyl modified nucleotide

SEQ ID NO: 2213 - RNA, 101 nt, synthetic construct; identical to SEQ ID NO: 1213
  source 1..101: mol_type = other RNA
  modified_base 1: mod_base = OTHER; note = 2'-O-methyl modified nucleotide with phosphorothioate linkage
  modified_base 2: mod_base = OTHER; note = 2'-O-methyl modified nucleotide with phosphorothioate linkage
  modified_base 3: mod_base = OTHER; note = 2'-O-methyl modified nucleotide with phosphorothioate linkage
  modified_base 4: mod_base = OTHER; note = 2'-O-methyl modified nucleotide
  modified_base 5: mod_base = OTHER; note = 2'-O-methyl modified nucleotide
  modified_base 8: mod_base = OTHER; note = 2'-O-methyl modified nucleotide
  modified_base 9: mod_base = OTHER; note = 2'-O-methyl modified nucleotide
  modified_base 11: mod_base = OTHER; note = 2'-O-methyl modified nucleotide
  modified_base 13: mod_base = OTHER; note = 2'-O-methyl modified nucleotide
  modified_base 18: mod_base = OTHER; note = 2'-O-methyl modified nucleotide
  modified_base 22: mod_base = OTHER; note = 2'-O-methyl modified nucleotide
  modified_base 25: mod_base = OTHER; note = 2'-O-methyl modified nucleotide
  modified_base 29: mod_base = OTHER; note = 2'-O-methyl modified nucleotide
  modified_base 30: mod_base = OTHER; note = 2'-O-methyl modified nucleotide
  modified_base 31: mod_base = OTHER; note = 2'-O-methyl modified nucleotide
  modified_base 32: mod_base = OTHER; note = 2'-O-methyl modified nucleotide
  modified_base 37: mod_base = OTHER; note = 2'-O-methyl modified nucleotide
  modified_base 38: mod_base = OTHER; note = 2'-O-methyl modified nucleotide
  modified_base 39: mod_base = OTHER; note = 2'-O-methyl modified nucleotide
  modified_base 40: mod_base = OTHER; note = 2'-O-methyl modified nucleotide
  modified_base 41: mod_base = OTHER; note = 2'-O-methyl modified nucleotide
  modified_base 42: mod_base = OTHER; note = 2'-O-methyl modified nucleotide
  modified_base 43: mod_base = OTHER; note = 2'-O-methyl modified nucleotide
  modified_base 47: mod_base = OTHER; note = 2'-O-methyl modified nucleotide
  modified_base 48: mod_base = OTHER; note = 2'-O-methyl modified nucleotide
  modified_base 51: mod_base = OTHER; note = 2'-O-methyl modified nucleotide
  modified_base 54: mod_base = OTHER; note = nucleotide with phosphorothioate linkage
  modified_base 58: mod_base = OTHER; note = 2'-O-methyl modified nucleotide
  modified_base 59: mod_base = OTHER; note = 2'-O-methyl modified nucleotide
  modified_base 61: mod_base = OTHER; note = 2'-O-methyl modified nucleotide
  modified_base 62: mod_base = OTHER; note = 2'-O-methyl modified nucleotide
  modified_base 63: mod_base = OTHER; note = 2'-O-methyl modified nucleotide
  modified_base 64: mod_base = OTHER; note = 2'-O-methyl modified nucleotide
  modified_base 65: mod_base = OTHER; note = 2'-O-methyl modified nucleotide
  modified_base 66: mod_base = OTHER; note = 2'-O-methyl modified nucleotide
  modified_base 67: mod_base = OTHER; note = 2'-O-methyl modified nucleotide
  modified_base 68: mod_base = OTHER; note = 2'-O-methyl modified nucleotide
  modified_base 69: mod_base = OTHER; note = 2'-O-methyl modified nucleotide
  modified_base 70: mod_base = OTHER; note = 2'-O-methyl modified nucleotide
  modified_base 75: mod_base = OTHER; note = 2'-O-methyl modified nucleotide
  modified_base 77: mod_base = OTHER; note = 2'-O-methyl modified nucleotide
  modified_base 80: mod_base = OTHER; note = 2'-O-methyl modified nucleotide
  modified_base 86: mod_base = OTHER; note = 2'-O-methyl modified nucleotide
  modified_base 87: mod_base = OTHER; note = 2'-O-methyl modified nucleotide
  modified_base 89: mod_base = OTHER; note = 2'-O-methyl modified nucleotide
  modified_base 90: mod_base = OTHER; note = 2'-O-methyl modified nucleotide
  modified_base 91: mod_base = OTHER; note = 2'-O-methyl modified nucleotide
  modified_base 92: mod_base = OTHER; note = 2'-O-methyl modified nucleotide
  modified_base 99: mod_base = OTHER; note = nucleotide with phosphorothioate linkage
  modified_base 100: mod_base = OTHER; note = 2'-O-methyl modified nucleotide with phosphorothioate linkage
  modified_base 101: mod_base = OTHER; note = 2'-O-methyl modified nucleotide

SEQ ID NO: 2214 - RNA, 101 nt, synthetic construct; identical to SEQ ID NO: 1214
  source 1..101: mol_type = other RNA
  modified_base 1: mod_base = OTHER; note = 2'-O-methyl modified nucleotide with phosphorothioate linkage
  modified_base 2: mod_base = OTHER; note = 2'-O-methyl modified nucleotide with phosphorothioate linkage
  modified_base 3: mod_base = OTHER; note = 2'-O-methyl modified nucleotide with phosphorothioate linkage
  modified_base 4: mod_base = OTHER; note = 2'-O-methyl modified nucleotide
  modified_base 5: mod_base = OTHER; note = 2'-O-methyl modified nucleotide
  modified_base 8: mod_base = OTHER; note = 2'-O-methyl modified nucleotide
  modified_base 9: mod_base = OTHER; note = 2'-O-methyl modified nucleotide
  modified_base 11: mod_base = OTHER; note = 2'-O-methyl modified nucleotide
  modified_base 13: mod_base = OTHER; note = 2'-O-methyl modified nucleotide
  modified_base 18: mod_base = OTHER; note = 2'-O-methyl modified nucleotide
  modified_base 22: mod_base = OTHER; note = 2'-O-methyl modified nucleotide
  modified_base 25: mod_base = OTHER; note = 2'-O-methyl modified nucleotide
  modified_base 29: mod_base = OTHER; note = 2'-O-methyl modified nucleotide
  modified_base 30: mod_base = OTHER; note = 2'-O-methyl modified nucleotide
  modified_base 31: mod_base = OTHER; note = 2'-O-methyl modified nucleotide
  modified_base 32: mod_base = OTHER; note = 2'-O-methyl modified nucleotide
  modified_base 37: mod_base = OTHER; note = 2'-O-methyl modified nucleotide
  modified_base 38: mod_base = OTHER; note = 2'-O-methyl modified nucleotide
  modified_base 39: mod_base = OTHER; note = 2'-O-methyl modified nucleotide
  modified_base 40: mod_base = OTHER; note = 2'-O-methyl modified nucleotide
  modified_base 41: mod_base = OTHER; note = 2'-O-methyl modified nucleotide
  modified_base 42: mod_base = OTHER; note = 2'-O-methyl modified nucleotide
  modified_base 43: mod_base = OTHER; note = 2'-O-methyl modified nucleotide
  modified_base 47: mod_base = OTHER; note = 2'-O-methyl modified nucleotide
  modified_base 48: mod_base = OTHER; note = 2'-O-methyl modified nucleotide
  modified_base 51: mod_base = OTHER; note = 2'-O-methyl modified nucleotide
  modified_base 54: mod_base = OTHER; note = nucleotide with phosphorothioate linkage
  modified_base 58: mod_base = OTHER; note = 2'-O-methyl modified nucleotide
  modified_base 59: mod_base = OTHER; note = 2'-O-methyl modified nucleotide
  modified_base 61: mod_base = OTHER; note = 2'-O-methyl modified nucleotide
  modified_base 62: mod_base = OTHER; note = 2'-O-methyl modified nucleotide
  modified_base 63: mod_base = OTHER; note = 2'-O-methyl modified nucleotide
  modified_base 64: mod_base = OTHER; note = 2'-O-methyl modified nucleotide
  modified_base 65: mod_base = OTHER; note = 2'-O-methyl modified nucleotide
  modified_base 66: mod_base = OTHER; note = 2'-O-methyl modified nucleotide
  modified_base 67: mod_base = OTHER; note = 2'-O-methyl modified nucleotide
  modified_base 68: mod_base = OTHER; note = 2'-O-methyl modified nucleotide
  modified_base 69: mod_base = OTHER; note = 2'-O-methyl modified nucleotide
  modified_base 70: mod_base = OTHER; note = 2'-O-methyl modified nucleotide
  modified_base 75: mod_base = OTHER; note = 2'-O-methyl modified nucleotide
  modified_base 77: mod_base = OTHER; note = 2'-O-methyl modified nucleotide
  modified_base 80: mod_base = OTHER; note = 2'-O-methyl modified nucleotide
  modified_base 86: mod_base = OTHER; note = 2'-O-methyl modified nucleotide
  modified_base 87: mod_base = OTHER; note = 2'-O-methyl modified nucleotide
  modified_base 89: mod_base = OTHER; note = 2'-O-methyl modified nucleotide
  modified_base 90: mod_base = OTHER; note = 2'-O-methyl modified nucleotide
  modified_base 91: mod_base = OTHER; note = 2'-O-methyl modified nucleotide
  modified_base 92: mod_base = OTHER; note = 2'-O-methyl modified nucleotide
  modified_base 99: mod_base = OTHER; note = nucleotide with phosphorothioate linkage
  modified_base 100: mod_base = OTHER; note = 2'-O-methyl modified nucleotide with phosphorothioate linkage
  modified_base 101: mod_base = OTHER; note = 2'-O-methyl modified nucleotide

SEQ ID NO: 2215 - RNA, 101 nt, synthetic construct; identical to SEQ ID NO: 1215
  source 1..101: mol_type = other RNA
  modified_base 1: mod_base = OTHER; note = 2'-O-methyl modified nucleotide with phosphorothioate linkage
  modified_base 2: mod_base = OTHER; note = 2'-O-methyl modified nucleotide with phosphorothioate linkage
  modified_base 3: mod_base = OTHER; note = 2'-O-methyl modified nucleotide with phosphorothioate linkage
  modified_base 4: mod_base = OTHER; note = 2'-O-methyl modified nucleotide
  modified_base 5: mod_base = OTHER; note = 2'-O-methyl modified nucleotide
  modified_base 8: mod_base = OTHER; note = 2'-O-methyl modified nucleotide
  modified_base 9: mod_base = OTHER; note = 2'-O-methyl modified nucleotide
  modified_base 11: mod_base = OTHER; note = 2'-O-methyl modified nucleotide
  modified_base 13: mod_base = OTHER; note = 2'-O-methyl modified nucleotide
  modified_base 18: mod_base = OTHER; note = 2'-O-methyl modified nucleotide
  modified_base 22: mod_base = OTHER; note = 2'-O-methyl modified nucleotide
  modified_base 25: mod_base = OTHER; note = 2'-O-methyl modified nucleotide
  modified_base 29: mod_base = OTHER; note = 2'-O-methyl modified nucleotide
  modified_base 30: mod_base = OTHER; note = 2'-O-methyl modified nucleotide
  modified_base 31: mod_base = OTHER; note = 2'-O-methyl modified nucleotide
  modified_base 32: mod_base = OTHER; note = 2'-O-methyl modified nucleotide
  modified_base 37: mod_base = OTHER; note = 2'-O-methyl modified nucleotide
  modified_base 38: mod_base = OTHER; note = 2'-O-methyl modified nucleotide
  modified_base 39: mod_base = OTHER; note = 2'-O-methyl modified nucleotide
  modified_base 40: mod_base = OTHER; note = 2'-O-methyl modified nucleotide
  modified_base 41: mod_base = OTHER; note = 2'-O-methyl modified nucleotide
  modified_base 42: mod_base = OTHER; note = 2'-O-methyl modified nucleotide
  modified_base 43: mod_base = OTHER; note = 2'-O-methyl modified nucleotide
  modified_base 47: mod_base = OTHER; note = 2'-O-methyl modified nucleotide
  modified_base 48: mod_base = OTHER; note = 2'-O-methyl modified nucleotide
  modified_base 51: mod_base = OTHER; note = 2'-O-methyl modified nucleotide
  modified_base 54: mod_base = OTHER; note = nucleotide with phosphorothioate linkage
  modified_base 58: mod_base = OTHER; note = 2'-O-methyl modified nucleotide
  modified_base 59: mod_base = OTHER; note = 2'-O-methyl modified nucleotide
  modified_base 61: mod_base = OTHER; note = 2'-O-methyl modified nucleotide
  modified_base 62: mod_base = OTHER; note = 2'-O-methyl modified nucleotide
  modified_base 63: mod_base = OTHER; note = 2'-O-methyl modified nucleotide
  modified_base 64: mod_base = OTHER; note = 2'-O-methyl modified nucleotide
  modified_base 65: mod_base = OTHER; note = 2'-O-methyl modified nucleotide
  modified_base 66: mod_base = OTHER; note = 2'-O-methyl modified nucleotide
  modified_base 67: mod_base = OTHER; note = 2'-O-methyl modified nucleotide
  modified_base 68: mod_base = OTHER; note = 2'-O-methyl modified nucleotide
  modified_base 69: mod_base = OTHER; note = 2'-O-methyl modified nucleotide
  modified_base 70: mod_base = OTHER; note = 2'-O-methyl modified nucleotide
  modified_base 75: mod_base = OTHER; note = 2'-O-methyl modified nucleotide
  modified_base 77: mod_base = OTHER; note = 2'-O-methyl modified nucleotide
  modified_base 80: mod_base = OTHER; note = 2'-O-methyl modified nucleotide
  modified_base 86: mod_base = OTHER; note = 2'-O-methyl modified nucleotide
  modified_base 87: mod_base = OTHER; note = 2'-O-methyl modified nucleotide
  modified_base 89: mod_base = OTHER; note = 2'-O-methyl modified nucleotide
  modified_base 90: mod_base = OTHER; note = 2'-O-methyl modified nucleotide
  modified_base 91: mod_base = OTHER; note = 2'-O-methyl modified nucleotide
  modified_base 92: mod_base = OTHER; note = 2'-O-methyl modified nucleotide
  modified_base 99: mod_base = OTHER; note = nucleotide with phosphorothioate linkage
  modified_base 100: mod_base = OTHER; note = 2'-O-methyl modified nucleotide with phosphorothioate linkage
  modified_base 101: mod_base = OTHER; note = 2'-O-methyl modified nucleotide

SEQ ID NO: 2216 - RNA, 101 nt, synthetic construct; identical to SEQ ID NO: 1216
  source 1..101: mol_type = other RNA
  modified_base 1: mod_base = OTHER; note = 2'-O-methyl modified nucleotide with phosphorothioate linkage
  modified_base 2: mod_base = OTHER; note = 2'-O-methyl modified nucleotide with phosphorothioate linkage
  modified_base 3: mod_base = OTHER; note = 2'-O-methyl modified nucleotide with phosphorothioate linkage
  modified_base 4: mod_base = OTHER; note = 2'-O-methyl modified nucleotide
  modified_base 5: mod_base = OTHER; note = 2'-O-methyl modified nucleotide
  modified_base 8: mod_base = OTHER; note = 2'-O-methyl modified nucleotide
  modified_base 9: mod_base = OTHER; note = 2'-O-methyl modified nucleotide
  modified_base 11: mod_base = OTHER; note = 2'-O-methyl modified nucleotide
  modified_base 13: mod_base = OTHER; note = 2'-O-methyl modified nucleotide
  modified_base 18: mod_base = OTHER; note = 2'-O-methyl modified nucleotide
  modified_base 22: mod_base = OTHER; note = 2'-O-methyl modified nucleotide
  modified_base 25: mod_base = OTHER; note = 2'-O-methyl modified nucleotide
  modified_base 29: mod_base = OTHER; note = 2'-O-methyl modified nucleotide
  modified_base 30: mod_base = OTHER; note = 2'-O-methyl modified nucleotide
  modified_base 31: mod_base = OTHER; note = 2'-O-methyl modified nucleotide
  modified_base 32: mod_base = OTHER; note = 2'-O-methyl modified nucleotide
  modified_base 37: mod_base = OTHER; note = 2'-O-methyl modified nucleotide
  modified_base 38: mod_base = OTHER; note = 2'-O-methyl modified nucleotide
  modified_base 39: mod_base = OTHER; note = 2'-O-methyl modified nucleotide
  modified_base 40: mod_base = OTHER; note = 2'-O-methyl modified nucleotide
  modified_base 41: mod_base = OTHER; note = 2'-O-methyl modified nucleotide
  modified_base 42: mod_base = OTHER; note = 2'-O-methyl modified nucleotide
  modified_base 43: mod_base = OTHER; note = 2'-O-methyl modified nucleotide
  modified_base 47: mod_base = OTHER; note = 2'-O-methyl modified nucleotide
  modified_base 48: mod_base = OTHER; note = 2'-O-methyl modified nucleotide
  modified_base 51: mod_base = OTHER; note = 2'-O-methyl modified nucleotide
  modified_base 54: mod_base = OTHER; note = nucleotide with phosphorothioate linkage
  modified_base 58: mod_base = OTHER; note = 2'-O-methyl modified nucleotide
  modified_base 59: mod_base = OTHER; note = 2'-O-methyl modified nucleotide
  modified_base 61: mod_base = OTHER; note = 2'-O-methyl modified nucleotide
  modified_base 62: mod_base = OTHER; note = 2'-O-methyl modified nucleotide
  modified_base 63: mod_base = OTHER; note = 2'-O-methyl modified nucleotide
  modified_base 64: mod_base = OTHER; note = 2'-O-methyl modified nucleotide
  modified_base 65: mod_base = OTHER; note = 2'-O-methyl modified nucleotide
  modified_base 66: mod_base = OTHER; note = 2'-O-methyl modified nucleotide
  modified_base 67: mod_base = OTHER; note = 2'-O-methyl modified nucleotide
  modified_base 68: mod_base = OTHER; note = 2'-O-methyl modified nucleotide
  modified_base 69: mod_base = OTHER; note = 2'-O-methyl modified nucleotide
  modified_base 70: mod_base = OTHER; note = 2'-O-methyl modified nucleotide
  modified_base 75: mod_base = OTHER; note = 2'-O-methyl modified nucleotide
  modified_base 77: mod_base = OTHER; note = 2'-O-methyl modified nucleotide
  modified_base 80: mod_base = OTHER; note = 2'-O-methyl modified nucleotide
  modified_base 86: mod_base = OTHER; note = 2'-O-methyl modified nucleotide
  modified_base 87: mod_base = OTHER; note = 2'-O-methyl modified nucleotide
  modified_base 89: mod_base = OTHER; note = 2'-O-methyl modified nucleotide
  modified_base 90: mod_base = OTHER; note = 2'-O-methyl modified nucleotide
  modified_base 91: mod_base = OTHER; note = 2'-O-methyl modified nucleotide
  modified_base 92: mod_base = OTHER; note = 2'-O-methyl modified nucleotide
  modified_base 99: mod_base = OTHER; note = nucleotide with phosphorothioate linkage
  modified_base 100: mod_base = OTHER; note = 2'-O-methyl modified nucleotide with phosphorothioate linkage
  modified_base 101: mod_base = OTHER; note = 2'-O-methyl modified nucleotide

SEQ ID NO: 2217 - RNA, 101 nt, synthetic construct; identical to SEQ ID NO: 1217
  source 1..101: mol_type = other RNA
  modified_base 1: mod_base = OTHER; note = 2'-O-methyl modified nucleotide with phosphorothioate linkage
  modified_base 2: mod_base = OTHER; note = 2'-O-methyl modified nucleotide with phosphorothioate linkage
  modified_base 3: mod_base = OTHER; note = 2'-O-methyl modified nucleotide with phosphorothioate linkage
  modified_base 4: mod_base = OTHER; note = 2'-O-methyl modified nucleotide
  modified_base 5: mod_base = OTHER; note = 2'-O-methyl modified nucleotide
  modified_base 8: mod_base = OTHER; note = 2'-O-methyl modified nucleotide
  modified_base 9: mod_base = OTHER; note = 2'-O-methyl modified nucleotide
  modified_base 11: mod_base = OTHER; note = 2'-O-methyl modified nucleotide
  modified_base 13: mod_base = OTHER; note = 2'-O-methyl modified nucleotide
  modified_base 18: mod_base = OTHER; note = 2'-O-methyl modified nucleotide
  modified_base 22: mod_base = OTHER; note = 2'-O-methyl modified nucleotide
  modified_base 25: mod_base = OTHER; note = 2'-O-methyl modified nucleotide
  modified_base 29: mod_base = OTHER; note = 2'-O-methyl modified nucleotide
  modified_base 30: mod_base = OTHER; note = 2'-O-methyl modified nucleotide
  modified_base 31: mod_base = OTHER; note = 2'-O-methyl modified nucleotide
  modified_base 32: mod_base = OTHER; note = 2'-O-methyl modified nucleotide
  modified_base 37: mod_base = OTHER; note = 2'-O-methyl modified nucleotide
  modified_base 38: mod_base = OTHER; note = 2'-O-methyl modified nucleotide
  modified_base 39: mod_base = OTHER; note = 2'-O-methyl modified nucleotide
  modified_base 40: mod_base = OTHER; note = 2'-O-methyl modified nucleotide
  modified_base 41: mod_base = OTHER; note = 2'-O-methyl modified nucleotide
  modified_base 42: mod_base = OTHER; note = 2'-O-methyl modified nucleotide
  modified_base 43: mod_base = OTHER; note = 2'-O-methyl modified nucleotide
  modified_base 47: mod_base = OTHER; note = 2'-O-methyl modified nucleotide
  modified_base 48: mod_base = OTHER; note = 2'-O-methyl modified nucleotide
  modified_base 51: mod_base = OTHER; note = 2'-O-methyl modified nucleotide
  modified_base 54: mod_base = OTHER; note = nucleotide with phosphorothioate linkage
  modified_base 58: mod_base = OTHER; note = 2'-O-methyl modified nucleotide
  modified_base 59: mod_base = OTHER; note = 2'-O-methyl modified nucleotide
  modified_base 61: mod_base = OTHER; note = 2'-O-methyl modified nucleotide
  modified_base 62: mod_base = OTHER; note = 2'-O-methyl modified nucleotide
  modified_base 63: mod_base = OTHER; note = 2'-O-methyl modified nucleotide
  modified_base 64: mod_base = OTHER; note = 2'-O-methyl modified nucleotide
  modified_base 65: mod_base = OTHER; note = 2'-O-methyl modified nucleotide
  modified_base 66: mod_base = OTHER; note = 2'-O-methyl modified nucleotide
  modified_base 67: mod_base = OTHER; note = 2'-O-methyl modified nucleotide
  modified_base 68: mod_base = OTHER; note = 2'-O-methyl modified nucleotide
  modified_base 69: mod_base = OTHER; note = 2'-O-methyl modified nucleotide
  modified_base 70: mod_base = OTHER; note = 2'-O-methyl modified nucleotide
  modified_base 75: mod_base = OTHER; note = 2'-O-methyl modified nucleotide
  modified_base 77: mod_base = OTHER; note = 2'-O-methyl modified nucleotide
  modified_base 80: mod_base = OTHER; note = 2'-O-methyl modified nucleotide
  modified_base 86: mod_base = OTHER; note = 2'-O-methyl modified nucleotide
  modified_base 87: mod_base = OTHER; note = 2'-O-methyl modified nucleotide
  modified_base 89: mod_base = OTHER; note = 2'-O-methyl modified nucleotide
  modified_base 90: mod_base = OTHER; note = 2'-O-methyl modified nucleotide
  modified_base 91: mod_base = OTHER; note = 2'-O-methyl modified nucleotide
  modified_base 92: mod_base = OTHER; note = 2'-O-methyl modified nucleotide
  modified_base 99: mod_base = OTHER; note = nucleotide with phosphorothioate linkage
  modified_base 100: mod_base = OTHER; note = 2'-O-methyl modified nucleotide with phosphorothioate linkage
  modified_base 101: mod_base = OTHER; note = 2'-O-methyl modified nucleotide

SEQ ID NO: 2218 - RNA, 101 nt, synthetic construct; identical to SEQ ID NO: 1218
  source 1..101: mol_type = other RNA
  modified_base 1: mod_base = OTHER; note = 2'-O-methyl modified nucleotide with phosphorothioate linkage
  modified_base 2: mod_base = OTHER; note = 2'-O-methyl modified nucleotide with phosphorothioate linkage
  modified_base 3: mod_base = OTHER; note = 2'-O-methyl modified nucleotide with phosphorothioate linkage
  modified_base 4: mod_base = OTHER; note = 2'-O-methyl modified nucleotide
  modified_base 5: mod_base = OTHER; note = 2'-O-methyl modified nucleotide
  modified_base 8: mod_base = OTHER; note = 2'-O-methyl modified nucleotide
  modified_base 9: mod_base = OTHER; note = 2'-O-methyl modified nucleotide
  modified_base 11: mod_base = OTHER; note = 2'-O-methyl modified nucleotide
  modified_base 13: mod_base = OTHER; note = 2'-O-methyl modified nucleotide
  modified_base 18: mod_base = OTHER; note = 2'-O-methyl modified nucleotide
  modified_base 22: mod_base = OTHER; note = 2'-O-methyl modified nucleotide
  modified_base 25: mod_base = OTHER; note = 2'-O-methyl modified nucleotide
  modified_base 29: mod_base = OTHER; note = 2'-O-methyl modified nucleotide
  modified_base 30: mod_base = OTHER; note = 2'-O-methyl modified nucleotide
  modified_base 31: mod_base = OTHER; note = 2'-O-methyl modified nucleotide
  modified_base 32: mod_base = OTHER; note = 2'-O-methyl modified nucleotide
  modified_base 37: mod_base = OTHER; note = 2'-O-methyl modified nucleotide
  modified_base 38: mod_base = OTHER; note = 2'-O-methyl modified nucleotide
  modified_base 39: mod_base = OTHER; note = 2'-O-methyl modified nucleotide
  modified_base 40: mod_base = OTHER; note = 2'-O-methyl modified nucleotide
  modified_base 41: mod_base = OTHER; note = 2'-O-methyl modified nucleotide
  modified_base 42: mod_base = OTHER; note = 2'-O-methyl modified nucleotide
  modified_base 43: mod_base = OTHER; note = 2'-O-methyl modified nucleotide
  modified_base 47: mod_base = OTHER; note = 2'-O-methyl modified nucleotide
  modified_base 48: mod_base = OTHER; note = 2'-O-methyl modified nucleotide
  modified_base 51: mod_base = OTHER; note = 2'-O-methyl modified nucleotide
  modified_base 54: mod_base = OTHER; note = nucleotide with phosphorothioate linkage
  modified_base 58: mod_base = OTHER; note = 2'-O-methyl modified nucleotide
  modified_base 59: mod_base = OTHER; note = 2'-O-methyl modified nucleotide
  modified_base 61: mod_base = OTHER; note = 2'-O-methyl modified nucleotide
  modified_base 62: mod_base = OTHER; note = 2'-O-methyl modified nucleotide
  modified_base 63: mod_base = OTHER; note = 2'-O-methyl modified nucleotide
  modified_base 64: mod_base = OTHER; note = 2'-O-methyl modified nucleotide
  modified_base 65: mod_base = OTHER; note = 2'-O-methyl modified nucleotide
  modified_base 66: mod_base = OTHER; note = 2'-O-methyl modified nucleotide
  modified_base 67: mod_base = OTHER; note = 2'-O-methyl modified nucleotide
  modified_base 68: mod_base = OTHER; note = 2'-O-methyl modified nucleotide
  modified_base 69: mod_base = OTHER; note = 2'-O-methyl modified nucleotide
  modified_base 70: mod_base = OTHER; note = 2'-O-methyl modified nucleotide
  modified_base 75: mod_base = OTHER; note = 2'-O-methyl modified nucleotide
  modified_base 77: mod_base = OTHER; note = 2'-O-methyl modified nucleotide
  modified_base 80: mod_base = OTHER; note = 2'-O-methyl modified nucleotide
  modified_base 86: mod_base = OTHER; note = 2'-O-methyl modified nucleotide
  modified_base 87: mod_base = OTHER; note = 2'-O-methyl modified nucleotide
  modified_base 89: mod_base = OTHER; note = 2'-O-methyl modified nucleotide
  modified_base 90: mod_base = OTHER; note = 2'-O-methyl modified nucleotide
  modified_base 91: mod_base = OTHER; note = 2'-O-methyl modified nucleotide
  modified_base 92: mod_base = OTHER; note = 2'-O-methyl modified nucleotide
  modified_base 99: mod_base = OTHER; note = nucleotide with phosphorothioate linkage
  modified_base 100: mod_base = OTHER; note = 2'-O-methyl modified nucleotide with phosphorothioate linkage
  modified_base 101: mod_base = OTHER; note = 2'-O-methyl modified nucleotide

SEQ ID NO: 2219 - RNA, 101 nt, synthetic construct; identical to SEQ ID NO: 1219
  source 1..101: mol_type = other RNA
  modified_base 1: mod_base = OTHER; note = 2'-O-methyl modified nucleotide with phosphorothioate linkage
  modified_base 2: mod_base = OTHER; note = 2'-O-methyl modified nucleotide with phosphorothioate linkage
  modified_base 3: mod_base = OTHER; note = 2'-O-methyl modified nucleotide with phosphorothioate linkage
  modified_base 4: mod_base = OTHER; note = 2'-O-methyl modified nucleotide
  modified_base 5: mod_base = OTHER; note = 2'-O-methyl modified nucleotide
  modified_base 8: mod_base = OTHER; note = 2'-O-methyl modified nucleotide
  modified_base 9: mod_base = OTHER; note = 2'-O-methyl modified nucleotide
  modified_base 11: mod_base = OTHER; note = 2'-O-methyl modified nucleotide
  modified_base 13: mod_base = OTHER; note = 2'-O-methyl modified nucleotide
  modified_base 18: mod_base = OTHER; note = 2'-O-methyl modified nucleotide
  modified_base 22: mod_base = OTHER; note = 2'-O-methyl modified nucleotide
  modified_base 25: mod_base = OTHER; note = 2'-O-methyl modified nucleotide
  modified_base 29: mod_base = OTHER; note = 2'-O-methyl modified nucleotide
  modified_base 30: mod_base = OTHER; note = 2'-O-methyl modified nucleotide
  modified_base 31: mod_base = OTHER; note = 2'-O-methyl modified nucleotide
  modified_base 32: mod_base = OTHER; note = 2'-O-methyl modified nucleotide
  modified_base 37: mod_base = OTHER; note = 2'-O-methyl modified nucleotide
  modified_base 38: mod_base = OTHER; note = 2'-O-methyl modified nucleotide
  modified_base 39: mod_base = OTHER; note = 2'-O-methyl modified nucleotide
  modified_base 40: mod_base = OTHER; note = 2'-O-methyl modified nucleotide
  modified_base 41: mod_base = OTHER; note = 2'-O-methyl modified nucleotide
  modified_base 42: mod_base = OTHER; note = 2'-O-methyl modified nucleotide
  modified_base 43: mod_base = OTHER; note = 2'-O-methyl modified nucleotide
  modified_base 47: mod_base = OTHER; note = 2'-O-methyl modified nucleotide
  modified_base 48: mod_base = OTHER; note = 2'-O-methyl modified nucleotide
  modified_base 51: mod_base = OTHER; note = 2'-O-methyl modified nucleotide
  modified_base 54: mod_base = OTHER; note = nucleotide with phosphorothioate linkage
  modified_base 58: mod_base = OTHER; note = 2'-O-methyl modified nucleotide
  modified_base 59: mod_base = OTHER; note = 2'-O-methyl modified nucleotide
  modified_base 61: mod_base = OTHER; note = 2'-O-methyl modified nucleotide
  modified_base 62: mod_base = OTHER; note = 2'-O-methyl modified nucleotide
  modified_base 63: mod_base = OTHER; note = 2'-O-methyl modified nucleotide
  modified_base 64: mod_base = OTHER; note = 2'-O-methyl modified nucleotide
  modified_base 65: mod_base = OTHER; note = 2'-O-methyl modified nucleotide
  modified_base 66: mod_base = OTHER; note = 2'-O-methyl modified nucleotide
  modified_base 67: mod_base = OTHER; note = 2'-O-methyl modified nucleotide
  modified_base 68: mod_base = OTHER; note = 2'-O-methyl modified nucleotide
  modified_base 69: mod_base = OTHER; note = 2'-O-methyl modified nucleotide
  modified_base 70: mod_base = OTHER; note = 2'-O-methyl modified nucleotide
  modified_base 75: mod_base = OTHER; note = 2'-O-methyl modified nucleotide
  modified_base 77: mod_base = OTHER; note = 2'-O-methyl modified nucleotide
  modified_base 80: mod_base = OTHER; note = 2'-O-methyl modified nucleotide
  modified_base 86: mod_base = OTHER; note = 2'-O-methyl modified nucleotide
  modified_base 87: mod_base = OTHER; note = 2'-O-methyl modified nucleotide
  modified_base 89: mod_base = OTHER; note = 2'-O-methyl modified nucleotide
  modified_base 90: mod_base = OTHER; note = 2'-O-methyl modified nucleotide
  modified_base 91: mod_base = OTHER; note = 2'-O-methyl modified nucleotide
  modified_base 92: mod_base = OTHER; note = 2'-O-methyl modified nucleotide
  modified_base 99: mod_base = OTHER; note = nucleotide with phosphorothioate linkage
  modified_base 100: mod_base = OTHER; note = 2'-O-methyl modified nucleotide with phosphorothioate linkage
  modified_base 101: mod_base = OTHER; note = 2'-O-methyl modified nucleotide

SEQ ID NO: 2220 - RNA, 101 nt, synthetic construct; identical to SEQ ID NO: 1220
  source 1..101: mol_type = other RNA
  modified_base 1: mod_base = OTHER; note = 2'-O-methyl modified nucleotide with phosphorothioate linkage
  modified_base 2: mod_base = OTHER; note = 2'-O-methyl modified nucleotide with phosphorothioate linkage
  modified_base 3: mod_base = OTHER; note = 2'-O-methyl modified nucleotide with phosphorothioate linkage
  modified_base 4: mod_base = OTHER; note = 2'-O-methyl modified nucleotide
  modified_base 5: mod_base = OTHER; note = 2'-O-methyl modified nucleotide
  modified_base 8: mod_base = OTHER; note = 2'-O-methyl modified nucleotide
  modified_base 9: mod_base = OTHER; note = 2'-O-methyl modified nucleotide
  modified_base 11: mod_base = OTHER; note = 2'-O-methyl modified nucleotide
  modified_base 13: mod_base = OTHER; note = 2'-O-methyl modified nucleotide
  modified_base 18: mod_base = OTHER; note = 2'-O-methyl modified nucleotide
  modified_base 22: mod_base = OTHER; note = 2'-O-methyl modified nucleotide
  modified_base 25: mod_base = OTHER; note = 2'-O-methyl modified nucleotide
  modified_base 29: mod_base = OTHER; note = 2'-O-methyl modified nucleotide
  modified_base 30: mod_base = OTHER; note = 2'-O-methyl modified nucleotide
  modified_base 31: mod_base = OTHER; note = 2'-O-methyl modified nucleotide
  modified_base 32: mod_base = OTHER; note = 2'-O-methyl modified nucleotide
  modified_base 37: mod_base = OTHER; note = 2'-O-methyl modified nucleotide
  modified_base 38: mod_base = OTHER; note = 2'-O-methyl modified nucleotide
  modified_base 39: mod_base = OTHER; note = 2'-O-methyl modified nucleotide
  modified_base 40: mod_base = OTHER; note = 2'-O-methyl modified nucleotide
  modified_base 41: mod_base = OTHER; note = 2'-O-methyl modified nucleotide
  modified_base 42: mod_base = OTHER; note = 2'-O-methyl modified nucleotide
  modified_base 43: mod_base = OTHER; note = 2'-O-methyl modified nucleotide
  modified_base 47: mod_base = OTHER; note = 2'-O-methyl modified nucleotide
  modified_base 48: mod_base = OTHER; note = 2'-O-methyl modified nucleotide
  modified_base 51: mod_base = OTHER; note = 2'-O-methyl modified nucleotide
  modified_base 54: mod_base = OTHER; note = nucleotide with phosphorothioate linkage
  modified_base 58: mod_base = OTHER; note = 2'-O-methyl modified nucleotide
  modified_base 59: mod_base = OTHER; note = 2'-O-methyl modified nucleotide
  modified_base 61: mod_base = OTHER; note = 2'-O-methyl modified nucleotide
  modified_base 62: mod_base = OTHER; note = 2'-O-methyl modified nucleotide
  modified_base 63: mod_base = OTHER; note = 2'-O-methyl modified nucleotide
  modified_base 64: mod_base = OTHER; note = 2'-O-methyl modified nucleotide
  modified_base 65: mod_base = OTHER; note = 2'-O-methyl modified nucleotide
  modified_base 66: mod_base = OTHER; note = 2'-O-methyl modified nucleotide
  modified_base 67: mod_base = OTHER; note = 2'-O-methyl modified nucleotide
  modified_base 68: mod_base = OTHER; note = 2'-O-methyl modified nucleotide
  modified_base 69: mod_base = OTHER; note = 2'-O-methyl modified nucleotide
  modified_base 70: mod_base = OTHER; note = 2'-O-methyl modified nucleotide
  modified_base 75: mod_base = OTHER; note = 2'-O-methyl modified nucleotide
  modified_base 77: mod_base = OTHER; note = 2'-O-methyl modified nucleotide
  modified_base 80: mod_base = OTHER; note = 2'-O-methyl modified nucleotide
  modified_base 86: mod_base = OTHER; note = 2'-O-methyl modified nucleotide
  modified_base 87: mod_base = OTHER; note = 2'-O-methyl modified nucleotide
  modified_base 89: mod_base = OTHER; note = 2'-O-methyl modified nucleotide
  modified_base 90: mod_base = OTHER; note = 2'-O-methyl modified nucleotide
  modified_base 91: mod_base = OTHER; note = 2'-O-methyl modified nucleotide
  modified_base 92: mod_base = OTHER; note = 2'-O-methyl modified nucleotide
  modified_base 99: mod_base = OTHER; note = nucleotide with phosphorothioate linkage
  modified_base 100: mod_base = OTHER; note = 2'-O-methyl modified nucleotide with phosphorothioate linkage
  modified_base 101: mod_base = OTHER; note = 2'-O-methyl modified nucleotide

SEQ ID NO: 2221 - RNA, 101 nt, synthetic construct; identical to SEQ ID NO: 1221
  source 1..101: mol_type = other RNA
  modified_base 1: mod_base = OTHER; note = 2'-O-methyl modified nucleotide with phosphorothioate linkage
  modified_base 2: mod_base = OTHER; note = 2'-O-methyl modified nucleotide with phosphorothioate linkage
  modified_base 3: mod_base = OTHER; note = 2'-O-methyl modified nucleotide with phosphorothioate linkage
  modified_base 4: mod_base = OTHER; note = 2'-O-methyl modified nucleotide
  modified_base 5: mod_base = OTHER; note = 2'-O-methyl modified nucleotide
  modified_base 8: mod_base = OTHER; note = 2'-O-methyl modified nucleotide
  modified_base 9: mod_base = OTHER; note = 2'-O-methyl modified nucleotide
  modified_base 11: mod_base = OTHER; note = 2'-O-methyl modified nucleotide
  modified_base 13: mod_base = OTHER; note = 2'-O-methyl modified nucleotide
  modified_base 18: mod_base = OTHER; note = 2'-O-methyl modified nucleotide
  modified_base 22: mod_base = OTHER; note = 2'-O-methyl modified nucleotide
  modified_base 25: mod_base = OTHER; note = 2'-O-methyl modified nucleotide
  modified_base 29: mod_base = OTHER; note = 2'-O-methyl modified nucleotide
  modified_base 30: mod_base = OTHER; note = 2'-O-methyl modified nucleotide
  modified_base 31: mod_base = OTHER; note = 2'-O-methyl modified nucleotide
  modified_base 32: mod_base = OTHER; note = 2'-O-methyl modified nucleotide
  modified_base 37: mod_base = OTHER; note = 2'-O-methyl modified nucleotide
  modified_base 38: mod_base = OTHER; note = 2'-O-methyl modified nucleotide
  modified_base 39: mod_base = OTHER; note = 2'-O-methyl modified nucleotide
  modified_base 40: mod_base = OTHER; note = 2'-O-methyl modified nucleotide
  modified_base 41: mod_base = OTHER; note = 2'-O-methyl modified nucleotide
  modified_base 42: mod_base = OTHER; note = 2'-O-methyl modified nucleotide
  modified_base 43: mod_base = OTHER; note = 2'-O-methyl modified nucleotide
  modified_base 47: mod_base = OTHER; note = 2'-O-methyl modified nucleotide
  modified_base 48: mod_base = OTHER; note = 2'-O-methyl modified nucleotide
  modified_base 51: mod_base = OTHER; note = 2'-O-methyl modified nucleotide
  modified_base 54: mod_base = OTHER; note = nucleotide with phosphorothioate linkage
  modified_base 58: mod_base = OTHER; note = 2'-O-methyl modified nucleotide
  modified_base 59: mod_base = OTHER; note = 2'-O-methyl modified nucleotide
  modified_base 61: mod_base = OTHER; note = 2'-O-methyl modified nucleotide
  modified_base 62: mod_base = OTHER; note = 2'-O-methyl modified nucleotide
  modified_base 63: mod_base = OTHER; note = 2'-O-methyl modified nucleotide
  modified_base 64: mod_base = OTHER; note = 2'-O-methyl modified nucleotide
  modified_base 65: mod_base = OTHER; note = 2'-O-methyl modified nucleotide
  modified_base 66: mod_base = OTHER; note = 2'-O-methyl modified nucleotide
  modified_base 67: mod_base = OTHER; note = 2'-O-methyl modified nucleotide
  modified_base 68: mod_base = OTHER; note = 2'-O-methyl modified nucleotide
  modified_base 69: mod_base = OTHER; note = 2'-O-methyl modified nucleotide
  modified_base 70: mod_base = OTHER; note = 2'-O-methyl modified nucleotide
  modified_base 75: mod_base = OTHER; note = 2'-O-methyl modified nucleotide
  modified_base 77: mod_base = OTHER; note = 2'-O-methyl modified nucleotide
  modified_base 80: mod_base = OTHER; note = 2'-O-methyl modified nucleotide
  modified_base 86: mod_base = OTHER; note = 2'-O-methyl modified nucleotide
  modified_base 87: mod_base = OTHER; note = 2'-O-methyl modified nucleotide
  modified_base 89: mod_base = OTHER; note = 2'-O-methyl modified nucleotide
  modified_base 90: mod_base = OTHER; note = 2'-O-methyl modified nucleotide
  modified_base 91: mod_base = OTHER; note = 2'-O-methyl modified nucleotide
  modified_base 92: mod_base = OTHER; note = 2'-O-methyl modified nucleotide
  modified_base 99: mod_base = OTHER; note = nucleotide with phosphorothioate linkage
  modified_base 100: mod_base = OTHER; note = 2'-O-methyl modified nucleotide with phosphorothioate linkage
  modified_base 101: mod_base = OTHER; note = 2'-O-methyl modified nucleotide

SEQ ID NO: 2222 - RNA, 101 nt, synthetic construct; identical to SEQ ID NO: 1222
  source 1..101: mol_type = other RNA
  modified_base 1: mod_base = OTHER; note = 2'-O-methyl modified nucleotide with phosphorothioate linkage
  modified_base 2: mod_base = OTHER; note = 2'-O-methyl modified nucleotide with phosphorothioate linkage
  modified_base 3: mod_base = OTHER; note = 2'-O-methyl modified nucleotide with phosphorothioate linkage
  modified_base 4: mod_base = OTHER; note = 2'-O-methyl modified nucleotide
  modified_base 5: mod_base = OTHER; note = 2'-O-methyl modified nucleotide
  modified_base 8: mod_base = OTHER; note = 2'-O-methyl modified nucleotide
  modified_base 9: mod_base = OTHER; note = 2'-O-methyl modified nucleotide
  modified_base 11: mod_base = OTHER; note = 2'-O-methyl modified nucleotide
  modified_base 13: mod_base = OTHER; note = 2'-O-methyl modified nucleotide
  modified_base 18: mod_base = OTHER; note = 2'-O-methyl modified nucleotide
  modified_base 22: mod_base = OTHER; note = 2'-O-methyl modified nucleotide
  modified_base 25: mod_base = OTHER; note = 2'-O-methyl modified nucleotide
  modified_base 29: mod_base = OTHER; note = 2'-O-methyl modified nucleotide
  modified_base 30: mod_base = OTHER; note = 2'-O-methyl modified nucleotide
  modified_base 31: mod_base = OTHER; note = 2'-O-methyl modified nucleotide
  modified_base 32: mod_base = OTHER; note = 2'-O-methyl modified nucleotide
  modified_base 37: mod_base = OTHER; note = 2'-O-methyl modified nucleotide
  modified_base 38: mod_base = OTHER; note = 2'-O-methyl modified nucleotide
  modified_base 39: mod_base = OTHER; note = 2'-O-methyl modified nucleotide
  modified_base 40: mod_base = OTHER; note = 2'-O-methyl modified nucleotide
  modified_base 41: mod_base = OTHER; note = 2'-O-methyl modified nucleotide
  modified_base 42: mod_base = OTHER; note = 2'-O-methyl modified nucleotide
  modified_base 43: mod_base = OTHER; note = 2'-O-methyl modified nucleotide
  modified_base 47: mod_base = OTHER; note = 2'-O-methyl modified nucleotide
  modified_base 48: mod_base = OTHER; note = 2'-O-methyl modified nucleotide
  modified_base 51: mod_base = OTHER; note = 2'-O-methyl modified nucleotide
  modified_base 54: mod_base = OTHER; note = nucleotide with phosphorothioate linkage
  modified_base 58: mod_base = OTHER; note = 2'-O-methyl modified nucleotide
  modified_base 59: mod_base = OTHER; note = 2'-O-methyl modified nucleotide
  modified_base 61: mod_base = OTHER; note = 2'-O-methyl modified nucleotide
  modified_base 62: mod_base = OTHER; note = 2'-O-methyl modified nucleotide
  modified_base 63: mod_base = OTHER; note = 2'-O-methyl modified nucleotide
  modified_base 64: mod_base = OTHER; note = 2'-O-methyl modified nucleotide
  modified_base 65: mod_base = OTHER; note = 2'-O-methyl modified nucleotide
  modified_base 66: mod_base = OTHER; note = 2'-O-methyl modified nucleotide
  modified_base 67: mod_base = OTHER; note = 2'-O-methyl modified nucleotide
  modified_base 68: mod_base = OTHER; note = 2'-O-methyl modified nucleotide
  modified_base 69: mod_base = OTHER; note = 2'-O-methyl modified nucleotide
  modified_base 70: mod_base = OTHER; note = 2'-O-methyl modified nucleotide
  modified_base 75: mod_base = OTHER; note = 2'-O-methyl modified nucleotide
  modified_base 77: mod_base = OTHER; note = 2'-O-methyl modified nucleotide
  modified_base 80: mod_base = OTHER; note = 2'-O-methyl modified nucleotide
  modified_base 86: mod_base = OTHER; note = 2'-O-methyl modified nucleotide
  modified_base 87: mod_base = OTHER; note = 2'-O-methyl modified nucleotide
  modified_base 89: mod_base = OTHER; note = 2'-O-methyl modified nucleotide
  modified_base 90: mod_base = OTHER; note = 2'-O-methyl modified nucleotide
  modified_base 91: mod_base = OTHER; note = 2'-O-methyl modified nucleotide
  modified_base 92: mod_base = OTHER; note = 2'-O-methyl modified nucleotide
  modified_base 99: mod_base = OTHER; note = nucleotide with phosphorothioate linkage
  modified_base 100: mod_base = OTHER; note = 2'-O-methyl modified nucleotide with phosphorothioate linkage
  modified_base 101: mod_base = OTHER; note = 2'-O-methyl modified nucleotide

SEQ ID NO: 2223 - RNA, 101 nt, synthetic construct; identical to SEQ ID NO: 1223
  source 1..101: mol_type = other RNA
  modified_base 1: mod_base = OTHER; note = 2'-O-methyl modified nucleotide with phosphorothioate linkage
  modified_base 2: mod_base = OTHER; note = 2'-O-methyl modified nucleotide with phosphorothioate linkage
  modified_base 3: mod_base = OTHER; note = 2'-O-methyl modified nucleotide with phosphorothioate linkage
  modified_base 4: mod_base = OTHER; note = 2'-O-methyl modified nucleotide
  modified_base 5: mod_base = OTHER; note = 2'-O-methyl modified nucleotide
  modified_base 8: mod_base = OTHER; note = 2'-O-methyl modified nucleotide
  modified_base 9: mod_base = OTHER; note = 2'-O-methyl modified nucleotide
  modified_base 11: mod_base = OTHER; note = 2'-O-methyl modified nucleotide
  modified_base 13: mod_base = OTHER; note = 2'-O-methyl modified nucleotide
  modified_base 18: mod_base = OTHER; note = 2'-O-methyl modified nucleotide
  modified_base 22: mod_base = OTHER; note = 2'-O-methyl modified nucleotide
  modified_base 25: mod_base = OTHER; note = 2'-O-methyl modified nucleotide
  modified_base 29: mod_base = OTHER; note = 2'-O-methyl modified nucleotide
  modified_base 30: mod_base = OTHER; note = 2'-O-methyl modified nucleotide
  modified_base 31: mod_base = OTHER; note = 2'-O-methyl modified nucleotide
  modified_base 32: mod_base = OTHER; note = 2'-O-methyl modified nucleotide
  modified_base 37: mod_base = OTHER; note = 2'-O-methyl modified nucleotide
  modified_base 38: mod_base = OTHER; note = 2'-O-methyl modified nucleotide
  modified_base 39: mod_base = OTHER; note = 2'-O-methyl modified nucleotide
  modified_base 40: mod_base = OTHER; note = 2'-O-methyl modified nucleotide
  modified_base 41: mod_base = OTHER; note = 2'-O-methyl modified nucleotide
  modified_base 42: mod_base = OTHER; note = 2'-O-methyl modified nucleotide
  modified_base 43: mod_base = OTHER; note = 2'-O-methyl modified nucleotide
  modified_base 47: mod_base = OTHER; note = 2'-O-methyl modified nucleotide
  modified_base 48: mod_base = OTHER; note = 2'-O-methyl modified nucleotide
  modified_base 51: mod_base = OTHER; note = 2'-O-methyl modified nucleotide
  modified_base 54: mod_base = OTHER; note = nucleotide with phosphorothioate linkage
  modified_base 58: mod_base = OTHER; note = 2'-O-methyl modified nucleotide
  modified_base 59: mod_base = OTHER; note = 2'-O-methyl modified nucleotide
  modified_base 61: mod_base = OTHER; note = 2'-O-methyl modified nucleotide
  modified_base 62: mod_base = OTHER; note = 2'-O-methyl modified nucleotide
  modified_base 63: mod_base = OTHER; note = 2'-O-methyl modified nucleotide
  modified_base 64: mod_base = OTHER; note = 2'-O-methyl modified nucleotide
  modified_base 65: mod_base = OTHER; note = 2'-O-methyl modified nucleotide
  modified_base 66: mod_base = OTHER; note = 2'-O-methyl modified nucleotide
  modified_base 67: mod_base = OTHER; note = 2'-O-methyl modified nucleotide
  modified_base 68: mod_base = OTHER; note = 2'-O-methyl modified nucleotide
  modified_base 69: mod_base = OTHER; note = 2'-O-methyl modified nucleotide
  modified_base 70: mod_base = OTHER; note = 2'-O-methyl modified nucleotide
  modified_base 75: mod_base = OTHER; note = 2'-O-methyl modified nucleotide
  modified_base 77: mod_base = OTHER; note = 2'-O-methyl modified nucleotide
  modified_base 80: mod_base = OTHER; note = 2'-O-methyl modified nucleotide
  modified_base 86: mod_base = OTHER; note = 2'-O-methyl modified nucleotide
  modified_base 87: mod_base = OTHER; note = 2'-O-methyl modified nucleotide
  modified_base 89: mod_base = OTHER; note = 2'-O-methyl modified nucleotide
  modified_base 90: mod_base = OTHER; note = 2'-O-methyl modified nucleotide
  modified_base 91: mod_base = OTHER; note = 2'-O-methyl modified nucleotide
  modified_base 92: mod_base = OTHER; note = 2'-O-methyl modified nucleotide
  modified_base 99: mod_base = OTHER; note = nucleotide with phosphorothioate linkage
  modified_base 100: mod_base = OTHER; note = 2'-O-methyl modified nucleotide with phosphorothioate linkage
  modified_base 101: mod_base = OTHER; note = 2'-O-methyl modified nucleotide

SEQ ID NO: 2224 - RNA, 101 nt, synthetic construct; identical to SEQ ID NO: 1224
  source 1..101: mol_type = other RNA
  modified_base 1: mod_base = OTHER; note = 2'-O-methyl modified nucleotide with phosphorothioate linkage
  modified_base 2: mod_base = OTHER; note = 2'-O-methyl modified nucleotide with phosphorothioate linkage
  modified_base 3: mod_base = OTHER; note = 2'-O-methyl modified nucleotide with phosphorothioate linkage
  modified_base 4: mod_base = OTHER; note = 2'-O-methyl modified nucleotide
  modified_base 5: mod_base = OTHER; note = 2'-O-methyl modified nucleotide
  modified_base 8: mod_base = OTHER; note = 2'-O-methyl modified nucleotide
  modified_base 9: mod_base = OTHER; note = 2'-O-methyl modified nucleotide
  modified_base 11: mod_base = OTHER; note = 2'-O-methyl modified nucleotide
  modified_base 13: mod_base = OTHER; note = 2'-O-methyl modified nucleotide
  modified_base 18: mod_base = OTHER; note = 2'-O-methyl modified nucleotide
  modified_base 22: mod_base = OTHER; note = 2'-O-methyl modified nucleotide
  modified_base 25: mod_base = OTHER; note = 2'-O-methyl modified nucleotide
  modified_base 29: mod_base = OTHER; note = 2'-O-methyl modified nucleotide
  modified_base 30: mod_base = OTHER; note = 2'-O-methyl modified nucleotide
  modified_base 31: mod_base = OTHER; note = 2'-O-methyl modified nucleotide
  modified_base 32: mod_base = OTHER; note = 2'-O-methyl modified nucleotide
  modified_base 37: mod_base = OTHER; note = 2'-O-methyl modified nucleotide
  modified_base 38: mod_base = OTHER; note = 2'-O-methyl modified nucleotide
  modified_base 39: mod_base = OTHER; note = 2'-O-methyl modified nucleotide
  modified_base 40: mod_base = OTHER; note = 2'-O-methyl modified nucleotide
  modified_base 41: mod_base = OTHER; note = 2'-O-methyl modified nucleotide
  modified_base 42: mod_base = OTHER; note = 2'-O-methyl modified nucleotide
  modified_base 43: mod_base = OTHER; note = 2'-O-methyl modified nucleotide
  modified_base 47: mod_base = OTHER; note = 2'-O-methyl modified nucleotide
  modified_base 48: mod_base = OTHER; note = 2'-O-methyl modified nucleotide
  modified_base 51: mod_base = OTHER; note = 2'-O-methyl modified nucleotide
  modified_base 54: mod_base = OTHER; note = nucleotide with phosphorothioate linkage
  modified_base 58: mod_base = OTHER; note = 2'-O-methyl modified nucleotide
  modified_base 59: mod_base = OTHER; note = 2'-O-methyl modified nucleotide
  modified_base 61: mod_base = OTHER; note = 2'-O-methyl modified nucleotide
  modified_base 62: mod_base = OTHER; note = 2'-O-methyl modified nucleotide
  modified_base 63: mod_base = OTHER; note = 2'-O-methyl modified nucleotide
  modified_base 64: mod_base = OTHER; note = 2'-O-methyl modified nucleotide
  modified_base 65: mod_base = OTHER; note = 2'-O-methyl modified nucleotide
  modified_base 66: mod_base = OTHER; note = 2'-O-methyl modified nucleotide
  modified_base 67: mod_base = OTHER; note = 2'-O-methyl modified nucleotide
  modified_base 68: mod_base = OTHER; note = 2'-O-methyl modified nucleotide
  modified_base 69: mod_base = OTHER; note = 2'-O-methyl modified nucleotide
  modified_base 70: mod_base = OTHER; note = 2'-O-methyl modified nucleotide
  modified_base 75: mod_base = OTHER; note = 2'-O-methyl modified nucleotide
  modified_base 77: mod_base = OTHER; note = 2'-O-methyl modified nucleotide
  modified_base 80: mod_base = OTHER; note = 2'-O-methyl modified nucleotide
  modified_base 86: mod_base = OTHER; note = 2'-O-methyl modified nucleotide
  modified_base 87: mod_base = OTHER; note = 2'-O-methyl modified nucleotide
  modified_base 89: mod_base = OTHER; note = 2'-O-methyl modified nucleotide
  modified_base 90: mod_base = OTHER; note = 2'-O-methyl modified nucleotide
  modified_base 91: mod_base = OTHER; note = 2'-O-methyl modified nucleotide
  modified_base 92: mod_base = OTHER; note = 2'-O-methyl modified nucleotide
  modified_base 99: mod_base = OTHER; note = nucleotide with phosphorothioate linkage
  modified_base 100: mod_base = OTHER; note = 2'-O-methyl modified nucleotide with phosphorothioate linkage
  modified_base 101: mod_base = OTHER; note = 2'-O-methyl modified nucleotide

SEQ ID NO: 2225 - RNA, 101 nt, synthetic construct; identical to SEQ ID NO: 1225
  source 1..101: mol_type = other RNA
  modified_base 1: mod_base = OTHER; note = 2'-O-methyl modified nucleotide with phosphorothioate linkage
  modified_base 2: mod_base = OTHER; note = 2'-O-methyl modified nucleotide with phosphorothioate linkage
  modified_base 3: mod_base = OTHER; note = 2'-O-methyl modified nucleotide with phosphorothioate linkage
  modified_base 4: mod_base = OTHER; note = 2'-O-methyl modified nucleotide
  modified_base 5: mod_base = OTHER; note = 2'-O-methyl modified nucleotide
  modified_base 8: mod_base = OTHER; note = 2'-O-methyl modified nucleotide
  modified_base 9: mod_base = OTHER; note = 2'-O-methyl modified nucleotide
  modified_base 11: mod_base = OTHER; note = 2'-O-methyl modified nucleotide
  modified_base 13: mod_base = OTHER; note = 2'-O-methyl modified nucleotide
  modified_base 18: mod_base = OTHER; note = 2'-O-methyl modified nucleotide
  modified_base 22: mod_base = OTHER; note = 2'-O-methyl modified nucleotide
  modified_base 25: mod_base = OTHER; note = 2'-O-methyl modified nucleotide
  modified_base 29: mod_base = OTHER; note = 2'-O-methyl modified nucleotide
  modified_base 30: mod_base = OTHER; note = 2'-O-methyl modified nucleotide
  modified_base 31: mod_base = OTHER; note = 2'-O-methyl modified nucleotide
  modified_base 32: mod_base = OTHER; note = 2'-O-methyl modified nucleotide
  modified_base 37: mod_base = OTHER; note = 2'-O-methyl modified nucleotide
  modified_base 38: mod_base = OTHER; note = 2'-O-methyl modified nucleotide
  modified_base 39: mod_base = OTHER; note = 2'-O-methyl modified nucleotide
  modified_base 40: mod_base = OTHER; note = 2'-O-methyl modified nucleotide
  modified_base 41: mod_base = OTHER; note = 2'-O-methyl modified nucleotide
  modified_base 42: mod_base = OTHER; note = 2'-O-methyl modified nucleotide
  modified_base 43: mod_base = OTHER; note = 2'-O-methyl modified nucleotide
  modified_base 47: mod_base = OTHER; note = 2'-O-methyl modified nucleotide
  modified_base 48: mod_base = OTHER; note = 2'-O-methyl modified nucleotide
  modified_base 51: mod_base = OTHER; note = 2'-O-methyl modified nucleotide
  modified_base 54: mod_base = OTHER; note = nucleotide with phosphorothioate linkage
  modified_base 58: mod_base = OTHER; note = 2'-O-methyl modified nucleotide
  modified_base 59: mod_base = OTHER; note = 2'-O-methyl modified nucleotide
  modified_base 61: mod_base = OTHER; note = 2'-O-methyl modified nucleotide
  modified_base 62: mod_base = OTHER; note = 2'-O-methyl modified nucleotide
  modified_base 63: mod_base = OTHER; note = 2'-O-methyl modified nucleotide
  modified_base 64: mod_base = OTHER; note = 2'-O-methyl modified nucleotide
  modified_base 65: mod_base = OTHER; note = 2'-O-methyl modified nucleotide
  modified_base 66: mod_base = OTHER; note = 2'-O-methyl modified nucleotide
  modified_base 67: mod_base = OTHER; note = 2'-O-methyl modified nucleotide
  modified_base 68: mod_base = OTHER; note = 2'-O-methyl modified nucleotide
  modified_base 69: mod_base = OTHER; note = 2'-O-methyl modified nucleotide
  modified_base 70: mod_base = OTHER; note = 2'-O-methyl modified nucleotide
  modified_base 75: mod_base = OTHER; note = 2'-O-methyl modified nucleotide
  modified_base 77: mod_base = OTHER; note = 2'-O-methyl modified nucleotide
  modified_base 80: mod_base = OTHER; note = 2'-O-methyl modified nucleotide
  modified_base 86: mod_base = OTHER; note = 2'-O-methyl modified nucleotide
  modified_base 87: mod_base = OTHER; note = 2'-O-methyl modified nucleotide
  modified_base 89: mod_base = OTHER; note = 2'-O-methyl modified nucleotide
  modified_base 90: mod_base = OTHER; note = 2'-O-methyl modified nucleotide
  modified_base 91: mod_base = OTHER; note = 2'-O-methyl modified nucleotide
  modified_base 92: mod_base = OTHER; note = 2'-O-methyl modified nucleotide
  modified_base 99: mod_base = OTHER; note = nucleotide with phosphorothioate linkage
  modified_base 100: mod_base = OTHER; note = 2'-O-methyl modified nucleotide with phosphorothioate linkage
  modified_base 101: mod_base = OTHER; note = 2'-O-methyl modified nucleotide

SEQ ID NO: 2226 - RNA, 101 nt, synthetic construct; identical to SEQ ID NO: 1226
  source 1..101: mol_type = other RNA
  modified_base 1: mod_base = OTHER; note = 2'-O-methyl modified nucleotide with phosphorothioate linkage
  modified_base 2: mod_base = OTHER; note = 2'-O-methyl modified nucleotide with phosphorothioate linkage
  modified_base 3: mod_base = OTHER; note = 2'-O-methyl modified nucleotide with phosphorothioate linkage
  modified_base 4: mod_base = OTHER; note = 2'-O-methyl modified nucleotide
  modified_base 5: mod_base = OTHER; note = 2'-O-methyl modified nucleotide
  modified_base 8: mod_base = OTHER; note = 2'-O-methyl modified nucleotide
  modified_base 9: mod_base = OTHER; note = 2'-O-methyl modified nucleotide
  modified_base 11: mod_base = OTHER; note = 2'-O-methyl modified nucleotide
  modified_base 13: mod_base = OTHER; note = 2'-O-methyl modified nucleotide
  modified_base 18: mod_base = OTHER; note = 2'-O-methyl modified nucleotide
  modified_base 22: mod_base = OTHER; note = 2'-O-methyl modified nucleotide
  modified_base 25: mod_base = OTHER; note = 2'-O-methyl modified nucleotide
  modified_base 29: mod_base = OTHER; note = 2'-O-methyl modified nucleotide
  modified_base 30: mod_base = OTHER; note = 2'-O-methyl modified nucleotide
  modified_base 31: mod_base = OTHER; note = 2'-O-methyl modified nucleotide
  modified_base 32: mod_base = OTHER; note = 2'-O-methyl modified nucleotide
  modified_base 37: mod_base = OTHER; note = 2'-O-methyl modified nucleotide
  modified_base 38: mod_base = OTHER; note = 2'-O-methyl modified nucleotide
  modified_base 39: mod_base = OTHER; note = 2'-O-methyl modified nucleotide
  modified_base 40: mod_base = OTHER; note = 2'-O-methyl modified nucleotide
  modified_base 41: mod_base = OTHER; note = 2'-O-methyl modified nucleotide
  modified_base 42: mod_base = OTHER; note = 2'-O-methyl modified nucleotide
  modified_base 43: mod_base = OTHER; note = 2'-O-methyl modified nucleotide
  modified_base 47: mod_base = OTHER; note = 2'-O-methyl modified nucleotide
  modified_base 48: mod_base = OTHER; note = 2'-O-methyl modified nucleotide
  modified_base 51: mod_base = OTHER; note = 2'-O-methyl modified nucleotide
  modified_base 54: mod_base = OTHER; note = nucleotide with phosphorothioate linkage
  modified_base 58: mod_base = OTHER; note = 2'-O-methyl modified nucleotide
  modified_base 59: mod_base = OTHER; note = 2'-O-methyl modified nucleotide
  modified_base 61: mod_base = OTHER; note = 2'-O-methyl modified nucleotide
  modified_base 62: mod_base = OTHER; note = 2'-O-methyl modified nucleotide
  modified_base 63: mod_base = OTHER; note = 2'-O-methyl modified nucleotide
  modified_base 64: mod_base = OTHER; note = 2'-O-methyl modified nucleotide
  modified_base 65: mod_base = OTHER; note = 2'-O-methyl modified nucleotide
  modified_base 66: mod_base = OTHER; note = 2'-O-methyl modified nucleotide
  modified_base 67: mod_base = OTHER; note = 2'-O-methyl modified nucleotide
  modified_base 68: mod_base = OTHER; note = 2'-O-methyl modified nucleotide
  modified_base 69: mod_base = OTHER; note = 2'-O-methyl modified nucleotide
  modified_base 70: mod_base = OTHER; note = 2'-O-methyl modified nucleotide
  modified_base 75: mod_base = OTHER; note = 2'-O-methyl modified nucleotide
  modified_base 77: mod_base = OTHER; note = 2'-O-methyl modified nucleotide
  modified_base 80: mod_base = OTHER; note = 2'-O-methyl modified nucleotide
  modified_base 86: mod_base = OTHER; note = 2'-O-methyl modified nucleotide
  modified_base 87: mod_base = OTHER; note = 2'-O-methyl modified nucleotide
  modified_base 89: mod_base = OTHER; note = 2'-O-methyl modified nucleotide
  modified_base 90: mod_base = OTHER; note = 2'-O-methyl modified nucleotide
  modified_base 91: mod_base = OTHER; note = 2'-O-methyl modified nucleotide
  modified_base 92: mod_base = OTHER; note = 2'-O-methyl modified nucleotide
  modified_base 99: mod_base = OTHER; note = nucleotide with phosphorothioate linkage
  modified_base 100: mod_base = OTHER; note = 2'-O-methyl modified nucleotide with phosphorothioate linkage
  modified_base 101: mod_base = OTHER; note = 2'-O-methyl modified nucleotide

SEQ ID NO: 2227 - RNA, 101 nt, synthetic construct; identical to SEQ ID NO: 1227
  source 1..101: mol_type = other RNA
  modified_base 1: mod_base = OTHER; note = 2'-O-methyl modified nucleotide with phosphorothioate linkage
  modified_base 2: mod_base = OTHER; note = 2'-O-methyl modified nucleotide with phosphorothioate linkage
  modified_base 3: mod_base = OTHER; note = 2'-O-methyl modified nucleotide with phosphorothioate linkage
  modified_base 4: mod_base = OTHER; note = 2'-O-methyl modified nucleotide
  modified_base 5: mod_base = OTHER; note = 2'-O-methyl modified nucleotide
  modified_base 8: mod_base = OTHER; note = 2'-O-methyl modified nucleotide
  modified_base 9: mod_base = OTHER; note = 2'-O-methyl modified nucleotide
  modified_base 11: mod_base = OTHER; note = 2'-O-methyl modified nucleotide
  modified_base 13: mod_base = OTHER; note = 2'-O-methyl modified nucleotide
  modified_base 18: mod_base = OTHER; note = 2'-O-methyl modified nucleotide
  modified_base 22: mod_base = OTHER; note = 2'-O-methyl modified nucleotide
  modified_base 25: mod_base = OTHER; note = 2'-O-methyl modified nucleotide
  modified_base 29: mod_base = OTHER; note = 2'-O-methyl modified nucleotide
  modified_base 30: mod_base = OTHER; note = 2'-O-methyl modified nucleotide
  modified_base 31: mod_base = OTHER; note = 2'-O-methyl modified nucleotide
  modified_base 32: mod_base = OTHER; note = 2'-O-methyl modified nucleotide
  modified_base 37: mod_base = OTHER; note = 2'-O-methyl modified nucleotide
  modified_base 38: mod_base = OTHER; note = 2'-O-methyl modified nucleotide
  modified_base 39: mod_base = OTHER; note = 2'-O-methyl modified nucleotide
  modified_base 40: mod_base = OTHER; note = 2'-O-methyl modified nucleotide
  modified_base 41: mod_base = OTHER; note = 2'-O-methyl modified nucleotide
  modified_base 42: mod_base = OTHER; note = 2'-O-methyl modified nucleotide
  modified_base 43: mod_base = OTHER; note = 2'-O-methyl modified nucleotide
  modified_base 47: mod_base = OTHER; note = 2'-O-methyl modified nucleotide
  modified_base 48: mod_base = OTHER; note = 2'-O-methyl modified nucleotide
  modified_base 51: mod_base = OTHER; note = 2'-O-methyl modified nucleotide
  modified_base 54: mod_base = OTHER; note = nucleotide with phosphorothioate linkage
  modified_base 58: mod_base = OTHER; note = 2'-O-methyl modified nucleotide
  modified_base 59: mod_base = OTHER; note = 2'-O-methyl modified nucleotide
  modified_base 61: mod_base = OTHER; note = 2'-O-methyl modified nucleotide
  modified_base 62: mod_base = OTHER; note = 2'-O-methyl modified nucleotide
  modified_base 63: mod_base = OTHER; note = 2'-O-methyl modified nucleotide
  modified_base 64: mod_base = OTHER; note = 2'-O-methyl modified nucleotide
  modified_base 65: mod_base = OTHER; note = 2'-O-methyl modified nucleotide
  modified_base 66: mod_base = OTHER; note = 2'-O-methyl modified nucleotide
  modified_base 67: mod_base = OTHER; note = 2'-O-methyl modified nucleotide
  modified_base 68: mod_base = OTHER; note = 2'-O-methyl modified nucleotide
  modified_base 69: mod_base = OTHER; note = 2'-O-methyl modified nucleotide
  modified_base 70: mod_base = OTHER; note = 2'-O-methyl modified nucleotide
  modified_base 75: mod_base = OTHER; note = 2'-O-methyl modified nucleotide
  modified_base 77: mod_base = OTHER; note = 2'-O-methyl modified nucleotide
  modified_base 80: mod_base = OTHER; note = 2'-O-methyl modified nucleotide
  modified_base 86: mod_base = OTHER; note = 2'-O-methyl modified nucleotide
  modified_base 87: mod_base = OTHER; note = 2'-O-methyl modified nucleotide
  modified_base 89: mod_base = OTHER; note = 2'-O-methyl modified nucleotide
  modified_base 90: mod_base = OTHER; note = 2'-O-methyl modified nucleotide
  modified_base 91: mod_base = OTHER; note = 2'-O-methyl modified nucleotide
  modified_base 92: mod_base = OTHER; note = 2'-O-methyl modified nucleotide
  modified_base 99: mod_base = OTHER; note = nucleotide with phosphorothioate linkage
  modified_base 100: mod_base = OTHER; note = 2'-O-methyl modified nucleotide with phosphorothioate linkage
  modified_base 101: mod_base = OTHER; note = 2'-O-methyl modified nucleotide

SEQ ID NO: 2228 - RNA, 101 nt, synthetic construct; identical to SEQ ID NO: 1228
  source 1..101: mol_type = other RNA
  modified_base 1: mod_base = OTHER; note = 2'-O-methyl modified nucleotide with phosphorothioate linkage
  modified_base 2: mod_base = OTHER; note = 2'-O-methyl modified nucleotide with phosphorothioate linkage
  modified_base 3: mod_base = OTHER; note = 2'-O-methyl modified nucleotide with phosphorothioate linkage
  modified_base 4: mod_base = OTHER; note = 2'-O-methyl modified nucleotide
  modified_base 5: mod_base = OTHER; note = 2'-O-methyl modified nucleotide
  modified_base 8: mod_base = OTHER; note = 2'-O-methyl modified nucleotide
  modified_base 9: mod_base = OTHER; note = 2'-O-methyl modified nucleotide
  modified_base 11: mod_base = OTHER; note = 2'-O-methyl modified nucleotide
  modified_base 13: mod_base = OTHER; note = 2'-O-methyl modified nucleotide
  modified_base 18: mod_base = OTHER; note = 2'-O-methyl modified nucleotide
  modified_base 22: mod_base = OTHER; note = 2'-O-methyl modified nucleotide
  modified_base 25: mod_base = OTHER; note = 2'-O-methyl modified nucleotide
  modified_base 29: mod_base = OTHER; note = 2'-O-methyl modified nucleotide
  modified_base 30: mod_base = OTHER; note = 2'-O-methyl modified nucleotide
  modified_base 31: mod_base = OTHER; note = 2'-O-methyl modified nucleotide
  modified_base 32: mod_base = OTHER; note = 2'-O-methyl modified nucleotide
  modified_base 37: mod_base = OTHER; note = 2'-O-methyl modified nucleotide
  modified_base 38: mod_base = OTHER; note = 2'-O-methyl modified nucleotide
  modified_base 39: mod_base = OTHER; note = 2'-O-methyl modified nucleotide
  modified_base 40: mod_base = OTHER; note = 2'-O-methyl modified nucleotide
  modified_base 41: mod_base = OTHER; note = 2'-O-methyl modified nucleotide
  modified_base 42: mod_base = OTHER; note = 2'-O-methyl modified nucleotide
  modified_base 43: mod_base = OTHER; note = 2'-O-methyl modified nucleotide
  modified_base 47: mod_base = OTHER; note = 2'-O-methyl modified nucleotide
  modified_base 48: mod_base = OTHER; note = 2'-O-methyl modified nucleotide
  modified_base 51: mod_base = OTHER; note = 2'-O-methyl modified nucleotide
  modified_base 54: mod_base = OTHER; note = nucleotide with phosphorothioate linkage
  modified_base 58: mod_base = OTHER; note = 2'-O-methyl modified nucleotide
  modified_base 59: mod_base = OTHER; note = 2'-O-methyl modified nucleotide
  modified_base 61: mod_base = OTHER; note = 2'-O-methyl modified nucleotide
  modified_base 62: mod_base = OTHER; note = 2'-O-methyl modified nucleotide
  modified_base 63: mod_base = OTHER; note = 2'-O-methyl modified nucleotide
  modified_base 64: mod_base = OTHER; note = 2'-O-methyl modified nucleotide
  modified_base 65: mod_base = OTHER; note = 2'-O-methyl modified nucleotide
  modified_base 66: mod_base = OTHER; note = 2'-O-methyl modified nucleotide
  modified_base 67: mod_base = OTHER; note = 2'-O-methyl modified nucleotide
  modified_base 68: mod_base = OTHER; note = 2'-O-methyl modified nucleotide
  modified_base 69: mod_base = OTHER; note = 2'-O-methyl modified nucleotide
  modified_base 70: mod_base = OTHER; note = 2'-O-methyl modified nucleotide
  modified_base 75: mod_base = OTHER; note = 2'-O-methyl modified nucleotide
  modified_base 77: mod_base = OTHER; note = 2'-O-methyl modified nucleotide
  modified_base 80: mod_base = OTHER; note = 2'-O-methyl modified nucleotide
  modified_base 86: mod_base = OTHER; note = 2'-O-methyl modified nucleotide
  modified_base 87: mod_base = OTHER; note = 2'-O-methyl modified nucleotide
  modified_base 89: mod_base = OTHER; note = 2'-O-methyl modified nucleotide
  modified_base 90: mod_base = OTHER; note = 2'-O-methyl modified nucleotide
  modified_base 91: mod_base = OTHER; note = 2'-O-methyl modified nucleotide
  modified_base 92: mod_base = OTHER; note = 2'-O-methyl modified nucleotide
  modified_base 99: mod_base = OTHER; note = nucleotide with phosphorothioate linkage
  modified_base 100: mod_base = OTHER; note = 2'-O-methyl modified nucleotide with phosphorothioate linkage
  modified_base 101: mod_base = OTHER; note = 2'-O-methyl modified nucleotide

SEQ ID NO: 2229 - RNA, 101 nt, synthetic construct; identical to SEQ ID NO: 1229
  source 1..101: mol_type = other RNA
  modified_base 1: mod_base = OTHER; note = 2'-O-methyl modified nucleotide with phosphorothioate linkage
  modified_base 2: mod_base = OTHER; note = 2'-O-methyl modified nucleotide with phosphorothioate linkage
  modified_base 3: mod_base = OTHER; note = 2'-O-methyl modified nucleotide with phosphorothioate linkage
  modified_base 4: mod_base = OTHER; note = 2'-O-methyl modified nucleotide
  modified_base 5: mod_base = OTHER; note = 2'-O-methyl modified nucleotide
  modified_base 8: mod_base = OTHER; note = 2'-O-methyl modified nucleotide
  modified_base 9: mod_base = OTHER; note = 2'-O-methyl modified nucleotide
  modified_base 11: mod_base = OTHER; note = 2'-O-methyl modified nucleotide
  modified_base 13: mod_base = OTHER; note = 2'-O-methyl modified nucleotide
  modified_base 18: mod_base = OTHER; note = 2'-O-methyl modified nucleotide
  modified_base 22: mod_base = OTHER; note = 2'-O-methyl modified nucleotide
  modified_base 25: mod_base = OTHER; note = 2'-O-methyl modified nucleotide
  modified_base 29: mod_base = OTHER; note = 2'-O-methyl modified nucleotide
  modified_base 30: mod_base = OTHER; note = 2'-O-methyl modified nucleotide
  modified_base 31: mod_base = OTHER; note = 2'-O-methyl modified nucleotide
  modified_base 32: mod_base = OTHER; note = 2'-O-methyl modified nucleotide
  modified_base 37: mod_base = OTHER; note = 2'-O-methyl modified nucleotide
  modified_base 38: mod_base = OTHER; note = 2'-O-methyl modified nucleotide
  modified_base 39: mod_base = OTHER; note = 2'-O-methyl modified nucleotide
  modified_base 40: mod_base = OTHER; note = 2'-O-methyl modified nucleotide
  modified_base 41: mod_base = OTHER; note = 2'-O-methyl modified nucleotide
  modified_base 42: mod_base = OTHER; note = 2'-O-methyl modified nucleotide
  modified_base 43: mod_base = OTHER; note = 2'-O-methyl modified nucleotide
  modified_base 47: mod_base = OTHER; note = 2'-O-methyl modified nucleotide
  modified_base 48: mod_base = OTHER; note = 2'-O-methyl modified nucleotide
  modified_base 51: mod_base = OTHER; note = 2'-O-methyl modified nucleotide
  modified_base 54: mod_base = OTHER; note = nucleotide with phosphorothioate linkage
  modified_base 58: mod_base = OTHER; note = 2'-O-methyl modified nucleotide
  modified_base 59: mod_base = OTHER; note = 2'-O-methyl modified nucleotide
  modified_base 61: mod_base = OTHER; note = 2'-O-methyl modified nucleotide
  modified_base 62: mod_base = OTHER; note = 2'-O-methyl modified nucleotide
  modified_base 63: mod_base = OTHER; note = 2'-O-methyl modified nucleotide
  modified_base 64: mod_base = OTHER; note = 2'-O-methyl modified nucleotide
  modified_base 65: mod_base = OTHER; note = 2'-O-methyl modified nucleotide
  modified_base 66: mod_base = OTHER; note = 2'-O-methyl modified nucleotide
  modified_base 67: mod_base = OTHER; note = 2'-O-methyl modified nucleotide
  modified_base 68: mod_base = OTHER; note = 2'-O-methyl modified nucleotide
  modified_base 69: mod_base = OTHER; note = 2'-O-methyl modified nucleotide
  modified_base 70: mod_base = OTHER; note = 2'-O-methyl modified nucleotide
  modified_base 75: mod_base = OTHER; note = 2'-O-methyl modified nucleotide
  modified_base 77: mod_base = OTHER; note = 2'-O-methyl modified nucleotide
  modified_base 80: mod_base = OTHER; note = 2'-O-methyl modified nucleotide
  modified_base 86: mod_base = OTHER; note = 2'-O-methyl modified nucleotide
  modified_base 87: mod_base = OTHER; note = 2'-O-methyl modified nucleotide
  modified_base 89: mod_base = OTHER; note = 2'-O-methyl modified nucleotide
  modified_base 90: mod_base = OTHER; note = 2'-O-methyl modified nucleotide
  modified_base 91: mod_base = OTHER; note = 2'-O-methyl modified nucleotide
  modified_base 92: mod_base = OTHER; note = 2'-O-methyl modified nucleotide
  modified_base 99: mod_base = OTHER; note = nucleotide with phosphorothioate linkage
  modified_base 100: mod_base = OTHER; note = 2'-O-methyl modified nucleotide with phosphorothioate linkage
  modified_base 101: mod_base = OTHER; note = 2'-O-methyl modified nucleotide

SEQ ID NO: 2230 - RNA, 101 nt, synthetic construct; identical to SEQ ID NO: 1230
  source 1..101: mol_type = other RNA
  modified_base 1: mod_base = OTHER; note = 2'-O-methyl modified nucleotide with phosphorothioate linkage
  modified_base 2: mod_base = OTHER; note = 2'-O-methyl modified nucleotide with phosphorothioate linkage
  modified_base 3: mod_base = OTHER; note = 2'-O-methyl modified nucleotide with phosphorothioate linkage
  modified_base 4: mod_base = OTHER; note = 2'-O-methyl modified nucleotide
  modified_base 5: mod_base = OTHER; note = 2'-O-methyl modified nucleotide
  modified_base 8: mod_base = OTHER; note = 2'-O-methyl modified nucleotide
  modified_base 9: mod_base = OTHER; note = 2'-O-methyl modified nucleotide
  modified_base 11: mod_base = OTHER; note = 2'-O-methyl modified nucleotide
  modified_base 13: mod_base = OTHER; note = 2'-O-methyl modified nucleotide
  modified_base 18: mod_base = OTHER; note = 2'-O-methyl modified nucleotide
  modified_base 22: mod_base = OTHER; note = 2'-O-methyl modified nucleotide
  modified_base 25: mod_base = OTHER; note = 2'-O-methyl modified nucleotide
  modified_base 29: mod_base = OTHER; note = 2'-O-methyl modified nucleotide
  modified_base 30: mod_base = OTHER; note = 2'-O-methyl modified nucleotide
  modified_base 31: mod_base = OTHER; note = 2'-O-methyl modified nucleotide
  modified_base 32: mod_base = OTHER; note = 2'-O-methyl modified nucleotide
  modified_base 37: mod_base = OTHER; note = 2'-O-methyl modified nucleotide
  modified_base 38: mod_base = OTHER; note = 2'-O-methyl modified nucleotide
  modified_base 39: mod_base = OTHER; note = 2'-O-methyl modified nucleotide
  modified_base 40: mod_base = OTHER; note = 2'-O-methyl modified nucleotide
  modified_base 41: mod_base = OTHER; note = 2'-O-methyl modified nucleotide
  modified_base 42: mod_base = OTHER; note = 2'-O-methyl modified nucleotide
  modified_base 43: mod_base = OTHER; note = 2'-O-methyl modified nucleotide
  modified_base 47: mod_base = OTHER; note = 2'-O-methyl modified nucleotide
  modified_base 48: mod_base = OTHER; note = 2'-O-methyl modified nucleotide
  modified_base 51: mod_base = OTHER; note = 2'-O-methyl modified nucleotide
  modified_base 54: mod_base = OTHER; note = nucleotide with phosphorothioate linkage
  modified_base 58: mod_base = OTHER; note = 2'-O-methyl modified nucleotide
  modified_base 59: mod_base = OTHER; note = 2'-O-methyl modified nucleotide
  modified_base 61: mod_base = OTHER; note = 2'-O-methyl modified nucleotide
  modified_base 62: mod_base = OTHER; note = 2'-O-methyl modified nucleotide
  modified_base 63: mod_base = OTHER; note = 2'-O-methyl modified nucleotide
  modified_base 64: mod_base = OTHER; note = 2'-O-methyl modified nucleotide
  modified_base 65: mod_base = OTHER; note = 2'-O-methyl modified nucleotide
  modified_base 66: mod_base = OTHER; note = 2'-O-methyl modified nucleotide
  modified_base 67: mod_base = OTHER; note = 2'-O-methyl modified nucleotide
  modified_base 68: mod_base = OTHER; note = 2'-O-methyl modified nucleotide
  modified_base 69: mod_base = OTHER; note = 2'-O-methyl modified nucleotide
  modified_base 70: mod_base = OTHER; note = 2'-O-methyl modified nucleotide
  modified_base 75: mod_base = OTHER; note = 2'-O-methyl modified nucleotide
  modified_base 77: mod_base = OTHER; note = 2'-O-methyl modified nucleotide
  modified_base 80: mod_base = OTHER; note = 2'-O-methyl modified nucleotide
  modified_base 86: mod_base = OTHER; note = 2'-O-methyl modified nucleotide
  modified_base 87: mod_base = OTHER; note = 2'-O-methyl modified nucleotide
  modified_base 89: mod_base = OTHER; note = 2'-O-methyl modified nucleotide
  modified_base 90: mod_base = OTHER; note = 2'-O-methyl modified nucleotide
  modified_base 91: mod_base = OTHER; note = 2'-O-methyl modified nucleotide
  modified_base 92: mod_base = OTHER; note = 2'-O-methyl modified nucleotide
  modified_base 99: mod_base = OTHER; note = nucleotide with phosphorothioate linkage
  modified_base 100: mod_base = OTHER; note = 2'-O-methyl modified nucleotide with phosphorothioate linkage
  modified_base 101: mod_base = OTHER; note = 2'-O-methyl modified nucleotide

SEQ ID NO: 2231 - RNA, 101 nt, synthetic construct; identical to SEQ ID NO: 1231
  source 1..101: mol_type = other RNA
  modified_base 1: mod_base = OTHER; note = 2'-O-methyl modified nucleotide with phosphorothioate linkage
  modified_base 2: mod_base = OTHER; note = 2'-O-methyl modified nucleotide with phosphorothioate linkage
  modified_base 3: mod_base = OTHER; note = 2'-O-methyl modified nucleotide with phosphorothioate linkage
  modified_base 4: mod_base = OTHER; note = 2'-O-methyl modified nucleotide
  modified_base 5: mod_base = OTHER; note = 2'-O-methyl modified nucleotide
  modified_base 8: mod_base = OTHER; note = 2'-O-methyl modified nucleotide
  modified_base 9: mod_base = OTHER; note = 2'-O-methyl modified nucleotide
  modified_base 11: mod_base = OTHER; note = 2'-O-methyl modified nucleotide
  modified_base 13: mod_base = OTHER; note = 2'-O-methyl modified nucleotide
  modified_base 18: mod_base = OTHER; note = 2'-O-methyl modified nucleotide
  modified_base 22: mod_base = OTHER; note = 2'-O-methyl modified nucleotide
  modified_base 25: mod_base = OTHER; note = 2'-O-methyl modified nucleotide
  modified_base 29: mod_base = OTHER; note = 2'-O-methyl modified nucleotide
  modified_base 30: mod_base = OTHER; note = 2'-O-methyl modified nucleotide
  modified_base 31: mod_base = OTHER; note = 2'-O-methyl modified nucleotide
  modified_base 32: mod_base = OTHER; note = 2'-O-methyl modified nucleotide
  modified_base 37: mod_base = OTHER; note = 2'-O-methyl modified nucleotide
  modified_base 38: mod_base = OTHER; note = 2'-O-methyl modified nucleotide
  modified_base 39: mod_base = OTHER; note = 2'-O-methyl modified nucleotide
  modified_base 40: mod_base = OTHER; note = 2'-O-methyl modified nucleotide
  modified_base 41: mod_base = OTHER; note = 2'-O-methyl modified nucleotide
  modified_base 42: mod_base = OTHER; note = 2'-O-methyl modified nucleotide
  modified_base 43: mod_base = OTHER; note = 2'-O-methyl modified nucleotide
  modified_base 47: mod_base = OTHER; note = 2'-O-methyl modified nucleotide
  modified_base 48: mod_base = OTHER; note = 2'-O-methyl modified nucleotide
  modified_base 51: mod_base = OTHER; note = 2'-O-methyl modified nucleotide
  modified_base 54: mod_base = OTHER; note = nucleotide with phosphorothioate linkage
  modified_base 58: mod_base = OTHER; note = 2'-O-methyl modified nucleotide
  modified_base 59: mod_base = OTHER; note = 2'-O-methyl modified nucleotide
  modified_base 61: mod_base = OTHER; note = 2'-O-methyl modified nucleotide
  modified_base 62: mod_base = OTHER; note = 2'-O-methyl modified nucleotide
  modified_base 63: mod_base = OTHER; note = 2'-O-methyl modified nucleotide
  modified_base 64: mod_base = OTHER; note = 2'-O-methyl modified nucleotide
  modified_base 65: mod_base = OTHER; note = 2'-O-methyl modified nucleotide
  modified_base 66: mod_base = OTHER; note = 2'-O-methyl modified nucleotide
  modified_base 67: mod_base = OTHER; note = 2'-O-methyl modified nucleotide
  modified_base 68: mod_base = OTHER; note = 2'-O-methyl modified nucleotide
  modified_base 69: mod_base = OTHER; note = 2'-O-methyl modified nucleotide
  modified_base 70: mod_base = OTHER; note = 2'-O-methyl modified nucleotide
  modified_base 75: mod_base = OTHER; note = 2'-O-methyl modified nucleotide
  modified_base 77: mod_base = OTHER; note = 2'-O-methyl modified nucleotide
  modified_base 80: mod_base = OTHER; note = 2'-O-methyl modified nucleotide
  modified_base 86: mod_base = OTHER; note = 2'-O-methyl modified nucleotide
  modified_base 87: mod_base = OTHER; note = 2'-O-methyl modified nucleotide
  modified_base 89: mod_base = OTHER; note = 2'-O-methyl modified nucleotide
  modified_base 90: mod_base = OTHER; note = 2'-O-methyl modified nucleotide
  modified_base 91: mod_base = OTHER; note = 2'-O-methyl modified nucleotide
  modified_base 92: mod_base = OTHER; note = 2'-O-methyl modified nucleotide
  modified_base 99: mod_base = OTHER; note = nucleotide with phosphorothioate linkage
  modified_base 100: mod_base = OTHER; note = 2'-O-methyl modified nucleotide with phosphorothioate linkage
  modified_base 101: mod_base = OTHER; note = 2'-O-methyl modified nucleotide

SEQ ID NO: 2232 - RNA, 101 nt, synthetic construct; identical to SEQ ID NO: 1232
  source 1..101: mol_type = other RNA
  modified_base 1: mod_base = OTHER; note = 2'-O-methyl modified nucleotide with phosphorothioate linkage
  modified_base 2: mod_base = OTHER; note = 2'-O-methyl modified nucleotide with phosphorothioate linkage
  modified_base 3: mod_base = OTHER; note = 2'-O-methyl modified nucleotide with phosphorothioate linkage
  modified_base 4: mod_base = OTHER; note = 2'-O-methyl modified nucleotide
  modified_base 5: mod_base = OTHER; note = 2'-O-methyl modified nucleotide
  modified_base 8: mod_base = OTHER; note = 2'-O-methyl modified nucleotide
  modified_base 9: mod_base = OTHER; note = 2'-O-methyl modified nucleotide
  modified_base 11: mod_base = OTHER; note = 2'-O-methyl modified nucleotide
  modified_base 13: mod_base = OTHER; note = 2'-O-methyl modified nucleotide
  modified_base 18: mod_base = OTHER; note = 2'-O-methyl modified nucleotide
  modified_base 22: mod_base = OTHER; note = 2'-O-methyl modified nucleotide
  modified_base 25: mod_base = OTHER; note = 2'-O-methyl modified nucleotide
  modified_base 29: mod_base = OTHER; note = 2'-O-methyl modified nucleotide
  modified_base 30: mod_base = OTHER; note = 2'-O-methyl modified nucleotide
  modified_base 31: mod_base = OTHER; note = 2'-O-methyl modified nucleotide
  modified_base 32: mod_base = OTHER; note = 2'-O-methyl modified nucleotide
  modified_base 37: mod_base = OTHER; note = 2'-O-methyl modified nucleotide
  modified_base 38: mod_base = OTHER; note = 2'-O-methyl modified nucleotide
  modified_base 39: mod_base = OTHER; note = 2'-O-methyl modified nucleotide
  modified_base 40: mod_base = OTHER; note = 2'-O-methyl modified nucleotide
  modified_base 41: mod_base = OTHER; note = 2'-O-methyl modified nucleotide
  modified_base 42: mod_base = OTHER; note = 2'-O-methyl modified nucleotide
  modified_base 43: mod_base = OTHER; note = 2'-O-methyl modified nucleotide
  modified_base 47: mod_base = OTHER; note = 2'-O-methyl modified nucleotide
  modified_base 48: mod_base = OTHER; note = 2'-O-methyl modified nucleotide
  modified_base 51: mod_base = OTHER; note = 2'-O-methyl modified nucleotide
  modified_base 54: mod_base = OTHER; note = nucleotide with phosphorothioate linkage
  modified_base 58: mod_base = OTHER; note = 2'-O-methyl modified nucleotide
  modified_base 59: mod_base = OTHER; note = 2'-O-methyl modified nucleotide
  modified_base 61: mod_base = OTHER; note = 2'-O-methyl modified nucleotide
  modified_base 62: mod_base = OTHER; note = 2'-O-methyl modified nucleotide
  modified_base 63: mod_base = OTHER; note = 2'-O-methyl modified nucleotide
  modified_base 64: mod_base = OTHER; note = 2'-O-methyl modified nucleotide
  modified_base 65: mod_base = OTHER; note = 2'-O-methyl modified nucleotide
  modified_base 66: mod_base = OTHER; note = 2'-O-methyl modified nucleotide
  modified_base 67: mod_base = OTHER; note = 2'-O-methyl modified nucleotide
  modified_base 68: mod_base = OTHER; note = 2'-O-methyl modified nucleotide
  modified_base 69: mod_base = OTHER; note = 2'-O-methyl modified nucleotide
  modified_base 70: mod_base = OTHER; note = 2'-O-methyl modified nucleotide
  modified_base 75: mod_base = OTHER; note = 2'-O-methyl modified nucleotide
  modified_base 77: mod_base = OTHER; note = 2'-O-methyl modified nucleotide
  modified_base 80: mod_base = OTHER; note = 2'-O-methyl modified nucleotide
  modified_base 86: mod_base = OTHER; note = 2'-O-methyl modified nucleotide
  modified_base 87: mod_base = OTHER; note = 2'-O-methyl modified nucleotide
  modified_base 89: mod_base = OTHER; note = 2'-O-methyl modified nucleotide
  modified_base 90: mod_base = OTHER; note = 2'-O-methyl modified nucleotide
  modified_base 91: mod_base = OTHER; note = 2'-O-methyl modified nucleotide
  modified_base 92: mod_base = OTHER; note = 2'-O-methyl modified nucleotide
  modified_base 99: mod_base = OTHER; note = nucleotide with phosphorothioate linkage
  modified_base 100: mod_base = OTHER; note = 2'-O-methyl modified nucleotide with phosphorothioate linkage
  modified_base 101: mod_base = OTHER; note = 2'-O-methyl modified nucleotide

SEQ ID NO: 2233 - RNA, 101 nt, synthetic construct; identical to SEQ ID NO: 1233
  source 1..101: mol_type = other RNA
  modified_base 1: mod_base = OTHER; note = 2'-O-methyl modified nucleotide with phosphorothioate linkage
  modified_base 2: mod_base = OTHER; note = 2'-O-methyl modified nucleotide with phosphorothioate linkage
  modified_base 3: mod_base = OTHER; note = 2'-O-methyl modified nucleotide with phosphorothioate linkage
  modified_base 4: mod_base = OTHER; note = 2'-O-methyl modified nucleotide
  modified_base 5: mod_base = OTHER; note = 2'-O-methyl modified nucleotide
  modified_base 8: mod_base = OTHER; note = 2'-O-methyl modified nucleotide
  modified_base 9: mod_base = OTHER; note = 2'-O-methyl modified nucleotide
  modified_base 11: mod_base = OTHER; note = 2'-O-methyl modified nucleotide
  modified_base 13: mod_base = OTHER; note = 2'-O-methyl modified nucleotide
  modified_base 18: mod_base = OTHER; note = 2'-O-methyl modified nucleotide
  modified_base 22: mod_base = OTHER; note = 2'-O-methyl modified nucleotide
  modified_base 25: mod_base = OTHER; note = 2'-O-methyl modified nucleotide
  modified_base 29: mod_base = OTHER; note = 2'-O-methyl modified nucleotide
  modified_base 30: mod_base = OTHER; note = 2'-O-methyl modified nucleotide
  modified_base 31: mod_base = OTHER; note = 2'-O-methyl modified nucleotide
  modified_base 32: mod_base = OTHER; note = 2'-O-methyl modified nucleotide
  modified_base 37: mod_base = OTHER; note = 2'-O-methyl modified nucleotide
  modified_base 38: mod_base = OTHER; note = 2'-O-methyl modified nucleotide
  modified_base 39: mod_base = OTHER; note = 2'-O-methyl modified nucleotide
  modified_base 40: mod_base = OTHER; note = 2'-O-methyl modified nucleotide
  modified_base 41: mod_base = OTHER; note = 2'-O-methyl modified nucleotide
  modified_base 42: mod_base = OTHER; note = 2'-O-methyl modified nucleotide
  modified_base 43: mod_base = OTHER; note = 2'-O-methyl modified nucleotide
  modified_base 47: mod_base = OTHER; note = 2'-O-methyl modified nucleotide
  modified_base 48: mod_base = OTHER; note = 2'-O-methyl modified nucleotide
  modified_base 51: mod_base = OTHER; note = 2'-O-methyl modified nucleotide
  modified_base 54: mod_base = OTHER; note = nucleotide with phosphorothioate linkage
  modified_base 58: mod_base = OTHER; note = 2'-O-methyl modified nucleotide
  modified_base 59: mod_base = OTHER; note = 2'-O-methyl modified nucleotide
  modified_base 61: mod_base = OTHER; note = 2'-O-methyl modified nucleotide
  modified_base 62: mod_base = OTHER; note = 2'-O-methyl modified nucleotide
  modified_base 63: mod_base = OTHER; note = 2'-O-methyl modified nucleotide
  modified_base 64: mod_base = OTHER; note = 2'-O-methyl modified nucleotide
  modified_base 65: mod_base = OTHER; note = 2'-O-methyl modified nucleotide
  modified_base 66: mod_base = OTHER; note = 2'-O-methyl modified nucleotide
  modified_base 67: mod_base = OTHER; note = 2'-O-methyl modified nucleotide
  modified_base 68: mod_base = OTHER; note = 2'-O-methyl modified nucleotide
  modified_base 69: mod_base = OTHER; note = 2'-O-methyl modified nucleotide
  modified_base 70: mod_base = OTHER; note = 2'-O-methyl modified nucleotide
  modified_base 75: mod_base = OTHER; note = 2'-O-methyl modified nucleotide
  modified_base 77: mod_base = OTHER; note = 2'-O-methyl modified nucleotide
  modified_base 80: mod_base = OTHER; note = 2'-O-methyl modified nucleotide
  modified_base 86: mod_base = OTHER; note = 2'-O-methyl modified nucleotide
  modified_base 87: mod_base = OTHER; note = 2'-O-methyl modified nucleotide
  modified_base 89: mod_base = OTHER; note = 2'-O-methyl modified nucleotide
  modified_base 90: mod_base = OTHER; note = 2'-O-methyl modified nucleotide
  modified_base 91: mod_base = OTHER; note = 2'-O-methyl modified nucleotide
  modified_base 92: mod_base = OTHER; note = 2'-O-methyl modified nucleotide
  modified_base 99: mod_base = OTHER; note = nucleotide with phosphorothioate linkage
  modified_base 100: mod_base = OTHER; note = 2'-O-methyl modified nucleotide with phosphorothioate linkage
  modified_base 101: mod_base = OTHER; note = 2'-O-methyl modified nucleotide

SEQ ID NO: 2234 - RNA, 101 nt, synthetic construct; identical to SEQ ID NO: 1234
  source 1..101: mol_type = other RNA
  modified_base 1: mod_base = OTHER; note = 2'-O-methyl modified nucleotide with phosphorothioate linkage
  modified_base 2: mod_base = OTHER; note = 2'-O-methyl modified nucleotide with phosphorothioate linkage
  modified_base 3: mod_base = OTHER; note = 2'-O-methyl modified nucleotide with phosphorothioate linkage
  modified_base 4: mod_base = OTHER; note = 2'-O-methyl modified nucleotide
  modified_base 5: mod_base = OTHER; note = 2'-O-methyl modified nucleotide
  modified_base 8: mod_base = OTHER; note = 2'-O-methyl modified nucleotide
  modified_base 9: mod_base = OTHER; note = 2'-O-methyl modified nucleotide
  modified_base 11: mod_base = OTHER; note = 2'-O-methyl modified nucleotide
  modified_base 13: mod_base = OTHER; note = 2'-O-methyl modified nucleotide
  modified_base 18: mod_base = OTHER; note = 2'-O-methyl modified nucleotide
  modified_base 22: mod_base = OTHER; note = 2'-O-methyl modified nucleotide
  modified_base 25: mod_base = OTHER; note = 2'-O-methyl modified nucleotide
  modified_base 29: mod_base = OTHER; note = 2'-O-methyl modified nucleotide
  modified_base 30: mod_base = OTHER; note = 2'-O-methyl modified nucleotide
  modified_base 31: mod_base = OTHER; note = 2'-O-methyl modified nucleotide
  modified_base 32: mod_base = OTHER; note = 2'-O-methyl modified nucleotide
  modified_base 37: mod_base = OTHER; note = 2'-O-methyl modified nucleotide
  modified_base 38: mod_base = OTHER; note = 2'-O-methyl modified nucleotide
  modified_base 39: mod_base = OTHER; note = 2'-O-methyl modified nucleotide
  modified_base 40: mod_base = OTHER; note = 2'-O-methyl modified nucleotide
  modified_base 41: mod_base = OTHER; note = 2'-O-methyl modified nucleotide
  modified_base 42: mod_base = OTHER; note = 2'-O-methyl modified nucleotide
  modified_base 43: mod_base = OTHER; note = 2'-O-methyl modified nucleotide
  modified_base 47: mod_base = OTHER; note = 2'-O-methyl modified nucleotide
  modified_base 48: mod_base = OTHER; note = 2'-O-methyl modified nucleotide
  modified_base 51: mod_base = OTHER; note = 2'-O-methyl modified nucleotide
  modified_base 54: mod_base = OTHER; note = nucleotide with phosphorothioate linkage
  modified_base 58: mod_base = OTHER; note = 2'-O-methyl modified nucleotide
  modified_base 59: mod_base = OTHER; note = 2'-O-methyl modified nucleotide
  modified_base 61: mod_base = OTHER; note = 2'-O-methyl modified nucleotide
  modified_base 62: mod_base = OTHER; note = 2'-O-methyl modified nucleotide
  modified_base 63: mod_base = OTHER; note = 2'-O-methyl modified nucleotide
  modified_base 64: mod_base = OTHER; note = 2'-O-methyl modified nucleotide
  modified_base 65: mod_base = OTHER; note = 2'-O-methyl modified nucleotide
  modified_base 66: mod_base = OTHER; note = 2'-O-methyl modified nucleotide
  modified_base 67: mod_base = OTHER; note = 2'-O-methyl modified nucleotide
  modified_base 68: mod_base = OTHER; note = 2'-O-methyl modified nucleotide
  modified_base 69: mod_base = OTHER; note = 2'-O-methyl modified nucleotide
  modified_base 70: mod_base = OTHER; note = 2'-O-methyl modified nucleotide
  modified_base 75: mod_base = OTHER; note = 2'-O-methyl modified nucleotide
  modified_base 77: mod_base = OTHER; note = 2'-O-methyl modified nucleotide
  modified_base 80: mod_base = OTHER; note = 2'-O-methyl modified nucleotide
  modified_base 86: mod_base = OTHER; note = 2'-O-methyl modified nucleotide
  modified_base 87: mod_base = OTHER; note = 2'-O-methyl modified nucleotide
  modified_base 89: mod_base = OTHER; note = 2'-O-methyl modified nucleotide
  modified_base 90: mod_base = OTHER; note = 2'-O-methyl modified nucleotide
  modified_base 91: mod_base = OTHER; note = 2'-O-methyl modified nucleotide
  modified_base 92: mod_base = OTHER; note = 2'-O-methyl modified nucleotide
  modified_base 99: mod_base = OTHER; note = nucleotide with phosphorothioate linkage
  modified_base 100: mod_base = OTHER; note = 2'-O-methyl modified nucleotide with phosphorothioate linkage
  modified_base 101: mod_base = OTHER; note = 2'-O-methyl modified nucleotide

SEQ ID NO: 2235 - RNA, 101 nt, synthetic construct; identical to SEQ ID NO: 1235
  source 1..101: mol_type = other RNA
  modified_base 1: mod_base = OTHER; note = 2'-O-methyl modified nucleotide with phosphorothioate linkage
  modified_base 2: mod_base = OTHER; note = 2'-O-methyl modified nucleotide with phosphorothioate linkage
  modified_base 3: mod_base = OTHER; note = 2'-O-methyl modified nucleotide with phosphorothioate linkage
  modified_base 4: mod_base = OTHER; note = 2'-O-methyl modified nucleotide
  modified_base 5: mod_base = OTHER; note = 2'-O-methyl modified nucleotide
  modified_base 8: mod_base = OTHER; note = 2'-O-methyl modified nucleotide
  modified_base 9: mod_base = OTHER; note = 2'-O-methyl modified nucleotide
  modified_base 11: mod_base = OTHER; note = 2'-O-methyl modified nucleotide
  modified_base 13: mod_base = OTHER; note = 2'-O-methyl modified nucleotide
  modified_base 18: mod_base = OTHER; note = 2'-O-methyl modified nucleotide
  modified_base 22: mod_base = OTHER; note = 2'-O-methyl modified nucleotide
  modified_base 25: mod_base = OTHER; note = 2'-O-methyl modified nucleotide
  modified_base 29: mod_base = OTHER; note = 2'-O-methyl modified nucleotide
  modified_base 30: mod_base = OTHER; note = 2'-O-methyl modified nucleotide
  modified_base 31: mod_base = OTHER; note = 2'-O-methyl modified nucleotide
  modified_base 32: mod_base = OTHER; note = 2'-O-methyl modified nucleotide
  modified_base 37: mod_base = OTHER; note = 2'-O-methyl modified nucleotide
  modified_base 38: mod_base = OTHER; note = 2'-O-methyl modified nucleotide
  modified_base 39: mod_base = OTHER; note = 2'-O-methyl modified nucleotide
  modified_base 40: mod_base = OTHER; note = 2'-O-methyl modified nucleotide
  modified_base 41: mod_base = OTHER; note = 2'-O-methyl modified nucleotide
  modified_base 42: mod_base = OTHER; note = 2'-O-methyl modified nucleotide
  modified_base 43: mod_base = OTHER; note = 2'-O-methyl modified nucleotide
  modified_base 47: mod_base = OTHER; note = 2'-O-methyl modified nucleotide
  modified_base 48: mod_base = OTHER; note = 2'-O-methyl modified nucleotide
  modified_base 51: mod_base = OTHER; note = 2'-O-methyl modified nucleotide
  modified_base 54: mod_base = OTHER; note = nucleotide with phosphorothioate linkage
  modified_base 58: mod_base = OTHER; note = 2'-O-methyl modified nucleotide
  modified_base 59: mod_base = OTHER; note = 2'-O-methyl modified nucleotide
  modified_base 61: mod_base = OTHER; note = 2'-O-methyl modified nucleotide
  modified_base 62: mod_base = OTHER; note = 2'-O-methyl modified nucleotide
  modified_base 63: mod_base = OTHER; note = 2'-O-methyl modified nucleotide
  modified_base 64: mod_base = OTHER; note = 2'-O-methyl modified nucleotide
  modified_base 65: mod_base = OTHER; note = 2'-O-methyl modified nucleotide
  modified_base 66: mod_base = OTHER; note = 2'-O-methyl modified nucleotide
  modified_base 67: mod_base = OTHER; note = 2'-O-methyl modified nucleotide
  modified_base 68: mod_base = OTHER; note = 2'-O-methyl modified nucleotide
  modified_base 69: mod_base = OTHER; note = 2'-O-methyl modified nucleotide
  modified_base 70: mod_base = OTHER; note = 2'-O-methyl modified nucleotide
  modified_base 75: mod_base = OTHER; note = 2'-O-methyl modified nucleotide
  modified_base 77: mod_base = OTHER; note = 2'-O-methyl modified nucleotide
  modified_base 80: mod_base = OTHER; note = 2'-O-methyl modified nucleotide
  modified_base 86: mod_base = OTHER; note = 2'-O-methyl modified nucleotide
  modified_base 87: mod_base = OTHER; note = 2'-O-methyl modified nucleotide
  modified_base 89: mod_base = OTHER; note = 2'-O-methyl modified nucleotide
  modified_base 90: mod_base = OTHER; note = 2'-O-methyl modified nucleotide
  modified_base 91: mod_base = OTHER; note = 2'-O-methyl modified nucleotide
  modified_base 92: mod_base = OTHER; note = 2'-O-methyl modified nucleotide
  modified_base 99: mod_base = OTHER; note = nucleotide with phosphorothioate linkage
  modified_base 100: mod_base = OTHER; note = 2'-O-methyl modified nucleotide with phosphorothioate linkage
  modified_base 101: mod_base = OTHER; note = 2'-O-methyl modified nucleotide

SEQ ID NO: 2236 - RNA, 101 nt, synthetic construct; identical to SEQ ID NO: 1236
  source 1..101: mol_type = other RNA
  modified_base 1: mod_base = OTHER; note = 2'-O-methyl modified nucleotide with phosphorothioate linkage
  modified_base 2: mod_base = OTHER; note = 2'-O-methyl modified nucleotide with phosphorothioate linkage
  modified_base 3: mod_base = OTHER; note = 2'-O-methyl modified nucleotide with phosphorothioate linkage
  modified_base 4: mod_base = OTHER; note = 2'-O-methyl modified nucleotide
  modified_base 5: mod_base = OTHER; note = 2'-O-methyl modified nucleotide
  modified_base 8: mod_base = OTHER; note = 2'-O-methyl modified nucleotide
  modified_base 9: mod_base = OTHER; note = 2'-O-methyl modified nucleotide
  modified_base 11: mod_base = OTHER; note = 2'-O-methyl modified nucleotide
  modified_base 13: mod_base = OTHER; note = 2'-O-methyl modified nucleotide
  modified_base 18: mod_base = OTHER; note = 2'-O-methyl modified nucleotide
  modified_base 22: mod_base = OTHER; note = 2'-O-methyl modified nucleotide
  modified_base 25: mod_base = OTHER; note = 2'-O-methyl modified nucleotide
  modified_base 29: mod_base = OTHER; note = 2'-O-methyl modified nucleotide
  modified_base 30: mod_base = OTHER; note = 2'-O-methyl modified nucleotide
  modified_base 31: mod_base = OTHER; note = 2'-O-methyl modified nucleotide
  modified_base 32: mod_base = OTHER; note = 2'-O-methyl modified nucleotide
  modified_base 37: mod_base = OTHER; note = 2'-O-methyl modified nucleotide
  modified_base 38: mod_base = OTHER; note = 2'-O-methyl modified nucleotide
  modified_base 39: mod_base = OTHER; note = 2'-O-methyl modified nucleotide
  modified_base 40: mod_base = OTHER; note = 2'-O-methyl modified nucleotide
  modified_base 41: mod_base = OTHER; note = 2'-O-methyl modified nucleotide
  modified_base 42: mod_base = OTHER; note = 2'-O-methyl modified nucleotide
  modified_base 43: mod_base = OTHER; note = 2'-O-methyl modified nucleotide
  modified_base 47: mod_base = OTHER; note = 2'-O-methyl modified nucleotide
  modified_base 48: mod_base = OTHER; note = 2'-O-methyl modified nucleotide
  modified_base 51: mod_base = OTHER; note = 2'-O-methyl modified nucleotide
  modified_base 54: mod_base = OTHER; note = nucleotide with phosphorothioate linkage
  modified_base 58: mod_base = OTHER; note = 2'-O-methyl modified nucleotide
  modified_base 59: mod_base = OTHER; note = 2'-O-methyl modified nucleotide
  modified_base 61: mod_base = OTHER; note = 2'-O-methyl modified nucleotide
  modified_base 62: mod_base = OTHER; note = 2'-O-methyl modified nucleotide
  modified_base 63: mod_base = OTHER; note = 2'-O-methyl modified nucleotide
  modified_base 64: mod_base = OTHER; note = 2'-O-methyl modified nucleotide
  modified_base 65: mod_base = OTHER; note = 2'-O-methyl modified nucleotide
  modified_base 66: mod_base = OTHER; note = 2'-O-methyl modified nucleotide
  modified_base 67: mod_base = OTHER; note = 2'-O-methyl modified nucleotide
  modified_base 68: mod_base = OTHER; note = 2'-O-methyl modified nucleotide
  modified_base 69: mod_base = OTHER; note = 2'-O-methyl modified nucleotide
  modified_base 70: mod_base = OTHER; note = 2'-O-methyl modified nucleotide
  modified_base 75: mod_base = OTHER; note = 2'-O-methyl modified nucleotide
  modified_base 77: mod_base = OTHER; note = 2'-O-methyl modified nucleotide
  modified_base 80: mod_base = OTHER; note = 2'-O-methyl modified nucleotide
  modified_base 86: mod_base = OTHER; note = 2'-O-methyl modified nucleotide
  modified_base 87: mod_base = OTHER; note = 2'-O-methyl modified nucleotide
  modified_base 89: mod_base = OTHER; note = 2'-O-methyl modified nucleotide
  modified_base 90: mod_base = OTHER; note = 2'-O-methyl modified nucleotide
  modified_base 91: mod_base = OTHER; note = 2'-O-methyl modified nucleotide
  modified_base 92: mod_base = OTHER; note = 2'-O-methyl modified nucleotide
  modified_base 99: mod_base = OTHER; note = nucleotide with phosphorothioate linkage
  modified_base 100: mod_base = OTHER; note = 2'-O-methyl modified nucleotide with phosphorothioate linkage
  modified_base 101: mod_base = OTHER; note = 2'-O-methyl modified nucleotide

SEQ ID NO: 2237 - RNA, 101 nt, synthetic construct; identical to SEQ ID NO: 1237
  source 1..101: mol_type = other RNA
  modified_base 1: mod_base = OTHER; note = 2'-O-methyl modified nucleotide with phosphorothioate linkage
  modified_base 2: mod_base = OTHER; note = 2'-O-methyl modified nucleotide with phosphorothioate linkage
  modified_base 3: mod_base = OTHER; note = 2'-O-methyl modified nucleotide with phosphorothioate linkage
  modified_base 4: mod_base = OTHER; note = 2'-O-methyl modified nucleotide
  modified_base 5: mod_base = OTHER; note = 2'-O-methyl modified nucleotide
  modified_base 8: mod_base = OTHER; note = 2'-O-methyl modified nucleotide
  modified_base 9: mod_base = OTHER; note = 2'-O-methyl modified nucleotide
  modified_base 11: mod_base = OTHER; note = 2'-O-methyl modified nucleotide
  modified_base 13: mod_base = OTHER; note = 2'-O-methyl modified nucleotide
  modified_base 18: mod_base = OTHER; note = 2'-O-methyl modified nucleotide
  modified_base 22: mod_base = OTHER; note = 2'-O-methyl modified nucleotide
  modified_base 25: mod_base = OTHER; note = 2'-O-methyl modified nucleotide
  modified_base 29: mod_base = OTHER; note = 2'-O-methyl modified nucleotide
  modified_base 30: mod_base = OTHER; note = 2'-O-methyl modified nucleotide
  modified_base 31: mod_base = OTHER; note = 2'-O-methyl modified nucleotide
  modified_base 32: mod_base = OTHER; note = 2'-O-methyl modified nucleotide
  modified_base 37: mod_base = OTHER; note = 2'-O-methyl modified nucleotide
  modified_base 38: mod_base = OTHER; note = 2'-O-methyl modified nucleotide
  modified_base 39: mod_base = OTHER; note = 2'-O-methyl modified nucleotide
  modified_base 40: mod_base = OTHER; note = 2'-O-methyl modified nucleotide
  modified_base 41: mod_base = OTHER; note = 2'-O-methyl modified nucleotide
  modified_base 42: mod_base = OTHER; note = 2'-O-methyl modified nucleotide
  modified_base 43: mod_base = OTHER; note = 2'-O-methyl modified nucleotide
  modified_base 47: mod_base = OTHER; note = 2'-O-methyl modified nucleotide
  modified_base 48: mod_base = OTHER; note = 2'-O-methyl modified nucleotide
  modified_base 51: mod_base = OTHER; note = 2'-O-methyl modified nucleotide
  modified_base 54: mod_base = OTHER; note = nucleotide with phosphorothioate linkage
  modified_base 58: mod_base = OTHER; note = 2'-O-methyl modified nucleotide
  modified_base 59: mod_base = OTHER; note = 2'-O-methyl modified nucleotide
  modified_base 61: mod_base = OTHER; note = 2'-O-methyl modified nucleotide
  modified_base 62: mod_base = OTHER; note = 2'-O-methyl modified nucleotide
  modified_base 63: mod_base = OTHER; note = 2'-O-methyl modified nucleotide
  modified_base 64: mod_base = OTHER; note = 2'-O-methyl modified nucleotide
  modified_base 65: mod_base = OTHER; note = 2'-O-methyl modified nucleotide
  modified_base 66: mod_base = OTHER; note = 2'-O-methyl modified nucleotide
  modified_base 67: mod_base = OTHER; note = 2'-O-methyl modified nucleotide
  modified_base 68: mod_base = OTHER; note = 2'-O-methyl modified nucleotide
  modified_base 69: mod_base = OTHER; note = 2'-O-methyl modified nucleotide
  modified_base 70: mod_base = OTHER; note = 2'-O-methyl modified nucleotide
  modified_base 75: mod_base = OTHER; note = 2'-O-methyl modified nucleotide
  modified_base 77: mod_base = OTHER; note = 2'-O-methyl modified nucleotide
  modified_base 80: mod_base = OTHER; note = 2'-O-methyl modified nucleotide
  modified_base 86: mod_base = OTHER; note = 2'-O-methyl modified nucleotide
  modified_base 87: mod_base = OTHER; note = 2'-O-methyl modified nucleotide
  modified_base 89: mod_base = OTHER; note = 2'-O-methyl modified nucleotide
  modified_base 90: mod_base = OTHER; note = 2'-O-methyl modified nucleotide
  modified_base 91: mod_base = OTHER; note = 2'-O-methyl modified nucleotide
  modified_base 92: mod_base = OTHER; note = 2'-O-methyl modified nucleotide
  modified_base 99: mod_base = OTHER; note = nucleotide with phosphorothioate linkage
  modified_base 100: mod_base = OTHER; note = 2'-O-methyl modified nucleotide with phosphorothioate linkage
  modified_base 101: mod_base = OTHER; note = 2'-O-methyl modified nucleotide

SEQ ID NO: 2238 - RNA, 101 nt, synthetic construct; identical to SEQ ID NO: 1238
  source 1..101: mol_type = other RNA
  modified_base 1: mod_base = OTHER; note = 2'-O-methyl modified nucleotide with phosphorothioate linkage
  modified_base 2: mod_base = OTHER; note = 2'-O-methyl modified nucleotide with phosphorothioate linkage
  modified_base 3: mod_base = OTHER; note = 2'-O-methyl modified nucleotide with phosphorothioate linkage
  modified_base 4: mod_base = OTHER; note = 2'-O-methyl modified nucleotide
  modified_base 5: mod_base = OTHER; note = 2'-O-methyl modified nucleotide
  modified_base 8: mod_base = OTHER; note = 2'-O-methyl modified nucleotide
  modified_base 9: mod_base = OTHER; note = 2'-O-methyl modified nucleotide
  modified_base 11: mod_base = OTHER; note = 2'-O-methyl modified nucleotide
  modified_base 13: mod_base = OTHER; note = 2'-O-methyl modified nucleotide
  modified_base 18: mod_base = OTHER; note = 2'-O-methyl modified nucleotide
  modified_base 22: mod_base = OTHER; note = 2'-O-methyl modified nucleotide
  modified_base 25: mod_base = OTHER; note = 2'-O-methyl modified nucleotide
  modified_base 29: mod_base = OTHER; note = 2'-O-methyl modified nucleotide
  modified_base 30: mod_base = OTHER; note = 2'-O-methyl modified nucleotide
  modified_base 31: mod_base = OTHER; note = 2'-O-methyl modified nucleotide
  modified_base 32: mod_base = OTHER; note = 2'-O-methyl modified nucleotide
  modified_base 37: mod_base = OTHER; note = 2'-O-methyl modified nucleotide
  modified_base 38: mod_base = OTHER; note = 2'-O-methyl modified nucleotide
  modified_base 39: mod_base = OTHER; note = 2'-O-methyl modified nucleotide
  modified_base 40: mod_base = OTHER; note = 2'-O-methyl modified nucleotide
  modified_base 41: mod_base = OTHER; note = 2'-O-methyl modified nucleotide
  modified_base 42: mod_base = OTHER; note = 2'-O-methyl modified nucleotide
  modified_base 43: mod_base = OTHER; note = 2'-O-methyl modified nucleotide
  modified_base 47: mod_base = OTHER; note = 2'-O-methyl modified nucleotide
  modified_base 48: mod_base = OTHER; note = 2'-O-methyl modified nucleotide
  modified_base 51: mod_base = OTHER; note = 2'-O-methyl modified nucleotide
  modified_base 54: mod_base = OTHER; note = nucleotide with phosphorothioate linkage
  modified_base 58: mod_base = OTHER; note = 2'-O-methyl modified nucleotide
  modified_base 59: mod_base = OTHER; note = 2'-O-methyl modified nucleotide
  modified_base 61: mod_base = OTHER; note = 2'-O-methyl modified nucleotide
  modified_base 62: mod_base = OTHER; note = 2'-O-methyl modified nucleotide
  modified_base 63: mod_base = OTHER; note = 2'-O-methyl modified nucleotide
  modified_base 64: mod_base = OTHER; note = 2'-O-methyl modified nucleotide
  modified_base 65: mod_base = OTHER; note = 2'-O-methyl modified nucleotide
  modified_base 66: mod_base = OTHER; note = 2'-O-methyl modified nucleotide
  modified_base 67: mod_base = OTHER; note = 2'-O-methyl modified nucleotide
  modified_base 68: mod_base = OTHER; note = 2'-O-methyl modified nucleotide
  modified_base 69: mod_base = OTHER; note = 2'-O-methyl modified nucleotide
  modified_base 70: mod_base = OTHER; note = 2'-O-methyl modified nucleotide
  modified_base 75: mod_base = OTHER; note = 2'-O-methyl modified nucleotide
  modified_base 77: mod_base = OTHER; note = 2'-O-methyl modified nucleotide
  modified_base 80: mod_base = OTHER; note = 2'-O-methyl modified nucleotide
  modified_base 86: mod_base = OTHER; note = 2'-O-methyl modified nucleotide
  modified_base 87: mod_base = OTHER; note = 2'-O-methyl modified nucleotide
  modified_base 89: mod_base = OTHER; note = 2'-O-methyl modified nucleotide
  modified_base 90: mod_base = OTHER; note = 2'-O-methyl modified nucleotide
  modified_base 91: mod_base = OTHER; note = 2'-O-methyl modified nucleotide
  modified_base 92: mod_base = OTHER; note = 2'-O-methyl modified nucleotide
  modified_base 99: mod_base = OTHER; note = nucleotide with phosphorothioate linkage
  modified_base 100: mod_base = OTHER; note = 2'-O-methyl modified nucleotide with phosphorothioate linkage
  modified_base 101: mod_base = OTHER; note = 2'-O-methyl modified nucleotide

SEQ ID NO: 2239 - RNA, 101 nt, synthetic construct; identical to SEQ ID NO: 1239
  source 1..101: mol_type = other RNA
  modified_base 1: mod_base = OTHER; note = 2'-O-methyl modified nucleotide with phosphorothioate linkage
  modified_base 2: mod_base = OTHER; note = 2'-O-methyl modified nucleotide with phosphorothioate linkage
  modified_base 3: mod_base = OTHER; note = 2'-O-methyl modified nucleotide with phosphorothioate linkage
  modified_base 4: mod_base = OTHER; note = 2'-O-methyl modified nucleotide
  modified_base 5: mod_base = OTHER; note = 2'-O-methyl modified nucleotide
  modified_base 8: mod_base = OTHER; note = 2'-O-methyl modified nucleotide
  modified_base 9: mod_base = OTHER; note = 2'-O-methyl modified nucleotide
  modified_base 11: mod_base = OTHER; note = 2'-O-methyl modified nucleotide
  modified_base 13: mod_base = OTHER; note = 2'-O-methyl modified nucleotide
  modified_base 18: mod_base = OTHER; note = 2'-O-methyl modified nucleotide
  modified_base 22: mod_base = OTHER; note = 2'-O-methyl modified nucleotide
  modified_base 25: mod_base = OTHER; note = 2'-O-methyl modified nucleotide
  modified_base 29: mod_base = OTHER; note = 2'-O-methyl modified nucleotide
  modified_base 30: mod_base = OTHER; note = 2'-O-methyl modified nucleotide
  modified_base 31: mod_base = OTHER; note = 2'-O-methyl modified nucleotide
  modified_base 32: mod_base = OTHER; note = 2'-O-methyl modified nucleotide
  modified_base 37: mod_base = OTHER; note = 2'-O-methyl modified nucleotide
  modified_base 38: mod_base = OTHER; note = 2'-O-methyl modified nucleotide
  modified_base 39: mod_base = OTHER; note = 2'-O-methyl modified nucleotide
  modified_base 40: mod_base = OTHER; note = 2'-O-methyl modified nucleotide
  modified_base 41: mod_base = OTHER; note = 2'-O-methyl modified nucleotide
  modified_base 42: mod_base = OTHER; note = 2'-O-methyl modified nucleotide
  modified_base 43: mod_base = OTHER; note = 2'-O-methyl modified nucleotide
  modified_base 47: mod_base = OTHER; note = 2'-O-methyl modified nucleotide
  modified_base 48: mod_base = OTHER; note = 2'-O-methyl modified nucleotide
  modified_base 51: mod_base = OTHER; note = 2'-O-methyl modified nucleotide
  modified_base 54: mod_base = OTHER; note = nucleotide with phosphorothioate linkage
  modified_base 58: mod_base = OTHER; note = 2'-O-methyl modified nucleotide
  modified_base 59: mod_base = OTHER; note = 2'-O-methyl modified nucleotide
  modified_base 61: mod_base = OTHER; note = 2'-O-methyl modified nucleotide
  modified_base 62: mod_base = OTHER; note = 2'-O-methyl modified nucleotide
  modified_base 63: mod_base = OTHER; note = 2'-O-methyl modified nucleotide
  modified_base 64: mod_base = OTHER; note = 2'-O-methyl modified nucleotide
  modified_base 65: mod_base = OTHER; note = 2'-O-methyl modified nucleotide
  modified_base 66: mod_base = OTHER; note = 2'-O-methyl modified nucleotide
  modified_base 67: mod_base = OTHER; note = 2'-O-methyl modified nucleotide
  modified_base 68: mod_base = OTHER; note = 2'-O-methyl modified nucleotide
  modified_base 69: mod_base = OTHER; note = 2'-O-methyl modified nucleotide
  modified_base 70: mod_base = OTHER; note = 2'-O-methyl modified nucleotide
  modified_base 75: mod_base = OTHER; note = 2'-O-methyl modified nucleotide
  modified_base 77: mod_base = OTHER; note = 2'-O-methyl modified nucleotide
  modified_base 80: mod_base = OTHER; note = 2'-O-methyl modified nucleotide
  modified_base 86: mod_base = OTHER; note = 2'-O-methyl modified nucleotide
  modified_base 87: mod_base = OTHER; note = 2'-O-methyl modified nucleotide
  modified_base 89: mod_base = OTHER; note = 2'-O-methyl modified nucleotide
  modified_base 90: mod_base = OTHER; note = 2'-O-methyl modified nucleotide
  modified_base 91: mod_base = OTHER; note = 2'-O-methyl modified nucleotide
  modified_base 92: mod_base = OTHER; note = 2'-O-methyl modified nucleotide
  modified_base 99: mod_base = OTHER; note = nucleotide with phosphorothioate linkage
  modified_base 100: mod_base = OTHER; note = 2'-O-methyl modified nucleotide with phosphorothioate linkage
  modified_base 101: mod_base = OTHER; note = 2'-O-methyl modified nucleotide

SEQ ID NO: 2240 - RNA, 101 nt, synthetic construct; identical to SEQ ID NO: 1240
  source 1..101: mol_type = other RNA
  modified_base 1: mod_base = OTHER; note = 2'-O-methyl modified nucleotide with phosphorothioate linkage
  modified_base 2: mod_base = OTHER; note = 2'-O-methyl modified nucleotide with phosphorothioate linkage
  modified_base 3: mod_base = OTHER; note = 2'-O-methyl modified nucleotide with phosphorothioate linkage
  modified_base 4: mod_base = OTHER; note = 2'-O-methyl modified nucleotide
  modified_base 5: mod_base = OTHER; note = 2'-O-methyl modified nucleotide
  modified_base 8: mod_base = OTHER; note = 2'-O-methyl modified nucleotide
  modified_base 9: mod_base = OTHER; note = 2'-O-methyl modified nucleotide
  modified_base 11: mod_base = OTHER; note = 2'-O-methyl modified nucleotide
  modified_base 13: mod_base = OTHER; note = 2'-O-methyl modified nucleotide
  modified_base 18: mod_base = OTHER; note = 2'-O-methyl modified nucleotide
  modified_base 22: mod_base = OTHER; note = 2'-O-methyl modified nucleotide
  modified_base 25: mod_base = OTHER; note = 2'-O-methyl modified nucleotide
  modified_base 29: mod_base = OTHER; note = 2'-O-methyl modified nucleotide
  modified_base 30: mod_base = OTHER; note = 2'-O-methyl modified nucleotide
  modified_base 31: mod_base = OTHER; note = 2'-O-methyl modified nucleotide
  modified_base 32: mod_base = OTHER; note = 2'-O-methyl modified nucleotide
  modified_base 37: mod_base = OTHER; note = 2'-O-methyl modified nucleotide
  modified_base 38: mod_base = OTHER; note = 2'-O-methyl modified nucleotide
  modified_base 39: mod_base = OTHER; note = 2'-O-methyl modified nucleotide
  modified_base 40: mod_base = OTHER; note = 2'-O-methyl modified nucleotide
  modified_base 41: mod_base = OTHER; note = 2'-O-methyl modified nucleotide
  modified_base 42: mod_base = OTHER; note = 2'-O-methyl modified nucleotide
  modified_base 43: mod_base = OTHER; note = 2'-O-methyl modified nucleotide
  modified_base 47: mod_base = OTHER; note = 2'-O-methyl modified nucleotide
  modified_base 48: mod_base = OTHER; note = 2'-O-methyl modified nucleotide
  modified_base 51: mod_base = OTHER; note = 2'-O-methyl modified nucleotide
  modified_base 54: mod_base = OTHER; note = nucleotide with phosphorothioate linkage
  modified_base 58: mod_base = OTHER; note = 2'-O-methyl modified nucleotide
  modified_base 59: mod_base = OTHER; note = 2'-O-methyl modified nucleotide
  modified_base 61: mod_base = OTHER; note = 2'-O-methyl modified nucleotide
  modified_base 62: mod_base = OTHER; note = 2'-O-methyl modified nucleotide
  modified_base 63: mod_base = OTHER; note = 2'-O-methyl modified nucleotide
  modified_base 64: mod_base = OTHER; note = 2'-O-methyl modified nucleotide
  modified_base 65: mod_base = OTHER; note = 2'-O-methyl modified nucleotide
  modified_base 66: mod_base = OTHER; note = 2'-O-methyl modified nucleotide
  modified_base 67: mod_base = OTHER; note = 2'-O-methyl modified nucleotide
  modified_base 68: mod_base = OTHER; note = 2'-O-methyl modified nucleotide
  modified_base 69: mod_base = OTHER; note = 2'-O-methyl modified nucleotide
  modified_base 70: mod_base = OTHER; note = 2'-O-methyl modified nucleotide
  modified_base 75: mod_base = OTHER; note = 2'-O-methyl modified nucleotide
  modified_base 77: mod_base = OTHER; note = 2'-O-methyl modified nucleotide
  modified_base 80: mod_base = OTHER; note = 2'-O-methyl modified nucleotide
  modified_base 86: mod_base = OTHER; note = 2'-O-methyl modified nucleotide
  modified_base 87: mod_base = OTHER; note = 2'-O-methyl modified nucleotide
  modified_base 89: mod_base = OTHER; note = 2'-O-methyl modified nucleotide
  modified_base 90: mod_base = OTHER; note = 2'-O-methyl modified nucleotide
  modified_base 91: mod_base = OTHER; note = 2'-O-methyl modified nucleotide
  modified_base 92: mod_base = OTHER; note = 2'-O-methyl modified nucleotide
  modified_base 99: mod_base = OTHER; note = nucleotide with phosphorothioate linkage
  modified_base 100: mod_base = OTHER; note = 2'-O-methyl modified nucleotide with phosphorothioate linkage
  modified_base 101: mod_base = OTHER; note = 2'-O-methyl modified nucleotide

SEQ ID NO: 2241 - RNA, 101 nt, synthetic construct; identical to SEQ ID NO: 1241
  source 1..101: mol_type = other RNA
  modified_base 1: mod_base = OTHER; note = 2'-O-methyl modified nucleotide with phosphorothioate linkage
  modified_base 2: mod_base = OTHER; note = 2'-O-methyl modified nucleotide with phosphorothioate linkage
  modified_base 3: mod_base = OTHER; note = 2'-O-methyl modified nucleotide with phosphorothioate linkage
  modified_base 4: mod_base = OTHER; note = 2'-O-methyl modified nucleotide
  modified_base 5: mod_base = OTHER; note = 2'-O-methyl modified nucleotide
  modified_base 8: mod_base = OTHER; note = 2'-O-methyl modified nucleotide
  modified_base 9: mod_base = OTHER; note = 2'-O-methyl modified nucleotide
  modified_base 11: mod_base = OTHER; note = 2'-O-methyl modified nucleotide
  modified_base 13: mod_base = OTHER; note = 2'-O-methyl modified nucleotide
  modified_base 18: mod_base = OTHER; note = 2'-O-methyl modified nucleotide
  modified_base 22: mod_base = OTHER; note = 2'-O-methyl modified nucleotide
  modified_base 25: mod_base = OTHER; note = 2'-O-methyl modified nucleotide
  modified_base 29: mod_base = OTHER; note = 2'-O-methyl modified nucleotide
  modified_base 30: mod_base = OTHER; note = 2'-O-methyl modified nucleotide
  modified_base 31: mod_base = OTHER; note = 2'-O-methyl modified nucleotide
  modified_base 32: mod_base = OTHER; note = 2'-O-methyl modified nucleotide
  modified_base 37: mod_base = OTHER; note = 2'-O-methyl modified nucleotide
  modified_base 38: mod_base = OTHER; note = 2'-O-methyl modified nucleotide
  modified_base 39: mod_base = OTHER; note = 2'-O-methyl modified nucleotide
  modified_base 40: mod_base = OTHER; note = 2'-O-methyl modified nucleotide
  modified_base 41: mod_base = OTHER; note = 2'-O-methyl modified nucleotide
  modified_base 42: mod_base = OTHER; note = 2'-O-methyl modified nucleotide
  modified_base 43: mod_base = OTHER; note = 2'-O-methyl modified nucleotide
  modified_base 47: mod_base = OTHER; note = 2'-O-methyl modified nucleotide
  modified_base 48: mod_base = OTHER; note = 2'-O-methyl modified nucleotide
  modified_base 51: mod_base = OTHER; note = 2'-O-methyl modified nucleotide
  modified_base 54: mod_base = OTHER; note = nucleotide with phosphorothioate linkage
  modified_base 58: mod_base = OTHER; note = 2'-O-methyl modified nucleotide
  modified_base 59: mod_base = OTHER; note = 2'-O-methyl modified nucleotide
  modified_base 61: mod_base = OTHER; note = 2'-O-methyl modified nucleotide
  modified_base 62: mod_base = OTHER; note = 2'-O-methyl modified nucleotide
  modified_base 63: mod_base = OTHER; note = 2'-O-methyl modified nucleotide
  modified_base 64: mod_base = OTHER; note = 2'-O-methyl modified nucleotide
  modified_base 65: mod_base = OTHER; note = 2'-O-methyl modified nucleotide
  modified_base 66: mod_base = OTHER; note = 2'-O-methyl modified nucleotide
  modified_base 67: mod_base = OTHER; note = 2'-O-methyl modified nucleotide
  modified_base 68: mod_base = OTHER; note = 2'-O-methyl modified nucleotide
  modified_base 69: mod_base = OTHER; note = 2'-O-methyl modified nucleotide
  modified_base 70: mod_base = OTHER; note = 2'-O-methyl modified nucleotide
  modified_base 75: mod_base = OTHER; note = 2'-O-methyl modified nucleotide
  modified_base 77: mod_base = OTHER; note = 2'-O-methyl modified nucleotide
  modified_base 80: mod_base = OTHER; note = 2'-O-methyl modified nucleotide
  modified_base 86: mod_base = OTHER; note = 2'-O-methyl modified nucleotide
  modified_base 87: mod_base = OTHER; note = 2'-O-methyl modified nucleotide
  modified_base 89: mod_base = OTHER; note = 2'-O-methyl modified nucleotide
  modified_base 90: mod_base = OTHER; note = 2'-O-methyl modified nucleotide
  modified_base 91: mod_base = OTHER; note = 2'-O-methyl modified nucleotide
  modified_base 92: mod_base = OTHER; note = 2'-O-methyl modified nucleotide
  modified_base 99: mod_base = OTHER; note = nucleotide with phosphorothioate linkage
  modified_base 100: mod_base = OTHER; note = 2'-O-methyl modified nucleotide with phosphorothioate linkage
  modified_base 101: mod_base = OTHER; note = 2'-O-methyl modified nucleotide

SEQ ID NO: 2242 - RNA, 101 nt, synthetic construct; identical to SEQ ID NO: 1242
  source 1..101: mol_type = other RNA
  modified_base 1: mod_base = OTHER; note = 2'-O-methyl modified nucleotide with phosphorothioate linkage
  modified_base 2: mod_base = OTHER; note = 2'-O-methyl modified nucleotide with phosphorothioate linkage
  modified_base 3: mod_base = OTHER; note = 2'-O-methyl modified nucleotide with phosphorothioate linkage
  modified_base 4: mod_base = OTHER; note = 2'-O-methyl modified nucleotide
  modified_base 5: mod_base = OTHER; note = 2'-O-methyl modified nucleotide
  modified_base 8: mod_base = OTHER; note = 2'-O-methyl modified nucleotide
  modified_base 9: mod_base = OTHER; note = 2'-O-methyl modified nucleotide
  modified_base 11: mod_base = OTHER; note = 2'-O-methyl modified nucleotide
  modified_base 13: mod_base = OTHER; note = 2'-O-methyl modified nucleotide
  modified_base 18: mod_base = OTHER; note = 2'-O-methyl modified nucleotide
  modified_base 22: mod_base = OTHER; note = 2'-O-methyl modified nucleotide
  modified_base 25: mod_base = OTHER; note = 2'-O-methyl modified nucleotide
  modified_base 29: mod_base = OTHER; note = 2'-O-methyl modified nucleotide
  modified_base 30: mod_base = OTHER; note = 2'-O-methyl modified nucleotide
  modified_base 31: mod_base = OTHER; note = 2'-O-methyl modified nucleotide
  modified_base 32: mod_base = OTHER; note = 2'-O-methyl modified nucleotide
  modified_base 37: mod_base = OTHER; note = 2'-O-methyl modified nucleotide
  modified_base 38: mod_base = OTHER; note = 2'-O-methyl modified nucleotide
  modified_base 39: mod_base = OTHER; note = 2'-O-methyl modified nucleotide
  modified_base 40: mod_base = OTHER; note = 2'-O-methyl modified nucleotide
  modified_base 41: mod_base = OTHER; note = 2'-O-methyl modified nucleotide
  modified_base 42: mod_base = OTHER; note = 2'-O-methyl modified nucleotide
  modified_base 43: mod_base = OTHER; note = 2'-O-methyl modified nucleotide
  modified_base 47: mod_base = OTHER; note = 2'-O-methyl modified nucleotide
  modified_base 48: mod_base = OTHER; note = 2'-O-methyl modified nucleotide
  modified_base 51: mod_base = OTHER; note = 2'-O-methyl modified nucleotide
  modified_base 54: mod_base = OTHER; note = nucleotide with phosphorothioate linkage
  modified_base 58: mod_base = OTHER; note = 2'-O-methyl modified nucleotide
  modified_base 59: mod_base = OTHER; note = 2'-O-methyl modified nucleotide
  modified_base 61: mod_base = OTHER; note = 2'-O-methyl modified nucleotide
  modified_base 62: mod_base = OTHER; note = 2'-O-methyl modified nucleotide
  modified_base 63: mod_base = OTHER; note = 2'-O-methyl modified nucleotide
  modified_base 64: mod_base = OTHER; note = 2'-O-methyl modified nucleotide
  modified_base 65: mod_base = OTHER; note = 2'-O-methyl modified nucleotide
  modified_base 66: mod_base = OTHER; note = 2'-O-methyl modified nucleotide
  modified_base 67: mod_base = OTHER; note = 2'-O-methyl modified nucleotide
  modified_base 68: mod_base = OTHER; note = 2'-O-methyl modified nucleotide
  modified_base 69: mod_base = OTHER; note = 2'-O-methyl modified nucleotide
  modified_base 70: mod_base = OTHER; note = 2'-O-methyl modified nucleotide
  modified_base 75: mod_base = OTHER; note = 2'-O-methyl modified nucleotide
  modified_base 77: mod_base = OTHER; note = 2'-O-methyl modified nucleotide
  modified_base 80: mod_base = OTHER; note = 2'-O-methyl modified nucleotide
  modified_base 86: mod_base = OTHER; note = 2'-O-methyl modified nucleotide
  modified_base 87: mod_base = OTHER; note = 2'-O-methyl modified nucleotide
  modified_base 89: mod_base = OTHER; note = 2'-O-methyl modified nucleotide
  modified_base 90: mod_base = OTHER; note = 2'-O-methyl modified nucleotide
  modified_base 91: mod_base = OTHER; note = 2'-O-methyl modified nucleotide
  modified_base 92: mod_base = OTHER; note = 2'-O-methyl modified nucleotide
  modified_base 99: mod_base = OTHER; note = nucleotide with phosphorothioate linkage
  modified_base 100: mod_base = OTHER; note = 2'-O-methyl modified nucleotide with phosphorothioate linkage
  modified_base 101: mod_base = OTHER; note = 2'-O-methyl modified nucleotide

SEQ ID NO: 2243 - RNA, 101 nt, synthetic construct; identical to SEQ ID NO: 1243
  source 1..101: mol_type = other RNA
  modified_base 1: mod_base = OTHER; note = 2'-O-methyl modified nucleotide with phosphorothioate linkage
  modified_base 2: mod_base = OTHER; note = 2'-O-methyl modified nucleotide with phosphorothioate linkage
  modified_base 3: mod_base = OTHER; note = 2'-O-methyl modified nucleotide with phosphorothioate linkage
  modified_base 4: mod_base = OTHER; note = 2'-O-methyl modified nucleotide
  modified_base 5: mod_base = OTHER; note = 2'-O-methyl modified nucleotide
  modified_base 8: mod_base = OTHER; note = 2'-O-methyl modified nucleotide
  modified_base 9: mod_base = OTHER; note = 2'-O-methyl modified nucleotide
  modified_base 11: mod_base = OTHER; note = 2'-O-methyl modified nucleotide
  modified_base 13: mod_base = OTHER; note = 2'-O-methyl modified nucleotide
  modified_base 18: mod_base = OTHER; note = 2'-O-methyl modified nucleotide
  modified_base 22: mod_base = OTHER; note = 2'-O-methyl modified nucleotide
  modified_base 25: mod_base = OTHER; note = 2'-O-methyl modified nucleotide
  modified_base 29: mod_base = OTHER; note = 2'-O-methyl modified nucleotide
  modified_base 30: mod_base = OTHER; note = 2'-O-methyl modified nucleotide
  modified_base 31: mod_base = OTHER; note = 2'-O-methyl modified nucleotide
  modified_base 32: mod_base = OTHER; note = 2'-O-methyl modified nucleotide
  modified_base 37: mod_base = OTHER; note = 2'-O-methyl modified nucleotide
  modified_base 38: mod_base = OTHER; note = 2'-O-methyl modified nucleotide
  modified_base 39: mod_base = OTHER; note = 2'-O-methyl modified nucleotide
  modified_base 40: mod_base = OTHER; note = 2'-O-methyl modified nucleotide
  modified_base 41: mod_base = OTHER; note = 2'-O-methyl modified nucleotide
  modified_base 42: mod_base = OTHER; note = 2'-O-methyl modified nucleotide
  modified_base 43: mod_base = OTHER; note = 2'-O-methyl modified nucleotide
  modified_base 47: mod_base = OTHER; note = 2'-O-methyl modified nucleotide
  modified_base 48: mod_base = OTHER; note = 2'-O-methyl modified nucleotide
  modified_base 51: mod_base = OTHER; note = 2'-O-methyl modified nucleotide
  modified_base 54: mod_base = OTHER; note = nucleotide with phosphorothioate linkage
  modified_base 58: mod_base = OTHER; note = 2'-O-methyl modified nucleotide
  modified_base 59: mod_base = OTHER; note = 2'-O-methyl modified nucleotide
  modified_base 61: mod_base = OTHER; note = 2'-O-methyl modified nucleotide
  modified_base 62: mod_base = OTHER; note = 2'-O-methyl modified nucleotide
  modified_base 63: mod_base = OTHER; note = 2'-O-methyl modified nucleotide
  modified_base 64: mod_base = OTHER; note = 2'-O-methyl modified nucleotide
  modified_base 65: mod_base = OTHER; note = 2'-O-methyl modified nucleotide
  modified_base 66: mod_base = OTHER; note = 2'-O-methyl modified nucleotide
  modified_base 67: mod_base = OTHER; note = 2'-O-methyl modified nucleotide
  modified_base 68: mod_base = OTHER; note = 2'-O-methyl modified nucleotide
  modified_base 69: mod_base = OTHER; note = 2'-O-methyl modified nucleotide
  modified_base 70: mod_base = OTHER; note = 2'-O-methyl modified nucleotide
  modified_base 75: mod_base = OTHER; note = 2'-O-methyl modified nucleotide
  modified_base 77: mod_base = OTHER; note = 2'-O-methyl modified nucleotide
  modified_base 80: mod_base = OTHER; note = 2'-O-methyl modified nucleotide
  modified_base 86: mod_base = OTHER; note = 2'-O-methyl modified nucleotide
  modified_base 87: mod_base = OTHER; note = 2'-O-methyl modified nucleotide
  modified_base 89: mod_base = OTHER; note = 2'-O-methyl modified nucleotide
  modified_base 90: mod_base = OTHER; note = 2'-O-methyl modified nucleotide
  modified_base 91: mod_base = OTHER; note = 2'-O-methyl modified nucleotide
  modified_base 92: mod_base = OTHER; note = 2'-O-methyl modified nucleotide
  modified_base 99: mod_base = OTHER; note = nucleotide with phosphorothioate linkage
  modified_base 100: mod_base = OTHER; note = 2'-O-methyl modified nucleotide with phosphorothioate linkage
  modified_base 101: mod_base = OTHER; note = 2'-O-methyl modified nucleotide

SEQ ID NO: 2244 - RNA, 101 nt, synthetic construct; identical to SEQ ID NO: 1244
  source 1..101: mol_type = other RNA
  modified_base 1: mod_base = OTHER; note = 2'-O-methyl modified nucleotide with phosphorothioate linkage
  modified_base 2: mod_base = OTHER; note = 2'-O-methyl modified nucleotide with phosphorothioate linkage
  modified_base 3: mod_base = OTHER; note = 2'-O-methyl modified nucleotide with phosphorothioate linkage
  modified_base 4: mod_base = OTHER; note = 2'-O-methyl modified nucleotide
  modified_base 5: mod_base = OTHER; note = 2'-O-methyl modified nucleotide
  modified_base 8: mod_base = OTHER; note = 2'-O-methyl modified nucleotide
  modified_base 9: mod_base = OTHER; note = 2'-O-methyl modified nucleotide
  modified_base 11: mod_base = OTHER; note = 2'-O-methyl modified nucleotide
  modified_base 13: mod_base = OTHER; note = 2'-O-methyl modified nucleotide
  modified_base 18: mod_base = OTHER; note = 2'-O-methyl modified nucleotide
  modified_base 22: mod_base = OTHER; note = 2'-O-methyl modified nucleotide
  modified_base 25: mod_base = OTHER; note = 2'-O-methyl modified nucleotide
  modified_base 29: mod_base = OTHER; note = 2'-O-methyl modified nucleotide
  modified_base 30: mod_base = OTHER; note = 2'-O-methyl modified nucleotide
  modified_base 31: mod_base = OTHER; note = 2'-O-methyl modified nucleotide
  modified_base 32: mod_base = OTHER; note = 2'-O-methyl modified nucleotide
  modified_base 37: mod_base = OTHER; note = 2'-O-methyl modified nucleotide
  modified_base 38: mod_base = OTHER; note = 2'-O-methyl modified nucleotide
  modified_base 39: mod_base = OTHER; note = 2'-O-methyl modified nucleotide
  modified_base 40: mod_base = OTHER; note = 2'-O-methyl modified nucleotide
  modified_base 41: mod_base = OTHER; note = 2'-O-methyl modified nucleotide
  modified_base 42: mod_base = OTHER; note = 2'-O-methyl modified nucleotide
  modified_base 43: mod_base = OTHER; note = 2'-O-methyl modified nucleotide
  modified_base 47: mod_base = OTHER; note = 2'-O-methyl modified nucleotide
  modified_base 48: mod_base = OTHER; note = 2'-O-methyl modified nucleotide
  modified_base 51: mod_base = OTHER; note = 2'-O-methyl modified nucleotide
  modified_base 54: mod_base = OTHER; note = nucleotide with phosphorothioate linkage
  modified_base 58: mod_base = OTHER; note = 2'-O-methyl modified nucleotide
  modified_base 59: mod_base = OTHER; note = 2'-O-methyl modified nucleotide
  modified_base 61: mod_base = OTHER; note = 2'-O-methyl modified nucleotide
  modified_base 62: mod_base = OTHER; note = 2'-O-methyl modified nucleotide
  modified_base 63: mod_base = OTHER; note = 2'-O-methyl modified nucleotide
  modified_base 64: mod_base = OTHER; note = 2'-O-methyl modified nucleotide
  modified_base 65: mod_base = OTHER; note = 2'-O-methyl modified nucleotide
  modified_base 66: mod_base = OTHER; note = 2'-O-methyl modified nucleotide
  modified_base 67: mod_base = OTHER; note = 2'-O-methyl modified nucleotide
  modified_base 68: mod_base = OTHER; note = 2'-O-methyl modified nucleotide
  modified_base 69: mod_base = OTHER; note = 2'-O-methyl modified nucleotide
  modified_base 70: mod_base = OTHER; note = 2'-O-methyl modified nucleotide
  modified_base 75: mod_base = OTHER; note = 2'-O-methyl modified nucleotide
  modified_base 77: mod_base = OTHER; note = 2'-O-methyl modified nucleotide
  modified_base 80: mod_base = OTHER; note = 2'-O-methyl modified nucleotide
  modified_base 86: mod_base = OTHER; note = 2'-O-methyl modified nucleotide
  modified_base 87: mod_base = OTHER; note = 2'-O-methyl modified nucleotide
  modified_base 89: mod_base = OTHER; note = 2'-O-methyl modified nucleotide
  modified_base 90: mod_base = OTHER; note = 2'-O-methyl modified nucleotide
  modified_base 91: mod_base = OTHER; note = 2'-O-methyl modified nucleotide
  modified_base 92: mod_base = OTHER; note = 2'-O-methyl modified nucleotide
  modified_base 99: mod_base = OTHER; note = nucleotide with phosphorothioate linkage
  modified_base 100: mod_base = OTHER; note = 2'-O-methyl modified nucleotide with phosphorothioate linkage
  modified_base 101: mod_base = OTHER; note = 2'-O-methyl modified nucleotide

SEQ ID NO: 2245 - RNA, 101 nt, synthetic construct; identical to SEQ ID NO: 1245
  source 1..101: mol_type = other RNA
  modified_base 1: mod_base = OTHER; note = 2'-O-methyl modified nucleotide with phosphorothioate linkage
  modified_base 2: mod_base = OTHER; note = 2'-O-methyl modified nucleotide with phosphorothioate linkage
  modified_base 3: mod_base = OTHER; note = 2'-O-methyl modified nucleotide with phosphorothioate linkage
  modified_base 4: mod_base = OTHER; note = 2'-O-methyl modified nucleotide
  modified_base 5: mod_base = OTHER; note = 2'-O-methyl modified nucleotide
  modified_base 8: mod_base = OTHER; note = 2'-O-methyl modified nucleotide
  modified_base 9: mod_base = OTHER; note = 2'-O-methyl modified nucleotide
  modified_base 11: mod_base = OTHER; note = 2'-O-methyl modified nucleotide
  modified_base 13: mod_base = OTHER; note = 2'-O-methyl modified nucleotide
  modified_base 18: mod_base = OTHER; note = 2'-O-methyl modified nucleotide
  modified_base 22: mod_base = OTHER; note = 2'-O-methyl modified nucleotide
  modified_base 25: mod_base = OTHER; note = 2'-O-methyl modified nucleotide
  modified_base 29: mod_base = OTHER; note = 2'-O-methyl modified nucleotide
  modified_base 30: mod_base = OTHER; note = 2'-O-methyl modified nucleotide
  modified_base 31: mod_base = OTHER; note = 2'-O-methyl modified nucleotide
  modified_base 32: mod_base = OTHER; note = 2'-O-methyl modified nucleotide
  modified_base 37: mod_base = OTHER; note = 2'-O-methyl modified nucleotide
  modified_base 38: mod_base = OTHER; note = 2'-O-methyl modified nucleotide
  modified_base 39: mod_base = OTHER; note = 2'-O-methyl modified nucleotide
  modified_base 40: mod_base = OTHER; note = 2'-O-methyl modified nucleotide
  modified_base 41: mod_base = OTHER; note = 2'-O-methyl modified nucleotide
  modified_base 42: mod_base = OTHER; note = 2'-O-methyl modified nucleotide
  modified_base 43: mod_base = OTHER; note = 2'-O-methyl modified nucleotide
  modified_base 47: mod_base = OTHER; note = 2'-O-methyl modified nucleotide
  modified_base 48: mod_base = OTHER; note = 2'-O-methyl modified nucleotide
  modified_base 51: mod_base = OTHER; note = 2'-O-methyl modified nucleotide
  modified_base 54: mod_base = OTHER; note = nucleotide with phosphorothioate linkage
  modified_base 58: mod_base = OTHER; note = 2'-O-methyl modified nucleotide
  modified_base 59: mod_base = OTHER; note = 2'-O-methyl modified nucleotide
  modified_base 61: mod_base = OTHER; note = 2'-O-methyl modified nucleotide
  modified_base 62: mod_base = OTHER; note = 2'-O-methyl modified nucleotide
  modified_base 63: mod_base = OTHER; note = 2'-O-methyl modified nucleotide
  modified_base 64: mod_base = OTHER; note = 2'-O-methyl modified nucleotide
  modified_base 65: mod_base = OTHER; note = 2'-O-methyl modified nucleotide
  modified_base 66: mod_base = OTHER; note = 2'-O-methyl modified nucleotide
  modified_base 67: mod_base = OTHER; note = 2'-O-methyl modified nucleotide
  modified_base 68: mod_base = OTHER; note = 2'-O-methyl modified nucleotide
  modified_base 69: mod_base = OTHER; note = 2'-O-methyl modified nucleotide
  modified_base 70: mod_base = OTHER; note = 2'-O-methyl modified nucleotide
  modified_base 75: mod_base = OTHER; note = 2'-O-methyl modified nucleotide
  modified_base 77: mod_base = OTHER; note = 2'-O-methyl modified nucleotide
  modified_base 80: mod_base = OTHER; note = 2'-O-methyl modified nucleotide
  modified_base 86: mod_base = OTHER; note = 2'-O-methyl modified nucleotide
  modified_base 87: mod_base = OTHER; note = 2'-O-methyl modified nucleotide
  modified_base 89: mod_base = OTHER; note = 2'-O-methyl modified nucleotide
  modified_base 90: mod_base = OTHER; note = 2'-O-methyl modified nucleotide
  modified_base 91: mod_base = OTHER; note = 2'-O-methyl modified nucleotide
  modified_base 92: mod_base = OTHER; note = 2'-O-methyl modified nucleotide
  modified_base 99: mod_base = OTHER; note = nucleotide with phosphorothioate linkage
  modified_base 100: mod_base = OTHER; note = 2'-O-methyl modified nucleotide with phosphorothioate linkage
  modified_base 101: mod_base = OTHER; note = 2'-O-methyl modified nucleotide

SEQ ID NO: 2246 - RNA, 91 nt, synthetic construct; identical to SEQ ID NO: 1246
  source 1..91: mol_type = other RNA
  modified_base 1: mod_base = OTHER; note = 2'-O-methyl modified nucleotide with phosphorothioate linkage
  modified_base 2: mod_base = OTHER; note = 2'-O-methyl modified nucleotide with phosphorothioate linkage
  modified_base 3: mod_base = OTHER; note = 2'-O-methyl modified nucleotide with phosphorothioate linkage
  modified_base 29: mod_base = OTHER; note = 2'-O-methyl modified nucleotide
  modified_base 30: mod_base = OTHER; note = 2'-O-methyl modified nucleotide
  modified_base 31: mod_base = OTHER; note = 2'-O-methyl modified nucleotide
  modified_base 32: mod_base = OTHER; note = 2'-O-methyl modified nucleotide
  modified_base 33: mod_base = OTHER; note = 2'-O-methyl modified nucleotide
  modified_base 34: mod_base = OTHER; note = 2'-O-methyl modified nucleotide
  modified_base 35: mod_base = OTHER; note = 2'-O-methyl modified nucleotide
  modified_base 36: mod_base = OTHER; note = 2'-O-methyl modified nucleotide
  modified_base 37: mod_base = OTHER; note = 2'-O-methyl modified nucleotide
  modified_base 38: mod_base = OTHER; note = 2'-O-methyl modified nucleotide
  modified_base 39: mod_base = OTHER; note = 2'-O-methyl modified nucleotide
  modified_base 40: mod_base = OTHER; note = 2'-O-methyl modified nucleotide
  modified_base 88: mod_base = OTHER; note = 2'-O-methyl modified nucleotide with phosphorothioate linkage
  modified_base 89: mod_base = OTHER; note = 2'-O-methyl modified nucleotide with phosphorothioate linkage
  modified_base 90: mod_base = OTHER; note = 2'-O-methyl modified nucleotide with phosphorothioate linkage
  modified_base 91: mod_base = OTHER; note = 2'-O-methyl modified nucleotide

SEQ ID NO: 2247 - RNA, 101 nt, synthetic construct; identical to SEQ ID NO: 1247
  source 1..101: mol_type = other RNA
  modified_base 1: mod_base = OTHER; note = 2'-O-methyl modified nucleotide with phosphorothioate linkage
  modified_base 2: mod_base = OTHER; note = 2'-O-methyl modified nucleotide with phosphorothioate linkage
  modified_base 3: mod_base = OTHER; note = 2'-O-methyl modified nucleotide with phosphorothioate linkage
  modified_base 4: mod_base = OTHER; note = 2'-O-methyl modified nucleotide
  modified_base 5: mod_base = OTHER; note = 2'-O-methyl modified nucleotide
  modified_base 8: mod_base = OTHER; note = 2'-O-methyl modified nucleotide
  modified_base 9: mod_base = OTHER; note = 2'-O-methyl modified nucleotide
  modified_base 11: mod_base = OTHER; note = 2'-O-methyl modified nucleotide
  modified_base 13: mod_base = OTHER; note = 2'-O-methyl modified nucleotide
  modified_base 18: mod_base = OTHER; note = 2'-O-methyl modified nucleotide
  modified_base 22: mod_base = OTHER; note = 2'-O-methyl modified nucleotide
  modified_base 25: mod_base = OTHER; note = 2'-O-methyl modified nucleotide
  modified_base 29: mod_base = OTHER; note = 2'-O-methyl modified nucleotide
  modified_base 30: mod_base = OTHER; note = 2'-O-methyl modified nucleotide
  modified_base 31: mod_base = OTHER; note = 2'-O-methyl modified nucleotide
  modified_base 32: mod_base = OTHER; note = 2'-O-methyl modified nucleotide
  modified_base 37: mod_base = OTHER; note = 2'-O-methyl modified nucleotide
  modified_base 38: mod_base = OTHER; note = 2'-O-methyl modified nucleotide
  modified_base 39: mod_base = OTHER; note = 2'-O-methyl modified nucleotide
  modified_base 40: mod_base = OTHER; note = 2'-O-methyl modified nucleotide
  modified_base 41: mod_base = OTHER; note = 2'-O-methyl modified nucleotide
  modified_base 42: mod_base = OTHER; note = 2'-O-methyl modified nucleotide
  modified_base 43: mod_base = OTHER; note = 2'-O-methyl modified nucleotide
  modified_base 47: mod_base = OTHER; note = 2'-O-methyl modified nucleotide
  modified_base 48: mod_base = OTHER; note = 2'-O-methyl modified nucleotide
  modified_base 51: mod_base = OTHER; note = 2'-O-methyl modified nucleotide
  modified_base 54: mod_base = OTHER; note = nucleotide with phosphorothioate linkage
  modified_base 58: mod_base = OTHER; note = 2'-O-methyl modified nucleotide
  modified_base 59: mod_base = OTHER; note = 2'-O-methyl modified nucleotide
  modified_base 61: mod_base = OTHER; note = 2'-O-methyl modified nucleotide
  modified_base 62: mod_base = OTHER; note = 2'-O-methyl modified nucleotide
  modified_base 63: mod_base = OTHER; note = 2'-O-methyl modified nucleotide
  modified_base 64: mod_base = OTHER; note = 2'-O-methyl modified nucleotide
  modified_base 65: mod_base = OTHER; note = 2'-O-methyl modified nucleotide
  modified_base 66: mod_base = OTHER; note = 2'-O-methyl modified nucleotide
  modified_base 67: mod_base = OTHER; note = 2'-O-methyl modified nucleotide
  modified_base 68: mod_base = OTHER; note = 2'-O-methyl modified nucleotide
  modified_base 69: mod_base = OTHER; note = 2'-O-methyl modified nucleotide
  modified_base 70: mod_base = OTHER; note = 2'-O-methyl modified nucleotide
  modified_base 75: mod_base = OTHER; note = 2'-O-methyl modified nucleotide
  modified_base 77: mod_base = OTHER; note = 2'-O-methyl modified nucleotide
  modified_base 80: mod_base = OTHER; note = 2'-O-methyl modified nucleotide
  modified_base 86: mod_base = OTHER; note = 2'-O-methyl modified nucleotide
  modified_base 87: mod_base = OTHER; note = 2'-O-methyl modified nucleotide
  modified_base 89: mod_base = OTHER; note = 2'-O-methyl modified nucleotide
  modified_base 90: mod_base = OTHER; note = 2'-O-methyl modified nucleotide
  modified_base 91: mod_base = OTHER; note = 2'-O-methyl modified nucleotide
  modified_base 92: mod_base = OTHER; note = 2'-O-methyl modified nucleotide
  modified_base 99: mod_base = OTHER; note = nucleotide with phosphorothioate linkage
  modified_base 100: mod_base = OTHER; note = 2'-O-methyl modified nucleotide with phosphorothioate linkage
  modified_base 101: mod_base = OTHER; note = 2'-O-methyl modified nucleotide

SEQ ID NO: 2248 - RNA, 101 nt, synthetic construct; identical to SEQ ID NO: 1248
  source 1..101: mol_type = other RNA
  modified_base 1: mod_base = OTHER; note = 2'-O-methyl modified nucleotide with phosphorothioate linkage
  modified_base 2: mod_base = OTHER; note = 2'-O-methyl modified nucleotide with phosphorothioate linkage
  modified_base 3: mod_base = OTHER; note = 2'-O-methyl modified nucleotide with phosphorothioate linkage
  modified_base 4: mod_base = OTHER; note = 2'-O-methyl modified nucleotide
  modified_base 5: mod_base = OTHER; note = 2'-O-methyl modified nucleotide
  modified_base 8: mod_base = OTHER; note = 2'-O-methyl modified nucleotide
  modified_base 9: mod_base = OTHER; note = 2'-O-methyl modified nucleotide
  modified_base 11: mod_base = OTHER; note = 2'-O-methyl modified nucleotide
  modified_base 13: mod_base = OTHER; note = 2'-O-methyl modified nucleotide
  modified_base 18: mod_base = OTHER; note = 2'-O-methyl modified nucleotide
  modified_base 22: mod_base = OTHER; note = 2'-O-methyl modified nucleotide
  modified_base 25: mod_base = OTHER; note = 2'-O-methyl modified nucleotide
  modified_base 29: mod_base = OTHER; note = 2'-O-methyl modified nucleotide
  modified_base 30: mod_base = OTHER; note = 2'-O-methyl modified nucleotide
  modified_base 31: mod_base = OTHER; note = 2'-O-methyl modified nucleotide
  modified_base 32: mod_base = OTHER; note = 2'-O-methyl modified nucleotide
  modified_base 37: mod_base = OTHER; note = 2'-O-methyl modified nucleotide
  modified_base 38: mod_base = OTHER; note = 2'-O-methyl modified nucleotide
  modified_base 39: mod_base = OTHER; note = 2'-O-methyl modified nucleotide
  modified_base 40: mod_base = OTHER; note = 2'-O-methyl modified nucleotide
  modified_base 41: mod_base = OTHER; note = 2'-O-methyl modified nucleotide
  modified_base 42: mod_base = OTHER; note = 2'-O-methyl modified nucleotide
  modified_base 43: mod_base = OTHER; note = 2'-O-methyl modified nucleotide
  modified_base 47: mod_base = OTHER; note = 2'-O-methyl modified nucleotide
  modified_base 48: mod_base = OTHER; note = 2'-O-methyl modified nucleotide
  modified_base 51: mod_base = OTHER; note = 2'-O-methyl modified nucleotide
  modified_base 54: mod_base = OTHER; note = nucleotide with phosphorothioate linkage
  modified_base 58: mod_base = OTHER; note = 2'-O-methyl modified nucleotide
  modified_base 59: mod_base = OTHER; note = 2'-O-methyl modified nucleotide
  modified_base 61: mod_base = OTHER; note = 2'-O-methyl modified nucleotide
  modified_base 62: mod_base = OTHER; note = 2'-O-methyl modified nucleotide
  modified_base 63: mod_base = OTHER; note = 2'-O-methyl modified nucleotide
  modified_base 64: mod_base = OTHER; note = 2'-O-methyl modified nucleotide
  modified_base 65: mod_base = OTHER; note = 2'-O-methyl modified nucleotide
  modified_base 66: mod_base = OTHER; note = 2'-O-methyl modified nucleotide
  modified_base 67: mod_base = OTHER; note = 2'-O-methyl modified nucleotide
  modified_base 68: mod_base = OTHER; note = 2'-O-methyl modified nucleotide
  modified_base 69: mod_base = OTHER; note = 2'-O-methyl modified nucleotide
  modified_base 70: mod_base = OTHER; note = 2'-O-methyl modified nucleotide
  modified_base 75: mod_base = OTHER; note = 2'-O-methyl modified nucleotide
  modified_base 77: mod_base = OTHER; note = 2'-O-methyl modified nucleotide
  modified_base 80: mod_base = OTHER; note = 2'-O-methyl modified nucleotide
  modified_base 86: mod_base = OTHER; note = 2'-O-methyl modified nucleotide
  modified_base 87: mod_base = OTHER; note = 2'-O-methyl modified nucleotide
  modified_base 89: mod_base = OTHER; note = 2'-O-methyl modified nucleotide
  modified_base 90: mod_base = OTHER; note = 2'-O-methyl modified nucleotide
  modified_base 91: mod_base = OTHER; note = 2'-O-methyl modified nucleotide
  modified_base 92: mod_base = OTHER; note = 2'-O-methyl modified nucleotide
  modified_base 99: mod_base = OTHER; note = nucleotide with phosphorothioate linkage
  modified_base 100: mod_base = OTHER; note = 2'-O-methyl modified nucleotide with phosphorothioate linkage
  modified_base 101: mod_base = OTHER; note = 2'-O-methyl modified nucleotide

SEQ ID NO: 2249 - RNA, 101 nt, synthetic construct; identical to SEQ ID NO: 1249
  source 1..101: mol_type = other RNA
  modified_base 1: mod_base = OTHER; note = 2'-O-methyl modified nucleotide with phosphorothioate linkage
  modified_base 2: mod_base = OTHER; note = 2'-O-methyl modified nucleotide with phosphorothioate linkage
  modified_base 3: mod_base = OTHER; note = 2'-O-methyl modified nucleotide with phosphorothioate linkage
  modified_base 4: mod_base = OTHER; note = 2'-O-methyl modified nucleotide
  modified_base 5: mod_base = OTHER; note = 2'-O-methyl modified nucleotide
  modified_base 8: mod_base = OTHER; note = 2'-O-methyl modified nucleotide
  modified_base 9: mod_base = OTHER; note = 2'-O-methyl modified nucleotide
  modified_base 11: mod_base = OTHER; note = 2'-O-methyl modified nucleotide
  modified_base 13: mod_base = OTHER; note = 2'-O-methyl modified nucleotide
  modified_base 18: mod_base = OTHER; note = 2'-O-methyl modified nucleotide
  modified_base 22: mod_base = OTHER; note = 2'-O-methyl modified nucleotide
  modified_base 25: mod_base = OTHER; note = 2'-O-methyl modified nucleotide
  modified_base 29: mod_base = OTHER; note = 2'-O-methyl modified nucleotide
  modified_base 30: mod_base = OTHER; note = 2'-O-methyl modified nucleotide
  modified_base 31: mod_base = OTHER; note = 2'-O-methyl modified nucleotide
  modified_base 32: mod_base = OTHER; note = 2'-O-methyl modified nucleotide
  modified_base 37: mod_base = OTHER; note = 2'-O-methyl modified nucleotide
  modified_base 38: mod_base = OTHER; note = 2'-O-methyl modified nucleotide
  modified_base 39: mod_base = OTHER; note = 2'-O-methyl modified nucleotide
  modified_base 40: mod_base = OTHER; note = 2'-O-methyl modified nucleotide
  modified_base 41: mod_base = OTHER; note = 2'-O-methyl modified nucleotide
  modified_base 42: mod_base = OTHER; note = 2'-O-methyl modified nucleotide
  modified_base 43: mod_base = OTHER; note = 2'-O-methyl modified nucleotide
  modified_base 47: mod_base = OTHER; note = 2'-O-methyl modified nucleotide
  modified_base 48: mod_base = OTHER; note = 2'-O-methyl modified nucleotide
  modified_base 51: mod_base = OTHER; note = 2'-O-methyl modified nucleotide
  modified_base 54: mod_base = OTHER; note = nucleotide with phosphorothioate linkage
  modified_base 58: mod_base = OTHER; note = 2'-O-methyl modified nucleotide
  modified_base 59: mod_base = OTHER; note = 2'-O-methyl modified nucleotide
  modified_base 61: mod_base = OTHER; note = 2'-O-methyl modified nucleotide
  modified_base 62: mod_base = OTHER; note = 2'-O-methyl modified nucleotide
  modified_base 63: mod_base = OTHER; note = 2'-O-methyl modified nucleotide
  modified_base 64: mod_base = OTHER; note = 2'-O-methyl modified nucleotide
  modified_base 65: mod_base = OTHER; note = 2'-O-methyl modified nucleotide
  modified_base 66: mod_base = OTHER; note = 2'-O-methyl modified nucleotide
  modified_base 67: mod_base = OTHER; note = 2'-O-methyl modified nucleotide
  modified_base 68: mod_base = OTHER; note = 2'-O-methyl modified nucleotide
  modified_base 69: mod_base = OTHER; note = 2'-O-methyl modified nucleotide
  modified_base 70: mod_base = OTHER; note = 2'-O-methyl modified nucleotide
  modified_base 75: mod_base = OTHER; note = 2'-O-methyl modified nucleotide
  modified_base 77: mod_base = OTHER; note = 2'-O-methyl modified nucleotide
  modified_base 80: mod_base = OTHER; note = 2'-O-methyl modified nucleotide
  modified_base 86: mod_base = OTHER; note = 2'-O-methyl modified nucleotide
  modified_base 87: mod_base = OTHER; note = 2'-O-methyl modified nucleotide
  modified_base 89: mod_base = OTHER; note = 2'-O-methyl modified nucleotide
  modified_base 90: mod_base = OTHER; note = 2'-O-methyl modified nucleotide
  modified_base 91: mod_base = OTHER; note = 2'-O-methyl modified nucleotide
  modified_base 92: mod_base = OTHER; note = 2'-O-methyl modified nucleotide
  modified_base 99: mod_base = OTHER; note = nucleotide with phosphorothioate linkage
  modified_base 100: mod_base = OTHER; note = 2'-O-methyl modified nucleotide with phosphorothioate linkage
  modified_base 101: mod_base = OTHER; note = 2'-O-methyl modified nucleotide

SEQ ID NO: 2250 - RNA, 101 nt, synthetic construct; identical to SEQ ID NO: 1250
  source 1..101: mol_type = other RNA
  modified_base 1: mod_base = OTHER; note = 2'-O-methyl modified nucleotide with phosphorothioate linkage
  modified_base 2: mod_base = OTHER; note = 2'-O-methyl modified nucleotide with phosphorothioate linkage
  modified_base 3: mod_base = OTHER; note = 2'-O-methyl modified nucleotide with phosphorothioate linkage
  modified_base 4: mod_base = OTHER; note = 2'-O-methyl modified nucleotide
  modified_base 5: mod_base = OTHER; note = 2'-O-methyl modified nucleotide
  modified_base 8: mod_base = OTHER; note = 2'-O-methyl modified nucleotide
  modified_base 9: mod_base = OTHER; note = 2'-O-methyl modified nucleotide
  modified_base 11: mod_base = OTHER; note = 2'-O-methyl modified nucleotide
  modified_base 13: mod_base = OTHER; note = 2'-O-methyl modified nucleotide
  modified_base 18: mod_base = OTHER; note = 2'-O-methyl modified nucleotide
  modified_base 22: mod_base = OTHER; note = 2'-O-methyl modified nucleotide
  modified_base 25: mod_base = OTHER; note = 2'-O-methyl modified nucleotide
  modified_base 29: mod_base = OTHER; note = 2'-O-methyl modified nucleotide
  modified_base 30: mod_base = OTHER; note = 2'-O-methyl modified nucleotide
  modified_base 31: mod_base = OTHER; note = 2'-O-methyl modified nucleotide
  modified_base 32: mod_base = OTHER; note = 2'-O-methyl modified nucleotide
  modified_base 37: mod_base = OTHER; note = 2'-O-methyl modified nucleotide
  modified_base 38: mod_base = OTHER; note = 2'-O-methyl modified nucleotide
  modified_base 39: mod_base = OTHER; note = 2'-O-methyl modified nucleotide
  modified_base 40: mod_base = OTHER; note = 2'-O-methyl modified nucleotide
  modified_base 41: mod_base = OTHER; note = 2'-O-methyl modified nucleotide
  modified_base 42: mod_base = OTHER; note = 2'-O-methyl modified nucleotide
  modified_base 43: mod_base = OTHER; note = 2'-O-methyl modified nucleotide
  modified_base 47: mod_base = OTHER; note = 2'-O-methyl modified nucleotide
  modified_base 48: mod_base = OTHER; note = 2'-O-methyl modified nucleotide
  modified_base 51: mod_base = OTHER; note = 2'-O-methyl modified nucleotide
  modified_base 54: mod_base = OTHER; note = nucleotide with phosphorothioate linkage
  modified_base 58: mod_base = OTHER; note = 2'-O-methyl modified nucleotide
  modified_base 59: mod_base = OTHER; note = 2'-O-methyl modified nucleotide
  modified_base 61: mod_base = OTHER; note = 2'-O-methyl modified nucleotide
  modified_base 62: mod_base = OTHER; note = 2'-O-methyl modified nucleotide
  modified_base 63: mod_base = OTHER; note = 2'-O-methyl modified nucleotide
  modified_base 64: mod_base = OTHER; note = 2'-O-methyl modified nucleotide
  modified_base 65: mod_base = OTHER; note = 2'-O-methyl modified nucleotide
  modified_base 66: mod_base = OTHER; note = 2'-O-methyl modified nucleotide
  modified_base 67: mod_base = OTHER; note = 2'-O-methyl modified nucleotide
  modified_base 68: mod_base = OTHER; note = 2'-O-methyl modified nucleotide
  modified_base 69: mod_base = OTHER; note = 2'-O-methyl modified nucleotide
  modified_base 70: mod_base = OTHER; note = 2'-O-methyl modified nucleotide
  modified_base 75: mod_base = OTHER; note = 2'-O-methyl modified nucleotide
  modified_base 77: mod_base = OTHER; note = 2'-O-methyl modified nucleotide
  modified_base 80: mod_base = OTHER; note = 2'-O-methyl modified nucleotide
  modified_base 86: mod_base = OTHER; note = 2'-O-methyl modified nucleotide
  modified_base 87: mod_base = OTHER; note = 2'-O-methyl modified nucleotide
  modified_base 89: mod_base = OTHER; note = 2'-O-methyl modified nucleotide
  modified_base 90: mod_base = OTHER; note = 2'-O-methyl modified nucleotide
  modified_base 91: mod_base = OTHER; note = 2'-O-methyl modified nucleotide
  modified_base 92: mod_base = OTHER; note = 2'-O-methyl modified nucleotide
  modified_base 99: mod_base = OTHER; note = nucleotide with phosphorothioate linkage
  modified_base 100: mod_base = OTHER; note = 2'-O-methyl modified nucleotide with phosphorothioate linkage
  modified_base 101: mod_base = OTHER; note = 2'-O-methyl modified nucleotide

SEQ ID NO: 2251 - RNA, 101 nt, synthetic construct; identical to SEQ ID NO: 1251
  source 1..101: mol_type = other RNA
  modified_base 1: mod_base = OTHER; note = 2'-O-methyl modified nucleotide with phosphorothioate linkage
  modified_base 2: mod_base = OTHER; note = 2'-O-methyl modified nucleotide with phosphorothioate linkage
  modified_base 3: mod_base = OTHER; note = 2'-O-methyl modified nucleotide with phosphorothioate linkage
  modified_base 4: mod_base = OTHER; note = 2'-O-methyl modified nucleotide
  modified_base 5: mod_base = OTHER; note = 2'-O-methyl modified nucleotide
  modified_base 8: mod_base = OTHER; note = 2'-O-methyl modified nucleotide
  modified_base 9: mod_base = OTHER; note = 2'-O-methyl modified nucleotide
  modified_base 11: mod_base = OTHER; note = 2'-O-methyl modified nucleotide
  modified_base 13: mod_base = OTHER; note = 2'-O-methyl modified nucleotide
  modified_base 18: mod_base = OTHER; note = 2'-O-methyl modified nucleotide
  modified_base 22: mod_base = OTHER; note = 2'-O-methyl modified nucleotide
  modified_base 25: mod_base = OTHER; note = 2'-O-methyl modified nucleotide
  modified_base 29: mod_base = OTHER; note = 2'-O-methyl modified nucleotide
  modified_base 30: mod_base = OTHER; note = 2'-O-methyl modified nucleotide
  modified_base 31: mod_base = OTHER; note = 2'-O-methyl modified nucleotide
  modified_base 32: mod_base = OTHER; note = 2'-O-methyl modified nucleotide
  modified_base 37: mod_base = OTHER; note = 2'-O-methyl modified nucleotide
  modified_base 38: mod_base = OTHER; note = 2'-O-methyl modified nucleotide
  modified_base 39: mod_base = OTHER; note = 2'-O-methyl modified nucleotide
  modified_base 40: mod_base = OTHER; note = 2'-O-methyl modified nucleotide
  modified_base 41: mod_base = OTHER; note = 2'-O-methyl modified nucleotide
  modified_base 42: mod_base = OTHER; note = 2'-O-methyl modified nucleotide
  modified_base 43: mod_base = OTHER; note = 2'-O-methyl modified nucleotide
  modified_base 47: mod_base = OTHER; note = 2'-O-methyl modified nucleotide
  modified_base 48: mod_base = OTHER; note = 2'-O-methyl modified nucleotide
  modified_base 51: mod_base = OTHER; note = 2'-O-methyl modified nucleotide
  modified_base 54: mod_base = OTHER; note = nucleotide with phosphorothioate linkage
  modified_base 58: mod_base = OTHER; note = 2'-O-methyl modified nucleotide
  modified_base 59: mod_base = OTHER; note = 2'-O-methyl modified nucleotide
  modified_base 61: mod_base = OTHER; note = 2'-O-methyl modified nucleotide
  modified_base 62: mod_base = OTHER; note = 2'-O-methyl modified nucleotide
  modified_base 63: mod_base = OTHER; note = 2'-O-methyl modified nucleotide
  modified_base 64: mod_base = OTHER; note = 2'-O-methyl modified nucleotide
  modified_base 65: mod_base = OTHER; note = 2'-O-methyl modified nucleotide
  modified_base 66: mod_base = OTHER; note = 2'-O-methyl modified nucleotide
  modified_base 67: mod_base = OTHER; note = 2'-O-methyl modified nucleotide
  modified_base 68: mod_base = OTHER; note = 2'-O-methyl modified nucleotide
  modified_base 69: mod_base = OTHER; note = 2'-O-methyl modified nucleotide
  modified_base 70: mod_base = OTHER; note = 2'-O-methyl modified nucleotide
  modified_base 75: mod_base = OTHER; note = 2'-O-methyl modified nucleotide
  modified_base 77: mod_base = OTHER; note = 2'-O-methyl modified nucleotide
  modified_base 80: mod_base = OTHER; note = 2'-O-methyl modified nucleotide
  modified_base 86: mod_base = OTHER; note = 2'-O-methyl modified nucleotide
  modified_base 87: mod_base = OTHER; note = 2'-O-methyl modified nucleotide
  modified_base 89: mod_base = OTHER; note = 2'-O-methyl modified nucleotide
  modified_base 90: mod_base = OTHER; note = 2'-O-methyl modified nucleotide
  modified_base 91: mod_base = OTHER; note = 2'-O-methyl modified nucleotide
  modified_base 92: mod_base = OTHER; note = 2'-O-methyl modified nucleotide
  modified_base 99: mod_base = OTHER; note = nucleotide with phosphorothioate linkage
  modified_base 100: mod_base = OTHER; note = 2'-O-methyl modified nucleotide with phosphorothioate linkage
  modified_base 101: mod_base = OTHER; note = 2'-O-methyl modified nucleotide

SEQ ID NO: 2252 - RNA, 101 nt, synthetic construct; identical to SEQ ID NO: 1252
  source 1..101: mol_type = other RNA
  modified_base 1: mod_base = OTHER; note = 2'-O-methyl modified nucleotide with phosphorothioate linkage
  modified_base 2: mod_base = OTHER; note = 2'-O-methyl modified nucleotide with phosphorothioate linkage
  modified_base 3: mod_base = OTHER; note = 2'-O-methyl modified nucleotide with phosphorothioate linkage
  modified_base 4: mod_base = OTHER; note = 2'-O-methyl modified nucleotide
  modified_base 5: mod_base = OTHER; note = 2'-O-methyl modified nucleotide
  modified_base 8: mod_base = OTHER; note = 2'-O-methyl modified nucleotide
  modified_base 9: mod_base = OTHER; note = 2'-O-methyl modified nucleotide
  modified_base 11: mod_base = OTHER; note = 2'-O-methyl modified nucleotide
  modified_base 13: mod_base = OTHER; note = 2'-O-methyl modified nucleotide
  modified_base 18: mod_base = OTHER; note = 2'-O-methyl modified nucleotide
  modified_base 22: mod_base = OTHER; note = 2'-O-methyl modified nucleotide
  modified_base 25: mod_base = OTHER; note = 2'-O-methyl modified nucleotide
  modified_base 29: mod_base = OTHER; note = 2'-O-methyl modified nucleotide
  modified_base 30: mod_base = OTHER; note = 2'-O-methyl modified nucleotide
  modified_base 31: mod_base = OTHER; note = 2'-O-methyl modified nucleotide
  modified_base 32: mod_base = OTHER; note = 2'-O-methyl modified nucleotide
  modified_base 37: mod_base = OTHER; note = 2'-O-methyl modified nucleotide
  modified_base 38: mod_base = OTHER; note = 2'-O-methyl modified nucleotide
  modified_base 39: mod_base = OTHER; note = 2'-O-methyl modified nucleotide
  modified_base 40: mod_base = OTHER; note = 2'-O-methyl modified nucleotide
  modified_base 41: mod_base = OTHER; note = 2'-O-methyl modified nucleotide
  modified_base 42: mod_base = OTHER; note = 2'-O-methyl modified nucleotide
  modified_base 43: mod_base = OTHER; note = 2'-O-methyl modified nucleotide
  modified_base 47: mod_base = OTHER; note = 2'-O-methyl modified nucleotide
  modified_base 48: mod_base = OTHER; note = 2'-O-methyl modified nucleotide
  modified_base 51: mod_base = OTHER; note = 2'-O-methyl modified nucleotide
  modified_base 54: mod_base = OTHER; note = nucleotide with phosphorothioate linkage
  modified_base 58: mod_base = OTHER; note = 2'-O-methyl modified nucleotide
  modified_base 59: mod_base = OTHER; note = 2'-O-methyl modified nucleotide
  modified_base 61: mod_base = OTHER; note = 2'-O-methyl modified nucleotide
  modified_base 62: mod_base = OTHER; note = 2'-O-methyl modified nucleotide
  modified_base 63: mod_base = OTHER; note = 2'-O-methyl modified nucleotide
  modified_base 64: mod_base = OTHER; note = 2'-O-methyl modified nucleotide
  modified_base 65: mod_base = OTHER; note = 2'-O-methyl modified nucleotide
  modified_base 66: mod_base = OTHER; note = 2'-O-methyl modified nucleotide
  modified_base 67: mod_base = OTHER; note = 2'-O-methyl modified nucleotide
  modified_base 68: mod_base = OTHER; note = 2'-O-methyl modified nucleotide
  modified_base 69: mod_base = OTHER; note = 2'-O-methyl modified nucleotide
  modified_base 70: mod_base = OTHER; note = 2'-O-methyl modified nucleotide
  modified_base 75: mod_base = OTHER; note = 2'-O-methyl modified nucleotide
  modified_base 77: mod_base = OTHER; note = 2'-O-methyl modified nucleotide
  modified_base 80: mod_base = OTHER; note = 2'-O-methyl modified nucleotide
  modified_base 86: mod_base = OTHER; note = 2'-O-methyl modified nucleotide
  modified_base 87: mod_base = OTHER; note = 2'-O-methyl modified nucleotide
  modified_base 89: mod_base = OTHER; note = 2'-O-methyl modified nucleotide
  modified_base 90: mod_base = OTHER; note = 2'-O-methyl modified nucleotide
  modified_base 91: mod_base = OTHER; note = 2'-O-methyl modified nucleotide
  modified_base 92: mod_base = OTHER; note = 2'-O-methyl modified nucleotide
  modified_base 99: mod_base = OTHER; note = nucleotide with phosphorothioate linkage
  modified_base 100: mod_base = OTHER; note = 2'-O-methyl modified nucleotide with phosphorothioate linkage
  modified_base 101: mod_base = OTHER; note = 2'-O-methyl modified nucleotide

SEQ ID NO: 2253 - RNA, 101 nt, synthetic construct; identical to SEQ ID NO: 1253
  source 1..101: mol_type = other RNA
  modified_base 1: mod_base = OTHER; note = 2'-O-methyl modified nucleotide with phosphorothioate linkage
  modified_base 2: mod_base = OTHER; note = 2'-O-methyl modified nucleotide with phosphorothioate linkage
  modified_base 3: mod_base = OTHER; note = 2'-O-methyl modified nucleotide with phosphorothioate linkage
  modified_base 4: mod_base = OTHER; note = 2'-O-methyl modified nucleotide
  modified_base 5: mod_base = OTHER; note = 2'-O-methyl modified nucleotide
  modified_base 8: mod_base = OTHER; note = 2'-O-methyl modified nucleotide
  modified_base 9: mod_base = OTHER; note = 2'-O-methyl modified nucleotide
  modified_base 11: mod_base = OTHER; note = 2'-O-methyl modified nucleotide
  modified_base 13: mod_base = OTHER; note = 2'-O-methyl modified nucleotide
  modified_base 18: mod_base = OTHER; note = 2'-O-methyl modified nucleotide
  modified_base 22: mod_base = OTHER; note = 2'-O-methyl modified nucleotide
  modified_base 25: mod_base = OTHER; note = 2'-O-methyl modified nucleotide
  modified_base 29: mod_base = OTHER; note = 2'-O-methyl modified nucleotide
  modified_base 30: mod_base = OTHER; note = 2'-O-methyl modified nucleotide
  modified_base 31: mod_base = OTHER; note = 2'-O-methyl modified nucleotide
  modified_base 32: mod_base = OTHER; note = 2'-O-methyl modified nucleotide
  modified_base 37: mod_base = OTHER; note = 2'-O-methyl modified nucleotide
  modified_base 38: mod_base = OTHER; note = 2'-O-methyl modified nucleotide
  modified_base 39: mod_base = OTHER; note = 2'-O-methyl modified nucleotide
  modified_base 40: mod_base = OTHER; note = 2'-O-methyl modified nucleotide
  modified_base 41: mod_base = OTHER; note = 2'-O-methyl modified nucleotide
  modified_base 42: mod_base = OTHER; note = 2'-O-methyl modified nucleotide
  modified_base 43: mod_base = OTHER; note = 2'-O-methyl modified nucleotide
  modified_base 47: mod_base = OTHER; note = 2'-O-methyl modified nucleotide
  modified_base 48: mod_base = OTHER; note = 2'-O-methyl modified nucleotide
  modified_base 51: mod_base = OTHER; note = 2'-O-methyl modified nucleotide
  modified_base 54: mod_base = OTHER; note = nucleotide with phosphorothioate linkage
  modified_base 58: mod_base = OTHER; note = 2'-O-methyl modified nucleotide
  modified_base 59: mod_base = OTHER; note = 2'-O-methyl modified nucleotide
  modified_base 61: mod_base = OTHER; note = 2'-O-methyl modified nucleotide
  modified_base 62: mod_base = OTHER; note = 2'-O-methyl modified nucleotide
  modified_base 63: mod_base = OTHER; note = 2'-O-methyl modified nucleotide
  modified_base 64: mod_base = OTHER; note = 2'-O-methyl modified nucleotide
  modified_base 65: mod_base = OTHER; note = 2'-O-methyl modified nucleotide
  modified_base 66: mod_base = OTHER; note = 2'-O-methyl modified nucleotide
  modified_base 67: mod_base = OTHER; note = 2'-O-methyl modified nucleotide
  modified_base 68: mod_base = OTHER; note = 2'-O-methyl modified nucleotide
  modified_base 69: mod_base = OTHER; note = 2'-O-methyl modified nucleotide
  modified_base 70: mod_base = OTHER; note = 2'-O-methyl modified nucleotide
  modified_base 75: mod_base = OTHER; note = 2'-O-methyl modified nucleotide
  modified_base 77: mod_base = OTHER; note = 2'-O-methyl modified nucleotide
  modified_base 80: mod_base = OTHER; note = 2'-O-methyl modified nucleotide
  modified_base 86: mod_base = OTHER; note = 2'-O-methyl modified nucleotide
  modified_base 87: mod_base = OTHER; note = 2'-O-methyl modified nucleotide
  modified_base 89: mod_base = OTHER; note = 2'-O-methyl modified nucleotide
  modified_base 90: mod_base = OTHER; note = 2'-O-methyl modified nucleotide
  modified_base 91: mod_base = OTHER; note = 2'-O-methyl modified nucleotide
  modified_base 92: mod_base = OTHER; note = 2'-O-methyl modified nucleotide
  modified_base 99: mod_base = OTHER; note = nucleotide with phosphorothioate linkage
  modified_base 100: mod_base = OTHER; note = 2'-O-methyl modified nucleotide with phosphorothioate linkage
  modified_base 101: mod_base = OTHER; note = 2'-O-methyl modified nucleotide

SEQ ID NO: 2254 - RNA, 101 nt, synthetic construct; identical to SEQ ID NO: 1254
  source 1..101: mol_type = other RNA
  modified_base 1: mod_base = OTHER; note = 2'-O-methyl modified nucleotide with phosphorothioate linkage
  modified_base 2: mod_base = OTHER; note = 2'-O-methyl modified nucleotide with phosphorothioate linkage
  modified_base 3: mod_base = OTHER; note = 2'-O-methyl modified nucleotide with phosphorothioate linkage
  modified_base 4: mod_base = OTHER; note = 2'-O-methyl modified nucleotide
  modified_base 5: mod_base = OTHER; note = 2'-O-methyl modified nucleotide
  modified_base 8: mod_base = OTHER; note = 2'-O-methyl modified nucleotide
  modified_base 9: mod_base = OTHER; note = 2'-O-methyl modified nucleotide
  modified_base 11: mod_base = OTHER; note = 2'-O-methyl modified nucleotide
  modified_base 13: mod_base = OTHER; note = 2'-O-methyl modified nucleotide
  modified_base 18: mod_base = OTHER; note = 2'-O-methyl modified nucleotide
  modified_base 22: mod_base = OTHER; note = 2'-O-methyl modified nucleotide
  modified_base 25: mod_base = OTHER; note = 2'-O-methyl modified nucleotide
  modified_base 29: mod_base = OTHER; note = 2'-O-methyl modified nucleotide
  modified_base 30: mod_base = OTHER; note = 2'-O-methyl modified nucleotide
  modified_base 31: mod_base = OTHER; note = 2'-O-methyl modified nucleotide
  modified_base 32: mod_base = OTHER; note = 2'-O-methyl modified nucleotide
  modified_base 37: mod_base = OTHER; note = 2'-O-methyl modified nucleotide
  modified_base 38: mod_base = OTHER; note = 2'-O-methyl modified nucleotide
  modified_base 39: mod_base = OTHER; note = 2'-O-methyl modified nucleotide
  modified_base 40: mod_base = OTHER; note = 2'-O-methyl modified nucleotide
  modified_base 41: mod_base = OTHER; note = 2'-O-methyl modified nucleotide
  modified_base 42: mod_base = OTHER; note = 2'-O-methyl modified nucleotide
  modified_base 43: mod_base = OTHER; note = 2'-O-methyl modified nucleotide
  modified_base 47: mod_base = OTHER; note = 2'-O-methyl modified nucleotide
  modified_base 48: mod_base = OTHER; note = 2'-O-methyl modified nucleotide
  modified_base 51: mod_base = OTHER; note = 2'-O-methyl modified nucleotide
  modified_base 54: mod_base = OTHER; note = nucleotide with phosphorothioate linkage
  modified_base 58: mod_base = OTHER; note = 2'-O-methyl modified nucleotide
  modified_base 59: mod_base = OTHER; note = 2'-O-methyl modified nucleotide
  modified_base 61: mod_base = OTHER; note = 2'-O-methyl modified nucleotide
  modified_base 62: mod_base = OTHER; note = 2'-O-methyl modified nucleotide
  modified_base 63: mod_base = OTHER; note = 2'-O-methyl modified nucleotide
  modified_base 64: mod_base = OTHER; note = 2'-O-methyl modified nucleotide
  modified_base 65: mod_base = OTHER; note = 2'-O-methyl modified nucleotide
  modified_base 66: mod_base = OTHER; note = 2'-O-methyl modified nucleotide
  modified_base 67: mod_base = OTHER; note = 2'-O-methyl modified nucleotide
  modified_base 68: mod_base = OTHER; note = 2'-O-methyl modified nucleotide
  modified_base 69: mod_base = OTHER; note = 2'-O-methyl modified nucleotide
  modified_base 70: mod_base = OTHER; note = 2'-O-methyl modified nucleotide
  modified_base 75: mod_base = OTHER; note = 2'-O-methyl modified nucleotide
  modified_base 77: mod_base = OTHER; note = 2'-O-methyl modified nucleotide
  modified_base 80: mod_base = OTHER; note = 2'-O-methyl modified nucleotide
  modified_base 86: mod_base = OTHER; note = 2'-O-methyl modified nucleotide
  modified_base 87: mod_base = OTHER; note = 2'-O-methyl modified nucleotide
  modified_base 89: mod_base = OTHER; note = 2'-O-methyl modified nucleotide
  modified_base 90: mod_base = OTHER; note = 2'-O-methyl modified nucleotide
  modified_base 91: mod_base = OTHER; note = 2'-O-methyl modified nucleotide
  modified_base 92: mod_base = OTHER; note = 2'-O-methyl modified nucleotide
  modified_base 99: mod_base = OTHER; note = nucleotide with phosphorothioate linkage
  modified_base 100: mod_base = OTHER; note = 2'-O-methyl modified nucleotide with phosphorothioate linkage
  modified_base 101: mod_base = OTHER; note = 2'-O-methyl modified nucleotide

SEQ ID NO: 2255 - RNA, 101 nt, synthetic construct; identical to SEQ ID NO: 1255
  source 1..101: mol_type = other RNA
  modified_base 1: mod_base = OTHER; note = 2'-O-methyl modified nucleotide with phosphorothioate linkage
  modified_base 2: mod_base = OTHER; note = 2'-O-methyl modified nucleotide with phosphorothioate linkage
  modified_base 3: mod_base = OTHER; note = 2'-O-methyl modified nucleotide with phosphorothioate linkage
  modified_base 4: mod_base = OTHER; note = 2'-O-methyl modified nucleotide
  modified_base 5: mod_base = OTHER; note = 2'-O-methyl modified nucleotide
  modified_base 8: mod_base = OTHER; note = 2'-O-methyl modified nucleotide
  modified_base 9: mod_base = OTHER; note = 2'-O-methyl modified nucleotide
  modified_base 11: mod_base = OTHER; note = 2'-O-methyl modified nucleotide
  modified_base 13: mod_base = OTHER; note = 2'-O-methyl modified nucleotide
  modified_base 18: mod_base = OTHER; note = 2'-O-methyl modified nucleotide
  modified_base 22: mod_base = OTHER; note = 2'-O-methyl modified nucleotide
  modified_base 25: mod_base = OTHER; note = 2'-O-methyl modified nucleotide
  modified_base 29: mod_base = OTHER; note = 2'-O-methyl modified nucleotide
  modified_base 30: mod_base = OTHER; note = 2'-O-methyl modified nucleotide
  modified_base 31: mod_base = OTHER; note = 2'-O-methyl modified nucleotide
  modified_base 32: mod_base = OTHER; note = 2'-O-methyl modified nucleotide
  modified_base 37: mod_base = OTHER; note = 2'-O-methyl modified nucleotide
  modified_base 38: mod_base = OTHER; note = 2'-O-methyl modified nucleotide
  modified_base 39: mod_base = OTHER; note = 2'-O-methyl modified nucleotide
  modified_base 40: mod_base = OTHER; note = 2'-O-methyl modified nucleotide
  modified_base 41: mod_base = OTHER; note = 2'-O-methyl modified nucleotide
  modified_base 42: mod_base = OTHER; note = 2'-O-methyl modified nucleotide
  modified_base 43: mod_base = OTHER; note = 2'-O-methyl modified nucleotide
  modified_base 47: mod_base = OTHER; note = 2'-O-methyl modified nucleotide
  modified_base 48: mod_base = OTHER; note = 2'-O-methyl modified nucleotide
  modified_base 51: mod_base = OTHER; note = 2'-O-methyl modified nucleotide
  modified_base 54: mod_base = OTHER; note = nucleotide with phosphorothioate linkage
  modified_base 58: mod_base = OTHER; note = 2'-O-methyl modified nucleotide
  modified_base 59: mod_base = OTHER; note = 2'-O-methyl modified nucleotide
  modified_base 61: mod_base = OTHER; note = 2'-O-methyl modified nucleotide
  modified_base 62: mod_base = OTHER; note = 2'-O-methyl modified nucleotide
  modified_base 63: mod_base = OTHER; note = 2'-O-methyl modified nucleotide
  modified_base 64: mod_base = OTHER; note = 2'-O-methyl modified nucleotide
  modified_base 65: mod_base = OTHER; note = 2'-O-methyl modified nucleotide
  modified_base 66: mod_base = OTHER; note = 2'-O-methyl modified nucleotide
  modified_base 67: mod_base = OTHER; note = 2'-O-methyl modified nucleotide
  modified_base 68: mod_base = OTHER; note = 2'-O-methyl modified nucleotide
  modified_base 69: mod_base = OTHER; note = 2'-O-methyl modified nucleotide
  modified_base 70: mod_base = OTHER; note = 2'-O-methyl modified nucleotide
  modified_base 75: mod_base = OTHER; note = 2'-O-methyl modified nucleotide
  modified_base 77: mod_base = OTHER; note = 2'-O-methyl modified nucleotide
  modified_base 80: mod_base = OTHER; note = 2'-O-methyl modified nucleotide
  modified_base 86: mod_base = OTHER; note = 2'-O-methyl modified nucleotide
  modified_base 87: mod_base = OTHER; note = 2'-O-methyl modified nucleotide
  modified_base 89: mod_base = OTHER; note = 2'-O-methyl modified nucleotide
  modified_base 90: mod_base = OTHER; note = 2'-O-methyl modified nucleotide
  modified_base 91: mod_base = OTHER; note = 2'-O-methyl modified nucleotide
  modified_base 92: mod_base = OTHER; note = 2'-O-methyl modified nucleotide
  modified_base 99: mod_base = OTHER; note = nucleotide with phosphorothioate linkage
  modified_base 100: mod_base = OTHER; note = 2'-O-methyl modified nucleotide with phosphorothioate linkage
  modified_base 101: mod_base = OTHER; note = 2'-O-methyl modified nucleotide

SEQ ID NO: 2256 - RNA, 101 nt, synthetic construct; identical to SEQ ID NO: 1256
  source 1..101: mol_type = other RNA
  modified_base 1: mod_base = OTHER; note = 2'-O-methyl modified nucleotide with phosphorothioate linkage
  modified_base 2: mod_base = OTHER; note = 2'-O-methyl modified nucleotide with phosphorothioate linkage
  modified_base 3: mod_base = OTHER; note = 2'-O-methyl modified nucleotide with phosphorothioate linkage
  modified_base 4: mod_base = OTHER; note = 2'-O-methyl modified nucleotide
  modified_base 5: mod_base = OTHER; note = 2'-O-methyl modified nucleotide
  modified_base 8: mod_base = OTHER; note = 2'-O-methyl modified nucleotide
  modified_base 9: mod_base = OTHER; note = 2'-O-methyl modified nucleotide
  modified_base 11: mod_base = OTHER; note = 2'-O-methyl modified nucleotide
  modified_base 13: mod_base = OTHER; note = 2'-O-methyl modified nucleotide
  modified_base 18: mod_base = OTHER; note = 2'-O-methyl modified nucleotide
  modified_base 22: mod_base = OTHER; note = 2'-O-methyl modified nucleotide
  modified_base 25: mod_base = OTHER; note = 2'-O-methyl modified nucleotide
  modified_base 29: mod_base = OTHER; note = 2'-O-methyl modified nucleotide
  modified_base 30: mod_base = OTHER; note = 2'-O-methyl modified nucleotide
  modified_base 31: mod_base = OTHER; note = 2'-O-methyl modified nucleotide
  modified_base 32: mod_base = OTHER; note = 2'-O-methyl modified nucleotide
  modified_base 37: mod_base = OTHER; note = 2'-O-methyl modified nucleotide
  modified_base 38: mod_base = OTHER; note = 2'-O-methyl modified nucleotide
  modified_base 39: mod_base = OTHER; note = 2'-O-methyl modified nucleotide
  modified_base 40: mod_base = OTHER; note = 2'-O-methyl modified nucleotide
  modified_base 41: mod_base = OTHER; note = 2'-O-methyl modified nucleotide
  modified_base 42: mod_base = OTHER; note = 2'-O-methyl modified nucleotide
  modified_base 43: mod_base = OTHER; note = 2'-O-methyl modified nucleotide
  modified_base 47: mod_base = OTHER; note = 2'-O-methyl modified nucleotide
  modified_base 48: mod_base = OTHER; note = 2'-O-methyl modified nucleotide
  modified_base 51: mod_base = OTHER; note = 2'-O-methyl modified nucleotide
  modified_base 54: mod_base = OTHER; note = nucleotide with phosphorothioate linkage
  modified_base 58: mod_base = OTHER; note = 2'-O-methyl modified nucleotide
  modified_base 59: mod_base = OTHER; note = 2'-O-methyl modified nucleotide
  modified_base 61: mod_base = OTHER; note = 2'-O-methyl modified nucleotide
  modified_base 62: mod_base = OTHER; note = 2'-O-methyl modified nucleotide
  modified_base 63: mod_base = OTHER; note = 2'-O-methyl modified nucleotide
  modified_base 64: mod_base = OTHER; note = 2'-O-methyl modified nucleotide
  modified_base 65: mod_base = OTHER; note = 2'-O-methyl modified nucleotide
  modified_base 66: mod_base = OTHER; note = 2'-O-methyl modified nucleotide
  modified_base 67: mod_base = OTHER; note = 2'-O-methyl modified nucleotide
  modified_base 68: mod_base = OTHER; note = 2'-O-methyl modified nucleotide
  modified_base 69: mod_base = OTHER; note = 2'-O-methyl modified nucleotide
  modified_base 70: mod_base = OTHER; note = 2'-O-methyl modified nucleotide
  modified_base 75: mod_base = OTHER; note = 2'-O-methyl modified nucleotide
  modified_base 77: mod_base = OTHER; note = 2'-O-methyl modified nucleotide
  modified_base 80: mod_base = OTHER; note = 2'-O-methyl modified nucleotide
  modified_base 86: mod_base = OTHER; note = 2'-O-methyl modified nucleotide
  modified_base 87: mod_base = OTHER; note = 2'-O-methyl modified nucleotide
  modified_base 89: mod_base = OTHER; note = 2'-O-methyl modified nucleotide
  modified_base 90: mod_base = OTHER; note = 2'-O-methyl modified nucleotide
  modified_base 91: mod_base = OTHER; note = 2'-O-methyl modified nucleotide
  modified_base 92: mod_base = OTHER; note = 2'-O-methyl modified nucleotide
  modified_base 99: mod_base = OTHER; note = nucleotide with phosphorothioate linkage
  modified_base 100: mod_base = OTHER; note = 2'-O-methyl modified nucleotide with phosphorothioate linkage
  modified_base 101: mod_base = OTHER; note = 2'-O-methyl modified nucleotide

SEQ ID NO: 2257 - RNA, 101 nt, synthetic construct; identical to SEQ ID NO: 1257
  source 1..101: mol_type = other RNA
  modified_base 1: mod_base = OTHER; note = 2'-O-methyl modified nucleotide with phosphorothioate linkage
  modified_base 2: mod_base = OTHER; note = 2'-O-methyl modified nucleotide with phosphorothioate linkage
  modified_base 3: mod_base = OTHER; note = 2'-O-methyl modified nucleotide with phosphorothioate linkage
  modified_base 4: mod_base = OTHER; note = 2'-O-methyl modified nucleotide
  modified_base 5: mod_base = OTHER; note = 2'-O-methyl modified nucleotide
  modified_base 8: mod_base = OTHER; note = 2'-O-methyl modified nucleotide
  modified_base 9: mod_base = OTHER; note = 2'-O-methyl modified nucleotide
  modified_base 11: mod_base = OTHER; note = 2'-O-methyl modified nucleotide
  modified_base 13: mod_base = OTHER; note = 2'-O-methyl modified nucleotide
  modified_base 18: mod_base = OTHER; note = 2'-O-methyl modified nucleotide
  modified_base 22: mod_base = OTHER; note = 2'-O-methyl modified nucleotide
  modified_base 25: mod_base = OTHER; note = 2'-O-methyl modified nucleotide
  modified_base 29: mod_base = OTHER; note = 2'-O-methyl modified nucleotide
  modified_base 30: mod_base = OTHER; note = 2'-O-methyl modified nucleotide
  modified_base 31: mod_base = OTHER; note = 2'-O-methyl modified nucleotide
  modified_base 32: mod_base = OTHER; note = 2'-O-methyl modified nucleotide
  modified_base 37: mod_base = OTHER; note = 2'-O-methyl modified nucleotide
  modified_base 38: mod_base = OTHER; note = 2'-O-methyl modified nucleotide
  modified_base 39: mod_base = OTHER; note = 2'-O-methyl modified nucleotide
  modified_base 40: mod_base = OTHER; note = 2'-O-methyl modified nucleotide
  modified_base 41: mod_base = OTHER; note = 2'-O-methyl modified nucleotide
  modified_base 42: mod_base = OTHER; note = 2'-O-methyl modified nucleotide
  modified_base 43: mod_base = OTHER; note = 2'-O-methyl modified nucleotide
  modified_base 47: mod_base = OTHER; note = 2'-O-methyl modified nucleotide
  modified_base 48: mod_base = OTHER; note = 2'-O-methyl modified nucleotide
  modified_base 51: mod_base = OTHER; note = 2'-O-methyl modified nucleotide
  modified_base 54: mod_base = OTHER; note = nucleotide with phosphorothioate linkage
  modified_base 58: mod_base = OTHER; note = 2'-O-methyl modified nucleotide
  modified_base 59: mod_base = OTHER; note = 2'-O-methyl modified nucleotide
  modified_base 61: mod_base = OTHER; note = 2'-O-methyl modified nucleotide
  modified_base 62: mod_base = OTHER; note = 2'-O-methyl modified nucleotide
  modified_base 63: mod_base = OTHER; note = 2'-O-methyl modified nucleotide
  modified_base 64: mod_base = OTHER; note = 2'-O-methyl modified nucleotide
  modified_base 65: mod_base = OTHER; note = 2'-O-methyl modified nucleotide
  modified_base 66: mod_base = OTHER; note = 2'-O-methyl modified nucleotide
  modified_base 67: mod_base = OTHER; note = 2'-O-methyl modified nucleotide
  modified_base 68: mod_base = OTHER; note = 2'-O-methyl modified nucleotide
  modified_base 69: mod_base = OTHER; note = 2'-O-methyl modified nucleotide
  modified_base 70: mod_base = OTHER; note = 2'-O-methyl modified nucleotide
  modified_base 75: mod_base = OTHER; note = 2'-O-methyl modified nucleotide
  modified_base 77: mod_base = OTHER; note = 2'-O-methyl modified nucleotide
  modified_base 80: mod_base = OTHER; note = 2'-O-methyl modified nucleotide
  modified_base 86: mod_base = OTHER; note = 2'-O-methyl modified nucleotide
  modified_base 87: mod_base = OTHER; note = 2'-O-methyl modified nucleotide
  modified_base 89: mod_base = OTHER; note = 2'-O-methyl modified nucleotide
  modified_base 90: mod_base = OTHER; note = 2'-O-methyl modified nucleotide
  modified_base 91: mod_base = OTHER; note = 2'-O-methyl modified nucleotide
  modified_base 92: mod_base = OTHER; note = 2'-O-methyl modified nucleotide
  modified_base 99: mod_base = OTHER; note = nucleotide with phosphorothioate linkage
  modified_base 100: mod_base = OTHER; note = 2'-O-methyl modified nucleotide with phosphorothioate linkage
  modified_base 101: mod_base = OTHER; note = 2'-O-methyl modified nucleotide

SEQ ID NO: 2258 - RNA, 101 nt, synthetic construct; identical to SEQ ID NO: 1258
  source 1..101: mol_type = other RNA
  modified_base 1: mod_base = OTHER; note = 2'-O-methyl modified nucleotide with phosphorothioate linkage
  modified_base 2: mod_base = OTHER; note = 2'-O-methyl modified nucleotide with phosphorothioate linkage
  modified_base 3: mod_base = OTHER; note = 2'-O-methyl modified nucleotide with phosphorothioate linkage
  modified_base 4: mod_base = OTHER; note = 2'-O-methyl modified nucleotide
  modified_base 5: mod_base = OTHER; note = 2'-O-methyl modified nucleotide
  modified_base 8: mod_base = OTHER; note = 2'-O-methyl modified nucleotide
  modified_base 9: mod_base = OTHER; note = 2'-O-methyl modified nucleotide
  modified_base 11: mod_base = OTHER; note = 2'-O-methyl modified nucleotide
  modified_base 13: mod_base = OTHER; note = 2'-O-methyl modified nucleotide
  modified_base 18: mod_base = OTHER; note = 2'-O-methyl modified nucleotide
  modified_base 22: mod_base = OTHER; note = 2'-O-methyl modified nucleotide
  modified_base 25: mod_base = OTHER; note = 2'-O-methyl modified nucleotide
  modified_base 29: mod_base = OTHER; note = 2'-O-methyl modified nucleotide
  modified_base 30: mod_base = OTHER; note = 2'-O-methyl modified nucleotide
  modified_base 31: mod_base = OTHER; note = 2'-O-methyl modified nucleotide
  modified_base 32: mod_base = OTHER; note = 2'-O-methyl modified nucleotide
  modified_base 37: mod_base = OTHER; note = 2'-O-methyl modified nucleotide
  modified_base 38: mod_base = OTHER; note = 2'-O-methyl modified nucleotide
  modified_base 39: mod_base = OTHER; note = 2'-O-methyl modified nucleotide
  modified_base 40: mod_base = OTHER; note = 2'-O-methyl modified nucleotide
  modified_base 41: mod_base = OTHER; note = 2'-O-methyl modified nucleotide
  modified_base 42: mod_base = OTHER; note = 2'-O-methyl modified nucleotide
  modified_base 43: mod_base = OTHER; note = 2'-O-methyl modified nucleotide
  modified_base 47: mod_base = OTHER; note = 2'-O-methyl modified nucleotide
  modified_base 48: mod_base = OTHER; note = 2'-O-methyl modified nucleotide
  modified_base 51: mod_base = OTHER; note = 2'-O-methyl modified nucleotide
  modified_base 54: mod_base = OTHER; note = nucleotide with phosphorothioate linkage
  modified_base 58: mod_base = OTHER; note = 2'-O-methyl modified nucleotide
  modified_base 59: mod_base = OTHER; note = 2'-O-methyl modified nucleotide
  modified_base 61: mod_base = OTHER; note = 2'-O-methyl modified nucleotide
  modified_base 62: mod_base = OTHER; note = 2'-O-methyl modified nucleotide
  modified_base 63: mod_base = OTHER; note = 2'-O-methyl modified nucleotide
  modified_base 64: mod_base = OTHER; note = 2'-O-methyl modified nucleotide
  modified_base 65: mod_base = OTHER; note = 2'-O-methyl modified nucleotide
  modified_base 66: mod_base = OTHER; note = 2'-O-methyl modified nucleotide
  modified_base 67: mod_base = OTHER; note = 2'-O-methyl modified nucleotide
  modified_base 68: mod_base = OTHER; note = 2'-O-methyl modified nucleotide
  modified_base 69: mod_base = OTHER; note = 2'-O-methyl modified nucleotide
  modified_base 70: mod_base = OTHER; note = 2'-O-methyl modified nucleotide
  modified_base 75: mod_base = OTHER; note = 2'-O-methyl modified nucleotide
  modified_base 77: mod_base = OTHER; note = 2'-O-methyl modified nucleotide
  modified_base 80: mod_base = OTHER; note = 2'-O-methyl modified nucleotide
  modified_base 86: mod_base = OTHER; note = 2'-O-methyl modified nucleotide
  modified_base 87: mod_base = OTHER; note = 2'-O-methyl modified nucleotide
  modified_base 89: mod_base = OTHER; note = 2'-O-methyl modified nucleotide
  modified_base 90: mod_base = OTHER; note = 2'-O-methyl modified nucleotide
  modified_base 91: mod_base = OTHER; note = 2'-O-methyl modified nucleotide
  modified_base 92: mod_base = OTHER; note = 2'-O-methyl modified nucleotide
  modified_base 99: mod_base = OTHER; note = nucleotide with phosphorothioate linkage
  modified_base 100: mod_base = OTHER; note = 2'-O-methyl modified nucleotide with phosphorothioate linkage
  modified_base 101: mod_base = OTHER; note = 2'-O-methyl modified nucleotide

SEQ ID NO: 2259 - RNA, 101 nt, synthetic construct; identical to SEQ ID NO: 1259
  source 1..101: mol_type = other RNA
  modified_base 1: mod_base = OTHER; note = 2'-O-methyl modified nucleotide with phosphorothioate linkage
  modified_base 2: mod_base = OTHER; note = 2'-O-methyl modified nucleotide with phosphorothioate linkage
  modified_base 3: mod_base = OTHER; note = 2'-O-methyl modified nucleotide with phosphorothioate linkage
  modified_base 4: mod_base = OTHER; note = 2'-O-methyl modified nucleotide
  modified_base 5: mod_base = OTHER; note = 2'-O-methyl modified nucleotide
  modified_base 8: mod_base = OTHER; note = 2'-O-methyl modified nucleotide
  modified_base 9: mod_base = OTHER; note = 2'-O-methyl modified nucleotide
  modified_base 11: mod_base = OTHER; note = 2'-O-methyl modified nucleotide
  modified_base 13: mod_base = OTHER; note = 2'-O-methyl modified nucleotide
  modified_base 18: mod_base = OTHER; note = 2'-O-methyl modified nucleotide
  modified_base 22: mod_base = OTHER; note = 2'-O-methyl modified nucleotide
  modified_base 25: mod_base = OTHER; note = 2'-O-methyl modified nucleotide
  modified_base 29: mod_base = OTHER; note = 2'-O-methyl modified nucleotide
  modified_base 30: mod_base = OTHER; note = 2'-O-methyl modified nucleotide
  modified_base 31: mod_base = OTHER; note = 2'-O-methyl modified nucleotide
  modified_base 32: mod_base = OTHER; note = 2'-O-methyl modified nucleotide
  modified_base 37: mod_base = OTHER; note = 2'-O-methyl modified nucleotide
  modified_base 38: mod_base = OTHER; note = 2'-O-methyl modified nucleotide
  modified_base 39: mod_base = OTHER; note = 2'-O-methyl modified nucleotide
  modified_base 40: mod_base = OTHER; note = 2'-O-methyl modified nucleotide
  modified_base 41: mod_base = OTHER; note = 2'-O-methyl modified nucleotide
  modified_base 42: mod_base = OTHER; note = 2'-O-methyl modified nucleotide
  modified_base 43: mod_base = OTHER; note = 2'-O-methyl modified nucleotide
  modified_base 47: mod_base = OTHER; note = 2'-O-methyl modified nucleotide
  modified_base 48: mod_base = OTHER; note = 2'-O-methyl modified nucleotide
  modified_base 51: mod_base = OTHER; note = 2'-O-methyl modified nucleotide
  modified_base 54: mod_base = OTHER; note = nucleotide with phosphorothioate linkage
  modified_base 58: mod_base = OTHER; note = 2'-O-methyl modified nucleotide
  modified_base 59: mod_base = OTHER; note = 2'-O-methyl modified nucleotide
  modified_base 61: mod_base = OTHER; note = 2'-O-methyl modified nucleotide
  modified_base 62: mod_base = OTHER; note = 2'-O-methyl modified nucleotide
  modified_base 63: mod_base = OTHER; note = 2'-O-methyl modified nucleotide
  modified_base 64: mod_base = OTHER; note = 2'-O-methyl modified nucleotide
  modified_base 65: mod_base = OTHER; note = 2'-O-methyl modified nucleotide
  modified_base 66: mod_base = OTHER; note = 2'-O-methyl modified nucleotide
  modified_base 67: mod_base = OTHER; note = 2'-O-methyl modified nucleotide
  modified_base 68: mod_base = OTHER; note = 2'-O-methyl modified nucleotide
  modified_base 69: mod_base = OTHER; note = 2'-O-methyl modified nucleotide
  modified_base 70: mod_base = OTHER; note = 2'-O-methyl modified nucleotide
  modified_base 75: mod_base = OTHER; note = 2'-O-methyl modified nucleotide
  modified_base 77: mod_base = OTHER; note = 2'-O-methyl modified nucleotide
  modified_base 80: mod_base = OTHER; note = 2'-O-methyl modified nucleotide
  modified_base 86: mod_base = OTHER; note = 2'-O-methyl modified nucleotide
  modified_base 87: mod_base = OTHER; note = 2'-O-methyl modified nucleotide
  modified_base 89: mod_base = OTHER; note = 2'-O-methyl modified nucleotide
  modified_base 90: mod_base = OTHER; note = 2'-O-methyl modified nucleotide
  modified_base 91: mod_base = OTHER; note = 2'-O-methyl modified nucleotide
  modified_base 92: mod_base = OTHER; note = 2'-O-methyl modified nucleotide
  modified_base 99: mod_base = OTHER; note = nucleotide with phosphorothioate linkage
  modified_base 100: mod_base = OTHER; note = 2'-O-methyl modified nucleotide with phosphorothioate linkage
  modified_base 101: mod_base = OTHER; note = 2'-O-methyl modified nucleotide

SEQ ID NO: 2260 - RNA, 101 nt, synthetic construct; identical to SEQ ID NO: 1260
  source 1..101: mol_type = other RNA
  modified_base 1: mod_base = OTHER; note = 2'-O-methyl modified nucleotide with phosphorothioate linkage
  modified_base 2: mod_base = OTHER; note = 2'-O-methyl modified nucleotide with phosphorothioate linkage
  modified_base 3: mod_base = OTHER; note = 2'-O-methyl modified nucleotide with phosphorothioate linkage
  modified_base 4: mod_base = OTHER; note = 2'-O-methyl modified nucleotide
  modified_base 5: mod_base = OTHER; note = 2'-O-methyl modified nucleotide
  modified_base 8: mod_base = OTHER; note = 2'-O-methyl modified nucleotide
  modified_base 9: mod_base = OTHER; note = 2'-O-methyl modified nucleotide
  modified_base 11: mod_base = OTHER; note = 2'-O-methyl modified nucleotide
  modified_base 13: mod_base = OTHER; note = 2'-O-methyl modified nucleotide
  modified_base 18: mod_base = OTHER; note = 2'-O-methyl modified nucleotide
  modified_base 22: mod_base = OTHER; note = 2'-O-methyl modified nucleotide
  modified_base 25: mod_base = OTHER; note = 2'-O-methyl modified nucleotide
  modified_base 29: mod_base = OTHER; note = 2'-O-methyl modified nucleotide
  modified_base 30: mod_base = OTHER; note = 2'-O-methyl modified nucleotide
  modified_base 31: mod_base = OTHER; note = 2'-O-methyl modified nucleotide
  modified_base 32: mod_base = OTHER; note = 2'-O-methyl modified nucleotide
  modified_base 37: mod_base = OTHER; note = 2'-O-methyl modified nucleotide
  modified_base 38: mod_base = OTHER; note = 2'-O-methyl modified nucleotide
  modified_base 39: mod_base = OTHER; note = 2'-O-methyl modified nucleotide
  modified_base 40: mod_base = OTHER; note = 2'-O-methyl modified nucleotide
  modified_base 41: mod_base = OTHER; note = 2'-O-methyl modified nucleotide
  modified_base 42: mod_base = OTHER; note = 2'-O-methyl modified nucleotide
  modified_base 43: mod_base = OTHER; note = 2'-O-methyl modified nucleotide
  modified_base 47: mod_base = OTHER; note = 2'-O-methyl modified nucleotide
  modified_base 48: mod_base = OTHER; note = 2'-O-methyl modified nucleotide
  modified_base 51: mod_base = OTHER; note = 2'-O-methyl modified nucleotide
  modified_base 54: mod_base = OTHER; note = nucleotide with phosphorothioate linkage
  modified_base 58: mod_base = OTHER; note = 2'-O-methyl modified nucleotide
  modified_base 59: mod_base = OTHER; note = 2'-O-methyl modified nucleotide
  modified_base 61: mod_base = OTHER; note = 2'-O-methyl modified nucleotide
  modified_base 62: mod_base = OTHER; note = 2'-O-methyl modified nucleotide
  modified_base 63: mod_base = OTHER; note = 2'-O-methyl modified nucleotide
  modified_base 64: mod_base = OTHER; note = 2'-O-methyl modified nucleotide
  modified_base 65: mod_base = OTHER; note = 2'-O-methyl modified nucleotide
  modified_base 66: mod_base = OTHER; note = 2'-O-methyl modified nucleotide
  modified_base 67: mod_base = OTHER; note = 2'-O-methyl modified nucleotide
  modified_base 68: mod_base = OTHER; note = 2'-O-methyl modified nucleotide
  modified_base 69: mod_base = OTHER; note = 2'-O-methyl modified nucleotide
  modified_base 70: mod_base = OTHER; note = 2'-O-methyl modified nucleotide
  modified_base 75: mod_base = OTHER; note = 2'-O-methyl modified nucleotide
  modified_base 77: mod_base = OTHER; note = 2'-O-methyl modified nucleotide
  modified_base 80: mod_base = OTHER; note = 2'-O-methyl modified nucleotide
  modified_base 86: mod_base = OTHER; note = 2'-O-methyl modified nucleotide
  modified_base 87: mod_base = OTHER; note = 2'-O-methyl modified nucleotide
  modified_base 89: mod_base = OTHER; note = 2'-O-methyl modified nucleotide
  modified_base 90: mod_base = OTHER; note = 2'-O-methyl modified nucleotide
  modified_base 91: mod_base = OTHER; note = 2'-O-methyl modified nucleotide
  modified_base 92: mod_base = OTHER; note = 2'-O-methyl modified nucleotide
  modified_base 99: mod_base = OTHER; note = nucleotide with phosphorothioate linkage
  modified_base 100: mod_base = OTHER; note = 2'-O-methyl modified nucleotide with phosphorothioate linkage
  modified_base 101: mod_base = OTHER; note = 2'-O-methyl modified nucleotide

SEQ ID NO: 2261 - RNA, 101 nt, synthetic construct; identical to SEQ ID NO: 1261
  source 1..101: mol_type = other RNA
  modified_base 1: mod_base = OTHER; note = 2'-O-methyl modified nucleotide with phosphorothioate linkage
  modified_base 2: mod_base = OTHER; note = 2'-O-methyl modified nucleotide with phosphorothioate linkage
  modified_base 3: mod_base = OTHER; note = 2'-O-methyl modified nucleotide with phosphorothioate linkage
  modified_base 4: mod_base = OTHER; note = 2'-O-methyl modified nucleotide
  modified_base 5: mod_base = OTHER; note = 2'-O-methyl modified nucleotide
  modified_base 8: mod_base = OTHER; note = 2'-O-methyl modified nucleotide
  modified_base 9: mod_base = OTHER; note = 2'-O-methyl modified nucleotide
  modified_base 11: mod_base = OTHER; note = 2'-O-methyl modified nucleotide
  modified_base 13: mod_base = OTHER; note = 2'-O-methyl modified nucleotide
  modified_base 18: mod_base = OTHER; note = 2'-O-methyl modified nucleotide
  modified_base 22: mod_base = OTHER; note = 2'-O-methyl modified nucleotide
  modified_base 25: mod_base = OTHER; note = 2'-O-methyl modified nucleotide
  modified_base 29: mod_base = OTHER; note = 2'-O-methyl modified nucleotide
  modified_base 30: mod_base = OTHER; note = 2'-O-methyl modified nucleotide
  modified_base 31: mod_base = OTHER; note = 2'-O-methyl modified nucleotide
  modified_base 32: mod_base = OTHER; note = 2'-O-methyl modified nucleotide
  modified_base 37: mod_base = OTHER; note = 2'-O-methyl modified nucleotide
  modified_base 38: mod_base = OTHER; note = 2'-O-methyl modified nucleotide
  modified_base 39: mod_base = OTHER; note = 2'-O-methyl modified nucleotide
  modified_base 40: mod_base = OTHER; note = 2'-O-methyl modified nucleotide
  modified_base 41: mod_base = OTHER; note = 2'-O-methyl modified nucleotide
  modified_base 42: mod_base = OTHER; note = 2'-O-methyl modified nucleotide
  modified_base 43: mod_base = OTHER; note = 2'-O-methyl modified nucleotide
  modified_base 47: mod_base = OTHER; note = 2'-O-methyl modified nucleotide
  modified_base 48: mod_base = OTHER; note = 2'-O-methyl modified nucleotide
  modified_base 51: mod_base = OTHER; note = 2'-O-methyl modified nucleotide
  modified_base 54: mod_base = OTHER; note = nucleotide with phosphorothioate linkage
  modified_base 58: mod_base = OTHER; note = 2'-O-methyl modified nucleotide
  modified_base 59: mod_base = OTHER; note = 2'-O-methyl modified nucleotide
  modified_base 61: mod_base = OTHER; note = 2'-O-methyl modified nucleotide
  modified_base 62: mod_base = OTHER; note = 2'-O-methyl modified nucleotide
  modified_base 63: mod_base = OTHER; note = 2'-O-methyl modified nucleotide
  modified_base 64: mod_base = OTHER; note = 2'-O-methyl modified nucleotide
  modified_base 65: mod_base = OTHER; note = 2'-O-methyl modified nucleotide
  modified_base 66: mod_base = OTHER; note = 2'-O-methyl modified nucleotide
  modified_base 67: mod_base = OTHER; note = 2'-O-methyl modified nucleotide
  modified_base 68: mod_base = OTHER; note = 2'-O-methyl modified nucleotide
  modified_base 69: mod_base = OTHER; note = 2'-O-methyl modified nucleotide
  modified_base 70: mod_base = OTHER; note = 2'-O-methyl modified nucleotide
  modified_base 75: mod_base = OTHER; note = 2'-O-methyl modified nucleotide
  modified_base 77: mod_base = OTHER; note = 2'-O-methyl modified nucleotide
  modified_base 80: mod_base = OTHER; note = 2'-O-methyl modified nucleotide
  modified_base 86: mod_base = OTHER; note = 2'-O-methyl modified nucleotide
  modified_base 87: mod_base = OTHER; note = 2'-O-methyl modified nucleotide
  modified_base 89: mod_base = OTHER; note = 2'-O-methyl modified nucleotide
  modified_base 90: mod_base = OTHER; note = 2'-O-methyl modified nucleotide
  modified_base 91: mod_base = OTHER; note = 2'-O-methyl modified nucleotide
  modified_base 92: mod_base = OTHER; note = 2'-O-methyl modified nucleotide
  modified_base 99: mod_base = OTHER; note = nucleotide with phosphorothioate linkage
  modified_base 100: mod_base = OTHER; note = 2'-O-methyl modified nucleotide with phosphorothioate linkage
  modified_base 101: mod_base = OTHER; note = 2'-O-methyl modified nucleotide

SEQ ID NO: 2262 - RNA, 101 nt, synthetic construct; identical to SEQ ID NO: 1262
  source 1..101: mol_type = other RNA
  modified_base 1: mod_base = OTHER; note = 2'-O-methyl modified nucleotide with phosphorothioate linkage
  modified_base 2: mod_base = OTHER; note = 2'-O-methyl modified nucleotide with phosphorothioate linkage
  modified_base 3: mod_base = OTHER; note = 2'-O-methyl modified nucleotide with phosphorothioate linkage
  modified_base 4: mod_base = OTHER; note = 2'-O-methyl modified nucleotide
  modified_base 5: mod_base = OTHER; note = 2'-O-methyl modified nucleotide
  modified_base 8: mod_base = OTHER; note = 2'-O-methyl modified nucleotide
  modified_base 9: mod_base = OTHER; note = 2'-O-methyl modified nucleotide
  modified_base 11: mod_base = OTHER; note = 2'-O-methyl modified nucleotide
  modified_base 13: mod_base = OTHER; note = 2'-O-methyl modified nucleotide
  modified_base 18: mod_base = OTHER; note = 2'-O-methyl modified nucleotide
  modified_base 22: mod_base = OTHER; note = 2'-O-methyl modified nucleotide
  modified_base 25: mod_base = OTHER; note = 2'-O-methyl modified nucleotide
  modified_base 29: mod_base = OTHER; note = 2'-O-methyl modified nucleotide
  modified_base 30: mod_base = OTHER; note = 2'-O-methyl modified nucleotide
  modified_base 31: mod_base = OTHER; note = 2'-O-methyl modified nucleotide
  modified_base 32: mod_base = OTHER; note = 2'-O-methyl modified nucleotide
  modified_base 37: mod_base = OTHER; note = 2'-O-methyl modified nucleotide
  modified_base 38: mod_base = OTHER; note = 2'-O-methyl modified nucleotide
  modified_base 39: mod_base = OTHER; note = 2'-O-methyl modified nucleotide
  modified_base 40: mod_base = OTHER; note = 2'-O-methyl modified nucleotide
  modified_base 41: mod_base = OTHER; note = 2'-O-methyl modified nucleotide
  modified_base 42: mod_base = OTHER; note = 2'-O-methyl modified nucleotide
  modified_base 43: mod_base = OTHER; note = 2'-O-methyl modified nucleotide
  modified_base 47: mod_base = OTHER; note = 2'-O-methyl modified nucleotide
  modified_base 48: mod_base = OTHER; note = 2'-O-methyl modified nucleotide
  modified_base 51: mod_base = OTHER; note = 2'-O-methyl modified nucleotide
  modified_base 54: mod_base = OTHER; note = nucleotide with phosphorothioate linkage
  modified_base 58: mod_base = OTHER; note = 2'-O-methyl modified nucleotide
  modified_base 59: mod_base = OTHER; note = 2'-O-methyl modified nucleotide
  modified_base 61: mod_base = OTHER; note = 2'-O-methyl modified nucleotide
  modified_base 62: mod_base = OTHER; note = 2'-O-methyl modified nucleotide
  modified_base 63: mod_base = OTHER; note = 2'-O-methyl modified nucleotide
  modified_base 64: mod_base = OTHER; note = 2'-O-methyl modified nucleotide
  modified_base 65: mod_base = OTHER; note = 2'-O-methyl modified nucleotide
  modified_base 66: mod_base = OTHER; note = 2'-O-methyl modified nucleotide
  modified_base 67: mod_base = OTHER; note = 2'-O-methyl modified nucleotide
  modified_base 68: mod_base = OTHER; note = 2'-O-methyl modified nucleotide
  modified_base 69: mod_base = OTHER; note = 2'-O-methyl modified nucleotide
  modified_base 70: mod_base = OTHER; note = 2'-O-methyl modified nucleotide
  modified_base 75: mod_base = OTHER; note = 2'-O-methyl modified nucleotide
  modified_base 77: mod_base = OTHER; note = 2'-O-methyl modified nucleotide
  modified_base 80: mod_base = OTHER; note = 2'-O-methyl modified nucleotide
  modified_base 86: mod_base = OTHER; note = 2'-O-methyl modified nucleotide
  modified_base 87: mod_base = OTHER; note = 2'-O-methyl modified nucleotide
  modified_base 89: mod_base = OTHER; note = 2'-O-methyl modified nucleotide
  modified_base 90: mod_base = OTHER; note = 2'-O-methyl modified nucleotide
  modified_base 91: mod_base = OTHER; note = 2'-O-methyl modified nucleotide
  modified_base 92: mod_base = OTHER; note = 2'-O-methyl modified nucleotide
  modified_base 99: mod_base = OTHER; note = nucleotide with phosphorothioate linkage
  modified_base 100: mod_base = OTHER; note = 2'-O-methyl modified nucleotide with phosphorothioate linkage
  modified_base 101: mod_base = OTHER; note = 2'-O-methyl modified nucleotide

SEQ ID NO: 2263 - RNA, 101 nt, synthetic construct; identical to SEQ ID NO: 1263
  source 1..101: mol_type = other RNA
  modified_base 1: mod_base = OTHER; note = 2'-O-methyl modified nucleotide with phosphorothioate linkage
  modified_base 2: mod_base = OTHER; note = 2'-O-methyl modified nucleotide with phosphorothioate linkage
  modified_base 3: mod_base = OTHER; note = 2'-O-methyl modified nucleotide with phosphorothioate linkage
  modified_base 4: mod_base = OTHER; note = 2'-O-methyl modified nucleotide
  modified_base 5: mod_base = OTHER; note = 2'-O-methyl modified nucleotide
  modified_base 8: mod_base = OTHER; note = 2'-O-methyl modified nucleotide
  modified_base 9: mod_base = OTHER; note = 2'-O-methyl modified nucleotide
  modified_base 11: mod_base = OTHER; note = 2'-O-methyl modified nucleotide
  modified_base 13: mod_base = OTHER; note = 2'-O-methyl modified nucleotide
  modified_base 18: mod_base = OTHER; note = 2'-O-methyl modified nucleotide
  modified_base 22: mod_base = OTHER; note = 2'-O-methyl modified nucleotide
  modified_base 25: mod_base = OTHER; note = 2'-O-methyl modified nucleotide
  modified_base 29: mod_base = OTHER; note = 2'-O-methyl modified nucleotide
  modified_base 30: mod_base = OTHER; note = 2'-O-methyl modified nucleotide
  modified_base 31: mod_base = OTHER; note = 2'-O-methyl modified nucleotide
  modified_base 32: mod_base = OTHER; note = 2'-O-methyl modified nucleotide
  modified_base 37: mod_base = OTHER; note = 2'-O-methyl modified nucleotide
  modified_base 38: mod_base = OTHER; note = 2'-O-methyl modified nucleotide
  modified_base 39: mod_base = OTHER; note = 2'-O-methyl modified nucleotide
  modified_base 40: mod_base = OTHER; note = 2'-O-methyl modified nucleotide
  modified_base 41: mod_base = OTHER; note = 2'-O-methyl modified nucleotide
  modified_base 42: mod_base = OTHER; note = 2'-O-methyl modified nucleotide
  modified_base 43: mod_base = OTHER; note = 2'-O-methyl modified nucleotide
  modified_base 47: mod_base = OTHER; note = 2'-O-methyl modified nucleotide
  modified_base 48: mod_base = OTHER; note = 2'-O-methyl modified nucleotide
  modified_base 51: mod_base = OTHER; note = 2'-O-methyl modified nucleotide
  modified_base 54: mod_base = OTHER; note = nucleotide with phosphorothioate linkage
  modified_base 58: mod_base = OTHER; note = 2'-O-methyl modified nucleotide
  modified_base 59: mod_base = OTHER; note = 2'-O-methyl modified nucleotide
  modified_base 61: mod_base = OTHER; note = 2'-O-methyl modified nucleotide
  modified_base 62: mod_base = OTHER; note = 2'-O-methyl modified nucleotide
  modified_base 63: mod_base = OTHER; note = 2'-O-methyl modified nucleotide
  modified_base 64: mod_base = OTHER; note = 2'-O-methyl modified nucleotide
  modified_base 65: mod_base = OTHER; note = 2'-O-methyl modified nucleotide
  modified_base 66: mod_base = OTHER; note = 2'-O-methyl modified nucleotide
  modified_base 67: mod_base = OTHER; note = 2'-O-methyl modified nucleotide
  modified_base 68: mod_base = OTHER; note = 2'-O-methyl modified nucleotide
  modified_base 69: mod_base = OTHER; note = 2'-O-methyl modified nucleotide
  modified_base 70: mod_base = OTHER; note = 2'-O-methyl modified nucleotide
  modified_base 75: mod_base = OTHER; note = 2'-O-methyl modified nucleotide
  modified_base 77: mod_base = OTHER; note = 2'-O-methyl modified nucleotide
  modified_base 80: mod_base = OTHER; note = 2'-O-methyl modified nucleotide
  modified_base 86: mod_base = OTHER; note = 2'-O-methyl modified nucleotide
  modified_base 87: mod_base = OTHER; note = 2'-O-methyl modified nucleotide
  modified_base 89: mod_base = OTHER; note = 2'-O-methyl modified nucleotide
  modified_base 90: mod_base = OTHER; note = 2'-O-methyl modified nucleotide
  modified_base 91: mod_base = OTHER; note = 2'-O-methyl modified nucleotide
  modified_base 92: mod_base = OTHER; note = 2'-O-methyl modified nucleotide
  modified_base 99: mod_base = OTHER; note = nucleotide with phosphorothioate linkage
  modified_base 100: mod_base = OTHER; note = 2'-O-methyl modified nucleotide with phosphorothioate linkage
  modified_base 101: mod_base = OTHER; note = 2'-O-methyl modified nucleotide

SEQ ID NO: 2264 - RNA, 101 nt, synthetic construct; identical to SEQ ID NO: 1264
  source 1..101: mol_type = other RNA
  modified_base 1: mod_base = OTHER; note = 2'-O-methyl modified nucleotide with phosphorothioate linkage
  modified_base 2: mod_base = OTHER; note = 2'-O-methyl modified nucleotide with phosphorothioate linkage
  modified_base 3: mod_base = OTHER; note = 2'-O-methyl modified nucleotide with phosphorothioate linkage
  modified_base 4: mod_base = OTHER; note = 2'-O-methyl modified nucleotide
  modified_base 5: mod_base = OTHER; note = 2'-O-methyl modified nucleotide
  modified_base 8: mod_base = OTHER; note = 2'-O-methyl modified nucleotide
  modified_base 9: mod_base = OTHER; note = 2'-O-methyl modified nucleotide
  modified_base 11: mod_base = OTHER; note = 2'-O-methyl modified nucleotide
  modified_base 13: mod_base = OTHER; note = 2'-O-methyl modified nucleotide
  modified_base 18: mod_base = OTHER; note = 2'-O-methyl modified nucleotide
  modified_base 22: mod_base = OTHER; note = 2'-O-methyl modified nucleotide
  modified_base 25: mod_base = OTHER; note = 2'-O-methyl modified nucleotide
  modified_base 29: mod_base = OTHER; note = 2'-O-methyl modified nucleotide
  modified_base 30: mod_base = OTHER; note = 2'-O-methyl modified nucleotide
  modified_base 31: mod_base = OTHER; note = 2'-O-methyl modified nucleotide
  modified_base 32: mod_base = OTHER; note = 2'-O-methyl modified nucleotide
  modified_base 37: mod_base = OTHER; note = 2'-O-methyl modified nucleotide
  modified_base 38: mod_base = OTHER; note = 2'-O-methyl modified nucleotide
  modified_base 39: mod_base = OTHER; note = 2'-O-methyl modified nucleotide
  modified_base 40: mod_base = OTHER; note = 2'-O-methyl modified nucleotide
  modified_base 41: mod_base = OTHER; note = 2'-O-methyl modified nucleotide
  modified_base 42: mod_base = OTHER; note = 2'-O-methyl modified nucleotide
  modified_base 43: mod_base = OTHER; note = 2'-O-methyl modified nucleotide
  modified_base 47: mod_base = OTHER; note = 2'-O-methyl modified nucleotide
  modified_base 48: mod_base = OTHER; note = 2'-O-methyl modified nucleotide
  modified_base 51: mod_base = OTHER; note = 2'-O-methyl modified nucleotide
  modified_base 54: mod_base = OTHER; note = nucleotide with phosphorothioate linkage
  modified_base 58: mod_base = OTHER; note = 2'-O-methyl modified nucleotide
  modified_base 59: mod_base = OTHER; note = 2'-O-methyl modified nucleotide
  modified_base 61: mod_base = OTHER; note = 2'-O-methyl modified nucleotide
  modified_base 62: mod_base = OTHER; note = 2'-O-methyl modified nucleotide
  modified_base 63: mod_base = OTHER; note = 2'-O-methyl modified nucleotide
  modified_base 64: mod_base = OTHER; note = 2'-O-methyl modified nucleotide
  modified_base 65: mod_base = OTHER; note = 2'-O-methyl modified nucleotide
  modified_base 66: mod_base = OTHER; note = 2'-O-methyl modified nucleotide
  modified_base 67: mod_base = OTHER; note = 2'-O-methyl modified nucleotide
  modified_base 68: mod_base = OTHER; note = 2'-O-methyl modified nucleotide
  modified_base 69: mod_base = OTHER; note = 2'-O-methyl modified nucleotide
  modified_base 70: mod_base = OTHER; note = 2'-O-methyl modified nucleotide
  modified_base 75: mod_base = OTHER; note = 2'-O-methyl modified nucleotide
  modified_base 77: mod_base = OTHER; note = 2'-O-methyl modified nucleotide
  modified_base 80: mod_base = OTHER; note = 2'-O-methyl modified nucleotide
  modified_base 86: mod_base = OTHER; note = 2'-O-methyl modified nucleotide
  modified_base 87: mod_base = OTHER; note = 2'-O-methyl modified nucleotide
  modified_base 89: mod_base = OTHER; note = 2'-O-methyl modified nucleotide
  modified_base 90: mod_base = OTHER; note = 2'-O-methyl modified nucleotide
  modified_base 91: mod_base = OTHER; note = 2'-O-methyl modified nucleotide
  modified_base 92: mod_base = OTHER; note = 2'-O-methyl modified nucleotide
  modified_base 99: mod_base = OTHER; note = nucleotide with phosphorothioate linkage
  modified_base 100: mod_base = OTHER; note = 2'-O-methyl modified nucleotide with phosphorothioate linkage
  modified_base 101: mod_base = OTHER; note = 2'-O-methyl modified nucleotide

SEQ ID NO: 2265 - RNA, 101 nt, synthetic construct; identical to SEQ ID NO: 1265
  source 1..101: mol_type = other RNA
  modified_base 1: mod_base = OTHER; note = 2'-O-methyl modified nucleotide with phosphorothioate linkage
  modified_base 2: mod_base = OTHER; note = 2'-O-methyl modified nucleotide with phosphorothioate linkage
  modified_base 3: mod_base = OTHER; note = 2'-O-methyl modified nucleotide with phosphorothioate linkage
  modified_base 4: mod_base = OTHER; note = 2'-O-methyl modified nucleotide
  modified_base 5: mod_base = OTHER; note = 2'-O-methyl modified nucleotide
  modified_base 8: mod_base = OTHER; note = 2'-O-methyl modified nucleotide
  modified_base 9: mod_base = OTHER; note = 2'-O-methyl modified nucleotide
  modified_base 11: mod_base = OTHER; note = 2'-O-methyl modified nucleotide
  modified_base 13: mod_base = OTHER; note = 2'-O-methyl modified nucleotide
  modified_base 18: mod_base = OTHER; note = 2'-O-methyl modified nucleotide
  modified_base 22: mod_base = OTHER; note = 2'-O-methyl modified nucleotide
  modified_base 25: mod_base = OTHER; note = 2'-O-methyl modified nucleotide
  modified_base 29: mod_base = OTHER; note = 2'-O-methyl modified nucleotide
  modified_base 30: mod_base = OTHER; note = 2'-O-methyl modified nucleotide
  modified_base 31: mod_base = OTHER; note = 2'-O-methyl modified nucleotide
  modified_base 32: mod_base = OTHER; note = 2'-O-methyl modified nucleotide
  modified_base 37: mod_base = OTHER; note = 2'-O-methyl modified nucleotide
  modified_base 38: mod_base = OTHER; note = 2'-O-methyl modified nucleotide
  modified_base 39: mod_base = OTHER; note = 2'-O-methyl modified nucleotide
  modified_base 40: mod_base = OTHER; note = 2'-O-methyl modified nucleotide
  modified_base 41: mod_base = OTHER; note = 2'-O-methyl modified nucleotide
  modified_base 42: mod_base = OTHER; note = 2'-O-methyl modified nucleotide
  modified_base 43: mod_base = OTHER; note = 2'-O-methyl modified nucleotide
  modified_base 47: mod_base = OTHER; note = 2'-O-methyl modified nucleotide
  modified_base 48: mod_base = OTHER; note = 2'-O-methyl modified nucleotide
  modified_base 51: mod_base = OTHER; note = 2'-O-methyl modified nucleotide
  modified_base 54: mod_base = OTHER; note = nucleotide with phosphorothioate linkage
  modified_base 58: mod_base = OTHER; note = 2'-O-methyl modified nucleotide
  modified_base 59: mod_base = OTHER; note = 2'-O-methyl modified nucleotide
  modified_base 61: mod_base = OTHER; note = 2'-O-methyl modified nucleotide
  modified_base 62: mod_base = OTHER; note = 2'-O-methyl modified nucleotide
  modified_base 63: mod_base = OTHER; note = 2'-O-methyl modified nucleotide
  modified_base 64: mod_base = OTHER; note = 2'-O-methyl modified nucleotide
  modified_base 65: mod_base = OTHER; note = 2'-O-methyl modified nucleotide
  modified_base 66: mod_base = OTHER; note = 2'-O-methyl modified nucleotide
  modified_base 67: mod_base = OTHER; note = 2'-O-methyl modified nucleotide
  modified_base 68: mod_base = OTHER; note = 2'-O-methyl modified nucleotide
  modified_base 69: mod_base = OTHER; note = 2'-O-methyl modified nucleotide
  modified_base 70: mod_base = OTHER; note = 2'-O-methyl modified nucleotide
  modified_base 75: mod_base = OTHER; note = 2'-O-methyl modified nucleotide
  modified_base 77: mod_base = OTHER; note = 2'-O-methyl modified nucleotide
  modified_base 80: mod_base = OTHER; note = 2'-O-methyl modified nucleotide
  modified_base 86: mod_base = OTHER; note = 2'-O-methyl modified nucleotide
  modified_base 87: mod_base = OTHER; note = 2'-O-methyl modified nucleotide
  modified_base 89: mod_base = OTHER; note = 2'-O-methyl modified nucleotide
  modified_base 90: mod_base = OTHER; note = 2'-O-methyl modified nucleotide
  modified_base 91: mod_base = OTHER; note = 2'-O-methyl modified nucleotide
  modified_base 92: mod_base = OTHER; note = 2'-O-methyl modified nucleotide
  modified_base 99: mod_base = OTHER; note = nucleotide with phosphorothioate linkage
  modified_base 100: mod_base = OTHER; note = 2'-O-methyl modified nucleotide with phosphorothioate linkage
  modified_base 101: mod_base = OTHER; note = 2'-O-methyl modified nucleotide

SEQ ID NO: 2266-2300 - skipped (35 entries)

SEQ ID NO: 2301 - RNA, 101 nt, synthetic construct; identical to SEQ ID NO: 1301
  source 1..101: mol_type = other RNA
  modified_base 1: mod_base = OTHER; note = 2'-O-methyl modified nucleotide with phosphorothioate linkage
  modified_base 2: mod_base = OTHER; note = 2'-O-methyl modified nucleotide with phosphorothioate linkage
  modified_base 3: mod_base = OTHER; note = 2'-O-methyl modified nucleotide with phosphorothioate linkage
  modified_base 4: mod_base = OTHER; note = 2'-O-methyl modified nucleotide
  modified_base 5: mod_base = OTHER; note = 2'-O-methyl modified nucleotide
  modified_base 8: mod_base = OTHER; note = 2'-O-methyl modified nucleotide
  modified_base 9: mod_base = OTHER; note = 2'-O-methyl modified nucleotide
  modified_base 11: mod_base = OTHER; note = 2'-O-methyl modified nucleotide
  modified_base 13: mod_base = OTHER; note = 2'-O-methyl modified nucleotide
  modified_base 18: mod_base = OTHER; note = 2'-O-methyl modified nucleotide
  modified_base 22: mod_base = OTHER; note = 2'-O-methyl modified nucleotide
  modified_base 25: mod_base = OTHER; note = 2'-O-methyl modified nucleotide
  modified_base 29: mod_base = OTHER; note = 2'-O-methyl modified nucleotide
  modified_base 30: mod_base = OTHER; note = 2'-O-methyl modified nucleotide
  modified_base 31: mod_base = OTHER; note = 2'-O-methyl modified nucleotide
  modified_base 32: mod_base = OTHER; note = 2'-O-methyl modified nucleotide
  modified_base 37: mod_base = OTHER; note = 2'-O-methyl modified nucleotide
  modified_base 38: mod_base = OTHER; note = 2'-O-methyl modified nucleotide
  modified_base 39: mod_base = OTHER; note = 2'-O-methyl modified nucleotide
  modified_base 40: mod_base = OTHER; note = 2'-O-methyl modified nucleotide
  modified_base 41: mod_base = OTHER; note = 2'-O-methyl modified nucleotide
  modified_base 42: mod_base = OTHER; note = 2'-O-methyl modified nucleotide
  modified_base 43: mod_base = OTHER; note = 2'-O-methyl modified nucleotide
  modified_base 47: mod_base = OTHER; note = 2'-O-methyl modified nucleotide
  modified_base 48: mod_base = OTHER; note = 2'-O-methyl modified nucleotide
  modified_base 51: mod_base = OTHER; note = 2'-O-methyl modified nucleotide
  modified_base 54: mod_base = OTHER; note = nucleotide with phosphorothioate linkage
  modified_base 58: mod_base = OTHER; note = 2'-O-methyl modified nucleotide
  modified_base 59: mod_base = OTHER; note = 2'-O-methyl modified nucleotide
  modified_base 61: mod_base = OTHER; note = 2'-O-methyl modified nucleotide
  modified_base 62: mod_base = OTHER; note = 2'-O-methyl modified nucleotide
  modified_base 63: mod_base = OTHER; note = 2'-O-methyl modified nucleotide
  modified_base 64: mod_base = OTHER; note = 2'-O-methyl modified nucleotide
  modified_base 65: mod_base = OTHER; note = 2'-O-methyl modified nucleotide
  modified_base 66: mod_base = OTHER; note = 2'-O-methyl modified nucleotide
  modified_base 67: mod_base = OTHER; note = 2'-O-methyl modified nucleotide
  modified_base 68: mod_base = OTHER; note = 2'-O-methyl modified nucleotide
  modified_base 69: mod_base = OTHER; note = 2'-O-methyl modified nucleotide
  modified_base 70: mod_base = OTHER; note = 2'-O-methyl modified nucleotide
  modified_base 75: mod_base = OTHER; note = 2'-O-methyl modified nucleotide
  modified_base 77: mod_base = OTHER; note = 2'-O-methyl modified nucleotide
  modified_base 80: mod_base = OTHER; note = 2'-O-methyl modified nucleotide
  modified_base 86: mod_base = OTHER; note = 2'-O-methyl modified nucleotide
  modified_base 87: mod_base = OTHER; note = 2'-O-methyl modified nucleotide
  modified_base 89: mod_base = OTHER; note = 2'-O-methyl modified nucleotide
  modified_base 90: mod_base = OTHER; note = 2'-O-methyl modified nucleotide
  modified_base 91: mod_base = OTHER; note = 2'-O-methyl modified nucleotide
  modified_base 92: mod_base = OTHER; note = 2'-O-methyl modified nucleotide
  modified_base 99: mod_base = OTHER; note = nucleotide with phosphorothioate linkage
  modified_base 100: mod_base = OTHER; note = 2'-O-methyl modified nucleotide with phosphorothioate linkage
  modified_base 101: mod_base = OTHER; note = 2'-O-methyl modified nucleotide

SEQ ID NO: 2302 - RNA, 101 nt, synthetic construct; identical to SEQ ID NO: 1302
  source 1..101: mol_type = other RNA
  modified_base 1: mod_base = OTHER; note = 2'-O-methyl modified nucleotide with phosphorothioate linkage
  modified_base 2: mod_base = OTHER; note = 2'-O-methyl modified nucleotide with phosphorothioate linkage
  modified_base 3: mod_base = OTHER; note = 2'-O-methyl modified nucleotide with phosphorothioate linkage
  modified_base 4: mod_base = OTHER; note = 2'-O-methyl modified nucleotide
  modified_base 5: mod_base = OTHER; note = 2'-O-methyl modified nucleotide
  modified_base 8: mod_base = OTHER; note = 2'-O-methyl modified nucleotide
  modified_base 9: mod_base = OTHER; note = 2'-O-methyl modified nucleotide
  modified_base 11: mod_base = OTHER; note = 2'-O-methyl modified nucleotide
  modified_base 13: mod_base = OTHER; note = 2'-O-methyl modified nucleotide
  modified_base 18: mod_base = OTHER; note = 2'-O-methyl modified nucleotide
  modified_base 22: mod_base = OTHER; note = 2'-O-methyl modified nucleotide
  modified_base 25: mod_base = OTHER; note = 2'-O-methyl modified nucleotide
  modified_base 29: mod_base = OTHER; note = 2'-O-methyl modified nucleotide
  modified_base 30: mod_base = OTHER; note = 2'-O-methyl modified nucleotide
  modified_base 31: mod_base = OTHER; note = 2'-O-methyl modified nucleotide
  modified_base 32: mod_base = OTHER; note = 2'-O-methyl modified nucleotide
  modified_base 37: mod_base = OTHER; note = 2'-O-methyl modified nucleotide
  modified_base 38: mod_base = OTHER; note = 2'-O-methyl modified nucleotide
  modified_base 39: mod_base = OTHER; note = 2'-O-methyl modified nucleotide
  modified_base 40: mod_base = OTHER; note = 2'-O-methyl modified nucleotide
  modified_base 41: mod_base = OTHER; note = 2'-O-methyl modified nucleotide
  modified_base 42: mod_base = OTHER; note = 2'-O-methyl modified nucleotide
  modified_base 43: mod_base = OTHER; note = 2'-O-methyl modified nucleotide
  modified_base 47: mod_base = OTHER; note = 2'-O-methyl modified nucleotide
  modified_base 48: mod_base = OTHER; note = 2'-O-methyl modified nucleotide
  modified_base 51: mod_base = OTHER; note = 2'-O-methyl modified nucleotide
  modified_base 54: mod_base = OTHER; note = nucleotide with phosphorothioate linkage
  modified_base 58: mod_base = OTHER; note = 2'-O-methyl modified nucleotide
  modified_base 59: mod_base = OTHER; note = 2'-O-methyl modified nucleotide
  modified_base 61: mod_base = OTHER; note = 2'-O-methyl modified nucleotide
  modified_base 62: mod_base = OTHER; note = 2'-O-methyl modified nucleotide
  modified_base 63: mod_base = OTHER; note = 2'-O-methyl modified nucleotide
  modified_base 64: mod_base = OTHER; note = 2'-O-methyl modified nucleotide
  modified_base 65: mod_base = OTHER; note = 2'-O-methyl modified nucleotide
  modified_base 66: mod_base = OTHER; note = 2'-O-methyl modified nucleotide
  modified_base 67: mod_base = OTHER; note = 2'-O-methyl modified nucleotide
  modified_base 68: mod_base = OTHER; note = 2'-O-methyl modified nucleotide
  modified_base 69: mod_base = OTHER; note = 2'-O-methyl modified nucleotide
  modified_base 70: mod_base = OTHER; note = 2'-O-methyl modified nucleotide
  modified_base 75: mod_base = OTHER; note = 2'-O-methyl modified nucleotide
  modified_base 77: mod_base = OTHER; note = 2'-O-methyl modified nucleotide
  modified_base 80: mod_base = OTHER; note = 2'-O-methyl modified nucleotide
  modified_base 86: mod_base = OTHER; note = 2'-O-methyl modified nucleotide
  modified_base 87: mod_base = OTHER; note = 2'-O-methyl modified nucleotide
  modified_base 89: mod_base = OTHER; note = 2'-O-methyl modified nucleotide
  modified_base 90: mod_base = OTHER; note = 2'-O-methyl modified nucleotide
  modified_base 91: mod_base = OTHER; note = 2'-O-methyl modified nucleotide
  modified_base 92: mod_base = OTHER; note = 2'-O-methyl modified nucleotide
  modified_base 99: mod_base = OTHER; note = nucleotide with phosphorothioate linkage
  modified_base 100: mod_base = OTHER; note = 2'-O-methyl modified nucleotide with phosphorothioate linkage
  modified_base 101: mod_base = OTHER; note = 2'-O-methyl modified nucleotide

SEQ ID NO: 2303 - skipped

SEQ ID NO: 2304 - RNA, 101 nt, synthetic construct; identical to SEQ ID NO: 1304
  source 1..101: mol_type = other RNA
  modified_base 1: mod_base = OTHER; note = 2'-O-methyl modified nucleotide with phosphorothioate linkage
  modified_base 2: mod_base = OTHER; note = 2'-O-methyl modified nucleotide with phosphorothioate linkage
  modified_base 3: mod_base = OTHER; note = 2'-O-methyl modified nucleotide with phosphorothioate linkage
  modified_base 4: mod_base = OTHER; note = 2'-O-methyl modified nucleotide
  modified_base 5: mod_base = OTHER; note = 2'-O-methyl modified nucleotide
  modified_base 8: mod_base = OTHER; note = 2'-O-methyl modified nucleotide
  modified_base 9: mod_base = OTHER; note = 2'-O-methyl modified nucleotide
  modified_base 11: mod_base = OTHER; note = 2'-O-methyl modified nucleotide
  modified_base 13: mod_base = OTHER; note = 2'-O-methyl modified nucleotide
  modified_base 18: mod_base = OTHER; note = 2'-O-methyl modified nucleotide
  modified_base 22: mod_base = OTHER; note = 2'-O-methyl modified nucleotide
  modified_base 25: mod_base = OTHER; note = 2'-O-methyl modified nucleotide
  modified_base 29: mod_base = OTHER; note = 2'-O-methyl modified nucleotide
  modified_base 30: mod_base = OTHER; note = 2'-O-methyl modified nucleotide
  modified_base 31: mod_base = OTHER; note = 2'-O-methyl modified nucleotide
  modified_base 32: mod_base = OTHER; note = 2'-O-methyl modified nucleotide
  modified_base 37: mod_base = OTHER; note = 2'-O-methyl modified nucleotide
  modified_base 38: mod_base = OTHER; note = 2'-O-methyl modified nucleotide
  modified_base 39: mod_base = OTHER; note = 2'-O-methyl modified nucleotide
  modified_base 40: mod_base = OTHER; note = 2'-O-methyl modified nucleotide
  modified_base 41: mod_base = OTHER; note = 2'-O-methyl modified nucleotide
  modified_base 42: mod_base = OTHER; note = 2'-O-methyl modified nucleotide
  modified_base 43: mod_base = OTHER; note = 2'-O-methyl modified nucleotide
  modified_base 47: mod_base = OTHER; note = 2'-O-methyl modified nucleotide
  modified_base 48: mod_base = OTHER; note = 2'-O-methyl modified nucleotide
  modified_base 51: mod_base = OTHER; note = 2'-O-methyl modified nucleotide
  modified_base 54: mod_base = OTHER; note = nucleotide with phosphorothioate linkage
  modified_base 58: mod_base = OTHER; note = 2'-O-methyl modified nucleotide
  modified_base 59: mod_base = OTHER; note = 2'-O-methyl modified nucleotide
  modified_base 61: mod_base = OTHER; note = 2'-O-methyl modified nucleotide
  modified_base 62: mod_base = OTHER; note = 2'-O-methyl modified nucleotide
  modified_base 63: mod_base = OTHER; note = 2'-O-methyl modified nucleotide
  modified_base 64: mod_base = OTHER; note = 2'-O-methyl modified nucleotide
  modified_base 65: mod_base = OTHER; note = 2'-O-methyl modified nucleotide
  modified_base 66: mod_base = OTHER; note = 2'-O-methyl modified nucleotide
  modified_base 67: mod_base = OTHER; note = 2'-O-methyl modified nucleotide
  modified_base 68: mod_base = OTHER; note = 2'-O-methyl modified nucleotide
  modified_base 69: mod_base = OTHER; note = 2'-O-methyl modified nucleotide
  modified_base 70: mod_base = OTHER; note = 2'-O-methyl modified nucleotide
  modified_base 75: mod_base = OTHER; note = 2'-O-methyl modified nucleotide
  modified_base 77: mod_base = OTHER; note = 2'-O-methyl modified nucleotide
  modified_base 80: mod_base = OTHER; note = 2'-O-methyl modified nucleotide
  modified_base 86: mod_base = OTHER; note = 2'-O-methyl modified nucleotide
  modified_base 87: mod_base = OTHER; note = 2'-O-methyl modified nucleotide
  modified_base 89: mod_base = OTHER; note = 2'-O-methyl modified nucleotide
  modified_base 90: mod_base = OTHER; note = 2'-O-methyl modified nucleotide
  modified_base 91: mod_base = OTHER; note = 2'-O-methyl modified nucleotide
  modified_base 92: mod_base = OTHER; note = 2'-O-methyl modified nucleotide
  modified_base 99: mod_base = OTHER; note = nucleotide with phosphorothioate linkage
  modified_base 100: mod_base = OTHER; note = 2'-O-methyl modified nucleotide with phosphorothioate linkage
  modified_base 101: mod_base = OTHER; note = 2'-O-methyl modified nucleotide

SEQ ID NO: 2305 - RNA, 101 nt, synthetic construct; identical to SEQ ID NO: 1305
  source 1..101: mol_type = other RNA
  modified_base 1: mod_base = OTHER; note = 2'-O-methyl modified nucleotide with phosphorothioate linkage
  modified_base 2: mod_base = OTHER; note = 2'-O-methyl modified nucleotide with phosphorothioate linkage
  modified_base 3: mod_base = OTHER; note = 2'-O-methyl modified nucleotide with phosphorothioate linkage
  modified_base 4: mod_base = OTHER; note = 2'-O-methyl modified nucleotide
  modified_base 5: mod_base = OTHER; note = 2'-O-methyl modified nucleotide
  modified_base 8: mod_base = OTHER; note = 2'-O-methyl modified nucleotide
  modified_base 9: mod_base = OTHER; note = 2'-O-methyl modified nucleotide
  modified_base 11: mod_base = OTHER; note = 2'-O-methyl modified nucleotide
  modified_base 13: mod_base = OTHER; note = 2'-O-methyl modified nucleotide
  modified_base 18: mod_base = OTHER; note = 2'-O-methyl modified nucleotide
  modified_base 22: mod_base = OTHER; note = 2'-O-methyl modified nucleotide
  modified_base 25: mod_base = OTHER; note = 2'-O-methyl modified nucleotide
  modified_base 29: mod_base = OTHER; note = 2'-O-methyl modified nucleotide
  modified_base 30: mod_base = OTHER; note = 2'-O-methyl modified nucleotide
  modified_base 31: mod_base = OTHER; note = 2'-O-methyl modified nucleotide
  modified_base 32: mod_base = OTHER; note = 2'-O-methyl modified nucleotide
  modified_base 37: mod_base = OTHER; note = 2'-O-methyl modified nucleotide
  modified_base 38: mod_base = OTHER; note = 2'-O-methyl modified nucleotide
  modified_base 39: mod_base = OTHER; note = 2'-O-methyl modified nucleotide
  modified_base 40: mod_base = OTHER; note = 2'-O-methyl modified nucleotide
  modified_base 41: mod_base = OTHER; note = 2'-O-methyl modified nucleotide
  modified_base 42: mod_base = OTHER; note = 2'-O-methyl modified nucleotide
  modified_base 43: mod_base = OTHER; note = 2'-O-methyl modified nucleotide
  modified_base 47: mod_base = OTHER; note = 2'-O-methyl modified nucleotide
  modified_base 48: mod_base = OTHER; note = 2'-O-methyl modified nucleotide
  modified_base 51: mod_base = OTHER; note = 2'-O-methyl modified nucleotide
  modified_base 54: mod_base = OTHER; note = nucleotide with phosphorothioate linkage
  modified_base 58: mod_base = OTHER; note = 2'-O-methyl modified nucleotide
  modified_base 59: mod_base = OTHER; note = 2'-O-methyl modified nucleotide
  modified_base 61: mod_base = OTHER; note = 2'-O-methyl modified nucleotide
  modified_base 62: mod_base = OTHER; note = 2'-O-methyl modified nucleotide
  modified_base 63: mod_base = OTHER; note = 2'-O-methyl modified nucleotide
  modified_base 64: mod_base = OTHER; note = 2'-O-methyl modified nucleotide
  modified_base 65: mod_base = OTHER; note = 2'-O-methyl modified nucleotide
  modified_base 66: mod_base = OTHER; note = 2'-O-methyl modified nucleotide
  modified_base 67: mod_base = OTHER; note = 2'-O-methyl modified nucleotide
  modified_base 68: mod_base = OTHER; note = 2'-O-methyl modified nucleotide
  modified_base 69: mod_base = OTHER; note = 2'-O-methyl modified nucleotide
  modified_base 70: mod_base = OTHER; note = 2'-O-methyl modified nucleotide
  modified_base 75: mod_base = OTHER; note = 2'-O-methyl modified nucleotide
  modified_base 77: mod_base = OTHER; note = 2'-O-methyl modified nucleotide
  modified_base 80: mod_base = OTHER; note = 2'-O-methyl modified nucleotide
  modified_base 86: mod_base = OTHER; note = 2'-O-methyl modified nucleotide
  modified_base 87: mod_base = OTHER; note = 2'-O-methyl modified nucleotide
  modified_base 89: mod_base = OTHER; note = 2'-O-methyl modified nucleotide
  modified_base 90: mod_base = OTHER; note = 2'-O-methyl modified nucleotide
  modified_base 91: mod_base = OTHER; note = 2'-O-methyl modified nucleotide
  modified_base 92: mod_base = OTHER; note = 2'-O-methyl modified nucleotide
  modified_base 99: mod_base = OTHER; note = nucleotide with phosphorothioate linkage
  modified_base 100: mod_base = OTHER; note = 2'-O-methyl modified nucleotide with phosphorothioate linkage
  modified_base 101: mod_base = OTHER; note = 2'-O-methyl modified nucleotide

SEQ ID NO: 2306 - RNA, 101 nt, synthetic construct; identical to SEQ ID NO: 1306
  source 1..101: mol_type = other RNA
  modified_base 1: mod_base = OTHER; note = 2'-O-methyl modified nucleotide with phosphorothioate linkage
  modified_base 2: mod_base = OTHER; note = 2'-O-methyl modified nucleotide with phosphorothioate linkage
  modified_base 3: mod_base = OTHER; note = 2'-O-methyl modified nucleotide with phosphorothioate linkage
  modified_base 4: mod_base = OTHER; note = 2'-O-methyl modified nucleotide
  modified_base 5: mod_base = OTHER; note = 2'-O-methyl modified nucleotide
  modified_base 8: mod_base = OTHER; note = 2'-O-methyl modified nucleotide
  modified_base 9: mod_base = OTHER; note = 2'-O-methyl modified nucleotide
  modified_base 11: mod_base = OTHER; note = 2'-O-methyl modified nucleotide
  modified_base 13: mod_base = OTHER; note = 2'-O-methyl modified nucleotide
  modified_base 18: mod_base = OTHER; note = 2'-O-methyl modified nucleotide
  modified_base 22: mod_base = OTHER; note = 2'-O-methyl modified nucleotide
  modified_base 25: mod_base = OTHER; note = 2'-O-methyl modified nucleotide
  modified_base 29: mod_base = OTHER; note = 2'-O-methyl modified nucleotide
  modified_base 30: mod_base = OTHER; note = 2'-O-methyl modified nucleotide
  modified_base 31: mod_base = OTHER; note = 2'-O-methyl modified nucleotide
  modified_base 32: mod_base = OTHER; note = 2'-O-methyl modified nucleotide
  modified_base 37: mod_base = OTHER; note = 2'-O-methyl modified nucleotide
  modified_base 38: mod_base = OTHER; note = 2'-O-methyl modified nucleotide
  modified_base 39: mod_base = OTHER; note = 2'-O-methyl modified nucleotide
  modified_base 40: mod_base = OTHER; note = 2'-O-methyl modified nucleotide
  modified_base 41: mod_base = OTHER; note = 2'-O-methyl modified nucleotide
  modified_base 42: mod_base = OTHER; note = 2'-O-methyl modified nucleotide
  modified_base 43: mod_base = OTHER; note = 2'-O-methyl modified nucleotide
  modified_base 47: mod_base = OTHER; note = 2'-O-methyl modified nucleotide
  modified_base 48: mod_base = OTHER; note = 2'-O-methyl modified nucleotide
  modified_base 51: mod_base = OTHER; note = 2'-O-methyl modified nucleotide
  modified_base 54: mod_base = OTHER; note = nucleotide with phosphorothioate linkage
  modified_base 58: mod_base = OTHER; note = 2'-O-methyl modified nucleotide
  modified_base 59: mod_base = OTHER; note = 2'-O-methyl modified nucleotide
  modified_base 61: mod_base = OTHER; note = 2'-O-methyl modified nucleotide
  modified_base 62: mod_base = OTHER; note = 2'-O-methyl modified nucleotide
  modified_base 63: mod_base = OTHER; note = 2'-O-methyl modified nucleotide
  modified_base 64: mod_base = OTHER; note = 2'-O-methyl modified nucleotide
  modified_base 65: mod_base = OTHER; note = 2'-O-methyl modified nucleotide
  modified_base 66: mod_base = OTHER; note = 2'-O-methyl modified nucleotide
  modified_base 67: mod_base = OTHER; note = 2'-O-methyl modified nucleotide
  modified_base 68: mod_base = OTHER; note = 2'-O-methyl modified nucleotide
  modified_base 69: mod_base = OTHER; note = 2'-O-methyl modified nucleotide
  modified_base 70: mod_base = OTHER; note = 2'-O-methyl modified nucleotide
  modified_base 75: mod_base = OTHER; note = 2'-O-methyl modified nucleotide
  modified_base 77: mod_base = OTHER; note = 2'-O-methyl modified nucleotide
  modified_base 80: mod_base = OTHER; note = 2'-O-methyl modified nucleotide
  modified_base 86: mod_base = OTHER; note = 2'-O-methyl modified nucleotide
  modified_base 87: mod_base = OTHER; note = 2'-O-methyl modified nucleotide
  modified_base 89: mod_base = OTHER; note = 2'-O-methyl modified nucleotide
  modified_base 90: mod_base = OTHER; note = 2'-O-methyl modified nucleotide
  modified_base 91: mod_base = OTHER; note = 2'-O-methyl modified nucleotide
  modified_base 92: mod_base = OTHER; note = 2'-O-methyl modified nucleotide
  modified_base 99: mod_base = OTHER; note = nucleotide with phosphorothioate linkage
  modified_base 100: mod_base = OTHER; note = 2'-O-methyl modified nucleotide with phosphorothioate linkage
  modified_base 101: mod_base = OTHER; note = 2'-O-methyl modified nucleotide

SEQ ID NO: 2307 - RNA, 101 nt, synthetic construct; identical to SEQ ID NO: 1307
  source 1..101: mol_type = other RNA
  modified_base 1: mod_base = OTHER; note = 2'-O-methyl modified nucleotide with phosphorothioate linkage
  modified_base 2: mod_base = OTHER; note = 2'-O-methyl modified nucleotide with phosphorothioate linkage
  modified_base 3: mod_base = OTHER; note = 2'-O-methyl modified nucleotide with phosphorothioate linkage
  modified_base 4: mod_base = OTHER; note = 2'-O-methyl modified nucleotide
  modified_base 5: mod_base = OTHER; note = 2'-O-methyl modified nucleotide
  modified_base 8: mod_base = OTHER; note = 2'-O-methyl modified nucleotide
  modified_base 9: mod_base = OTHER; note = 2'-O-methyl modified nucleotide
  modified_base 11: mod_base = OTHER; note = 2'-O-methyl modified nucleotide
  modified_base 13: mod_base = OTHER; note = 2'-O-methyl modified nucleotide
  modified_base 18: mod_base = OTHER; note = 2'-O-methyl modified nucleotide
  modified_base 22: mod_base = OTHER; note = 2'-O-methyl modified nucleotide
  modified_base 25: mod_base = OTHER; note = 2'-O-methyl modified nucleotide
  modified_base 29: mod_base = OTHER; note = 2'-O-methyl modified nucleotide
  modified_base 30: mod_base = OTHER; note = 2'-O-methyl modified nucleotide
  modified_base 31: mod_base = OTHER; note = 2'-O-methyl modified nucleotide
  modified_base 32: mod_base = OTHER; note = 2'-O-methyl modified nucleotide
  modified_base 37: mod_base = OTHER; note = 2'-O-methyl modified nucleotide
  modified_base 38: mod_base = OTHER; note = 2'-O-methyl modified nucleotide
  modified_base 39: mod_base = OTHER; note = 2'-O-methyl modified nucleotide
  modified_base 40: mod_base = OTHER; note = 2'-O-methyl modified nucleotide
  modified_base 41: mod_base = OTHER; note = 2'-O-methyl modified nucleotide
  modified_base 42: mod_base = OTHER; note = 2'-O-methyl modified nucleotide
  modified_base 43: mod_base = OTHER; note = 2'-O-methyl modified nucleotide
  modified_base 47: mod_base = OTHER; note = 2'-O-methyl modified nucleotide
  modified_base 48: mod_base = OTHER; note = 2'-O-methyl modified nucleotide
  modified_base 51: mod_base = OTHER; note = 2'-O-methyl modified nucleotide
  modified_base 54: mod_base = OTHER; note = nucleotide with phosphorothioate linkage
  modified_base 58: mod_base = OTHER; note = 2'-O-methyl modified nucleotide
  modified_base 59: mod_base = OTHER; note = 2'-O-methyl modified nucleotide
  modified_base 61: mod_base = OTHER; note = 2'-O-methyl modified nucleotide
  modified_base 62: mod_base = OTHER; note = 2'-O-methyl modified nucleotide
  modified_base 63: mod_base = OTHER; note = 2'-O-methyl modified nucleotide
  modified_base 64: mod_base = OTHER; note = 2'-O-methyl modified nucleotide
  modified_base 65: mod_base = OTHER; note = 2'-O-methyl modified nucleotide
  modified_base 66: mod_base = OTHER; note = 2'-O-methyl modified nucleotide
  modified_base 67: mod_base = OTHER; note = 2'-O-methyl modified nucleotide
  modified_base 68: mod_base = OTHER; note = 2'-O-methyl modified nucleotide
  modified_base 69: mod_base = OTHER; note = 2'-O-methyl modified nucleotide
  modified_base 70: mod_base = OTHER; note = 2'-O-methyl modified nucleotide
  modified_base 75: mod_base = OTHER; note = 2'-O-methyl modified nucleotide
  modified_base 77: mod_base = OTHER; note = 2'-O-methyl modified nucleotide
  modified_base 80: mod_base = OTHER; note = 2'-O-methyl modified nucleotide
  modified_base 86: mod_base = OTHER; note = 2'-O-methyl modified nucleotide
  modified_base 87: mod_base = OTHER; note = 2'-O-methyl modified nucleotide
  modified_base 89: mod_base = OTHER; note = 2'-O-methyl modified nucleotide
  modified_base 90: mod_base = OTHER; note = 2'-O-methyl modified nucleotide
  modified_base 91: mod_base = OTHER; note = 2'-O-methyl modified nucleotide
  modified_base 92: mod_base = OTHER; note = 2'-O-methyl modified nucleotide
  modified_base 99: mod_base = OTHER; note = nucleotide with phosphorothioate linkage
  modified_base 100: mod_base = OTHER; note = 2'-O-methyl modified nucleotide with phosphorothioate linkage
  modified_base 101: mod_base = OTHER; note = 2'-O-methyl modified nucleotide

SEQ ID NO: 2308 - RNA, 101 nt, synthetic construct; identical to SEQ ID NO: 1308
  source 1..101: mol_type = other RNA
  modified_base 1: mod_base = OTHER; note = 2'-O-methyl modified nucleotide with phosphorothioate linkage
  modified_base 2: mod_base = OTHER; note = 2'-O-methyl modified nucleotide with phosphorothioate linkage
  modified_base 3: mod_base = OTHER; note = 2'-O-methyl modified nucleotide with phosphorothioate linkage
  modified_base 4: mod_base = OTHER; note = 2'-O-methyl modified nucleotide
  modified_base 5: mod_base = OTHER; note = 2'-O-methyl modified nucleotide
  modified_base 8: mod_base = OTHER; note = 2'-O-methyl modified nucleotide
  modified_base 9: mod_base = OTHER; note = 2'-O-methyl modified nucleotide
  modified_base 11: mod_base = OTHER; note = 2'-O-methyl modified nucleotide
  modified_base 13: mod_base = OTHER; note = 2'-O-methyl modified nucleotide
  modified_base 18: mod_base = OTHER; note = 2'-O-methyl modified nucleotide
  modified_base 22: mod_base = OTHER; note = 2'-O-methyl modified nucleotide
  modified_base 25: mod_base = OTHER; note = 2'-O-methyl modified nucleotide
  modified_base 29: mod_base = OTHER; note = 2'-O-methyl modified nucleotide
  modified_base 30: mod_base = OTHER; note = 2'-O-methyl modified nucleotide
  modified_base 31: mod_base = OTHER; note = 2'-O-methyl modified nucleotide
  modified_base 32: mod_base = OTHER; note = 2'-O-methyl modified nucleotide
  modified_base 37: mod_base = OTHER; note = 2'-O-methyl modified nucleotide
  modified_base 38: mod_base = OTHER; note = 2'-O-methyl modified nucleotide
  modified_base 39: mod_base = OTHER; note = 2'-O-methyl modified nucleotide
  modified_base 40: mod_base = OTHER; note = 2'-O-methyl modified nucleotide
  modified_base 41: mod_base = OTHER; note = 2'-O-methyl modified nucleotide
  modified_base 42: mod_base = OTHER; note = 2'-O-methyl modified nucleotide
  modified_base 43: mod_base = OTHER; note = 2'-O-methyl modified nucleotide
  modified_base 47: mod_base = OTHER; note = 2'-O-methyl modified nucleotide
  modified_base 48: mod_base = OTHER; note = 2'-O-methyl modified nucleotide
  modified_base 51: mod_base = OTHER; note = 2'-O-methyl modified nucleotide
  modified_base 54: mod_base = OTHER; note = nucleotide with phosphorothioate linkage
  modified_base 58: mod_base = OTHER; note = 2'-O-methyl modified nucleotide
  modified_base 59: mod_base = OTHER; note = 2'-O-methyl modified nucleotide
  modified_base 61: mod_base = OTHER; note = 2'-O-methyl modified nucleotide
  modified_base 62: mod_base = OTHER; note = 2'-O-methyl modified nucleotide
  modified_base 63: mod_base = OTHER; note = 2'-O-methyl modified nucleotide
  modified_base 64: mod_base = OTHER; note = 2'-O-methyl modified nucleotide
  modified_base 65: mod_base = OTHER; note = 2'-O-methyl modified nucleotide
  modified_base 66: mod_base = OTHER; note = 2'-O-methyl modified nucleotide
  modified_base 67: mod_base = OTHER; note = 2'-O-methyl modified nucleotide
  modified_base 68: mod_base = OTHER; note = 2'-O-methyl modified nucleotide
  modified_base 69: mod_base = OTHER; note = 2'-O-methyl modified nucleotide
  modified_base 70: mod_base = OTHER; note = 2'-O-methyl modified nucleotide
  modified_base 75: mod_base = OTHER; note = 2'-O-methyl modified nucleotide
  modified_base 77: mod_base = OTHER; note = 2'-O-methyl modified nucleotide
  modified_base 80: mod_base = OTHER; note = 2'-O-methyl modified nucleotide
  modified_base 86: mod_base = OTHER; note = 2'-O-methyl modified nucleotide
  modified_base 87: mod_base = OTHER; note = 2'-O-methyl modified nucleotide
  modified_base 89: mod_base = OTHER; note = 2'-O-methyl modified nucleotide
  modified_base 90: mod_base = OTHER; note = 2'-O-methyl modified nucleotide
  modified_base 91: mod_base = OTHER; note = 2'-O-methyl modified nucleotide
  modified_base 92: mod_base = OTHER; note = 2'-O-methyl modified nucleotide
  modified_base 99: mod_base = OTHER; note = nucleotide with phosphorothioate linkage
  modified_base 100: mod_base = OTHER; note = 2'-O-methyl modified nucleotide with phosphorothioate linkage
  modified_base 101: mod_base = OTHER; note = 2'-O-methyl modified nucleotide

SEQ ID NO: 2309 - RNA, 101 nt, synthetic construct; identical to SEQ ID NO: 1309
  source 1..101: mol_type = other RNA
  modified_base 1: mod_base = OTHER; note = 2'-O-methyl modified nucleotide with phosphorothioate linkage
  modified_base 2: mod_base = OTHER; note = 2'-O-methyl modified nucleotide with phosphorothioate linkage
  modified_base 3: mod_base = OTHER; note = 2'-O-methyl modified nucleotide with phosphorothioate linkage
  modified_base 4: mod_base = OTHER; note = 2'-O-methyl modified nucleotide
  modified_base 5: mod_base = OTHER; note = 2'-O-methyl modified nucleotide
  modified_base 8: mod_base = OTHER; note = 2'-O-methyl modified nucleotide
  modified_base 9: mod_base = OTHER; note = 2'-O-methyl modified nucleotide
  modified_base 11: mod_base = OTHER; note = 2'-O-methyl modified nucleotide
  modified_base 13: mod_base = OTHER; note = 2'-O-methyl modified nucleotide
  modified_base 18: mod_base = OTHER; note = 2'-O-methyl modified nucleotide
  modified_base 22: mod_base = OTHER; note = 2'-O-methyl modified nucleotide
  modified_base 25: mod_base = OTHER; note = 2'-O-methyl modified nucleotide
  modified_base 29: mod_base = OTHER; note = 2'-O-methyl modified nucleotide
  modified_base 30: mod_base = OTHER; note = 2'-O-methyl modified nucleotide
  modified_base 31: mod_base = OTHER; note = 2'-O-methyl modified nucleotide
  modified_base 32: mod_base = OTHER; note = 2'-O-methyl modified nucleotide
  modified_base 37: mod_base = OTHER; note = 2'-O-methyl modified nucleotide
  modified_base 38: mod_base = OTHER; note = 2'-O-methyl modified nucleotide
  modified_base 39: mod_base = OTHER; note = 2'-O-methyl modified nucleotide
  modified_base 40: mod_base = OTHER; note = 2'-O-methyl modified nucleotide
  modified_base 41: mod_base = OTHER; note = 2'-O-methyl modified nucleotide
  modified_base 42: mod_base = OTHER; note = 2'-O-methyl modified nucleotide
  modified_base 43: mod_base = OTHER; note = 2'-O-methyl modified nucleotide
  modified_base 47: mod_base = OTHER; note = 2'-O-methyl modified nucleotide
  modified_base 48: mod_base = OTHER; note = 2'-O-methyl modified nucleotide
  modified_base 51: mod_base = OTHER; note = 2'-O-methyl modified nucleotide
  modified_base 54: mod_base = OTHER; note = nucleotide with phosphorothioate linkage
  modified_base 58: mod_base = OTHER; note = 2'-O-methyl modified nucleotide
  modified_base 59: mod_base = OTHER; note = 2'-O-methyl modified nucleotide
  modified_base 61: mod_base = OTHER; note = 2'-O-methyl modified nucleotide
  modified_base 62: mod_base = OTHER; note = 2'-O-methyl modified nucleotide
  modified_base 63: mod_base = OTHER; note = 2'-O-methyl modified nucleotide
  modified_base 64: mod_base = OTHER; note = 2'-O-methyl modified nucleotide
  modified_base 65: mod_base = OTHER; note = 2'-O-methyl modified nucleotide
  modified_base 66: mod_base = OTHER; note = 2'-O-methyl modified nucleotide
  modified_base 67: mod_base = OTHER; note = 2'-O-methyl modified nucleotide
  modified_base 68: mod_base = OTHER; note = 2'-O-methyl modified nucleotide
  modified_base 69: mod_base = OTHER; note = 2'-O-methyl modified nucleotide
  modified_base 70: mod_base = OTHER; note = 2'-O-methyl modified nucleotide
  modified_base 75: mod_base = OTHER; note = 2'-O-methyl modified nucleotide
  modified_base 77: mod_base = OTHER; note = 2'-O-methyl modified nucleotide
  modified_base 80: mod_base = OTHER; note = 2'-O-methyl modified nucleotide
  modified_base 86: mod_base = OTHER; note = 2'-O-methyl modified nucleotide
  modified_base 87: mod_base = OTHER; note = 2'-O-methyl modified nucleotide
  modified_base 89: mod_base = OTHER; note = 2'-O-methyl modified nucleotide
  modified_base 90: mod_base = OTHER; note = 2'-O-methyl modified nucleotide
  modified_base 91: mod_base = OTHER; note = 2'-O-methyl modified nucleotide
  modified_base 92: mod_base = OTHER; note = 2'-O-methyl modified nucleotide
  modified_base 99: mod_base = OTHER; note = nucleotide with phosphorothioate linkage
  modified_base 100: mod_base = OTHER; note = 2'-O-methyl modified nucleotide with phosphorothioate linkage
  modified_base 101: mod_base = OTHER; note = 2'-O-methyl modified nucleotide

SEQ ID NO: 2310 - RNA, 101 nt, synthetic construct; identical to SEQ ID NO: 1310
  source 1..101: mol_type = other RNA
  modified_base 1: mod_base = OTHER; note = 2'-O-methyl modified nucleotide with phosphorothioate linkage
  modified_base 2: mod_base = OTHER; note = 2'-O-methyl modified nucleotide with phosphorothioate linkage
  modified_base 3: mod_base = OTHER; note = 2'-O-methyl modified nucleotide with phosphorothioate linkage
  modified_base 4: mod_base = OTHER; note = 2'-O-methyl modified nucleotide
  modified_base 5: mod_base = OTHER; note = 2'-O-methyl modified nucleotide
  modified_base 8: mod_base = OTHER; note = 2'-O-methyl modified nucleotide
  modified_base 9: mod_base = OTHER; note = 2'-O-methyl modified nucleotide
  modified_base 11: mod_base = OTHER; note = 2'-O-methyl modified nucleotide
  modified_base 13: mod_base = OTHER; note = 2'-O-methyl modified nucleotide
  modified_base 18: mod_base = OTHER; note = 2'-O-methyl modified nucleotide
  modified_base 22: mod_base = OTHER; note = 2'-O-methyl modified nucleotide
  modified_base 25: mod_base = OTHER; note = 2'-O-methyl modified nucleotide
  modified_base 29: mod_base = OTHER; note = 2'-O-methyl modified nucleotide
  modified_base 30: mod_base = OTHER; note = 2'-O-methyl modified nucleotide
  modified_base 31: mod_base = OTHER; note = 2'-O-methyl modified nucleotide
  modified_base 32: mod_base = OTHER; note = 2'-O-methyl modified nucleotide
  modified_base 37: mod_base = OTHER; note = 2'-O-methyl modified nucleotide
  modified_base 38: mod_base = OTHER; note = 2'-O-methyl modified nucleotide
  modified_base 39: mod_base = OTHER; note = 2'-O-methyl modified nucleotide
  modified_base 40: mod_base = OTHER; note = 2'-O-methyl modified nucleotide
  modified_base 41: mod_base = OTHER; note = 2'-O-methyl modified nucleotide
  modified_base 42: mod_base = OTHER; note = 2'-O-methyl modified nucleotide
  modified_base 43: mod_base = OTHER; note = 2'-O-methyl modified nucleotide
  modified_base 47: mod_base = OTHER; note = 2'-O-methyl modified nucleotide
  modified_base 48: mod_base = OTHER; note = 2'-O-methyl modified nucleotide
  modified_base 51: mod_base = OTHER; note = 2'-O-methyl modified nucleotide
  modified_base 54: mod_base = OTHER; note = nucleotide with phosphorothioate linkage
  modified_base 58: mod_base = OTHER; note = 2'-O-methyl modified nucleotide
  modified_base 59: mod_base = OTHER; note = 2'-O-methyl modified nucleotide
  modified_base 61: mod_base = OTHER; note = 2'-O-methyl modified nucleotide
  modified_base 62: mod_base = OTHER; note = 2'-O-methyl modified nucleotide
  modified_base 63: mod_base = OTHER; note = 2'-O-methyl modified nucleotide
  modified_base 64: mod_base = OTHER; note = 2'-O-methyl modified nucleotide
  modified_base 65: mod_base = OTHER; note = 2'-O-methyl modified nucleotide
  modified_base 66: mod_base = OTHER; note = 2'-O-methyl modified nucleotide
  modified_base 67: mod_base = OTHER; note = 2'-O-methyl modified nucleotide
  modified_base 68: mod_base = OTHER; note = 2'-O-methyl modified nucleotide
  modified_base 69: mod_base = OTHER; note = 2'-O-methyl modified nucleotide
  modified_base 70: mod_base = OTHER; note = 2'-O-methyl modified nucleotide
  modified_base 75: mod_base = OTHER; note = 2'-O-methyl modified nucleotide
  modified_base 77: mod_base = OTHER; note = 2'-O-methyl modified nucleotide
  modified_base 80: mod_base = OTHER; note = 2'-O-methyl modified nucleotide
  modified_base 86: mod_base = OTHER; note = 2'-O-methyl modified nucleotide
  modified_base 87: mod_base = OTHER; note = 2'-O-methyl modified nucleotide
  modified_base 89: mod_base = OTHER; note = 2'-O-methyl modified nucleotide
  modified_base 90: mod_base = OTHER; note = 2'-O-methyl modified nucleotide
  modified_base 91: mod_base = OTHER; note = 2'-O-methyl modified nucleotide
  modified_base 92: mod_base = OTHER; note = 2'-O-methyl modified nucleotide
  modified_base 99: mod_base = OTHER; note = nucleotide with phosphorothioate linkage
  modified_base 100: mod_base = OTHER; note = 2'-O-methyl modified nucleotide with phosphorothioate linkage
  modified_base 101: mod_base = OTHER; note = 2'-O-methyl modified nucleotide

SEQ ID NO: 2311 - RNA, 101 nt, synthetic construct; identical to SEQ ID NO: 1311
  source 1..101: mol_type = other RNA
  modified_base 1: mod_base = OTHER; note = 2'-O-methyl modified nucleotide with phosphorothioate linkage
  modified_base 2: mod_base = OTHER; note = 2'-O-methyl modified nucleotide with phosphorothioate linkage
  modified_base 3: mod_base = OTHER; note = 2'-O-methyl modified nucleotide with phosphorothioate linkage
  modified_base 4: mod_base = OTHER; note = 2'-O-methyl modified nucleotide
  modified_base 5: mod_base = OTHER; note = 2'-O-methyl modified nucleotide
  modified_base 8: mod_base = OTHER; note = 2'-O-methyl modified nucleotide
  modified_base 9: mod_base = OTHER; note = 2'-O-methyl modified nucleotide
  modified_base 11: mod_base = OTHER; note = 2'-O-methyl modified nucleotide
  modified_base 13: mod_base = OTHER; note = 2'-O-methyl modified nucleotide
  modified_base 18: mod_base = OTHER; note = 2'-O-methyl modified nucleotide
  modified_base 22: mod_base = OTHER; note = 2'-O-methyl modified nucleotide
  modified_base 25: mod_base = OTHER; note = 2'-O-methyl modified nucleotide
  modified_base 29: mod_base = OTHER; note = 2'-O-methyl modified nucleotide
  modified_base 30: mod_base = OTHER; note = 2'-O-methyl modified nucleotide
  modified_base 31: mod_base = OTHER; note = 2'-O-methyl modified nucleotide
  modified_base 32: mod_base = OTHER; note = 2'-O-methyl modified nucleotide
  modified_base 37: mod_base = OTHER; note = 2'-O-methyl modified nucleotide
  modified_base 38: mod_base = OTHER; note = 2'-O-methyl modified nucleotide
  modified_base 39: mod_base = OTHER; note = 2'-O-methyl modified nucleotide
  modified_base 40: mod_base = OTHER; note = 2'-O-methyl modified nucleotide
  modified_base 41: mod_base = OTHER; note = 2'-O-methyl modified nucleotide
  modified_base 42: mod_base = OTHER; note = 2'-O-methyl modified nucleotide
  modified_base 43: mod_base = OTHER; note = 2'-O-methyl modified nucleotide
  modified_base 47: mod_base = OTHER; note = 2'-O-methyl modified nucleotide
  modified_base 48: mod_base = OTHER; note = 2'-O-methyl modified nucleotide
  modified_base 51: mod_base = OTHER; note = 2'-O-methyl modified nucleotide
  modified_base 54: mod_base = OTHER; note = nucleotide with phosphorothioate linkage
  modified_base 58: mod_base = OTHER; note = 2'-O-methyl modified nucleotide
  modified_base 59: mod_base = OTHER; note = 2'-O-methyl modified nucleotide
  modified_base 61: mod_base = OTHER; note = 2'-O-methyl modified nucleotide
  modified_base 62: mod_base = OTHER; note = 2'-O-methyl modified nucleotide
  modified_base 63: mod_base = OTHER; note = 2'-O-methyl modified nucleotide
  modified_base 64: mod_base = OTHER; note = 2'-O-methyl modified nucleotide
  modified_base 65: mod_base = OTHER; note = 2'-O-methyl modified nucleotide
  modified_base 66: mod_base = OTHER; note = 2'-O-methyl modified nucleotide
  modified_base 67: mod_base = OTHER; note = 2'-O-methyl modified nucleotide
  modified_base 68: mod_base = OTHER; note = 2'-O-methyl modified nucleotide
  modified_base 69: mod_base = OTHER; note = 2'-O-methyl modified nucleotide
  modified_base 70: mod_base = OTHER; note = 2'-O-methyl modified nucleotide
  modified_base 75: mod_base = OTHER; note = 2'-O-methyl modified nucleotide
  modified_base 77: mod_base = OTHER; note = 2'-O-methyl modified nucleotide
  modified_base 80: mod_base = OTHER; note = 2'-O-methyl modified nucleotide
  modified_base 86: mod_base = OTHER; note = 2'-O-methyl modified nucleotide
  modified_base 87: mod_base = OTHER; note = 2'-O-methyl modified nucleotide
  modified_base 89: mod_base = OTHER; note = 2'-O-methyl modified nucleotide
  modified_base 90: mod_base = OTHER; note = 2'-O-methyl modified nucleotide
  modified_base 91: mod_base = OTHER; note = 2'-O-methyl modified nucleotide
  modified_base 92: mod_base = OTHER; note = 2'-O-methyl modified nucleotide
  modified_base 99: mod_base = OTHER; note = nucleotide with phosphorothioate linkage
  modified_base 100: mod_base = OTHER; note = 2'-O-methyl modified nucleotide with phosphorothioate linkage
  modified_base 101: mod_base = OTHER; note = 2'-O-methyl modified nucleotide

SEQ ID NO: 2312 - RNA, 101 nt, synthetic construct; identical to SEQ ID NO: 1312
  source 1..101: mol_type = other RNA
  modified_base 1: mod_base = OTHER; note = 2'-O-methyl modified nucleotide with phosphorothioate linkage
  modified_base 2: mod_base = OTHER; note = 2'-O-methyl modified nucleotide with phosphorothioate linkage
  modified_base 3: mod_base = OTHER; note = 2'-O-methyl modified nucleotide with phosphorothioate linkage
  modified_base 4: mod_base = OTHER; note = 2'-O-methyl modified nucleotide
  modified_base 5: mod_base = OTHER; note = 2'-O-methyl modified nucleotide
  modified_base 8: mod_base = OTHER; note = 2'-O-methyl modified nucleotide
  modified_base 9: mod_base = OTHER; note = 2'-O-methyl modified nucleotide
  modified_base 11: mod_base = OTHER; note = 2'-O-methyl modified nucleotide
  modified_base 13: mod_base = OTHER; note = 2'-O-methyl modified nucleotide
  modified_base 18: mod_base = OTHER; note = 2'-O-methyl modified nucleotide
  modified_base 22: mod_base = OTHER; note = 2'-O-methyl modified nucleotide
  modified_base 25: mod_base = OTHER; note = 2'-O-methyl modified nucleotide
  modified_base 29: mod_base = OTHER; note = 2'-O-methyl modified nucleotide
  modified_base 30: mod_base = OTHER; note = 2'-O-methyl modified nucleotide
  modified_base 31: mod_base = OTHER; note = 2'-O-methyl modified nucleotide
  modified_base 32: mod_base = OTHER; note = 2'-O-methyl modified nucleotide
  modified_base 37: mod_base = OTHER; note = 2'-O-methyl modified nucleotide
  modified_base 38: mod_base = OTHER; note = 2'-O-methyl modified nucleotide
  modified_base 39: mod_base = OTHER; note = 2'-O-methyl modified nucleotide
  modified_base 40: mod_base = OTHER; note = 2'-O-methyl modified nucleotide
  modified_base 41: mod_base = OTHER; note = 2'-O-methyl modified nucleotide
  modified_base 42: mod_base = OTHER; note = 2'-O-methyl modified nucleotide
  modified_base 43: mod_base = OTHER; note = 2'-O-methyl modified nucleotide
  modified_base 47: mod_base = OTHER; note = 2'-O-methyl modified nucleotide
  modified_base 48: mod_base = OTHER; note = 2'-O-methyl modified nucleotide
  modified_base 51: mod_base = OTHER; note = 2'-O-methyl modified nucleotide
  modified_base 54: mod_base = OTHER; note = nucleotide with phosphorothioate linkage
  modified_base 58: mod_base = OTHER; note = 2'-O-methyl modified nucleotide
  modified_base 59: mod_base = OTHER; note = 2'-O-methyl modified nucleotide
  modified_base 61: mod_base = OTHER; note = 2'-O-methyl modified nucleotide
  modified_base 62: mod_base = OTHER; note = 2'-O-methyl modified nucleotide
  modified_base 63: mod_base = OTHER; note = 2'-O-methyl modified nucleotide
  modified_base 64: mod_base = OTHER; note = 2'-O-methyl modified nucleotide
  modified_base 65: mod_base = OTHER; note = 2'-O-methyl modified nucleotide
  modified_base 66: mod_base = OTHER; note = 2'-O-methyl modified nucleotide
  modified_base 67: mod_base = OTHER; note = 2'-O-methyl modified nucleotide
  modified_base 68: mod_base = OTHER; note = 2'-O-methyl modified nucleotide
  modified_base 69: mod_base = OTHER; note = 2'-O-methyl modified nucleotide
  modified_base 70: mod_base = OTHER; note = 2'-O-methyl modified nucleotide
  modified_base 75: mod_base = OTHER; note = 2'-O-methyl modified nucleotide
  modified_base 77: mod_base = OTHER; note = 2'-O-methyl modified nucleotide
  modified_base 80: mod_base = OTHER; note = 2'-O-methyl modified nucleotide
  modified_base 86: mod_base = OTHER; note = 2'-O-methyl modified nucleotide
  modified_base 87: mod_base = OTHER; note = 2'-O-methyl modified nucleotide
  modified_base 89: mod_base = OTHER; note = 2'-O-methyl modified nucleotide
  modified_base 90: mod_base = OTHER; note = 2'-O-methyl modified nucleotide
  modified_base 91: mod_base = OTHER; note = 2'-O-methyl modified nucleotide
  modified_base 92: mod_base = OTHER; note = 2'-O-methyl modified nucleotide
  modified_base 99: mod_base = OTHER; note = nucleotide with phosphorothioate linkage
  modified_base 100: mod_base = OTHER; note = 2'-O-methyl modified nucleotide with phosphorothioate linkage
  modified_base 101: mod_base = OTHER; note = 2'-O-methyl modified nucleotide

SEQ ID NO: 2313 - RNA, 101 nt, synthetic construct; identical to SEQ ID NO: 1313
  source 1..101: mol_type = other RNA
  modified_base 1: mod_base = OTHER; note = 2'-O-methyl modified nucleotide with phosphorothioate linkage
  modified_base 2: mod_base = OTHER; note = 2'-O-methyl modified nucleotide with phosphorothioate linkage
  modified_base 3: mod_base = OTHER; note = 2'-O-methyl modified nucleotide with phosphorothioate linkage
  modified_base 4: mod_base = OTHER; note = 2'-O-methyl modified nucleotide
  modified_base 5: mod_base = OTHER; note = 2'-O-methyl modified nucleotide
  modified_base 8: mod_base = OTHER; note = 2'-O-methyl modified nucleotide
  modified_base 9: mod_base = OTHER; note = 2'-O-methyl modified nucleotide
  modified_base 11: mod_base = OTHER; note = 2'-O-methyl modified nucleotide
  modified_base 13: mod_base = OTHER; note = 2'-O-methyl modified nucleotide
  modified_base 18: mod_base = OTHER; note = 2'-O-methyl modified nucleotide
  modified_base 22: mod_base = OTHER; note = 2'-O-methyl modified nucleotide
  modified_base 25: mod_base = OTHER; note = 2'-O-methyl modified nucleotide
  modified_base 29: mod_base = OTHER; note = 2'-O-methyl modified nucleotide
  modified_base 30: mod_base = OTHER; note = 2'-O-methyl modified nucleotide
  modified_base 31: mod_base = OTHER; note = 2'-O-methyl modified nucleotide
  modified_base 32: mod_base = OTHER; note = 2'-O-methyl modified nucleotide
  modified_base 37: mod_base = OTHER; note = 2'-O-methyl modified nucleotide
  modified_base 38: mod_base = OTHER; note = 2'-O-methyl modified nucleotide
  modified_base 39: mod_base = OTHER; note = 2'-O-methyl modified nucleotide
  modified_base 40: mod_base = OTHER; note = 2'-O-methyl modified nucleotide
  modified_base 41: mod_base = OTHER; note = 2'-O-methyl modified nucleotide
  modified_base 42: mod_base = OTHER; note = 2'-O-methyl modified nucleotide
  modified_base 43: mod_base = OTHER; note = 2'-O-methyl modified nucleotide
  modified_base 47: mod_base = OTHER; note = 2'-O-methyl modified nucleotide
  modified_base 48: mod_base = OTHER; note = 2'-O-methyl modified nucleotide
  modified_base 51: mod_base = OTHER; note = 2'-O-methyl modified nucleotide
  modified_base 54: mod_base = OTHER; note = nucleotide with phosphorothioate linkage
  modified_base 58: mod_base = OTHER; note = 2'-O-methyl modified nucleotide
  modified_base 59: mod_base = OTHER; note = 2'-O-methyl modified nucleotide
  modified_base 61: mod_base = OTHER; note = 2'-O-methyl modified nucleotide
  modified_base 62: mod_base = OTHER; note = 2'-O-methyl modified nucleotide
  modified_base 63: mod_base = OTHER; note = 2'-O-methyl modified nucleotide
  modified_base 64: mod_base = OTHER; note = 2'-O-methyl modified nucleotide
  modified_base 65: mod_base = OTHER; note = 2'-O-methyl modified nucleotide
  modified_base 66: mod_base = OTHER; note = 2'-O-methyl modified nucleotide
  modified_base 67: mod_base = OTHER; note = 2'-O-methyl modified nucleotide
  modified_base 68: mod_base = OTHER; note = 2'-O-methyl modified nucleotide
  modified_base 69: mod_base = OTHER; note = 2'-O-methyl modified nucleotide
  modified_base 70: mod_base = OTHER; note = 2'-O-methyl modified nucleotide
  modified_base 75: mod_base = OTHER; note = 2'-O-methyl modified nucleotide
  modified_base 77: mod_base = OTHER; note = 2'-O-methyl modified nucleotide
  modified_base 80: mod_base = OTHER; note = 2'-O-methyl modified nucleotide
  modified_base 86: mod_base = OTHER; note = 2'-O-methyl modified nucleotide
  modified_base 87: mod_base = OTHER; note = 2'-O-methyl modified nucleotide
  modified_base 89: mod_base = OTHER; note = 2'-O-methyl modified nucleotide
  modified_base 90: mod_base = OTHER; note = 2'-O-methyl modified nucleotide
  modified_base 91: mod_base = OTHER; note = 2'-O-methyl modified nucleotide
  modified_base 92: mod_base = OTHER; note = 2'-O-methyl modified nucleotide
  modified_base 99: mod_base = OTHER; note = nucleotide with phosphorothioate linkage
  modified_base 100: mod_base = OTHER; note = 2'-O-methyl modified nucleotide with phosphorothioate linkage
  modified_base 101: mod_base = OTHER; note = 2'-O-methyl modified nucleotide

SEQ ID NO: 2314 - RNA, 101 nt, synthetic construct; identical to SEQ ID NO: 1314
  source 1..101: mol_type = other RNA
  modified_base 1: mod_base = OTHER; note = 2'-O-methyl modified nucleotide with phosphorothioate linkage
  modified_base 2: mod_base = OTHER; note = 2'-O-methyl modified nucleotide with phosphorothioate linkage
  modified_base 3: mod_base = OTHER; note = 2'-O-methyl modified nucleotide with phosphorothioate linkage
  modified_base 4: mod_base = OTHER; note = 2'-O-methyl modified nucleotide
  modified_base 5: mod_base = OTHER; note = 2'-O-methyl modified nucleotide
  modified_base 8: mod_base = OTHER; note = 2'-O-methyl modified nucleotide
  modified_base 9: mod_base = OTHER; note = 2'-O-methyl modified nucleotide
  modified_base 11: mod_base = OTHER; note = 2'-O-methyl modified nucleotide
  modified_base 13: mod_base = OTHER; note = 2'-O-methyl modified nucleotide
  modified_base 18: mod_base = OTHER; note = 2'-O-methyl modified nucleotide
  modified_base 22: mod_base = OTHER; note = 2'-O-methyl modified nucleotide
  modified_base 25: mod_base = OTHER; note = 2'-O-methyl modified nucleotide
  modified_base 29: mod_base = OTHER; note = 2'-O-methyl modified nucleotide
  modified_base 30: mod_base = OTHER; note = 2'-O-methyl modified nucleotide
  modified_base 31: mod_base = OTHER; note = 2'-O-methyl modified nucleotide
  modified_base 32: mod_base = OTHER; note = 2'-O-methyl modified nucleotide
  modified_base 37: mod_base = OTHER; note = 2'-O-methyl modified nucleotide
  modified_base 38: mod_base = OTHER; note = 2'-O-methyl modified nucleotide
  modified_base 39: mod_base = OTHER; note = 2'-O-methyl modified nucleotide
  modified_base 40: mod_base = OTHER; note = 2'-O-methyl modified nucleotide
  modified_base 41: mod_base = OTHER; note = 2'-O-methyl modified nucleotide
  modified_base 42: mod_base = OTHER; note = 2'-O-methyl modified nucleotide
  modified_base 43: mod_base = OTHER; note = 2'-O-methyl modified nucleotide
  modified_base 47: mod_base = OTHER; note = 2'-O-methyl modified nucleotide
  modified_base 48: mod_base = OTHER; note = 2'-O-methyl modified nucleotide
  modified_base 51: mod_base = OTHER; note = 2'-O-methyl modified nucleotide
  modified_base 54: mod_base = OTHER; note = nucleotide with phosphorothioate linkage
  modified_base 58: mod_base = OTHER; note = 2'-O-methyl modified nucleotide
  modified_base 59: mod_base = OTHER; note = 2'-O-methyl modified nucleotide
  modified_base 61: mod_base = OTHER; note = 2'-O-methyl modified nucleotide
  modified_base 62: mod_base = OTHER; note = 2'-O-methyl modified nucleotide
  modified_base 63: mod_base = OTHER; note = 2'-O-methyl modified nucleotide
  modified_base 64: mod_base = OTHER; note = 2'-O-methyl modified nucleotide
  modified_base 65: mod_base = OTHER; note = 2'-O-methyl modified nucleotide
  modified_base 66: mod_base = OTHER; note = 2'-O-methyl modified nucleotide
  modified_base 67: mod_base = OTHER; note = 2'-O-methyl modified nucleotide
  modified_base 68: mod_base = OTHER; note = 2'-O-methyl modified nucleotide
  modified_base 69: mod_base = OTHER; note = 2'-O-methyl modified nucleotide
  modified_base 70: mod_base = OTHER; note = 2'-O-methyl modified nucleotide
  modified_base 75: mod_base = OTHER; note = 2'-O-methyl modified nucleotide
  modified_base 77: mod_base = OTHER; note = 2'-O-methyl modified nucleotide
  modified_base 80: mod_base = OTHER; note = 2'-O-methyl modified nucleotide
  modified_base 86: mod_base = OTHER; note = 2'-O-methyl modified nucleotide
  modified_base 87: mod_base = OTHER; note = 2'-O-methyl modified nucleotide
  modified_base 89: mod_base = OTHER; note = 2'-O-methyl modified nucleotide
  modified_base 90: mod_base = OTHER; note = 2'-O-methyl modified nucleotide
  modified_base 91: mod_base = OTHER; note = 2'-O-methyl modified nucleotide
  modified_base 92: mod_base = OTHER; note = 2'-O-methyl modified nucleotide
  modified_base 99: mod_base = OTHER; note = nucleotide with phosphorothioate linkage
  modified_base 100: mod_base = OTHER; note = 2'-O-methyl modified nucleotide with phosphorothioate linkage
  modified_base 101: mod_base = OTHER; note = 2'-O-methyl modified nucleotide

SEQ ID NO: 2315 - RNA, 101 nt, synthetic construct; identical to SEQ ID NO: 1315
  source 1..101: mol_type = other RNA
  modified_base 1: mod_base = OTHER; note = 2'-O-methyl modified nucleotide with phosphorothioate linkage
  modified_base 2: mod_base = OTHER; note = 2'-O-methyl modified nucleotide with phosphorothioate linkage
  modified_base 3: mod_base = OTHER; note = 2'-O-methyl modified nucleotide with phosphorothioate linkage
  modified_base 4: mod_base = OTHER; note = 2'-O-methyl modified nucleotide
  modified_base 5: mod_base = OTHER; note = 2'-O-methyl modified nucleotide
  modified_base 8: mod_base = OTHER; note = 2'-O-methyl modified nucleotide
  modified_base 9: mod_base = OTHER; note = 2'-O-methyl modified nucleotide
  modified_base 11: mod_base = OTHER; note = 2'-O-methyl modified nucleotide
  modified_base 13: mod_base = OTHER; note = 2'-O-methyl modified nucleotide
  modified_base 18: mod_base = OTHER; note = 2'-O-methyl modified nucleotide
  modified_base 22: mod_base = OTHER; note = 2'-O-methyl modified nucleotide
  modified_base 25: mod_base = OTHER; note = 2'-O-methyl modified nucleotide
  modified_base 29: mod_base = OTHER; note = 2'-O-methyl modified nucleotide
  modified_base 30: mod_base = OTHER; note = 2'-O-methyl modified nucleotide
  modified_base 31: mod_base = OTHER; note = 2'-O-methyl modified nucleotide
  modified_base 32: mod_base = OTHER; note = 2'-O-methyl modified nucleotide
  modified_base 37: mod_base = OTHER; note = 2'-O-methyl modified nucleotide
  modified_base 38: mod_base = OTHER; note = 2'-O-methyl modified nucleotide
  modified_base 39: mod_base = OTHER; note = 2'-O-methyl modified nucleotide
  modified_base 40: mod_base = OTHER; note = 2'-O-methyl modified nucleotide
  modified_base 41: mod_base = OTHER; note = 2'-O-methyl modified nucleotide
  modified_base 42: mod_base = OTHER; note = 2'-O-methyl modified nucleotide
  modified_base 43: mod_base = OTHER; note = 2'-O-methyl modified nucleotide
  modified_base 47: mod_base = OTHER; note = 2'-O-methyl modified nucleotide
  modified_base 48: mod_base = OTHER; note = 2'-O-methyl modified nucleotide
  modified_base 51: mod_base = OTHER; note = 2'-O-methyl modified nucleotide
  modified_base 54: mod_base = OTHER; note = nucleotide with phosphorothioate linkage
  modified_base 58: mod_base = OTHER; note = 2'-O-methyl modified nucleotide
  modified_base 59: mod_base = OTHER; note = 2'-O-methyl modified nucleotide
  modified_base 61: mod_base = OTHER; note = 2'-O-methyl modified nucleotide
  modified_base 62: mod_base = OTHER; note = 2'-O-methyl modified nucleotide
  modified_base 63: mod_base = OTHER; note = 2'-O-methyl modified nucleotide
  modified_base 64: mod_base = OTHER; note = 2'-O-methyl modified nucleotide
  modified_base 65: mod_base = OTHER; note = 2'-O-methyl modified nucleotide
  modified_base 66: mod_base = OTHER; note = 2'-O-methyl modified nucleotide
  modified_base 67: mod_base = OTHER; note = 2'-O-methyl modified nucleotide
  modified_base 68: mod_base = OTHER; note = 2'-O-methyl modified nucleotide
  modified_base 69: mod_base = OTHER; note = 2'-O-methyl modified nucleotide
  modified_base 70: mod_base = OTHER; note = 2'-O-methyl modified nucleotide
  modified_base 75: mod_base = OTHER; note = 2'-O-methyl modified nucleotide
  modified_base 77: mod_base = OTHER; note = 2'-O-methyl modified nucleotide
  modified_base 80: mod_base = OTHER; note = 2'-O-methyl modified nucleotide
  modified_base 86: mod_base = OTHER; note = 2'-O-methyl modified nucleotide
  modified_base 87: mod_base = OTHER; note = 2'-O-methyl modified nucleotide
  modified_base 89: mod_base = OTHER; note = 2'-O-methyl modified nucleotide
  modified_base 90: mod_base = OTHER; note = 2'-O-methyl modified nucleotide
  modified_base 91: mod_base = OTHER; note = 2'-O-methyl modified nucleotide
  modified_base 92: mod_base = OTHER; note = 2'-O-methyl modified nucleotide
  modified_base 99: mod_base = OTHER; note = nucleotide with phosphorothioate linkage
  modified_base 100: mod_base = OTHER; note = 2'-O-methyl modified nucleotide with phosphorothioate linkage
  modified_base 101: mod_base = OTHER; note = 2'-O-methyl modified nucleotide

SEQ ID NO: 2316 - RNA, 101 nt, synthetic construct; identical to SEQ ID NO: 1316
  source 1..101: mol_type = other RNA
  modified_base 1: mod_base = OTHER; note = 2'-O-methyl modified nucleotide with phosphorothioate linkage
  modified_base 2: mod_base = OTHER; note = 2'-O-methyl modified nucleotide with phosphorothioate linkage
  modified_base 3: mod_base = OTHER; note = 2'-O-methyl modified nucleotide with phosphorothioate linkage
  modified_base 4: mod_base = OTHER; note = 2'-O-methyl modified nucleotide
  modified_base 5: mod_base = OTHER; note = 2'-O-methyl modified nucleotide
  modified_base 8: mod_base = OTHER; note = 2'-O-methyl modified nucleotide
  modified_base 9: mod_base = OTHER; note = 2'-O-methyl modified nucleotide
  modified_base 11: mod_base = OTHER; note = 2'-O-methyl modified nucleotide
  modified_base 13: mod_base = OTHER; note = 2'-O-methyl modified nucleotide
  modified_base 18: mod_base = OTHER; note = 2'-O-methyl modified nucleotide
  modified_base 22: mod_base = OTHER; note = 2'-O-methyl modified nucleotide
  modified_base 25: mod_base = OTHER; note = 2'-O-methyl modified nucleotide
  modified_base 29: mod_base = OTHER; note = 2'-O-methyl modified nucleotide
  modified_base 30: mod_base = OTHER; note = 2'-O-methyl modified nucleotide
  modified_base 31: mod_base = OTHER; note = 2'-O-methyl modified nucleotide
  modified_base 32: mod_base = OTHER; note = 2'-O-methyl modified nucleotide
  modified_base 37: mod_base = OTHER; note = 2'-O-methyl modified nucleotide
  modified_base 38: mod_base = OTHER; note = 2'-O-methyl modified nucleotide
  modified_base 39: mod_base = OTHER; note = 2'-O-methyl modified nucleotide
  modified_base 40: mod_base = OTHER; note = 2'-O-methyl modified nucleotide
  modified_base 41: mod_base = OTHER; note = 2'-O-methyl modified nucleotide
  modified_base 42: mod_base = OTHER; note = 2'-O-methyl modified nucleotide
  modified_base 43: mod_base = OTHER; note = 2'-O-methyl modified nucleotide
  modified_base 47: mod_base = OTHER; note = 2'-O-methyl modified nucleotide
  modified_base 48: mod_base = OTHER; note = 2'-O-methyl modified nucleotide
  modified_base 51: mod_base = OTHER; note = 2'-O-methyl modified nucleotide
  modified_base 54: mod_base = OTHER; note = nucleotide with phosphorothioate linkage
  modified_base 58: mod_base = OTHER; note = 2'-O-methyl modified nucleotide
  modified_base 59: mod_base = OTHER; note = 2'-O-methyl modified nucleotide
  modified_base 61: mod_base = OTHER; note = 2'-O-methyl modified nucleotide
  modified_base 62: mod_base = OTHER; note = 2'-O-methyl modified nucleotide
  modified_base 63: mod_base = OTHER; note = 2'-O-methyl modified nucleotide
  modified_base 64: mod_base = OTHER; note = 2'-O-methyl modified nucleotide
  modified_base 65: mod_base = OTHER; note = 2'-O-methyl modified nucleotide
  modified_base 66: mod_base = OTHER; note = 2'-O-methyl modified nucleotide
  modified_base 67: mod_base = OTHER; note = 2'-O-methyl modified nucleotide
  modified_base 68: mod_base = OTHER; note = 2'-O-methyl modified nucleotide
  modified_base 69: mod_base = OTHER; note = 2'-O-methyl modified nucleotide
  modified_base 70: mod_base = OTHER; note = 2'-O-methyl modified nucleotide
  modified_base 75: mod_base = OTHER; note = 2'-O-methyl modified nucleotide
  modified_base 77: mod_base = OTHER; note = 2'-O-methyl modified nucleotide
  modified_base 80: mod_base = OTHER; note = 2'-O-methyl modified nucleotide
  modified_base 86: mod_base = OTHER; note = 2'-O-methyl modified nucleotide
  modified_base 87: mod_base = OTHER; note = 2'-O-methyl modified nucleotide
  modified_base 89: mod_base = OTHER; note = 2'-O-methyl modified nucleotide
  modified_base 90: mod_base = OTHER; note = 2'-O-methyl modified nucleotide
  modified_base 91: mod_base = OTHER; note = 2'-O-methyl modified nucleotide
  modified_base 92: mod_base = OTHER; note = 2'-O-methyl modified nucleotide
  modified_base 99: mod_base = OTHER; note = nucleotide with phosphorothioate linkage
  modified_base 100: mod_base = OTHER; note = 2'-O-methyl modified nucleotide with phosphorothioate linkage
  modified_base 101: mod_base = OTHER; note = 2'-O-methyl modified nucleotide

SEQ ID NO: 2317 - RNA, 101 nt, synthetic construct; identical to SEQ ID NO: 1317
  source 1..101: mol_type = other RNA
  modified_base 1: mod_base = OTHER; note = 2'-O-methyl modified nucleotide with phosphorothioate linkage
  modified_base 2: mod_base = OTHER; note = 2'-O-methyl modified nucleotide with phosphorothioate linkage
  modified_base 3: mod_base = OTHER; note = 2'-O-methyl modified nucleotide with phosphorothioate linkage
  modified_base 4: mod_base = OTHER; note = 2'-O-methyl modified nucleotide
  modified_base 5: mod_base = OTHER; note = 2'-O-methyl modified nucleotide
  modified_base 8: mod_base = OTHER; note = 2'-O-methyl modified nucleotide
  modified_base 9: mod_base = OTHER; note = 2'-O-methyl modified nucleotide
  modified_base 11: mod_base = OTHER; note = 2'-O-methyl modified nucleotide
  modified_base 13: mod_base = OTHER; note = 2'-O-methyl modified nucleotide
  modified_base 18: mod_base = OTHER; note = 2'-O-methyl modified nucleotide
  modified_base 22: mod_base = OTHER; note = 2'-O-methyl modified nucleotide
  modified_base 25: mod_base = OTHER; note = 2'-O-methyl modified nucleotide
  modified_base 29: mod_base = OTHER; note = 2'-O-methyl modified nucleotide
  modified_base 30: mod_base = OTHER; note = 2'-O-methyl modified nucleotide
  modified_base 31: mod_base = OTHER; note = 2'-O-methyl modified nucleotide
  modified_base 32: mod_base = OTHER; note = 2'-O-methyl modified nucleotide
  modified_base 37: mod_base = OTHER; note = 2'-O-methyl modified nucleotide
  modified_base 38: mod_base = OTHER; note = 2'-O-methyl modified nucleotide
  modified_base 39: mod_base = OTHER; note = 2'-O-methyl modified nucleotide
  modified_base 40: mod_base = OTHER; note = 2'-O-methyl modified nucleotide
  modified_base 41: mod_base = OTHER; note = 2'-O-methyl modified nucleotide
  modified_base 42: mod_base = OTHER; note = 2'-O-methyl modified nucleotide
  modified_base 43: mod_base = OTHER; note = 2'-O-methyl modified nucleotide
  modified_base 47: mod_base = OTHER; note = 2'-O-methyl modified nucleotide
  modified_base 48: mod_base = OTHER; note = 2'-O-methyl modified nucleotide
  modified_base 51: mod_base = OTHER; note = 2'-O-methyl modified nucleotide
  modified_base 54: mod_base = OTHER; note = nucleotide with phosphorothioate linkage
  modified_base 58: mod_base = OTHER; note = 2'-O-methyl modified nucleotide
  modified_base 59: mod_base = OTHER; note = 2'-O-methyl modified nucleotide
  modified_base 61: mod_base = OTHER; note = 2'-O-methyl modified nucleotide
  modified_base 62: mod_base = OTHER; note = 2'-O-methyl modified nucleotide
  modified_base 63: mod_base = OTHER; note = 2'-O-methyl modified nucleotide
  modified_base 64: mod_base = OTHER; note = 2'-O-methyl modified nucleotide
  modified_base 65: mod_base = OTHER; note = 2'-O-methyl modified nucleotide
  modified_base 66: mod_base = OTHER; note = 2'-O-methyl modified nucleotide
  modified_base 67: mod_base = OTHER; note = 2'-O-methyl modified nucleotide
  modified_base 68: mod_base = OTHER; note = 2'-O-methyl modified nucleotide
  modified_base 69: mod_base = OTHER; note = 2'-O-methyl modified nucleotide
  modified_base 70: mod_base = OTHER; note = 2'-O-methyl modified nucleotide
  modified_base 75: mod_base = OTHER; note = 2'-O-methyl modified nucleotide
  modified_base 77: mod_base = OTHER; note = 2'-O-methyl modified nucleotide
  modified_base 80: mod_base = OTHER; note = 2'-O-methyl modified nucleotide
  modified_base 86: mod_base = OTHER; note = 2'-O-methyl modified nucleotide
  modified_base 87: mod_base = OTHER; note = 2'-O-methyl modified nucleotide
  modified_base 89: mod_base = OTHER; note = 2'-O-methyl modified nucleotide
  modified_base 90: mod_base = OTHER; note = 2'-O-methyl modified nucleotide
  modified_base 91: mod_base = OTHER; note = 2'-O-methyl modified nucleotide
  modified_base 92: mod_base = OTHER; note = 2'-O-methyl modified nucleotide
  modified_base 99: mod_base = OTHER; note = nucleotide with phosphorothioate linkage
  modified_base 100: mod_base = OTHER; note = 2'-O-methyl modified nucleotide with phosphorothioate linkage
  modified_base 101: mod_base = OTHER; note = 2'-O-methyl modified nucleotide

SEQ ID NO: 2318 - RNA, 101 nt, synthetic construct; identical to SEQ ID NO: 1318
  source 1..101: mol_type = other RNA
  modified_base 1: mod_base = OTHER; note = 2'-O-methyl modified nucleotide with phosphorothioate linkage
  modified_base 2: mod_base = OTHER; note = 2'-O-methyl modified nucleotide with phosphorothioate linkage
  modified_base 3: mod_base = OTHER; note = 2'-O-methyl modified nucleotide with phosphorothioate linkage
  modified_base 4: mod_base = OTHER; note = 2'-O-methyl modified nucleotide
  modified_base 5: mod_base = OTHER; note = 2'-O-methyl modified nucleotide
  modified_base 8: mod_base = OTHER; note = 2'-O-methyl modified nucleotide
  modified_base 9: mod_base = OTHER; note = 2'-O-methyl modified nucleotide
  modified_base 11: mod_base = OTHER; note = 2'-O-methyl modified nucleotide
  modified_base 13: mod_base = OTHER; note = 2'-O-methyl modified nucleotide
  modified_base 18: mod_base = OTHER; note = 2'-O-methyl modified nucleotide
  modified_base 22: mod_base = OTHER; note = 2'-O-methyl modified nucleotide
  modified_base 25: mod_base = OTHER; note = 2'-O-methyl modified nucleotide
  modified_base 29: mod_base = OTHER; note = 2'-O-methyl modified nucleotide
  modified_base 30: mod_base = OTHER; note = 2'-O-methyl modified nucleotide
  modified_base 31: mod_base = OTHER; note = 2'-O-methyl modified nucleotide
  modified_base 32: mod_base = OTHER; note = 2'-O-methyl modified nucleotide
  modified_base 37: mod_base = OTHER; note = 2'-O-methyl modified nucleotide
  modified_base 38: mod_base = OTHER; note = 2'-O-methyl modified nucleotide
  modified_base 39: mod_base = OTHER; note = 2'-O-methyl modified nucleotide
  modified_base 40: mod_base = OTHER; note = 2'-O-methyl modified nucleotide
  modified_base 41: mod_base = OTHER; note = 2'-O-methyl modified nucleotide
  modified_base 42: mod_base = OTHER; note = 2'-O-methyl modified nucleotide
  modified_base 43: mod_base = OTHER; note = 2'-O-methyl modified nucleotide
  modified_base 47: mod_base = OTHER; note = 2'-O-methyl modified nucleotide
  modified_base 48: mod_base = OTHER; note = 2'-O-methyl modified nucleotide
  modified_base 51: mod_base = OTHER; note = 2'-O-methyl modified nucleotide
  modified_base 54: mod_base = OTHER; note = nucleotide with phosphorothioate linkage
  modified_base 58: mod_base = OTHER; note = 2'-O-methyl modified nucleotide
  modified_base 59: mod_base = OTHER; note = 2'-O-methyl modified nucleotide
  modified_base 61: mod_base = OTHER; note = 2'-O-methyl modified nucleotide
  modified_base 62: mod_base = OTHER; note = 2'-O-methyl modified nucleotide
  modified_base 63: mod_base = OTHER; note = 2'-O-methyl modified nucleotide
  modified_base 64: mod_base = OTHER; note = 2'-O-methyl modified nucleotide
  modified_base 65: mod_base = OTHER; note = 2'-O-methyl modified nucleotide
  modified_base 66: mod_base = OTHER; note = 2'-O-methyl modified nucleotide
  modified_base 67: mod_base = OTHER; note = 2'-O-methyl modified nucleotide
  modified_base 68: mod_base = OTHER; note = 2'-O-methyl modified nucleotide
  modified_base 69: mod_base = OTHER; note = 2'-O-methyl modified nucleotide
  modified_base 70: mod_base = OTHER; note = 2'-O-methyl modified nucleotide
  modified_base 75: mod_base = OTHER; note = 2'-O-methyl modified nucleotide
  modified_base 77: mod_base = OTHER; note = 2'-O-methyl modified nucleotide
  modified_base 80: mod_base = OTHER; note = 2'-O-methyl modified nucleotide
  modified_base 86: mod_base = OTHER; note = 2'-O-methyl modified nucleotide
  modified_base 87: mod_base = OTHER; note = 2'-O-methyl modified nucleotide
  modified_base 89: mod_base = OTHER; note = 2'-O-methyl modified nucleotide
  modified_base 90: mod_base = OTHER; note = 2'-O-methyl modified nucleotide
  modified_base 91: mod_base = OTHER; note = 2'-O-methyl modified nucleotide
  modified_base 92: mod_base = OTHER; note = 2'-O-methyl modified nucleotide
  modified_base 99: mod_base = OTHER; note = nucleotide with phosphorothioate linkage
  modified_base 100: mod_base = OTHER; note = 2'-O-methyl modified nucleotide with phosphorothioate linkage
  modified_base 101: mod_base = OTHER; note = 2'-O-methyl modified nucleotide

SEQ ID NO: 2319 - RNA, 101 nt, synthetic construct; identical to SEQ ID NO: 1319
  source 1..101: mol_type = other RNA
  modified_base 1: mod_base = OTHER; note = 2'-O-methyl modified nucleotide with phosphorothioate linkage
  modified_base 2: mod_base = OTHER; note = 2'-O-methyl modified nucleotide with phosphorothioate linkage
  modified_base 3: mod_base = OTHER; note = 2'-O-methyl modified nucleotide with phosphorothioate linkage
  modified_base 4: mod_base = OTHER; note = 2'-O-methyl modified nucleotide
  modified_base 5: mod_base = OTHER; note = 2'-O-methyl modified nucleotide
  modified_base 8: mod_base = OTHER; note = 2'-O-methyl modified nucleotide
  modified_base 9: mod_base = OTHER; note = 2'-O-methyl modified nucleotide
  modified_base 11: mod_base = OTHER; note = 2'-O-methyl modified nucleotide
  modified_base 13: mod_base = OTHER; note = 2'-O-methyl modified nucleotide
  modified_base 18: mod_base = OTHER; note = 2'-O-methyl modified nucleotide
  modified_base 22: mod_base = OTHER; note = 2'-O-methyl modified nucleotide
  modified_base 25: mod_base = OTHER; note = 2'-O-methyl modified nucleotide
  modified_base 29: mod_base = OTHER; note = 2'-O-methyl modified nucleotide
  modified_base 30: mod_base = OTHER; note = 2'-O-methyl modified nucleotide
  modified_base 31: mod_base = OTHER; note = 2'-O-methyl modified nucleotide
  modified_base 32: mod_base = OTHER; note = 2'-O-methyl modified nucleotide
  modified_base 37: mod_base = OTHER; note = 2'-O-methyl modified nucleotide
  modified_base 38: mod_base = OTHER; note = 2'-O-methyl modified nucleotide
  modified_base 39: mod_base = OTHER; note = 2'-O-methyl modified nucleotide
  modified_base 40: mod_base = OTHER; note = 2'-O-methyl modified nucleotide
  modified_base 41: mod_base = OTHER; note = 2'-O-methyl modified nucleotide
  modified_base 42: mod_base = OTHER; note = 2'-O-methyl modified nucleotide
  modified_base 43: mod_base = OTHER; note = 2'-O-methyl modified nucleotide
  modified_base 47: mod_base = OTHER; note = 2'-O-methyl modified nucleotide
  modified_base 48: mod_base = OTHER; note = 2'-O-methyl modified nucleotide
  modified_base 51: mod_base = OTHER; note = 2'-O-methyl modified nucleotide
  modified_base 54: mod_base = OTHER; note = nucleotide with phosphorothioate linkage
  modified_base 58: mod_base = OTHER; note = 2'-O-methyl modified nucleotide
  modified_base 59: mod_base = OTHER; note = 2'-O-methyl modified nucleotide
  modified_base 61: mod_base = OTHER; note = 2'-O-methyl modified nucleotide
  modified_base 62: mod_base = OTHER; note = 2'-O-methyl modified nucleotide
  modified_base 63: mod_base = OTHER; note = 2'-O-methyl modified nucleotide
  modified_base 64: mod_base = OTHER; note = 2'-O-methyl modified nucleotide
  modified_base 65: mod_base = OTHER; note = 2'-O-methyl modified nucleotide
  modified_base 66: mod_base = OTHER; note = 2'-O-methyl modified nucleotide
  modified_base 67: mod_base = OTHER; note = 2'-O-methyl modified nucleotide
  modified_base 68: mod_base = OTHER; note = 2'-O-methyl modified nucleotide
  modified_base 69: mod_base = OTHER; note = 2'-O-methyl modified nucleotide
  modified_base 70: mod_base = OTHER; note = 2'-O-methyl modified nucleotide
  modified_base 75: mod_base = OTHER; note = 2'-O-methyl modified nucleotide
  modified_base 77: mod_base = OTHER; note = 2'-O-methyl modified nucleotide
  modified_base 80: mod_base = OTHER; note = 2'-O-methyl modified nucleotide
  modified_base 86: mod_base = OTHER; note = 2'-O-methyl modified nucleotide
  modified_base 87: mod_base = OTHER; note = 2'-O-methyl modified nucleotide
  modified_base 89: mod_base = OTHER; note = 2'-O-methyl modified nucleotide
  modified_base 90: mod_base = OTHER; note = 2'-O-methyl modified nucleotide
  modified_base 91: mod_base = OTHER; note = 2'-O-methyl modified nucleotide
  modified_base 92: mod_base = OTHER; note = 2'-O-methyl modified nucleotide
  modified_base 99: mod_base = OTHER; note = nucleotide with phosphorothioate linkage
  modified_base 100: mod_base = OTHER; note = 2'-O-methyl modified nucleotide with phosphorothioate linkage
  modified_base 101: mod_base = OTHER; note = 2'-O-methyl modified nucleotide

SEQ ID NO: 2320 - RNA, 101 nt, synthetic construct; identical to SEQ ID NO: 1320
  source 1..101: mol_type = other RNA
  modified_base 1: mod_base = OTHER; note = 2'-O-methyl modified nucleotide with phosphorothioate linkage
  modified_base 2: mod_base = OTHER; note = 2'-O-methyl modified nucleotide with phosphorothioate linkage
  modified_base 3: mod_base = OTHER; note = 2'-O-methyl modified nucleotide with phosphorothioate linkage
  modified_base 4: mod_base = OTHER; note = 2'-O-methyl modified nucleotide
  modified_base 5: mod_base = OTHER; note = 2'-O-methyl modified nucleotide
  modified_base 8: mod_base = OTHER; note = 2'-O-methyl modified nucleotide
  modified_base 9: mod_base = OTHER; note = 2'-O-methyl modified nucleotide
  modified_base 11: mod_base = OTHER; note = 2'-O-methyl modified nucleotide
  modified_base 13: mod_base = OTHER; note = 2'-O-methyl modified nucleotide
  modified_base 18: mod_base = OTHER; note = 2'-O-methyl modified nucleotide
  modified_base 22: mod_base = OTHER; note = 2'-O-methyl modified nucleotide
  modified_base 25: mod_base = OTHER; note = 2'-O-methyl modified nucleotide
  modified_base 29: mod_base = OTHER; note = 2'-O-methyl modified nucleotide
  modified_base 30: mod_base = OTHER; note = 2'-O-methyl modified nucleotide
  modified_base 31: mod_base = OTHER; note = 2'-O-methyl modified nucleotide
  modified_base 32: mod_base = OTHER; note = 2'-O-methyl modified nucleotide
  modified_base 37: mod_base = OTHER; note = 2'-O-methyl modified nucleotide
  modified_base 38: mod_base = OTHER; note = 2'-O-methyl modified nucleotide
  modified_base 39: mod_base = OTHER; note = 2'-O-methyl modified nucleotide
  modified_base 40: mod_base = OTHER; note = 2'-O-methyl modified nucleotide
  modified_base 41: mod_base = OTHER; note = 2'-O-methyl modified nucleotide
  modified_base 42: mod_base = OTHER; note = 2'-O-methyl modified nucleotide
  modified_base 43: mod_base = OTHER; note = 2'-O-methyl modified nucleotide
  modified_base 47: mod_base = OTHER; note = 2'-O-methyl modified nucleotide
  modified_base 48: mod_base = OTHER; note = 2'-O-methyl modified nucleotide
  modified_base 51: mod_base = OTHER; note = 2'-O-methyl modified nucleotide
  modified_base 54: mod_base = OTHER; note = nucleotide with phosphorothioate linkage
  modified_base 58: mod_base = OTHER; note = 2'-O-methyl modified nucleotide
  modified_base 59: mod_base = OTHER; note = 2'-O-methyl modified nucleotide
  modified_base 61: mod_base = OTHER; note = 2'-O-methyl modified nucleotide
  modified_base 62: mod_base = OTHER; note = 2'-O-methyl modified nucleotide
  modified_base 63: mod_base = OTHER; note = 2'-O-methyl modified nucleotide
  modified_base 64: mod_base = OTHER; note = 2'-O-methyl modified nucleotide
  modified_base 65: mod_base = OTHER; note = 2'-O-methyl modified nucleotide
  modified_base 66: mod_base = OTHER; note = 2'-O-methyl modified nucleotide
  modified_base 67: mod_base = OTHER; note = 2'-O-methyl modified nucleotide
  modified_base 68: mod_base = OTHER; note = 2'-O-methyl modified nucleotide
  modified_base 69: mod_base = OTHER; note = 2'-O-methyl modified nucleotide
  modified_base 70: mod_base = OTHER; note = 2'-O-methyl modified nucleotide
  modified_base 75: mod_base = OTHER; note = 2'-O-methyl modified nucleotide
  modified_base 77: mod_base = OTHER; note = 2'-O-methyl modified nucleotide
  modified_base 80: mod_base = OTHER; note = 2'-O-methyl modified nucleotide
  modified_base 86: mod_base = OTHER; note = 2'-O-methyl modified nucleotide
  modified_base 87: mod_base = OTHER; note = 2'-O-methyl modified nucleotide
  modified_base 89: mod_base = OTHER; note = 2'-O-methyl modified nucleotide
  modified_base 90: mod_base = OTHER; note = 2'-O-methyl modified nucleotide
  modified_base 91: mod_base = OTHER; note = 2'-O-methyl modified nucleotide
  modified_base 92: mod_base = OTHER; note = 2'-O-methyl modified nucleotide
  modified_base 99: mod_base = OTHER; note = nucleotide with phosphorothioate linkage
  modified_base 100: mod_base = OTHER; note = 2'-O-methyl modified nucleotide with phosphorothioate linkage
  modified_base 101: mod_base = OTHER; note = 2'-O-methyl modified nucleotide

SEQ ID NO: 2321 - RNA, 101 nt, synthetic construct; identical to SEQ ID NO: 1321
  source 1..101: mol_type = other RNA
  modified_base 1: mod_base = OTHER; note = 2'-O-methyl modified nucleotide with phosphorothioate linkage
  modified_base 2: mod_base = OTHER; note = 2'-O-methyl modified nucleotide with phosphorothioate linkage
  modified_base 3: mod_base = OTHER; note = 2'-O-methyl modified nucleotide with phosphorothioate linkage
  modified_base 4: mod_base = OTHER; note = 2'-O-methyl modified nucleotide
  modified_base 5: mod_base = OTHER; note = 2'-O-methyl modified nucleotide
  modified_base 8: mod_base = OTHER; note = 2'-O-methyl modified nucleotide
  modified_base 9: mod_base = OTHER; note = 2'-O-methyl modified nucleotide
  modified_base 11: mod_base = OTHER; note = 2'-O-methyl modified nucleotide
  modified_base 13: mod_base = OTHER; note = 2'-O-methyl modified nucleotide
  modified_base 18: mod_base = OTHER; note = 2'-O-methyl modified nucleotide
  modified_base 22: mod_base = OTHER; note = 2'-O-methyl modified nucleotide
  modified_base 25: mod_base = OTHER; note = 2'-O-methyl modified nucleotide
  modified_base 29: mod_base = OTHER; note = 2'-O-methyl modified nucleotide
  modified_base 30: mod_base = OTHER; note = 2'-O-methyl modified nucleotide
  modified_base 31: mod_base = OTHER; note = 2'-O-methyl modified nucleotide
  modified_base 32: mod_base = OTHER; note = 2'-O-methyl modified nucleotide
  modified_base 37: mod_base = OTHER; note = 2'-O-methyl modified nucleotide
  modified_base 38: mod_base = OTHER; note = 2'-O-methyl modified nucleotide
  modified_base 39: mod_base = OTHER; note = 2'-O-methyl modified nucleotide
  modified_base 40: mod_base = OTHER; note = 2'-O-methyl modified nucleotide
  modified_base 41: mod_base = OTHER; note = 2'-O-methyl modified nucleotide
  modified_base 42: mod_base = OTHER; note = 2'-O-methyl modified nucleotide
  modified_base 43: mod_base = OTHER; note = 2'-O-methyl modified nucleotide
  modified_base 47: mod_base = OTHER; note = 2'-O-methyl modified nucleotide
  modified_base 48: mod_base = OTHER; note = 2'-O-methyl modified nucleotide
  modified_base 51: mod_base = OTHER; note = 2'-O-methyl modified nucleotide
  modified_base 54: mod_base = OTHER; note = nucleotide with phosphorothioate linkage
  modified_base 58: mod_base = OTHER; note = 2'-O-methyl modified nucleotide
  modified_base 59: mod_base = OTHER; note = 2'-O-methyl modified nucleotide
  modified_base 61: mod_base = OTHER; note = 2'-O-methyl modified nucleotide
  modified_base 62: mod_base = OTHER; note = 2'-O-methyl modified nucleotide
  modified_base 63: mod_base = OTHER; note = 2'-O-methyl modified nucleotide
  modified_base 64: mod_base = OTHER; note = 2'-O-methyl modified nucleotide
  modified_base 65: mod_base = OTHER; note = 2'-O-methyl modified nucleotide
  modified_base 66: mod_base = OTHER; note = 2'-O-methyl modified nucleotide
  modified_base 67: mod_base = OTHER; note = 2'-O-methyl modified nucleotide
  modified_base 68: mod_base = OTHER; note = 2'-O-methyl modified nucleotide
  modified_base 69: mod_base = OTHER; note = 2'-O-methyl modified nucleotide
  modified_base 70: mod_base = OTHER; note = 2'-O-methyl modified nucleotide
  modified_base 75: mod_base = OTHER; note = 2'-O-methyl modified nucleotide
  modified_base 77: mod_base = OTHER; note = 2'-O-methyl modified nucleotide
  modified_base 80: mod_base = OTHER; note = 2'-O-methyl modified nucleotide
  modified_base 86: mod_base = OTHER; note = 2'-O-methyl modified nucleotide
  modified_base 87: mod_base = OTHER; note = 2'-O-methyl modified nucleotide
  modified_base 89: mod_base = OTHER; note = 2'-O-methyl modified nucleotide
  modified_base 90: mod_base = OTHER; note = 2'-O-methyl modified nucleotide
  modified_base 91: mod_base = OTHER; note = 2'-O-methyl modified nucleotide
  modified_base 92: mod_base = OTHER; note = 2'-O-methyl modified nucleotide
  modified_base 99: mod_base = OTHER; note = nucleotide with phosphorothioate linkage
  modified_base 100: mod_base = OTHER; note = 2'-O-methyl modified nucleotide with phosphorothioate linkage
  modified_base 101: mod_base = OTHER; note = 2'-O-methyl modified nucleotide

SEQ ID NO: 2322 - RNA, 101 nt, synthetic construct; identical to SEQ ID NO: 1322
  source 1..101: mol_type = other RNA
  modified_base 1: mod_base = OTHER; note = 2'-O-methyl modified nucleotide with phosphorothioate linkage
  modified_base 2: mod_base = OTHER; note = 2'-O-methyl modified nucleotide with phosphorothioate linkage
  modified_base 3: mod_base = OTHER; note = 2'-O-methyl modified nucleotide with phosphorothioate linkage
  modified_base 4: mod_base = OTHER; note = 2'-O-methyl modified nucleotide
  modified_base 5: mod_base = OTHER; note = 2'-O-methyl modified nucleotide
  modified_base 8: mod_base = OTHER; note = 2'-O-methyl modified nucleotide
  modified_base 9: mod_base = OTHER; note = 2'-O-methyl modified nucleotide
  modified_base 11: mod_base = OTHER; note = 2'-O-methyl modified nucleotide
  modified_base 13: mod_base = OTHER; note = 2'-O-methyl modified nucleotide
  modified_base 18: mod_base = OTHER; note = 2'-O-methyl modified nucleotide
  modified_base 22: mod_base = OTHER; note = 2'-O-methyl modified nucleotide
  modified_base 25: mod_base = OTHER; note = 2'-O-methyl modified nucleotide
  modified_base 29: mod_base = OTHER; note = 2'-O-methyl modified nucleotide
  modified_base 30: mod_base = OTHER; note = 2'-O-methyl modified nucleotide
  modified_base 31: mod_base = OTHER; note = 2'-O-methyl modified nucleotide
  modified_base 32: mod_base = OTHER; note = 2'-O-methyl modified nucleotide
  modified_base 37: mod_base = OTHER; note = 2'-O-methyl modified nucleotide
  modified_base 38: mod_base = OTHER; note = 2'-O-methyl modified nucleotide
  modified_base 39: mod_base = OTHER; note = 2'-O-methyl modified nucleotide
  modified_base 40: mod_base = OTHER; note = 2'-O-methyl modified nucleotide
  modified_base 41: mod_base = OTHER; note = 2'-O-methyl modified nucleotide
  modified_base 42: mod_base = OTHER; note = 2'-O-methyl modified nucleotide
  modified_base 43: mod_base = OTHER; note = 2'-O-methyl modified nucleotide
  modified_base 47: mod_base = OTHER; note = 2'-O-methyl modified nucleotide
  modified_base 48: mod_base = OTHER; note = 2'-O-methyl modified nucleotide
  modified_base 51: mod_base = OTHER; note = 2'-O-methyl modified nucleotide
  modified_base 54: mod_base = OTHER; note = nucleotide with phosphorothioate linkage
  modified_base 58: mod_base = OTHER; note = 2'-O-methyl modified nucleotide
  modified_base 59: mod_base = OTHER; note = 2'-O-methyl modified nucleotide
  modified_base 61: mod_base = OTHER; note = 2'-O-methyl modified nucleotide
  modified_base 62: mod_base = OTHER; note = 2'-O-methyl modified nucleotide
  modified_base 63: mod_base = OTHER; note = 2'-O-methyl modified nucleotide
  modified_base 64: mod_base = OTHER; note = 2'-O-methyl modified nucleotide
  modified_base 65: mod_base = OTHER; note = 2'-O-methyl modified nucleotide
  modified_base 66: mod_base = OTHER; note = 2'-O-methyl modified nucleotide
  modified_base 67: mod_base = OTHER; note = 2'-O-methyl modified nucleotide
  modified_base 68: mod_base = OTHER; note = 2'-O-methyl modified nucleotide
  modified_base 69: mod_base = OTHER; note = 2'-O-methyl modified nucleotide
  modified_base 70: mod_base = OTHER; note = 2'-O-methyl modified nucleotide
  modified_base 75: mod_base = OTHER; note = 2'-O-methyl modified nucleotide
  modified_base 77: mod_base = OTHER; note = 2'-O-methyl modified nucleotide
  modified_base 80: mod_base = OTHER; note = 2'-O-methyl modified nucleotide
  modified_base 86: mod_base = OTHER; note = 2'-O-methyl modified nucleotide
  modified_base 87: mod_base = OTHER; note = 2'-O-methyl modified nucleotide
  modified_base 89: mod_base = OTHER; note = 2'-O-methyl modified nucleotide
  modified_base 90: mod_base = OTHER; note = 2'-O-methyl modified nucleotide
  modified_base 91: mod_base = OTHER; note = 2'-O-methyl modified nucleotide
  modified_base 92: mod_base = OTHER; note = 2'-O-methyl modified nucleotide
  modified_base 99: mod_base = OTHER; note = nucleotide with phosphorothioate linkage
  modified_base 100: mod_base = OTHER; note = 2'-O-methyl modified nucleotide with phosphorothioate linkage
  modified_base 101: mod_base = OTHER; note = 2'-O-methyl modified nucleotide

SEQ ID NO: 2323 - RNA, 101 nt, synthetic construct; identical to SEQ ID NO: 1323
  source 1..101: mol_type = other RNA
  modified_base 1: mod_base = OTHER; note = 2'-O-methyl modified nucleotide with phosphorothioate linkage
  modified_base 2: mod_base = OTHER; note = 2'-O-methyl modified nucleotide with phosphorothioate linkage
  modified_base 3: mod_base = OTHER; note = 2'-O-methyl modified nucleotide with phosphorothioate linkage
  modified_base 4: mod_base = OTHER; note = 2'-O-methyl modified nucleotide
  modified_base 5: mod_base = OTHER; note = 2'-O-methyl modified nucleotide
  modified_base 8: mod_base = OTHER; note = 2'-O-methyl modified nucleotide
  modified_base 9: mod_base = OTHER; note = 2'-O-methyl modified nucleotide
  modified_base 11: mod_base = OTHER; note = 2'-O-methyl modified nucleotide
  modified_base 13: mod_base = OTHER; note = 2'-O-methyl modified nucleotide
  modified_base 18: mod_base = OTHER; note = 2'-O-methyl modified nucleotide
  modified_base 22: mod_base = OTHER; note = 2'-O-methyl modified nucleotide
  modified_base 25: mod_base = OTHER; note = 2'-O-methyl modified nucleotide
  modified_base 29: mod_base = OTHER; note = 2'-O-methyl modified nucleotide
  modified_base 30: mod_base = OTHER; note = 2'-O-methyl modified nucleotide
  modified_base 31: mod_base = OTHER; note = 2'-O-methyl modified nucleotide
  modified_base 32: mod_base = OTHER; note = 2'-O-methyl modified nucleotide
  modified_base 37: mod_base = OTHER; note = 2'-O-methyl modified nucleotide
  modified_base 38: mod_base = OTHER; note = 2'-O-methyl modified nucleotide
  modified_base 39: mod_base = OTHER; note = 2'-O-methyl modified nucleotide
  modified_base 40: mod_base = OTHER; note = 2'-O-methyl modified nucleotide
  modified_base 41: mod_base = OTHER; note = 2'-O-methyl modified nucleotide
  modified_base 42: mod_base = OTHER; note = 2'-O-methyl modified nucleotide
  modified_base 43: mod_base = OTHER; note = 2'-O-methyl modified nucleotide
  modified_base 47: mod_base = OTHER; note = 2'-O-methyl modified nucleotide
  modified_base 48: mod_base = OTHER; note = 2'-O-methyl modified nucleotide
  modified_base 51: mod_base = OTHER; note = 2'-O-methyl modified nucleotide
  modified_base 54: mod_base = OTHER; note = nucleotide with phosphorothioate linkage
  modified_base 58: mod_base = OTHER; note = 2'-O-methyl modified nucleotide
  modified_base 59: mod_base = OTHER; note = 2'-O-methyl modified nucleotide
  modified_base 61: mod_base = OTHER; note = 2'-O-methyl modified nucleotide
  modified_base 62: mod_base = OTHER; note = 2'-O-methyl modified nucleotide
  modified_base 63: mod_base = OTHER; note = 2'-O-methyl modified nucleotide
  modified_base 64: mod_base = OTHER; note = 2'-O-methyl modified nucleotide
  modified_base 65: mod_base = OTHER; note = 2'-O-methyl modified nucleotide
  modified_base 66: mod_base = OTHER; note = 2'-O-methyl modified nucleotide
  modified_base 67: mod_base = OTHER; note = 2'-O-methyl modified nucleotide
  modified_base 68: mod_base = OTHER; note = 2'-O-methyl modified nucleotide
  modified_base 69: mod_base = OTHER; note = 2'-O-methyl modified nucleotide
  modified_base 70: mod_base = OTHER; note = 2'-O-methyl modified nucleotide
  modified_base 75: mod_base = OTHER; note = 2'-O-methyl modified nucleotide
  modified_base 77: mod_base = OTHER; note = 2'-O-methyl modified nucleotide
  modified_base 80: mod_base = OTHER; note = 2'-O-methyl modified nucleotide
  modified_base 86: mod_base = OTHER; note = 2'-O-methyl modified nucleotide
  modified_base 87: mod_base = OTHER; note = 2'-O-methyl modified nucleotide
  modified_base 89: mod_base = OTHER; note = 2'-O-methyl modified nucleotide
  modified_base 90: mod_base = OTHER; note = 2'-O-methyl modified nucleotide
  modified_base 91: mod_base = OTHER; note = 2'-O-methyl modified nucleotide
  modified_base 92: mod_base = OTHER; note = 2'-O-methyl modified nucleotide
  modified_base 99: mod_base = OTHER; note = nucleotide with phosphorothioate linkage
  modified_base 100: mod_base = OTHER; note = 2'-O-methyl modified nucleotide with phosphorothioate linkage
  modified_base 101: mod_base = OTHER; note = 2'-O-methyl modified nucleotide

SEQ ID NO: 2324 - RNA, 101 nt, synthetic construct; identical to SEQ ID NO: 1324
  source 1..101: mol_type = other RNA
  modified_base 1: mod_base = OTHER; note = 2'-O-methyl modified nucleotide with phosphorothioate linkage
  modified_base 2: mod_base = OTHER; note = 2'-O-methyl modified nucleotide with phosphorothioate linkage
  modified_base 3: mod_base = OTHER; note = 2'-O-methyl modified nucleotide with phosphorothioate linkage
  modified_base 4: mod_base = OTHER; note = 2'-O-methyl modified nucleotide
  modified_base 5: mod_base = OTHER; note = 2'-O-methyl modified nucleotide
  modified_base 8: mod_base = OTHER; note = 2'-O-methyl modified nucleotide
  modified_base 9: mod_base = OTHER; note = 2'-O-methyl modified nucleotide
  modified_base 11: mod_base = OTHER; note = 2'-O-methyl modified nucleotide
  modified_base 13: mod_base = OTHER; note = 2'-O-methyl modified nucleotide
  modified_base 18: mod_base = OTHER; note = 2'-O-methyl modified nucleotide
  modified_base 22: mod_base = OTHER; note = 2'-O-methyl modified nucleotide
  modified_base 25: mod_base = OTHER; note = 2'-O-methyl modified nucleotide
  modified_base 29: mod_base = OTHER; note = 2'-O-methyl modified nucleotide
  modified_base 30: mod_base = OTHER; note = 2'-O-methyl modified nucleotide
  modified_base 31: mod_base = OTHER; note = 2'-O-methyl modified nucleotide
  modified_base 32: mod_base = OTHER; note = 2'-O-methyl modified nucleotide
  modified_base 37: mod_base = OTHER; note = 2'-O-methyl modified nucleotide
  modified_base 38: mod_base = OTHER; note = 2'-O-methyl modified nucleotide
  modified_base 39: mod_base = OTHER; note = 2'-O-methyl modified nucleotide
  modified_base 40: mod_base = OTHER; note = 2'-O-methyl modified nucleotide
  modified_base 41: mod_base = OTHER; note = 2'-O-methyl modified nucleotide
  modified_base 42: mod_base = OTHER; note = 2'-O-methyl modified nucleotide
  modified_base 43: mod_base = OTHER; note = 2'-O-methyl modified nucleotide
  modified_base 47: mod_base = OTHER; note = 2'-O-methyl modified nucleotide
  modified_base 48: mod_base = OTHER; note = 2'-O-methyl modified nucleotide
  modified_base 51: mod_base = OTHER; note = 2'-O-methyl modified nucleotide
  modified_base 54: mod_base = OTHER; note = nucleotide with phosphorothioate linkage
  modified_base 58: mod_base = OTHER; note = 2'-O-methyl modified nucleotide
  modified_base 59: mod_base = OTHER; note = 2'-O-methyl modified nucleotide
  modified_base 61: mod_base = OTHER; note = 2'-O-methyl modified nucleotide
  modified_base 62: mod_base = OTHER; note = 2'-O-methyl modified nucleotide
  modified_base 63: mod_base = OTHER; note = 2'-O-methyl modified nucleotide
  modified_base 64: mod_base = OTHER; note = 2'-O-methyl modified nucleotide
  modified_base 65: mod_base = OTHER; note = 2'-O-methyl modified nucleotide
  modified_base 66: mod_base = OTHER; note = 2'-O-methyl modified nucleotide
  modified_base 67: mod_base = OTHER; note = 2'-O-methyl modified nucleotide
  modified_base 68: mod_base = OTHER; note = 2'-O-methyl modified nucleotide
  modified_base 69: mod_base = OTHER; note = 2'-O-methyl modified nucleotide
  modified_base 70: mod_base = OTHER; note = 2'-O-methyl modified nucleotide
  modified_base 75: mod_base = OTHER; note = 2'-O-methyl modified nucleotide
  modified_base 77: mod_base = OTHER; note = 2'-O-methyl modified nucleotide
  modified_base 80: mod_base = OTHER; note = 2'-O-methyl modified nucleotide
  modified_base 86: mod_base = OTHER; note = 2'-O-methyl modified nucleotide
  modified_base 87: mod_base = OTHER; note = 2'-O-methyl modified nucleotide
  modified_base 89: mod_base = OTHER; note = 2'-O-methyl modified nucleotide
  modified_base 90: mod_base = OTHER; note = 2'-O-methyl modified nucleotide
  modified_base 91: mod_base = OTHER; note = 2'-O-methyl modified nucleotide
  modified_base 92: mod_base = OTHER; note = 2'-O-methyl modified nucleotide
  modified_base 99: mod_base = OTHER; note = nucleotide with phosphorothioate linkage
  modified_base 100: mod_base = OTHER; note = 2'-O-methyl modified nucleotide with phosphorothioate linkage
  modified_base 101: mod_base = OTHER; note = 2'-O-methyl modified nucleotide

SEQ ID NO: 2325 - RNA, 101 nt, synthetic construct; identical to SEQ ID NO: 1325
  source 1..101: mol_type = other RNA
  modified_base 1: mod_base = OTHER; note = 2'-O-methyl modified nucleotide with phosphorothioate linkage
  modified_base 2: mod_base = OTHER; note = 2'-O-methyl modified nucleotide with phosphorothioate linkage
  modified_base 3: mod_base = OTHER; note = 2'-O-methyl modified nucleotide with phosphorothioate linkage
  modified_base 4: mod_base = OTHER; note = 2'-O-methyl modified nucleotide
  modified_base 5: mod_base = OTHER; note = 2'-O-methyl modified nucleotide
  modified_base 8: mod_base = OTHER; note = 2'-O-methyl modified nucleotide
  modified_base 9: mod_base = OTHER; note = 2'-O-methyl modified nucleotide
  modified_base 11: mod_base = OTHER; note = 2'-O-methyl modified nucleotide
  modified_base 13: mod_base = OTHER; note = 2'-O-methyl modified nucleotide
  modified_base 18: mod_base = OTHER; note = 2'-O-methyl modified nucleotide
  modified_base 22: mod_base = OTHER; note = 2'-O-methyl modified nucleotide
  modified_base 25: mod_base = OTHER; note = 2'-O-methyl modified nucleotide
  modified_base 29: mod_base = OTHER; note = 2'-O-methyl modified nucleotide
  modified_base 30: mod_base = OTHER; note = 2'-O-methyl modified nucleotide
  modified_base 31: mod_base = OTHER; note = 2'-O-methyl modified nucleotide
  modified_base 32: mod_base = OTHER; note = 2'-O-methyl modified nucleotide
  modified_base 37: mod_base = OTHER; note = 2'-O-methyl modified nucleotide
  modified_base 38: mod_base = OTHER; note = 2'-O-methyl modified nucleotide
  modified_base 39: mod_base = OTHER; note = 2'-O-methyl modified nucleotide
  modified_base 40: mod_base = OTHER; note = 2'-O-methyl modified nucleotide
  modified_base 41: mod_base = OTHER; note = 2'-O-methyl modified nucleotide
  modified_base 42: mod_base = OTHER; note = 2'-O-methyl modified nucleotide
  modified_base 43: mod_base = OTHER; note = 2'-O-methyl modified nucleotide
  modified_base 47: mod_base = OTHER; note = 2'-O-methyl modified nucleotide
  modified_base 48: mod_base = OTHER; note = 2'-O-methyl modified nucleotide
  modified_base 51: mod_base = OTHER; note = 2'-O-methyl modified nucleotide
  modified_base 54: mod_base = OTHER; note = nucleotide with phosphorothioate linkage
  modified_base 58: mod_base = OTHER; note = 2'-O-methyl modified nucleotide
  modified_base 59: mod_base = OTHER; note = 2'-O-methyl modified nucleotide
  modified_base 61: mod_base = OTHER; note = 2'-O-methyl modified nucleotide
  modified_base 62: mod_base = OTHER; note = 2'-O-methyl modified nucleotide
  modified_base 63: mod_base = OTHER; note = 2'-O-methyl modified nucleotide
  modified_base 64: mod_base = OTHER; note = 2'-O-methyl modified nucleotide
  modified_base 65: mod_base = OTHER; note = 2'-O-methyl modified nucleotide
  modified_base 66: mod_base = OTHER; note = 2'-O-methyl modified nucleotide
  modified_base 67: mod_base = OTHER; note = 2'-O-methyl modified nucleotide
  modified_base 68: mod_base = OTHER; note = 2'-O-methyl modified nucleotide
  modified_base 69: mod_base = OTHER; note = 2'-O-methyl modified nucleotide
  modified_base 70: mod_base = OTHER; note = 2'-O-methyl modified nucleotide
  modified_base 75: mod_base = OTHER; note = 2'-O-methyl modified nucleotide
  modified_base 77: mod_base = OTHER; note = 2'-O-methyl modified nucleotide
  modified_base 80: mod_base = OTHER; note = 2'-O-methyl modified nucleotide
  modified_base 86: mod_base = OTHER; note = 2'-O-methyl modified nucleotide
  modified_base 87: mod_base = OTHER; note = 2'-O-methyl modified nucleotide
  modified_base 89: mod_base = OTHER; note = 2'-O-methyl modified nucleotide
  modified_base 90: mod_base = OTHER; note = 2'-O-methyl modified nucleotide
  modified_base 91: mod_base = OTHER; note = 2'-O-methyl modified nucleotide
  modified_base 92: mod_base = OTHER; note = 2'-O-methyl modified nucleotide
  modified_base 99: mod_base = OTHER; note = nucleotide with phosphorothioate linkage
  modified_base 100: mod_base = OTHER; note = 2'-O-methyl modified nucleotide with phosphorothioate linkage
  modified_base 101: mod_base = OTHER; note = 2'-O-methyl modified nucleotide

SEQ ID NO: 2326 - RNA, 101 nt, synthetic construct; identical to SEQ ID NO: 1326
  source 1..101: mol_type = other RNA
  modified_base 1: mod_base = OTHER; note = 2'-O-methyl modified nucleotide with phosphorothioate linkage
  modified_base 2: mod_base = OTHER; note = 2'-O-methyl modified nucleotide with phosphorothioate linkage
  modified_base 3: mod_base = OTHER; note = 2'-O-methyl modified nucleotide with phosphorothioate linkage
  modified_base 4: mod_base = OTHER; note = 2'-O-methyl modified nucleotide
  modified_base 5: mod_base = OTHER; note = 2'-O-methyl modified nucleotide
  modified_base 8: mod_base = OTHER; note = 2'-O-methyl modified nucleotide
  modified_base 9: mod_base = OTHER; note = 2'-O-methyl modified nucleotide
  modified_base 11: mod_base = OTHER; note = 2'-O-methyl modified nucleotide
  modified_base 13: mod_base = OTHER; note = 2'-O-methyl modified nucleotide
  modified_base 18: mod_base = OTHER; note = 2'-O-methyl modified nucleotide
  modified_base 22: mod_base = OTHER; note = 2'-O-methyl modified nucleotide
  modified_base 25: mod_base = OTHER; note = 2'-O-methyl modified nucleotide
  modified_base 29: mod_base = OTHER; note = 2'-O-methyl modified nucleotide
  modified_base 30: mod_base = OTHER; note = 2'-O-methyl modified nucleotide
  modified_base 31: mod_base = OTHER; note = 2'-O-methyl modified nucleotide
  modified_base 32: mod_base = OTHER; note = 2'-O-methyl modified nucleotide
  modified_base 37: mod_base = OTHER; note = 2'-O-methyl modified nucleotide
  modified_base 38: mod_base = OTHER; note = 2'-O-methyl modified nucleotide
  modified_base 39: mod_base = OTHER; note = 2'-O-methyl modified nucleotide
  modified_base 40: mod_base = OTHER; note = 2'-O-methyl modified nucleotide
  modified_base 41: mod_base = OTHER; note = 2'-O-methyl modified nucleotide
  modified_base 42: mod_base = OTHER; note = 2'-O-methyl modified nucleotide
  modified_base 43: mod_base = OTHER; note = 2'-O-methyl modified nucleotide
  modified_base 47: mod_base = OTHER; note = 2'-O-methyl modified nucleotide
  modified_base 48: mod_base = OTHER; note = 2'-O-methyl modified nucleotide
  modified_base 51: mod_base = OTHER; note = 2'-O-methyl modified nucleotide
  modified_base 54: mod_base = OTHER; note = nucleotide with phosphorothioate linkage
  modified_base 58: mod_base = OTHER; note = 2'-O-methyl modified nucleotide
  modified_base 59: mod_base = OTHER; note = 2'-O-methyl modified nucleotide
  modified_base 61: mod_base = OTHER; note = 2'-O-methyl modified nucleotide
  modified_base 62: mod_base = OTHER; note = 2'-O-methyl modified nucleotide
  modified_base 63: mod_base = OTHER; note = 2'-O-methyl modified nucleotide
  modified_base 64: mod_base = OTHER; note = 2'-O-methyl modified nucleotide
  modified_base 65: mod_base = OTHER; note = 2'-O-methyl modified nucleotide
  modified_base 66: mod_base = OTHER; note = 2'-O-methyl modified nucleotide
  modified_base 67: mod_base = OTHER; note = 2'-O-methyl modified nucleotide
  modified_base 68: mod_base = OTHER; note = 2'-O-methyl modified nucleotide
  modified_base 69: mod_base = OTHER; note = 2'-O-methyl modified nucleotide
  modified_base 70: mod_base = OTHER; note = 2'-O-methyl modified nucleotide
  modified_base 75: mod_base = OTHER; note = 2'-O-methyl modified nucleotide
  modified_base 77: mod_base = OTHER; note = 2'-O-methyl modified nucleotide
  modified_base 80: mod_base = OTHER; note = 2'-O-methyl modified nucleotide
  modified_base 86: mod_base = OTHER; note = 2'-O-methyl modified nucleotide
  modified_base 87: mod_base = OTHER; note = 2'-O-methyl modified nucleotide
  modified_base 89: mod_base = OTHER; note = 2'-O-methyl modified nucleotide
  modified_base 90: mod_base = OTHER; note = 2'-O-methyl modified nucleotide
  modified_base 91: mod_base = OTHER; note = 2'-O-methyl modified nucleotide
  modified_base 92: mod_base = OTHER; note = 2'-O-methyl modified nucleotide
  modified_base 99: mod_base = OTHER; note = nucleotide with phosphorothioate linkage
  modified_base 100: mod_base = OTHER; note = 2'-O-methyl modified nucleotide with phosphorothioate linkage
  modified_base 101: mod_base = OTHER; note = 2'-O-methyl modified nucleotide

SEQ ID NO: 2327 - RNA, 101 nt, synthetic construct; identical to SEQ ID NO: 1327
  source 1..101: mol_type = other RNA
  modified_base 1: mod_base = OTHER; note = 2'-O-methyl modified nucleotide with phosphorothioate linkage
  modified_base 2: mod_base = OTHER; note = 2'-O-methyl modified nucleotide with phosphorothioate linkage
  modified_base 3: mod_base = OTHER; note = 2'-O-methyl modified nucleotide with phosphorothioate linkage
  modified_base 4: mod_base = OTHER; note = 2'-O-methyl modified nucleotide
  modified_base 5: mod_base = OTHER; note = 2'-O-methyl modified nucleotide
  modified_base 8: mod_base = OTHER; note = 2'-O-methyl modified nucleotide
  modified_base 9: mod_base = OTHER; note = 2'-O-methyl modified nucleotide
  modified_base 11: mod_base = OTHER; note = 2'-O-methyl modified nucleotide
  modified_base 13: mod_base = OTHER; note = 2'-O-methyl modified nucleotide
  modified_base 18: mod_base = OTHER; note = 2'-O-methyl modified nucleotide
  modified_base 22: mod_base = OTHER; note = 2'-O-methyl modified nucleotide
  modified_base 25: mod_base = OTHER; note = 2'-O-methyl modified nucleotide
  modified_base 29: mod_base = OTHER; note = 2'-O-methyl modified nucleotide
  modified_base 30: mod_base = OTHER; note = 2'-O-methyl modified nucleotide
  modified_base 31: mod_base = OTHER; note = 2'-O-methyl modified nucleotide
  modified_base 32: mod_base = OTHER; note = 2'-O-methyl modified nucleotide
  modified_base 37: mod_base = OTHER; note = 2'-O-methyl modified nucleotide
  modified_base 38: mod_base = OTHER; note = 2'-O-methyl modified nucleotide
  modified_base 39: mod_base = OTHER; note = 2'-O-methyl modified nucleotide
  modified_base 40: mod_base = OTHER; note = 2'-O-methyl modified nucleotide
  modified_base 41: mod_base = OTHER; note = 2'-O-methyl modified nucleotide
  modified_base 42: mod_base = OTHER; note = 2'-O-methyl modified nucleotide
  modified_base 43: mod_base = OTHER; note = 2'-O-methyl modified nucleotide
  modified_base 47: mod_base = OTHER; note = 2'-O-methyl modified nucleotide
  modified_base 48: mod_base = OTHER; note = 2'-O-methyl modified nucleotide
  modified_base 51: mod_base = OTHER; note = 2'-O-methyl modified nucleotide
  modified_base 54: mod_base = OTHER; note = nucleotide with phosphorothioate linkage
  modified_base 58: mod_base = OTHER; note = 2'-O-methyl modified nucleotide
  modified_base 59: mod_base = OTHER; note = 2'-O-methyl modified nucleotide
  modified_base 61: mod_base = OTHER; note = 2'-O-methyl modified nucleotide
  modified_base 62: mod_base = OTHER; note = 2'-O-methyl modified nucleotide
  modified_base 63: mod_base = OTHER; note = 2'-O-methyl modified nucleotide
  modified_base 64: mod_base = OTHER; note = 2'-O-methyl modified nucleotide
  modified_base 65: mod_base = OTHER; note = 2'-O-methyl modified nucleotide
  modified_base 66: mod_base = OTHER; note = 2'-O-methyl modified nucleotide
  modified_base 67: mod_base = OTHER; note = 2'-O-methyl modified nucleotide
  modified_base 68: mod_base = OTHER; note = 2'-O-methyl modified nucleotide
  modified_base 69: mod_base = OTHER; note = 2'-O-methyl modified nucleotide
  modified_base 70: mod_base = OTHER; note = 2'-O-methyl modified nucleotide
  modified_base 75: mod_base = OTHER; note = 2'-O-methyl modified nucleotide
  modified_base 77: mod_base = OTHER; note = 2'-O-methyl modified nucleotide
  modified_base 80: mod_base = OTHER; note = 2'-O-methyl modified nucleotide
  modified_base 86: mod_base = OTHER; note = 2'-O-methyl modified nucleotide
  modified_base 87: mod_base = OTHER; note = 2'-O-methyl modified nucleotide
  modified_base 89: mod_base = OTHER; note = 2'-O-methyl modified nucleotide
  modified_base 90: mod_base = OTHER; note = 2'-O-methyl modified nucleotide
  modified_base 91: mod_base = OTHER; note = 2'-O-methyl modified nucleotide
  modified_base 92: mod_base = OTHER; note = 2'-O-methyl modified nucleotide
  modified_base 99: mod_base = OTHER; note = nucleotide with phosphorothioate linkage
  modified_base 100: mod_base = OTHER; note = 2'-O-methyl modified nucleotide with phosphorothioate linkage
  modified_base 101: mod_base = OTHER; note = 2'-O-methyl modified nucleotide

SEQ ID NO: 2328 - RNA, 101 nt, synthetic construct; identical to SEQ ID NO: 1328
  source 1..101: mol_type = other RNA
  modified_base 1: mod_base = OTHER; note = 2'-O-methyl modified nucleotide with phosphorothioate linkage
  modified_base 2: mod_base = OTHER; note = 2'-O-methyl modified nucleotide with phosphorothioate linkage
  modified_base 3: mod_base = OTHER; note = 2'-O-methyl modified nucleotide with phosphorothioate linkage
  modified_base 4: mod_base = OTHER; note = 2'-O-methyl modified nucleotide
  modified_base 5: mod_base = OTHER; note = 2'-O-methyl modified nucleotide
  modified_base 8: mod_base = OTHER; note = 2'-O-methyl modified nucleotide
  modified_base 9: mod_base = OTHER; note = 2'-O-methyl modified nucleotide
  modified_base 11: mod_base = OTHER; note = 2'-O-methyl modified nucleotide
  modified_base 13: mod_base = OTHER; note = 2'-O-methyl modified nucleotide
  modified_base 18: mod_base = OTHER; note = 2'-O-methyl modified nucleotide
  modified_base 22: mod_base = OTHER; note = 2'-O-methyl modified nucleotide
  modified_base 25: mod_base = OTHER; note = 2'-O-methyl modified nucleotide
  modified_base 29: mod_base = OTHER; note = 2'-O-methyl modified nucleotide
  modified_base 30: mod_base = OTHER; note = 2'-O-methyl modified nucleotide
  modified_base 31: mod_base = OTHER; note = 2'-O-methyl modified nucleotide
  modified_base 32: mod_base = OTHER; note = 2'-O-methyl modified nucleotide
  modified_base 37: mod_base = OTHER; note = 2'-O-methyl modified nucleotide
  modified_base 38: mod_base = OTHER; note = 2'-O-methyl modified nucleotide
  modified_base 39: mod_base = OTHER; note = 2'-O-methyl modified nucleotide
  modified_base 40: mod_base = OTHER; note = 2'-O-methyl modified nucleotide
  modified_base 41: mod_base = OTHER; note = 2'-O-methyl modified nucleotide
  modified_base 42: mod_base = OTHER; note = 2'-O-methyl modified nucleotide
  modified_base 43: mod_base = OTHER; note = 2'-O-methyl modified nucleotide
  modified_base 47: mod_base = OTHER; note = 2'-O-methyl modified nucleotide
  modified_base 48: mod_base = OTHER; note = 2'-O-methyl modified nucleotide
  modified_base 51: mod_base = OTHER; note = 2'-O-methyl modified nucleotide
  modified_base 54: mod_base = OTHER; note = nucleotide with phosphorothioate linkage
  modified_base 58: mod_base = OTHER; note = 2'-O-methyl modified nucleotide
  modified_base 59: mod_base = OTHER; note = 2'-O-methyl modified nucleotide
  modified_base 61: mod_base = OTHER; note = 2'-O-methyl modified nucleotide
  modified_base 62: mod_base = OTHER; note = 2'-O-methyl modified nucleotide
  modified_base 63: mod_base = OTHER; note = 2'-O-methyl modified nucleotide
  modified_base 64: mod_base = OTHER; note = 2'-O-methyl modified nucleotide
  modified_base 65: mod_base = OTHER; note = 2'-O-methyl modified nucleotide
  modified_base 66: mod_base = OTHER; note = 2'-O-methyl modified nucleotide
  modified_base 67: mod_base = OTHER; note = 2'-O-methyl modified nucleotide
  modified_base 68: mod_base = OTHER; note = 2'-O-methyl modified nucleotide
  modified_base 69: mod_base = OTHER; note = 2'-O-methyl modified nucleotide
  modified_base 70: mod_base = OTHER; note = 2'-O-methyl modified nucleotide
  modified_base 75: mod_base = OTHER; note = 2'-O-methyl modified nucleotide
  modified_base 77: mod_base = OTHER; note = 2'-O-methyl modified nucleotide
  modified_base 80: mod_base = OTHER; note = 2'-O-methyl modified nucleotide
  modified_base 86: mod_base = OTHER; note = 2'-O-methyl modified nucleotide
  modified_base 87: mod_base = OTHER; note = 2'-O-methyl modified nucleotide
  modified_base 89: mod_base = OTHER; note = 2'-O-methyl modified nucleotide
  modified_base 90: mod_base = OTHER; note = 2'-O-methyl modified nucleotide
  modified_base 91: mod_base = OTHER; note = 2'-O-methyl modified nucleotide
  modified_base 92: mod_base = OTHER; note = 2'-O-methyl modified nucleotide
  modified_base 99: mod_base = OTHER; note = nucleotide with phosphorothioate linkage
  modified_base 100: mod_base = OTHER; note = 2'-O-methyl modified nucleotide with phosphorothioate linkage
  modified_base 101: mod_base = OTHER; note = 2'-O-methyl modified nucleotide

SEQ ID NO: 2329 - RNA, 101 nt, synthetic construct; identical to SEQ ID NO: 1329
  source 1..101: mol_type = other RNA
  modified_base 1: mod_base = OTHER; note = 2'-O-methyl modified nucleotide with phosphorothioate linkage
  modified_base 2: mod_base = OTHER; note = 2'-O-methyl modified nucleotide with phosphorothioate linkage
  modified_base 3: mod_base = OTHER; note = 2'-O-methyl modified nucleotide with phosphorothioate linkage
  modified_base 4: mod_base = OTHER; note = 2'-O-methyl modified nucleotide
  modified_base 5: mod_base = OTHER; note = 2'-O-methyl modified nucleotide
  modified_base 8: mod_base = OTHER; note = 2'-O-methyl modified nucleotide
  modified_base 9: mod_base = OTHER; note = 2'-O-methyl modified nucleotide
  modified_base 11: mod_base = OTHER; note = 2'-O-methyl modified nucleotide
  modified_base 13: mod_base = OTHER; note = 2'-O-methyl modified nucleotide
  modified_base 18: mod_base = OTHER; note = 2'-O-methyl modified nucleotide
  modified_base 22: mod_base = OTHER; note = 2'-O-methyl modified nucleotide
  modified_base 25: mod_base = OTHER; note = 2'-O-methyl modified nucleotide
  modified_base 29: mod_base = OTHER; note = 2'-O-methyl modified nucleotide
  modified_base 30: mod_base = OTHER; note = 2'-O-methyl modified nucleotide
  modified_base 31: mod_base = OTHER; note = 2'-O-methyl modified nucleotide
  modified_base 32: mod_base = OTHER; note = 2'-O-methyl modified nucleotide
  modified_base 37: mod_base = OTHER; note = 2'-O-methyl modified nucleotide
  modified_base 38: mod_base = OTHER; note = 2'-O-methyl modified nucleotide
  modified_base 39: mod_base = OTHER; note = 2'-O-methyl modified nucleotide
  modified_base 40: mod_base = OTHER; note = 2'-O-methyl modified nucleotide
  modified_base 41: mod_base = OTHER; note = 2'-O-methyl modified nucleotide
  modified_base 42: mod_base = OTHER; note = 2'-O-methyl modified nucleotide
  modified_base 43: mod_base = OTHER; note = 2'-O-methyl modified nucleotide
  modified_base 47: mod_base = OTHER; note = 2'-O-methyl modified nucleotide
  modified_base 48: mod_base = OTHER; note = 2'-O-methyl modified nucleotide
  modified_base 51: mod_base = OTHER; note = 2'-O-methyl modified nucleotide
  modified_base 54: mod_base = OTHER; note = nucleotide with phosphorothioate linkage
  modified_base 58: mod_base = OTHER; note = 2'-O-methyl modified nucleotide
  modified_base 59: mod_base = OTHER; note = 2'-O-methyl modified nucleotide
  modified_base 61: mod_base = OTHER; note = 2'-O-methyl modified nucleotide
  modified_base 62: mod_base = OTHER; note = 2'-O-methyl modified nucleotide
  modified_base 63: mod_base = OTHER; note = 2'-O-methyl modified nucleotide
  modified_base 64: mod_base = OTHER; note = 2'-O-methyl modified nucleotide
  modified_base 65: mod_base = OTHER; note = 2'-O-methyl modified nucleotide
  modified_base 66: mod_base = OTHER; note = 2'-O-methyl modified nucleotide
  modified_base 67: mod_base = OTHER; note = 2'-O-methyl modified nucleotide
  modified_base 68: mod_base = OTHER; note = 2'-O-methyl modified nucleotide
  modified_base 69: mod_base = OTHER; note = 2'-O-methyl modified nucleotide
  modified_base 70: mod_base = OTHER; note = 2'-O-methyl modified nucleotide
  modified_base 75: mod_base = OTHER; note = 2'-O-methyl modified nucleotide
  modified_base 77: mod_base = OTHER; note = 2'-O-methyl modified nucleotide
  modified_base 80: mod_base = OTHER; note = 2'-O-methyl modified nucleotide
  modified_base 86: mod_base = OTHER; note = 2'-O-methyl modified nucleotide
  modified_base 87: mod_base = OTHER; note = 2'-O-methyl modified nucleotide
  modified_base 89: mod_base = OTHER; note = 2'-O-methyl modified nucleotide
  modified_base 90: mod_base = OTHER; note = 2'-O-methyl modified nucleotide
  modified_base 91: mod_base = OTHER; note = 2'-O-methyl modified nucleotide
  modified_base 92: mod_base = OTHER; note = 2'-O-methyl modified nucleotide
  modified_base 99: mod_base = OTHER; note = nucleotide with phosphorothioate linkage
  modified_base 100: mod_base = OTHER; note = 2'-O-methyl modified nucleotide with phosphorothioate linkage
  modified_base 101: mod_base = OTHER; note = 2'-O-methyl modified nucleotide

SEQ ID NO: 2330 - RNA, 101 nt, synthetic construct; identical to SEQ ID NO: 1330
  source 1..101: mol_type = other RNA
  modified_base 1: mod_base = OTHER; note = 2'-O-methyl modified nucleotide with phosphorothioate linkage
  modified_base 2: mod_base = OTHER; note = 2'-O-methyl modified nucleotide with phosphorothioate linkage
  modified_base 3: mod_base = OTHER; note = 2'-O-methyl modified nucleotide with phosphorothioate linkage
  modified_base 4: mod_base = OTHER; note = 2'-O-methyl modified nucleotide
  modified_base 5: mod_base = OTHER; note = 2'-O-methyl modified nucleotide
  modified_base 8: mod_base = OTHER; note = 2'-O-methyl modified nucleotide
  modified_base 9: mod_base = OTHER; note = 2'-O-methyl modified nucleotide
  modified_base 11: mod_base = OTHER; note = 2'-O-methyl modified nucleotide
  modified_base 13: mod_base = OTHER; note = 2'-O-methyl modified nucleotide
  modified_base 18: mod_base = OTHER; note = 2'-O-methyl modified nucleotide
  modified_base 22: mod_base = OTHER; note = 2'-O-methyl modified nucleotide
  modified_base 25: mod_base = OTHER; note = 2'-O-methyl modified nucleotide
  modified_base 29: mod_base = OTHER; note = 2'-O-methyl modified nucleotide
  modified_base 30: mod_base = OTHER; note = 2'-O-methyl modified nucleotide
  modified_base 31: mod_base = OTHER; note = 2'-O-methyl modified nucleotide
  modified_base 32: mod_base = OTHER; note = 2'-O-methyl modified nucleotide
  modified_base 37: mod_base = OTHER; note = 2'-O-methyl modified nucleotide
  modified_base 38: mod_base = OTHER; note = 2'-O-methyl modified nucleotide
  modified_base 39: mod_base = OTHER; note = 2'-O-methyl modified nucleotide
  modified_base 40: mod_base = OTHER; note = 2'-O-methyl modified nucleotide
  modified_base 41: mod_base = OTHER; note = 2'-O-methyl modified nucleotide
  modified_base 42: mod_base = OTHER; note = 2'-O-methyl modified nucleotide
  modified_base 43: mod_base = OTHER; note = 2'-O-methyl modified nucleotide
  modified_base 47: mod_base = OTHER; note = 2'-O-methyl modified nucleotide
  modified_base 48: mod_base = OTHER; note = 2'-O-methyl modified nucleotide
  modified_base 51: mod_base = OTHER; note = 2'-O-methyl modified nucleotide
  modified_base 54: mod_base = OTHER; note = nucleotide with phosphorothioate linkage
  modified_base 58: mod_base = OTHER; note = 2'-O-methyl modified nucleotide
  modified_base 59: mod_base = OTHER; note = 2'-O-methyl modified nucleotide
  modified_base 61: mod_base = OTHER; note = 2'-O-methyl modified nucleotide
  modified_base 62: mod_base = OTHER; note = 2'-O-methyl modified nucleotide
  modified_base 63: mod_base = OTHER; note = 2'-O-methyl modified nucleotide
  modified_base 64: mod_base = OTHER; note = 2'-O-methyl modified nucleotide
  modified_base 65: mod_base = OTHER; note = 2'-O-methyl modified nucleotide
  modified_base 66: mod_base = OTHER; note = 2'-O-methyl modified nucleotide
  modified_base 67: mod_base = OTHER; note = 2'-O-methyl modified nucleotide
  modified_base 68: mod_base = OTHER; note = 2'-O-methyl modified nucleotide
  modified_base 69: mod_base = OTHER; note = 2'-O-methyl modified nucleotide
  modified_base 70: mod_base = OTHER; note = 2'-O-methyl modified nucleotide
  modified_base 75: mod_base = OTHER; note = 2'-O-methyl modified nucleotide
  modified_base 77: mod_base = OTHER; note = 2'-O-methyl modified nucleotide
  modified_base 80: mod_base = OTHER; note = 2'-O-methyl modified nucleotide
  modified_base 86: mod_base = OTHER; note = 2'-O-methyl modified nucleotide
  modified_base 87: mod_base = OTHER; note = 2'-O-methyl modified nucleotide
  modified_base 89: mod_base = OTHER; note = 2'-O-methyl modified nucleotide
  modified_base 90: mod_base = OTHER; note = 2'-O-methyl modified nucleotide
  modified_base 91: mod_base = OTHER; note = 2'-O-methyl modified nucleotide
  modified_base 92: mod_base = OTHER; note = 2'-O-methyl modified nucleotide
  modified_base 99: mod_base = OTHER; note = nucleotide with phosphorothioate linkage
  modified_base 100: mod_base = OTHER; note = 2'-O-methyl modified nucleotide with phosphorothioate linkage
  modified_base 101: mod_base = OTHER; note = 2'-O-methyl modified nucleotide

SEQ ID NO: 2331 - RNA, 101 nt, synthetic construct; identical to SEQ ID NO: 1331
  source 1..101: mol_type = other RNA
  modified_base 1: mod_base = OTHER; note = 2'-O-methyl modified nucleotide with phosphorothioate linkage
  modified_base 2: mod_base = OTHER; note = 2'-O-methyl modified nucleotide with phosphorothioate linkage
  modified_base 3: mod_base = OTHER; note = 2'-O-methyl modified nucleotide with phosphorothioate linkage
  modified_base 4: mod_base = OTHER; note = 2'-O-methyl modified nucleotide
  modified_base 5: mod_base = OTHER; note = 2'-O-methyl modified nucleotide
  modified_base 8: mod_base = OTHER; note = 2'-O-methyl modified nucleotide
  modified_base 9: mod_base = OTHER; note = 2'-O-methyl modified nucleotide
  modified_base 11: mod_base = OTHER; note = 2'-O-methyl modified nucleotide
  modified_base 13: mod_base = OTHER; note = 2'-O-methyl modified nucleotide
  modified_base 18: mod_base = OTHER; note = 2'-O-methyl modified nucleotide
  modified_base 22: mod_base = OTHER; note = 2'-O-methyl modified nucleotide
  modified_base 25: mod_base = OTHER; note = 2'-O-methyl modified nucleotide
  modified_base 29: mod_base = OTHER; note = 2'-O-methyl modified nucleotide
  modified_base 30: mod_base = OTHER; note = 2'-O-methyl modified nucleotide
  modified_base 31: mod_base = OTHER; note = 2'-O-methyl modified nucleotide
  modified_base 32: mod_base = OTHER; note = 2'-O-methyl modified nucleotide
  modified_base 37: mod_base = OTHER; note = 2'-O-methyl modified nucleotide
  modified_base 38: mod_base = OTHER; note = 2'-O-methyl modified nucleotide
  modified_base 39: mod_base = OTHER; note = 2'-O-methyl modified nucleotide
  modified_base 40: mod_base = OTHER; note = 2'-O-methyl modified nucleotide
  modified_base 41: mod_base = OTHER; note = 2'-O-methyl modified nucleotide
  modified_base 42: mod_base = OTHER; note = 2'-O-methyl modified nucleotide
  modified_base 43: mod_base = OTHER; note = 2'-O-methyl modified nucleotide
  modified_base 47: mod_base = OTHER; note = 2'-O-methyl modified nucleotide
  modified_base 48: mod_base = OTHER; note = 2'-O-methyl modified nucleotide
  modified_base 51: mod_base = OTHER; note = 2'-O-methyl modified nucleotide
  modified_base 54: mod_base = OTHER; note = nucleotide with phosphorothioate linkage
  modified_base 58: mod_base = OTHER; note = 2'-O-methyl modified nucleotide
  modified_base 59: mod_base = OTHER; note = 2'-O-methyl modified nucleotide
  modified_base 61: mod_base = OTHER; note = 2'-O-methyl modified nucleotide
  modified_base 62: mod_base = OTHER; note = 2'-O-methyl modified nucleotide
  modified_base 63: mod_base = OTHER; note = 2'-O-methyl modified nucleotide
  modified_base 64: mod_base = OTHER; note = 2'-O-methyl modified nucleotide
  modified_base 65: mod_base = OTHER; note = 2'-O-methyl modified nucleotide
  modified_base 66: mod_base = OTHER; note = 2'-O-methyl modified nucleotide
  modified_base 67: mod_base = OTHER; note = 2'-O-methyl modified nucleotide
  modified_base 68: mod_base = OTHER; note = 2'-O-methyl modified nucleotide
  modified_base 69: mod_base = OTHER; note = 2'-O-methyl modified nucleotide
  modified_base 70: mod_base = OTHER; note = 2'-O-methyl modified nucleotide
  modified_base 75: mod_base = OTHER; note = 2'-O-methyl modified nucleotide
  modified_base 77: mod_base = OTHER; note = 2'-O-methyl modified nucleotide
  modified_base 80: mod_base = OTHER; note = 2'-O-methyl modified nucleotide
  modified_base 86: mod_base = OTHER; note = 2'-O-methyl modified nucleotide
  modified_base 87: mod_base = OTHER; note = 2'-O-methyl modified nucleotide
  modified_base 89: mod_base = OTHER; note = 2'-O-methyl modified nucleotide
  modified_base 90: mod_base = OTHER; note = 2'-O-methyl modified nucleotide
  modified_base 91: mod_base = OTHER; note = 2'-O-methyl modified nucleotide
  modified_base 92: mod_base = OTHER; note = 2'-O-methyl modified nucleotide
  modified_base 99: mod_base = OTHER; note = nucleotide with phosphorothioate linkage
  modified_base 100: mod_base = OTHER; note = 2'-O-methyl modified nucleotide with phosphorothioate linkage
  modified_base 101: mod_base = OTHER; note = 2'-O-methyl modified nucleotide

SEQ ID NO: 2332 - RNA, 101 nt, synthetic construct; identical to SEQ ID NO: 1332
  source 1..101: mol_type = other RNA
  modified_base 1: mod_base = OTHER; note = 2'-O-methyl modified nucleotide with phosphorothioate linkage
  modified_base 2: mod_base = OTHER; note = 2'-O-methyl modified nucleotide with phosphorothioate linkage
  modified_base 3: mod_base = OTHER; note = 2'-O-methyl modified nucleotide with phosphorothioate linkage
  modified_base 4: mod_base = OTHER; note = 2'-O-methyl modified nucleotide
  modified_base 5: mod_base = OTHER; note = 2'-O-methyl modified nucleotide
  modified_base 8: mod_base = OTHER; note = 2'-O-methyl modified nucleotide
  modified_base 9: mod_base = OTHER; note = 2'-O-methyl modified nucleotide
  modified_base 11: mod_base = OTHER; note = 2'-O-methyl modified nucleotide
  modified_base 13: mod_base = OTHER; note = 2'-O-methyl modified nucleotide
  modified_base 18: mod_base = OTHER; note = 2'-O-methyl modified nucleotide
  modified_base 22: mod_base = OTHER; note = 2'-O-methyl modified nucleotide
  modified_base 25: mod_base = OTHER; note = 2'-O-methyl modified nucleotide
  modified_base 29: mod_base = OTHER; note = 2'-O-methyl modified nucleotide
  modified_base 30: mod_base = OTHER; note = 2'-O-methyl modified nucleotide
  modified_base 31: mod_base = OTHER; note = 2'-O-methyl modified nucleotide
  modified_base 32: mod_base = OTHER; note = 2'-O-methyl modified nucleotide
  modified_base 37: mod_base = OTHER; note = 2'-O-methyl modified nucleotide
  modified_base 38: mod_base = OTHER; note = 2'-O-methyl modified nucleotide
  modified_base 39: mod_base = OTHER; note = 2'-O-methyl modified nucleotide
  modified_base 40: mod_base = OTHER; note = 2'-O-methyl modified nucleotide
  modified_base 41: mod_base = OTHER; note = 2'-O-methyl modified nucleotide
  modified_base 42: mod_base = OTHER; note = 2'-O-methyl modified nucleotide
  modified_base 43: mod_base = OTHER; note = 2'-O-methyl modified nucleotide
  modified_base 47: mod_base = OTHER; note = 2'-O-methyl modified nucleotide
  modified_base 48: mod_base = OTHER; note = 2'-O-methyl modified nucleotide
  modified_base 51: mod_base = OTHER; note = 2'-O-methyl modified nucleotide
  modified_base 54: mod_base = OTHER; note = nucleotide with phosphorothioate linkage
  modified_base 58: mod_base = OTHER; note = 2'-O-methyl modified nucleotide
  modified_base 59: mod_base = OTHER; note = 2'-O-methyl modified nucleotide
  modified_base 61: mod_base = OTHER; note = 2'-O-methyl modified nucleotide
  modified_base 62: mod_base = OTHER; note = 2'-O-methyl modified nucleotide
  modified_base 63: mod_base = OTHER; note = 2'-O-methyl modified nucleotide
  modified_base 64: mod_base = OTHER; note = 2'-O-methyl modified nucleotide
  modified_base 65: mod_base = OTHER; note = 2'-O-methyl modified nucleotide
  modified_base 66: mod_base = OTHER; note = 2'-O-methyl modified nucleotide
  modified_base 67: mod_base = OTHER; note = 2'-O-methyl modified nucleotide
  modified_base 68: mod_base = OTHER; note = 2'-O-methyl modified nucleotide
  modified_base 69: mod_base = OTHER; note = 2'-O-methyl modified nucleotide
  modified_base 70: mod_base = OTHER; note = 2'-O-methyl modified nucleotide
  modified_base 75: mod_base = OTHER; note = 2'-O-methyl modified nucleotide
  modified_base 77: mod_base = OTHER; note = 2'-O-methyl modified nucleotide
  modified_base 80: mod_base = OTHER; note = 2'-O-methyl modified nucleotide
  modified_base 86: mod_base = OTHER; note = 2'-O-methyl modified nucleotide
  modified_base 87: mod_base = OTHER; note = 2'-O-methyl modified nucleotide
  modified_base 89: mod_base = OTHER; note = 2'-O-methyl modified nucleotide
  modified_base 90: mod_base = OTHER; note = 2'-O-methyl modified nucleotide
  modified_base 91: mod_base = OTHER; note = 2'-O-methyl modified nucleotide
  modified_base 92: mod_base = OTHER; note = 2'-O-methyl modified nucleotide
  modified_base 99: mod_base = OTHER; note = nucleotide with phosphorothioate linkage
  modified_base 100: mod_base = OTHER; note = 2'-O-methyl modified nucleotide with phosphorothioate linkage
  modified_base 101: mod_base = OTHER; note = 2'-O-methyl modified nucleotide

SEQ ID NO: 2333 - RNA, 101 nt, synthetic construct; identical to SEQ ID NO: 1333
  source 1..101: mol_type = other RNA
  modified_base 1: mod_base = OTHER; note = 2'-O-methyl modified nucleotide with phosphorothioate linkage
  modified_base 2: mod_base = OTHER; note = 2'-O-methyl modified nucleotide with phosphorothioate linkage
  modified_base 3: mod_base = OTHER; note = 2'-O-methyl modified nucleotide with phosphorothioate linkage
  modified_base 4: mod_base = OTHER; note = 2'-O-methyl modified nucleotide
  modified_base 5: mod_base = OTHER; note = 2'-O-methyl modified nucleotide
  modified_base 8: mod_base = OTHER; note = 2'-O-methyl modified nucleotide
  modified_base 9: mod_base = OTHER; note = 2'-O-methyl modified nucleotide
  modified_base 11: mod_base = OTHER; note = 2'-O-methyl modified nucleotide
  modified_base 13: mod_base = OTHER; note = 2'-O-methyl modified nucleotide
  modified_base 18: mod_base = OTHER; note = 2'-O-methyl modified nucleotide
  modified_base 22: mod_base = OTHER; note = 2'-O-methyl modified nucleotide
  modified_base 25: mod_base = OTHER; note = 2'-O-methyl modified nucleotide
  modified_base 29: mod_base = OTHER; note = 2'-O-methyl modified nucleotide
  modified_base 30: mod_base = OTHER; note = 2'-O-methyl modified nucleotide
  modified_base 31: mod_base = OTHER; note = 2'-O-methyl modified nucleotide
  modified_base 32: mod_base = OTHER; note = 2'-O-methyl modified nucleotide
  modified_base 37: mod_base = OTHER; note = 2'-O-methyl modified nucleotide
  modified_base 38: mod_base = OTHER; note = 2'-O-methyl modified nucleotide
  modified_base 39: mod_base = OTHER; note = 2'-O-methyl modified nucleotide
  modified_base 40: mod_base = OTHER; note = 2'-O-methyl modified nucleotide
  modified_base 41: mod_base = OTHER; note = 2'-O-methyl modified nucleotide
  modified_base 42: mod_base = OTHER; note = 2'-O-methyl modified nucleotide
  modified_base 43: mod_base = OTHER; note = 2'-O-methyl modified nucleotide
  modified_base 47: mod_base = OTHER; note = 2'-O-methyl modified nucleotide
  modified_base 48: mod_base = OTHER; note = 2'-O-methyl modified nucleotide
  modified_base 51: mod_base = OTHER; note = 2'-O-methyl modified nucleotide
  modified_base 54: mod_base = OTHER; note = nucleotide with phosphorothioate linkage
  modified_base 58: mod_base = OTHER; note = 2'-O-methyl modified nucleotide
  modified_base 59: mod_base = OTHER; note = 2'-O-methyl modified nucleotide
  modified_base 61: mod_base = OTHER; note = 2'-O-methyl modified nucleotide
  modified_base 62: mod_base = OTHER; note = 2'-O-methyl modified nucleotide
  modified_base 63: mod_base = OTHER; note = 2'-O-methyl modified nucleotide
  modified_base 64: mod_base = OTHER; note = 2'-O-methyl modified nucleotide
  modified_base 65: mod_base = OTHER; note = 2'-O-methyl modified nucleotide
  modified_base 66: mod_base = OTHER; note = 2'-O-methyl modified nucleotide
  modified_base 67: mod_base = OTHER; note = 2'-O-methyl modified nucleotide
  modified_base 68: mod_base = OTHER; note = 2'-O-methyl modified nucleotide
  modified_base 69: mod_base = OTHER; note = 2'-O-methyl modified nucleotide
  modified_base 70: mod_base = OTHER; note = 2'-O-methyl modified nucleotide
  modified_base 75: mod_base = OTHER; note = 2'-O-methyl modified nucleotide
  modified_base 77: mod_base = OTHER; note = 2'-O-methyl modified nucleotide
  modified_base 80: mod_base = OTHER; note = 2'-O-methyl modified nucleotide
  modified_base 86: mod_base = OTHER; note = 2'-O-methyl modified nucleotide
  modified_base 87: mod_base = OTHER; note = 2'-O-methyl modified nucleotide
  modified_base 89: mod_base = OTHER; note = 2'-O-methyl modified nucleotide
  modified_base 90: mod_base = OTHER; note = 2'-O-methyl modified nucleotide
  modified_base 91: mod_base = OTHER; note = 2'-O-methyl modified nucleotide
  modified_base 92: mod_base = OTHER; note = 2'-O-methyl modified nucleotide
  modified_base 99: mod_base = OTHER; note = nucleotide with phosphorothioate linkage
  modified_base 100: mod_base = OTHER; note = 2'-O-methyl modified nucleotide with phosphorothioate linkage
  modified_base 101: mod_base = OTHER; note = 2'-O-methyl modified nucleotide

SEQ ID NO: 2334 - RNA, 101 nt, synthetic construct; identical to SEQ ID NO: 1334
  source 1..101: mol_type = other RNA
  modified_base 1: mod_base = OTHER; note = 2'-O-methyl modified nucleotide with phosphorothioate linkage
  modified_base 2: mod_base = OTHER; note = 2'-O-methyl modified nucleotide with phosphorothioate linkage
  modified_base 3: mod_base = OTHER; note = 2'-O-methyl modified nucleotide with phosphorothioate linkage
  modified_base 4: mod_base = OTHER; note = 2'-O-methyl modified nucleotide
  modified_base 5: mod_base = OTHER; note = 2'-O-methyl modified nucleotide
  modified_base 8: mod_base = OTHER; note = 2'-O-methyl modified nucleotide
  modified_base 9: mod_base = OTHER; note = 2'-O-methyl modified nucleotide
  modified_base 11: mod_base = OTHER; note = 2'-O-methyl modified nucleotide
  modified_base 13: mod_base = OTHER; note = 2'-O-methyl modified nucleotide
  modified_base 18: mod_base = OTHER; note = 2'-O-methyl modified nucleotide
  modified_base 22: mod_base = OTHER; note = 2'-O-methyl modified nucleotide
  modified_base 25: mod_base = OTHER; note = 2'-O-methyl modified nucleotide
  modified_base 29: mod_base = OTHER; note = 2'-O-methyl modified nucleotide
  modified_base 30: mod_base = OTHER; note = 2'-O-methyl modified nucleotide
  modified_base 31: mod_base = OTHER; note = 2'-O-methyl modified nucleotide
  modified_base 32: mod_base = OTHER; note = 2'-O-methyl modified nucleotide
  modified_base 37: mod_base = OTHER; note = 2'-O-methyl modified nucleotide
  modified_base 38: mod_base = OTHER; note = 2'-O-methyl modified nucleotide
  modified_base 39: mod_base = OTHER; note = 2'-O-methyl modified nucleotide
  modified_base 40: mod_base = OTHER; note = 2'-O-methyl modified nucleotide
  modified_base 41: mod_base = OTHER; note = 2'-O-methyl modified nucleotide
  modified_base 42: mod_base = OTHER; note = 2'-O-methyl modified nucleotide
  modified_base 43: mod_base = OTHER; note = 2'-O-methyl modified nucleotide
  modified_base 47: mod_base = OTHER; note = 2'-O-methyl modified nucleotide
  modified_base 48: mod_base = OTHER; note = 2'-O-methyl modified nucleotide
  modified_base 51: mod_base = OTHER; note = 2'-O-methyl modified nucleotide
  modified_base 54: mod_base = OTHER; note = nucleotide with phosphorothioate linkage
  modified_base 58: mod_base = OTHER; note = 2'-O-methyl modified nucleotide
  modified_base 59: mod_base = OTHER; note = 2'-O-methyl modified nucleotide
  modified_base 61: mod_base = OTHER; note = 2'-O-methyl modified nucleotide
  modified_base 62: mod_base = OTHER; note = 2'-O-methyl modified nucleotide
  modified_base 63: mod_base = OTHER; note = 2'-O-methyl modified nucleotide
  modified_base 64: mod_base = OTHER; note = 2'-O-methyl modified nucleotide
  modified_base 65: mod_base = OTHER; note = 2'-O-methyl modified nucleotide
  modified_base 66: mod_base = OTHER; note = 2'-O-methyl modified nucleotide
  modified_base 67: mod_base = OTHER; note = 2'-O-methyl modified nucleotide
  modified_base 68: mod_base = OTHER; note = 2'-O-methyl modified nucleotide
  modified_base 69: mod_base = OTHER; note = 2'-O-methyl modified nucleotide
  modified_base 70: mod_base = OTHER; note = 2'-O-methyl modified nucleotide
  modified_base 75: mod_base = OTHER; note = 2'-O-methyl modified nucleotide
  modified_base 77: mod_base = OTHER; note = 2'-O-methyl modified nucleotide
  modified_base 80: mod_base = OTHER; note = 2'-O-methyl modified nucleotide
  modified_base 86: mod_base = OTHER; note = 2'-O-methyl modified nucleotide
  modified_base 87: mod_base = OTHER; note = 2'-O-methyl modified nucleotide
  modified_base 89: mod_base = OTHER; note = 2'-O-methyl modified nucleotide
  modified_base 90: mod_base = OTHER; note = 2'-O-methyl modified nucleotide
  modified_base 91: mod_base = OTHER; note = 2'-O-methyl modified nucleotide
  modified_base 92: mod_base = OTHER; note = 2'-O-methyl modified nucleotide
  modified_base 99: mod_base = OTHER; note = nucleotide with phosphorothioate linkage
  modified_base 100: mod_base = OTHER; note = 2'-O-methyl modified nucleotide with phosphorothioate linkage
  modified_base 101: mod_base = OTHER; note = 2'-O-methyl modified nucleotide

SEQ ID NO: 2335 - RNA, 101 nt, synthetic construct; identical to SEQ ID NO: 1335
  source 1..101: mol_type = other RNA
  modified_base 1: mod_base = OTHER; note = 2'-O-methyl modified nucleotide with phosphorothioate linkage
  modified_base 2: mod_base = OTHER; note = 2'-O-methyl modified nucleotide with phosphorothioate linkage
  modified_base 3: mod_base = OTHER; note = 2'-O-methyl modified nucleotide with phosphorothioate linkage
  modified_base 4: mod_base = OTHER; note = 2'-O-methyl modified nucleotide
  modified_base 5: mod_base = OTHER; note = 2'-O-methyl modified nucleotide
  modified_base 8: mod_base = OTHER; note = 2'-O-methyl modified nucleotide
  modified_base 9: mod_base = OTHER; note = 2'-O-methyl modified nucleotide
  modified_base 11: mod_base = OTHER; note = 2'-O-methyl modified nucleotide
  modified_base 13: mod_base = OTHER; note = 2'-O-methyl modified nucleotide
  modified_base 18: mod_base = OTHER; note = 2'-O-methyl modified nucleotide
  modified_base 22: mod_base = OTHER; note = 2'-O-methyl modified nucleotide
  modified_base 25: mod_base = OTHER; note = 2'-O-methyl modified nucleotide
  modified_base 29: mod_base = OTHER; note = 2'-O-methyl modified nucleotide
  modified_base 30: mod_base = OTHER; note = 2'-O-methyl modified nucleotide
  modified_base 31: mod_base = OTHER; note = 2'-O-methyl modified nucleotide
  modified_base 32: mod_base = OTHER; note = 2'-O-methyl modified nucleotide
  modified_base 37: mod_base = OTHER; note = 2'-O-methyl modified nucleotide
  modified_base 38: mod_base = OTHER; note = 2'-O-methyl modified nucleotide
  modified_base 39: mod_base = OTHER; note = 2'-O-methyl modified nucleotide
  modified_base 40: mod_base = OTHER; note = 2'-O-methyl modified nucleotide
  modified_base 41: mod_base = OTHER; note = 2'-O-methyl modified nucleotide
  modified_base 42: mod_base = OTHER; note = 2'-O-methyl modified nucleotide
  modified_base 43: mod_base = OTHER; note = 2'-O-methyl modified nucleotide
  modified_base 47: mod_base = OTHER; note = 2'-O-methyl modified nucleotide
  modified_base 48: mod_base = OTHER; note = 2'-O-methyl modified nucleotide
  modified_base 51: mod_base = OTHER; note = 2'-O-methyl modified nucleotide
  modified_base 54: mod_base = OTHER; note = nucleotide with phosphorothioate linkage
  modified_base 58: mod_base = OTHER; note = 2'-O-methyl modified nucleotide
  modified_base 59: mod_base = OTHER; note = 2'-O-methyl modified nucleotide
  modified_base 61: mod_base = OTHER; note = 2'-O-methyl modified nucleotide
  modified_base 62: mod_base = OTHER; note = 2'-O-methyl modified nucleotide
  modified_base 63: mod_base = OTHER; note = 2'-O-methyl modified nucleotide
  modified_base 64: mod_base = OTHER; note = 2'-O-methyl modified nucleotide
  modified_base 65: mod_base = OTHER; note = 2'-O-methyl modified nucleotide
  modified_base 66: mod_base = OTHER; note = 2'-O-methyl modified nucleotide
  modified_base 67: mod_base = OTHER; note = 2'-O-methyl modified nucleotide
  modified_base 68: mod_base = OTHER; note = 2'-O-methyl modified nucleotide
  modified_base 69: mod_base = OTHER; note = 2'-O-methyl modified nucleotide
  modified_base 70: mod_base = OTHER; note = 2'-O-methyl modified nucleotide
  modified_base 75: mod_base = OTHER; note = 2'-O-methyl modified nucleotide
  modified_base 77: mod_base = OTHER; note = 2'-O-methyl modified nucleotide
  modified_base 80: mod_base = OTHER; note = 2'-O-methyl modified nucleotide
  modified_base 86: mod_base = OTHER; note = 2'-O-methyl modified nucleotide
  modified_base 87: mod_base = OTHER; note = 2'-O-methyl modified nucleotide
  modified_base 89: mod_base = OTHER; note = 2'-O-methyl modified nucleotide
  modified_base 90: mod_base = OTHER; note = 2'-O-methyl modified nucleotide
  modified_base 91: mod_base = OTHER; note = 2'-O-methyl modified nucleotide
  modified_base 92: mod_base = OTHER; note = 2'-O-methyl modified nucleotide
  modified_base 99: mod_base = OTHER; note = nucleotide with phosphorothioate linkage
  modified_base 100: mod_base = OTHER; note = 2'-O-methyl modified nucleotide with phosphorothioate linkage
  modified_base 101: mod_base = OTHER; note = 2'-O-methyl modified nucleotide

SEQ ID NO: 2336 - RNA, 101 nt, synthetic construct; identical to SEQ ID NO: 1336
  source 1..101: mol_type = other RNA
  modified_base 1: mod_base = OTHER; note = 2'-O-methyl modified nucleotide with phosphorothioate linkage
  modified_base 2: mod_base = OTHER; note = 2'-O-methyl modified nucleotide with phosphorothioate linkage
  modified_base 3: mod_base = OTHER; note = 2'-O-methyl modified nucleotide with phosphorothioate linkage
  modified_base 4: mod_base = OTHER; note = 2'-O-methyl modified nucleotide
  modified_base 5: mod_base = OTHER; note = 2'-O-methyl modified nucleotide
  modified_base 8: mod_base = OTHER; note = 2'-O-methyl modified nucleotide
  modified_base 9: mod_base = OTHER; note = 2'-O-methyl modified nucleotide
  modified_base 11: mod_base = OTHER; note = 2'-O-methyl modified nucleotide
  modified_base 13: mod_base = OTHER; note = 2'-O-methyl modified nucleotide
  modified_base 18: mod_base = OTHER; note = 2'-O-methyl modified nucleotide
  modified_base 22: mod_base = OTHER; note = 2'-O-methyl modified nucleotide
  modified_base 25: mod_base = OTHER; note = 2'-O-methyl modified nucleotide
  modified_base 29: mod_base = OTHER; note = 2'-O-methyl modified nucleotide
  modified_base 30: mod_base = OTHER; note = 2'-O-methyl modified nucleotide
  modified_base 31: mod_base = OTHER; note = 2'-O-methyl modified nucleotide
  modified_base 32: mod_base = OTHER; note = 2'-O-methyl modified nucleotide
  modified_base 37: mod_base = OTHER; note = 2'-O-methyl modified nucleotide
  modified_base 38: mod_base = OTHER; note = 2'-O-methyl modified nucleotide
  modified_base 39: mod_base = OTHER; note = 2'-O-methyl modified nucleotide
  modified_base 40: mod_base = OTHER; note = 2'-O-methyl modified nucleotide
  modified_base 41: mod_base = OTHER; note = 2'-O-methyl modified nucleotide
  modified_base 42: mod_base = OTHER; note = 2'-O-methyl modified nucleotide
  modified_base 43: mod_base = OTHER; note = 2'-O-methyl modified nucleotide
  modified_base 47: mod_base = OTHER; note = 2'-O-methyl modified nucleotide
  modified_base 48: mod_base = OTHER; note = 2'-O-methyl modified nucleotide
  modified_base 51: mod_base = OTHER; note = 2'-O-methyl modified nucleotide
  modified_base 54: mod_base = OTHER; note = nucleotide with phosphorothioate linkage
  modified_base 58: mod_base = OTHER; note = 2'-O-methyl modified nucleotide
  modified_base 59: mod_base = OTHER; note = 2'-O-methyl modified nucleotide
  modified_base 61: mod_base = OTHER; note = 2'-O-methyl modified nucleotide
  modified_base 62: mod_base = OTHER; note = 2'-O-methyl modified nucleotide
  modified_base 63: mod_base = OTHER; note = 2'-O-methyl modified nucleotide
  modified_base 64: mod_base = OTHER; note = 2'-O-methyl modified nucleotide
  modified_base 65: mod_base = OTHER; note = 2'-O-methyl modified nucleotide
  modified_base 66: mod_base = OTHER; note = 2'-O-methyl modified nucleotide
  modified_base 67: mod_base = OTHER; note = 2'-O-methyl modified nucleotide
  modified_base 68: mod_base = OTHER; note = 2'-O-methyl modified nucleotide
  modified_base 69: mod_base = OTHER; note = 2'-O-methyl modified nucleotide
  modified_base 70: mod_base = OTHER; note = 2'-O-methyl modified nucleotide
  modified_base 75: mod_base = OTHER; note = 2'-O-methyl modified nucleotide
  modified_base 77: mod_base = OTHER; note = 2'-O-methyl modified nucleotide
  modified_base 80: mod_base = OTHER; note = 2'-O-methyl modified nucleotide
  modified_base 86: mod_base = OTHER; note = 2'-O-methyl modified nucleotide
  modified_base 87: mod_base = OTHER; note = 2'-O-methyl modified nucleotide
  modified_base 89: mod_base = OTHER; note = 2'-O-methyl modified nucleotide
  modified_base 90: mod_base = OTHER; note = 2'-O-methyl modified nucleotide
  modified_base 91: mod_base = OTHER; note = 2'-O-methyl modified nucleotide
  modified_base 92: mod_base = OTHER; note = 2'-O-methyl modified nucleotide
  modified_base 99: mod_base = OTHER; note = nucleotide with phosphorothioate linkage
  modified_base 100: mod_base = OTHER; note = 2'-O-methyl modified nucleotide with phosphorothioate linkage
  modified_base 101: mod_base = OTHER; note = 2'-O-methyl modified nucleotide

SEQ ID NO: 2337 - RNA, 101 nt, synthetic construct; identical to SEQ ID NO: 1337
  source 1..101: mol_type = other RNA
  modified_base 1: mod_base = OTHER; note = 2'-O-methyl modified nucleotide with phosphorothioate linkage
  modified_base 2: mod_base = OTHER; note = 2'-O-methyl modified nucleotide with phosphorothioate linkage
  modified_base 3: mod_base = OTHER; note = 2'-O-methyl modified nucleotide with phosphorothioate linkage
  modified_base 4: mod_base = OTHER; note = 2'-O-methyl modified nucleotide
  modified_base 5: mod_base = OTHER; note = 2'-O-methyl modified nucleotide
  modified_base 8: mod_base = OTHER; note = 2'-O-methyl modified nucleotide
  modified_base 9: mod_base = OTHER; note = 2'-O-methyl modified nucleotide
  modified_base 11: mod_base = OTHER; note = 2'-O-methyl modified nucleotide
  modified_base 13: mod_base = OTHER; note = 2'-O-methyl modified nucleotide
  modified_base 18: mod_base = OTHER; note = 2'-O-methyl modified nucleotide
  modified_base 22: mod_base = OTHER; note = 2'-O-methyl modified nucleotide
  modified_base 25: mod_base = OTHER; note = 2'-O-methyl modified nucleotide
  modified_base 29: mod_base = OTHER; note = 2'-O-methyl modified nucleotide
  modified_base 30: mod_base = OTHER; note = 2'-O-methyl modified nucleotide
  modified_base 31: mod_base = OTHER; note = 2'-O-methyl modified nucleotide
  modified_base 32: mod_base = OTHER; note = 2'-O-methyl modified nucleotide
  modified_base 37: mod_base = OTHER; note = 2'-O-methyl modified nucleotide
  modified_base 38: mod_base = OTHER; note = 2'-O-methyl modified nucleotide
  modified_base 39: mod_base = OTHER; note = 2'-O-methyl modified nucleotide
  modified_base 40: mod_base = OTHER; note = 2'-O-methyl modified nucleotide
  modified_base 41: mod_base = OTHER; note = 2'-O-methyl modified nucleotide
  modified_base 42: mod_base = OTHER; note = 2'-O-methyl modified nucleotide
  modified_base 43: mod_base = OTHER; note = 2'-O-methyl modified nucleotide
  modified_base 47: mod_base = OTHER; note = 2'-O-methyl modified nucleotide
  modified_base 48: mod_base = OTHER; note = 2'-O-methyl modified nucleotide
  modified_base 51: mod_base = OTHER; note = 2'-O-methyl modified nucleotide
  modified_base 54: mod_base = OTHER; note = nucleotide with phosphorothioate linkage
  modified_base 58: mod_base = OTHER; note = 2'-O-methyl modified nucleotide
  modified_base 59: mod_base = OTHER; note = 2'-O-methyl modified nucleotide
  modified_base 61: mod_base = OTHER; note = 2'-O-methyl modified nucleotide
  modified_base 62: mod_base = OTHER; note = 2'-O-methyl modified nucleotide
  modified_base 63: mod_base = OTHER; note = 2'-O-methyl modified nucleotide
  modified_base 64: mod_base = OTHER; note = 2'-O-methyl modified nucleotide
  modified_base 65: mod_base = OTHER; note = 2'-O-methyl modified nucleotide
  modified_base 66: mod_base = OTHER; note = 2'-O-methyl modified nucleotide
  modified_base 67: mod_base = OTHER; note = 2'-O-methyl modified nucleotide
  modified_base 68: mod_base = OTHER; note = 2'-O-methyl modified nucleotide
  modified_base 69: mod_base = OTHER; note = 2'-O-methyl modified nucleotide
  modified_base 70: mod_base = OTHER; note = 2'-O-methyl modified nucleotide
  modified_base 75: mod_base = OTHER; note = 2'-O-methyl modified nucleotide
  modified_base 77: mod_base = OTHER; note = 2'-O-methyl modified nucleotide
  modified_base 80: mod_base = OTHER; note = 2'-O-methyl modified nucleotide
  modified_base 86: mod_base = OTHER; note = 2'-O-methyl modified nucleotide
  modified_base 87: mod_base = OTHER; note = 2'-O-methyl modified nucleotide
  modified_base 89: mod_base = OTHER; note = 2'-O-methyl modified nucleotide
  modified_base 90: mod_base = OTHER; note = 2'-O-methyl modified nucleotide
  modified_base 91: mod_base = OTHER; note = 2'-O-methyl modified nucleotide
  modified_base 92: mod_base = OTHER; note = 2'-O-methyl modified nucleotide
  modified_base 99: mod_base = OTHER; note = nucleotide with phosphorothioate linkage
  modified_base 100: mod_base = OTHER; note = 2'-O-methyl modified nucleotide with phosphorothioate linkage
  modified_base 101: mod_base = OTHER; note = 2'-O-methyl modified nucleotide

SEQ ID NO: 2338 - RNA, 101 nt, synthetic construct; identical to SEQ ID NO: 1338
  source 1..101: mol_type = other RNA
  modified_base 1: mod_base = OTHER; note = 2'-O-methyl modified nucleotide with phosphorothioate linkage
  modified_base 2: mod_base = OTHER; note = 2'-O-methyl modified nucleotide with phosphorothioate linkage
  modified_base 3: mod_base = OTHER; note = 2'-O-methyl modified nucleotide with phosphorothioate linkage
  modified_base 4: mod_base = OTHER; note = 2'-O-methyl modified nucleotide
  modified_base 5: mod_base = OTHER; note = 2'-O-methyl modified nucleotide
  modified_base 8: mod_base = OTHER; note = 2'-O-methyl modified nucleotide
  modified_base 9: mod_base = OTHER; note = 2'-O-methyl modified nucleotide
  modified_base 11: mod_base = OTHER; note = 2'-O-methyl modified nucleotide
  modified_base 13: mod_base = OTHER; note = 2'-O-methyl modified nucleotide
  modified_base 18: mod_base = OTHER; note = 2'-O-methyl modified nucleotide
  modified_base 22: mod_base = OTHER; note = 2'-O-methyl modified nucleotide
  modified_base 25: mod_base = OTHER; note = 2'-O-methyl modified nucleotide
  modified_base 29: mod_base = OTHER; note = 2'-O-methyl modified nucleotide
  modified_base 30: mod_base = OTHER; note = 2'-O-methyl modified nucleotide
  modified_base 31: mod_base = OTHER; note = 2'-O-methyl modified nucleotide
  modified_base 32: mod_base = OTHER; note = 2'-O-methyl modified nucleotide
  modified_base 37: mod_base = OTHER; note = 2'-O-methyl modified nucleotide
  modified_base 38: mod_base = OTHER; note = 2'-O-methyl modified nucleotide
  modified_base 39: mod_base = OTHER; note = 2'-O-methyl modified nucleotide
  modified_base 40: mod_base = OTHER; note = 2'-O-methyl modified nucleotide
  modified_base 41: mod_base = OTHER; note = 2'-O-methyl modified nucleotide
  modified_base 42: mod_base = OTHER; note = 2'-O-methyl modified nucleotide
  modified_base 43: mod_base = OTHER; note = 2'-O-methyl modified nucleotide
  modified_base 47: mod_base = OTHER; note = 2'-O-methyl modified nucleotide
  modified_base 48: mod_base = OTHER; note = 2'-O-methyl modified nucleotide
  modified_base 51: mod_base = OTHER; note = 2'-O-methyl modified nucleotide
  modified_base 54: mod_base = OTHER; note = nucleotide with phosphorothioate linkage
  modified_base 58: mod_base = OTHER; note = 2'-O-methyl modified nucleotide
  modified_base 59: mod_base = OTHER; note = 2'-O-methyl modified nucleotide
  modified_base 61: mod_base = OTHER; note = 2'-O-methyl modified nucleotide
  modified_base 62: mod_base = OTHER; note = 2'-O-methyl modified nucleotide
  modified_base 63: mod_base = OTHER; note = 2'-O-methyl modified nucleotide
  modified_base 64: mod_base = OTHER; note = 2'-O-methyl modified nucleotide
  modified_base 65: mod_base = OTHER; note = 2'-O-methyl modified nucleotide
  modified_base 66: mod_base = OTHER; note = 2'-O-methyl modified nucleotide
  modified_base 67: mod_base = OTHER; note = 2'-O-methyl modified nucleotide
  modified_base 68: mod_base = OTHER; note = 2'-O-methyl modified nucleotide
  modified_base 69: mod_base = OTHER; note = 2'-O-methyl modified nucleotide
  modified_base 70: mod_base = OTHER; note = 2'-O-methyl modified nucleotide
  modified_base 75: mod_base = OTHER; note = 2'-O-methyl modified nucleotide
  modified_base 77: mod_base = OTHER; note = 2'-O-methyl modified nucleotide
  modified_base 80: mod_base = OTHER; note = 2'-O-methyl modified nucleotide
  modified_base 86: mod_base = OTHER; note = 2'-O-methyl modified nucleotide
  modified_base 87: mod_base = OTHER; note = 2'-O-methyl modified nucleotide
  modified_base 89: mod_base = OTHER; note = 2'-O-methyl modified nucleotide
  modified_base 90: mod_base = OTHER; note = 2'-O-methyl modified nucleotide
  modified_base 91: mod_base = OTHER; note = 2'-O-methyl modified nucleotide
  modified_base 92: mod_base = OTHER; note = 2'-O-methyl modified nucleotide
  modified_base 99: mod_base = OTHER; note = nucleotide with phosphorothioate linkage
  modified_base 100: mod_base = OTHER; note = 2'-O-methyl modified nucleotide with phosphorothioate linkage
  modified_base 101: mod_base = OTHER; note = 2'-O-methyl modified nucleotide

SEQ ID NO: 2339 - RNA, 101 nt, synthetic construct; identical to SEQ ID NO: 1339
  source 1..101: mol_type = other RNA
  modified_base 1: mod_base = OTHER; note = 2'-O-methyl modified nucleotide with phosphorothioate linkage
  modified_base 2: mod_base = OTHER; note = 2'-O-methyl modified nucleotide with phosphorothioate linkage
  modified_base 3: mod_base = OTHER; note = 2'-O-methyl modified nucleotide with phosphorothioate linkage
  modified_base 4: mod_base = OTHER; note = 2'-O-methyl modified nucleotide
  modified_base 5: mod_base = OTHER; note = 2'-O-methyl modified nucleotide
  modified_base 8: mod_base = OTHER; note = 2'-O-methyl modified nucleotide
  modified_base 9: mod_base = OTHER; note = 2'-O-methyl modified nucleotide
  modified_base 11: mod_base = OTHER; note = 2'-O-methyl modified nucleotide
  modified_base 13: mod_base = OTHER; note = 2'-O-methyl modified nucleotide
  modified_base 18: mod_base = OTHER; note = 2'-O-methyl modified nucleotide
  modified_base 22: mod_base = OTHER; note = 2'-O-methyl modified nucleotide
  modified_base 25: mod_base = OTHER; note = 2'-O-methyl modified nucleotide
  modified_base 29: mod_base = OTHER; note = 2'-O-methyl modified nucleotide
  modified_base 30: mod_base = OTHER; note = 2'-O-methyl modified nucleotide
  modified_base 31: mod_base = OTHER; note = 2'-O-methyl modified nucleotide
  modified_base 32: mod_base = OTHER; note = 2'-O-methyl modified nucleotide
  modified_base 37: mod_base = OTHER; note = 2'-O-methyl modified nucleotide
  modified_base 38: mod_base = OTHER; note = 2'-O-methyl modified nucleotide
  modified_base 39: mod_base = OTHER; note = 2'-O-methyl modified nucleotide
  modified_base 40: mod_base = OTHER; note = 2'-O-methyl modified nucleotide
  modified_base 41: mod_base = OTHER; note = 2'-O-methyl modified nucleotide
  modified_base 42: mod_base = OTHER; note = 2'-O-methyl modified nucleotide
  modified_base 43: mod_base = OTHER; note = 2'-O-methyl modified nucleotide
  modified_base 47: mod_base = OTHER; note = 2'-O-methyl modified nucleotide
  modified_base 48: mod_base = OTHER; note = 2'-O-methyl modified nucleotide
  modified_base 51: mod_base = OTHER; note = 2'-O-methyl modified nucleotide
  modified_base 54: mod_base = OTHER; note = nucleotide with phosphorothioate linkage
  modified_base 58: mod_base = OTHER; note = 2'-O-methyl modified nucleotide
  modified_base 59: mod_base = OTHER; note = 2'-O-methyl modified nucleotide
  modified_base 61: mod_base = OTHER; note = 2'-O-methyl modified nucleotide
  modified_base 62: mod_base = OTHER; note = 2'-O-methyl modified nucleotide
  modified_base 63: mod_base = OTHER; note = 2'-O-methyl modified nucleotide
  modified_base 64: mod_base = OTHER; note = 2'-O-methyl modified nucleotide
  modified_base 65: mod_base = OTHER; note = 2'-O-methyl modified nucleotide
  modified_base 66: mod_base = OTHER; note = 2'-O-methyl modified nucleotide
  modified_base 67: mod_base = OTHER; note = 2'-O-methyl modified nucleotide
  modified_base 68: mod_base = OTHER; note = 2'-O-methyl modified nucleotide
  modified_base 69: mod_base = OTHER; note = 2'-O-methyl modified nucleotide
  modified_base 70: mod_base = OTHER; note = 2'-O-methyl modified nucleotide
  modified_base 75: mod_base = OTHER; note = 2'-O-methyl modified nucleotide
  modified_base 77: mod_base = OTHER; note = 2'-O-methyl modified nucleotide
  modified_base 80: mod_base = OTHER; note = 2'-O-methyl modified nucleotide
  modified_base 86: mod_base = OTHER; note = 2'-O-methyl modified nucleotide
  modified_base 87: mod_base = OTHER; note = 2'-O-methyl modified nucleotide
  modified_base 89: mod_base = OTHER; note = 2'-O-methyl modified nucleotide
  modified_base 90: mod_base = OTHER; note = 2'-O-methyl modified nucleotide
  modified_base 91: mod_base = OTHER; note = 2'-O-methyl modified nucleotide
  modified_base 92: mod_base = OTHER; note = 2'-O-methyl modified nucleotide
  modified_base 99: mod_base = OTHER; note = nucleotide with phosphorothioate linkage
  modified_base 100: mod_base = OTHER; note = 2'-O-methyl modified nucleotide with phosphorothioate linkage
  modified_base 101: mod_base = OTHER; note = 2'-O-methyl modified nucleotide

SEQ ID NO: 2340 - RNA, 101 nt, synthetic construct; identical to SEQ ID NO: 1340
  source 1..101: mol_type = other RNA
  modified_base 1: mod_base = OTHER; note = 2'-O-methyl modified nucleotide with phosphorothioate linkage
  modified_base 2: mod_base = OTHER; note = 2'-O-methyl modified nucleotide with phosphorothioate linkage
  modified_base 3: mod_base = OTHER; note = 2'-O-methyl modified nucleotide with phosphorothioate linkage
  modified_base 4: mod_base = OTHER; note = 2'-O-methyl modified nucleotide
  modified_base 5: mod_base = OTHER; note = 2'-O-methyl modified nucleotide
  modified_base 8: mod_base = OTHER; note = 2'-O-methyl modified nucleotide
  modified_base 9: mod_base = OTHER; note = 2'-O-methyl modified nucleotide
  modified_base 11: mod_base = OTHER; note = 2'-O-methyl modified nucleotide
  modified_base 13: mod_base = OTHER; note = 2'-O-methyl modified nucleotide
  modified_base 18: mod_base = OTHER; note = 2'-O-methyl modified nucleotide
  modified_base 22: mod_base = OTHER; note = 2'-O-methyl modified nucleotide
  modified_base 25: mod_base = OTHER; note = 2'-O-methyl modified nucleotide
  modified_base 29: mod_base = OTHER; note = 2'-O-methyl modified nucleotide
  modified_base 30: mod_base = OTHER; note = 2'-O-methyl modified nucleotide
  modified_base 31: mod_base = OTHER; note = 2'-O-methyl modified nucleotide
  modified_base 32: mod_base = OTHER; note = 2'-O-methyl modified nucleotide
  modified_base 37: mod_base = OTHER; note = 2'-O-methyl modified nucleotide
  modified_base 38: mod_base = OTHER; note = 2'-O-methyl modified nucleotide
  modified_base 39: mod_base = OTHER; note = 2'-O-methyl modified nucleotide
  modified_base 40: mod_base = OTHER; note = 2'-O-methyl modified nucleotide
  modified_base 41: mod_base = OTHER; note = 2'-O-methyl modified nucleotide
  modified_base 42: mod_base = OTHER; note = 2'-O-methyl modified nucleotide
  modified_base 43: mod_base = OTHER; note = 2'-O-methyl modified nucleotide
  modified_base 47: mod_base = OTHER; note = 2'-O-methyl modified nucleotide
  modified_base 48: mod_base = OTHER; note = 2'-O-methyl modified nucleotide
  modified_base 51: mod_base = OTHER; note = 2'-O-methyl modified nucleotide
  modified_base 54: mod_base = OTHER; note = nucleotide with phosphorothioate linkage
  modified_base 58: mod_base = OTHER; note = 2'-O-methyl modified nucleotide
  modified_base 59: mod_base = OTHER; note = 2'-O-methyl modified nucleotide
  modified_base 61: mod_base = OTHER; note = 2'-O-methyl modified nucleotide
  modified_base 62: mod_base = OTHER; note = 2'-O-methyl modified nucleotide
  modified_base 63: mod_base = OTHER; note = 2'-O-methyl modified nucleotide
  modified_base 64: mod_base = OTHER; note = 2'-O-methyl modified nucleotide
  modified_base 65: mod_base = OTHER; note = 2'-O-methyl modified nucleotide
  modified_base 66: mod_base = OTHER; note = 2'-O-methyl modified nucleotide
  modified_base 67: mod_base = OTHER; note = 2'-O-methyl modified nucleotide
  modified_base 68: mod_base = OTHER; note = 2'-O-methyl modified nucleotide
  modified_base 69: mod_base = OTHER; note = 2'-O-methyl modified nucleotide
  modified_base 70: mod_base = OTHER; note = 2'-O-methyl modified nucleotide
  modified_base 75: mod_base = OTHER; note = 2'-O-methyl modified nucleotide
  modified_base 77: mod_base = OTHER; note = 2'-O-methyl modified nucleotide
  modified_base 80: mod_base = OTHER; note = 2'-O-methyl modified nucleotide
  modified_base 86: mod_base = OTHER; note = 2'-O-methyl modified nucleotide
  modified_base 87: mod_base = OTHER; note = 2'-O-methyl modified nucleotide
  modified_base 89: mod_base = OTHER; note = 2'-O-methyl modified nucleotide
  modified_base 90: mod_base = OTHER; note = 2'-O-methyl modified nucleotide
  modified_base 91: mod_base = OTHER; note = 2'-O-methyl modified nucleotide
  modified_base 92: mod_base = OTHER; note = 2'-O-methyl modified nucleotide
  modified_base 99: mod_base = OTHER; note = nucleotide with phosphorothioate linkage
  modified_base 100: mod_base = OTHER; note = 2'-O-methyl modified nucleotide with phosphorothioate linkage
  modified_base 101: mod_base = OTHER; note = 2'-O-methyl modified nucleotide

SEQ ID NO: 2341 - RNA, 101 nt, synthetic construct; identical to SEQ ID NO: 1341
  source 1..101: mol_type = other RNA
  modified_base 1: mod_base = OTHER; note = 2'-O-methyl modified nucleotide with phosphorothioate linkage
  modified_base 2: mod_base = OTHER; note = 2'-O-methyl modified nucleotide with phosphorothioate linkage
  modified_base 3: mod_base = OTHER; note = 2'-O-methyl modified nucleotide with phosphorothioate linkage
  modified_base 4: mod_base = OTHER; note = 2'-O-methyl modified nucleotide
  modified_base 5: mod_base = OTHER; note = 2'-O-methyl modified nucleotide
  modified_base 8: mod_base = OTHER; note = 2'-O-methyl modified nucleotide
  modified_base 9: mod_base = OTHER; note = 2'-O-methyl modified nucleotide
  modified_base 11: mod_base = OTHER; note = 2'-O-methyl modified nucleotide
  modified_base 13: mod_base = OTHER; note = 2'-O-methyl modified nucleotide
  modified_base 18: mod_base = OTHER; note = 2'-O-methyl modified nucleotide
  modified_base 22: mod_base = OTHER; note = 2'-O-methyl modified nucleotide
  modified_base 25: mod_base = OTHER; note = 2'-O-methyl modified nucleotide
  modified_base 29: mod_base = OTHER; note = 2'-O-methyl modified nucleotide
  modified_base 30: mod_base = OTHER; note = 2'-O-methyl modified nucleotide
  modified_base 31: mod_base = OTHER; note = 2'-O-methyl modified nucleotide
  modified_base 32: mod_base = OTHER; note = 2'-O-methyl modified nucleotide
  modified_base 37: mod_base = OTHER; note = 2'-O-methyl modified nucleotide
  modified_base 38: mod_base = OTHER; note = 2'-O-methyl modified nucleotide
  modified_base 39: mod_base = OTHER; note = 2'-O-methyl modified nucleotide
  modified_base 40: mod_base = OTHER; note = 2'-O-methyl modified nucleotide
  modified_base 41: mod_base = OTHER; note = 2'-O-methyl modified nucleotide
  modified_base 42: mod_base = OTHER; note = 2'-O-methyl modified nucleotide
  modified_base 43: mod_base = OTHER; note = 2'-O-methyl modified nucleotide
  modified_base 47: mod_base = OTHER; note = 2'-O-methyl modified nucleotide
  modified_base 48: mod_base = OTHER; note = 2'-O-methyl modified nucleotide
  modified_base 51: mod_base = OTHER; note = 2'-O-methyl modified nucleotide
  modified_base 54: mod_base = OTHER; note = nucleotide with phosphorothioate linkage
  modified_base 58: mod_base = OTHER; note = 2'-O-methyl modified nucleotide
  modified_base 59: mod_base = OTHER; note = 2'-O-methyl modified nucleotide
  modified_base 61: mod_base = OTHER; note = 2'-O-methyl modified nucleotide
  modified_base 62: mod_base = OTHER; note = 2'-O-methyl modified nucleotide
  modified_base 63: mod_base = OTHER; note = 2'-O-methyl modified nucleotide
  modified_base 64: mod_base = OTHER; note = 2'-O-methyl modified nucleotide
  modified_base 65: mod_base = OTHER; note = 2'-O-methyl modified nucleotide
  modified_base 66: mod_base = OTHER; note = 2'-O-methyl modified nucleotide
  modified_base 67: mod_base = OTHER; note = 2'-O-methyl modified nucleotide
  modified_base 68: mod_base = OTHER; note = 2'-O-methyl modified nucleotide
  modified_base 69: mod_base = OTHER; note = 2'-O-methyl modified nucleotide
  modified_base 70: mod_base = OTHER; note = 2'-O-methyl modified nucleotide
  modified_base 75: mod_base = OTHER; note = 2'-O-methyl modified nucleotide
  modified_base 77: mod_base = OTHER; note = 2'-O-methyl modified nucleotide
  modified_base 80: mod_base = OTHER; note = 2'-O-methyl modified nucleotide
  modified_base 86: mod_base = OTHER; note = 2'-O-methyl modified nucleotide
  modified_base 87: mod_base = OTHER; note = 2'-O-methyl modified nucleotide
  modified_base 89: mod_base = OTHER; note = 2'-O-methyl modified nucleotide
  modified_base 90: mod_base = OTHER; note = 2'-O-methyl modified nucleotide
  modified_base 91: mod_base = OTHER; note = 2'-O-methyl modified nucleotide
  modified_base 92: mod_base = OTHER; note = 2'-O-methyl modified nucleotide
  modified_base 99: mod_base = OTHER; note = nucleotide with phosphorothioate linkage
  modified_base 100: mod_base = OTHER; note = 2'-O-methyl modified nucleotide with phosphorothioate linkage
  modified_base 101: mod_base = OTHER; note = 2'-O-methyl modified nucleotide

SEQ ID NO: 2342 - RNA, 101 nt, synthetic construct; identical to SEQ ID NO: 1342
  source 1..101: mol_type = other RNA
  modified_base 1: mod_base = OTHER; note = 2'-O-methyl modified nucleotide with phosphorothioate linkage
  modified_base 2: mod_base = OTHER; note = 2'-O-methyl modified nucleotide with phosphorothioate linkage
  modified_base 3: mod_base = OTHER; note = 2'-O-methyl modified nucleotide with phosphorothioate linkage
  modified_base 4: mod_base = OTHER; note = 2'-O-methyl modified nucleotide
  modified_base 5: mod_base = OTHER; note = 2'-O-methyl modified nucleotide
  modified_base 8: mod_base = OTHER; note = 2'-O-methyl modified nucleotide
  modified_base 9: mod_base = OTHER; note = 2'-O-methyl modified nucleotide
  modified_base 11: mod_base = OTHER; note = 2'-O-methyl modified nucleotide
  modified_base 13: mod_base = OTHER; note = 2'-O-methyl modified nucleotide
  modified_base 18: mod_base = OTHER; note = 2'-O-methyl modified nucleotide
  modified_base 22: mod_base = OTHER; note = 2'-O-methyl modified nucleotide
  modified_base 25: mod_base = OTHER; note = 2'-O-methyl modified nucleotide
  modified_base 29: mod_base = OTHER; note = 2'-O-methyl modified nucleotide
  modified_base 30: mod_base = OTHER; note = 2'-O-methyl modified nucleotide
  modified_base 31: mod_base = OTHER; note = 2'-O-methyl modified nucleotide
  modified_base 32: mod_base = OTHER; note = 2'-O-methyl modified nucleotide
  modified_base 37: mod_base = OTHER; note = 2'-O-methyl modified nucleotide
  modified_base 38: mod_base = OTHER; note = 2'-O-methyl modified nucleotide
  modified_base 39: mod_base = OTHER; note = 2'-O-methyl modified nucleotide
  modified_base 40: mod_base = OTHER; note = 2'-O-methyl modified nucleotide
  modified_base 41: mod_base = OTHER; note = 2'-O-methyl modified nucleotide
  modified_base 42: mod_base = OTHER; note = 2'-O-methyl modified nucleotide
  modified_base 43: mod_base = OTHER; note = 2'-O-methyl modified nucleotide
  modified_base 47: mod_base = OTHER; note = 2'-O-methyl modified nucleotide
  modified_base 48: mod_base = OTHER; note = 2'-O-methyl modified nucleotide
  modified_base 51: mod_base = OTHER; note = 2'-O-methyl modified nucleotide
  modified_base 54: mod_base = OTHER; note = nucleotide with phosphorothioate linkage
  modified_base 58: mod_base = OTHER; note = 2'-O-methyl modified nucleotide
  modified_base 59: mod_base = OTHER; note = 2'-O-methyl modified nucleotide
  modified_base 61: mod_base = OTHER; note = 2'-O-methyl modified nucleotide
  modified_base 62: mod_base = OTHER; note = 2'-O-methyl modified nucleotide
  modified_base 63: mod_base = OTHER; note = 2'-O-methyl modified nucleotide
  modified_base 64: mod_base = OTHER; note = 2'-O-methyl modified nucleotide
  modified_base 65: mod_base = OTHER; note = 2'-O-methyl modified nucleotide
  modified_base 66: mod_base = OTHER; note = 2'-O-methyl modified nucleotide
  modified_base 67: mod_base = OTHER; note = 2'-O-methyl modified nucleotide
  modified_base 68: mod_base = OTHER; note = 2'-O-methyl modified nucleotide
  modified_base 69: mod_base = OTHER; note = 2'-O-methyl modified nucleotide
  modified_base 70: mod_base = OTHER; note = 2'-O-methyl modified nucleotide
  modified_base 75: mod_base = OTHER; note = 2'-O-methyl modified nucleotide
  modified_base 77: mod_base = OTHER; note = 2'-O-methyl modified nucleotide
  modified_base 80: mod_base = OTHER; note = 2'-O-methyl modified nucleotide
  modified_base 86: mod_base = OTHER; note = 2'-O-methyl modified nucleotide
  modified_base 87: mod_base = OTHER; note = 2'-O-methyl modified nucleotide
  modified_base 89: mod_base = OTHER; note = 2'-O-methyl modified nucleotide
  modified_base 90: mod_base = OTHER; note = 2'-O-methyl modified nucleotide
  modified_base 91: mod_base = OTHER; note = 2'-O-methyl modified nucleotide
  modified_base 92: mod_base = OTHER; note = 2'-O-methyl modified nucleotide
  modified_base 99: mod_base = OTHER; note = nucleotide with phosphorothioate linkage
  modified_base 100: mod_base = OTHER; note = 2'-O-methyl modified nucleotide with phosphorothioate linkage
  modified_base 101: mod_base = OTHER; note = 2'-O-methyl modified nucleotide

SEQ ID NO: 2343 - RNA, 101 nt, synthetic construct; identical to SEQ ID NO: 1343
  source 1..101: mol_type = other RNA
  modified_base 1: mod_base = OTHER; note = 2'-O-methyl modified nucleotide with phosphorothioate linkage
  modified_base 2: mod_base = OTHER; note = 2'-O-methyl modified nucleotide with phosphorothioate linkage
  modified_base 3: mod_base = OTHER; note = 2'-O-methyl modified nucleotide with phosphorothioate linkage
  modified_base 4: mod_base = OTHER; note = 2'-O-methyl modified nucleotide
  modified_base 5: mod_base = OTHER; note = 2'-O-methyl modified nucleotide
  modified_base 8: mod_base = OTHER; note = 2'-O-methyl modified nucleotide
  modified_base 9: mod_base = OTHER; note = 2'-O-methyl modified nucleotide
  modified_base 11: mod_base = OTHER; note = 2'-O-methyl modified nucleotide
  modified_base 13: mod_base = OTHER; note = 2'-O-methyl modified nucleotide
  modified_base 18: mod_base = OTHER; note = 2'-O-methyl modified nucleotide
  modified_base 22: mod_base = OTHER; note = 2'-O-methyl modified nucleotide
  modified_base 25: mod_base = OTHER; note = 2'-O-methyl modified nucleotide
  modified_base 29: mod_base = OTHER; note = 2'-O-methyl modified nucleotide
  modified_base 30: mod_base = OTHER; note = 2'-O-methyl modified nucleotide
  modified_base 31: mod_base = OTHER; note = 2'-O-methyl modified nucleotide
  modified_base 32: mod_base = OTHER; note = 2'-O-methyl modified nucleotide
  modified_base 37: mod_base = OTHER; note = 2'-O-methyl modified nucleotide
  modified_base 38: mod_base = OTHER; note = 2'-O-methyl modified nucleotide
  modified_base 39: mod_base = OTHER; note = 2'-O-methyl modified nucleotide
  modified_base 40: mod_base = OTHER; note = 2'-O-methyl modified nucleotide
  modified_base 41: mod_base = OTHER; note = 2'-O-methyl modified nucleotide
  modified_base 42: mod_base = OTHER; note = 2'-O-methyl modified nucleotide
  modified_base 43: mod_base = OTHER; note = 2'-O-methyl modified nucleotide
  modified_base 47: mod_base = OTHER; note = 2'-O-methyl modified nucleotide
  modified_base 48: mod_base = OTHER; note = 2'-O-methyl modified nucleotide
  modified_base 51: mod_base = OTHER; note = 2'-O-methyl modified nucleotide
  modified_base 54: mod_base = OTHER; note = nucleotide with phosphorothioate linkage
  modified_base 58: mod_base = OTHER; note = 2'-O-methyl modified nucleotide
  modified_base 59: mod_base = OTHER; note = 2'-O-methyl modified nucleotide
  modified_base 61: mod_base = OTHER; note = 2'-O-methyl modified nucleotide
  modified_base 62: mod_base = OTHER; note = 2'-O-methyl modified nucleotide
  modified_base 63: mod_base = OTHER; note = 2'-O-methyl modified nucleotide
  modified_base 64: mod_base = OTHER; note = 2'-O-methyl modified nucleotide
  modified_base 65: mod_base = OTHER; note = 2'-O-methyl modified nucleotide
  modified_base 66: mod_base = OTHER; note = 2'-O-methyl modified nucleotide
  modified_base 67: mod_base = OTHER; note = 2'-O-methyl modified nucleotide
  modified_base 68: mod_base = OTHER; note = 2'-O-methyl modified nucleotide
  modified_base 69: mod_base = OTHER; note = 2'-O-methyl modified nucleotide
  modified_base 70: mod_base = OTHER; note = 2'-O-methyl modified nucleotide
  modified_base 75: mod_base = OTHER; note = 2'-O-methyl modified nucleotide
  modified_base 77: mod_base = OTHER; note = 2'-O-methyl modified nucleotide
  modified_base 80: mod_base = OTHER; note = 2'-O-methyl modified nucleotide
  modified_base 86: mod_base = OTHER; note = 2'-O-methyl modified nucleotide
  modified_base 87: mod_base = OTHER; note = 2'-O-methyl modified nucleotide
  modified_base 89: mod_base = OTHER; note = 2'-O-methyl modified nucleotide
  modified_base 90: mod_base = OTHER; note = 2'-O-methyl modified nucleotide
  modified_base 91: mod_base = OTHER; note = 2'-O-methyl modified nucleotide
  modified_base 92: mod_base = OTHER; note = 2'-O-methyl modified nucleotide
  modified_base 99: mod_base = OTHER; note = nucleotide with phosphorothioate linkage
  modified_base 100: mod_base = OTHER; note = 2'-O-methyl modified nucleotide with phosphorothioate linkage
  modified_base 101: mod_base = OTHER; note = 2'-O-methyl modified nucleotide

SEQ ID NO: 2344 - RNA, 101 nt, synthetic construct; identical to SEQ ID NO: 1344
  source 1..101: mol_type = other RNA
  modified_base 1: mod_base = OTHER; note = 2'-O-methyl modified nucleotide with phosphorothioate linkage
  modified_base 2: mod_base = OTHER; note = 2'-O-methyl modified nucleotide with phosphorothioate linkage
  modified_base 3: mod_base = OTHER; note = 2'-O-methyl modified nucleotide with phosphorothioate linkage
  modified_base 4: mod_base = OTHER; note = 2'-O-methyl modified nucleotide
  modified_base 5: mod_base = OTHER; note = 2'-O-methyl modified nucleotide
  modified_base 8: mod_base = OTHER; note = 2'-O-methyl modified nucleotide
  modified_base 9: mod_base = OTHER; note = 2'-O-methyl modified nucleotide
  modified_base 11: mod_base = OTHER; note = 2'-O-methyl modified nucleotide
  modified_base 13: mod_base = OTHER; note = 2'-O-methyl modified nucleotide
  modified_base 18: mod_base = OTHER; note = 2'-O-methyl modified nucleotide
  modified_base 22: mod_base = OTHER; note = 2'-O-methyl modified nucleotide
  modified_base 25: mod_base = OTHER; note = 2'-O-methyl modified nucleotide
  modified_base 29: mod_base = OTHER; note = 2'-O-methyl modified nucleotide
  modified_base 30: mod_base = OTHER; note = 2'-O-methyl modified nucleotide
  modified_base 31: mod_base = OTHER; note = 2'-O-methyl modified nucleotide
  modified_base 32: mod_base = OTHER; note = 2'-O-methyl modified nucleotide
  modified_base 37: mod_base = OTHER; note = 2'-O-methyl modified nucleotide
  modified_base 38: mod_base = OTHER; note = 2'-O-methyl modified nucleotide
  modified_base 39: mod_base = OTHER; note = 2'-O-methyl modified nucleotide
  modified_base 40: mod_base = OTHER; note = 2'-O-methyl modified nucleotide
  modified_base 41: mod_base = OTHER; note = 2'-O-methyl modified nucleotide
  modified_base 42: mod_base = OTHER; note = 2'-O-methyl modified nucleotide
  modified_base 43: mod_base = OTHER; note = 2'-O-methyl modified nucleotide
  modified_base 47: mod_base = OTHER; note = 2'-O-methyl modified nucleotide
  modified_base 48: mod_base = OTHER; note = 2'-O-methyl modified nucleotide
  modified_base 51: mod_base = OTHER; note = 2'-O-methyl modified nucleotide
  modified_base 54: mod_base = OTHER; note = nucleotide with phosphorothioate linkage
  modified_base 58: mod_base = OTHER; note = 2'-O-methyl modified nucleotide
  modified_base 59: mod_base = OTHER; note = 2'-O-methyl modified nucleotide
  modified_base 61: mod_base = OTHER; note = 2'-O-methyl modified nucleotide
  modified_base 62: mod_base = OTHER; note = 2'-O-methyl modified nucleotide
  modified_base 63: mod_base = OTHER; note = 2'-O-methyl modified nucleotide
  modified_base 64: mod_base = OTHER; note = 2'-O-methyl modified nucleotide
  modified_base 65: mod_base = OTHER; note = 2'-O-methyl modified nucleotide
  modified_base 66: mod_base = OTHER; note = 2'-O-methyl modified nucleotide
  modified_base 67: mod_base = OTHER; note = 2'-O-methyl modified nucleotide
  modified_base 68: mod_base = OTHER; note = 2'-O-methyl modified nucleotide
  modified_base 69: mod_base = OTHER; note = 2'-O-methyl modified nucleotide
  modified_base 70: mod_base = OTHER; note = 2'-O-methyl modified nucleotide
  modified_base 75: mod_base = OTHER; note = 2'-O-methyl modified nucleotide
  modified_base 77: mod_base = OTHER; note = 2'-O-methyl modified nucleotide
  modified_base 80: mod_base = OTHER; note = 2'-O-methyl modified nucleotide
  modified_base 86: mod_base = OTHER; note = 2'-O-methyl modified nucleotide
  modified_base 87: mod_base = OTHER; note = 2'-O-methyl modified nucleotide
  modified_base 89: mod_base = OTHER; note = 2'-O-methyl modified nucleotide
  modified_base 90: mod_base = OTHER; note = 2'-O-methyl modified nucleotide
  modified_base 91: mod_base = OTHER; note = 2'-O-methyl modified nucleotide
  modified_base 92: mod_base = OTHER; note = 2'-O-methyl modified nucleotide
  modified_base 99: mod_base = OTHER; note = nucleotide with phosphorothioate linkage
  modified_base 100: mod_base = OTHER; note = 2'-O-methyl modified nucleotide with phosphorothioate linkage
  modified_base 101: mod_base = OTHER; note = 2'-O-methyl modified nucleotide

SEQ ID NO: 2345 - RNA, 101 nt, synthetic construct; identical to SEQ ID NO: 1345
  source 1..101: mol_type = other RNA
  modified_base 1: mod_base = OTHER; note = 2'-O-methyl modified nucleotide with phosphorothioate linkage
  modified_base 2: mod_base = OTHER; note = 2'-O-methyl modified nucleotide with phosphorothioate linkage
  modified_base 3: mod_base = OTHER; note = 2'-O-methyl modified nucleotide with phosphorothioate linkage
  modified_base 4: mod_base = OTHER; note = 2'-O-methyl modified nucleotide
  modified_base 5: mod_base = OTHER; note = 2'-O-methyl modified nucleotide
  modified_base 8: mod_base = OTHER; note = 2'-O-methyl modified nucleotide
  modified_base 9: mod_base = OTHER; note = 2'-O-methyl modified nucleotide
  modified_base 11: mod_base = OTHER; note = 2'-O-methyl modified nucleotide
  modified_base 13: mod_base = OTHER; note = 2'-O-methyl modified nucleotide
  modified_base 18: mod_base = OTHER; note = 2'-O-methyl modified nucleotide
  modified_base 22: mod_base = OTHER; note = 2'-O-methyl modified nucleotide
  modified_base 25: mod_base = OTHER; note = 2'-O-methyl modified nucleotide
  modified_base 29: mod_base = OTHER; note = 2'-O-methyl modified nucleotide
  modified_base 30: mod_base = OTHER; note = 2'-O-methyl modified nucleotide
  modified_base 31: mod_base = OTHER; note = 2'-O-methyl modified nucleotide
  modified_base 32: mod_base = OTHER; note = 2'-O-methyl modified nucleotide
  modified_base 37: mod_base = OTHER; note = 2'-O-methyl modified nucleotide
  modified_base 38: mod_base = OTHER; note = 2'-O-methyl modified nucleotide
  modified_base 39: mod_base = OTHER; note = 2'-O-methyl modified nucleotide
  modified_base 40: mod_base = OTHER; note = 2'-O-methyl modified nucleotide
  modified_base 41: mod_base = OTHER; note = 2'-O-methyl modified nucleotide
  modified_base 42: mod_base = OTHER; note = 2'-O-methyl modified nucleotide
  modified_base 43: mod_base = OTHER; note = 2'-O-methyl modified nucleotide
  modified_base 47: mod_base = OTHER; note = 2'-O-methyl modified nucleotide
  modified_base 48: mod_base = OTHER; note = 2'-O-methyl modified nucleotide
  modified_base 51: mod_base = OTHER; note = 2'-O-methyl modified nucleotide
  modified_base 54: mod_base = OTHER; note = nucleotide with phosphorothioate linkage
  modified_base 58: mod_base = OTHER; note = 2'-O-methyl modified nucleotide
  modified_base 59: mod_base = OTHER; note = 2'-O-methyl modified nucleotide
  modified_base 61: mod_base = OTHER; note = 2'-O-methyl modified nucleotide
  modified_base 62: mod_base = OTHER; note = 2'-O-methyl modified nucleotide
  modified_base 63: mod_base = OTHER; note = 2'-O-methyl modified nucleotide
  modified_base 64: mod_base = OTHER; note = 2'-O-methyl modified nucleotide
  modified_base 65: mod_base = OTHER; note = 2'-O-methyl modified nucleotide
  modified_base 66: mod_base = OTHER; note = 2'-O-methyl modified nucleotide
  modified_base 67: mod_base = OTHER; note = 2'-O-methyl modified nucleotide
  modified_base 68: mod_base = OTHER; note = 2'-O-methyl modified nucleotide
  modified_base 69: mod_base = OTHER; note = 2'-O-methyl modified nucleotide
  modified_base 70: mod_base = OTHER; note = 2'-O-methyl modified nucleotide
  modified_base 75: mod_base = OTHER; note = 2'-O-methyl modified nucleotide
  modified_base 77: mod_base = OTHER; note = 2'-O-methyl modified nucleotide
  modified_base 80: mod_base = OTHER; note = 2'-O-methyl modified nucleotide
  modified_base 86: mod_base = OTHER; note = 2'-O-methyl modified nucleotide
  modified_base 87: mod_base = OTHER; note = 2'-O-methyl modified nucleotide
  modified_base 89: mod_base = OTHER; note = 2'-O-methyl modified nucleotide
  modified_base 90: mod_base = OTHER; note = 2'-O-methyl modified nucleotide
  modified_base 91: mod_base = OTHER; note = 2'-O-methyl modified nucleotide
  modified_base 92: mod_base = OTHER; note = 2'-O-methyl modified nucleotide
  modified_base 99: mod_base = OTHER; note = nucleotide with phosphorothioate linkage
  modified_base 100: mod_base = OTHER; note = 2'-O-methyl modified nucleotide with phosphorothioate linkage
  modified_base 101: mod_base = OTHER; note = 2'-O-methyl modified nucleotide

SEQ ID NO: 2346 - RNA, 101 nt, synthetic construct; identical to SEQ ID NO: 1346
  source 1..101: mol_type = other RNA
  modified_base 1: mod_base = OTHER; note = 2'-O-methyl modified nucleotide with phosphorothioate linkage
  modified_base 2: mod_base = OTHER; note = 2'-O-methyl modified nucleotide with phosphorothioate linkage
  modified_base 3: mod_base = OTHER; note = 2'-O-methyl modified nucleotide with phosphorothioate linkage
  modified_base 4: mod_base = OTHER; note = 2'-O-methyl modified nucleotide
  modified_base 5: mod_base = OTHER; note = 2'-O-methyl modified nucleotide
  modified_base 8: mod_base = OTHER; note = 2'-O-methyl modified nucleotide
  modified_base 9: mod_base = OTHER; note = 2'-O-methyl modified nucleotide
  modified_base 11: mod_base = OTHER; note = 2'-O-methyl modified nucleotide
  modified_base 13: mod_base = OTHER; note = 2'-O-methyl modified nucleotide
  modified_base 18: mod_base = OTHER; note = 2'-O-methyl modified nucleotide
  modified_base 22: mod_base = OTHER; note = 2'-O-methyl modified nucleotide
  modified_base 25: mod_base = OTHER; note = 2'-O-methyl modified nucleotide
  modified_base 29: mod_base = OTHER; note = 2'-O-methyl modified nucleotide
  modified_base 30: mod_base = OTHER; note = 2'-O-methyl modified nucleotide
  modified_base 31: mod_base = OTHER; note = 2'-O-methyl modified nucleotide
  modified_base 32: mod_base = OTHER; note = 2'-O-methyl modified nucleotide
  modified_base 37: mod_base = OTHER; note = 2'-O-methyl modified nucleotide
  modified_base 38: mod_base = OTHER; note = 2'-O-methyl modified nucleotide
  modified_base 39: mod_base = OTHER; note = 2'-O-methyl modified nucleotide
  modified_base 40: mod_base = OTHER; note = 2'-O-methyl modified nucleotide
  modified_base 41: mod_base = OTHER; note = 2'-O-methyl modified nucleotide
  modified_base 42: mod_base = OTHER; note = 2'-O-methyl modified nucleotide
  modified_base 43: mod_base = OTHER; note = 2'-O-methyl modified nucleotide
  modified_base 47: mod_base = OTHER; note = 2'-O-methyl modified nucleotide
  modified_base 48: mod_base = OTHER; note = 2'-O-methyl modified nucleotide
  modified_base 51: mod_base = OTHER; note = 2'-O-methyl modified nucleotide
  modified_base 54: mod_base = OTHER; note = nucleotide with phosphorothioate linkage
  modified_base 58: mod_base = OTHER; note = 2'-O-methyl modified nucleotide
  modified_base 59: mod_base = OTHER; note = 2'-O-methyl modified nucleotide
  modified_base 61: mod_base = OTHER; note = 2'-O-methyl modified nucleotide
  modified_base 62: mod_base = OTHER; note = 2'-O-methyl modified nucleotide
  modified_base 63: mod_base = OTHER; note = 2'-O-methyl modified nucleotide
  modified_base 64: mod_base = OTHER; note = 2'-O-methyl modified nucleotide
  modified_base 65: mod_base = OTHER; note = 2'-O-methyl modified nucleotide
  modified_base 66: mod_base = OTHER; note = 2'-O-methyl modified nucleotide
  modified_base 67: mod_base = OTHER; note = 2'-O-methyl modified nucleotide
  modified_base 68: mod_base = OTHER; note = 2'-O-methyl modified nucleotide
  modified_base 69: mod_base = OTHER; note = 2'-O-methyl modified nucleotide
  modified_base 70: mod_base = OTHER; note = 2'-O-methyl modified nucleotide
  modified_base 75: mod_base = OTHER; note = 2'-O-methyl modified nucleotide
  modified_base 77: mod_base = OTHER; note = 2'-O-methyl modified nucleotide
  modified_base 80: mod_base = OTHER; note = 2'-O-methyl modified nucleotide
  modified_base 86: mod_base = OTHER; note = 2'-O-methyl modified nucleotide
  modified_base 87: mod_base = OTHER; note = 2'-O-methyl modified nucleotide
  modified_base 89: mod_base = OTHER; note = 2'-O-methyl modified nucleotide
  modified_base 90: mod_base = OTHER; note = 2'-O-methyl modified nucleotide
  modified_base 91: mod_base = OTHER; note = 2'-O-methyl modified nucleotide
  modified_base 92: mod_base = OTHER; note = 2'-O-methyl modified nucleotide
  modified_base 99: mod_base = OTHER; note = nucleotide with phosphorothioate linkage
  modified_base 100: mod_base = OTHER; note = 2'-O-methyl modified nucleotide with phosphorothioate linkage
  modified_base 101: mod_base = OTHER; note = 2'-O-methyl modified nucleotide

SEQ ID NO: 2347 - RNA, 101 nt, synthetic construct; identical to SEQ ID NO: 1347
  source 1..101: mol_type = other RNA
  modified_base 1: mod_base = OTHER; note = 2'-O-methyl modified nucleotide with phosphorothioate linkage
  modified_base 2: mod_base = OTHER; note = 2'-O-methyl modified nucleotide with phosphorothioate linkage
  modified_base 3: mod_base = OTHER; note = 2'-O-methyl modified nucleotide with phosphorothioate linkage
  modified_base 4: mod_base = OTHER; note = 2'-O-methyl modified nucleotide
  modified_base 5: mod_base = OTHER; note = 2'-O-methyl modified nucleotide
  modified_base 8: mod_base = OTHER; note = 2'-O-methyl modified nucleotide
  modified_base 9: mod_base = OTHER; note = 2'-O-methyl modified nucleotide
  modified_base 11: mod_base = OTHER; note = 2'-O-methyl modified nucleotide
  modified_base 13: mod_base = OTHER; note = 2'-O-methyl modified nucleotide
  modified_base 18: mod_base = OTHER; note = 2'-O-methyl modified nucleotide
  modified_base 22: mod_base = OTHER; note = 2'-O-methyl modified nucleotide
  modified_base 25: mod_base = OTHER; note = 2'-O-methyl modified nucleotide
  modified_base 29: mod_base = OTHER; note = 2'-O-methyl modified nucleotide
  modified_base 30: mod_base = OTHER; note = 2'-O-methyl modified nucleotide
  modified_base 31: mod_base = OTHER; note = 2'-O-methyl modified nucleotide
  modified_base 32: mod_base = OTHER; note = 2'-O-methyl modified nucleotide
  modified_base 37: mod_base = OTHER; note = 2'-O-methyl modified nucleotide
  modified_base 38: mod_base = OTHER; note = 2'-O-methyl modified nucleotide
  modified_base 39: mod_base = OTHER; note = 2'-O-methyl modified nucleotide
  modified_base 40: mod_base = OTHER; note = 2'-O-methyl modified nucleotide
  modified_base 41: mod_base = OTHER; note = 2'-O-methyl modified nucleotide
  modified_base 42: mod_base = OTHER; note = 2'-O-methyl modified nucleotide
  modified_base 43: mod_base = OTHER; note = 2'-O-methyl modified nucleotide
  modified_base 47: mod_base = OTHER; note = 2'-O-methyl modified nucleotide
  modified_base 48: mod_base = OTHER; note = 2'-O-methyl modified nucleotide
  modified_base 51: mod_base = OTHER; note = 2'-O-methyl modified nucleotide
  modified_base 54: mod_base = OTHER; note = nucleotide with phosphorothioate linkage
  modified_base 58: mod_base = OTHER; note = 2'-O-methyl modified nucleotide
  modified_base 59: mod_base = OTHER; note = 2'-O-methyl modified nucleotide
  modified_base 61: mod_base = OTHER; note = 2'-O-methyl modified nucleotide
  modified_base 62: mod_base = OTHER; note = 2'-O-methyl modified nucleotide
  modified_base 63: mod_base = OTHER; note = 2'-O-methyl modified nucleotide
  modified_base 64: mod_base = OTHER; note = 2'-O-methyl modified nucleotide
  modified_base 65: mod_base = OTHER; note = 2'-O-methyl modified nucleotide
  modified_base 66: mod_base = OTHER; note = 2'-O-methyl modified nucleotide
  modified_base 67: mod_base = OTHER; note = 2'-O-methyl modified nucleotide
  modified_base 68: mod_base = OTHER; note = 2'-O-methyl modified nucleotide
  modified_base 69: mod_base = OTHER; note = 2'-O-methyl modified nucleotide
  modified_base 70: mod_base = OTHER; note = 2'-O-methyl modified nucleotide
  modified_base 75: mod_base = OTHER; note = 2'-O-methyl modified nucleotide
  modified_base 77: mod_base = OTHER; note = 2'-O-methyl modified nucleotide
  modified_base 80: mod_base = OTHER; note = 2'-O-methyl modified nucleotide
  modified_base 86: mod_base = OTHER; note = 2'-O-methyl modified nucleotide
  modified_base 87: mod_base = OTHER; note = 2'-O-methyl modified nucleotide
  modified_base 89: mod_base = OTHER; note = 2'-O-methyl modified nucleotide
  modified_base 90: mod_base = OTHER; note = 2'-O-methyl modified nucleotide
  modified_base 91: mod_base = OTHER; note = 2'-O-methyl modified nucleotide
  modified_base 92: mod_base = OTHER; note = 2'-O-methyl modified nucleotide
  modified_base 99: mod_base = OTHER; note = nucleotide with phosphorothioate linkage
  modified_base 100: mod_base = OTHER; note = 2'-O-methyl modified nucleotide with phosphorothioate linkage
  modified_base 101: mod_base = OTHER; note = 2'-O-methyl modified nucleotide

SEQ ID NO: 2348 - RNA, 101 nt, synthetic construct; identical to SEQ ID NO: 1348
  source 1..101: mol_type = other RNA
  modified_base 1: mod_base = OTHER; note = 2'-O-methyl modified nucleotide with phosphorothioate linkage
  modified_base 2: mod_base = OTHER; note = 2'-O-methyl modified nucleotide with phosphorothioate linkage
  modified_base 3: mod_base = OTHER; note = 2'-O-methyl modified nucleotide with phosphorothioate linkage
  modified_base 4: mod_base = OTHER; note = 2'-O-methyl modified nucleotide
  modified_base 5: mod_base = OTHER; note = 2'-O-methyl modified nucleotide
  modified_base 8: mod_base = OTHER; note = 2'-O-methyl modified nucleotide
  modified_base 9: mod_base = OTHER; note = 2'-O-methyl modified nucleotide
  modified_base 11: mod_base = OTHER; note = 2'-O-methyl modified nucleotide
  modified_base 13: mod_base = OTHER; note = 2'-O-methyl modified nucleotide
  modified_base 18: mod_base = OTHER; note = 2'-O-methyl modified nucleotide
  modified_base 22: mod_base = OTHER; note = 2'-O-methyl modified nucleotide
  modified_base 25: mod_base = OTHER; note = 2'-O-methyl modified nucleotide
  modified_base 29: mod_base = OTHER; note = 2'-O-methyl modified nucleotide
  modified_base 30: mod_base = OTHER; note = 2'-O-methyl modified nucleotide
  modified_base 31: mod_base = OTHER; note = 2'-O-methyl modified nucleotide
  modified_base 32: mod_base = OTHER; note = 2'-O-methyl modified nucleotide
  modified_base 37: mod_base = OTHER; note = 2'-O-methyl modified nucleotide
  modified_base 38: mod_base = OTHER; note = 2'-O-methyl modified nucleotide
  modified_base 39: mod_base = OTHER; note = 2'-O-methyl modified nucleotide
  modified_base 40: mod_base = OTHER; note = 2'-O-methyl modified nucleotide
  modified_base 41: mod_base = OTHER; note = 2'-O-methyl modified nucleotide
  modified_base 42: mod_base = OTHER; note = 2'-O-methyl modified nucleotide
  modified_base 43: mod_base = OTHER; note = 2'-O-methyl modified nucleotide
  modified_base 47: mod_base = OTHER; note = 2'-O-methyl modified nucleotide
  modified_base 48: mod_base = OTHER; note = 2'-O-methyl modified nucleotide
  modified_base 51: mod_base = OTHER; note = 2'-O-methyl modified nucleotide
  modified_base 54: mod_base = OTHER; note = nucleotide with phosphorothioate linkage
  modified_base 58: mod_base = OTHER; note = 2'-O-methyl modified nucleotide
  modified_base 59: mod_base = OTHER; note = 2'-O-methyl modified nucleotide
  modified_base 61: mod_base = OTHER; note = 2'-O-methyl modified nucleotide
  modified_base 62: mod_base = OTHER; note = 2'-O-methyl modified nucleotide
  modified_base 63: mod_base = OTHER; note = 2'-O-methyl modified nucleotide
  modified_base 64: mod_base = OTHER; note = 2'-O-methyl modified nucleotide
  modified_base 65: mod_base = OTHER; note = 2'-O-methyl modified nucleotide
  modified_base 66: mod_base = OTHER; note = 2'-O-methyl modified nucleotide
  modified_base 67: mod_base = OTHER; note = 2'-O-methyl modified nucleotide
  modified_base 68: mod_base = OTHER; note = 2'-O-methyl modified nucleotide
  modified_base 69: mod_base = OTHER; note = 2'-O-methyl modified nucleotide
  modified_base 70: mod_base = OTHER; note = 2'-O-methyl modified nucleotide
  modified_base 75: mod_base = OTHER; note = 2'-O-methyl modified nucleotide
  modified_base 77: mod_base = OTHER; note = 2'-O-methyl modified nucleotide
  modified_base 80: mod_base = OTHER; note = 2'-O-methyl modified nucleotide
  modified_base 86: mod_base = OTHER; note = 2'-O-methyl modified nucleotide
  modified_base 87: mod_base = OTHER; note = 2'-O-methyl modified nucleotide
  modified_base 89: mod_base = OTHER; note = 2'-O-methyl modified nucleotide
  modified_base 90: mod_base = OTHER; note = 2'-O-methyl modified nucleotide
  modified_base 91: mod_base = OTHER; note = 2'-O-methyl modified nucleotide
  modified_base 92: mod_base = OTHER; note = 2'-O-methyl modified nucleotide
  modified_base 99: mod_base = OTHER; note = nucleotide with phosphorothioate linkage
  modified_base 100: mod_base = OTHER; note = 2'-O-methyl modified nucleotide with phosphorothioate linkage
  modified_base 101: mod_base = OTHER; note = 2'-O-methyl modified nucleotide

SEQ ID NO: 2349 - RNA, 101 nt, synthetic construct; identical to SEQ ID NO: 1349
  source 1..101: mol_type = other RNA
  modified_base 1: mod_base = OTHER; note = 2'-O-methyl modified nucleotide with phosphorothioate linkage
  modified_base 2: mod_base = OTHER; note = 2'-O-methyl modified nucleotide with phosphorothioate linkage
  modified_base 3: mod_base = OTHER; note = 2'-O-methyl modified nucleotide with phosphorothioate linkage
  modified_base 4: mod_base = OTHER; note = 2'-O-methyl modified nucleotide
  modified_base 5: mod_base = OTHER; note = 2'-O-methyl modified nucleotide
  modified_base 8: mod_base = OTHER; note = 2'-O-methyl modified nucleotide
  modified_base 9: mod_base = OTHER; note = 2'-O-methyl modified nucleotide
  modified_base 11: mod_base = OTHER; note = 2'-O-methyl modified nucleotide
  modified_base 13: mod_base = OTHER; note = 2'-O-methyl modified nucleotide
  modified_base 18: mod_base = OTHER; note = 2'-O-methyl modified nucleotide
  modified_base 22: mod_base = OTHER; note = 2'-O-methyl modified nucleotide
  modified_base 25: mod_base = OTHER; note = 2'-O-methyl modified nucleotide
  modified_base 29: mod_base = OTHER; note = 2'-O-methyl modified nucleotide
  modified_base 30: mod_base = OTHER; note = 2'-O-methyl modified nucleotide
  modified_base 31: mod_base = OTHER; note = 2'-O-methyl modified nucleotide
  modified_base 32: mod_base = OTHER; note = 2'-O-methyl modified nucleotide
  modified_base 37: mod_base = OTHER; note = 2'-O-methyl modified nucleotide
  modified_base 38: mod_base = OTHER; note = 2'-O-methyl modified nucleotide
  modified_base 39: mod_base = OTHER; note = 2'-O-methyl modified nucleotide
  modified_base 40: mod_base = OTHER; note = 2'-O-methyl modified nucleotide
  modified_base 41: mod_base = OTHER; note = 2'-O-methyl modified nucleotide
  modified_base 42: mod_base = OTHER; note = 2'-O-methyl modified nucleotide
  modified_base 43: mod_base = OTHER; note = 2'-O-methyl modified nucleotide
  modified_base 47: mod_base = OTHER; note = 2'-O-methyl modified nucleotide
  modified_base 48: mod_base = OTHER; note = 2'-O-methyl modified nucleotide
  modified_base 51: mod_base = OTHER; note = 2'-O-methyl modified nucleotide
  modified_base 54: mod_base = OTHER; note = nucleotide with phosphorothioate linkage
  modified_base 58: mod_base = OTHER; note = 2'-O-methyl modified nucleotide
  modified_base 59: mod_base = OTHER; note = 2'-O-methyl modified nucleotide
  modified_base 61: mod_base = OTHER; note = 2'-O-methyl modified nucleotide
  modified_base 62: mod_base = OTHER; note = 2'-O-methyl modified nucleotide
  modified_base 63: mod_base = OTHER; note = 2'-O-methyl modified nucleotide
  modified_base 64: mod_base = OTHER; note = 2'-O-methyl modified nucleotide
  modified_base 65: mod_base = OTHER; note = 2'-O-methyl modified nucleotide
  modified_base 66: mod_base = OTHER; note = 2'-O-methyl modified nucleotide
  modified_base 67: mod_base = OTHER; note = 2'-O-methyl modified nucleotide
  modified_base 68: mod_base = OTHER; note = 2'-O-methyl modified nucleotide
  modified_base 69: mod_base = OTHER; note = 2'-O-methyl modified nucleotide
  modified_base 70: mod_base = OTHER; note = 2'-O-methyl modified nucleotide
  modified_base 75: mod_base = OTHER; note = 2'-O-methyl modified nucleotide
  modified_base 77: mod_base = OTHER; note = 2'-O-methyl modified nucleotide
  modified_base 80: mod_base = OTHER; note = 2'-O-methyl modified nucleotide
  modified_base 86: mod_base = OTHER; note = 2'-O-methyl modified nucleotide
  modified_base 87: mod_base = OTHER; note = 2'-O-methyl modified nucleotide
  modified_base 89: mod_base = OTHER; note = 2'-O-methyl modified nucleotide
  modified_base 90: mod_base = OTHER; note = 2'-O-methyl modified nucleotide
  modified_base 91: mod_base = OTHER; note = 2'-O-methyl modified nucleotide
  modified_base 92: mod_base = OTHER; note = 2'-O-methyl modified nucleotide
  modified_base 99: mod_base = OTHER; note = nucleotide with phosphorothioate linkage
  modified_base 100: mod_base = OTHER; note = 2'-O-methyl modified nucleotide with phosphorothioate linkage
  modified_base 101: mod_base = OTHER; note = 2'-O-methyl modified nucleotide

SEQ ID NO: 2350 - RNA, 101 nt, synthetic construct; identical to SEQ ID NO: 1350
  source 1..101: mol_type = other RNA
  modified_base 1: mod_base = OTHER; note = 2'-O-methyl modified nucleotide with phosphorothioate linkage
  modified_base 2: mod_base = OTHER; note = 2'-O-methyl modified nucleotide with phosphorothioate linkage
  modified_base 3: mod_base = OTHER; note = 2'-O-methyl modified nucleotide with phosphorothioate linkage
  modified_base 4: mod_base = OTHER; note = 2'-O-methyl modified nucleotide
  modified_base 5: mod_base = OTHER; note = 2'-O-methyl modified nucleotide
  modified_base 8: mod_base = OTHER; note = 2'-O-methyl modified nucleotide
  modified_base 9: mod_base = OTHER; note = 2'-O-methyl modified nucleotide
  modified_base 11: mod_base = OTHER; note = 2'-O-methyl modified nucleotide
  modified_base 13: mod_base = OTHER; note = 2'-O-methyl modified nucleotide
  modified_base 18: mod_base = OTHER; note = 2'-O-methyl modified nucleotide
  modified_base 22: mod_base = OTHER; note = 2'-O-methyl modified nucleotide
  modified_base 25: mod_base = OTHER; note = 2'-O-methyl modified nucleotide
  modified_base 29: mod_base = OTHER; note = 2'-O-methyl modified nucleotide
  modified_base 30: mod_base = OTHER; note = 2'-O-methyl modified nucleotide
  modified_base 31: mod_base = OTHER; note = 2'-O-methyl modified nucleotide
  modified_base 32: mod_base = OTHER; note = 2'-O-methyl modified nucleotide
  modified_base 37: mod_base = OTHER; note = 2'-O-methyl modified nucleotide
  modified_base 38: mod_base = OTHER; note = 2'-O-methyl modified nucleotide
  modified_base 39: mod_base = OTHER; note = 2'-O-methyl modified nucleotide
  modified_base 40: mod_base = OTHER; note = 2'-O-methyl modified nucleotide
  modified_base 41: mod_base = OTHER; note = 2'-O-methyl modified nucleotide
  modified_base 42: mod_base = OTHER; note = 2'-O-methyl modified nucleotide
  modified_base 43: mod_base = OTHER; note = 2'-O-methyl modified nucleotide
  modified_base 47: mod_base = OTHER; note = 2'-O-methyl modified nucleotide
  modified_base 48: mod_base = OTHER; note = 2'-O-methyl modified nucleotide
  modified_base 51: mod_base = OTHER; note = 2'-O-methyl modified nucleotide
  modified_base 54: mod_base = OTHER; note = nucleotide with phosphorothioate linkage
  modified_base 58: mod_base = OTHER; note = 2'-O-methyl modified nucleotide
  modified_base 59: mod_base = OTHER; note = 2'-O-methyl modified nucleotide
  modified_base 61: mod_base = OTHER; note = 2'-O-methyl modified nucleotide
  modified_base 62: mod_base = OTHER; note = 2'-O-methyl modified nucleotide
  modified_base 63: mod_base = OTHER; note = 2'-O-methyl modified nucleotide
  modified_base 64: mod_base = OTHER; note = 2'-O-methyl modified nucleotide
  modified_base 65: mod_base = OTHER; note = 2'-O-methyl modified nucleotide
  modified_base 66: mod_base = OTHER; note = 2'-O-methyl modified nucleotide
  modified_base 67: mod_base = OTHER; note = 2'-O-methyl modified nucleotide
  modified_base 68: mod_base = OTHER; note = 2'-O-methyl modified nucleotide
  modified_base 69: mod_base = OTHER; note = 2'-O-methyl modified nucleotide
  modified_base 70: mod_base = OTHER; note = 2'-O-methyl modified nucleotide
  modified_base 75: mod_base = OTHER; note = 2'-O-methyl modified nucleotide
  modified_base 77: mod_base = OTHER; note = 2'-O-methyl modified nucleotide
  modified_base 80: mod_base = OTHER; note = 2'-O-methyl modified nucleotide
  modified_base 86: mod_base = OTHER; note = 2'-O-methyl modified nucleotide
  modified_base 87: mod_base = OTHER; note = 2'-O-methyl modified nucleotide
  modified_base 89: mod_base = OTHER; note = 2'-O-methyl modified nucleotide
  modified_base 90: mod_base = OTHER; note = 2'-O-methyl modified nucleotide
  modified_base 91: mod_base = OTHER; note = 2'-O-methyl modified nucleotide
  modified_base 92: mod_base = OTHER; note = 2'-O-methyl modified nucleotide
  modified_base 99: mod_base = OTHER; note = nucleotide with phosphorothioate linkage
  modified_base 100: mod_base = OTHER; note = 2'-O-methyl modified nucleotide with phosphorothioate linkage
  modified_base 101: mod_base = OTHER; note = 2'-O-methyl modified nucleotide

SEQ ID NO: 2351 - RNA, 101 nt, synthetic construct; identical to SEQ ID NO: 1351
  source 1..101: mol_type = other RNA
  modified_base 1: mod_base = OTHER; note = 2'-O-methyl modified nucleotide with phosphorothioate linkage
  modified_base 2: mod_base = OTHER; note = 2'-O-methyl modified nucleotide with phosphorothioate linkage
  modified_base 3: mod_base = OTHER; note = 2'-O-methyl modified nucleotide with phosphorothioate linkage
  modified_base 4: mod_base = OTHER; note = 2'-O-methyl modified nucleotide
  modified_base 5: mod_base = OTHER; note = 2'-O-methyl modified nucleotide
  modified_base 8: mod_base = OTHER; note = 2'-O-methyl modified nucleotide
  modified_base 9: mod_base = OTHER; note = 2'-O-methyl modified nucleotide
  modified_base 11: mod_base = OTHER; note = 2'-O-methyl modified nucleotide
  modified_base 13: mod_base = OTHER; note = 2'-O-methyl modified nucleotide
  modified_base 18: mod_base = OTHER; note = 2'-O-methyl modified nucleotide
  modified_base 22: mod_base = OTHER; note = 2'-O-methyl modified nucleotide
  modified_base 25: mod_base = OTHER; note = 2'-O-methyl modified nucleotide
  modified_base 29: mod_base = OTHER; note = 2'-O-methyl modified nucleotide
  modified_base 30: mod_base = OTHER; note = 2'-O-methyl modified nucleotide
  modified_base 31: mod_base = OTHER; note = 2'-O-methyl modified nucleotide
  modified_base 32: mod_base = OTHER; note = 2'-O-methyl modified nucleotide
  modified_base 37: mod_base = OTHER; note = 2'-O-methyl modified nucleotide
  modified_base 38: mod_base = OTHER; note = 2'-O-methyl modified nucleotide
  modified_base 39: mod_base = OTHER; note = 2'-O-methyl modified nucleotide
  modified_base 40: mod_base = OTHER; note = 2'-O-methyl modified nucleotide
  modified_base 41: mod_base = OTHER; note = 2'-O-methyl modified nucleotide
  modified_base 42: mod_base = OTHER; note = 2'-O-methyl modified nucleotide
  modified_base 43: mod_base = OTHER; note = 2'-O-methyl modified nucleotide
  modified_base 47: mod_base = OTHER; note = 2'-O-methyl modified nucleotide
  modified_base 48: mod_base = OTHER; note = 2'-O-methyl modified nucleotide
  modified_base 51: mod_base = OTHER; note = 2'-O-methyl modified nucleotide
  modified_base 54: mod_base = OTHER; note = nucleotide with phosphorothioate linkage
  modified_base 58: mod_base = OTHER; note = 2'-O-methyl modified nucleotide
  modified_base 59: mod_base = OTHER; note = 2'-O-methyl modified nucleotide
  modified_base 61: mod_base = OTHER; note = 2'-O-methyl modified nucleotide
  modified_base 62: mod_base = OTHER; note = 2'-O-methyl modified nucleotide
  modified_base 63: mod_base = OTHER; note = 2'-O-methyl modified nucleotide
  modified_base 64: mod_base = OTHER; note = 2'-O-methyl modified nucleotide
  modified_base 65: mod_base = OTHER; note = 2'-O-methyl modified nucleotide
  modified_base 66: mod_base = OTHER; note = 2'-O-methyl modified nucleotide
  modified_base 67: mod_base = OTHER; note = 2'-O-methyl modified nucleotide
  modified_base 68: mod_base = OTHER; note = 2'-O-methyl modified nucleotide
  modified_base 69: mod_base = OTHER; note = 2'-O-methyl modified nucleotide
  modified_base 70: mod_base = OTHER; note = 2'-O-methyl modified nucleotide
  modified_base 75: mod_base = OTHER; note = 2'-O-methyl modified nucleotide
  modified_base 77: mod_base = OTHER; note = 2'-O-methyl modified nucleotide
  modified_base 80: mod_base = OTHER; note = 2'-O-methyl modified nucleotide
  modified_base 86: mod_base = OTHER; note = 2'-O-methyl modified nucleotide
  modified_base 87: mod_base = OTHER; note = 2'-O-methyl modified nucleotide
  modified_base 89: mod_base = OTHER; note = 2'-O-methyl modified nucleotide
  modified_base 90: mod_base = OTHER; note = 2'-O-methyl modified nucleotide
  modified_base 91: mod_base = OTHER; note = 2'-O-methyl modified nucleotide
  modified_base 92: mod_base = OTHER; note = 2'-O-methyl modified nucleotide
  modified_base 99: mod_base = OTHER; note = nucleotide with phosphorothioate linkage
  modified_base 100: mod_base = OTHER; note = 2'-O-methyl modified nucleotide with phosphorothioate linkage
  modified_base 101: mod_base = OTHER; note = 2'-O-methyl modified nucleotide

SEQ ID NO: 2352 - RNA, 101 nt, synthetic construct; identical to SEQ ID NO: 1352
  source 1..101: mol_type = other RNA
  modified_base 1: mod_base = OTHER; note = 2'-O-methyl modified nucleotide with phosphorothioate linkage
  modified_base 2: mod_base = OTHER; note = 2'-O-methyl modified nucleotide with phosphorothioate linkage
  modified_base 3: mod_base = OTHER; note = 2'-O-methyl modified nucleotide with phosphorothioate linkage
  modified_base 4: mod_base = OTHER; note = 2'-O-methyl modified nucleotide
  modified_base 5: mod_base = OTHER; note = 2'-O-methyl modified nucleotide
  modified_base 8: mod_base = OTHER; note = 2'-O-methyl modified nucleotide
  modified_base 9: mod_base = OTHER; note = 2'-O-methyl modified nucleotide
  modified_base 11: mod_base = OTHER; note = 2'-O-methyl modified nucleotide
  modified_base 13: mod_base = OTHER; note = 2'-O-methyl modified nucleotide
  modified_base 18: mod_base = OTHER; note = 2'-O-methyl modified nucleotide
  modified_base 22: mod_base = OTHER; note = 2'-O-methyl modified nucleotide
  modified_base 25: mod_base = OTHER; note = 2'-O-methyl modified nucleotide
  modified_base 29: mod_base = OTHER; note = 2'-O-methyl modified nucleotide
  modified_base 30: mod_base = OTHER; note = 2'-O-methyl modified nucleotide
  modified_base 31: mod_base = OTHER; note = 2'-O-methyl modified nucleotide
  modified_base 32: mod_base = OTHER; note = 2'-O-methyl modified nucleotide
  modified_base 37: mod_base = OTHER; note = 2'-O-methyl modified nucleotide
  modified_base 38: mod_base = OTHER; note = 2'-O-methyl modified nucleotide
  modified_base 39: mod_base = OTHER; note = 2'-O-methyl modified nucleotide
  modified_base 40: mod_base = OTHER; note = 2'-O-methyl modified nucleotide
  modified_base 41: mod_base = OTHER; note = 2'-O-methyl modified nucleotide
  modified_base 42: mod_base = OTHER; note = 2'-O-methyl modified nucleotide
  modified_base 43: mod_base = OTHER; note = 2'-O-methyl modified nucleotide
  modified_base 47: mod_base = OTHER; note = 2'-O-methyl modified nucleotide
  modified_base 48: mod_base = OTHER; note = 2'-O-methyl modified nucleotide
  modified_base 51: mod_base = OTHER; note = 2'-O-methyl modified nucleotide
  modified_base 54: mod_base = OTHER; note = nucleotide with phosphorothioate linkage
  modified_base 58: mod_base = OTHER; note = 2'-O-methyl modified nucleotide
  modified_base 59: mod_base = OTHER; note = 2'-O-methyl modified nucleotide
  modified_base 61: mod_base = OTHER; note = 2'-O-methyl modified nucleotide
  modified_base 62: mod_base = OTHER; note = 2'-O-methyl modified nucleotide
  modified_base 63: mod_base = OTHER; note = 2'-O-methyl modified nucleotide
  modified_base 64: mod_base = OTHER; note = 2'-O-methyl modified nucleotide
  modified_base 65: mod_base = OTHER; note = 2'-O-methyl modified nucleotide
  modified_base 66: mod_base = OTHER; note = 2'-O-methyl modified nucleotide
  modified_base 67: mod_base = OTHER; note = 2'-O-methyl modified nucleotide
  modified_base 68: mod_base = OTHER; note = 2'-O-methyl modified nucleotide
  modified_base 69: mod_base = OTHER; note = 2'-O-methyl modified nucleotide
  modified_base 70: mod_base = OTHER; note = 2'-O-methyl modified nucleotide
  modified_base 75: mod_base = OTHER; note = 2'-O-methyl modified nucleotide
  modified_base 77: mod_base = OTHER; note = 2'-O-methyl modified nucleotide
  modified_base 80: mod_base = OTHER; note = 2'-O-methyl modified nucleotide
  modified_base 86: mod_base = OTHER; note = 2'-O-methyl modified nucleotide
  modified_base 87: mod_base = OTHER; note = 2'-O-methyl modified nucleotide
  modified_base 89: mod_base = OTHER; note = 2'-O-methyl modified nucleotide
  modified_base 90: mod_base = OTHER; note = 2'-O-methyl modified nucleotide
  modified_base 91: mod_base = OTHER; note = 2'-O-methyl modified nucleotide
  modified_base 92: mod_base = OTHER; note = 2'-O-methyl modified nucleotide
  modified_base 99: mod_base = OTHER; note = nucleotide with phosphorothioate linkage
  modified_base 100: mod_base = OTHER; note = 2'-O-methyl modified nucleotide with phosphorothioate linkage
  modified_base 101: mod_base = OTHER; note = 2'-O-methyl modified nucleotide

SEQ ID NO: 2353 - RNA, 101 nt, synthetic construct; identical to SEQ ID NO: 1353
  source 1..101: mol_type = other RNA
  modified_base 1: mod_base = OTHER; note = 2'-O-methyl modified nucleotide with phosphorothioate linkage
  modified_base 2: mod_base = OTHER; note = 2'-O-methyl modified nucleotide with phosphorothioate linkage
  modified_base 3: mod_base = OTHER; note = 2'-O-methyl modified nucleotide with phosphorothioate linkage
  modified_base 4: mod_base = OTHER; note = 2'-O-methyl modified nucleotide
  modified_base 5: mod_base = OTHER; note = 2'-O-methyl modified nucleotide
  modified_base 8: mod_base = OTHER; note = 2'-O-methyl modified nucleotide
  modified_base 9: mod_base = OTHER; note = 2'-O-methyl modified nucleotide
  modified_base 11: mod_base = OTHER; note = 2'-O-methyl modified nucleotide
  modified_base 13: mod_base = OTHER; note = 2'-O-methyl modified nucleotide
  modified_base 18: mod_base = OTHER; note = 2'-O-methyl modified nucleotide
  modified_base 22: mod_base = OTHER; note = 2'-O-methyl modified nucleotide
  modified_base 25: mod_base = OTHER; note = 2'-O-methyl modified nucleotide
  modified_base 29: mod_base = OTHER; note = 2'-O-methyl modified nucleotide
  modified_base 30: mod_base = OTHER; note = 2'-O-methyl modified nucleotide
  modified_base 31: mod_base = OTHER; note = 2'-O-methyl modified nucleotide
  modified_base 32: mod_base = OTHER; note = 2'-O-methyl modified nucleotide
  modified_base 37: mod_base = OTHER; note = 2'-O-methyl modified nucleotide
  modified_base 38: mod_base = OTHER; note = 2'-O-methyl modified nucleotide
  modified_base 39: mod_base = OTHER; note = 2'-O-methyl modified nucleotide
  modified_base 40: mod_base = OTHER; note = 2'-O-methyl modified nucleotide
  modified_base 41: mod_base = OTHER; note = 2'-O-methyl modified nucleotide
  modified_base 42: mod_base = OTHER; note = 2'-O-methyl modified nucleotide
  modified_base 43: mod_base = OTHER; note = 2'-O-methyl modified nucleotide
  modified_base 47: mod_base = OTHER; note = 2'-O-methyl modified nucleotide
  modified_base 48: mod_base = OTHER; note = 2'-O-methyl modified nucleotide
  modified_base 51: mod_base = OTHER; note = 2'-O-methyl modified nucleotide
  modified_base 54: mod_base = OTHER; note = nucleotide with phosphorothioate linkage
  modified_base 58: mod_base = OTHER; note = 2'-O-methyl modified nucleotide
  modified_base 59: mod_base = OTHER; note = 2'-O-methyl modified nucleotide
  modified_base 61: mod_base = OTHER; note = 2'-O-methyl modified nucleotide
  modified_base 62: mod_base = OTHER; note = 2'-O-methyl modified nucleotide
  modified_base 63: mod_base = OTHER; note = 2'-O-methyl modified nucleotide
  modified_base 64: mod_base = OTHER; note = 2'-O-methyl modified nucleotide
  modified_base 65: mod_base = OTHER; note = 2'-O-methyl modified nucleotide
  modified_base 66: mod_base = OTHER; note = 2'-O-methyl modified nucleotide
  modified_base 67: mod_base = OTHER; note = 2'-O-methyl modified nucleotide
  modified_base 68: mod_base = OTHER; note = 2'-O-methyl modified nucleotide
  modified_base 69: mod_base = OTHER; note = 2'-O-methyl modified nucleotide
  modified_base 70: mod_base = OTHER; note = 2'-O-methyl modified nucleotide
  modified_base 75: mod_base = OTHER; note = 2'-O-methyl modified nucleotide
  modified_base 77: mod_base = OTHER; note = 2'-O-methyl modified nucleotide
  modified_base 80: mod_base = OTHER; note = 2'-O-methyl modified nucleotide
  modified_base 86: mod_base = OTHER; note = 2'-O-methyl modified nucleotide
  modified_base 87: mod_base = OTHER; note = 2'-O-methyl modified nucleotide
  modified_base 89: mod_base = OTHER; note = 2'-O-methyl modified nucleotide
  modified_base 90: mod_base = OTHER; note = 2'-O-methyl modified nucleotide
  modified_base 91: mod_base = OTHER; note = 2'-O-methyl modified nucleotide
  modified_base 92: mod_base = OTHER; note = 2'-O-methyl modified nucleotide
  modified_base 99: mod_base = OTHER; note = nucleotide with phosphorothioate linkage
  modified_base 100: mod_base = OTHER; note = 2'-O-methyl modified nucleotide with phosphorothioate linkage
  modified_base 101: mod_base = OTHER; note = 2'-O-methyl modified nucleotide

SEQ ID NO: 2354 - RNA, 101 nt, synthetic construct; identical to SEQ ID NO: 1354
  source 1..101: mol_type = other RNA
  modified_base 1: mod_base = OTHER; note = 2'-O-methyl modified nucleotide with phosphorothioate linkage
  modified_base 2: mod_base = OTHER; note = 2'-O-methyl modified nucleotide with phosphorothioate linkage
  modified_base 3: mod_base = OTHER; note = 2'-O-methyl modified nucleotide with phosphorothioate linkage
  modified_base 4: mod_base = OTHER; note = 2'-O-methyl modified nucleotide
  modified_base 5: mod_base = OTHER; note = 2'-O-methyl modified nucleotide
  modified_base 8: mod_base = OTHER; note = 2'-O-methyl modified nucleotide
  modified_base 9: mod_base = OTHER; note = 2'-O-methyl modified nucleotide
  modified_base 11: mod_base = OTHER; note = 2'-O-methyl modified nucleotide
  modified_base 13: mod_base = OTHER; note = 2'-O-methyl modified nucleotide
  modified_base 18: mod_base = OTHER; note = 2'-O-methyl modified nucleotide
  modified_base 22: mod_base = OTHER; note = 2'-O-methyl modified nucleotide
  modified_base 25: mod_base = OTHER; note = 2'-O-methyl modified nucleotide
  modified_base 29: mod_base = OTHER; note = 2'-O-methyl modified nucleotide
  modified_base 30: mod_base = OTHER; note = 2'-O-methyl modified nucleotide
  modified_base 31: mod_base = OTHER; note = 2'-O-methyl modified nucleotide
  modified_base 32: mod_base = OTHER; note = 2'-O-methyl modified nucleotide
  modified_base 37: mod_base = OTHER; note = 2'-O-methyl modified nucleotide
  modified_base 38: mod_base = OTHER; note = 2'-O-methyl modified nucleotide
  modified_base 39: mod_base = OTHER; note = 2'-O-methyl modified nucleotide
  modified_base 40: mod_base = OTHER; note = 2'-O-methyl modified nucleotide
  modified_base 41: mod_base = OTHER; note = 2'-O-methyl modified nucleotide
  modified_base 42: mod_base = OTHER; note = 2'-O-methyl modified nucleotide
  modified_base 43: mod_base = OTHER; note = 2'-O-methyl modified nucleotide
  modified_base 47: mod_base = OTHER; note = 2'-O-methyl modified nucleotide
  modified_base 48: mod_base = OTHER; note = 2'-O-methyl modified nucleotide
  modified_base 51: mod_base = OTHER; note = 2'-O-methyl modified nucleotide
  modified_base 54: mod_base = OTHER; note = nucleotide with phosphorothioate linkage
  modified_base 58: mod_base = OTHER; note = 2'-O-methyl modified nucleotide
  modified_base 59: mod_base = OTHER; note = 2'-O-methyl modified nucleotide
  modified_base 61: mod_base = OTHER; note = 2'-O-methyl modified nucleotide
  modified_base 62: mod_base = OTHER; note = 2'-O-methyl modified nucleotide
  modified_base 63: mod_base = OTHER; note = 2'-O-methyl modified nucleotide
  modified_base 64: mod_base = OTHER; note = 2'-O-methyl modified nucleotide
  modified_base 65: mod_base = OTHER; note = 2'-O-methyl modified nucleotide
  modified_base 66: mod_base = OTHER; note = 2'-O-methyl modified nucleotide
  modified_base 67: mod_base = OTHER; note = 2'-O-methyl modified nucleotide
  modified_base 68: mod_base = OTHER; note = 2'-O-methyl modified nucleotide
  modified_base 69: mod_base = OTHER; note = 2'-O-methyl modified nucleotide
  modified_base 70: mod_base = OTHER; note = 2'-O-methyl modified nucleotide
  modified_base 75: mod_base = OTHER; note = 2'-O-methyl modified nucleotide
  modified_base 77: mod_base = OTHER; note = 2'-O-methyl modified nucleotide
  modified_base 80: mod_base = OTHER; note = 2'-O-methyl modified nucleotide
  modified_base 86: mod_base = OTHER; note = 2'-O-methyl modified nucleotide
  modified_base 87: mod_base = OTHER; note = 2'-O-methyl modified nucleotide
  modified_base 89: mod_base = OTHER; note = 2'-O-methyl modified nucleotide
  modified_base 90: mod_base = OTHER; note = 2'-O-methyl modified nucleotide
  modified_base 91: mod_base = OTHER; note = 2'-O-methyl modified nucleotide
  modified_base 92: mod_base = OTHER; note = 2'-O-methyl modified nucleotide
  modified_base 99: mod_base = OTHER; note = nucleotide with phosphorothioate linkage
  modified_base 100: mod_base = OTHER; note = 2'-O-methyl modified nucleotide with phosphorothioate linkage
  modified_base 101: mod_base = OTHER; note = 2'-O-methyl modified nucleotide

SEQ ID NO: 2355 - RNA, 101 nt, synthetic construct; identical to SEQ ID NO: 1355
  source 1..101: mol_type = other RNA
  modified_base 1: mod_base = OTHER; note = 2'-O-methyl modified nucleotide with phosphorothioate linkage
  modified_base 2: mod_base = OTHER; note = 2'-O-methyl modified nucleotide with phosphorothioate linkage
  modified_base 3: mod_base = OTHER; note = 2'-O-methyl modified nucleotide with phosphorothioate linkage
  modified_base 4: mod_base = OTHER; note = 2'-O-methyl modified nucleotide
  modified_base 5: mod_base = OTHER; note = 2'-O-methyl modified nucleotide
  modified_base 8: mod_base = OTHER; note = 2'-O-methyl modified nucleotide
  modified_base 9: mod_base = OTHER; note = 2'-O-methyl modified nucleotide
  modified_base 11: mod_base = OTHER; note = 2'-O-methyl modified nucleotide
  modified_base 13: mod_base = OTHER; note = 2'-O-methyl modified nucleotide
  modified_base 18: mod_base = OTHER; note = 2'-O-methyl modified nucleotide
  modified_base 22: mod_base = OTHER; note = 2'-O-methyl modified nucleotide
  modified_base 25: mod_base = OTHER; note = 2'-O-methyl modified nucleotide
  modified_base 29: mod_base = OTHER; note = 2'-O-methyl modified nucleotide
  modified_base 30: mod_base = OTHER; note = 2'-O-methyl modified nucleotide
  modified_base 31: mod_base = OTHER; note = 2'-O-methyl modified nucleotide
  modified_base 32: mod_base = OTHER; note = 2'-O-methyl modified nucleotide
  modified_base 37: mod_base = OTHER; note = 2'-O-methyl modified nucleotide
  modified_base 38: mod_base = OTHER; note = 2'-O-methyl modified nucleotide
  modified_base 39: mod_base = OTHER; note = 2'-O-methyl modified nucleotide
  modified_base 40: mod_base = OTHER; note = 2'-O-methyl modified nucleotide
  modified_base 41: mod_base = OTHER; note = 2'-O-methyl modified nucleotide
  modified_base 42: mod_base = OTHER; note = 2'-O-methyl modified nucleotide
  modified_base 43: mod_base = OTHER; note = 2'-O-methyl modified nucleotide
  modified_base 47: mod_base = OTHER; note = 2'-O-methyl modified nucleotide
  modified_base 48: mod_base = OTHER; note = 2'-O-methyl modified nucleotide
  modified_base 51: mod_base = OTHER; note = 2'-O-methyl modified nucleotide
  modified_base 54: mod_base = OTHER; note = nucleotide with phosphorothioate linkage
  modified_base 58: mod_base = OTHER; note = 2'-O-methyl modified nucleotide
  modified_base 59: mod_base = OTHER; note = 2'-O-methyl modified nucleotide
  modified_base 61: mod_base = OTHER; note = 2'-O-methyl modified nucleotide
  modified_base 62: mod_base = OTHER; note = 2'-O-methyl modified nucleotide
  modified_base 63: mod_base = OTHER; note = 2'-O-methyl modified nucleotide
  modified_base 64: mod_base = OTHER; note = 2'-O-methyl modified nucleotide
  modified_base 65: mod_base = OTHER; note = 2'-O-methyl modified nucleotide
  modified_base 66: mod_base = OTHER; note = 2'-O-methyl modified nucleotide
  modified_base 67: mod_base = OTHER; note = 2'-O-methyl modified nucleotide
  modified_base 68: mod_base = OTHER; note = 2'-O-methyl modified nucleotide
  modified_base 69: mod_base = OTHER; note = 2'-O-methyl modified nucleotide
  modified_base 70: mod_base = OTHER; note = 2'-O-methyl modified nucleotide
  modified_base 75: mod_base = OTHER; note = 2'-O-methyl modified nucleotide
  modified_base 77: mod_base = OTHER; note = 2'-O-methyl modified nucleotide
  modified_base 80: mod_base = OTHER; note = 2'-O-methyl modified nucleotide
  modified_base 86: mod_base = OTHER; note = 2'-O-methyl modified nucleotide
  modified_base 87: mod_base = OTHER; note = 2'-O-methyl modified nucleotide
  modified_base 89: mod_base = OTHER; note = 2'-O-methyl modified nucleotide
  modified_base 90: mod_base = OTHER; note = 2'-O-methyl modified nucleotide
  modified_base 91: mod_base = OTHER; note = 2'-O-methyl modified nucleotide
  modified_base 92: mod_base = OTHER; note = 2'-O-methyl modified nucleotide
  modified_base 99: mod_base = OTHER; note = nucleotide with phosphorothioate linkage
  modified_base 100: mod_base = OTHER; note = 2'-O-methyl modified nucleotide with phosphorothioate linkage
  modified_base 101: mod_base = OTHER; note = 2'-O-methyl modified nucleotide

SEQ ID NO: 2356 - RNA, 101 nt, synthetic construct; identical to SEQ ID NO: 1356
  source 1..101: mol_type = other RNA
  modified_base 1: mod_base = OTHER; note = 2'-O-methyl modified nucleotide with phosphorothioate linkage
  modified_base 2: mod_base = OTHER; note = 2'-O-methyl modified nucleotide with phosphorothioate linkage
  modified_base 3: mod_base = OTHER; note = 2'-O-methyl modified nucleotide with phosphorothioate linkage
  modified_base 4: mod_base = OTHER; note = 2'-O-methyl modified nucleotide
  modified_base 5: mod_base = OTHER; note = 2'-O-methyl modified nucleotide
  modified_base 8: mod_base = OTHER; note = 2'-O-methyl modified nucleotide
  modified_base 9: mod_base = OTHER; note = 2'-O-methyl modified nucleotide
  modified_base 11: mod_base = OTHER; note = 2'-O-methyl modified nucleotide
  modified_base 13: mod_base = OTHER; note = 2'-O-methyl modified nucleotide
  modified_base 18: mod_base = OTHER; note = 2'-O-methyl modified nucleotide
  modified_base 22: mod_base = OTHER; note = 2'-O-methyl modified nucleotide
  modified_base 25: mod_base = OTHER; note = 2'-O-methyl modified nucleotide
  modified_base 29: mod_base = OTHER; note = 2'-O-methyl modified nucleotide
  modified_base 30: mod_base = OTHER; note = 2'-O-methyl modified nucleotide
  modified_base 31: mod_base = OTHER; note = 2'-O-methyl modified nucleotide
  modified_base 32: mod_base = OTHER; note = 2'-O-methyl modified nucleotide
  modified_base 37: mod_base = OTHER; note = 2'-O-methyl modified nucleotide
  modified_base 38: mod_base = OTHER; note = 2'-O-methyl modified nucleotide
  modified_base 39: mod_base = OTHER; note = 2'-O-methyl modified nucleotide
  modified_base 40: mod_base = OTHER; note = 2'-O-methyl modified nucleotide
  modified_base 41: mod_base = OTHER; note = 2'-O-methyl modified nucleotide
  modified_base 42: mod_base = OTHER; note = 2'-O-methyl modified nucleotide
  modified_base 43: mod_base = OTHER; note = 2'-O-methyl modified nucleotide
  modified_base 47: mod_base = OTHER; note = 2'-O-methyl modified nucleotide
  modified_base 48: mod_base = OTHER; note = 2'-O-methyl modified nucleotide
  modified_base 51: mod_base = OTHER; note = 2'-O-methyl modified nucleotide
  modified_base 54: mod_base = OTHER; note = nucleotide with phosphorothioate linkage
  modified_base 58: mod_base = OTHER; note = 2'-O-methyl modified nucleotide
  modified_base 59: mod_base = OTHER; note = 2'-O-methyl modified nucleotide
  modified_base 61: mod_base = OTHER; note = 2'-O-methyl modified nucleotide
  modified_base 62: mod_base = OTHER; note = 2'-O-methyl modified nucleotide
  modified_base 63: mod_base = OTHER; note = 2'-O-methyl modified nucleotide
  modified_base 64: mod_base = OTHER; note = 2'-O-methyl modified nucleotide
  modified_base 65: mod_base = OTHER; note = 2'-O-methyl modified nucleotide
  modified_base 66: mod_base = OTHER; note = 2'-O-methyl modified nucleotide
  modified_base 67: mod_base = OTHER; note = 2'-O-methyl modified nucleotide
  modified_base 68: mod_base = OTHER; note = 2'-O-methyl modified nucleotide
  modified_base 69: mod_base = OTHER; note = 2'-O-methyl modified nucleotide
  modified_base 70: mod_base = OTHER; note = 2'-O-methyl modified nucleotide
  modified_base 75: mod_base = OTHER; note = 2'-O-methyl modified nucleotide
  modified_base 77: mod_base = OTHER; note = 2'-O-methyl modified nucleotide
  modified_base 80: mod_base = OTHER; note = 2'-O-methyl modified nucleotide
  modified_base 86: mod_base = OTHER; note = 2'-O-methyl modified nucleotide
  modified_base 87: mod_base = OTHER; note = 2'-O-methyl modified nucleotide
  modified_base 89: mod_base = OTHER; note = 2'-O-methyl modified nucleotide
  modified_base 90: mod_base = OTHER; note = 2'-O-methyl modified nucleotide
  modified_base 91: mod_base = OTHER; note = 2'-O-methyl modified nucleotide
  modified_base 92: mod_base = OTHER; note = 2'-O-methyl modified nucleotide
  modified_base 99: mod_base = OTHER; note = nucleotide with phosphorothioate linkage
  modified_base 100: mod_base = OTHER; note = 2'-O-methyl modified nucleotide with phosphorothioate linkage
  modified_base 101: mod_base = OTHER; note = 2'-O-methyl modified nucleotide

SEQ ID NO: 2357 - RNA, 101 nt, synthetic construct; identical to SEQ ID NO: 1357
  source 1..101: mol_type = other RNA
  modified_base 1: mod_base = OTHER; note = 2'-O-methyl modified nucleotide with phosphorothioate linkage
  modified_base 2: mod_base = OTHER; note = 2'-O-methyl modified nucleotide with phosphorothioate linkage
  modified_base 3: mod_base = OTHER; note = 2'-O-methyl modified nucleotide with phosphorothioate linkage
  modified_base 4: mod_base = OTHER; note = 2'-O-methyl modified nucleotide
  modified_base 5: mod_base = OTHER; note = 2'-O-methyl modified nucleotide
  modified_base 8: mod_base = OTHER; note = 2'-O-methyl modified nucleotide
  modified_base 9: mod_base = OTHER; note = 2'-O-methyl modified nucleotide
  modified_base 11: mod_base = OTHER; note = 2'-O-methyl modified nucleotide
  modified_base 13: mod_base = OTHER; note = 2'-O-methyl modified nucleotide
  modified_base 18: mod_base = OTHER; note = 2'-O-methyl modified nucleotide
  modified_base 22: mod_base = OTHER; note = 2'-O-methyl modified nucleotide
  modified_base 25: mod_base = OTHER; note = 2'-O-methyl modified nucleotide
  modified_base 29: mod_base = OTHER; note = 2'-O-methyl modified nucleotide
  modified_base 30: mod_base = OTHER; note = 2'-O-methyl modified nucleotide
  modified_base 31: mod_base = OTHER; note = 2'-O-methyl modified nucleotide
  modified_base 32: mod_base = OTHER; note = 2'-O-methyl modified nucleotide
  modified_base 37: mod_base = OTHER; note = 2'-O-methyl modified nucleotide
  modified_base 38: mod_base = OTHER; note = 2'-O-methyl modified nucleotide
  modified_base 39: mod_base = OTHER; note = 2'-O-methyl modified nucleotide
  modified_base 40: mod_base = OTHER; note = 2'-O-methyl modified nucleotide
  modified_base 41: mod_base = OTHER; note = 2'-O-methyl modified nucleotide
  modified_base 42: mod_base = OTHER; note = 2'-O-methyl modified nucleotide
  modified_base 43: mod_base = OTHER; note = 2'-O-methyl modified nucleotide
  modified_base 47: mod_base = OTHER; note = 2'-O-methyl modified nucleotide
  modified_base 48: mod_base = OTHER; note = 2'-O-methyl modified nucleotide
  modified_base 51: mod_base = OTHER; note = 2'-O-methyl modified nucleotide
  modified_base 54: mod_base = OTHER; note = nucleotide with phosphorothioate linkage
  modified_base 58: mod_base = OTHER; note = 2'-O-methyl modified nucleotide
  modified_base 59: mod_base = OTHER; note = 2'-O-methyl modified nucleotide
  modified_base 61: mod_base = OTHER; note = 2'-O-methyl modified nucleotide
  modified_base 62: mod_base = OTHER; note = 2'-O-methyl modified nucleotide
  modified_base 63: mod_base = OTHER; note = 2'-O-methyl modified nucleotide
  modified_base 64: mod_base = OTHER; note = 2'-O-methyl modified nucleotide
  modified_base 65: mod_base = OTHER; note = 2'-O-methyl modified nucleotide
  modified_base 66: mod_base = OTHER; note = 2'-O-methyl modified nucleotide
  modified_base 67: mod_base = OTHER; note = 2'-O-methyl modified nucleotide
  modified_base 68: mod_base = OTHER; note = 2'-O-methyl modified nucleotide
  modified_base 69: mod_base = OTHER; note = 2'-O-methyl modified nucleotide
  modified_base 70: mod_base = OTHER; note = 2'-O-methyl modified nucleotide
  modified_base 75: mod_base = OTHER; note = 2'-O-methyl modified nucleotide
  modified_base 77: mod_base = OTHER; note = 2'-O-methyl modified nucleotide
  modified_base 80: mod_base = OTHER; note = 2'-O-methyl modified nucleotide
  modified_base 86: mod_base = OTHER; note = 2'-O-methyl modified nucleotide
  modified_base 87: mod_base = OTHER; note = 2'-O-methyl modified nucleotide
  modified_base 89: mod_base = OTHER; note = 2'-O-methyl modified nucleotide
  modified_base 90: mod_base = OTHER; note = 2'-O-methyl modified nucleotide
  modified_base 91: mod_base = OTHER; note = 2'-O-methyl modified nucleotide
  modified_base 92: mod_base = OTHER; note = 2'-O-methyl modified nucleotide
  modified_base 99: mod_base = OTHER; note = nucleotide with phosphorothioate linkage
  modified_base 100: mod_base = OTHER; note = 2'-O-methyl modified nucleotide with phosphorothioate linkage
  modified_base 101: mod_base = OTHER; note = 2'-O-methyl modified nucleotide

SEQ ID NO: 2358 - RNA, 101 nt, synthetic construct; identical to SEQ ID NO: 1358
  source 1..101: mol_type = other RNA
  modified_base 1: mod_base = OTHER; note = 2'-O-methyl modified nucleotide with phosphorothioate linkage
  modified_base 2: mod_base = OTHER; note = 2'-O-methyl modified nucleotide with phosphorothioate linkage
  modified_base 3: mod_base = OTHER; note = 2'-O-methyl modified nucleotide with phosphorothioate linkage
  modified_base 4: mod_base = OTHER; note = 2'-O-methyl modified nucleotide
  modified_base 5: mod_base = OTHER; note = 2'-O-methyl modified nucleotide
  modified_base 8: mod_base = OTHER; note = 2'-O-methyl modified nucleotide
  modified_base 9: mod_base = OTHER; note = 2'-O-methyl modified nucleotide
  modified_base 11: mod_base = OTHER; note = 2'-O-methyl modified nucleotide
  modified_base 13: mod_base = OTHER; note = 2'-O-methyl modified nucleotide
  modified_base 18: mod_base = OTHER; note = 2'-O-methyl modified nucleotide
  modified_base 22: mod_base = OTHER; note = 2'-O-methyl modified nucleotide
  modified_base 25: mod_base = OTHER; note = 2'-O-methyl modified nucleotide
  modified_base 29: mod_base = OTHER; note = 2'-O-methyl modified nucleotide
  modified_base 30: mod_base = OTHER; note = 2'-O-methyl modified nucleotide
  modified_base 31: mod_base = OTHER; note = 2'-O-methyl modified nucleotide
  modified_base 32: mod_base = OTHER; note = 2'-O-methyl modified nucleotide
  modified_base 37: mod_base = OTHER; note = 2'-O-methyl modified nucleotide
  modified_base 38: mod_base = OTHER; note = 2'-O-methyl modified nucleotide
  modified_base 39: mod_base = OTHER; note = 2'-O-methyl modified nucleotide
  modified_base 40: mod_base = OTHER; note = 2'-O-methyl modified nucleotide
  modified_base 41: mod_base = OTHER; note = 2'-O-methyl modified nucleotide
  modified_base 42: mod_base = OTHER; note = 2'-O-methyl modified nucleotide
  modified_base 43: mod_base = OTHER; note = 2'-O-methyl modified nucleotide
  modified_base 47: mod_base = OTHER; note = 2'-O-methyl modified nucleotide
  modified_base 48: mod_base = OTHER; note = 2'-O-methyl modified nucleotide
  modified_base 51: mod_base = OTHER; note = 2'-O-methyl modified nucleotide
  modified_base 54: mod_base = OTHER; note = nucleotide with phosphorothioate linkage
  modified_base 58: mod_base = OTHER; note = 2'-O-methyl modified nucleotide
  modified_base 59: mod_base = OTHER; note = 2'-O-methyl modified nucleotide
  modified_base 61: mod_base = OTHER; note = 2'-O-methyl modified nucleotide
  modified_base 62: mod_base = OTHER; note = 2'-O-methyl modified nucleotide
  modified_base 63: mod_base = OTHER; note = 2'-O-methyl modified nucleotide
  modified_base 64: mod_base = OTHER; note = 2'-O-methyl modified nucleotide
  modified_base 65: mod_base = OTHER; note = 2'-O-methyl modified nucleotide
  modified_base 66: mod_base = OTHER; note = 2'-O-methyl modified nucleotide
  modified_base 67: mod_base = OTHER; note = 2'-O-methyl modified nucleotide
  modified_base 68: mod_base = OTHER; note = 2'-O-methyl modified nucleotide
  modified_base 69: mod_base = OTHER; note = 2'-O-methyl modified nucleotide
  modified_base 70: mod_base = OTHER; note = 2'-O-methyl modified nucleotide
  modified_base 75: mod_base = OTHER; note = 2'-O-methyl modified nucleotide
  modified_base 77: mod_base = OTHER; note = 2'-O-methyl modified nucleotide
  modified_base 80: mod_base = OTHER; note = 2'-O-methyl modified nucleotide
  modified_base 86: mod_base = OTHER; note = 2'-O-methyl modified nucleotide
  modified_base 87: mod_base = OTHER; note = 2'-O-methyl modified nucleotide
  modified_base 89: mod_base = OTHER; note = 2'-O-methyl modified nucleotide
  modified_base 90: mod_base = OTHER; note = 2'-O-methyl modified nucleotide
  modified_base 91: mod_base = OTHER; note = 2'-O-methyl modified nucleotide
  modified_base 92: mod_base = OTHER; note = 2'-O-methyl modified nucleotide
  modified_base 99: mod_base = OTHER; note = nucleotide with phosphorothioate linkage
  modified_base 100: mod_base = OTHER; note = 2'-O-methyl modified nucleotide with phosphorothioate linkage
  modified_base 101: mod_base = OTHER; note = 2'-O-methyl modified nucleotide

SEQ ID NO: 2359 - RNA, 101 nt, synthetic construct; identical to SEQ ID NO: 1359
  source 1..101: mol_type = other RNA
  modified_base 1: mod_base = OTHER; note = 2'-O-methyl modified nucleotide with phosphorothioate linkage
  modified_base 2: mod_base = OTHER; note = 2'-O-methyl modified nucleotide with phosphorothioate linkage
  modified_base 3: mod_base = OTHER; note = 2'-O-methyl modified nucleotide with phosphorothioate linkage
  modified_base 4: mod_base = OTHER; note = 2'-O-methyl modified nucleotide
  modified_base 5: mod_base = OTHER; note = 2'-O-methyl modified nucleotide
  modified_base 8: mod_base = OTHER; note = 2'-O-methyl modified nucleotide
  modified_base 9: mod_base = OTHER; note = 2'-O-methyl modified nucleotide
  modified_base 11: mod_base = OTHER; note = 2'-O-methyl modified nucleotide
  modified_base 13: mod_base = OTHER; note = 2'-O-methyl modified nucleotide
  modified_base 18: mod_base = OTHER; note = 2'-O-methyl modified nucleotide
  modified_base 22: mod_base = OTHER; note = 2'-O-methyl modified nucleotide
  modified_base 25: mod_base = OTHER; note = 2'-O-methyl modified nucleotide
  modified_base 29: mod_base = OTHER; note = 2'-O-methyl modified nucleotide
  modified_base 30: mod_base = OTHER; note = 2'-O-methyl modified nucleotide
  modified_base 31: mod_base = OTHER; note = 2'-O-methyl modified nucleotide
  modified_base 32: mod_base = OTHER; note = 2'-O-methyl modified nucleotide
  modified_base 37: mod_base = OTHER; note = 2'-O-methyl modified nucleotide
  modified_base 38: mod_base = OTHER; note = 2'-O-methyl modified nucleotide
  modified_base 39: mod_base = OTHER; note = 2'-O-methyl modified nucleotide
  modified_base 40: mod_base = OTHER; note = 2'-O-methyl modified nucleotide
  modified_base 41: mod_base = OTHER; note = 2'-O-methyl modified nucleotide
  modified_base 42: mod_base = OTHER; note = 2'-O-methyl modified nucleotide
  modified_base 43: mod_base = OTHER; note = 2'-O-methyl modified nucleotide
  modified_base 47: mod_base = OTHER; note = 2'-O-methyl modified nucleotide
  modified_base 48: mod_base = OTHER; note = 2'-O-methyl modified nucleotide
  modified_base 51: mod_base = OTHER; note = 2'-O-methyl modified nucleotide
  modified_base 54: mod_base = OTHER; note = nucleotide with phosphorothioate linkage
  modified_base 58: mod_base = OTHER; note = 2'-O-methyl modified nucleotide
  modified_base 59: mod_base = OTHER; note = 2'-O-methyl modified nucleotide
  modified_base 61: mod_base = OTHER; note = 2'-O-methyl modified nucleotide
  modified_base 62: mod_base = OTHER; note = 2'-O-methyl modified nucleotide
  modified_base 63: mod_base = OTHER; note = 2'-O-methyl modified nucleotide
  modified_base 64: mod_base = OTHER; note = 2'-O-methyl modified nucleotide
  modified_base 65: mod_base = OTHER; note = 2'-O-methyl modified nucleotide
  modified_base 66: mod_base = OTHER; note = 2'-O-methyl modified nucleotide
  modified_base 67: mod_base = OTHER; note = 2'-O-methyl modified nucleotide
  modified_base 68: mod_base = OTHER; note = 2'-O-methyl modified nucleotide
  modified_base 69: mod_base = OTHER; note = 2'-O-methyl modified nucleotide
  modified_base 70: mod_base = OTHER; note = 2'-O-methyl modified nucleotide
  modified_base 75: mod_base = OTHER; note = 2'-O-methyl modified nucleotide
  modified_base 77: mod_base = OTHER; note = 2'-O-methyl modified nucleotide
  modified_base 80: mod_base = OTHER; note = 2'-O-methyl modified nucleotide
  modified_base 86: mod_base = OTHER; note = 2'-O-methyl modified nucleotide
  modified_base 87: mod_base = OTHER; note = 2'-O-methyl modified nucleotide
  modified_base 89: mod_base = OTHER; note = 2'-O-methyl modified nucleotide
  modified_base 90: mod_base = OTHER; note = 2'-O-methyl modified nucleotide
  modified_base 91: mod_base = OTHER; note = 2'-O-methyl modified nucleotide
  modified_base 92: mod_base = OTHER; note = 2'-O-methyl modified nucleotide
  modified_base 99: mod_base = OTHER; note = nucleotide with phosphorothioate linkage
  modified_base 100: mod_base = OTHER; note = 2'-O-methyl modified nucleotide with phosphorothioate linkage
  modified_base 101: mod_base = OTHER; note = 2'-O-methyl modified nucleotide

SEQ ID NO: 2360 - RNA, 101 nt, synthetic construct; identical to SEQ ID NO: 1360
  source 1..101: mol_type = other RNA
  modified_base 1: mod_base = OTHER; note = 2'-O-methyl modified nucleotide with phosphorothioate linkage
  modified_base 2: mod_base = OTHER; note = 2'-O-methyl modified nucleotide with phosphorothioate linkage
  modified_base 3: mod_base = OTHER; note = 2'-O-methyl modified nucleotide with phosphorothioate linkage
  modified_base 4: mod_base = OTHER; note = 2'-O-methyl modified nucleotide
  modified_base 5: mod_base = OTHER; note = 2'-O-methyl modified nucleotide
  modified_base 8: mod_base = OTHER; note = 2'-O-methyl modified nucleotide
  modified_base 9: mod_base = OTHER; note = 2'-O-methyl modified nucleotide
  modified_base 11: mod_base = OTHER; note = 2'-O-methyl modified nucleotide
  modified_base 13: mod_base = OTHER; note = 2'-O-methyl modified nucleotide
  modified_base 18: mod_base = OTHER; note = 2'-O-methyl modified nucleotide
  modified_base 22: mod_base = OTHER; note = 2'-O-methyl modified nucleotide
  modified_base 25: mod_base = OTHER; note = 2'-O-methyl modified nucleotide
  modified_base 29: mod_base = OTHER; note = 2'-O-methyl modified nucleotide
  modified_base 30: mod_base = OTHER; note = 2'-O-methyl modified nucleotide
  modified_base 31: mod_base = OTHER; note = 2'-O-methyl modified nucleotide
  modified_base 32: mod_base = OTHER; note = 2'-O-methyl modified nucleotide
  modified_base 37: mod_base = OTHER; note = 2'-O-methyl modified nucleotide
  modified_base 38: mod_base = OTHER; note = 2'-O-methyl modified nucleotide
  modified_base 39: mod_base = OTHER; note = 2'-O-methyl modified nucleotide
  modified_base 40: mod_base = OTHER; note = 2'-O-methyl modified nucleotide
  modified_base 41: mod_base = OTHER; note = 2'-O-methyl modified nucleotide
  modified_base 42: mod_base = OTHER; note = 2'-O-methyl modified nucleotide
  modified_base 43: mod_base = OTHER; note = 2'-O-methyl modified nucleotide
  modified_base 47: mod_base = OTHER; note = 2'-O-methyl modified nucleotide
  modified_base 48: mod_base = OTHER; note = 2'-O-methyl modified nucleotide
  modified_base 51: mod_base = OTHER; note = 2'-O-methyl modified nucleotide
  modified_base 54: mod_base = OTHER; note = nucleotide with phosphorothioate linkage
  modified_base 58: mod_base = OTHER; note = 2'-O-methyl modified nucleotide
  modified_base 59: mod_base = OTHER; note = 2'-O-methyl modified nucleotide
  modified_base 61: mod_base = OTHER; note = 2'-O-methyl modified nucleotide
  modified_base 62: mod_base = OTHER; note = 2'-O-methyl modified nucleotide
  modified_base 63: mod_base = OTHER; note = 2'-O-methyl modified nucleotide
  modified_base 64: mod_base = OTHER; note = 2'-O-methyl modified nucleotide
  modified_base 65: mod_base = OTHER; note = 2'-O-methyl modified nucleotide
  modified_base 66: mod_base = OTHER; note = 2'-O-methyl modified nucleotide
  modified_base 67: mod_base = OTHER; note = 2'-O-methyl modified nucleotide
  modified_base 68: mod_base = OTHER; note = 2'-O-methyl modified nucleotide
  modified_base 69: mod_base = OTHER; note = 2'-O-methyl modified nucleotide
  modified_base 70: mod_base = OTHER; note = 2'-O-methyl modified nucleotide
  modified_base 75: mod_base = OTHER; note = 2'-O-methyl modified nucleotide
  modified_base 77: mod_base = OTHER; note = 2'-O-methyl modified nucleotide
  modified_base 80: mod_base = OTHER; note = 2'-O-methyl modified nucleotide
  modified_base 86: mod_base = OTHER; note = 2'-O-methyl modified nucleotide
  modified_base 87: mod_base = OTHER; note = 2'-O-methyl modified nucleotide
  modified_base 89: mod_base = OTHER; note = 2'-O-methyl modified nucleotide
  modified_base 90: mod_base = OTHER; note = 2'-O-methyl modified nucleotide
  modified_base 91: mod_base = OTHER; note = 2'-O-methyl modified nucleotide
  modified_base 92: mod_base = OTHER; note = 2'-O-methyl modified nucleotide
  modified_base 99: mod_base = OTHER; note = nucleotide with phosphorothioate linkage
  modified_base 100: mod_base = OTHER; note = 2'-O-methyl modified nucleotide with phosphorothioate linkage
  modified_base 101: mod_base = OTHER; note = 2'-O-methyl modified nucleotide

SEQ ID NO: 2361 - RNA, 101 nt, synthetic construct; identical to SEQ ID NO: 1361
  source 1..101: mol_type = other RNA
  modified_base 1: mod_base = OTHER; note = 2'-O-methyl modified nucleotide with phosphorothioate linkage
  modified_base 2: mod_base = OTHER; note = 2'-O-methyl modified nucleotide with phosphorothioate linkage
  modified_base 3: mod_base = OTHER; note = 2'-O-methyl modified nucleotide with phosphorothioate linkage
  modified_base 4: mod_base = OTHER; note = 2'-O-methyl modified nucleotide
  modified_base 5: mod_base = OTHER; note = 2'-O-methyl modified nucleotide
  modified_base 8: mod_base = OTHER; note = 2'-O-methyl modified nucleotide
  modified_base 9: mod_base = OTHER; note = 2'-O-methyl modified nucleotide
  modified_base 11: mod_base = OTHER; note = 2'-O-methyl modified nucleotide
  modified_base 13: mod_base = OTHER; note = 2'-O-methyl modified nucleotide
  modified_base 18: mod_base = OTHER; note = 2'-O-methyl modified nucleotide
  modified_base 22: mod_base = OTHER; note = 2'-O-methyl modified nucleotide
  modified_base 25: mod_base = OTHER; note = 2'-O-methyl modified nucleotide
  modified_base 29: mod_base = OTHER; note = 2'-O-methyl modified nucleotide
  modified_base 30: mod_base = OTHER; note = 2'-O-methyl modified nucleotide
  modified_base 31: mod_base = OTHER; note = 2'-O-methyl modified nucleotide
  modified_base 32: mod_base = OTHER; note = 2'-O-methyl modified nucleotide
  modified_base 37: mod_base = OTHER; note = 2'-O-methyl modified nucleotide
  modified_base 38: mod_base = OTHER; note = 2'-O-methyl modified nucleotide
  modified_base 39: mod_base = OTHER; note = 2'-O-methyl modified nucleotide
  modified_base 40: mod_base = OTHER; note = 2'-O-methyl modified nucleotide
  modified_base 41: mod_base = OTHER; note = 2'-O-methyl modified nucleotide
  modified_base 42: mod_base = OTHER; note = 2'-O-methyl modified nucleotide
  modified_base 43: mod_base = OTHER; note = 2'-O-methyl modified nucleotide
  modified_base 47: mod_base = OTHER; note = 2'-O-methyl modified nucleotide
  modified_base 48: mod_base = OTHER; note = 2'-O-methyl modified nucleotide
  modified_base 51: mod_base = OTHER; note = 2'-O-methyl modified nucleotide
  modified_base 54: mod_base = OTHER; note = nucleotide with phosphorothioate linkage
  modified_base 58: mod_base = OTHER; note = 2'-O-methyl modified nucleotide
  modified_base 59: mod_base = OTHER; note = 2'-O-methyl modified nucleotide
  modified_base 61: mod_base = OTHER; note = 2'-O-methyl modified nucleotide
  modified_base 62: mod_base = OTHER; note = 2'-O-methyl modified nucleotide
  modified_base 63: mod_base = OTHER; note = 2'-O-methyl modified nucleotide
  modified_base 64: mod_base = OTHER; note = 2'-O-methyl modified nucleotide
  modified_base 65: mod_base = OTHER; note = 2'-O-methyl modified nucleotide
  modified_base 66: mod_base = OTHER; note = 2'-O-methyl modified nucleotide
  modified_base 67: mod_base = OTHER; note = 2'-O-methyl modified nucleotide
  modified_base 68: mod_base = OTHER; note = 2'-O-methyl modified nucleotide
  modified_base 69: mod_base = OTHER; note = 2'-O-methyl modified nucleotide
  modified_base 70: mod_base = OTHER; note = 2'-O-methyl modified nucleotide
  modified_base 75: mod_base = OTHER; note = 2'-O-methyl modified nucleotide
  modified_base 77: mod_base = OTHER; note = 2'-O-methyl modified nucleotide
  modified_base 80: mod_base = OTHER; note = 2'-O-methyl modified nucleotide
  modified_base 86: mod_base = OTHER; note = 2'-O-methyl modified nucleotide
  modified_base 87: mod_base = OTHER; note = 2'-O-methyl modified nucleotide
  modified_base 89: mod_base = OTHER; note = 2'-O-methyl modified nucleotide
  modified_base 90: mod_base = OTHER; note = 2'-O-methyl modified nucleotide
  modified_base 91: mod_base = OTHER; note = 2'-O-methyl modified nucleotide
  modified_base 92: mod_base = OTHER; note = 2'-O-methyl modified nucleotide
  modified_base 99: mod_base = OTHER; note = nucleotide with phosphorothioate linkage
  modified_base 100: mod_base = OTHER; note = 2'-O-methyl modified nucleotide with phosphorothioate linkage
  modified_base 101: mod_base = OTHER; note = 2'-O-methyl modified nucleotide

SEQ ID NO: 2362 - RNA, 101 nt, synthetic construct; identical to SEQ ID NO: 1362
  source 1..101: mol_type = other RNA
  modified_base 1: mod_base = OTHER; note = 2'-O-methyl modified nucleotide with phosphorothioate linkage
  modified_base 2: mod_base = OTHER; note = 2'-O-methyl modified nucleotide with phosphorothioate linkage
  modified_base 3: mod_base = OTHER; note = 2'-O-methyl modified nucleotide with phosphorothioate linkage
  modified_base 4: mod_base = OTHER; note = 2'-O-methyl modified nucleotide
  modified_base 5: mod_base = OTHER; note = 2'-O-methyl modified nucleotide
  modified_base 8: mod_base = OTHER; note = 2'-O-methyl modified nucleotide
  modified_base 9: mod_base = OTHER; note = 2'-O-methyl modified nucleotide
  modified_base 11: mod_base = OTHER; note = 2'-O-methyl modified nucleotide
  modified_base 13: mod_base = OTHER; note = 2'-O-methyl modified nucleotide
  modified_base 18: mod_base = OTHER; note = 2'-O-methyl modified nucleotide
  modified_base 22: mod_base = OTHER; note = 2'-O-methyl modified nucleotide
  modified_base 25: mod_base = OTHER; note = 2'-O-methyl modified nucleotide
  modified_base 29: mod_base = OTHER; note = 2'-O-methyl modified nucleotide
  modified_base 30: mod_base = OTHER; note = 2'-O-methyl modified nucleotide
  modified_base 31: mod_base = OTHER; note = 2'-O-methyl modified nucleotide
  modified_base 32: mod_base = OTHER; note = 2'-O-methyl modified nucleotide
  modified_base 37: mod_base = OTHER; note = 2'-O-methyl modified nucleotide
  modified_base 38: mod_base = OTHER; note = 2'-O-methyl modified nucleotide
  modified_base 39: mod_base = OTHER; note = 2'-O-methyl modified nucleotide
  modified_base 40: mod_base = OTHER; note = 2'-O-methyl modified nucleotide
  modified_base 41: mod_base = OTHER; note = 2'-O-methyl modified nucleotide
  modified_base 42: mod_base = OTHER; note = 2'-O-methyl modified nucleotide
  modified_base 43: mod_base = OTHER; note = 2'-O-methyl modified nucleotide
  modified_base 47: mod_base = OTHER; note = 2'-O-methyl modified nucleotide
  modified_base 48: mod_base = OTHER; note = 2'-O-methyl modified nucleotide
  modified_base 51: mod_base = OTHER; note = 2'-O-methyl modified nucleotide
  modified_base 54: mod_base = OTHER; note = nucleotide with phosphorothioate linkage
  modified_base 58: mod_base = OTHER; note = 2'-O-methyl modified nucleotide
  modified_base 59: mod_base = OTHER; note = 2'-O-methyl modified nucleotide
  modified_base 61: mod_base = OTHER; note = 2'-O-methyl modified nucleotide
  modified_base 62: mod_base = OTHER; note = 2'-O-methyl modified nucleotide
  modified_base 63: mod_base = OTHER; note = 2'-O-methyl modified nucleotide
  modified_base 64: mod_base = OTHER; note = 2'-O-methyl modified nucleotide
  modified_base 65: mod_base = OTHER; note = 2'-O-methyl modified nucleotide
  modified_base 66: mod_base = OTHER; note = 2'-O-methyl modified nucleotide
  modified_base 67: mod_base = OTHER; note = 2'-O-methyl modified nucleotide
  modified_base 68: mod_base = OTHER; note = 2'-O-methyl modified nucleotide
  modified_base 69: mod_base = OTHER; note = 2'-O-methyl modified nucleotide
  modified_base 70: mod_base = OTHER; note = 2'-O-methyl modified nucleotide
  modified_base 75: mod_base = OTHER; note = 2'-O-methyl modified nucleotide
  modified_base 77: mod_base = OTHER; note = 2'-O-methyl modified nucleotide
  modified_base 80: mod_base = OTHER; note = 2'-O-methyl modified nucleotide
  modified_base 86: mod_base = OTHER; note = 2'-O-methyl modified nucleotide
  modified_base 87: mod_base = OTHER; note = 2'-O-methyl modified nucleotide
  modified_base 89: mod_base = OTHER; note = 2'-O-methyl modified nucleotide
  modified_base 90: mod_base = OTHER; note = 2'-O-methyl modified nucleotide
  modified_base 91: mod_base = OTHER; note = 2'-O-methyl modified nucleotide
  modified_base 92: mod_base = OTHER; note = 2'-O-methyl modified nucleotide
  modified_base 99: mod_base = OTHER; note = nucleotide with phosphorothioate linkage
  modified_base 100: mod_base = OTHER; note = 2'-O-methyl modified nucleotide with phosphorothioate linkage
  modified_base 101: mod_base = OTHER; note = 2'-O-methyl modified nucleotide

SEQ ID NO: 2363 - RNA, 101 nt, synthetic construct; identical to SEQ ID NO: 1363
  source 1..101: mol_type = other RNA
  modified_base 1: mod_base = OTHER; note = 2'-O-methyl modified nucleotide with phosphorothioate linkage
  modified_base 2: mod_base = OTHER; note = 2'-O-methyl modified nucleotide with phosphorothioate linkage
  modified_base 3: mod_base = OTHER; note = 2'-O-methyl modified nucleotide with phosphorothioate linkage
  modified_base 4: mod_base = OTHER; note = 2'-O-methyl modified nucleotide
  modified_base 5: mod_base = OTHER; note = 2'-O-methyl modified nucleotide
  modified_base 8: mod_base = OTHER; note = 2'-O-methyl modified nucleotide
  modified_base 9: mod_base = OTHER; note = 2'-O-methyl modified nucleotide
  modified_base 11: mod_base = OTHER; note = 2'-O-methyl modified nucleotide
  modified_base 13: mod_base = OTHER; note = 2'-O-methyl modified nucleotide
  modified_base 18: mod_base = OTHER; note = 2'-O-methyl modified nucleotide
  modified_base 22: mod_base = OTHER; note = 2'-O-methyl modified nucleotide
  modified_base 25: mod_base = OTHER; note = 2'-O-methyl modified nucleotide
  modified_base 29: mod_base = OTHER; note = 2'-O-methyl modified nucleotide
  modified_base 30: mod_base = OTHER; note = 2'-O-methyl modified nucleotide
  modified_base 31: mod_base = OTHER; note = 2'-O-methyl modified nucleotide
  modified_base 32: mod_base = OTHER; note = 2'-O-methyl modified nucleotide
  modified_base 37: mod_base = OTHER; note = 2'-O-methyl modified nucleotide
  modified_base 38: mod_base = OTHER; note = 2'-O-methyl modified nucleotide
  modified_base 39: mod_base = OTHER; note = 2'-O-methyl modified nucleotide
  modified_base 40: mod_base = OTHER; note = 2'-O-methyl modified nucleotide
  modified_base 41: mod_base = OTHER; note = 2'-O-methyl modified nucleotide
  modified_base 42: mod_base = OTHER; note = 2'-O-methyl modified nucleotide
  modified_base 43: mod_base = OTHER; note = 2'-O-methyl modified nucleotide
  modified_base 47: mod_base = OTHER; note = 2'-O-methyl modified nucleotide
  modified_base 48: mod_base = OTHER; note = 2'-O-methyl modified nucleotide
  modified_base 51: mod_base = OTHER; note = 2'-O-methyl modified nucleotide
  modified_base 54: mod_base = OTHER; note = nucleotide with phosphorothioate linkage
  modified_base 58: mod_base = OTHER; note = 2'-O-methyl modified nucleotide
  modified_base 59: mod_base = OTHER; note = 2'-O-methyl modified nucleotide
  modified_base 61: mod_base = OTHER; note = 2'-O-methyl modified nucleotide
  modified_base 62: mod_base = OTHER; note = 2'-O-methyl modified nucleotide
  modified_base 63: mod_base = OTHER; note = 2'-O-methyl modified nucleotide
  modified_base 64: mod_base = OTHER; note = 2'-O-methyl modified nucleotide
  modified_base 65: mod_base = OTHER; note = 2'-O-methyl modified nucleotide
  modified_base 66: mod_base = OTHER; note = 2'-O-methyl modified nucleotide
  modified_base 67: mod_base = OTHER; note = 2'-O-methyl modified nucleotide
  modified_base 68: mod_base = OTHER; note = 2'-O-methyl modified nucleotide
  modified_base 69: mod_base = OTHER; note = 2'-O-methyl modified nucleotide
  modified_base 70: mod_base = OTHER; note = 2'-O-methyl modified nucleotide
  modified_base 75: mod_base = OTHER; note = 2'-O-methyl modified nucleotide
  modified_base 77: mod_base = OTHER; note = 2'-O-methyl modified nucleotide
  modified_base 80: mod_base = OTHER; note = 2'-O-methyl modified nucleotide
  modified_base 86: mod_base = OTHER; note = 2'-O-methyl modified nucleotide
  modified_base 87: mod_base = OTHER; note = 2'-O-methyl modified nucleotide
  modified_base 89: mod_base = OTHER; note = 2'-O-methyl modified nucleotide
  modified_base 90: mod_base = OTHER; note = 2'-O-methyl modified nucleotide
  modified_base 91: mod_base = OTHER; note = 2'-O-methyl modified nucleotide
  modified_base 92: mod_base = OTHER; note = 2'-O-methyl modified nucleotide
  modified_base 99: mod_base = OTHER; note = nucleotide with phosphorothioate linkage
  modified_base 100: mod_base = OTHER; note = 2'-O-methyl modified nucleotide with phosphorothioate linkage
  modified_base 101: mod_base = OTHER; note = 2'-O-methyl modified nucleotide

SEQ ID NO: 2364 - RNA, 101 nt, synthetic construct; identical to SEQ ID NO: 1364
  source 1..101: mol_type = other RNA
  modified_base 1: mod_base = OTHER; note = 2'-O-methyl modified nucleotide with phosphorothioate linkage
  modified_base 2: mod_base = OTHER; note = 2'-O-methyl modified nucleotide with phosphorothioate linkage
  modified_base 3: mod_base = OTHER; note = 2'-O-methyl modified nucleotide with phosphorothioate linkage
  modified_base 4: mod_base = OTHER; note = 2'-O-methyl modified nucleotide
  modified_base 5: mod_base = OTHER; note = 2'-O-methyl modified nucleotide
  modified_base 8: mod_base = OTHER; note = 2'-O-methyl modified nucleotide
  modified_base 9: mod_base = OTHER; note = 2'-O-methyl modified nucleotide
  modified_base 11: mod_base = OTHER; note = 2'-O-methyl modified nucleotide
  modified_base 13: mod_base = OTHER; note = 2'-O-methyl modified nucleotide
  modified_base 18: mod_base = OTHER; note = 2'-O-methyl modified nucleotide
  modified_base 22: mod_base = OTHER; note = 2'-O-methyl modified nucleotide
  modified_base 25: mod_base = OTHER; note = 2'-O-methyl modified nucleotide
  modified_base 29: mod_base = OTHER; note = 2'-O-methyl modified nucleotide
  modified_base 30: mod_base = OTHER; note = 2'-O-methyl modified nucleotide
  modified_base 31: mod_base = OTHER; note = 2'-O-methyl modified nucleotide
  modified_base 32: mod_base = OTHER; note = 2'-O-methyl modified nucleotide
  modified_base 37: mod_base = OTHER; note = 2'-O-methyl modified nucleotide
  modified_base 38: mod_base = OTHER; note = 2'-O-methyl modified nucleotide
  modified_base 39: mod_base = OTHER; note = 2'-O-methyl modified nucleotide
  modified_base 40: mod_base = OTHER; note = 2'-O-methyl modified nucleotide
  modified_base 41: mod_base = OTHER; note = 2'-O-methyl modified nucleotide
  modified_base 42: mod_base = OTHER; note = 2'-O-methyl modified nucleotide
  modified_base 43: mod_base = OTHER; note = 2'-O-methyl modified nucleotide
  modified_base 47: mod_base = OTHER; note = 2'-O-methyl modified nucleotide
  modified_base 48: mod_base = OTHER; note = 2'-O-methyl modified nucleotide
  modified_base 51: mod_base = OTHER; note = 2'-O-methyl modified nucleotide
  modified_base 54: mod_base = OTHER; note = nucleotide with phosphorothioate linkage
  modified_base 58: mod_base = OTHER; note = 2'-O-methyl modified nucleotide
  modified_base 59: mod_base = OTHER; note = 2'-O-methyl modified nucleotide
  modified_base 61: mod_base = OTHER; note = 2'-O-methyl modified nucleotide
  modified_base 62: mod_base = OTHER; note = 2'-O-methyl modified nucleotide
  modified_base 63: mod_base = OTHER; note = 2'-O-methyl modified nucleotide
  modified_base 64: mod_base = OTHER; note = 2'-O-methyl modified nucleotide
  modified_base 65: mod_base = OTHER; note = 2'-O-methyl modified nucleotide
  modified_base 66: mod_base = OTHER; note = 2'-O-methyl modified nucleotide
  modified_base 67: mod_base = OTHER; note = 2'-O-methyl modified nucleotide
  modified_base 68: mod_base = OTHER; note = 2'-O-methyl modified nucleotide
  modified_base 69: mod_base = OTHER; note = 2'-O-methyl modified nucleotide
  modified_base 70: mod_base = OTHER; note = 2'-O-methyl modified nucleotide
  modified_base 75: mod_base = OTHER; note = 2'-O-methyl modified nucleotide
  modified_base 77: mod_base = OTHER; note = 2'-O-methyl modified nucleotide
  modified_base 80: mod_base = OTHER; note = 2'-O-methyl modified nucleotide
  modified_base 86: mod_base = OTHER; note = 2'-O-methyl modified nucleotide
  modified_base 87: mod_base = OTHER; note = 2'-O-methyl modified nucleotide
  modified_base 89: mod_base = OTHER; note = 2'-O-methyl modified nucleotide
  modified_base 90: mod_base = OTHER; note = 2'-O-methyl modified nucleotide
  modified_base 91: mod_base = OTHER; note = 2'-O-methyl modified nucleotide
  modified_base 92: mod_base = OTHER; note = 2'-O-methyl modified nucleotide
  modified_base 99: mod_base = OTHER; note = nucleotide with phosphorothioate linkage
  modified_base 100: mod_base = OTHER; note = 2'-O-methyl modified nucleotide with phosphorothioate linkage
  modified_base 101: mod_base = OTHER; note = 2'-O-methyl modified nucleotide

SEQ ID NO: 2365 - RNA, 101 nt, synthetic construct; identical to SEQ ID NO: 1365
  source 1..101: mol_type = other RNA
  modified_base 1: mod_base = OTHER; note = 2'-O-methyl modified nucleotide with phosphorothioate linkage
  modified_base 2: mod_base = OTHER; note = 2'-O-methyl modified nucleotide with phosphorothioate linkage
  modified_base 3: mod_base = OTHER; note = 2'-O-methyl modified nucleotide with phosphorothioate linkage
  modified_base 4: mod_base = OTHER; note = 2'-O-methyl modified nucleotide
  modified_base 5: mod_base = OTHER; note = 2'-O-methyl modified nucleotide
  modified_base 8: mod_base = OTHER; note = 2'-O-methyl modified nucleotide
  modified_base 9: mod_base = OTHER; note = 2'-O-methyl modified nucleotide
  modified_base 11: mod_base = OTHER; note = 2'-O-methyl modified nucleotide
  modified_base 13: mod_base = OTHER; note = 2'-O-methyl modified nucleotide
  modified_base 18: mod_base = OTHER; note = 2'-O-methyl modified nucleotide
  modified_base 22: mod_base = OTHER; note = 2'-O-methyl modified nucleotide
  modified_base 25: mod_base = OTHER; note = 2'-O-methyl modified nucleotide
  modified_base 29: mod_base = OTHER; note = 2'-O-methyl modified nucleotide
  modified_base 30: mod_base = OTHER; note = 2'-O-methyl modified nucleotide
  modified_base 31: mod_base = OTHER; note = 2'-O-methyl modified nucleotide
  modified_base 32: mod_base = OTHER; note = 2'-O-methyl modified nucleotide
  modified_base 37: mod_base = OTHER; note = 2'-O-methyl modified nucleotide
  modified_base 38: mod_base = OTHER; note = 2'-O-methyl modified nucleotide
  modified_base 39: mod_base = OTHER; note = 2'-O-methyl modified nucleotide
  modified_base 40: mod_base = OTHER; note = 2'-O-methyl modified nucleotide
  modified_base 41: mod_base = OTHER; note = 2'-O-methyl modified nucleotide
  modified_base 42: mod_base = OTHER; note = 2'-O-methyl modified nucleotide
  modified_base 43: mod_base = OTHER; note = 2'-O-methyl modified nucleotide
  modified_base 47: mod_base = OTHER; note = 2'-O-methyl modified nucleotide
  modified_base 48: mod_base = OTHER; note = 2'-O-methyl modified nucleotide
  modified_base 51: mod_base = OTHER; note = 2'-O-methyl modified nucleotide
  modified_base 54: mod_base = OTHER; note = nucleotide with phosphorothioate linkage
  modified_base 58: mod_base = OTHER; note = 2'-O-methyl modified nucleotide
  modified_base 59: mod_base = OTHER; note = 2'-O-methyl modified nucleotide
  modified_base 61: mod_base = OTHER; note = 2'-O-methyl modified nucleotide
  modified_base 62: mod_base = OTHER; note = 2'-O-methyl modified nucleotide
  modified_base 63: mod_base = OTHER; note = 2'-O-methyl modified nucleotide
  modified_base 64: mod_base = OTHER; note = 2'-O-methyl modified nucleotide
  modified_base 65: mod_base = OTHER; note = 2'-O-methyl modified nucleotide
  modified_base 66: mod_base = OTHER; note = 2'-O-methyl modified nucleotide
  modified_base 67: mod_base = OTHER; note = 2'-O-methyl modified nucleotide
  modified_base 68: mod_base = OTHER; note = 2'-O-methyl modified nucleotide
  modified_base 69: mod_base = OTHER; note = 2'-O-methyl modified nucleotide
  modified_base 70: mod_base = OTHER; note = 2'-O-methyl modified nucleotide
  modified_base 75: mod_base = OTHER; note = 2'-O-methyl modified nucleotide
  modified_base 77: mod_base = OTHER; note = 2'-O-methyl modified nucleotide
  modified_base 80: mod_base = OTHER; note = 2'-O-methyl modified nucleotide
  modified_base 86: mod_base = OTHER; note = 2'-O-methyl modified nucleotide
  modified_base 87: mod_base = OTHER; note = 2'-O-methyl modified nucleotide
  modified_base 89: mod_base = OTHER; note = 2'-O-methyl modified nucleotide
  modified_base 90: mod_base = OTHER; note = 2'-O-methyl modified nucleotide
  modified_base 91: mod_base = OTHER; note = 2'-O-methyl modified nucleotide
  modified_base 92: mod_base = OTHER; note = 2'-O-methyl modified nucleotide
  modified_base 99: mod_base = OTHER; note = nucleotide with phosphorothioate linkage
  modified_base 100: mod_base = OTHER; note = 2'-O-methyl modified nucleotide with phosphorothioate linkage
  modified_base 101: mod_base = OTHER; note = 2'-O-methyl modified nucleotide

SEQ ID NO: 2366 - RNA, 101 nt, synthetic construct; identical to SEQ ID NO: 1366
  source 1..101: mol_type = other RNA
  modified_base 1: mod_base = OTHER; note = 2'-O-methyl modified nucleotide with phosphorothioate linkage
  modified_base 2: mod_base = OTHER; note = 2'-O-methyl modified nucleotide with phosphorothioate linkage
  modified_base 3: mod_base = OTHER; note = 2'-O-methyl modified nucleotide with phosphorothioate linkage
  modified_base 4: mod_base = OTHER; note = 2'-O-methyl modified nucleotide
  modified_base 5: mod_base = OTHER; note = 2'-O-methyl modified nucleotide
  modified_base 8: mod_base = OTHER; note = 2'-O-methyl modified nucleotide
  modified_base 9: mod_base = OTHER; note = 2'-O-methyl modified nucleotide
  modified_base 11: mod_base = OTHER; note = 2'-O-methyl modified nucleotide
  modified_base 13: mod_base = OTHER; note = 2'-O-methyl modified nucleotide
  modified_base 18: mod_base = OTHER; note = 2'-O-methyl modified nucleotide
  modified_base 22: mod_base = OTHER; note = 2'-O-methyl modified nucleotide
  modified_base 25: mod_base = OTHER; note = 2'-O-methyl modified nucleotide
  modified_base 29: mod_base = OTHER; note = 2'-O-methyl modified nucleotide
  modified_base 30: mod_base = OTHER; note = 2'-O-methyl modified nucleotide
  modified_base 31: mod_base = OTHER; note = 2'-O-methyl modified nucleotide
  modified_base 32: mod_base = OTHER; note = 2'-O-methyl modified nucleotide
  modified_base 37: mod_base = OTHER; note = 2'-O-methyl modified nucleotide
  modified_base 38: mod_base = OTHER; note = 2'-O-methyl modified nucleotide
  modified_base 39: mod_base = OTHER; note = 2'-O-methyl modified nucleotide
  modified_base 40: mod_base = OTHER; note = 2'-O-methyl modified nucleotide
  modified_base 41: mod_base = OTHER; note = 2'-O-methyl modified nucleotide
  modified_base 42: mod_base = OTHER; note = 2'-O-methyl modified nucleotide
  modified_base 43: mod_base = OTHER; note = 2'-O-methyl modified nucleotide
  modified_base 47: mod_base = OTHER; note = 2'-O-methyl modified nucleotide
  modified_base 48: mod_base = OTHER; note = 2'-O-methyl modified nucleotide
  modified_base 51: mod_base = OTHER; note = 2'-O-methyl modified nucleotide
  modified_base 54: mod_base = OTHER; note = nucleotide with phosphorothioate linkage
  modified_base 58: mod_base = OTHER; note = 2'-O-methyl modified nucleotide
  modified_base 59: mod_base = OTHER; note = 2'-O-methyl modified nucleotide
  modified_base 61: mod_base = OTHER; note = 2'-O-methyl modified nucleotide
  modified_base 62: mod_base = OTHER; note = 2'-O-methyl modified nucleotide
  modified_base 63: mod_base = OTHER; note = 2'-O-methyl modified nucleotide
  modified_base 64: mod_base = OTHER; note = 2'-O-methyl modified nucleotide
  modified_base 65: mod_base = OTHER; note = 2'-O-methyl modified nucleotide
  modified_base 66: mod_base = OTHER; note = 2'-O-methyl modified nucleotide
  modified_base 67: mod_base = OTHER; note = 2'-O-methyl modified nucleotide
  modified_base 68: mod_base = OTHER; note = 2'-O-methyl modified nucleotide
  modified_base 69: mod_base = OTHER; note = 2'-O-methyl modified nucleotide
  modified_base 70: mod_base = OTHER; note = 2'-O-methyl modified nucleotide
  modified_base 75: mod_base = OTHER; note = 2'-O-methyl modified nucleotide
  modified_base 77: mod_base = OTHER; note = 2'-O-methyl modified nucleotide
  modified_base 80: mod_base = OTHER; note = 2'-O-methyl modified nucleotide
  modified_base 86: mod_base = OTHER; note = 2'-O-methyl modified nucleotide
  modified_base 87: mod_base = OTHER; note = 2'-O-methyl modified nucleotide
  modified_base 89: mod_base = OTHER; note = 2'-O-methyl modified nucleotide
  modified_base 90: mod_base = OTHER; note = 2'-O-methyl modified nucleotide
  modified_base 91: mod_base = OTHER; note = 2'-O-methyl modified nucleotide
  modified_base 92: mod_base = OTHER; note = 2'-O-methyl modified nucleotide
  modified_base 99: mod_base = OTHER; note = nucleotide with phosphorothioate linkage
  modified_base 100: mod_base = OTHER; note = 2'-O-methyl modified nucleotide with phosphorothioate linkage
  modified_base 101: mod_base = OTHER; note = 2'-O-methyl modified nucleotide

SEQ ID NO: 2367 - RNA, 101 nt, synthetic construct; identical to SEQ ID NO: 1367
  source 1..101: mol_type = other RNA
  modified_base 1: mod_base = OTHER; note = 2'-O-methyl modified nucleotide with phosphorothioate linkage
  modified_base 2: mod_base = OTHER; note = 2'-O-methyl modified nucleotide with phosphorothioate linkage
  modified_base 3: mod_base = OTHER; note = 2'-O-methyl modified nucleotide with phosphorothioate linkage
  modified_base 4: mod_base = OTHER; note = 2'-O-methyl modified nucleotide
  modified_base 5: mod_base = OTHER; note = 2'-O-methyl modified nucleotide
  modified_base 8: mod_base = OTHER; note = 2'-O-methyl modified nucleotide
  modified_base 9: mod_base = OTHER; note = 2'-O-methyl modified nucleotide
  modified_base 11: mod_base = OTHER; note = 2'-O-methyl modified nucleotide
  modified_base 13: mod_base = OTHER; note = 2'-O-methyl modified nucleotide
  modified_base 18: mod_base = OTHER; note = 2'-O-methyl modified nucleotide
  modified_base 22: mod_base = OTHER; note = 2'-O-methyl modified nucleotide
  modified_base 25: mod_base = OTHER; note = 2'-O-methyl modified nucleotide
  modified_base 29: mod_base = OTHER; note = 2'-O-methyl modified nucleotide
  modified_base 30: mod_base = OTHER; note = 2'-O-methyl modified nucleotide
  modified_base 31: mod_base = OTHER; note = 2'-O-methyl modified nucleotide
  modified_base 32: mod_base = OTHER; note = 2'-O-methyl modified nucleotide
  modified_base 37: mod_base = OTHER; note = 2'-O-methyl modified nucleotide
  modified_base 38: mod_base = OTHER; note = 2'-O-methyl modified nucleotide
  modified_base 39: mod_base = OTHER; note = 2'-O-methyl modified nucleotide
  modified_base 40: mod_base = OTHER; note = 2'-O-methyl modified nucleotide
  modified_base 41: mod_base = OTHER; note = 2'-O-methyl modified nucleotide
  modified_base 42: mod_base = OTHER; note = 2'-O-methyl modified nucleotide
  modified_base 43: mod_base = OTHER; note = 2'-O-methyl modified nucleotide
  modified_base 47: mod_base = OTHER; note = 2'-O-methyl modified nucleotide
  modified_base 48: mod_base = OTHER; note = 2'-O-methyl modified nucleotide
  modified_base 51: mod_base = OTHER; note = 2'-O-methyl modified nucleotide
  modified_base 54: mod_base = OTHER; note = nucleotide with phosphorothioate linkage
  modified_base 58: mod_base = OTHER; note = 2'-O-methyl modified nucleotide
  modified_base 59: mod_base = OTHER; note = 2'-O-methyl modified nucleotide
  modified_base 61: mod_base = OTHER; note = 2'-O-methyl modified nucleotide
  modified_base 62: mod_base = OTHER; note = 2'-O-methyl modified nucleotide
  modified_base 63: mod_base = OTHER; note = 2'-O-methyl modified nucleotide
  modified_base 64: mod_base = OTHER; note = 2'-O-methyl modified nucleotide
  modified_base 65: mod_base = OTHER; note = 2'-O-methyl modified nucleotide
  modified_base 66: mod_base = OTHER; note = 2'-O-methyl modified nucleotide
  modified_base 67: mod_base = OTHER; note = 2'-O-methyl modified nucleotide
  modified_base 68: mod_base = OTHER; note = 2'-O-methyl modified nucleotide
  modified_base 69: mod_base = OTHER; note = 2'-O-methyl modified nucleotide
  modified_base 70: mod_base = OTHER; note = 2'-O-methyl modified nucleotide
  modified_base 75: mod_base = OTHER; note = 2'-O-methyl modified nucleotide
  modified_base 77: mod_base = OTHER; note = 2'-O-methyl modified nucleotide
  modified_base 80: mod_base = OTHER; note = 2'-O-methyl modified nucleotide
  modified_base 86: mod_base = OTHER; note = 2'-O-methyl modified nucleotide
  modified_base 87: mod_base = OTHER; note = 2'-O-methyl modified nucleotide
  modified_base 89: mod_base = OTHER; note = 2'-O-methyl modified nucleotide
  modified_base 90: mod_base = OTHER; note = 2'-O-methyl modified nucleotide
  modified_base 91: mod_base = OTHER; note = 2'-O-methyl modified nucleotide
  modified_base 92: mod_base = OTHER; note = 2'-O-methyl modified nucleotide
  modified_base 99: mod_base = OTHER; note = nucleotide with phosphorothioate linkage
  modified_base 100: mod_base = OTHER; note = 2'-O-methyl modified nucleotide with phosphorothioate linkage
  modified_base 101: mod_base = OTHER; note = 2'-O-methyl modified nucleotide

SEQ ID NO: 2368 - RNA, 101 nt, synthetic construct; identical to SEQ ID NO: 1368
  source 1..101: mol_type = other RNA
  modified_base 1: mod_base = OTHER; note = 2'-O-methyl modified nucleotide with phosphorothioate linkage
  modified_base 2: mod_base = OTHER; note = 2'-O-methyl modified nucleotide with phosphorothioate linkage
  modified_base 3: mod_base = OTHER; note = 2'-O-methyl modified nucleotide with phosphorothioate linkage
  modified_base 4: mod_base = OTHER; note = 2'-O-methyl modified nucleotide
  modified_base 5: mod_base = OTHER; note = 2'-O-methyl modified nucleotide
  modified_base 8: mod_base = OTHER; note = 2'-O-methyl modified nucleotide
  modified_base 9: mod_base = OTHER; note = 2'-O-methyl modified nucleotide
  modified_base 11: mod_base = OTHER; note = 2'-O-methyl modified nucleotide
  modified_base 13: mod_base = OTHER; note = 2'-O-methyl modified nucleotide
  modified_base 18: mod_base = OTHER; note = 2'-O-methyl modified nucleotide
  modified_base 22: mod_base = OTHER; note = 2'-O-methyl modified nucleotide
  modified_base 25: mod_base = OTHER; note = 2'-O-methyl modified nucleotide
  modified_base 29: mod_base = OTHER; note = 2'-O-methyl modified nucleotide
  modified_base 30: mod_base = OTHER; note = 2'-O-methyl modified nucleotide
  modified_base 31: mod_base = OTHER; note = 2'-O-methyl modified nucleotide
  modified_base 32: mod_base = OTHER; note = 2'-O-methyl modified nucleotide
  modified_base 37: mod_base = OTHER; note = 2'-O-methyl modified nucleotide
  modified_base 38: mod_base = OTHER; note = 2'-O-methyl modified nucleotide
  modified_base 39: mod_base = OTHER; note = 2'-O-methyl modified nucleotide
  modified_base 40: mod_base = OTHER; note = 2'-O-methyl modified nucleotide
  modified_base 41: mod_base = OTHER; note = 2'-O-methyl modified nucleotide
  modified_base 42: mod_base = OTHER; note = 2'-O-methyl modified nucleotide
  modified_base 43: mod_base = OTHER; note = 2'-O-methyl modified nucleotide
  modified_base 47: mod_base = OTHER; note = 2'-O-methyl modified nucleotide
  modified_base 48: mod_base = OTHER; note = 2'-O-methyl modified nucleotide
  modified_base 51: mod_base = OTHER; note = 2'-O-methyl modified nucleotide
  modified_base 54: mod_base = OTHER; note = nucleotide with phosphorothioate linkage
  modified_base 58: mod_base = OTHER; note = 2'-O-methyl modified nucleotide
  modified_base 59: mod_base = OTHER; note = 2'-O-methyl modified nucleotide
  modified_base 61: mod_base = OTHER; note = 2'-O-methyl modified nucleotide
  modified_base 62: mod_base = OTHER; note = 2'-O-methyl modified nucleotide
  modified_base 63: mod_base = OTHER; note = 2'-O-methyl modified nucleotide
  modified_base 64: mod_base = OTHER; note = 2'-O-methyl modified nucleotide
  modified_base 65: mod_base = OTHER; note = 2'-O-methyl modified nucleotide
  modified_base 66: mod_base = OTHER; note = 2'-O-methyl modified nucleotide
  modified_base 67: mod_base = OTHER; note = 2'-O-methyl modified nucleotide
  modified_base 68: mod_base = OTHER; note = 2'-O-methyl modified nucleotide
  modified_base 69: mod_base = OTHER; note = 2'-O-methyl modified nucleotide
  modified_base 70: mod_base = OTHER; note = 2'-O-methyl modified nucleotide
  modified_base 75: mod_base = OTHER; note = 2'-O-methyl modified nucleotide
  modified_base 77: mod_base = OTHER; note = 2'-O-methyl modified nucleotide
  modified_base 80: mod_base = OTHER; note = 2'-O-methyl modified nucleotide
  modified_base 86: mod_base = OTHER; note = 2'-O-methyl modified nucleotide
  modified_base 87: mod_base = OTHER; note = 2'-O-methyl modified nucleotide
  modified_base 89: mod_base = OTHER; note = 2'-O-methyl modified nucleotide
  modified_base 90: mod_base = OTHER; note = 2'-O-methyl modified nucleotide
  modified_base 91: mod_base = OTHER; note = 2'-O-methyl modified nucleotide
  modified_base 92: mod_base = OTHER; note = 2'-O-methyl modified nucleotide
  modified_base 99: mod_base = OTHER; note = nucleotide with phosphorothioate linkage
  modified_base 100: mod_base = OTHER; note = 2'-O-methyl modified nucleotide with phosphorothioate linkage
  modified_base 101: mod_base = OTHER; note = 2'-O-methyl modified nucleotide

SEQ ID NO: 2369 - RNA, 101 nt, synthetic construct; identical to SEQ ID NO: 1369
  source 1..101: mol_type = other RNA
  modified_base 1: mod_base = OTHER; note = 2'-O-methyl modified nucleotide with phosphorothioate linkage
  modified_base 2: mod_base = OTHER; note = 2'-O-methyl modified nucleotide with phosphorothioate linkage
  modified_base 3: mod_base = OTHER; note = 2'-O-methyl modified nucleotide with phosphorothioate linkage
  modified_base 4: mod_base = OTHER; note = 2'-O-methyl modified nucleotide
  modified_base 5: mod_base = OTHER; note = 2'-O-methyl modified nucleotide
  modified_base 8: mod_base = OTHER; note = 2'-O-methyl modified nucleotide
  modified_base 9: mod_base = OTHER; note = 2'-O-methyl modified nucleotide
  modified_base 11: mod_base = OTHER; note = 2'-O-methyl modified nucleotide
  modified_base 13: mod_base = OTHER; note = 2'-O-methyl modified nucleotide
  modified_base 18: mod_base = OTHER; note = 2'-O-methyl modified nucleotide
  modified_base 22: mod_base = OTHER; note = 2'-O-methyl modified nucleotide
  modified_base 25: mod_base = OTHER; note = 2'-O-methyl modified nucleotide
  modified_base 29: mod_base = OTHER; note = 2'-O-methyl modified nucleotide
  modified_base 30: mod_base = OTHER; note = 2'-O-methyl modified nucleotide
  modified_base 31: mod_base = OTHER; note = 2'-O-methyl modified nucleotide
  modified_base 32: mod_base = OTHER; note = 2'-O-methyl modified nucleotide
  modified_base 37: mod_base = OTHER; note = 2'-O-methyl modified nucleotide
  modified_base 38: mod_base = OTHER; note = 2'-O-methyl modified nucleotide
  modified_base 39: mod_base = OTHER; note = 2'-O-methyl modified nucleotide
  modified_base 40: mod_base = OTHER; note = 2'-O-methyl modified nucleotide
  modified_base 41: mod_base = OTHER; note = 2'-O-methyl modified nucleotide
  modified_base 42: mod_base = OTHER; note = 2'-O-methyl modified nucleotide
  modified_base 43: mod_base = OTHER; note = 2'-O-methyl modified nucleotide
  modified_base 47: mod_base = OTHER; note = 2'-O-methyl modified nucleotide
  modified_base 48: mod_base = OTHER; note = 2'-O-methyl modified nucleotide
  modified_base 51: mod_base = OTHER; note = 2'-O-methyl modified nucleotide
  modified_base 54: mod_base = OTHER; note = nucleotide with phosphorothioate linkage
  modified_base 58: mod_base = OTHER; note = 2'-O-methyl modified nucleotide
  modified_base 59: mod_base = OTHER; note = 2'-O-methyl modified nucleotide
  modified_base 61: mod_base = OTHER; note = 2'-O-methyl modified nucleotide
  modified_base 62: mod_base = OTHER; note = 2'-O-methyl modified nucleotide
  modified_base 63: mod_base = OTHER; note = 2'-O-methyl modified nucleotide
  modified_base 64: mod_base = OTHER; note = 2'-O-methyl modified nucleotide
  modified_base 65: mod_base = OTHER; note = 2'-O-methyl modified nucleotide
  modified_base 66: mod_base = OTHER; note = 2'-O-methyl modified nucleotide
  modified_base 67: mod_base = OTHER; note = 2'-O-methyl modified nucleotide
  modified_base 68: mod_base = OTHER; note = 2'-O-methyl modified nucleotide
  modified_base 69: mod_base = OTHER; note = 2'-O-methyl modified nucleotide
  modified_base 70: mod_base = OTHER; note = 2'-O-methyl modified nucleotide
  modified_base 75: mod_base = OTHER; note = 2'-O-methyl modified nucleotide
  modified_base 77: mod_base = OTHER; note = 2'-O-methyl modified nucleotide
  modified_base 80: mod_base = OTHER; note = 2'-O-methyl modified nucleotide
  modified_base 86: mod_base = OTHER; note = 2'-O-methyl modified nucleotide
  modified_base 87: mod_base = OTHER; note = 2'-O-methyl modified nucleotide
  modified_base 89: mod_base = OTHER; note = 2'-O-methyl modified nucleotide
  modified_base 90: mod_base = OTHER; note = 2'-O-methyl modified nucleotide
  modified_base 91: mod_base = OTHER; note = 2'-O-methyl modified nucleotide
  modified_base 92: mod_base = OTHER; note = 2'-O-methyl modified nucleotide
  modified_base 99: mod_base = OTHER; note = nucleotide with phosphorothioate linkage
  modified_base 100: mod_base = OTHER; note = 2'-O-methyl modified nucleotide with phosphorothioate linkage
  modified_base 101: mod_base = OTHER; note = 2'-O-methyl modified nucleotide

SEQ ID NO: 2370 - RNA, 101 nt, synthetic construct; identical to SEQ ID NO: 1370
  source 1..101: mol_type = other RNA
  modified_base 1: mod_base = OTHER; note = 2'-O-methyl modified nucleotide with phosphorothioate linkage
  modified_base 2: mod_base = OTHER; note = 2'-O-methyl modified nucleotide with phosphorothioate linkage
  modified_base 3: mod_base = OTHER; note = 2'-O-methyl modified nucleotide with phosphorothioate linkage
  modified_base 4: mod_base = OTHER; note = 2'-O-methyl modified nucleotide
  modified_base 5: mod_base = OTHER; note = 2'-O-methyl modified nucleotide
  modified_base 8: mod_base = OTHER; note = 2'-O-methyl modified nucleotide
  modified_base 9: mod_base = OTHER; note = 2'-O-methyl modified nucleotide
  modified_base 11: mod_base = OTHER; note = 2'-O-methyl modified nucleotide
  modified_base 13: mod_base = OTHER; note = 2'-O-methyl modified nucleotide
  modified_base 18: mod_base = OTHER; note = 2'-O-methyl modified nucleotide
  modified_base 22: mod_base = OTHER; note = 2'-O-methyl modified nucleotide
  modified_base 25: mod_base = OTHER; note = 2'-O-methyl modified nucleotide
  modified_base 29: mod_base = OTHER; note = 2'-O-methyl modified nucleotide
  modified_base 30: mod_base = OTHER; note = 2'-O-methyl modified nucleotide
  modified_base 31: mod_base = OTHER; note = 2'-O-methyl modified nucleotide
  modified_base 32: mod_base = OTHER; note = 2'-O-methyl modified nucleotide
  modified_base 37: mod_base = OTHER; note = 2'-O-methyl modified nucleotide
  modified_base 38: mod_base = OTHER; note = 2'-O-methyl modified nucleotide
  modified_base 39: mod_base = OTHER; note = 2'-O-methyl modified nucleotide
  modified_base 40: mod_base = OTHER; note = 2'-O-methyl modified nucleotide
  modified_base 41: mod_base = OTHER; note = 2'-O-methyl modified nucleotide
  modified_base 42: mod_base = OTHER; note = 2'-O-methyl modified nucleotide
  modified_base 43: mod_base = OTHER; note = 2'-O-methyl modified nucleotide
  modified_base 47: mod_base = OTHER; note = 2'-O-methyl modified nucleotide
  modified_base 48: mod_base = OTHER; note = 2'-O-methyl modified nucleotide
  modified_base 51: mod_base = OTHER; note = 2'-O-methyl modified nucleotide
  modified_base 54: mod_base = OTHER; note = nucleotide with phosphorothioate linkage
  modified_base 58: mod_base = OTHER; note = 2'-O-methyl modified nucleotide
  modified_base 59: mod_base = OTHER; note = 2'-O-methyl modified nucleotide
  modified_base 61: mod_base = OTHER; note = 2'-O-methyl modified nucleotide
  modified_base 62: mod_base = OTHER; note = 2'-O-methyl modified nucleotide
  modified_base 63: mod_base = OTHER; note = 2'-O-methyl modified nucleotide
  modified_base 64: mod_base = OTHER; note = 2'-O-methyl modified nucleotide
  modified_base 65: mod_base = OTHER; note = 2'-O-methyl modified nucleotide
  modified_base 66: mod_base = OTHER; note = 2'-O-methyl modified nucleotide
  modified_base 67: mod_base = OTHER; note = 2'-O-methyl modified nucleotide
  modified_base 68: mod_base = OTHER; note = 2'-O-methyl modified nucleotide
  modified_base 69: mod_base = OTHER; note = 2'-O-methyl modified nucleotide
  modified_base 70: mod_base = OTHER; note = 2'-O-methyl modified nucleotide
  modified_base 75: mod_base = OTHER; note = 2'-O-methyl modified nucleotide
  modified_base 77: mod_base = OTHER; note = 2'-O-methyl modified nucleotide
  modified_base 80: mod_base = OTHER; note = 2'-O-methyl modified nucleotide
  modified_base 86: mod_base = OTHER; note = 2'-O-methyl modified nucleotide
  modified_base 87: mod_base = OTHER; note = 2'-O-methyl modified nucleotide
  modified_base 89: mod_base = OTHER; note = 2'-O-methyl modified nucleotide
  modified_base 90: mod_base = OTHER; note = 2'-O-methyl modified nucleotide
  modified_base 91: mod_base = OTHER; note = 2'-O-methyl modified nucleotide
  modified_base 92: mod_base = OTHER; note = 2'-O-methyl modified nucleotide
  modified_base 99: mod_base = OTHER; note = nucleotide with phosphorothioate linkage
  modified_base 100: mod_base = OTHER; note = 2'-O-methyl modified nucleotide with phosphorothioate linkage
  modified_base 101: mod_base = OTHER; note = 2'-O-methyl modified nucleotide

SEQ ID NO: 2371 - RNA, 101 nt, synthetic construct; identical to SEQ ID NO: 1371
  source 1..101: mol_type = other RNA
  modified_base 1: mod_base = OTHER; note = 2'-O-methyl modified nucleotide with phosphorothioate linkage
  modified_base 2: mod_base = OTHER; note = 2'-O-methyl modified nucleotide with phosphorothioate linkage
  modified_base 3: mod_base = OTHER; note = 2'-O-methyl modified nucleotide with phosphorothioate linkage
  modified_base 4: mod_base = OTHER; note = 2'-O-methyl modified nucleotide
  modified_base 5: mod_base = OTHER; note = 2'-O-methyl modified nucleotide
  modified_base 8: mod_base = OTHER; note = 2'-O-methyl modified nucleotide
  modified_base 9: mod_base = OTHER; note = 2'-O-methyl modified nucleotide
  modified_base 11: mod_base = OTHER; note = 2'-O-methyl modified nucleotide
  modified_base 13: mod_base = OTHER; note = 2'-O-methyl modified nucleotide
  modified_base 18: mod_base = OTHER; note = 2'-O-methyl modified nucleotide
  modified_base 22: mod_base = OTHER; note = 2'-O-methyl modified nucleotide
  modified_base 25: mod_base = OTHER; note = 2'-O-methyl modified nucleotide
  modified_base 29: mod_base = OTHER; note = 2'-O-methyl modified nucleotide
  modified_base 30: mod_base = OTHER; note = 2'-O-methyl modified nucleotide
  modified_base 31: mod_base = OTHER; note = 2'-O-methyl modified nucleotide
  modified_base 32: mod_base = OTHER; note = 2'-O-methyl modified nucleotide
  modified_base 37: mod_base = OTHER; note = 2'-O-methyl modified nucleotide
  modified_base 38: mod_base = OTHER; note = 2'-O-methyl modified nucleotide
  modified_base 39: mod_base = OTHER; note = 2'-O-methyl modified nucleotide
  modified_base 40: mod_base = OTHER; note = 2'-O-methyl modified nucleotide
  modified_base 41: mod_base = OTHER; note = 2'-O-methyl modified nucleotide
  modified_base 42: mod_base = OTHER; note = 2'-O-methyl modified nucleotide
  modified_base 43: mod_base = OTHER; note = 2'-O-methyl modified nucleotide
  modified_base 47: mod_base = OTHER; note = 2'-O-methyl modified nucleotide
  modified_base 48: mod_base = OTHER; note = 2'-O-methyl modified nucleotide
  modified_base 51: mod_base = OTHER; note = 2'-O-methyl modified nucleotide
  modified_base 54: mod_base = OTHER; note = nucleotide with phosphorothioate linkage
  modified_base 58: mod_base = OTHER; note = 2'-O-methyl modified nucleotide
  modified_base 59: mod_base = OTHER; note = 2'-O-methyl modified nucleotide
  modified_base 61: mod_base = OTHER; note = 2'-O-methyl modified nucleotide
  modified_base 62: mod_base = OTHER; note = 2'-O-methyl modified nucleotide
  modified_base 63: mod_base = OTHER; note = 2'-O-methyl modified nucleotide
  modified_base 64: mod_base = OTHER; note = 2'-O-methyl modified nucleotide
  modified_base 65: mod_base = OTHER; note = 2'-O-methyl modified nucleotide
  modified_base 66: mod_base = OTHER; note = 2'-O-methyl modified nucleotide
  modified_base 67: mod_base = OTHER; note = 2'-O-methyl modified nucleotide
  modified_base 68: mod_base = OTHER; note = 2'-O-methyl modified nucleotide
  modified_base 69: mod_base = OTHER; note = 2'-O-methyl modified nucleotide
  modified_base 70: mod_base = OTHER; note = 2'-O-methyl modified nucleotide
  modified_base 75: mod_base = OTHER; note = 2'-O-methyl modified nucleotide
  modified_base 77: mod_base = OTHER; note = 2'-O-methyl modified nucleotide
  modified_base 80: mod_base = OTHER; note = 2'-O-methyl modified nucleotide
  modified_base 86: mod_base = OTHER; note = 2'-O-methyl modified nucleotide
  modified_base 87: mod_base = OTHER; note = 2'-O-methyl modified nucleotide
  modified_base 89: mod_base = OTHER; note = 2'-O-methyl modified nucleotide
  modified_base 90: mod_base = OTHER; note = 2'-O-methyl modified nucleotide
  modified_base 91: mod_base = OTHER; note = 2'-O-methyl modified nucleotide
  modified_base 92: mod_base = OTHER; note = 2'-O-methyl modified nucleotide
  modified_base 99: mod_base = OTHER; note = nucleotide with phosphorothioate linkage
  modified_base 100: mod_base = OTHER; note = 2'-O-methyl modified nucleotide with phosphorothioate linkage
  modified_base 101: mod_base = OTHER; note = 2'-O-methyl modified nucleotide

SEQ ID NO: 2372 - RNA, 101 nt, synthetic construct; identical to SEQ ID NO: 1372
  source 1..101: mol_type = other RNA
  modified_base 1: mod_base = OTHER; note = 2'-O-methyl modified nucleotide with phosphorothioate linkage
  modified_base 2: mod_base = OTHER; note = 2'-O-methyl modified nucleotide with phosphorothioate linkage
  modified_base 3: mod_base = OTHER; note = 2'-O-methyl modified nucleotide with phosphorothioate linkage
  modified_base 4: mod_base = OTHER; note = 2'-O-methyl modified nucleotide
  modified_base 5: mod_base = OTHER; note = 2'-O-methyl modified nucleotide
  modified_base 8: mod_base = OTHER; note = 2'-O-methyl modified nucleotide
  modified_base 9: mod_base = OTHER; note = 2'-O-methyl modified nucleotide
  modified_base 11: mod_base = OTHER; note = 2'-O-methyl modified nucleotide
  modified_base 13: mod_base = OTHER; note = 2'-O-methyl modified nucleotide
  modified_base 18: mod_base = OTHER; note = 2'-O-methyl modified nucleotide
  modified_base 22: mod_base = OTHER; note = 2'-O-methyl modified nucleotide
  modified_base 25: mod_base = OTHER; note = 2'-O-methyl modified nucleotide
  modified_base 29: mod_base = OTHER; note = 2'-O-methyl modified nucleotide
  modified_base 30: mod_base = OTHER; note = 2'-O-methyl modified nucleotide
  modified_base 31: mod_base = OTHER; note = 2'-O-methyl modified nucleotide
  modified_base 32: mod_base = OTHER; note = 2'-O-methyl modified nucleotide
  modified_base 37: mod_base = OTHER; note = 2'-O-methyl modified nucleotide
  modified_base 38: mod_base = OTHER; note = 2'-O-methyl modified nucleotide
  modified_base 39: mod_base = OTHER; note = 2'-O-methyl modified nucleotide
  modified_base 40: mod_base = OTHER; note = 2'-O-methyl modified nucleotide
  modified_base 41: mod_base = OTHER; note = 2'-O-methyl modified nucleotide
  modified_base 42: mod_base = OTHER; note = 2'-O-methyl modified nucleotide
  modified_base 43: mod_base = OTHER; note = 2'-O-methyl modified nucleotide
  modified_base 47: mod_base = OTHER; note = 2'-O-methyl modified nucleotide
  modified_base 48: mod_base = OTHER; note = 2'-O-methyl modified nucleotide
  modified_base 51: mod_base = OTHER; note = 2'-O-methyl modified nucleotide
  modified_base 54: mod_base = OTHER; note = nucleotide with phosphorothioate linkage
  modified_base 58: mod_base = OTHER; note = 2'-O-methyl modified nucleotide
  modified_base 59: mod_base = OTHER; note = 2'-O-methyl modified nucleotide
  modified_base 61: mod_base = OTHER; note = 2'-O-methyl modified nucleotide
  modified_base 62: mod_base = OTHER; note = 2'-O-methyl modified nucleotide
  modified_base 63: mod_base = OTHER; note = 2'-O-methyl modified nucleotide
  modified_base 64: mod_base = OTHER; note = 2'-O-methyl modified nucleotide
  modified_base 65: mod_base = OTHER; note = 2'-O-methyl modified nucleotide
  modified_base 66: mod_base = OTHER; note = 2'-O-methyl modified nucleotide
  modified_base 67: mod_base = OTHER; note = 2'-O-methyl modified nucleotide
  modified_base 68: mod_base = OTHER; note = 2'-O-methyl modified nucleotide
  modified_base 69: mod_base = OTHER; note = 2'-O-methyl modified nucleotide
  modified_base 70: mod_base = OTHER; note = 2'-O-methyl modified nucleotide
  modified_base 75: mod_base = OTHER; note = 2'-O-methyl modified nucleotide
  modified_base 77: mod_base = OTHER; note = 2'-O-methyl modified nucleotide
  modified_base 80: mod_base = OTHER; note = 2'-O-methyl modified nucleotide
  modified_base 86: mod_base = OTHER; note = 2'-O-methyl modified nucleotide
  modified_base 87: mod_base = OTHER; note = 2'-O-methyl modified nucleotide
  modified_base 89: mod_base = OTHER; note = 2'-O-methyl modified nucleotide
  modified_base 90: mod_base = OTHER; note = 2'-O-methyl modified nucleotide
  modified_base 91: mod_base = OTHER; note = 2'-O-methyl modified nucleotide
  modified_base 92: mod_base = OTHER; note = 2'-O-methyl modified nucleotide
  modified_base 99: mod_base = OTHER; note = nucleotide with phosphorothioate linkage
  modified_base 100: mod_base = OTHER; note = 2'-O-methyl modified nucleotide with phosphorothioate linkage
  modified_base 101: mod_base = OTHER; note = 2'-O-methyl modified nucleotide

SEQ ID NO: 2373 - RNA, 101 nt, synthetic construct; identical to SEQ ID NO: 1373
  source 1..101: mol_type = other RNA
  modified_base 1: mod_base = OTHER; note = 2'-O-methyl modified nucleotide with phosphorothioate linkage
  modified_base 2: mod_base = OTHER; note = 2'-O-methyl modified nucleotide with phosphorothioate linkage
  modified_base 3: mod_base = OTHER; note = 2'-O-methyl modified nucleotide with phosphorothioate linkage
  modified_base 4: mod_base = OTHER; note = 2'-O-methyl modified nucleotide
  modified_base 5: mod_base = OTHER; note = 2'-O-methyl modified nucleotide
  modified_base 8: mod_base = OTHER; note = 2'-O-methyl modified nucleotide
  modified_base 9: mod_base = OTHER; note = 2'-O-methyl modified nucleotide
  modified_base 11: mod_base = OTHER; note = 2'-O-methyl modified nucleotide
  modified_base 13: mod_base = OTHER; note = 2'-O-methyl modified nucleotide
  modified_base 18: mod_base = OTHER; note = 2'-O-methyl modified nucleotide
  modified_base 22: mod_base = OTHER; note = 2'-O-methyl modified nucleotide
  modified_base 25: mod_base = OTHER; note = 2'-O-methyl modified nucleotide
  modified_base 29: mod_base = OTHER; note = 2'-O-methyl modified nucleotide
  modified_base 30: mod_base = OTHER; note = 2'-O-methyl modified nucleotide
  modified_base 31: mod_base = OTHER; note = 2'-O-methyl modified nucleotide
  modified_base 32: mod_base = OTHER; note = 2'-O-methyl modified nucleotide
  modified_base 37: mod_base = OTHER; note = 2'-O-methyl modified nucleotide
  modified_base 38: mod_base = OTHER; note = 2'-O-methyl modified nucleotide
  modified_base 39: mod_base = OTHER; note = 2'-O-methyl modified nucleotide
  modified_base 40: mod_base = OTHER; note = 2'-O-methyl modified nucleotide
  modified_base 41: mod_base = OTHER; note = 2'-O-methyl modified nucleotide
  modified_base 42: mod_base = OTHER; note = 2'-O-methyl modified nucleotide
  modified_base 43: mod_base = OTHER; note = 2'-O-methyl modified nucleotide
  modified_base 47: mod_base = OTHER; note = 2'-O-methyl modified nucleotide
  modified_base 48: mod_base = OTHER; note = 2'-O-methyl modified nucleotide
  modified_base 51: mod_base = OTHER; note = 2'-O-methyl modified nucleotide
  modified_base 54: mod_base = OTHER; note = nucleotide with phosphorothioate linkage
  modified_base 58: mod_base = OTHER; note = 2'-O-methyl modified nucleotide
  modified_base 59: mod_base = OTHER; note = 2'-O-methyl modified nucleotide
  modified_base 61: mod_base = OTHER; note = 2'-O-methyl modified nucleotide
  modified_base 62: mod_base = OTHER; note = 2'-O-methyl modified nucleotide
  modified_base 63: mod_base = OTHER; note = 2'-O-methyl modified nucleotide
  modified_base 64: mod_base = OTHER; note = 2'-O-methyl modified nucleotide
  modified_base 65: mod_base = OTHER; note = 2'-O-methyl modified nucleotide
  modified_base 66: mod_base = OTHER; note = 2'-O-methyl modified nucleotide
  modified_base 67: mod_base = OTHER; note = 2'-O-methyl modified nucleotide
  modified_base 68: mod_base = OTHER; note = 2'-O-methyl modified nucleotide
  modified_base 69: mod_base = OTHER; note = 2'-O-methyl modified nucleotide
  modified_base 70: mod_base = OTHER; note = 2'-O-methyl modified nucleotide
  modified_base 75: mod_base = OTHER; note = 2'-O-methyl modified nucleotide
  modified_base 77: mod_base = OTHER; note = 2'-O-methyl modified nucleotide
  modified_base 80: mod_base = OTHER; note = 2'-O-methyl modified nucleotide
  modified_base 86: mod_base = OTHER; note = 2'-O-methyl modified nucleotide
  modified_base 87: mod_base = OTHER; note = 2'-O-methyl modified nucleotide
  modified_base 89: mod_base = OTHER; note = 2'-O-methyl modified nucleotide
  modified_base 90: mod_base = OTHER; note = 2'-O-methyl modified nucleotide
  modified_base 91: mod_base = OTHER; note = 2'-O-methyl modified nucleotide
  modified_base 92: mod_base = OTHER; note = 2'-O-methyl modified nucleotide
  modified_base 99: mod_base = OTHER; note = nucleotide with phosphorothioate linkage
  modified_base 100: mod_base = OTHER; note = 2'-O-methyl modified nucleotide with phosphorothioate linkage
  modified_base 101: mod_base = OTHER; note = 2'-O-methyl modified nucleotide

SEQ ID NO: 2374 - RNA, 101 nt, synthetic construct; identical to SEQ ID NO: 1374
  source 1..101: mol_type = other RNA
  modified_base 1: mod_base = OTHER; note = 2'-O-methyl modified nucleotide with phosphorothioate linkage
  modified_base 2: mod_base = OTHER; note = 2'-O-methyl modified nucleotide with phosphorothioate linkage
  modified_base 3: mod_base = OTHER; note = 2'-O-methyl modified nucleotide with phosphorothioate linkage
  modified_base 4: mod_base = OTHER; note = 2'-O-methyl modified nucleotide
  modified_base 5: mod_base = OTHER; note = 2'-O-methyl modified nucleotide
  modified_base 8: mod_base = OTHER; note = 2'-O-methyl modified nucleotide
  modified_base 9: mod_base = OTHER; note = 2'-O-methyl modified nucleotide
  modified_base 11: mod_base = OTHER; note = 2'-O-methyl modified nucleotide
  modified_base 13: mod_base = OTHER; note = 2'-O-methyl modified nucleotide
  modified_base 18: mod_base = OTHER; note = 2'-O-methyl modified nucleotide
  modified_base 22: mod_base = OTHER; note = 2'-O-methyl modified nucleotide
  modified_base 25: mod_base = OTHER; note = 2'-O-methyl modified nucleotide
  modified_base 29: mod_base = OTHER; note = 2'-O-methyl modified nucleotide
  modified_base 30: mod_base = OTHER; note = 2'-O-methyl modified nucleotide
  modified_base 31: mod_base = OTHER; note = 2'-O-methyl modified nucleotide
  modified_base 32: mod_base = OTHER; note = 2'-O-methyl modified nucleotide
  modified_base 37: mod_base = OTHER; note = 2'-O-methyl modified nucleotide
  modified_base 38: mod_base = OTHER; note = 2'-O-methyl modified nucleotide
  modified_base 39: mod_base = OTHER; note = 2'-O-methyl modified nucleotide
  modified_base 40: mod_base = OTHER; note = 2'-O-methyl modified nucleotide
  modified_base 41: mod_base = OTHER; note = 2'-O-methyl modified nucleotide
  modified_base 42: mod_base = OTHER; note = 2'-O-methyl modified nucleotide
  modified_base 43: mod_base = OTHER; note = 2'-O-methyl modified nucleotide
  modified_base 47: mod_base = OTHER; note = 2'-O-methyl modified nucleotide
  modified_base 48: mod_base = OTHER; note = 2'-O-methyl modified nucleotide
  modified_base 51: mod_base = OTHER; note = 2'-O-methyl modified nucleotide
  modified_base 54: mod_base = OTHER; note = nucleotide with phosphorothioate linkage
  modified_base 58: mod_base = OTHER; note = 2'-O-methyl modified nucleotide
  modified_base 59: mod_base = OTHER; note = 2'-O-methyl modified nucleotide
  modified_base 61: mod_base = OTHER; note = 2'-O-methyl modified nucleotide
  modified_base 62: mod_base = OTHER; note = 2'-O-methyl modified nucleotide
  modified_base 63: mod_base = OTHER; note = 2'-O-methyl modified nucleotide
  modified_base 64: mod_base = OTHER; note = 2'-O-methyl modified nucleotide
  modified_base 65: mod_base = OTHER; note = 2'-O-methyl modified nucleotide
  modified_base 66: mod_base = OTHER; note = 2'-O-methyl modified nucleotide
  modified_base 67: mod_base = OTHER; note = 2'-O-methyl modified nucleotide
  modified_base 68: mod_base = OTHER; note = 2'-O-methyl modified nucleotide
  modified_base 69: mod_base = OTHER; note = 2'-O-methyl modified nucleotide
  modified_base 70: mod_base = OTHER; note = 2'-O-methyl modified nucleotide
  modified_base 75: mod_base = OTHER; note = 2'-O-methyl modified nucleotide
  modified_base 77: mod_base = OTHER; note = 2'-O-methyl modified nucleotide
  modified_base 80: mod_base = OTHER; note = 2'-O-methyl modified nucleotide
  modified_base 86: mod_base = OTHER; note = 2'-O-methyl modified nucleotide
  modified_base 87: mod_base = OTHER; note = 2'-O-methyl modified nucleotide
  modified_base 89: mod_base = OTHER; note = 2'-O-methyl modified nucleotide
  modified_base 90: mod_base = OTHER; note = 2'-O-methyl modified nucleotide
  modified_base 91: mod_base = OTHER; note = 2'-O-methyl modified nucleotide
  modified_base 92: mod_base = OTHER; note = 2'-O-methyl modified nucleotide
  modified_base 99: mod_base = OTHER; note = nucleotide with phosphorothioate linkage
  modified_base 100: mod_base = OTHER; note = 2'-O-methyl modified nucleotide with phosphorothioate linkage
  modified_base 101: mod_base = OTHER; note = 2'-O-methyl modified nucleotide

SEQ ID NO: 2375 - RNA, 101 nt, synthetic construct; identical to SEQ ID NO: 1375
  source 1..101: mol_type = other RNA
  modified_base 1: mod_base = OTHER; note = 2'-O-methyl modified nucleotide with phosphorothioate linkage
  modified_base 2: mod_base = OTHER; note = 2'-O-methyl modified nucleotide with phosphorothioate linkage
  modified_base 3: mod_base = OTHER; note = 2'-O-methyl modified nucleotide with phosphorothioate linkage
  modified_base 4: mod_base = OTHER; note = 2'-O-methyl modified nucleotide
  modified_base 5: mod_base = OTHER; note = 2'-O-methyl modified nucleotide
  modified_base 8: mod_base = OTHER; note = 2'-O-methyl modified nucleotide
  modified_base 9: mod_base = OTHER; note = 2'-O-methyl modified nucleotide
  modified_base 11: mod_base = OTHER; note = 2'-O-methyl modified nucleotide
  modified_base 13: mod_base = OTHER; note = 2'-O-methyl modified nucleotide
  modified_base 18: mod_base = OTHER; note = 2'-O-methyl modified nucleotide
  modified_base 22: mod_base = OTHER; note = 2'-O-methyl modified nucleotide
  modified_base 25: mod_base = OTHER; note = 2'-O-methyl modified nucleotide
  modified_base 29: mod_base = OTHER; note = 2'-O-methyl modified nucleotide
  modified_base 30: mod_base = OTHER; note = 2'-O-methyl modified nucleotide
  modified_base 31: mod_base = OTHER; note = 2'-O-methyl modified nucleotide
  modified_base 32: mod_base = OTHER; note = 2'-O-methyl modified nucleotide
  modified_base 37: mod_base = OTHER; note = 2'-O-methyl modified nucleotide
  modified_base 38: mod_base = OTHER; note = 2'-O-methyl modified nucleotide
  modified_base 39: mod_base = OTHER; note = 2'-O-methyl modified nucleotide
  modified_base 40: mod_base = OTHER; note = 2'-O-methyl modified nucleotide
  modified_base 41: mod_base = OTHER; note = 2'-O-methyl modified nucleotide
  modified_base 42: mod_base = OTHER; note = 2'-O-methyl modified nucleotide
  modified_base 43: mod_base = OTHER; note = 2'-O-methyl modified nucleotide
  modified_base 47: mod_base = OTHER; note = 2'-O-methyl modified nucleotide
  modified_base 48: mod_base = OTHER; note = 2'-O-methyl modified nucleotide
  modified_base 51: mod_base = OTHER; note = 2'-O-methyl modified nucleotide
  modified_base 54: mod_base = OTHER; note = nucleotide with phosphorothioate linkage
  modified_base 58: mod_base = OTHER; note = 2'-O-methyl modified nucleotide
  modified_base 59: mod_base = OTHER; note = 2'-O-methyl modified nucleotide
  modified_base 61: mod_base = OTHER; note = 2'-O-methyl modified nucleotide
  modified_base 62: mod_base = OTHER; note = 2'-O-methyl modified nucleotide
  modified_base 63: mod_base = OTHER; note = 2'-O-methyl modified nucleotide
  modified_base 64: mod_base = OTHER; note = 2'-O-methyl modified nucleotide
  modified_base 65: mod_base = OTHER; note = 2'-O-methyl modified nucleotide
  modified_base 66: mod_base = OTHER; note = 2'-O-methyl modified nucleotide
  modified_base 67: mod_base = OTHER; note = 2'-O-methyl modified nucleotide
  modified_base 68: mod_base = OTHER; note = 2'-O-methyl modified nucleotide
  modified_base 69: mod_base = OTHER; note = 2'-O-methyl modified nucleotide
  modified_base 70: mod_base = OTHER; note = 2'-O-methyl modified nucleotide
  modified_base 75: mod_base = OTHER; note = 2'-O-methyl modified nucleotide
  modified_base 77: mod_base = OTHER; note = 2'-O-methyl modified nucleotide
  modified_base 80: mod_base = OTHER; note = 2'-O-methyl modified nucleotide
  modified_base 86: mod_base = OTHER; note = 2'-O-methyl modified nucleotide
  modified_base 87: mod_base = OTHER; note = 2'-O-methyl modified nucleotide
  modified_base 89: mod_base = OTHER; note = 2'-O-methyl modified nucleotide
  modified_base 90: mod_base = OTHER; note = 2'-O-methyl modified nucleotide
  modified_base 91: mod_base = OTHER; note = 2'-O-methyl modified nucleotide
  modified_base 92: mod_base = OTHER; note = 2'-O-methyl modified nucleotide
  modified_base 99: mod_base = OTHER; note = nucleotide with phosphorothioate linkage
  modified_base 100: mod_base = OTHER; note = 2'-O-methyl modified nucleotide with phosphorothioate linkage
  modified_base 101: mod_base = OTHER; note = 2'-O-methyl modified nucleotide

SEQ ID NO: 2376 - RNA, 101 nt, synthetic construct; identical to SEQ ID NO: 1376
  source 1..101: mol_type = other RNA
  modified_base 1: mod_base = OTHER; note = 2'-O-methyl modified nucleotide with phosphorothioate linkage
  modified_base 2: mod_base = OTHER; note = 2'-O-methyl modified nucleotide with phosphorothioate linkage
  modified_base 3: mod_base = OTHER; note = 2'-O-methyl modified nucleotide with phosphorothioate linkage
  modified_base 4: mod_base = OTHER; note = 2'-O-methyl modified nucleotide
  modified_base 5: mod_base = OTHER; note = 2'-O-methyl modified nucleotide
  modified_base 8: mod_base = OTHER; note = 2'-O-methyl modified nucleotide
  modified_base 9: mod_base = OTHER; note = 2'-O-methyl modified nucleotide
  modified_base 11: mod_base = OTHER; note = 2'-O-methyl modified nucleotide
  modified_base 13: mod_base = OTHER; note = 2'-O-methyl modified nucleotide
  modified_base 18: mod_base = OTHER; note = 2'-O-methyl modified nucleotide
  modified_base 22: mod_base = OTHER; note = 2'-O-methyl modified nucleotide
  modified_base 25: mod_base = OTHER; note = 2'-O-methyl modified nucleotide
  modified_base 29: mod_base = OTHER; note = 2'-O-methyl modified nucleotide
  modified_base 30: mod_base = OTHER; note = 2'-O-methyl modified nucleotide
  modified_base 31: mod_base = OTHER; note = 2'-O-methyl modified nucleotide
  modified_base 32: mod_base = OTHER; note = 2'-O-methyl modified nucleotide
  modified_base 37: mod_base = OTHER; note = 2'-O-methyl modified nucleotide
  modified_base 38: mod_base = OTHER; note = 2'-O-methyl modified nucleotide
  modified_base 39: mod_base = OTHER; note = 2'-O-methyl modified nucleotide
  modified_base 40: mod_base = OTHER; note = 2'-O-methyl modified nucleotide
  modified_base 41: mod_base = OTHER; note = 2'-O-methyl modified nucleotide
  modified_base 42: mod_base = OTHER; note = 2'-O-methyl modified nucleotide
  modified_base 43: mod_base = OTHER; note = 2'-O-methyl modified nucleotide
  modified_base 47: mod_base = OTHER; note = 2'-O-methyl modified nucleotide
  modified_base 48: mod_base = OTHER; note = 2'-O-methyl modified nucleotide
  modified_base 51: mod_base = OTHER; note = 2'-O-methyl modified nucleotide
  modified_base 54: mod_base = OTHER; note = nucleotide with phosphorothioate linkage
  modified_base 58: mod_base = OTHER; note = 2'-O-methyl modified nucleotide
  modified_base 59: mod_base = OTHER; note = 2'-O-methyl modified nucleotide
  modified_base 61: mod_base = OTHER; note = 2'-O-methyl modified nucleotide
  modified_base 62: mod_base = OTHER; note = 2'-O-methyl modified nucleotide
  modified_base 63: mod_base = OTHER; note = 2'-O-methyl modified nucleotide
  modified_base 64: mod_base = OTHER; note = 2'-O-methyl modified nucleotide
  modified_base 65: mod_base = OTHER; note = 2'-O-methyl modified nucleotide
  modified_base 66: mod_base = OTHER; note = 2'-O-methyl modified nucleotide
  modified_base 67: mod_base = OTHER; note = 2'-O-methyl modified nucleotide
  modified_base 68: mod_base = OTHER; note = 2'-O-methyl modified nucleotide
  modified_base 69: mod_base = OTHER; note = 2'-O-methyl modified nucleotide
  modified_base 70: mod_base = OTHER; note = 2'-O-methyl modified nucleotide
  modified_base 75: mod_base = OTHER; note = 2'-O-methyl modified nucleotide
  modified_base 77: mod_base = OTHER; note = 2'-O-methyl modified nucleotide
  modified_base 80: mod_base = OTHER; note = 2'-O-methyl modified nucleotide
  modified_base 86: mod_base = OTHER; note = 2'-O-methyl modified nucleotide
  modified_base 87: mod_base = OTHER; note = 2'-O-methyl modified nucleotide
  modified_base 89: mod_base = OTHER; note = 2'-O-methyl modified nucleotide
  modified_base 90: mod_base = OTHER; note = 2'-O-methyl modified nucleotide
  modified_base 91: mod_base = OTHER; note = 2'-O-methyl modified nucleotide
  modified_base 92: mod_base = OTHER; note = 2'-O-methyl modified nucleotide
  modified_base 99: mod_base = OTHER; note = nucleotide with phosphorothioate linkage
  modified_base 100: mod_base = OTHER; note = 2'-O-methyl modified nucleotide with phosphorothioate linkage
  modified_base 101: mod_base = OTHER; note = 2'-O-methyl modified nucleotide

SEQ ID NO: 2377 - RNA, 101 nt, synthetic construct; identical to SEQ ID NO: 1377
  source 1..101: mol_type = other RNA
  modified_base 1: mod_base = OTHER; note = 2'-O-methyl modified nucleotide with phosphorothioate linkage
  modified_base 2: mod_base = OTHER; note = 2'-O-methyl modified nucleotide with phosphorothioate linkage
  modified_base 3: mod_base = OTHER; note = 2'-O-methyl modified nucleotide with phosphorothioate linkage
  modified_base 4: mod_base = OTHER; note = 2'-O-methyl modified nucleotide
  modified_base 5: mod_base = OTHER; note = 2'-O-methyl modified nucleotide
  modified_base 8: mod_base = OTHER; note = 2'-O-methyl modified nucleotide
  modified_base 9: mod_base = OTHER; note = 2'-O-methyl modified nucleotide
  modified_base 11: mod_base = OTHER; note = 2'-O-methyl modified nucleotide
  modified_base 13: mod_base = OTHER; note = 2'-O-methyl modified nucleotide
  modified_base 18: mod_base = OTHER; note = 2'-O-methyl modified nucleotide
  modified_base 22: mod_base = OTHER; note = 2'-O-methyl modified nucleotide
  modified_base 25: mod_base = OTHER; note = 2'-O-methyl modified nucleotide
  modified_base 29: mod_base = OTHER; note = 2'-O-methyl modified nucleotide
  modified_base 30: mod_base = OTHER; note = 2'-O-methyl modified nucleotide
  modified_base 31: mod_base = OTHER; note = 2'-O-methyl modified nucleotide
  modified_base 32: mod_base = OTHER; note = 2'-O-methyl modified nucleotide
  modified_base 37: mod_base = OTHER; note = 2'-O-methyl modified nucleotide
  modified_base 38: mod_base = OTHER; note = 2'-O-methyl modified nucleotide
  modified_base 39: mod_base = OTHER; note = 2'-O-methyl modified nucleotide
  modified_base 40: mod_base = OTHER; note = 2'-O-methyl modified nucleotide
  modified_base 41: mod_base = OTHER; note = 2'-O-methyl modified nucleotide
  modified_base 42: mod_base = OTHER; note = 2'-O-methyl modified nucleotide
  modified_base 43: mod_base = OTHER; note = 2'-O-methyl modified nucleotide
  modified_base 47: mod_base = OTHER; note = 2'-O-methyl modified nucleotide
  modified_base 48: mod_base = OTHER; note = 2'-O-methyl modified nucleotide
  modified_base 51: mod_base = OTHER; note = 2'-O-methyl modified nucleotide
  modified_base 54: mod_base = OTHER; note = nucleotide with phosphorothioate linkage
  modified_base 58: mod_base = OTHER; note = 2'-O-methyl modified nucleotide
  modified_base 59: mod_base = OTHER; note = 2'-O-methyl modified nucleotide
  modified_base 61: mod_base = OTHER; note = 2'-O-methyl modified nucleotide
  modified_base 62: mod_base = OTHER; note = 2'-O-methyl modified nucleotide
  modified_base 63: mod_base = OTHER; note = 2'-O-methyl modified nucleotide
  modified_base 64: mod_base = OTHER; note = 2'-O-methyl modified nucleotide
  modified_base 65: mod_base = OTHER; note = 2'-O-methyl modified nucleotide
  modified_base 66: mod_base = OTHER; note = 2'-O-methyl modified nucleotide
  modified_base 67: mod_base = OTHER; note = 2'-O-methyl modified nucleotide
  modified_base 68: mod_base = OTHER; note = 2'-O-methyl modified nucleotide
  modified_base 69: mod_base = OTHER; note = 2'-O-methyl modified nucleotide
  modified_base 70: mod_base = OTHER; note = 2'-O-methyl modified nucleotide
  modified_base 75: mod_base = OTHER; note = 2'-O-methyl modified nucleotide
  modified_base 77: mod_base = OTHER; note = 2'-O-methyl modified nucleotide
  modified_base 80: mod_base = OTHER; note = 2'-O-methyl modified nucleotide
  modified_base 86: mod_base = OTHER; note = 2'-O-methyl modified nucleotide
  modified_base 87: mod_base = OTHER; note = 2'-O-methyl modified nucleotide
  modified_base 89: mod_base = OTHER; note = 2'-O-methyl modified nucleotide
  modified_base 90: mod_base = OTHER; note = 2'-O-methyl modified nucleotide
  modified_base 91: mod_base = OTHER; note = 2'-O-methyl modified nucleotide
  modified_base 92: mod_base = OTHER; note = 2'-O-methyl modified nucleotide
  modified_base 99: mod_base = OTHER; note = nucleotide with phosphorothioate linkage
  modified_base 100: mod_base = OTHER; note = 2'-O-methyl modified nucleotide with phosphorothioate linkage
  modified_base 101: mod_base = OTHER; note = 2'-O-methyl modified nucleotide

SEQ ID NO: 2378 - RNA, 101 nt, synthetic construct; identical to SEQ ID NO: 1378
  source 1..101: mol_type = other RNA
  modified_base 1: mod_base = OTHER; note = 2'-O-methyl modified nucleotide with phosphorothioate linkage
  modified_base 2: mod_base = OTHER; note = 2'-O-methyl modified nucleotide with phosphorothioate linkage
  modified_base 3: mod_base = OTHER; note = 2'-O-methyl modified nucleotide with phosphorothioate linkage
  modified_base 4: mod_base = OTHER; note = 2'-O-methyl modified nucleotide
  modified_base 5: mod_base = OTHER; note = 2'-O-methyl modified nucleotide
  modified_base 8: mod_base = OTHER; note = 2'-O-methyl modified nucleotide
  modified_base 9: mod_base = OTHER; note = 2'-O-methyl modified nucleotide
  modified_base 11: mod_base = OTHER; note = 2'-O-methyl modified nucleotide
  modified_base 13: mod_base = OTHER; note = 2'-O-methyl modified nucleotide
  modified_base 18: mod_base = OTHER; note = 2'-O-methyl modified nucleotide
  modified_base 22: mod_base = OTHER; note = 2'-O-methyl modified nucleotide
  modified_base 25: mod_base = OTHER; note = 2'-O-methyl modified nucleotide
  modified_base 29: mod_base = OTHER; note = 2'-O-methyl modified nucleotide
  modified_base 30: mod_base = OTHER; note = 2'-O-methyl modified nucleotide
  modified_base 31: mod_base = OTHER; note = 2'-O-methyl modified nucleotide
  modified_base 32: mod_base = OTHER; note = 2'-O-methyl modified nucleotide
  modified_base 37: mod_base = OTHER; note = 2'-O-methyl modified nucleotide
  modified_base 38: mod_base = OTHER; note = 2'-O-methyl modified nucleotide
  modified_base 39: mod_base = OTHER; note = 2'-O-methyl modified nucleotide
  modified_base 40: mod_base = OTHER; note = 2'-O-methyl modified nucleotide
  modified_base 41: mod_base = OTHER; note = 2'-O-methyl modified nucleotide
  modified_base 42: mod_base = OTHER; note = 2'-O-methyl modified nucleotide
  modified_base 43: mod_base = OTHER; note = 2'-O-methyl modified nucleotide
  modified_base 47: mod_base = OTHER; note = 2'-O-methyl modified nucleotide
  modified_base 48: mod_base = OTHER; note = 2'-O-methyl modified nucleotide
  modified_base 51: mod_base = OTHER; note = 2'-O-methyl modified nucleotide
  modified_base 54: mod_base = OTHER; note = nucleotide with phosphorothioate linkage
  modified_base 58: mod_base = OTHER; note = 2'-O-methyl modified nucleotide
  modified_base 59: mod_base = OTHER; note = 2'-O-methyl modified nucleotide
  modified_base 61: mod_base = OTHER; note = 2'-O-methyl modified nucleotide
  modified_base 62: mod_base = OTHER; note = 2'-O-methyl modified nucleotide
  modified_base 63: mod_base = OTHER; note = 2'-O-methyl modified nucleotide
  modified_base 64: mod_base = OTHER; note = 2'-O-methyl modified nucleotide
  modified_base 65: mod_base = OTHER; note = 2'-O-methyl modified nucleotide
  modified_base 66: mod_base = OTHER; note = 2'-O-methyl modified nucleotide
  modified_base 67: mod_base = OTHER; note = 2'-O-methyl modified nucleotide
  modified_base 68: mod_base = OTHER; note = 2'-O-methyl modified nucleotide
  modified_base 69: mod_base = OTHER; note = 2'-O-methyl modified nucleotide
  modified_base 70: mod_base = OTHER; note = 2'-O-methyl modified nucleotide
  modified_base 75: mod_base = OTHER; note = 2'-O-methyl modified nucleotide
  modified_base 77: mod_base = OTHER; note = 2'-O-methyl modified nucleotide
  modified_base 80: mod_base = OTHER; note = 2'-O-methyl modified nucleotide
  modified_base 86: mod_base = OTHER; note = 2'-O-methyl modified nucleotide
  modified_base 87: mod_base = OTHER; note = 2'-O-methyl modified nucleotide
  modified_base 89: mod_base = OTHER; note = 2'-O-methyl modified nucleotide
  modified_base 90: mod_base = OTHER; note = 2'-O-methyl modified nucleotide
  modified_base 91: mod_base = OTHER; note = 2'-O-methyl modified nucleotide
  modified_base 92: mod_base = OTHER; note = 2'-O-methyl modified nucleotide
  modified_base 99: mod_base = OTHER; note = nucleotide with phosphorothioate linkage
  modified_base 100: mod_base = OTHER; note = 2'-O-methyl modified nucleotide with phosphorothioate linkage
  modified_base 101: mod_base = OTHER; note = 2'-O-methyl modified nucleotide

SEQ ID NO: 2379 - RNA, 101 nt, synthetic construct; identical to SEQ ID NO: 1379
  source 1..101: mol_type = other RNA
  modified_base 1: mod_base = OTHER; note = 2'-O-methyl modified nucleotide with phosphorothioate linkage
  modified_base 2: mod_base = OTHER; note = 2'-O-methyl modified nucleotide with phosphorothioate linkage
  modified_base 3: mod_base = OTHER; note = 2'-O-methyl modified nucleotide with phosphorothioate linkage
  modified_base 4: mod_base = OTHER; note = 2'-O-methyl modified nucleotide
  modified_base 5: mod_base = OTHER; note = 2'-O-methyl modified nucleotide
  modified_base 8: mod_base = OTHER; note = 2'-O-methyl modified nucleotide
  modified_base 9: mod_base = OTHER; note = 2'-O-methyl modified nucleotide
  modified_base 11: mod_base = OTHER; note = 2'-O-methyl modified nucleotide
  modified_base 13: mod_base = OTHER; note = 2'-O-methyl modified nucleotide
  modified_base 18: mod_base = OTHER; note = 2'-O-methyl modified nucleotide
  modified_base 22: mod_base = OTHER; note = 2'-O-methyl modified nucleotide
  modified_base 25: mod_base = OTHER; note = 2'-O-methyl modified nucleotide
  modified_base 29: mod_base = OTHER; note = 2'-O-methyl modified nucleotide
  modified_base 30: mod_base = OTHER; note = 2'-O-methyl modified nucleotide
  modified_base 31: mod_base = OTHER; note = 2'-O-methyl modified nucleotide
  modified_base 32: mod_base = OTHER; note = 2'-O-methyl modified nucleotide
  modified_base 37: mod_base = OTHER; note = 2'-O-methyl modified nucleotide
  modified_base 38: mod_base = OTHER; note = 2'-O-methyl modified nucleotide
  modified_base 39: mod_base = OTHER; note = 2'-O-methyl modified nucleotide
  modified_base 40: mod_base = OTHER; note = 2'-O-methyl modified nucleotide
  modified_base 41: mod_base = OTHER; note = 2'-O-methyl modified nucleotide
  modified_base 42: mod_base = OTHER; note = 2'-O-methyl modified nucleotide
  modified_base 43: mod_base = OTHER; note = 2'-O-methyl modified nucleotide
  modified_base 47: mod_base = OTHER; note = 2'-O-methyl modified nucleotide
  modified_base 48: mod_base = OTHER; note = 2'-O-methyl modified nucleotide
  modified_base 51: mod_base = OTHER; note = 2'-O-methyl modified nucleotide
  modified_base 54: mod_base = OTHER; note = nucleotide with phosphorothioate linkage
  modified_base 58: mod_base = OTHER; note = 2'-O-methyl modified nucleotide
  modified_base 59: mod_base = OTHER; note = 2'-O-methyl modified nucleotide
  modified_base 61: mod_base = OTHER; note = 2'-O-methyl modified nucleotide
  modified_base 62: mod_base = OTHER; note = 2'-O-methyl modified nucleotide
  modified_base 63: mod_base = OTHER; note = 2'-O-methyl modified nucleotide
  modified_base 64: mod_base = OTHER; note = 2'-O-methyl modified nucleotide
  modified_base 65: mod_base = OTHER; note = 2'-O-methyl modified nucleotide
  modified_base 66: mod_base = OTHER; note = 2'-O-methyl modified nucleotide
  modified_base 67: mod_base = OTHER; note = 2'-O-methyl modified nucleotide
  modified_base 68: mod_base = OTHER; note = 2'-O-methyl modified nucleotide
  modified_base 69: mod_base = OTHER; note = 2'-O-methyl modified nucleotide
  modified_base 70: mod_base = OTHER; note = 2'-O-methyl modified nucleotide
  modified_base 75: mod_base = OTHER; note = 2'-O-methyl modified nucleotide
  modified_base 77: mod_base = OTHER; note = 2'-O-methyl modified nucleotide
  modified_base 80: mod_base = OTHER; note = 2'-O-methyl modified nucleotide
  modified_base 86: mod_base = OTHER; note = 2'-O-methyl modified nucleotide
  modified_base 87: mod_base = OTHER; note = 2'-O-methyl modified nucleotide
  modified_base 89: mod_base = OTHER; note = 2'-O-methyl modified nucleotide
  modified_base 90: mod_base = OTHER; note = 2'-O-methyl modified nucleotide
  modified_base 91: mod_base = OTHER; note = 2'-O-methyl modified nucleotide
  modified_base 92: mod_base = OTHER; note = 2'-O-methyl modified nucleotide
  modified_base 99: mod_base = OTHER; note = nucleotide with phosphorothioate linkage
  modified_base 100: mod_base = OTHER; note = 2'-O-methyl modified nucleotide with phosphorothioate linkage
  modified_base 101: mod_base = OTHER; note = 2'-O-methyl modified nucleotide

SEQ ID NO: 2380 - RNA, 101 nt, synthetic construct; identical to SEQ ID NO: 1380
  source 1..101: mol_type = other RNA
  modified_base 1: mod_base = OTHER; note = 2'-O-methyl modified nucleotide with phosphorothioate linkage
  modified_base 2: mod_base = OTHER; note = 2'-O-methyl modified nucleotide with phosphorothioate linkage
  modified_base 3: mod_base = OTHER; note = 2'-O-methyl modified nucleotide with phosphorothioate linkage
  modified_base 4: mod_base = OTHER; note = 2'-O-methyl modified nucleotide
  modified_base 5: mod_base = OTHER; note = 2'-O-methyl modified nucleotide
  modified_base 8: mod_base = OTHER; note = 2'-O-methyl modified nucleotide
  modified_base 9: mod_base = OTHER; note = 2'-O-methyl modified nucleotide
  modified_base 11: mod_base = OTHER; note = 2'-O-methyl modified nucleotide
  modified_base 13: mod_base = OTHER; note = 2'-O-methyl modified nucleotide
  modified_base 18: mod_base = OTHER; note = 2'-O-methyl modified nucleotide
  modified_base 22: mod_base = OTHER; note = 2'-O-methyl modified nucleotide
  modified_base 25: mod_base = OTHER; note = 2'-O-methyl modified nucleotide
  modified_base 29: mod_base = OTHER; note = 2'-O-methyl modified nucleotide
  modified_base 30: mod_base = OTHER; note = 2'-O-methyl modified nucleotide
  modified_base 31: mod_base = OTHER; note = 2'-O-methyl modified nucleotide
  modified_base 32: mod_base = OTHER; note = 2'-O-methyl modified nucleotide
  modified_base 37: mod_base = OTHER; note = 2'-O-methyl modified nucleotide
  modified_base 38: mod_base = OTHER; note = 2'-O-methyl modified nucleotide
  modified_base 39: mod_base = OTHER; note = 2'-O-methyl modified nucleotide
  modified_base 40: mod_base = OTHER; note = 2'-O-methyl modified nucleotide
  modified_base 41: mod_base = OTHER; note = 2'-O-methyl modified nucleotide
  modified_base 42: mod_base = OTHER; note = 2'-O-methyl modified nucleotide
  modified_base 43: mod_base = OTHER; note = 2'-O-methyl modified nucleotide
  modified_base 47: mod_base = OTHER; note = 2'-O-methyl modified nucleotide
  modified_base 48: mod_base = OTHER; note = 2'-O-methyl modified nucleotide
  modified_base 51: mod_base = OTHER; note = 2'-O-methyl modified nucleotide
  modified_base 54: mod_base = OTHER; note = nucleotide with phosphorothioate linkage
  modified_base 58: mod_base = OTHER; note = 2'-O-methyl modified nucleotide
  modified_base 59: mod_base = OTHER; note = 2'-O-methyl modified nucleotide
  modified_base 61: mod_base = OTHER; note = 2'-O-methyl modified nucleotide
  modified_base 62: mod_base = OTHER; note = 2'-O-methyl modified nucleotide
  modified_base 63: mod_base = OTHER; note = 2'-O-methyl modified nucleotide
  modified_base 64: mod_base = OTHER; note = 2'-O-methyl modified nucleotide
  modified_base 65: mod_base = OTHER; note = 2'-O-methyl modified nucleotide
  modified_base 66: mod_base = OTHER; note = 2'-O-methyl modified nucleotide
  modified_base 67: mod_base = OTHER; note = 2'-O-methyl modified nucleotide
  modified_base 68: mod_base = OTHER; note = 2'-O-methyl modified nucleotide
  modified_base 69: mod_base = OTHER; note = 2'-O-methyl modified nucleotide
  modified_base 70: mod_base = OTHER; note = 2'-O-methyl modified nucleotide
  modified_base 75: mod_base = OTHER; note = 2'-O-methyl modified nucleotide
  modified_base 77: mod_base = OTHER; note = 2'-O-methyl modified nucleotide
  modified_base 80: mod_base = OTHER; note = 2'-O-methyl modified nucleotide
  modified_base 86: mod_base = OTHER; note = 2'-O-methyl modified nucleotide
  modified_base 87: mod_base = OTHER; note = 2'-O-methyl modified nucleotide
  modified_base 89: mod_base = OTHER; note = 2'-O-methyl modified nucleotide
  modified_base 90: mod_base = OTHER; note = 2'-O-methyl modified nucleotide
  modified_base 91: mod_base = OTHER; note = 2'-O-methyl modified nucleotide
  modified_base 92: mod_base = OTHER; note = 2'-O-methyl modified nucleotide
  modified_base 99: mod_base = OTHER; note = nucleotide with phosphorothioate linkage
  modified_base 100: mod_base = OTHER; note = 2'-O-methyl modified nucleotide with phosphorothioate linkage
  modified_base 101: mod_base = OTHER; note = 2'-O-methyl modified nucleotide

SEQ ID NO: 2381 - RNA, 101 nt, synthetic construct; identical to SEQ ID NO: 1381
  source 1..101: mol_type = other RNA
  modified_base 1: mod_base = OTHER; note = 2'-O-methyl modified nucleotide with phosphorothioate linkage
  modified_base 2: mod_base = OTHER; note = 2'-O-methyl modified nucleotide with phosphorothioate linkage
  modified_base 3: mod_base = OTHER; note = 2'-O-methyl modified nucleotide with phosphorothioate linkage
  modified_base 4: mod_base = OTHER; note = 2'-O-methyl modified nucleotide
  modified_base 5: mod_base = OTHER; note = 2'-O-methyl modified nucleotide
  modified_base 8: mod_base = OTHER; note = 2'-O-methyl modified nucleotide
  modified_base 9: mod_base = OTHER; note = 2'-O-methyl modified nucleotide
  modified_base 11: mod_base = OTHER; note = 2'-O-methyl modified nucleotide
  modified_base 13: mod_base = OTHER; note = 2'-O-methyl modified nucleotide
  modified_base 18: mod_base = OTHER; note = 2'-O-methyl modified nucleotide
  modified_base 22: mod_base = OTHER; note = 2'-O-methyl modified nucleotide
  modified_base 25: mod_base = OTHER; note = 2'-O-methyl modified nucleotide
  modified_base 29: mod_base = OTHER; note = 2'-O-methyl modified nucleotide
  modified_base 30: mod_base = OTHER; note = 2'-O-methyl modified nucleotide
  modified_base 31: mod_base = OTHER; note = 2'-O-methyl modified nucleotide
  modified_base 32: mod_base = OTHER; note = 2'-O-methyl modified nucleotide
  modified_base 37: mod_base = OTHER; note = 2'-O-methyl modified nucleotide
  modified_base 38: mod_base = OTHER; note = 2'-O-methyl modified nucleotide
  modified_base 39: mod_base = OTHER; note = 2'-O-methyl modified nucleotide
  modified_base 40: mod_base = OTHER; note = 2'-O-methyl modified nucleotide
  modified_base 41: mod_base = OTHER; note = 2'-O-methyl modified nucleotide
  modified_base 42: mod_base = OTHER; note = 2'-O-methyl modified nucleotide
  modified_base 43: mod_base = OTHER; note = 2'-O-methyl modified nucleotide
  modified_base 47: mod_base = OTHER; note = 2'-O-methyl modified nucleotide
  modified_base 48: mod_base = OTHER; note = 2'-O-methyl modified nucleotide
  modified_base 51: mod_base = OTHER; note = 2'-O-methyl modified nucleotide
  modified_base 54: mod_base = OTHER; note = nucleotide with phosphorothioate linkage
  modified_base 58: mod_base = OTHER; note = 2'-O-methyl modified nucleotide
  modified_base 59: mod_base = OTHER; note = 2'-O-methyl modified nucleotide
  modified_base 61: mod_base = OTHER; note = 2'-O-methyl modified nucleotide
  modified_base 62: mod_base = OTHER; note = 2'-O-methyl modified nucleotide
  modified_base 63: mod_base = OTHER; note = 2'-O-methyl modified nucleotide
  modified_base 64: mod_base = OTHER; note = 2'-O-methyl modified nucleotide
  modified_base 65: mod_base = OTHER; note = 2'-O-methyl modified nucleotide
  modified_base 66: mod_base = OTHER; note = 2'-O-methyl modified nucleotide
  modified_base 67: mod_base = OTHER; note = 2'-O-methyl modified nucleotide
  modified_base 68: mod_base = OTHER; note = 2'-O-methyl modified nucleotide
  modified_base 69: mod_base = OTHER; note = 2'-O-methyl modified nucleotide
  modified_base 70: mod_base = OTHER; note = 2'-O-methyl modified nucleotide
  modified_base 75: mod_base = OTHER; note = 2'-O-methyl modified nucleotide
  modified_base 77: mod_base = OTHER; note = 2'-O-methyl modified nucleotide
  modified_base 80: mod_base = OTHER; note = 2'-O-methyl modified nucleotide
  modified_base 86: mod_base = OTHER; note = 2'-O-methyl modified nucleotide
  modified_base 87: mod_base = OTHER; note = 2'-O-methyl modified nucleotide
  modified_base 89: mod_base = OTHER; note = 2'-O-methyl modified nucleotide
  modified_base 90: mod_base = OTHER; note = 2'-O-methyl modified nucleotide
  modified_base 91: mod_base = OTHER; note = 2'-O-methyl modified nucleotide
  modified_base 92: mod_base = OTHER; note = 2'-O-methyl modified nucleotide
  modified_base 99: mod_base = OTHER; note = nucleotide with phosphorothioate linkage
  modified_base 100: mod_base = OTHER; note = 2'-O-methyl modified nucleotide with phosphorothioate linkage
  modified_base 101: mod_base = OTHER; note = 2'-O-methyl modified nucleotide

SEQ ID NO: 2382 - RNA, 101 nt, synthetic construct; identical to SEQ ID NO: 1382
  source 1..101: mol_type = other RNA
  modified_base 1: mod_base = OTHER; note = 2'-O-methyl modified nucleotide with phosphorothioate linkage
  modified_base 2: mod_base = OTHER; note = 2'-O-methyl modified nucleotide with phosphorothioate linkage
  modified_base 3: mod_base = OTHER; note = 2'-O-methyl modified nucleotide with phosphorothioate linkage
  modified_base 4: mod_base = OTHER; note = 2'-O-methyl modified nucleotide
  modified_base 5: mod_base = OTHER; note = 2'-O-methyl modified nucleotide
  modified_base 8: mod_base = OTHER; note = 2'-O-methyl modified nucleotide
  modified_base 9: mod_base = OTHER; note = 2'-O-methyl modified nucleotide
  modified_base 11: mod_base = OTHER; note = 2'-O-methyl modified nucleotide
  modified_base 13: mod_base = OTHER; note = 2'-O-methyl modified nucleotide
  modified_base 18: mod_base = OTHER; note = 2'-O-methyl modified nucleotide
  modified_base 22: mod_base = OTHER; note = 2'-O-methyl modified nucleotide
  modified_base 25: mod_base = OTHER; note = 2'-O-methyl modified nucleotide
  modified_base 29: mod_base = OTHER; note = 2'-O-methyl modified nucleotide
  modified_base 30: mod_base = OTHER; note = 2'-O-methyl modified nucleotide
  modified_base 31: mod_base = OTHER; note = 2'-O-methyl modified nucleotide
  modified_base 32: mod_base = OTHER; note = 2'-O-methyl modified nucleotide
  modified_base 37: mod_base = OTHER; note = 2'-O-methyl modified nucleotide
  modified_base 38: mod_base = OTHER; note = 2'-O-methyl modified nucleotide
  modified_base 39: mod_base = OTHER; note = 2'-O-methyl modified nucleotide
  modified_base 40: mod_base = OTHER; note = 2'-O-methyl modified nucleotide
  modified_base 41: mod_base = OTHER; note = 2'-O-methyl modified nucleotide
  modified_base 42: mod_base = OTHER; note = 2'-O-methyl modified nucleotide
  modified_base 43: mod_base = OTHER; note = 2'-O-methyl modified nucleotide
  modified_base 47: mod_base = OTHER; note = 2'-O-methyl modified nucleotide
  modified_base 48: mod_base = OTHER; note = 2'-O-methyl modified nucleotide
  modified_base 51: mod_base = OTHER; note = 2'-O-methyl modified nucleotide
  modified_base 54: mod_base = OTHER; note = nucleotide with phosphorothioate linkage
  modified_base 58: mod_base = OTHER; note = 2'-O-methyl modified nucleotide
  modified_base 59: mod_base = OTHER; note = 2'-O-methyl modified nucleotide
  modified_base 61: mod_base = OTHER; note = 2'-O-methyl modified nucleotide
  modified_base 62: mod_base = OTHER; note = 2'-O-methyl modified nucleotide
  modified_base 63: mod_base = OTHER; note = 2'-O-methyl modified nucleotide
  modified_base 64: mod_base = OTHER; note = 2'-O-methyl modified nucleotide
  modified_base 65: mod_base = OTHER; note = 2'-O-methyl modified nucleotide
  modified_base 66: mod_base = OTHER; note = 2'-O-methyl modified nucleotide
  modified_base 67: mod_base = OTHER; note = 2'-O-methyl modified nucleotide
  modified_base 68: mod_base = OTHER; note = 2'-O-methyl modified nucleotide
  modified_base 69: mod_base = OTHER; note = 2'-O-methyl modified nucleotide
  modified_base 70: mod_base = OTHER; note = 2'-O-methyl modified nucleotide
  modified_base 75: mod_base = OTHER; note = 2'-O-methyl modified nucleotide
  modified_base 77: mod_base = OTHER; note = 2'-O-methyl modified nucleotide
  modified_base 80: mod_base = OTHER; note = 2'-O-methyl modified nucleotide
  modified_base 86: mod_base = OTHER; note = 2'-O-methyl modified nucleotide
  modified_base 87: mod_base = OTHER; note = 2'-O-methyl modified nucleotide
  modified_base 89: mod_base = OTHER; note = 2'-O-methyl modified nucleotide
  modified_base 90: mod_base = OTHER; note = 2'-O-methyl modified nucleotide
  modified_base 91: mod_base = OTHER; note = 2'-O-methyl modified nucleotide
  modified_base 92: mod_base = OTHER; note = 2'-O-methyl modified nucleotide
  modified_base 99: mod_base = OTHER; note = nucleotide with phosphorothioate linkage
  modified_base 100: mod_base = OTHER; note = 2'-O-methyl modified nucleotide with phosphorothioate linkage
  modified_base 101: mod_base = OTHER; note = 2'-O-methyl modified nucleotide

SEQ ID NO: 2383 - RNA, 101 nt, synthetic construct; identical to SEQ ID NO: 1383
  source 1..101: mol_type = other RNA
  modified_base 1: mod_base = OTHER; note = 2'-O-methyl modified nucleotide with phosphorothioate linkage
  modified_base 2: mod_base = OTHER; note = 2'-O-methyl modified nucleotide with phosphorothioate linkage
  modified_base 3: mod_base = OTHER; note = 2'-O-methyl modified nucleotide with phosphorothioate linkage
  modified_base 4: mod_base = OTHER; note = 2'-O-methyl modified nucleotide
  modified_base 5: mod_base = OTHER; note = 2'-O-methyl modified nucleotide
  modified_base 8: mod_base = OTHER; note = 2'-O-methyl modified nucleotide
  modified_base 9: mod_base = OTHER; note = 2'-O-methyl modified nucleotide
  modified_base 11: mod_base = OTHER; note = 2'-O-methyl modified nucleotide
  modified_base 13: mod_base = OTHER; note = 2'-O-methyl modified nucleotide
  modified_base 18: mod_base = OTHER; note = 2'-O-methyl modified nucleotide
  modified_base 22: mod_base = OTHER; note = 2'-O-methyl modified nucleotide
  modified_base 25: mod_base = OTHER; note = 2'-O-methyl modified nucleotide
  modified_base 29: mod_base = OTHER; note = 2'-O-methyl modified nucleotide
  modified_base 30: mod_base = OTHER; note = 2'-O-methyl modified nucleotide
  modified_base 31: mod_base = OTHER; note = 2'-O-methyl modified nucleotide
  modified_base 32: mod_base = OTHER; note = 2'-O-methyl modified nucleotide
  modified_base 37: mod_base = OTHER; note = 2'-O-methyl modified nucleotide
  modified_base 38: mod_base = OTHER; note = 2'-O-methyl modified nucleotide
  modified_base 39: mod_base = OTHER; note = 2'-O-methyl modified nucleotide
  modified_base 40: mod_base = OTHER; note = 2'-O-methyl modified nucleotide
  modified_base 41: mod_base = OTHER; note = 2'-O-methyl modified nucleotide
  modified_base 42: mod_base = OTHER; note = 2'-O-methyl modified nucleotide
  modified_base 43: mod_base = OTHER; note = 2'-O-methyl modified nucleotide
  modified_base 47: mod_base = OTHER; note = 2'-O-methyl modified nucleotide
  modified_base 48: mod_base = OTHER; note = 2'-O-methyl modified nucleotide
  modified_base 51: mod_base = OTHER; note = 2'-O-methyl modified nucleotide
  modified_base 54: mod_base = OTHER; note = nucleotide with phosphorothioate linkage
  modified_base 58: mod_base = OTHER; note = 2'-O-methyl modified nucleotide
  modified_base 59: mod_base = OTHER; note = 2'-O-methyl modified nucleotide
  modified_base 61: mod_base = OTHER; note = 2'-O-methyl modified nucleotide
  modified_base 62: mod_base = OTHER; note = 2'-O-methyl modified nucleotide
  modified_base 63: mod_base = OTHER; note = 2'-O-methyl modified nucleotide
  modified_base 64: mod_base = OTHER; note = 2'-O-methyl modified nucleotide
  modified_base 65: mod_base = OTHER; note = 2'-O-methyl modified nucleotide
  modified_base 66: mod_base = OTHER; note = 2'-O-methyl modified nucleotide
  modified_base 67: mod_base = OTHER; note = 2'-O-methyl modified nucleotide
  modified_base 68: mod_base = OTHER; note = 2'-O-methyl modified nucleotide
  modified_base 69: mod_base = OTHER; note = 2'-O-methyl modified nucleotide
  modified_base 70: mod_base = OTHER; note = 2'-O-methyl modified nucleotide
  modified_base 75: mod_base = OTHER; note = 2'-O-methyl modified nucleotide
  modified_base 77: mod_base = OTHER; note = 2'-O-methyl modified nucleotide
  modified_base 80: mod_base = OTHER; note = 2'-O-methyl modified nucleotide
  modified_base 86: mod_base = OTHER; note = 2'-O-methyl modified nucleotide
  modified_base 87: mod_base = OTHER; note = 2'-O-methyl modified nucleotide
  modified_base 89: mod_base = OTHER; note = 2'-O-methyl modified nucleotide
  modified_base 90: mod_base = OTHER; note = 2'-O-methyl modified nucleotide
  modified_base 91: mod_base = OTHER; note = 2'-O-methyl modified nucleotide
  modified_base 92: mod_base = OTHER; note = 2'-O-methyl modified nucleotide
  modified_base 99: mod_base = OTHER; note = nucleotide with phosphorothioate linkage
  modified_base 100: mod_base = OTHER; note = 2'-O-methyl modified nucleotide with phosphorothioate linkage
  modified_base 101: mod_base = OTHER; note = 2'-O-methyl modified nucleotide

SEQ ID NO: 2384 - RNA, 101 nt, synthetic construct; identical to SEQ ID NO: 1384
  source 1..101: mol_type = other RNA
  modified_base 1: mod_base = OTHER; note = 2'-O-methyl modified nucleotide with phosphorothioate linkage
  modified_base 2: mod_base = OTHER; note = 2'-O-methyl modified nucleotide with phosphorothioate linkage
  modified_base 3: mod_base = OTHER; note = 2'-O-methyl modified nucleotide with phosphorothioate linkage
  modified_base 4: mod_base = OTHER; note = 2'-O-methyl modified nucleotide
  modified_base 5: mod_base = OTHER; note = 2'-O-methyl modified nucleotide
  modified_base 8: mod_base = OTHER; note = 2'-O-methyl modified nucleotide
  modified_base 9: mod_base = OTHER; note = 2'-O-methyl modified nucleotide
  modified_base 11: mod_base = OTHER; note = 2'-O-methyl modified nucleotide
  modified_base 13: mod_base = OTHER; note = 2'-O-methyl modified nucleotide
  modified_base 18: mod_base = OTHER; note = 2'-O-methyl modified nucleotide
  modified_base 22: mod_base = OTHER; note = 2'-O-methyl modified nucleotide
  modified_base 25: mod_base = OTHER; note = 2'-O-methyl modified nucleotide
  modified_base 29: mod_base = OTHER; note = 2'-O-methyl modified nucleotide
  modified_base 30: mod_base = OTHER; note = 2'-O-methyl modified nucleotide
  modified_base 31: mod_base = OTHER; note = 2'-O-methyl modified nucleotide
  modified_base 32: mod_base = OTHER; note = 2'-O-methyl modified nucleotide
  modified_base 37: mod_base = OTHER; note = 2'-O-methyl modified nucleotide
  modified_base 38: mod_base = OTHER; note = 2'-O-methyl modified nucleotide
  modified_base 39: mod_base = OTHER; note = 2'-O-methyl modified nucleotide
  modified_base 40: mod_base = OTHER; note = 2'-O-methyl modified nucleotide
  modified_base 41: mod_base = OTHER; note = 2'-O-methyl modified nucleotide
  modified_base 42: mod_base = OTHER; note = 2'-O-methyl modified nucleotide
  modified_base 43: mod_base = OTHER; note = 2'-O-methyl modified nucleotide
  modified_base 47: mod_base = OTHER; note = 2'-O-methyl modified nucleotide
  modified_base 48: mod_base = OTHER; note = 2'-O-methyl modified nucleotide
  modified_base 51: mod_base = OTHER; note = 2'-O-methyl modified nucleotide
  modified_base 54: mod_base = OTHER; note = nucleotide with phosphorothioate linkage
  modified_base 58: mod_base = OTHER; note = 2'-O-methyl modified nucleotide
  modified_base 59: mod_base = OTHER; note = 2'-O-methyl modified nucleotide
  modified_base 61: mod_base = OTHER; note = 2'-O-methyl modified nucleotide
  modified_base 62: mod_base = OTHER; note = 2'-O-methyl modified nucleotide
  modified_base 63: mod_base = OTHER; note = 2'-O-methyl modified nucleotide
  modified_base 64: mod_base = OTHER; note = 2'-O-methyl modified nucleotide
  modified_base 65: mod_base = OTHER; note = 2'-O-methyl modified nucleotide
  modified_base 66: mod_base = OTHER; note = 2'-O-methyl modified nucleotide
  modified_base 67: mod_base = OTHER; note = 2'-O-methyl modified nucleotide
  modified_base 68: mod_base = OTHER; note = 2'-O-methyl modified nucleotide
  modified_base 69: mod_base = OTHER; note = 2'-O-methyl modified nucleotide
  modified_base 70: mod_base = OTHER; note = 2'-O-methyl modified nucleotide
  modified_base 75: mod_base = OTHER; note = 2'-O-methyl modified nucleotide
  modified_base 77: mod_base = OTHER; note = 2'-O-methyl modified nucleotide
  modified_base 80: mod_base = OTHER; note = 2'-O-methyl modified nucleotide
  modified_base 86: mod_base = OTHER; note = 2'-O-methyl modified nucleotide
  modified_base 87: mod_base = OTHER; note = 2'-O-methyl modified nucleotide
  modified_base 89: mod_base = OTHER; note = 2'-O-methyl modified nucleotide
  modified_base 90: mod_base = OTHER; note = 2'-O-methyl modified nucleotide
  modified_base 91: mod_base = OTHER; note = 2'-O-methyl modified nucleotide
  modified_base 92: mod_base = OTHER; note = 2'-O-methyl modified nucleotide
  modified_base 99: mod_base = OTHER; note = nucleotide with phosphorothioate linkage
  modified_base 100: mod_base = OTHER; note = 2'-O-methyl modified nucleotide with phosphorothioate linkage
  modified_base 101: mod_base = OTHER; note = 2'-O-methyl modified nucleotide

SEQ ID NO: 2385 - RNA, 101 nt, synthetic construct; identical to SEQ ID NO: 1385
  source 1..101: mol_type = other RNA
  modified_base 1: mod_base = OTHER; note = 2'-O-methyl modified nucleotide with phosphorothioate linkage
  modified_base 2: mod_base = OTHER; note = 2'-O-methyl modified nucleotide with phosphorothioate linkage
  modified_base 3: mod_base = OTHER; note = 2'-O-methyl modified nucleotide with phosphorothioate linkage
  modified_base 4: mod_base = OTHER; note = 2'-O-methyl modified nucleotide
  modified_base 5: mod_base = OTHER; note = 2'-O-methyl modified nucleotide
  modified_base 8: mod_base = OTHER; note = 2'-O-methyl modified nucleotide
  modified_base 9: mod_base = OTHER; note = 2'-O-methyl modified nucleotide
  modified_base 11: mod_base = OTHER; note = 2'-O-methyl modified nucleotide
  modified_base 13: mod_base = OTHER; note = 2'-O-methyl modified nucleotide
  modified_base 18: mod_base = OTHER; note = 2'-O-methyl modified nucleotide
  modified_base 22: mod_base = OTHER; note = 2'-O-methyl modified nucleotide
  modified_base 25: mod_base = OTHER; note = 2'-O-methyl modified nucleotide
  modified_base 29: mod_base = OTHER; note = 2'-O-methyl modified nucleotide
  modified_base 30: mod_base = OTHER; note = 2'-O-methyl modified nucleotide
  modified_base 31: mod_base = OTHER; note = 2'-O-methyl modified nucleotide
  modified_base 32: mod_base = OTHER; note = 2'-O-methyl modified nucleotide
  modified_base 37: mod_base = OTHER; note = 2'-O-methyl modified nucleotide
  modified_base 38: mod_base = OTHER; note = 2'-O-methyl modified nucleotide
  modified_base 39: mod_base = OTHER; note = 2'-O-methyl modified nucleotide
  modified_base 40: mod_base = OTHER; note = 2'-O-methyl modified nucleotide
  modified_base 41: mod_base = OTHER; note = 2'-O-methyl modified nucleotide
  modified_base 42: mod_base = OTHER; note = 2'-O-methyl modified nucleotide
  modified_base 43: mod_base = OTHER; note = 2'-O-methyl modified nucleotide
  modified_base 47: mod_base = OTHER; note = 2'-O-methyl modified nucleotide
  modified_base 48: mod_base = OTHER; note = 2'-O-methyl modified nucleotide
  modified_base 51: mod_base = OTHER; note = 2'-O-methyl modified nucleotide
  modified_base 54: mod_base = OTHER; note = nucleotide with phosphorothioate linkage
  modified_base 58: mod_base = OTHER; note = 2'-O-methyl modified nucleotide
  modified_base 59: mod_base = OTHER; note = 2'-O-methyl modified nucleotide
  modified_base 61: mod_base = OTHER; note = 2'-O-methyl modified nucleotide
  modified_base 62: mod_base = OTHER; note = 2'-O-methyl modified nucleotide
  modified_base 63: mod_base = OTHER; note = 2'-O-methyl modified nucleotide
  modified_base 64: mod_base = OTHER; note = 2'-O-methyl modified nucleotide
  modified_base 65: mod_base = OTHER; note = 2'-O-methyl modified nucleotide
  modified_base 66: mod_base = OTHER; note = 2'-O-methyl modified nucleotide
  modified_base 67: mod_base = OTHER; note = 2'-O-methyl modified nucleotide
  modified_base 68: mod_base = OTHER; note = 2'-O-methyl modified nucleotide
  modified_base 69: mod_base = OTHER; note = 2'-O-methyl modified nucleotide
  modified_base 70: mod_base = OTHER; note = 2'-O-methyl modified nucleotide
  modified_base 75: mod_base = OTHER; note = 2'-O-methyl modified nucleotide
  modified_base 77: mod_base = OTHER; note = 2'-O-methyl modified nucleotide
  modified_base 80: mod_base = OTHER; note = 2'-O-methyl modified nucleotide
  modified_base 86: mod_base = OTHER; note = 2'-O-methyl modified nucleotide
  modified_base 87: mod_base = OTHER; note = 2'-O-methyl modified nucleotide
  modified_base 89: mod_base = OTHER; note = 2'-O-methyl modified nucleotide
  modified_base 90: mod_base = OTHER; note = 2'-O-methyl modified nucleotide
  modified_base 91: mod_base = OTHER; note = 2'-O-methyl modified nucleotide
  modified_base 92: mod_base = OTHER; note = 2'-O-methyl modified nucleotide
  modified_base 99: mod_base = OTHER; note = nucleotide with phosphorothioate linkage
  modified_base 100: mod_base = OTHER; note = 2'-O-methyl modified nucleotide with phosphorothioate linkage
  modified_base 101: mod_base = OTHER; note = 2'-O-methyl modified nucleotide

SEQ ID NO: 2386 - RNA, 101 nt, synthetic construct; identical to SEQ ID NO: 1386
  source 1..101: mol_type = other RNA
  modified_base 1: mod_base = OTHER; note = 2'-O-methyl modified nucleotide with phosphorothioate linkage
  modified_base 2: mod_base = OTHER; note = 2'-O-methyl modified nucleotide with phosphorothioate linkage
  modified_base 3: mod_base = OTHER; note = 2'-O-methyl modified nucleotide with phosphorothioate linkage
  modified_base 4: mod_base = OTHER; note = 2'-O-methyl modified nucleotide
  modified_base 5: mod_base = OTHER; note = 2'-O-methyl modified nucleotide
  modified_base 8: mod_base = OTHER; note = 2'-O-methyl modified nucleotide
  modified_base 9: mod_base = OTHER; note = 2'-O-methyl modified nucleotide
  modified_base 11: mod_base = OTHER; note = 2'-O-methyl modified nucleotide
  modified_base 13: mod_base = OTHER; note = 2'-O-methyl modified nucleotide
  modified_base 18: mod_base = OTHER; note = 2'-O-methyl modified nucleotide
  modified_base 22: mod_base = OTHER; note = 2'-O-methyl modified nucleotide
  modified_base 25: mod_base = OTHER; note = 2'-O-methyl modified nucleotide
  modified_base 29: mod_base = OTHER; note = 2'-O-methyl modified nucleotide
  modified_base 30: mod_base = OTHER; note = 2'-O-methyl modified nucleotide
  modified_base 31: mod_base = OTHER; note = 2'-O-methyl modified nucleotide
  modified_base 32: mod_base = OTHER; note = 2'-O-methyl modified nucleotide
  modified_base 37: mod_base = OTHER; note = 2'-O-methyl modified nucleotide
  modified_base 38: mod_base = OTHER; note = 2'-O-methyl modified nucleotide
  modified_base 39: mod_base = OTHER; note = 2'-O-methyl modified nucleotide
  modified_base 40: mod_base = OTHER; note = 2'-O-methyl modified nucleotide
  modified_base 41: mod_base = OTHER; note = 2'-O-methyl modified nucleotide
  modified_base 42: mod_base = OTHER; note = 2'-O-methyl modified nucleotide
  modified_base 43: mod_base = OTHER; note = 2'-O-methyl modified nucleotide
  modified_base 47: mod_base = OTHER; note = 2'-O-methyl modified nucleotide
  modified_base 48: mod_base = OTHER; note = 2'-O-methyl modified nucleotide
  modified_base 51: mod_base = OTHER; note = 2'-O-methyl modified nucleotide
  modified_base 54: mod_base = OTHER; note = nucleotide with phosphorothioate linkage
  modified_base 58: mod_base = OTHER; note = 2'-O-methyl modified nucleotide
  modified_base 59: mod_base = OTHER; note = 2'-O-methyl modified nucleotide
  modified_base 61: mod_base = OTHER; note = 2'-O-methyl modified nucleotide
  modified_base 62: mod_base = OTHER; note = 2'-O-methyl modified nucleotide
  modified_base 63: mod_base = OTHER; note = 2'-O-methyl modified nucleotide
  modified_base 64: mod_base = OTHER; note = 2'-O-methyl modified nucleotide
  modified_base 65: mod_base = OTHER; note = 2'-O-methyl modified nucleotide
  modified_base 66: mod_base = OTHER; note = 2'-O-methyl modified nucleotide
  modified_base 67: mod_base = OTHER; note = 2'-O-methyl modified nucleotide
  modified_base 68: mod_base = OTHER; note = 2'-O-methyl modified nucleotide
  modified_base 69: mod_base = OTHER; note = 2'-O-methyl modified nucleotide
  modified_base 70: mod_base = OTHER; note = 2'-O-methyl modified nucleotide
  modified_base 75: mod_base = OTHER; note = 2'-O-methyl modified nucleotide
  modified_base 77: mod_base = OTHER; note = 2'-O-methyl modified nucleotide
  modified_base 80: mod_base = OTHER; note = 2'-O-methyl modified nucleotide
  modified_base 86: mod_base = OTHER; note = 2'-O-methyl modified nucleotide
  modified_base 87: mod_base = OTHER; note = 2'-O-methyl modified nucleotide
  modified_base 89: mod_base = OTHER; note = 2'-O-methyl modified nucleotide
  modified_base 90: mod_base = OTHER; note = 2'-O-methyl modified nucleotide
  modified_base 91: mod_base = OTHER; note = 2'-O-methyl modified nucleotide
  modified_base 92: mod_base = OTHER; note = 2'-O-methyl modified nucleotide
  modified_base 99: mod_base = OTHER; note = nucleotide with phosphorothioate linkage
  modified_base 100: mod_base = OTHER; note = 2'-O-methyl modified nucleotide with phosphorothioate linkage
  modified_base 101: mod_base = OTHER; note = 2'-O-methyl modified nucleotide

SEQ ID NO: 2387 - RNA, 101 nt, synthetic construct; identical to SEQ ID NO: 1387
  source 1..101: mol_type = other RNA
  modified_base 1: mod_base = OTHER; note = 2'-O-methyl modified nucleotide with phosphorothioate linkage
  modified_base 2: mod_base = OTHER; note = 2'-O-methyl modified nucleotide with phosphorothioate linkage
  modified_base 3: mod_base = OTHER; note = 2'-O-methyl modified nucleotide with phosphorothioate linkage
  modified_base 4: mod_base = OTHER; note = 2'-O-methyl modified nucleotide
  modified_base 5: mod_base = OTHER; note = 2'-O-methyl modified nucleotide
  modified_base 8: mod_base = OTHER; note = 2'-O-methyl modified nucleotide
  modified_base 9: mod_base = OTHER; note = 2'-O-methyl modified nucleotide
  modified_base 11: mod_base = OTHER; note = 2'-O-methyl modified nucleotide
  modified_base 13: mod_base = OTHER; note = 2'-O-methyl modified nucleotide
  modified_base 18: mod_base = OTHER; note = 2'-O-methyl modified nucleotide
  modified_base 22: mod_base = OTHER; note = 2'-O-methyl modified nucleotide
  modified_base 25: mod_base = OTHER; note = 2'-O-methyl modified nucleotide
  modified_base 29: mod_base = OTHER; note = 2'-O-methyl modified nucleotide
  modified_base 30: mod_base = OTHER; note = 2'-O-methyl modified nucleotide
  modified_base 31: mod_base = OTHER; note = 2'-O-methyl modified nucleotide
  modified_base 32: mod_base = OTHER; note = 2'-O-methyl modified nucleotide
  modified_base 37: mod_base = OTHER; note = 2'-O-methyl modified nucleotide
  modified_base 38: mod_base = OTHER; note = 2'-O-methyl modified nucleotide
  modified_base 39: mod_base = OTHER; note = 2'-O-methyl modified nucleotide
  modified_base 40: mod_base = OTHER; note = 2'-O-methyl modified nucleotide
  modified_base 41: mod_base = OTHER; note = 2'-O-methyl modified nucleotide
  modified_base 42: mod_base = OTHER; note = 2'-O-methyl modified nucleotide
  modified_base 43: mod_base = OTHER; note = 2'-O-methyl modified nucleotide
  modified_base 47: mod_base = OTHER; note = 2'-O-methyl modified nucleotide
  modified_base 48: mod_base = OTHER; note = 2'-O-methyl modified nucleotide
  modified_base 51: mod_base = OTHER; note = 2'-O-methyl modified nucleotide
  modified_base 54: mod_base = OTHER; note = nucleotide with phosphorothioate linkage
  modified_base 58: mod_base = OTHER; note = 2'-O-methyl modified nucleotide
  modified_base 59: mod_base = OTHER; note = 2'-O-methyl modified nucleotide
  modified_base 61: mod_base = OTHER; note = 2'-O-methyl modified nucleotide
  modified_base 62: mod_base = OTHER; note = 2'-O-methyl modified nucleotide
  modified_base 63: mod_base = OTHER; note = 2'-O-methyl modified nucleotide
  modified_base 64: mod_base = OTHER; note = 2'-O-methyl modified nucleotide
  modified_base 65: mod_base = OTHER; note = 2'-O-methyl modified nucleotide
  modified_base 66: mod_base = OTHER; note = 2'-O-methyl modified nucleotide
  modified_base 67: mod_base = OTHER; note = 2'-O-methyl modified nucleotide
  modified_base 68: mod_base = OTHER; note = 2'-O-methyl modified nucleotide
  modified_base 69: mod_base = OTHER; note = 2'-O-methyl modified nucleotide
  modified_base 70: mod_base = OTHER; note = 2'-O-methyl modified nucleotide
  modified_base 75: mod_base = OTHER; note = 2'-O-methyl modified nucleotide
  modified_base 77: mod_base = OTHER; note = 2'-O-methyl modified nucleotide
  modified_base 80: mod_base = OTHER; note = 2'-O-methyl modified nucleotide
  modified_base 86: mod_base = OTHER; note = 2'-O-methyl modified nucleotide
  modified_base 87: mod_base = OTHER; note = 2'-O-methyl modified nucleotide
  modified_base 89: mod_base = OTHER; note = 2'-O-methyl modified nucleotide
  modified_base 90: mod_base = OTHER; note = 2'-O-methyl modified nucleotide
  modified_base 91: mod_base = OTHER; note = 2'-O-methyl modified nucleotide
  modified_base 92: mod_base = OTHER; note = 2'-O-methyl modified nucleotide
  modified_base 99: mod_base = OTHER; note = nucleotide with phosphorothioate linkage
  modified_base 100: mod_base = OTHER; note = 2'-O-methyl modified nucleotide with phosphorothioate linkage
  modified_base 101: mod_base = OTHER; note = 2'-O-methyl modified nucleotide

SEQ ID NO: 2388 - RNA, 101 nt, synthetic construct; identical to SEQ ID NO: 1388
  source 1..101: mol_type = other RNA
  modified_base 1: mod_base = OTHER; note = 2'-O-methyl modified nucleotide with phosphorothioate linkage
  modified_base 2: mod_base = OTHER; note = 2'-O-methyl modified nucleotide with phosphorothioate linkage
  modified_base 3: mod_base = OTHER; note = 2'-O-methyl modified nucleotide with phosphorothioate linkage
  modified_base 4: mod_base = OTHER; note = 2'-O-methyl modified nucleotide
  modified_base 5: mod_base = OTHER; note = 2'-O-methyl modified nucleotide
  modified_base 8: mod_base = OTHER; note = 2'-O-methyl modified nucleotide
  modified_base 9: mod_base = OTHER; note = 2'-O-methyl modified nucleotide
  modified_base 11: mod_base = OTHER; note = 2'-O-methyl modified nucleotide
  modified_base 13: mod_base = OTHER; note = 2'-O-methyl modified nucleotide
  modified_base 18: mod_base = OTHER; note = 2'-O-methyl modified nucleotide
  modified_base 22: mod_base = OTHER; note = 2'-O-methyl modified nucleotide
  modified_base 25: mod_base = OTHER; note = 2'-O-methyl modified nucleotide
  modified_base 29: mod_base = OTHER; note = 2'-O-methyl modified nucleotide
  modified_base 30: mod_base = OTHER; note = 2'-O-methyl modified nucleotide
  modified_base 31: mod_base = OTHER; note = 2'-O-methyl modified nucleotide
  modified_base 32: mod_base = OTHER; note = 2'-O-methyl modified nucleotide
  modified_base 37: mod_base = OTHER; note = 2'-O-methyl modified nucleotide
  modified_base 38: mod_base = OTHER; note = 2'-O-methyl modified nucleotide
  modified_base 39: mod_base = OTHER; note = 2'-O-methyl modified nucleotide
  modified_base 40: mod_base = OTHER; note = 2'-O-methyl modified nucleotide
  modified_base 41: mod_base = OTHER; note = 2'-O-methyl modified nucleotide
  modified_base 42: mod_base = OTHER; note = 2'-O-methyl modified nucleotide
  modified_base 43: mod_base = OTHER; note = 2'-O-methyl modified nucleotide
  modified_base 47: mod_base = OTHER; note = 2'-O-methyl modified nucleotide
  modified_base 48: mod_base = OTHER; note = 2'-O-methyl modified nucleotide
  modified_base 51: mod_base = OTHER; note = 2'-O-methyl modified nucleotide
  modified_base 54: mod_base = OTHER; note = nucleotide with phosphorothioate linkage
  modified_base 58: mod_base = OTHER; note = 2'-O-methyl modified nucleotide
  modified_base 59: mod_base = OTHER; note = 2'-O-methyl modified nucleotide
  modified_base 61: mod_base = OTHER; note = 2'-O-methyl modified nucleotide
  modified_base 62: mod_base = OTHER; note = 2'-O-methyl modified nucleotide
  modified_base 63: mod_base = OTHER; note = 2'-O-methyl modified nucleotide
  modified_base 64: mod_base = OTHER; note = 2'-O-methyl modified nucleotide
  modified_base 65: mod_base = OTHER; note = 2'-O-methyl modified nucleotide
  modified_base 66: mod_base = OTHER; note = 2'-O-methyl modified nucleotide
  modified_base 67: mod_base = OTHER; note = 2'-O-methyl modified nucleotide
  modified_base 68: mod_base = OTHER; note = 2'-O-methyl modified nucleotide
  modified_base 69: mod_base = OTHER; note = 2'-O-methyl modified nucleotide
  modified_base 70: mod_base = OTHER; note = 2'-O-methyl modified nucleotide
  modified_base 75: mod_base = OTHER; note = 2'-O-methyl modified nucleotide
  modified_base 77: mod_base = OTHER; note = 2'-O-methyl modified nucleotide
  modified_base 80: mod_base = OTHER; note = 2'-O-methyl modified nucleotide
  modified_base 86: mod_base = OTHER; note = 2'-O-methyl modified nucleotide
  modified_base 87: mod_base = OTHER; note = 2'-O-methyl modified nucleotide
  modified_base 89: mod_base = OTHER; note = 2'-O-methyl modified nucleotide
  modified_base 90: mod_base = OTHER; note = 2'-O-methyl modified nucleotide
  modified_base 91: mod_base = OTHER; note = 2'-O-methyl modified nucleotide
  modified_base 92: mod_base = OTHER; note = 2'-O-methyl modified nucleotide
  modified_base 99: mod_base = OTHER; note = nucleotide with phosphorothioate linkage
  modified_base 100: mod_base = OTHER; note = 2'-O-methyl modified nucleotide with phosphorothioate linkage
  modified_base 101: mod_base = OTHER; note = 2'-O-methyl modified nucleotide

SEQ ID NO: 2389 - RNA, 101 nt, synthetic construct; identical to SEQ ID NO: 1389
  source 1..101: mol_type = other RNA
  modified_base 1: mod_base = OTHER; note = 2'-O-methyl modified nucleotide with phosphorothioate linkage
  modified_base 2: mod_base = OTHER; note = 2'-O-methyl modified nucleotide with phosphorothioate linkage
  modified_base 3: mod_base = OTHER; note = 2'-O-methyl modified nucleotide with phosphorothioate linkage
  modified_base 4: mod_base = OTHER; note = 2'-O-methyl modified nucleotide
  modified_base 5: mod_base = OTHER; note = 2'-O-methyl modified nucleotide
  modified_base 8: mod_base = OTHER; note = 2'-O-methyl modified nucleotide
  modified_base 9: mod_base = OTHER; note = 2'-O-methyl modified nucleotide
  modified_base 11: mod_base = OTHER; note = 2'-O-methyl modified nucleotide
  modified_base 13: mod_base = OTHER; note = 2'-O-methyl modified nucleotide
  modified_base 18: mod_base = OTHER; note = 2'-O-methyl modified nucleotide
  modified_base 22: mod_base = OTHER; note = 2'-O-methyl modified nucleotide
  modified_base 25: mod_base = OTHER; note = 2'-O-methyl modified nucleotide
  modified_base 29: mod_base = OTHER; note = 2'-O-methyl modified nucleotide
  modified_base 30: mod_base = OTHER; note = 2'-O-methyl modified nucleotide
  modified_base 31: mod_base = OTHER; note = 2'-O-methyl modified nucleotide
  modified_base 32: mod_base = OTHER; note = 2'-O-methyl modified nucleotide
  modified_base 37: mod_base = OTHER; note = 2'-O-methyl modified nucleotide
  modified_base 38: mod_base = OTHER; note = 2'-O-methyl modified nucleotide
  modified_base 39: mod_base = OTHER; note = 2'-O-methyl modified nucleotide
  modified_base 40: mod_base = OTHER; note = 2'-O-methyl modified nucleotide
  modified_base 41: mod_base = OTHER; note = 2'-O-methyl modified nucleotide
  modified_base 42: mod_base = OTHER; note = 2'-O-methyl modified nucleotide
  modified_base 43: mod_base = OTHER; note = 2'-O-methyl modified nucleotide
  modified_base 47: mod_base = OTHER; note = 2'-O-methyl modified nucleotide
  modified_base 48: mod_base = OTHER; note = 2'-O-methyl modified nucleotide
  modified_base 51: mod_base = OTHER; note = 2'-O-methyl modified nucleotide
  modified_base 54: mod_base = OTHER; note = nucleotide with phosphorothioate linkage
  modified_base 58: mod_base = OTHER; note = 2'-O-methyl modified nucleotide
  modified_base 59: mod_base = OTHER; note = 2'-O-methyl modified nucleotide
  modified_base 61: mod_base = OTHER; note = 2'-O-methyl modified nucleotide
  modified_base 62: mod_base = OTHER; note = 2'-O-methyl modified nucleotide
  modified_base 63: mod_base = OTHER; note = 2'-O-methyl modified nucleotide
  modified_base 64: mod_base = OTHER; note = 2'-O-methyl modified nucleotide
  modified_base 65: mod_base = OTHER; note = 2'-O-methyl modified nucleotide
  modified_base 66: mod_base = OTHER; note = 2'-O-methyl modified nucleotide
  modified_base 67: mod_base = OTHER; note = 2'-O-methyl modified nucleotide
  modified_base 68: mod_base = OTHER; note = 2'-O-methyl modified nucleotide
  modified_base 69: mod_base = OTHER; note = 2'-O-methyl modified nucleotide
  modified_base 70: mod_base = OTHER; note = 2'-O-methyl modified nucleotide
  modified_base 75: mod_base = OTHER; note = 2'-O-methyl modified nucleotide
  modified_base 77: mod_base = OTHER; note = 2'-O-methyl modified nucleotide
  modified_base 80: mod_base = OTHER; note = 2'-O-methyl modified nucleotide
  modified_base 86: mod_base = OTHER; note = 2'-O-methyl modified nucleotide
  modified_base 87: mod_base = OTHER; note = 2'-O-methyl modified nucleotide
  modified_base 89: mod_base = OTHER; note = 2'-O-methyl modified nucleotide
  modified_base 90: mod_base = OTHER; note = 2'-O-methyl modified nucleotide
  modified_base 91: mod_base = OTHER; note = 2'-O-methyl modified nucleotide
  modified_base 92: mod_base = OTHER; note = 2'-O-methyl modified nucleotide
  modified_base 99: mod_base = OTHER; note = nucleotide with phosphorothioate linkage
  modified_base 100: mod_base = OTHER; note = 2'-O-methyl modified nucleotide with phosphorothioate linkage
  modified_base 101: mod_base = OTHER; note = 2'-O-methyl modified nucleotide

SEQ ID NO: 2390 - RNA, 101 nt, synthetic construct; identical to SEQ ID NO: 1390
  source 1..101: mol_type = other RNA
  modified_base 1: mod_base = OTHER; note = 2'-O-methyl modified nucleotide with phosphorothioate linkage
  modified_base 2: mod_base = OTHER; note = 2'-O-methyl modified nucleotide with phosphorothioate linkage
  modified_base 3: mod_base = OTHER; note = 2'-O-methyl modified nucleotide with phosphorothioate linkage
  modified_base 4: mod_base = OTHER; note = 2'-O-methyl modified nucleotide
  modified_base 5: mod_base = OTHER; note = 2'-O-methyl modified nucleotide
  modified_base 8: mod_base = OTHER; note = 2'-O-methyl modified nucleotide
  modified_base 9: mod_base = OTHER; note = 2'-O-methyl modified nucleotide
  modified_base 11: mod_base = OTHER; note = 2'-O-methyl modified nucleotide
  modified_base 13: mod_base = OTHER; note = 2'-O-methyl modified nucleotide
  modified_base 18: mod_base = OTHER; note = 2'-O-methyl modified nucleotide
  modified_base 22: mod_base = OTHER; note = 2'-O-methyl modified nucleotide
  modified_base 25: mod_base = OTHER; note = 2'-O-methyl modified nucleotide
  modified_base 29: mod_base = OTHER; note = 2'-O-methyl modified nucleotide
  modified_base 30: mod_base = OTHER; note = 2'-O-methyl modified nucleotide
  modified_base 31: mod_base = OTHER; note = 2'-O-methyl modified nucleotide
  modified_base 32: mod_base = OTHER; note = 2'-O-methyl modified nucleotide
  modified_base 37: mod_base = OTHER; note = 2'-O-methyl modified nucleotide
  modified_base 38: mod_base = OTHER; note = 2'-O-methyl modified nucleotide
  modified_base 39: mod_base = OTHER; note = 2'-O-methyl modified nucleotide
  modified_base 40: mod_base = OTHER; note = 2'-O-methyl modified nucleotide
  modified_base 41: mod_base = OTHER; note = 2'-O-methyl modified nucleotide
  modified_base 42: mod_base = OTHER; note = 2'-O-methyl modified nucleotide
  modified_base 43: mod_base = OTHER; note = 2'-O-methyl modified nucleotide
  modified_base 47: mod_base = OTHER; note = 2'-O-methyl modified nucleotide
  modified_base 48: mod_base = OTHER; note = 2'-O-methyl modified nucleotide
  modified_base 51: mod_base = OTHER; note = 2'-O-methyl modified nucleotide
  modified_base 54: mod_base = OTHER; note = nucleotide with phosphorothioate linkage
  modified_base 58: mod_base = OTHER; note = 2'-O-methyl modified nucleotide
  modified_base 59: mod_base = OTHER; note = 2'-O-methyl modified nucleotide
  modified_base 61: mod_base = OTHER; note = 2'-O-methyl modified nucleotide
  modified_base 62: mod_base = OTHER; note = 2'-O-methyl modified nucleotide
  modified_base 63: mod_base = OTHER; note = 2'-O-methyl modified nucleotide
  modified_base 64: mod_base = OTHER; note = 2'-O-methyl modified nucleotide
  modified_base 65: mod_base = OTHER; note = 2'-O-methyl modified nucleotide
  modified_base 66: mod_base = OTHER; note = 2'-O-methyl modified nucleotide
  modified_base 67: mod_base = OTHER; note = 2'-O-methyl modified nucleotide
  modified_base 68: mod_base = OTHER; note = 2'-O-methyl modified nucleotide
  modified_base 69: mod_base = OTHER; note = 2'-O-methyl modified nucleotide
  modified_base 70: mod_base = OTHER; note = 2'-O-methyl modified nucleotide
  modified_base 75: mod_base = OTHER; note = 2'-O-methyl modified nucleotide
  modified_base 77: mod_base = OTHER; note = 2'-O-methyl modified nucleotide
  modified_base 80: mod_base = OTHER; note = 2'-O-methyl modified nucleotide
  modified_base 86: mod_base = OTHER; note = 2'-O-methyl modified nucleotide
  modified_base 87: mod_base = OTHER; note = 2'-O-methyl modified nucleotide
  modified_base 89: mod_base = OTHER; note = 2'-O-methyl modified nucleotide
  modified_base 90: mod_base = OTHER; note = 2'-O-methyl modified nucleotide
  modified_base 91: mod_base = OTHER; note = 2'-O-methyl modified nucleotide
  modified_base 92: mod_base = OTHER; note = 2'-O-methyl modified nucleotide
  modified_base 99: mod_base = OTHER; note = nucleotide with phosphorothioate linkage
  modified_base 100: mod_base = OTHER; note = 2'-O-methyl modified nucleotide with phosphorothioate linkage
  modified_base 101: mod_base = OTHER; note = 2'-O-methyl modified nucleotide

SEQ ID NO: 2391 - RNA, 101 nt, synthetic construct; identical to SEQ ID NO: 1391
  source 1..101: mol_type = other RNA
  modified_base 1: mod_base = OTHER; note = 2'-O-methyl modified nucleotide with phosphorothioate linkage
  modified_base 2: mod_base = OTHER; note = 2'-O-methyl modified nucleotide with phosphorothioate linkage
  modified_base 3: mod_base = OTHER; note = 2'-O-methyl modified nucleotide with phosphorothioate linkage
  modified_base 4: mod_base = OTHER; note = 2'-O-methyl modified nucleotide
  modified_base 5: mod_base = OTHER; note = 2'-O-methyl modified nucleotide
  modified_base 8: mod_base = OTHER; note = 2'-O-methyl modified nucleotide
  modified_base 9: mod_base = OTHER; note = 2'-O-methyl modified nucleotide
  modified_base 11: mod_base = OTHER; note = 2'-O-methyl modified nucleotide
  modified_base 13: mod_base = OTHER; note = 2'-O-methyl modified nucleotide
  modified_base 18: mod_base = OTHER; note = 2'-O-methyl modified nucleotide
  modified_base 22: mod_base = OTHER; note = 2'-O-methyl modified nucleotide
  modified_base 25: mod_base = OTHER; note = 2'-O-methyl modified nucleotide
  modified_base 29: mod_base = OTHER; note = 2'-O-methyl modified nucleotide
  modified_base 30: mod_base = OTHER; note = 2'-O-methyl modified nucleotide
  modified_base 31: mod_base = OTHER; note = 2'-O-methyl modified nucleotide
  modified_base 32: mod_base = OTHER; note = 2'-O-methyl modified nucleotide
  modified_base 37: mod_base = OTHER; note = 2'-O-methyl modified nucleotide
  modified_base 38: mod_base = OTHER; note = 2'-O-methyl modified nucleotide
  modified_base 39: mod_base = OTHER; note = 2'-O-methyl modified nucleotide
  modified_base 40: mod_base = OTHER; note = 2'-O-methyl modified nucleotide
  modified_base 41: mod_base = OTHER; note = 2'-O-methyl modified nucleotide
  modified_base 42: mod_base = OTHER; note = 2'-O-methyl modified nucleotide
  modified_base 43: mod_base = OTHER; note = 2'-O-methyl modified nucleotide
  modified_base 47: mod_base = OTHER; note = 2'-O-methyl modified nucleotide
  modified_base 48: mod_base = OTHER; note = 2'-O-methyl modified nucleotide
  modified_base 51: mod_base = OTHER; note = 2'-O-methyl modified nucleotide
  modified_base 54: mod_base = OTHER; note = nucleotide with phosphorothioate linkage
  modified_base 58: mod_base = OTHER; note = 2'-O-methyl modified nucleotide
  modified_base 59: mod_base = OTHER; note = 2'-O-methyl modified nucleotide
  modified_base 61: mod_base = OTHER; note = 2'-O-methyl modified nucleotide
  modified_base 62: mod_base = OTHER; note = 2'-O-methyl modified nucleotide
  modified_base 63: mod_base = OTHER; note = 2'-O-methyl modified nucleotide
  modified_base 64: mod_base = OTHER; note = 2'-O-methyl modified nucleotide
  modified_base 65: mod_base = OTHER; note = 2'-O-methyl modified nucleotide
  modified_base 66: mod_base = OTHER; note = 2'-O-methyl modified nucleotide
  modified_base 67: mod_base = OTHER; note = 2'-O-methyl modified nucleotide
  modified_base 68: mod_base = OTHER; note = 2'-O-methyl modified nucleotide
  modified_base 69: mod_base = OTHER; note = 2'-O-methyl modified nucleotide
  modified_base 70: mod_base = OTHER; note = 2'-O-methyl modified nucleotide
  modified_base 75: mod_base = OTHER; note = 2'-O-methyl modified nucleotide
  modified_base 77: mod_base = OTHER; note = 2'-O-methyl modified nucleotide
  modified_base 80: mod_base = OTHER; note = 2'-O-methyl modified nucleotide
  modified_base 86: mod_base = OTHER; note = 2'-O-methyl modified nucleotide
  modified_base 87: mod_base = OTHER; note = 2'-O-methyl modified nucleotide
  modified_base 89: mod_base = OTHER; note = 2'-O-methyl modified nucleotide
  modified_base 90: mod_base = OTHER; note = 2'-O-methyl modified nucleotide
  modified_base 91: mod_base = OTHER; note = 2'-O-methyl modified nucleotide
  modified_base 92: mod_base = OTHER; note = 2'-O-methyl modified nucleotide
  modified_base 99: mod_base = OTHER; note = nucleotide with phosphorothioate linkage
  modified_base 100: mod_base = OTHER; note = 2'-O-methyl modified nucleotide with phosphorothioate linkage
  modified_base 101: mod_base = OTHER; note = 2'-O-methyl modified nucleotide

SEQ ID NO: 2392 - RNA, 101 nt, synthetic construct; identical to SEQ ID NO: 1392
  source 1..101: mol_type = other RNA
  modified_base 1: mod_base = OTHER; note = 2'-O-methyl modified nucleotide with phosphorothioate linkage
  modified_base 2: mod_base = OTHER; note = 2'-O-methyl modified nucleotide with phosphorothioate linkage
  modified_base 3: mod_base = OTHER; note = 2'-O-methyl modified nucleotide with phosphorothioate linkage
  modified_base 4: mod_base = OTHER; note = 2'-O-methyl modified nucleotide
  modified_base 5: mod_base = OTHER; note = 2'-O-methyl modified nucleotide
  modified_base 8: mod_base = OTHER; note = 2'-O-methyl modified nucleotide
  modified_base 9: mod_base = OTHER; note = 2'-O-methyl modified nucleotide
  modified_base 11: mod_base = OTHER; note = 2'-O-methyl modified nucleotide
  modified_base 13: mod_base = OTHER; note = 2'-O-methyl modified nucleotide
  modified_base 18: mod_base = OTHER; note = 2'-O-methyl modified nucleotide
  modified_base 22: mod_base = OTHER; note = 2'-O-methyl modified nucleotide
  modified_base 25: mod_base = OTHER; note = 2'-O-methyl modified nucleotide
  modified_base 29: mod_base = OTHER; note = 2'-O-methyl modified nucleotide
  modified_base 30: mod_base = OTHER; note = 2'-O-methyl modified nucleotide
  modified_base 31: mod_base = OTHER; note = 2'-O-methyl modified nucleotide
  modified_base 32: mod_base = OTHER; note = 2'-O-methyl modified nucleotide
  modified_base 37: mod_base = OTHER; note = 2'-O-methyl modified nucleotide
  modified_base 38: mod_base = OTHER; note = 2'-O-methyl modified nucleotide
  modified_base 39: mod_base = OTHER; note = 2'-O-methyl modified nucleotide
  modified_base 40: mod_base = OTHER; note = 2'-O-methyl modified nucleotide
  modified_base 41: mod_base = OTHER; note = 2'-O-methyl modified nucleotide
  modified_base 42: mod_base = OTHER; note = 2'-O-methyl modified nucleotide
  modified_base 43: mod_base = OTHER; note = 2'-O-methyl modified nucleotide
  modified_base 47: mod_base = OTHER; note = 2'-O-methyl modified nucleotide
  modified_base 48: mod_base = OTHER; note = 2'-O-methyl modified nucleotide
  modified_base 51: mod_base = OTHER; note = 2'-O-methyl modified nucleotide
  modified_base 54: mod_base = OTHER; note = nucleotide with phosphorothioate linkage
  modified_base 58: mod_base = OTHER; note = 2'-O-methyl modified nucleotide
  modified_base 59: mod_base = OTHER; note = 2'-O-methyl modified nucleotide
  modified_base 61: mod_base = OTHER; note = 2'-O-methyl modified nucleotide
  modified_base 62: mod_base = OTHER; note = 2'-O-methyl modified nucleotide
  modified_base 63: mod_base = OTHER; note = 2'-O-methyl modified nucleotide
  modified_base 64: mod_base = OTHER; note = 2'-O-methyl modified nucleotide
  modified_base 65: mod_base = OTHER; note = 2'-O-methyl modified nucleotide
  modified_base 66: mod_base = OTHER; note = 2'-O-methyl modified nucleotide
  modified_base 67: mod_base = OTHER; note = 2'-O-methyl modified nucleotide
  modified_base 68: mod_base = OTHER; note = 2'-O-methyl modified nucleotide
  modified_base 69: mod_base = OTHER; note = 2'-O-methyl modified nucleotide
  modified_base 70: mod_base = OTHER; note = 2'-O-methyl modified nucleotide
  modified_base 75: mod_base = OTHER; note = 2'-O-methyl modified nucleotide
  modified_base 77: mod_base = OTHER; note = 2'-O-methyl modified nucleotide
  modified_base 80: mod_base = OTHER; note = 2'-O-methyl modified nucleotide
  modified_base 86: mod_base = OTHER; note = 2'-O-methyl modified nucleotide
  modified_base 87: mod_base = OTHER; note = 2'-O-methyl modified nucleotide
  modified_base 89: mod_base = OTHER; note = 2'-O-methyl modified nucleotide
  modified_base 90: mod_base = OTHER; note = 2'-O-methyl modified nucleotide
  modified_base 91: mod_base = OTHER; note = 2'-O-methyl modified nucleotide
  modified_base 92: mod_base = OTHER; note = 2'-O-methyl modified nucleotide
  modified_base 99: mod_base = OTHER; note = nucleotide with phosphorothioate linkage
  modified_base 100: mod_base = OTHER; note = 2'-O-methyl modified nucleotide with phosphorothioate linkage
  modified_base 101: mod_base = OTHER; note = 2'-O-methyl modified nucleotide

SEQ ID NO: 2393 - RNA, 101 nt, synthetic construct; identical to SEQ ID NO: 1393
  source 1..101: mol_type = other RNA
  modified_base 1: mod_base = OTHER; note = 2'-O-methyl modified nucleotide with phosphorothioate linkage
  modified_base 2: mod_base = OTHER; note = 2'-O-methyl modified nucleotide with phosphorothioate linkage
  modified_base 3: mod_base = OTHER; note = 2'-O-methyl modified nucleotide with phosphorothioate linkage
  modified_base 4: mod_base = OTHER; note = 2'-O-methyl modified nucleotide
  modified_base 5: mod_base = OTHER; note = 2'-O-methyl modified nucleotide
  modified_base 8: mod_base = OTHER; note = 2'-O-methyl modified nucleotide
  modified_base 9: mod_base = OTHER; note = 2'-O-methyl modified nucleotide
  modified_base 11: mod_base = OTHER; note = 2'-O-methyl modified nucleotide
  modified_base 13: mod_base = OTHER; note = 2'-O-methyl modified nucleotide
  modified_base 18: mod_base = OTHER; note = 2'-O-methyl modified nucleotide
  modified_base 22: mod_base = OTHER; note = 2'-O-methyl modified nucleotide
  modified_base 25: mod_base = OTHER; note = 2'-O-methyl modified nucleotide
  modified_base 29: mod_base = OTHER; note = 2'-O-methyl modified nucleotide
  modified_base 30: mod_base = OTHER; note = 2'-O-methyl modified nucleotide
  modified_base 31: mod_base = OTHER; note = 2'-O-methyl modified nucleotide
  modified_base 32: mod_base = OTHER; note = 2'-O-methyl modified nucleotide
  modified_base 37: mod_base = OTHER; note = 2'-O-methyl modified nucleotide
  modified_base 38: mod_base = OTHER; note = 2'-O-methyl modified nucleotide
  modified_base 39: mod_base = OTHER; note = 2'-O-methyl modified nucleotide
  modified_base 40: mod_base = OTHER; note = 2'-O-methyl modified nucleotide
  modified_base 41: mod_base = OTHER; note = 2'-O-methyl modified nucleotide
  modified_base 42: mod_base = OTHER; note = 2'-O-methyl modified nucleotide
  modified_base 43: mod_base = OTHER; note = 2'-O-methyl modified nucleotide
  modified_base 47: mod_base = OTHER; note = 2'-O-methyl modified nucleotide
  modified_base 48: mod_base = OTHER; note = 2'-O-methyl modified nucleotide
  modified_base 51: mod_base = OTHER; note = 2'-O-methyl modified nucleotide
  modified_base 54: mod_base = OTHER; note = nucleotide with phosphorothioate linkage
  modified_base 58: mod_base = OTHER; note = 2'-O-methyl modified nucleotide
  modified_base 59: mod_base = OTHER; note = 2'-O-methyl modified nucleotide
  modified_base 61: mod_base = OTHER; note = 2'-O-methyl modified nucleotide
  modified_base 62: mod_base = OTHER; note = 2'-O-methyl modified nucleotide
  modified_base 63: mod_base = OTHER; note = 2'-O-methyl modified nucleotide
  modified_base 64: mod_base = OTHER; note = 2'-O-methyl modified nucleotide
  modified_base 65: mod_base = OTHER; note = 2'-O-methyl modified nucleotide
  modified_base 66: mod_base = OTHER; note = 2'-O-methyl modified nucleotide
  modified_base 67: mod_base = OTHER; note = 2'-O-methyl modified nucleotide
  modified_base 68: mod_base = OTHER; note = 2'-O-methyl modified nucleotide
  modified_base 69: mod_base = OTHER; note = 2'-O-methyl modified nucleotide
  modified_base 70: mod_base = OTHER; note = 2'-O-methyl modified nucleotide
  modified_base 75: mod_base = OTHER; note = 2'-O-methyl modified nucleotide
  modified_base 77: mod_base = OTHER; note = 2'-O-methyl modified nucleotide
  modified_base 80: mod_base = OTHER; note = 2'-O-methyl modified nucleotide
  modified_base 86: mod_base = OTHER; note = 2'-O-methyl modified nucleotide
  modified_base 87: mod_base = OTHER; note = 2'-O-methyl modified nucleotide
  modified_base 89: mod_base = OTHER; note = 2'-O-methyl modified nucleotide
  modified_base 90: mod_base = OTHER; note = 2'-O-methyl modified nucleotide
  modified_base 91: mod_base = OTHER; note = 2'-O-methyl modified nucleotide
  modified_base 92: mod_base = OTHER; note = 2'-O-methyl modified nucleotide
  modified_base 99: mod_base = OTHER; note = nucleotide with phosphorothioate linkage
  modified_base 100: mod_base = OTHER; note = 2'-O-methyl modified nucleotide with phosphorothioate linkage
  modified_base 101: mod_base = OTHER; note = 2'-O-methyl modified nucleotide

SEQ ID NO: 2394 - RNA, 101 nt, synthetic construct; identical to SEQ ID NO: 1394
  source 1..101: mol_type = other RNA
  modified_base 1: mod_base = OTHER; note = 2'-O-methyl modified nucleotide with phosphorothioate linkage
  modified_base 2: mod_base = OTHER; note = 2'-O-methyl modified nucleotide with phosphorothioate linkage
  modified_base 3: mod_base = OTHER; note = 2'-O-methyl modified nucleotide with phosphorothioate linkage
  modified_base 4: mod_base = OTHER; note = 2'-O-methyl modified nucleotide
  modified_base 5: mod_base = OTHER; note = 2'-O-methyl modified nucleotide
  modified_base 8: mod_base = OTHER; note = 2'-O-methyl modified nucleotide
  modified_base 9: mod_base = OTHER; note = 2'-O-methyl modified nucleotide
  modified_base 11: mod_base = OTHER; note = 2'-O-methyl modified nucleotide
  modified_base 13: mod_base = OTHER; note = 2'-O-methyl modified nucleotide
  modified_base 18: mod_base = OTHER; note = 2'-O-methyl modified nucleotide
  modified_base 22: mod_base = OTHER; note = 2'-O-methyl modified nucleotide
  modified_base 25: mod_base = OTHER; note = 2'-O-methyl modified nucleotide
  modified_base 29: mod_base = OTHER; note = 2'-O-methyl modified nucleotide
  modified_base 30: mod_base = OTHER; note = 2'-O-methyl modified nucleotide
  modified_base 31: mod_base = OTHER; note = 2'-O-methyl modified nucleotide
  modified_base 32: mod_base = OTHER; note = 2'-O-methyl modified nucleotide
  modified_base 37: mod_base = OTHER; note = 2'-O-methyl modified nucleotide
  modified_base 38: mod_base = OTHER; note = 2'-O-methyl modified nucleotide
  modified_base 39: mod_base = OTHER; note = 2'-O-methyl modified nucleotide
  modified_base 40: mod_base = OTHER; note = 2'-O-methyl modified nucleotide
  modified_base 41: mod_base = OTHER; note = 2'-O-methyl modified nucleotide
  modified_base 42: mod_base = OTHER; note = 2'-O-methyl modified nucleotide
  modified_base 43: mod_base = OTHER; note = 2'-O-methyl modified nucleotide
  modified_base 47: mod_base = OTHER; note = 2'-O-methyl modified nucleotide
  modified_base 48: mod_base = OTHER; note = 2'-O-methyl modified nucleotide
  modified_base 51: mod_base = OTHER; note = 2'-O-methyl modified nucleotide
  modified_base 54: mod_base = OTHER; note = nucleotide with phosphorothioate linkage
  modified_base 58: mod_base = OTHER; note = 2'-O-methyl modified nucleotide
  modified_base 59: mod_base = OTHER; note = 2'-O-methyl modified nucleotide
  modified_base 61: mod_base = OTHER; note = 2'-O-methyl modified nucleotide
  modified_base 62: mod_base = OTHER; note = 2'-O-methyl modified nucleotide
  modified_base 63: mod_base = OTHER; note = 2'-O-methyl modified nucleotide
  modified_base 64: mod_base = OTHER; note = 2'-O-methyl modified nucleotide
  modified_base 65: mod_base = OTHER; note = 2'-O-methyl modified nucleotide
  modified_base 66: mod_base = OTHER; note = 2'-O-methyl modified nucleotide
  modified_base 67: mod_base = OTHER; note = 2'-O-methyl modified nucleotide
  modified_base 68: mod_base = OTHER; note = 2'-O-methyl modified nucleotide
  modified_base 69: mod_base = OTHER; note = 2'-O-methyl modified nucleotide
  modified_base 70: mod_base = OTHER; note = 2'-O-methyl modified nucleotide
  modified_base 75: mod_base = OTHER; note = 2'-O-methyl modified nucleotide
  modified_base 77: mod_base = OTHER; note = 2'-O-methyl modified nucleotide
  modified_base 80: mod_base = OTHER; note = 2'-O-methyl modified nucleotide
  modified_base 86: mod_base = OTHER; note = 2'-O-methyl modified nucleotide
  modified_base 87: mod_base = OTHER; note = 2'-O-methyl modified nucleotide
  modified_base 89: mod_base = OTHER; note = 2'-O-methyl modified nucleotide
  modified_base 90: mod_base = OTHER; note = 2'-O-methyl modified nucleotide
  modified_base 91: mod_base = OTHER; note = 2'-O-methyl modified nucleotide
  modified_base 92: mod_base = OTHER; note = 2'-O-methyl modified nucleotide
  modified_base 99: mod_base = OTHER; note = nucleotide with phosphorothioate linkage
  modified_base 100: mod_base = OTHER; note = 2'-O-methyl modified nucleotide with phosphorothioate linkage
  modified_base 101: mod_base = OTHER; note = 2'-O-methyl modified nucleotide

SEQ ID NO: 2395 - RNA, 101 nt, synthetic construct; identical to SEQ ID NO: 1395
  source 1..101: mol_type = other RNA
  modified_base 1: mod_base = OTHER; note = 2'-O-methyl modified nucleotide with phosphorothioate linkage
  modified_base 2: mod_base = OTHER; note = 2'-O-methyl modified nucleotide with phosphorothioate linkage
  modified_base 3: mod_base = OTHER; note = 2'-O-methyl modified nucleotide with phosphorothioate linkage
  modified_base 4: mod_base = OTHER; note = 2'-O-methyl modified nucleotide
  modified_base 5: mod_base = OTHER; note = 2'-O-methyl modified nucleotide
  modified_base 8: mod_base = OTHER; note = 2'-O-methyl modified nucleotide
  modified_base 9: mod_base = OTHER; note = 2'-O-methyl modified nucleotide
  modified_base 11: mod_base = OTHER; note = 2'-O-methyl modified nucleotide
  modified_base 13: mod_base = OTHER; note = 2'-O-methyl modified nucleotide
  modified_base 18: mod_base = OTHER; note = 2'-O-methyl modified nucleotide
  modified_base 22: mod_base = OTHER; note = 2'-O-methyl modified nucleotide
  modified_base 25: mod_base = OTHER; note = 2'-O-methyl modified nucleotide
  modified_base 29: mod_base = OTHER; note = 2'-O-methyl modified nucleotide
  modified_base 30: mod_base = OTHER; note = 2'-O-methyl modified nucleotide
  modified_base 31: mod_base = OTHER; note = 2'-O-methyl modified nucleotide
  modified_base 32: mod_base = OTHER; note = 2'-O-methyl modified nucleotide
  modified_base 37: mod_base = OTHER; note = 2'-O-methyl modified nucleotide
  modified_base 38: mod_base = OTHER; note = 2'-O-methyl modified nucleotide
  modified_base 39: mod_base = OTHER; note = 2'-O-methyl modified nucleotide
  modified_base 40: mod_base = OTHER; note = 2'-O-methyl modified nucleotide
  modified_base 41: mod_base = OTHER; note = 2'-O-methyl modified nucleotide
  modified_base 42: mod_base = OTHER; note = 2'-O-methyl modified nucleotide
  modified_base 43: mod_base = OTHER; note = 2'-O-methyl modified nucleotide
  modified_base 47: mod_base = OTHER; note = 2'-O-methyl modified nucleotide
  modified_base 48: mod_base = OTHER; note = 2'-O-methyl modified nucleotide
  modified_base 51: mod_base = OTHER; note = 2'-O-methyl modified nucleotide
  modified_base 54: mod_base = OTHER; note = nucleotide with phosphorothioate linkage
  modified_base 58: mod_base = OTHER; note = 2'-O-methyl modified nucleotide
  modified_base 59: mod_base = OTHER; note = 2'-O-methyl modified nucleotide
  modified_base 61: mod_base = OTHER; note = 2'-O-methyl modified nucleotide
  modified_base 62: mod_base = OTHER; note = 2'-O-methyl modified nucleotide
  modified_base 63: mod_base = OTHER; note = 2'-O-methyl modified nucleotide
  modified_base 64: mod_base = OTHER; note = 2'-O-methyl modified nucleotide
  modified_base 65: mod_base = OTHER; note = 2'-O-methyl modified nucleotide
  modified_base 66: mod_base = OTHER; note = 2'-O-methyl modified nucleotide
  modified_base 67: mod_base = OTHER; note = 2'-O-methyl modified nucleotide
  modified_base 68: mod_base = OTHER; note = 2'-O-methyl modified nucleotide
  modified_base 69: mod_base = OTHER; note = 2'-O-methyl modified nucleotide
  modified_base 70: mod_base = OTHER; note = 2'-O-methyl modified nucleotide
  modified_base 75: mod_base = OTHER; note = 2'-O-methyl modified nucleotide
  modified_base 77: mod_base = OTHER; note = 2'-O-methyl modified nucleotide
  modified_base 80: mod_base = OTHER; note = 2'-O-methyl modified nucleotide
  modified_base 86: mod_base = OTHER; note = 2'-O-methyl modified nucleotide
  modified_base 87: mod_base = OTHER; note = 2'-O-methyl modified nucleotide
  modified_base 89: mod_base = OTHER; note = 2'-O-methyl modified nucleotide
  modified_base 90: mod_base = OTHER; note = 2'-O-methyl modified nucleotide
  modified_base 91: mod_base = OTHER; note = 2'-O-methyl modified nucleotide
  modified_base 92: mod_base = OTHER; note = 2'-O-methyl modified nucleotide
  modified_base 99: mod_base = OTHER; note = nucleotide with phosphorothioate linkage
  modified_base 100: mod_base = OTHER; note = 2'-O-methyl modified nucleotide with phosphorothioate linkage
  modified_base 101: mod_base = OTHER; note = 2'-O-methyl modified nucleotide

SEQ ID NO: 2396 - RNA, 101 nt, synthetic construct; identical to SEQ ID NO: 1396
  source 1..101: mol_type = other RNA
  modified_base 1: mod_base = OTHER; note = 2'-O-methyl modified nucleotide with phosphorothioate linkage
  modified_base 2: mod_base = OTHER; note = 2'-O-methyl modified nucleotide with phosphorothioate linkage
  modified_base 3: mod_base = OTHER; note = 2'-O-methyl modified nucleotide with phosphorothioate linkage
  modified_base 4: mod_base = OTHER; note = 2'-O-methyl modified nucleotide
  modified_base 5: mod_base = OTHER; note = 2'-O-methyl modified nucleotide
  modified_base 8: mod_base = OTHER; note = 2'-O-methyl modified nucleotide
  modified_base 9: mod_base = OTHER; note = 2'-O-methyl modified nucleotide
  modified_base 11: mod_base = OTHER; note = 2'-O-methyl modified nucleotide
  modified_base 13: mod_base = OTHER; note = 2'-O-methyl modified nucleotide
  modified_base 18: mod_base = OTHER; note = 2'-O-methyl modified nucleotide
  modified_base 22: mod_base = OTHER; note = 2'-O-methyl modified nucleotide
  modified_base 25: mod_base = OTHER; note = 2'-O-methyl modified nucleotide
  modified_base 29: mod_base = OTHER; note = 2'-O-methyl modified nucleotide
  modified_base 30: mod_base = OTHER; note = 2'-O-methyl modified nucleotide
  modified_base 31: mod_base = OTHER; note = 2'-O-methyl modified nucleotide
  modified_base 32: mod_base = OTHER; note = 2'-O-methyl modified nucleotide
  modified_base 37: mod_base = OTHER; note = 2'-O-methyl modified nucleotide
  modified_base 38: mod_base = OTHER; note = 2'-O-methyl modified nucleotide
  modified_base 39: mod_base = OTHER; note = 2'-O-methyl modified nucleotide
  modified_base 40: mod_base = OTHER; note = 2'-O-methyl modified nucleotide
  modified_base 41: mod_base = OTHER; note = 2'-O-methyl modified nucleotide
  modified_base 42: mod_base = OTHER; note = 2'-O-methyl modified nucleotide
  modified_base 43: mod_base = OTHER; note = 2'-O-methyl modified nucleotide
  modified_base 47: mod_base = OTHER; note = 2'-O-methyl modified nucleotide
  modified_base 48: mod_base = OTHER; note = 2'-O-methyl modified nucleotide
  modified_base 51: mod_base = OTHER; note = 2'-O-methyl modified nucleotide
  modified_base 54: mod_base = OTHER; note = nucleotide with phosphorothioate linkage
  modified_base 58: mod_base = OTHER; note = 2'-O-methyl modified nucleotide
  modified_base 59: mod_base = OTHER; note = 2'-O-methyl modified nucleotide
  modified_base 61: mod_base = OTHER; note = 2'-O-methyl modified nucleotide
  modified_base 62: mod_base = OTHER; note = 2'-O-methyl modified nucleotide
  modified_base 63: mod_base = OTHER; note = 2'-O-methyl modified nucleotide
  modified_base 64: mod_base = OTHER; note = 2'-O-methyl modified nucleotide
  modified_base 65: mod_base = OTHER; note = 2'-O-methyl modified nucleotide
  modified_base 66: mod_base = OTHER; note = 2'-O-methyl modified nucleotide
  modified_base 67: mod_base = OTHER; note = 2'-O-methyl modified nucleotide
  modified_base 68: mod_base = OTHER; note = 2'-O-methyl modified nucleotide
  modified_base 69: mod_base = OTHER; note = 2'-O-methyl modified nucleotide
  modified_base 70: mod_base = OTHER; note = 2'-O-methyl modified nucleotide
  modified_base 75: mod_base = OTHER; note = 2'-O-methyl modified nucleotide
  modified_base 77: mod_base = OTHER; note = 2'-O-methyl modified nucleotide
  modified_base 80: mod_base = OTHER; note = 2'-O-methyl modified nucleotide
  modified_base 86: mod_base = OTHER; note = 2'-O-methyl modified nucleotide
  modified_base 87: mod_base = OTHER; note = 2'-O-methyl modified nucleotide
  modified_base 89: mod_base = OTHER; note = 2'-O-methyl modified nucleotide
  modified_base 90: mod_base = OTHER; note = 2'-O-methyl modified nucleotide
  modified_base 91: mod_base = OTHER; note = 2'-O-methyl modified nucleotide
  modified_base 92: mod_base = OTHER; note = 2'-O-methyl modified nucleotide
  modified_base 99: mod_base = OTHER; note = nucleotide with phosphorothioate linkage
  modified_base 100: mod_base = OTHER; note = 2'-O-methyl modified nucleotide with phosphorothioate linkage
  modified_base 101: mod_base = OTHER; note = 2'-O-methyl modified nucleotide

SEQ ID NO: 2397 - RNA, 101 nt, synthetic construct; identical to SEQ ID NO: 1397
  source 1..101: mol_type = other RNA
  modified_base 1: mod_base = OTHER; note = 2'-O-methyl modified nucleotide with phosphorothioate linkage
  modified_base 2: mod_base = OTHER; note = 2'-O-methyl modified nucleotide with phosphorothioate linkage
  modified_base 3: mod_base = OTHER; note = 2'-O-methyl modified nucleotide with phosphorothioate linkage
  modified_base 4: mod_base = OTHER; note = 2'-O-methyl modified nucleotide
  modified_base 5: mod_base = OTHER; note = 2'-O-methyl modified nucleotide
  modified_base 8: mod_base = OTHER; note = 2'-O-methyl modified nucleotide
  modified_base 9: mod_base = OTHER; note = 2'-O-methyl modified nucleotide
  modified_base 11: mod_base = OTHER; note = 2'-O-methyl modified nucleotide
  modified_base 13: mod_base = OTHER; note = 2'-O-methyl modified nucleotide
  modified_base 18: mod_base = OTHER; note = 2'-O-methyl modified nucleotide
  modified_base 22: mod_base = OTHER; note = 2'-O-methyl modified nucleotide
  modified_base 25: mod_base = OTHER; note = 2'-O-methyl modified nucleotide
  modified_base 29: mod_base = OTHER; note = 2'-O-methyl modified nucleotide
  modified_base 30: mod_base = OTHER; note = 2'-O-methyl modified nucleotide
  modified_base 31: mod_base = OTHER; note = 2'-O-methyl modified nucleotide
  modified_base 32: mod_base = OTHER; note = 2'-O-methyl modified nucleotide
  modified_base 37: mod_base = OTHER; note = 2'-O-methyl modified nucleotide
  modified_base 38: mod_base = OTHER; note = 2'-O-methyl modified nucleotide
  modified_base 39: mod_base = OTHER; note = 2'-O-methyl modified nucleotide
  modified_base 40: mod_base = OTHER; note = 2'-O-methyl modified nucleotide
  modified_base 41: mod_base = OTHER; note = 2'-O-methyl modified nucleotide
  modified_base 42: mod_base = OTHER; note = 2'-O-methyl modified nucleotide
  modified_base 43: mod_base = OTHER; note = 2'-O-methyl modified nucleotide
  modified_base 47: mod_base = OTHER; note = 2'-O-methyl modified nucleotide
  modified_base 48: mod_base = OTHER; note = 2'-O-methyl modified nucleotide
  modified_base 51: mod_base = OTHER; note = 2'-O-methyl modified nucleotide
  modified_base 54: mod_base = OTHER; note = nucleotide with phosphorothioate linkage
  modified_base 58: mod_base = OTHER; note = 2'-O-methyl modified nucleotide
  modified_base 59: mod_base = OTHER; note = 2'-O-methyl modified nucleotide
  modified_base 61: mod_base = OTHER; note = 2'-O-methyl modified nucleotide
  modified_base 62: mod_base = OTHER; note = 2'-O-methyl modified nucleotide
  modified_base 63: mod_base = OTHER; note = 2'-O-methyl modified nucleotide
  modified_base 64: mod_base = OTHER; note = 2'-O-methyl modified nucleotide
  modified_base 65: mod_base = OTHER; note = 2'-O-methyl modified nucleotide
  modified_base 66: mod_base = OTHER; note = 2'-O-methyl modified nucleotide
  modified_base 67: mod_base = OTHER; note = 2'-O-methyl modified nucleotide
  modified_base 68: mod_base = OTHER; note = 2'-O-methyl modified nucleotide
  modified_base 69: mod_base = OTHER; note = 2'-O-methyl modified nucleotide
  modified_base 70: mod_base = OTHER; note = 2'-O-methyl modified nucleotide
  modified_base 75: mod_base = OTHER; note = 2'-O-methyl modified nucleotide
  modified_base 77: mod_base = OTHER; note = 2'-O-methyl modified nucleotide
  modified_base 80: mod_base = OTHER; note = 2'-O-methyl modified nucleotide
  modified_base 86: mod_base = OTHER; note = 2'-O-methyl modified nucleotide
  modified_base 87: mod_base = OTHER; note = 2'-O-methyl modified nucleotide
  modified_base 89: mod_base = OTHER; note = 2'-O-methyl modified nucleotide
  modified_base 90: mod_base = OTHER; note = 2'-O-methyl modified nucleotide
  modified_base 91: mod_base = OTHER; note = 2'-O-methyl modified nucleotide
  modified_base 92: mod_base = OTHER; note = 2'-O-methyl modified nucleotide
  modified_base 99: mod_base = OTHER; note = nucleotide with phosphorothioate linkage
  modified_base 100: mod_base = OTHER; note = 2'-O-methyl modified nucleotide with phosphorothioate linkage
  modified_base 101: mod_base = OTHER; note = 2'-O-methyl modified nucleotide

SEQ ID NO: 2398 - RNA, 101 nt, synthetic construct; identical to SEQ ID NO: 1398
  source 1..101: mol_type = other RNA
  modified_base 1: mod_base = OTHER; note = 2'-O-methyl modified nucleotide with phosphorothioate linkage
  modified_base 2: mod_base = OTHER; note = 2'-O-methyl modified nucleotide with phosphorothioate linkage
  modified_base 3: mod_base = OTHER; note = 2'-O-methyl modified nucleotide with phosphorothioate linkage
  modified_base 4: mod_base = OTHER; note = 2'-O-methyl modified nucleotide
  modified_base 5: mod_base = OTHER; note = 2'-O-methyl modified nucleotide
  modified_base 8: mod_base = OTHER; note = 2'-O-methyl modified nucleotide
  modified_base 9: mod_base = OTHER; note = 2'-O-methyl modified nucleotide
  modified_base 11: mod_base = OTHER; note = 2'-O-methyl modified nucleotide
  modified_base 13: mod_base = OTHER; note = 2'-O-methyl modified nucleotide
  modified_base 18: mod_base = OTHER; note = 2'-O-methyl modified nucleotide
  modified_base 22: mod_base = OTHER; note = 2'-O-methyl modified nucleotide
  modified_base 25: mod_base = OTHER; note = 2'-O-methyl modified nucleotide
  modified_base 29: mod_base = OTHER; note = 2'-O-methyl modified nucleotide
  modified_base 30: mod_base = OTHER; note = 2'-O-methyl modified nucleotide
  modified_base 31: mod_base = OTHER; note = 2'-O-methyl modified nucleotide
  modified_base 32: mod_base = OTHER; note = 2'-O-methyl modified nucleotide
  modified_base 37: mod_base = OTHER; note = 2'-O-methyl modified nucleotide
  modified_base 38: mod_base = OTHER; note = 2'-O-methyl modified nucleotide
  modified_base 39: mod_base = OTHER; note = 2'-O-methyl modified nucleotide
  modified_base 40: mod_base = OTHER; note = 2'-O-methyl modified nucleotide
  modified_base 41: mod_base = OTHER; note = 2'-O-methyl modified nucleotide
  modified_base 42: mod_base = OTHER; note = 2'-O-methyl modified nucleotide
  modified_base 43: mod_base = OTHER; note = 2'-O-methyl modified nucleotide
  modified_base 47: mod_base = OTHER; note = 2'-O-methyl modified nucleotide
  modified_base 48: mod_base = OTHER; note = 2'-O-methyl modified nucleotide
  modified_base 51: mod_base = OTHER; note = 2'-O-methyl modified nucleotide
  modified_base 54: mod_base = OTHER; note = nucleotide with phosphorothioate linkage
  modified_base 58: mod_base = OTHER; note = 2'-O-methyl modified nucleotide
  modified_base 59: mod_base = OTHER; note = 2'-O-methyl modified nucleotide
  modified_base 61: mod_base = OTHER; note = 2'-O-methyl modified nucleotide
  modified_base 62: mod_base = OTHER; note = 2'-O-methyl modified nucleotide
  modified_base 63: mod_base = OTHER; note = 2'-O-methyl modified nucleotide
  modified_base 64: mod_base = OTHER; note = 2'-O-methyl modified nucleotide
  modified_base 65: mod_base = OTHER; note = 2'-O-methyl modified nucleotide
  modified_base 66: mod_base = OTHER; note = 2'-O-methyl modified nucleotide
  modified_base 67: mod_base = OTHER; note = 2'-O-methyl modified nucleotide
  modified_base 68: mod_base = OTHER; note = 2'-O-methyl modified nucleotide
  modified_base 69: mod_base = OTHER; note = 2'-O-methyl modified nucleotide
  modified_base 70: mod_base = OTHER; note = 2'-O-methyl modified nucleotide
  modified_base 75: mod_base = OTHER; note = 2'-O-methyl modified nucleotide
  modified_base 77: mod_base = OTHER; note = 2'-O-methyl modified nucleotide
  modified_base 80: mod_base = OTHER; note = 2'-O-methyl modified nucleotide
  modified_base 86: mod_base = OTHER; note = 2'-O-methyl modified nucleotide
  modified_base 87: mod_base = OTHER; note = 2'-O-methyl modified nucleotide
  modified_base 89: mod_base = OTHER; note = 2'-O-methyl modified nucleotide
  modified_base 90: mod_base = OTHER; note = 2'-O-methyl modified nucleotide
  modified_base 91: mod_base = OTHER; note = 2'-O-methyl modified nucleotide
  modified_base 92: mod_base = OTHER; note = 2'-O-methyl modified nucleotide
  modified_base 99: mod_base = OTHER; note = nucleotide with phosphorothioate linkage
  modified_base 100: mod_base = OTHER; note = 2'-O-methyl modified nucleotide with phosphorothioate linkage
  modified_base 101: mod_base = OTHER; note = 2'-O-methyl modified nucleotide

SEQ ID NO: 2399 - RNA, 101 nt, synthetic construct; identical to SEQ ID NO: 1399
  source 1..101: mol_type = other RNA
  modified_base 1: mod_base = OTHER; note = 2'-O-methyl modified nucleotide with phosphorothioate linkage
  modified_base 2: mod_base = OTHER; note = 2'-O-methyl modified nucleotide with phosphorothioate linkage
  modified_base 3: mod_base = OTHER; note = 2'-O-methyl modified nucleotide with phosphorothioate linkage
  modified_base 4: mod_base = OTHER; note = 2'-O-methyl modified nucleotide
  modified_base 5: mod_base = OTHER; note = 2'-O-methyl modified nucleotide
  modified_base 8: mod_base = OTHER; note = 2'-O-methyl modified nucleotide
  modified_base 9: mod_base = OTHER; note = 2'-O-methyl modified nucleotide
  modified_base 11: mod_base = OTHER; note = 2'-O-methyl modified nucleotide
  modified_base 13: mod_base = OTHER; note = 2'-O-methyl modified nucleotide
  modified_base 18: mod_base = OTHER; note = 2'-O-methyl modified nucleotide
  modified_base 22: mod_base = OTHER; note = 2'-O-methyl modified nucleotide
  modified_base 25: mod_base = OTHER; note = 2'-O-methyl modified nucleotide
  modified_base 29: mod_base = OTHER; note = 2'-O-methyl modified nucleotide
  modified_base 30: mod_base = OTHER; note = 2'-O-methyl modified nucleotide
  modified_base 31: mod_base = OTHER; note = 2'-O-methyl modified nucleotide
  modified_base 32: mod_base = OTHER; note = 2'-O-methyl modified nucleotide
  modified_base 37: mod_base = OTHER; note = 2'-O-methyl modified nucleotide
  modified_base 38: mod_base = OTHER; note = 2'-O-methyl modified nucleotide
  modified_base 39: mod_base = OTHER; note = 2'-O-methyl modified nucleotide
  modified_base 40: mod_base = OTHER; note = 2'-O-methyl modified nucleotide
  modified_base 41: mod_base = OTHER; note = 2'-O-methyl modified nucleotide
  modified_base 42: mod_base = OTHER; note = 2'-O-methyl modified nucleotide
  modified_base 43: mod_base = OTHER; note = 2'-O-methyl modified nucleotide
  modified_base 47: mod_base = OTHER; note = 2'-O-methyl modified nucleotide
  modified_base 48: mod_base = OTHER; note = 2'-O-methyl modified nucleotide
  modified_base 51: mod_base = OTHER; note = 2'-O-methyl modified nucleotide
  modified_base 54: mod_base = OTHER; note = nucleotide with phosphorothioate linkage
  modified_base 58: mod_base = OTHER; note = 2'-O-methyl modified nucleotide
  modified_base 59: mod_base = OTHER; note = 2'-O-methyl modified nucleotide
  modified_base 61: mod_base = OTHER; note = 2'-O-methyl modified nucleotide
  modified_base 62: mod_base = OTHER; note = 2'-O-methyl modified nucleotide
  modified_base 63: mod_base = OTHER; note = 2'-O-methyl modified nucleotide
  modified_base 64: mod_base = OTHER; note = 2'-O-methyl modified nucleotide
  modified_base 65: mod_base = OTHER; note = 2'-O-methyl modified nucleotide
  modified_base 66: mod_base = OTHER; note = 2'-O-methyl modified nucleotide
  modified_base 67: mod_base = OTHER; note = 2'-O-methyl modified nucleotide
  modified_base 68: mod_base = OTHER; note = 2'-O-methyl modified nucleotide
  modified_base 69: mod_base = OTHER; note = 2'-O-methyl modified nucleotide
  modified_base 70: mod_base = OTHER; note = 2'-O-methyl modified nucleotide
  modified_base 75: mod_base = OTHER; note = 2'-O-methyl modified nucleotide
  modified_base 77: mod_base = OTHER; note = 2'-O-methyl modified nucleotide
  modified_base 80: mod_base = OTHER; note = 2'-O-methyl modified nucleotide
  modified_base 86: mod_base = OTHER; note = 2'-O-methyl modified nucleotide
  modified_base 87: mod_base = OTHER; note = 2'-O-methyl modified nucleotide
  modified_base 89: mod_base = OTHER; note = 2'-O-methyl modified nucleotide
  modified_base 90: mod_base = OTHER; note = 2'-O-methyl modified nucleotide
  modified_base 91: mod_base = OTHER; note = 2'-O-methyl modified nucleotide
  modified_base 92: mod_base = OTHER; note = 2'-O-methyl modified nucleotide
  modified_base 99: mod_base = OTHER; note = nucleotide with phosphorothioate linkage
  modified_base 100: mod_base = OTHER; note = 2'-O-methyl modified nucleotide with phosphorothioate linkage
  modified_base 101: mod_base = OTHER; note = 2'-O-methyl modified nucleotide

SEQ ID NO: 2400 - RNA, 101 nt, synthetic construct; identical to SEQ ID NO: 1400
  source 1..101: mol_type = other RNA
  modified_base 1: mod_base = OTHER; note = 2'-O-methyl modified nucleotide with phosphorothioate linkage
  modified_base 2: mod_base = OTHER; note = 2'-O-methyl modified nucleotide with phosphorothioate linkage
  modified_base 3: mod_base = OTHER; note = 2'-O-methyl modified nucleotide with phosphorothioate linkage
  modified_base 4: mod_base = OTHER; note = 2'-O-methyl modified nucleotide
  modified_base 5: mod_base = OTHER; note = 2'-O-methyl modified nucleotide
  modified_base 8: mod_base = OTHER; note = 2'-O-methyl modified nucleotide
  modified_base 9: mod_base = OTHER; note = 2'-O-methyl modified nucleotide
  modified_base 11: mod_base = OTHER; note = 2'-O-methyl modified nucleotide
  modified_base 13: mod_base = OTHER; note = 2'-O-methyl modified nucleotide
  modified_base 18: mod_base = OTHER; note = 2'-O-methyl modified nucleotide
  modified_base 22: mod_base = OTHER; note = 2'-O-methyl modified nucleotide
  modified_base 25: mod_base = OTHER; note = 2'-O-methyl modified nucleotide
  modified_base 29: mod_base = OTHER; note = 2'-O-methyl modified nucleotide
  modified_base 30: mod_base = OTHER; note = 2'-O-methyl modified nucleotide
  modified_base 31: mod_base = OTHER; note = 2'-O-methyl modified nucleotide
  modified_base 32: mod_base = OTHER; note = 2'-O-methyl modified nucleotide
  modified_base 37: mod_base = OTHER; note = 2'-O-methyl modified nucleotide
  modified_base 38: mod_base = OTHER; note = 2'-O-methyl modified nucleotide
  modified_base 39: mod_base = OTHER; note = 2'-O-methyl modified nucleotide
  modified_base 40: mod_base = OTHER; note = 2'-O-methyl modified nucleotide
  modified_base 41: mod_base = OTHER; note = 2'-O-methyl modified nucleotide
  modified_base 42: mod_base = OTHER; note = 2'-O-methyl modified nucleotide
  modified_base 43: mod_base = OTHER; note = 2'-O-methyl modified nucleotide
  modified_base 47: mod_base = OTHER; note = 2'-O-methyl modified nucleotide
  modified_base 48: mod_base = OTHER; note = 2'-O-methyl modified nucleotide
  modified_base 51: mod_base = OTHER; note = 2'-O-methyl modified nucleotide
  modified_base 54: mod_base = OTHER; note = nucleotide with phosphorothioate linkage
  modified_base 58: mod_base = OTHER; note = 2'-O-methyl modified nucleotide
  modified_base 59: mod_base = OTHER; note = 2'-O-methyl modified nucleotide
  modified_base 61: mod_base = OTHER; note = 2'-O-methyl modified nucleotide
  modified_base 62: mod_base = OTHER; note = 2'-O-methyl modified nucleotide
  modified_base 63: mod_base = OTHER; note = 2'-O-methyl modified nucleotide
  modified_base 64: mod_base = OTHER; note = 2'-O-methyl modified nucleotide
  modified_base 65: mod_base = OTHER; note = 2'-O-methyl modified nucleotide
  modified_base 66: mod_base = OTHER; note = 2'-O-methyl modified nucleotide
  modified_base 67: mod_base = OTHER; note = 2'-O-methyl modified nucleotide
  modified_base 68: mod_base = OTHER; note = 2'-O-methyl modified nucleotide
  modified_base 69: mod_base = OTHER; note = 2'-O-methyl modified nucleotide
  modified_base 70: mod_base = OTHER; note = 2'-O-methyl modified nucleotide
  modified_base 75: mod_base = OTHER; note = 2'-O-methyl modified nucleotide
  modified_base 77: mod_base = OTHER; note = 2'-O-methyl modified nucleotide
  modified_base 80: mod_base = OTHER; note = 2'-O-methyl modified nucleotide
  modified_base 86: mod_base = OTHER; note = 2'-O-methyl modified nucleotide
  modified_base 87: mod_base = OTHER; note = 2'-O-methyl modified nucleotide
  modified_base 89: mod_base = OTHER; note = 2'-O-methyl modified nucleotide
  modified_base 90: mod_base = OTHER; note = 2'-O-methyl modified nucleotide
  modified_base 91: mod_base = OTHER; note = 2'-O-methyl modified nucleotide
  modified_base 92: mod_base = OTHER; note = 2'-O-methyl modified nucleotide
  modified_base 99: mod_base = OTHER; note = nucleotide with phosphorothioate linkage
  modified_base 100: mod_base = OTHER; note = 2'-O-methyl modified nucleotide with phosphorothioate linkage
  modified_base 101: mod_base = OTHER; note = 2'-O-methyl modified nucleotide

SEQ ID NO: 2401 - RNA, 101 nt, synthetic construct; identical to SEQ ID NO: 1401
  source 1..101: mol_type = other RNA
  modified_base 1: mod_base = OTHER; note = 2'-O-methyl modified nucleotide with phosphorothioate linkage
  modified_base 2: mod_base = OTHER; note = 2'-O-methyl modified nucleotide with phosphorothioate linkage
  modified_base 3: mod_base = OTHER; note = 2'-O-methyl modified nucleotide with phosphorothioate linkage
  modified_base 4: mod_base = OTHER; note = 2'-O-methyl modified nucleotide
  modified_base 5: mod_base = OTHER; note = 2'-O-methyl modified nucleotide
  modified_base 8: mod_base = OTHER; note = 2'-O-methyl modified nucleotide
  modified_base 9: mod_base = OTHER; note = 2'-O-methyl modified nucleotide
  modified_base 11: mod_base = OTHER; note = 2'-O-methyl modified nucleotide
  modified_base 13: mod_base = OTHER; note = 2'-O-methyl modified nucleotide
  modified_base 18: mod_base = OTHER; note = 2'-O-methyl modified nucleotide
  modified_base 22: mod_base = OTHER; note = 2'-O-methyl modified nucleotide
  modified_base 25: mod_base = OTHER; note = 2'-O-methyl modified nucleotide
  modified_base 29: mod_base = OTHER; note = 2'-O-methyl modified nucleotide
  modified_base 30: mod_base = OTHER; note = 2'-O-methyl modified nucleotide
  modified_base 31: mod_base = OTHER; note = 2'-O-methyl modified nucleotide
  modified_base 32: mod_base = OTHER; note = 2'-O-methyl modified nucleotide
  modified_base 37: mod_base = OTHER; note = 2'-O-methyl modified nucleotide
  modified_base 38: mod_base = OTHER; note = 2'-O-methyl modified nucleotide
  modified_base 39: mod_base = OTHER; note = 2'-O-methyl modified nucleotide
  modified_base 40: mod_base = OTHER; note = 2'-O-methyl modified nucleotide
  modified_base 41: mod_base = OTHER; note = 2'-O-methyl modified nucleotide
  modified_base 42: mod_base = OTHER; note = 2'-O-methyl modified nucleotide
  modified_base 43: mod_base = OTHER; note = 2'-O-methyl modified nucleotide
  modified_base 47: mod_base = OTHER; note = 2'-O-methyl modified nucleotide
  modified_base 48: mod_base = OTHER; note = 2'-O-methyl modified nucleotide
  modified_base 51: mod_base = OTHER; note = 2'-O-methyl modified nucleotide
  modified_base 54: mod_base = OTHER; note = nucleotide with phosphorothioate linkage
  modified_base 58: mod_base = OTHER; note = 2'-O-methyl modified nucleotide
  modified_base 59: mod_base = OTHER; note = 2'-O-methyl modified nucleotide
  modified_base 61: mod_base = OTHER; note = 2'-O-methyl modified nucleotide
  modified_base 62: mod_base = OTHER; note = 2'-O-methyl modified nucleotide
  modified_base 63: mod_base = OTHER; note = 2'-O-methyl modified nucleotide
  modified_base 64: mod_base = OTHER; note = 2'-O-methyl modified nucleotide
  modified_base 65: mod_base = OTHER; note = 2'-O-methyl modified nucleotide
  modified_base 66: mod_base = OTHER; note = 2'-O-methyl modified nucleotide
  modified_base 67: mod_base = OTHER; note = 2'-O-methyl modified nucleotide
  modified_base 68: mod_base = OTHER; note = 2'-O-methyl modified nucleotide
  modified_base 69: mod_base = OTHER; note = 2'-O-methyl modified nucleotide
  modified_base 70: mod_base = OTHER; note = 2'-O-methyl modified nucleotide
  modified_base 75: mod_base = OTHER; note = 2'-O-methyl modified nucleotide
  modified_base 77: mod_base = OTHER; note = 2'-O-methyl modified nucleotide
  modified_base 80: mod_base = OTHER; note = 2'-O-methyl modified nucleotide
  modified_base 86: mod_base = OTHER; note = 2'-O-methyl modified nucleotide
  modified_base 87: mod_base = OTHER; note = 2'-O-methyl modified nucleotide
  modified_base 89: mod_base = OTHER; note = 2'-O-methyl modified nucleotide
  modified_base 90: mod_base = OTHER; note = 2'-O-methyl modified nucleotide
  modified_base 91: mod_base = OTHER; note = 2'-O-methyl modified nucleotide
  modified_base 92: mod_base = OTHER; note = 2'-O-methyl modified nucleotide
  modified_base 99: mod_base = OTHER; note = nucleotide with phosphorothioate linkage
  modified_base 100: mod_base = OTHER; note = 2'-O-methyl modified nucleotide with phosphorothioate linkage
  modified_base 101: mod_base = OTHER; note = 2'-O-methyl modified nucleotide

SEQ ID NO: 2402 - RNA, 101 nt, synthetic construct; identical to SEQ ID NO: 1402
  source 1..101: mol_type = other RNA
  modified_base 1: mod_base = OTHER; note = 2'-O-methyl modified nucleotide with phosphorothioate linkage
  modified_base 2: mod_base = OTHER; note = 2'-O-methyl modified nucleotide with phosphorothioate linkage
  modified_base 3: mod_base = OTHER; note = 2'-O-methyl modified nucleotide with phosphorothioate linkage
  modified_base 4: mod_base = OTHER; note = 2'-O-methyl modified nucleotide
  modified_base 5: mod_base = OTHER; note = 2'-O-methyl modified nucleotide
  modified_base 8: mod_base = OTHER; note = 2'-O-methyl modified nucleotide
  modified_base 9: mod_base = OTHER; note = 2'-O-methyl modified nucleotide
  modified_base 11: mod_base = OTHER; note = 2'-O-methyl modified nucleotide
  modified_base 13: mod_base = OTHER; note = 2'-O-methyl modified nucleotide
  modified_base 18: mod_base = OTHER; note = 2'-O-methyl modified nucleotide
  modified_base 22: mod_base = OTHER; note = 2'-O-methyl modified nucleotide
  modified_base 25: mod_base = OTHER; note = 2'-O-methyl modified nucleotide
  modified_base 29: mod_base = OTHER; note = 2'-O-methyl modified nucleotide
  modified_base 30: mod_base = OTHER; note = 2'-O-methyl modified nucleotide
  modified_base 31: mod_base = OTHER; note = 2'-O-methyl modified nucleotide
  modified_base 32: mod_base = OTHER; note = 2'-O-methyl modified nucleotide
  modified_base 37: mod_base = OTHER; note = 2'-O-methyl modified nucleotide
  modified_base 38: mod_base = OTHER; note = 2'-O-methyl modified nucleotide
  modified_base 39: mod_base = OTHER; note = 2'-O-methyl modified nucleotide
  modified_base 40: mod_base = OTHER; note = 2'-O-methyl modified nucleotide
  modified_base 41: mod_base = OTHER; note = 2'-O-methyl modified nucleotide
  modified_base 42: mod_base = OTHER; note = 2'-O-methyl modified nucleotide
  modified_base 43: mod_base = OTHER; note = 2'-O-methyl modified nucleotide
  modified_base 47: mod_base = OTHER; note = 2'-O-methyl modified nucleotide
  modified_base 48: mod_base = OTHER; note = 2'-O-methyl modified nucleotide
  modified_base 51: mod_base = OTHER; note = 2'-O-methyl modified nucleotide
  modified_base 54: mod_base = OTHER; note = nucleotide with phosphorothioate linkage
  modified_base 58: mod_base = OTHER; note = 2'-O-methyl modified nucleotide
  modified_base 59: mod_base = OTHER; note = 2'-O-methyl modified nucleotide
  modified_base 61: mod_base = OTHER; note = 2'-O-methyl modified nucleotide
  modified_base 62: mod_base = OTHER; note = 2'-O-methyl modified nucleotide
  modified_base 63: mod_base = OTHER; note = 2'-O-methyl modified nucleotide
  modified_base 64: mod_base = OTHER; note = 2'-O-methyl modified nucleotide
  modified_base 65: mod_base = OTHER; note = 2'-O-methyl modified nucleotide
  modified_base 66: mod_base = OTHER; note = 2'-O-methyl modified nucleotide
  modified_base 67: mod_base = OTHER; note = 2'-O-methyl modified nucleotide
  modified_base 68: mod_base = OTHER; note = 2'-O-methyl modified nucleotide
  modified_base 69: mod_base = OTHER; note = 2'-O-methyl modified nucleotide
  modified_base 70: mod_base = OTHER; note = 2'-O-methyl modified nucleotide
  modified_base 75: mod_base = OTHER; note = 2'-O-methyl modified nucleotide
  modified_base 77: mod_base = OTHER; note = 2'-O-methyl modified nucleotide
  modified_base 80: mod_base = OTHER; note = 2'-O-methyl modified nucleotide
  modified_base 86: mod_base = OTHER; note = 2'-O-methyl modified nucleotide
  modified_base 87: mod_base = OTHER; note = 2'-O-methyl modified nucleotide
  modified_base 89: mod_base = OTHER; note = 2'-O-methyl modified nucleotide
  modified_base 90: mod_base = OTHER; note = 2'-O-methyl modified nucleotide
  modified_base 91: mod_base = OTHER; note = 2'-O-methyl modified nucleotide
  modified_base 92: mod_base = OTHER; note = 2'-O-methyl modified nucleotide
  modified_base 99: mod_base = OTHER; note = nucleotide with phosphorothioate linkage
  modified_base 100: mod_base = OTHER; note = 2'-O-methyl modified nucleotide with phosphorothioate linkage
  modified_base 101: mod_base = OTHER; note = 2'-O-methyl modified nucleotide

SEQ ID NO: 2403 - RNA, 101 nt, synthetic construct; identical to SEQ ID NO: 1403
  source 1..101: mol_type = other RNA
  modified_base 1: mod_base = OTHER; note = 2'-O-methyl modified nucleotide with phosphorothioate linkage
  modified_base 2: mod_base = OTHER; note = 2'-O-methyl modified nucleotide with phosphorothioate linkage
  modified_base 3: mod_base = OTHER; note = 2'-O-methyl modified nucleotide with phosphorothioate linkage
  modified_base 4: mod_base = OTHER; note = 2'-O-methyl modified nucleotide
  modified_base 5: mod_base = OTHER; note = 2'-O-methyl modified nucleotide
  modified_base 8: mod_base = OTHER; note = 2'-O-methyl modified nucleotide
  modified_base 9: mod_base = OTHER; note = 2'-O-methyl modified nucleotide
  modified_base 11: mod_base = OTHER; note = 2'-O-methyl modified nucleotide
  modified_base 13: mod_base = OTHER; note = 2'-O-methyl modified nucleotide
  modified_base 18: mod_base = OTHER; note = 2'-O-methyl modified nucleotide
  modified_base 22: mod_base = OTHER; note = 2'-O-methyl modified nucleotide
  modified_base 25: mod_base = OTHER; note = 2'-O-methyl modified nucleotide
  modified_base 29: mod_base = OTHER; note = 2'-O-methyl modified nucleotide
  modified_base 30: mod_base = OTHER; note = 2'-O-methyl modified nucleotide
  modified_base 31: mod_base = OTHER; note = 2'-O-methyl modified nucleotide
  modified_base 32: mod_base = OTHER; note = 2'-O-methyl modified nucleotide
  modified_base 37: mod_base = OTHER; note = 2'-O-methyl modified nucleotide
  modified_base 38: mod_base = OTHER; note = 2'-O-methyl modified nucleotide
  modified_base 39: mod_base = OTHER; note = 2'-O-methyl modified nucleotide
  modified_base 40: mod_base = OTHER; note = 2'-O-methyl modified nucleotide
  modified_base 41: mod_base = OTHER; note = 2'-O-methyl modified nucleotide
  modified_base 42: mod_base = OTHER; note = 2'-O-methyl modified nucleotide
  modified_base 43: mod_base = OTHER; note = 2'-O-methyl modified nucleotide
  modified_base 47: mod_base = OTHER; note = 2'-O-methyl modified nucleotide
  modified_base 48: mod_base = OTHER; note = 2'-O-methyl modified nucleotide
  modified_base 51: mod_base = OTHER; note = 2'-O-methyl modified nucleotide
  modified_base 54: mod_base = OTHER; note = nucleotide with phosphorothioate linkage
  modified_base 58: mod_base = OTHER; note = 2'-O-methyl modified nucleotide
  modified_base 59: mod_base = OTHER; note = 2'-O-methyl modified nucleotide
  modified_base 61: mod_base = OTHER; note = 2'-O-methyl modified nucleotide
  modified_base 62: mod_base = OTHER; note = 2'-O-methyl modified nucleotide
  modified_base 63: mod_base = OTHER; note = 2'-O-methyl modified nucleotide
  modified_base 64: mod_base = OTHER; note = 2'-O-methyl modified nucleotide
  modified_base 65: mod_base = OTHER; note = 2'-O-methyl modified nucleotide
  modified_base 66: mod_base = OTHER; note = 2'-O-methyl modified nucleotide
  modified_base 67: mod_base = OTHER; note = 2'-O-methyl modified nucleotide
  modified_base 68: mod_base = OTHER; note = 2'-O-methyl modified nucleotide
  modified_base 69: mod_base = OTHER; note = 2'-O-methyl modified nucleotide
  modified_base 70: mod_base = OTHER; note = 2'-O-methyl modified nucleotide
  modified_base 75: mod_base = OTHER; note = 2'-O-methyl modified nucleotide
  modified_base 77: mod_base = OTHER; note = 2'-O-methyl modified nucleotide
  modified_base 80: mod_base = OTHER; note = 2'-O-methyl modified nucleotide
  modified_base 86: mod_base = OTHER; note = 2'-O-methyl modified nucleotide
  modified_base 87: mod_base = OTHER; note = 2'-O-methyl modified nucleotide
  modified_base 89: mod_base = OTHER; note = 2'-O-methyl modified nucleotide
  modified_base 90: mod_base = OTHER; note = 2'-O-methyl modified nucleotide
  modified_base 91: mod_base = OTHER; note = 2'-O-methyl modified nucleotide
  modified_base 92: mod_base = OTHER; note = 2'-O-methyl modified nucleotide
  modified_base 99: mod_base = OTHER; note = nucleotide with phosphorothioate linkage
  modified_base 100: mod_base = OTHER; note = 2'-O-methyl modified nucleotide with phosphorothioate linkage
  modified_base 101: mod_base = OTHER; note = 2'-O-methyl modified nucleotide

SEQ ID NO: 2404 - RNA, 101 nt, synthetic construct; identical to SEQ ID NO: 1404
  source 1..101: mol_type = other RNA
  modified_base 1: mod_base = OTHER; note = 2'-O-methyl modified nucleotide with phosphorothioate linkage
  modified_base 2: mod_base = OTHER; note = 2'-O-methyl modified nucleotide with phosphorothioate linkage
  modified_base 3: mod_base = OTHER; note = 2'-O-methyl modified nucleotide with phosphorothioate linkage
  modified_base 4: mod_base = OTHER; note = 2'-O-methyl modified nucleotide
  modified_base 5: mod_base = OTHER; note = 2'-O-methyl modified nucleotide
  modified_base 8: mod_base = OTHER; note = 2'-O-methyl modified nucleotide
  modified_base 9: mod_base = OTHER; note = 2'-O-methyl modified nucleotide
  modified_base 11: mod_base = OTHER; note = 2'-O-methyl modified nucleotide
  modified_base 13: mod_base = OTHER; note = 2'-O-methyl modified nucleotide
  modified_base 18: mod_base = OTHER; note = 2'-O-methyl modified nucleotide
  modified_base 22: mod_base = OTHER; note = 2'-O-methyl modified nucleotide
  modified_base 25: mod_base = OTHER; note = 2'-O-methyl modified nucleotide
  modified_base 29: mod_base = OTHER; note = 2'-O-methyl modified nucleotide
  modified_base 30: mod_base = OTHER; note = 2'-O-methyl modified nucleotide
  modified_base 31: mod_base = OTHER; note = 2'-O-methyl modified nucleotide
  modified_base 32: mod_base = OTHER; note = 2'-O-methyl modified nucleotide
  modified_base 37: mod_base = OTHER; note = 2'-O-methyl modified nucleotide
  modified_base 38: mod_base = OTHER; note = 2'-O-methyl modified nucleotide
  modified_base 39: mod_base = OTHER; note = 2'-O-methyl modified nucleotide
  modified_base 40: mod_base = OTHER; note = 2'-O-methyl modified nucleotide
  modified_base 41: mod_base = OTHER; note = 2'-O-methyl modified nucleotide
  modified_base 42: mod_base = OTHER; note = 2'-O-methyl modified nucleotide
  modified_base 43: mod_base = OTHER; note = 2'-O-methyl modified nucleotide
  modified_base 47: mod_base = OTHER; note = 2'-O-methyl modified nucleotide
  modified_base 48: mod_base = OTHER; note = 2'-O-methyl modified nucleotide
  modified_base 51: mod_base = OTHER; note = 2'-O-methyl modified nucleotide
  modified_base 54: mod_base = OTHER; note = nucleotide with phosphorothioate linkage
  modified_base 58: mod_base = OTHER; note = 2'-O-methyl modified nucleotide
  modified_base 59: mod_base = OTHER; note = 2'-O-methyl modified nucleotide
  modified_base 61: mod_base = OTHER; note = 2'-O-methyl modified nucleotide
  modified_base 62: mod_base = OTHER; note = 2'-O-methyl modified nucleotide
  modified_base 63: mod_base = OTHER; note = 2'-O-methyl modified nucleotide
  modified_base 64: mod_base = OTHER; note = 2'-O-methyl modified nucleotide
  modified_base 65: mod_base = OTHER; note = 2'-O-methyl modified nucleotide
  modified_base 66: mod_base = OTHER; note = 2'-O-methyl modified nucleotide
  modified_base 67: mod_base = OTHER; note = 2'-O-methyl modified nucleotide
  modified_base 68: mod_base = OTHER; note = 2'-O-methyl modified nucleotide
  modified_base 69: mod_base = OTHER; note = 2'-O-methyl modified nucleotide
  modified_base 70: mod_base = OTHER; note = 2'-O-methyl modified nucleotide
  modified_base 75: mod_base = OTHER; note = 2'-O-methyl modified nucleotide
  modified_base 77: mod_base = OTHER; note = 2'-O-methyl modified nucleotide
  modified_base 80: mod_base = OTHER; note = 2'-O-methyl modified nucleotide
  modified_base 86: mod_base = OTHER; note = 2'-O-methyl modified nucleotide
  modified_base 87: mod_base = OTHER; note = 2'-O-methyl modified nucleotide
  modified_base 89: mod_base = OTHER; note = 2'-O-methyl modified nucleotide
  modified_base 90: mod_base = OTHER; note = 2'-O-methyl modified nucleotide
  modified_base 91: mod_base = OTHER; note = 2'-O-methyl modified nucleotide
  modified_base 92: mod_base = OTHER; note = 2'-O-methyl modified nucleotide
  modified_base 99: mod_base = OTHER; note = nucleotide with phosphorothioate linkage
  modified_base 100: mod_base = OTHER; note = 2'-O-methyl modified nucleotide with phosphorothioate linkage
  modified_base 101: mod_base = OTHER; note = 2'-O-methyl modified nucleotide

SEQ ID NO: 2405 - RNA, 101 nt, synthetic construct; identical to SEQ ID NO: 1405
  source 1..101: mol_type = other RNA
  modified_base 1: mod_base = OTHER; note = 2'-O-methyl modified nucleotide with phosphorothioate linkage
  modified_base 2: mod_base = OTHER; note = 2'-O-methyl modified nucleotide with phosphorothioate linkage
  modified_base 3: mod_base = OTHER; note = 2'-O-methyl modified nucleotide with phosphorothioate linkage
  modified_base 4: mod_base = OTHER; note = 2'-O-methyl modified nucleotide
  modified_base 5: mod_base = OTHER; note = 2'-O-methyl modified nucleotide
  modified_base 8: mod_base = OTHER; note = 2'-O-methyl modified nucleotide
  modified_base 9: mod_base = OTHER; note = 2'-O-methyl modified nucleotide
  modified_base 11: mod_base = OTHER; note = 2'-O-methyl modified nucleotide
  modified_base 13: mod_base = OTHER; note = 2'-O-methyl modified nucleotide
  modified_base 18: mod_base = OTHER; note = 2'-O-methyl modified nucleotide
  modified_base 22: mod_base = OTHER; note = 2'-O-methyl modified nucleotide
  modified_base 25: mod_base = OTHER; note = 2'-O-methyl modified nucleotide
  modified_base 29: mod_base = OTHER; note = 2'-O-methyl modified nucleotide
  modified_base 30: mod_base = OTHER; note = 2'-O-methyl modified nucleotide
  modified_base 31: mod_base = OTHER; note = 2'-O-methyl modified nucleotide
  modified_base 32: mod_base = OTHER; note = 2'-O-methyl modified nucleotide
  modified_base 37: mod_base = OTHER; note = 2'-O-methyl modified nucleotide
  modified_base 38: mod_base = OTHER; note = 2'-O-methyl modified nucleotide
  modified_base 39: mod_base = OTHER; note = 2'-O-methyl modified nucleotide
  modified_base 40: mod_base = OTHER; note = 2'-O-methyl modified nucleotide
  modified_base 41: mod_base = OTHER; note = 2'-O-methyl modified nucleotide
  modified_base 42: mod_base = OTHER; note = 2'-O-methyl modified nucleotide
  modified_base 43: mod_base = OTHER; note = 2'-O-methyl modified nucleotide
  modified_base 47: mod_base = OTHER; note = 2'-O-methyl modified nucleotide
  modified_base 48: mod_base = OTHER; note = 2'-O-methyl modified nucleotide
  modified_base 51: mod_base = OTHER; note = 2'-O-methyl modified nucleotide
  modified_base 54: mod_base = OTHER; note = nucleotide with phosphorothioate linkage
  modified_base 58: mod_base = OTHER; note = 2'-O-methyl modified nucleotide
  modified_base 59: mod_base = OTHER; note = 2'-O-methyl modified nucleotide
  modified_base 61: mod_base = OTHER; note = 2'-O-methyl modified nucleotide
  modified_base 62: mod_base = OTHER; note = 2'-O-methyl modified nucleotide
  modified_base 63: mod_base = OTHER; note = 2'-O-methyl modified nucleotide
  modified_base 64: mod_base = OTHER; note = 2'-O-methyl modified nucleotide
  modified_base 65: mod_base = OTHER; note = 2'-O-methyl modified nucleotide
  modified_base 66: mod_base = OTHER; note = 2'-O-methyl modified nucleotide
  modified_base 67: mod_base = OTHER; note = 2'-O-methyl modified nucleotide
  modified_base 68: mod_base = OTHER; note = 2'-O-methyl modified nucleotide
  modified_base 69: mod_base = OTHER; note = 2'-O-methyl modified nucleotide
  modified_base 70: mod_base = OTHER; note = 2'-O-methyl modified nucleotide
  modified_base 75: mod_base = OTHER; note = 2'-O-methyl modified nucleotide
  modified_base 77: mod_base = OTHER; note = 2'-O-methyl modified nucleotide
  modified_base 80: mod_base = OTHER; note = 2'-O-methyl modified nucleotide
  modified_base 86: mod_base = OTHER; note = 2'-O-methyl modified nucleotide
  modified_base 87: mod_base = OTHER; note = 2'-O-methyl modified nucleotide
  modified_base 89: mod_base = OTHER; note = 2'-O-methyl modified nucleotide
  modified_base 90: mod_base = OTHER; note = 2'-O-methyl modified nucleotide
  modified_base 91: mod_base = OTHER; note = 2'-O-methyl modified nucleotide
  modified_base 92: mod_base = OTHER; note = 2'-O-methyl modified nucleotide
  modified_base 99: mod_base = OTHER; note = nucleotide with phosphorothioate linkage
  modified_base 100: mod_base = OTHER; note = 2'-O-methyl modified nucleotide with phosphorothioate linkage
  modified_base 101: mod_base = OTHER; note = 2'-O-methyl modified nucleotide

SEQ ID NO: 2406 - RNA, 101 nt, synthetic construct; identical to SEQ ID NO: 1406
  source 1..101: mol_type = other RNA
  modified_base 1: mod_base = OTHER; note = 2'-O-methyl modified nucleotide with phosphorothioate linkage
  modified_base 2: mod_base = OTHER; note = 2'-O-methyl modified nucleotide with phosphorothioate linkage
  modified_base 3: mod_base = OTHER; note = 2'-O-methyl modified nucleotide with phosphorothioate linkage
  modified_base 4: mod_base = OTHER; note = 2'-O-methyl modified nucleotide
  modified_base 5: mod_base = OTHER; note = 2'-O-methyl modified nucleotide
  modified_base 8: mod_base = OTHER; note = 2'-O-methyl modified nucleotide
  modified_base 9: mod_base = OTHER; note = 2'-O-methyl modified nucleotide
  modified_base 11: mod_base = OTHER; note = 2'-O-methyl modified nucleotide
  modified_base 13: mod_base = OTHER; note = 2'-O-methyl modified nucleotide
  modified_base 18: mod_base = OTHER; note = 2'-O-methyl modified nucleotide
  modified_base 22: mod_base = OTHER; note = 2'-O-methyl modified nucleotide
  modified_base 25: mod_base = OTHER; note = 2'-O-methyl modified nucleotide
  modified_base 29: mod_base = OTHER; note = 2'-O-methyl modified nucleotide
  modified_base 30: mod_base = OTHER; note = 2'-O-methyl modified nucleotide
  modified_base 31: mod_base = OTHER; note = 2'-O-methyl modified nucleotide
  modified_base 32: mod_base = OTHER; note = 2'-O-methyl modified nucleotide
  modified_base 37: mod_base = OTHER; note = 2'-O-methyl modified nucleotide
  modified_base 38: mod_base = OTHER; note = 2'-O-methyl modified nucleotide
  modified_base 39: mod_base = OTHER; note = 2'-O-methyl modified nucleotide
  modified_base 40: mod_base = OTHER; note = 2'-O-methyl modified nucleotide
  modified_base 41: mod_base = OTHER; note = 2'-O-methyl modified nucleotide
  modified_base 42: mod_base = OTHER; note = 2'-O-methyl modified nucleotide
  modified_base 43: mod_base = OTHER; note = 2'-O-methyl modified nucleotide
  modified_base 47: mod_base = OTHER; note = 2'-O-methyl modified nucleotide
  modified_base 48: mod_base = OTHER; note = 2'-O-methyl modified nucleotide
  modified_base 51: mod_base = OTHER; note = 2'-O-methyl modified nucleotide
  modified_base 54: mod_base = OTHER; note = nucleotide with phosphorothioate linkage
  modified_base 58: mod_base = OTHER; note = 2'-O-methyl modified nucleotide
  modified_base 59: mod_base = OTHER; note = 2'-O-methyl modified nucleotide
  modified_base 61: mod_base = OTHER; note = 2'-O-methyl modified nucleotide
  modified_base 62: mod_base = OTHER; note = 2'-O-methyl modified nucleotide
  modified_base 63: mod_base = OTHER; note = 2'-O-methyl modified nucleotide
  modified_base 64: mod_base = OTHER; note = 2'-O-methyl modified nucleotide
  modified_base 65: mod_base = OTHER; note = 2'-O-methyl modified nucleotide
  modified_base 66: mod_base = OTHER; note = 2'-O-methyl modified nucleotide
  modified_base 67: mod_base = OTHER; note = 2'-O-methyl modified nucleotide
  modified_base 68: mod_base = OTHER; note = 2'-O-methyl modified nucleotide
  modified_base 69: mod_base = OTHER; note = 2'-O-methyl modified nucleotide
  modified_base 70: mod_base = OTHER; note = 2'-O-methyl modified nucleotide
  modified_base 75: mod_base = OTHER; note = 2'-O-methyl modified nucleotide
  modified_base 77: mod_base = OTHER; note = 2'-O-methyl modified nucleotide
  modified_base 80: mod_base = OTHER; note = 2'-O-methyl modified nucleotide
  modified_base 86: mod_base = OTHER; note = 2'-O-methyl modified nucleotide
  modified_base 87: mod_base = OTHER; note = 2'-O-methyl modified nucleotide
  modified_base 89: mod_base = OTHER; note = 2'-O-methyl modified nucleotide
  modified_base 90: mod_base = OTHER; note = 2'-O-methyl modified nucleotide
  modified_base 91: mod_base = OTHER; note = 2'-O-methyl modified nucleotide
  modified_base 92: mod_base = OTHER; note = 2'-O-methyl modified nucleotide
  modified_base 99: mod_base = OTHER; note = nucleotide with phosphorothioate linkage
  modified_base 100: mod_base = OTHER; note = 2'-O-methyl modified nucleotide with phosphorothioate linkage
  modified_base 101: mod_base = OTHER; note = 2'-O-methyl modified nucleotide

SEQ ID NO: 2407 - RNA, 101 nt, synthetic construct; identical to SEQ ID NO: 1407
  source 1..101: mol_type = other RNA
  modified_base 1: mod_base = OTHER; note = 2'-O-methyl modified nucleotide with phosphorothioate linkage
  modified_base 2: mod_base = OTHER; note = 2'-O-methyl modified nucleotide with phosphorothioate linkage
  modified_base 3: mod_base = OTHER; note = 2'-O-methyl modified nucleotide with phosphorothioate linkage
  modified_base 4: mod_base = OTHER; note = 2'-O-methyl modified nucleotide
  modified_base 5: mod_base = OTHER; note = 2'-O-methyl modified nucleotide
  modified_base 8: mod_base = OTHER; note = 2'-O-methyl modified nucleotide
  modified_base 9: mod_base = OTHER; note = 2'-O-methyl modified nucleotide
  modified_base 11: mod_base = OTHER; note = 2'-O-methyl modified nucleotide
  modified_base 13: mod_base = OTHER; note = 2'-O-methyl modified nucleotide
  modified_base 18: mod_base = OTHER; note = 2'-O-methyl modified nucleotide
  modified_base 22: mod_base = OTHER; note = 2'-O-methyl modified nucleotide
  modified_base 25: mod_base = OTHER; note = 2'-O-methyl modified nucleotide
  modified_base 29: mod_base = OTHER; note = 2'-O-methyl modified nucleotide
  modified_base 30: mod_base = OTHER; note = 2'-O-methyl modified nucleotide
  modified_base 31: mod_base = OTHER; note = 2'-O-methyl modified nucleotide
  modified_base 32: mod_base = OTHER; note = 2'-O-methyl modified nucleotide
  modified_base 37: mod_base = OTHER; note = 2'-O-methyl modified nucleotide
  modified_base 38: mod_base = OTHER; note = 2'-O-methyl modified nucleotide
  modified_base 39: mod_base = OTHER; note = 2'-O-methyl modified nucleotide
  modified_base 40: mod_base = OTHER; note = 2'-O-methyl modified nucleotide
  modified_base 41: mod_base = OTHER; note = 2'-O-methyl modified nucleotide
  modified_base 42: mod_base = OTHER; note = 2'-O-methyl modified nucleotide
  modified_base 43: mod_base = OTHER; note = 2'-O-methyl modified nucleotide
  modified_base 47: mod_base = OTHER; note = 2'-O-methyl modified nucleotide
  modified_base 48: mod_base = OTHER; note = 2'-O-methyl modified nucleotide
  modified_base 51: mod_base = OTHER; note = 2'-O-methyl modified nucleotide
  modified_base 54: mod_base = OTHER; note = nucleotide with phosphorothioate linkage
  modified_base 58: mod_base = OTHER; note = 2'-O-methyl modified nucleotide
  modified_base 59: mod_base = OTHER; note = 2'-O-methyl modified nucleotide
  modified_base 61: mod_base = OTHER; note = 2'-O-methyl modified nucleotide
  modified_base 62: mod_base = OTHER; note = 2'-O-methyl modified nucleotide
  modified_base 63: mod_base = OTHER; note = 2'-O-methyl modified nucleotide
  modified_base 64: mod_base = OTHER; note = 2'-O-methyl modified nucleotide
  modified_base 65: mod_base = OTHER; note = 2'-O-methyl modified nucleotide
  modified_base 66: mod_base = OTHER; note = 2'-O-methyl modified nucleotide
  modified_base 67: mod_base = OTHER; note = 2'-O-methyl modified nucleotide
  modified_base 68: mod_base = OTHER; note = 2'-O-methyl modified nucleotide
  modified_base 69: mod_base = OTHER; note = 2'-O-methyl modified nucleotide
  modified_base 70: mod_base = OTHER; note = 2'-O-methyl modified nucleotide
  modified_base 75: mod_base = OTHER; note = 2'-O-methyl modified nucleotide
  modified_base 77: mod_base = OTHER; note = 2'-O-methyl modified nucleotide
  modified_base 80: mod_base = OTHER; note = 2'-O-methyl modified nucleotide
  modified_base 86: mod_base = OTHER; note = 2'-O-methyl modified nucleotide
  modified_base 87: mod_base = OTHER; note = 2'-O-methyl modified nucleotide
  modified_base 89: mod_base = OTHER; note = 2'-O-methyl modified nucleotide
  modified_base 90: mod_base = OTHER; note = 2'-O-methyl modified nucleotide
  modified_base 91: mod_base = OTHER; note = 2'-O-methyl modified nucleotide
  modified_base 92: mod_base = OTHER; note = 2'-O-methyl modified nucleotide
  modified_base 99: mod_base = OTHER; note = nucleotide with phosphorothioate linkage
  modified_base 100: mod_base = OTHER; note = 2'-O-methyl modified nucleotide with phosphorothioate linkage
  modified_base 101: mod_base = OTHER; note = 2'-O-methyl modified nucleotide

SEQ ID NO: 2408 - RNA, 101 nt, synthetic construct; identical to SEQ ID NO: 1408
  source 1..101: mol_type = other RNA
  modified_base 1: mod_base = OTHER; note = 2'-O-methyl modified nucleotide with phosphorothioate linkage
  modified_base 2: mod_base = OTHER; note = 2'-O-methyl modified nucleotide with phosphorothioate linkage
  modified_base 3: mod_base = OTHER; note = 2'-O-methyl modified nucleotide with phosphorothioate linkage
  modified_base 4: mod_base = OTHER; note = 2'-O-methyl modified nucleotide
  modified_base 5: mod_base = OTHER; note = 2'-O-methyl modified nucleotide
  modified_base 8: mod_base = OTHER; note = 2'-O-methyl modified nucleotide
  modified_base 9: mod_base = OTHER; note = 2'-O-methyl modified nucleotide
  modified_base 11: mod_base = OTHER; note = 2'-O-methyl modified nucleotide
  modified_base 13: mod_base = OTHER; note = 2'-O-methyl modified nucleotide
  modified_base 18: mod_base = OTHER; note = 2'-O-methyl modified nucleotide
  modified_base 22: mod_base = OTHER; note = 2'-O-methyl modified nucleotide
  modified_base 25: mod_base = OTHER; note = 2'-O-methyl modified nucleotide
  modified_base 29: mod_base = OTHER; note = 2'-O-methyl modified nucleotide
  modified_base 30: mod_base = OTHER; note = 2'-O-methyl modified nucleotide
  modified_base 31: mod_base = OTHER; note = 2'-O-methyl modified nucleotide
  modified_base 32: mod_base = OTHER; note = 2'-O-methyl modified nucleotide
  modified_base 37: mod_base = OTHER; note = 2'-O-methyl modified nucleotide
  modified_base 38: mod_base = OTHER; note = 2'-O-methyl modified nucleotide
  modified_base 39: mod_base = OTHER; note = 2'-O-methyl modified nucleotide
  modified_base 40: mod_base = OTHER; note = 2'-O-methyl modified nucleotide
  modified_base 41: mod_base = OTHER; note = 2'-O-methyl modified nucleotide
  modified_base 42: mod_base = OTHER; note = 2'-O-methyl modified nucleotide
  modified_base 43: mod_base = OTHER; note = 2'-O-methyl modified nucleotide
  modified_base 47: mod_base = OTHER; note = 2'-O-methyl modified nucleotide
  modified_base 48: mod_base = OTHER; note = 2'-O-methyl modified nucleotide
  modified_base 51: mod_base = OTHER; note = 2'-O-methyl modified nucleotide
  modified_base 54: mod_base = OTHER; note = nucleotide with phosphorothioate linkage
  modified_base 58: mod_base = OTHER; note = 2'-O-methyl modified nucleotide
  modified_base 59: mod_base = OTHER; note = 2'-O-methyl modified nucleotide
  modified_base 61: mod_base = OTHER; note = 2'-O-methyl modified nucleotide
  modified_base 62: mod_base = OTHER; note = 2'-O-methyl modified nucleotide
  modified_base 63: mod_base = OTHER; note = 2'-O-methyl modified nucleotide
  modified_base 64: mod_base = OTHER; note = 2'-O-methyl modified nucleotide
  modified_base 65: mod_base = OTHER; note = 2'-O-methyl modified nucleotide
  modified_base 66: mod_base = OTHER; note = 2'-O-methyl modified nucleotide
  modified_base 67: mod_base = OTHER; note = 2'-O-methyl modified nucleotide
  modified_base 68: mod_base = OTHER; note = 2'-O-methyl modified nucleotide
  modified_base 69: mod_base = OTHER; note = 2'-O-methyl modified nucleotide
  modified_base 70: mod_base = OTHER; note = 2'-O-methyl modified nucleotide
  modified_base 75: mod_base = OTHER; note = 2'-O-methyl modified nucleotide
  modified_base 77: mod_base = OTHER; note = 2'-O-methyl modified nucleotide
  modified_base 80: mod_base = OTHER; note = 2'-O-methyl modified nucleotide
  modified_base 86: mod_base = OTHER; note = 2'-O-methyl modified nucleotide
  modified_base 87: mod_base = OTHER; note = 2'-O-methyl modified nucleotide
  modified_base 89: mod_base = OTHER; note = 2'-O-methyl modified nucleotide
  modified_base 90: mod_base = OTHER; note = 2'-O-methyl modified nucleotide
  modified_base 91: mod_base = OTHER; note = 2'-O-methyl modified nucleotide
  modified_base 92: mod_base = OTHER; note = 2'-O-methyl modified nucleotide
  modified_base 99: mod_base = OTHER; note = nucleotide with phosphorothioate linkage
  modified_base 100: mod_base = OTHER; note = 2'-O-methyl modified nucleotide with phosphorothioate linkage
  modified_base 101: mod_base = OTHER; note = 2'-O-methyl modified nucleotide

SEQ ID NO: 2409 - RNA, 101 nt, synthetic construct; identical to SEQ ID NO: 1409
  source 1..101: mol_type = other RNA
  modified_base 1: mod_base = OTHER; note = 2'-O-methyl modified nucleotide with phosphorothioate linkage
  modified_base 2: mod_base = OTHER; note = 2'-O-methyl modified nucleotide with phosphorothioate linkage
  modified_base 3: mod_base = OTHER; note = 2'-O-methyl modified nucleotide with phosphorothioate linkage
  modified_base 4: mod_base = OTHER; note = 2'-O-methyl modified nucleotide
  modified_base 5: mod_base = OTHER; note = 2'-O-methyl modified nucleotide
  modified_base 8: mod_base = OTHER; note = 2'-O-methyl modified nucleotide
  modified_base 9: mod_base = OTHER; note = 2'-O-methyl modified nucleotide
  modified_base 11: mod_base = OTHER; note = 2'-O-methyl modified nucleotide
  modified_base 13: mod_base = OTHER; note = 2'-O-methyl modified nucleotide
  modified_base 18: mod_base = OTHER; note = 2'-O-methyl modified nucleotide
  modified_base 22: mod_base = OTHER; note = 2'-O-methyl modified nucleotide
  modified_base 25: mod_base = OTHER; note = 2'-O-methyl modified nucleotide
  modified_base 29: mod_base = OTHER; note = 2'-O-methyl modified nucleotide
  modified_base 30: mod_base = OTHER; note = 2'-O-methyl modified nucleotide
  modified_base 31: mod_base = OTHER; note = 2'-O-methyl modified nucleotide
  modified_base 32: mod_base = OTHER; note = 2'-O-methyl modified nucleotide
  modified_base 37: mod_base = OTHER; note = 2'-O-methyl modified nucleotide
  modified_base 38: mod_base = OTHER; note = 2'-O-methyl modified nucleotide
  modified_base 39: mod_base = OTHER; note = 2'-O-methyl modified nucleotide
  modified_base 40: mod_base = OTHER; note = 2'-O-methyl modified nucleotide
  modified_base 41: mod_base = OTHER; note = 2'-O-methyl modified nucleotide
  modified_base 42: mod_base = OTHER; note = 2'-O-methyl modified nucleotide
  modified_base 43: mod_base = OTHER; note = 2'-O-methyl modified nucleotide
  modified_base 47: mod_base = OTHER; note = 2'-O-methyl modified nucleotide
  modified_base 48: mod_base = OTHER; note = 2'-O-methyl modified nucleotide
  modified_base 51: mod_base = OTHER; note = 2'-O-methyl modified nucleotide
  modified_base 54: mod_base = OTHER; note = nucleotide with phosphorothioate linkage
  modified_base 58: mod_base = OTHER; note = 2'-O-methyl modified nucleotide
  modified_base 59: mod_base = OTHER; note = 2'-O-methyl modified nucleotide
  modified_base 61: mod_base = OTHER; note = 2'-O-methyl modified nucleotide
  modified_base 62: mod_base = OTHER; note = 2'-O-methyl modified nucleotide
  modified_base 63: mod_base = OTHER; note = 2'-O-methyl modified nucleotide
  modified_base 64: mod_base = OTHER; note = 2'-O-methyl modified nucleotide
  modified_base 65: mod_base = OTHER; note = 2'-O-methyl modified nucleotide
  modified_base 66: mod_base = OTHER; note = 2'-O-methyl modified nucleotide
  modified_base 67: mod_base = OTHER; note = 2'-O-methyl modified nucleotide
  modified_base 68: mod_base = OTHER; note = 2'-O-methyl modified nucleotide
  modified_base 69: mod_base = OTHER; note = 2'-O-methyl modified nucleotide
  modified_base 70: mod_base = OTHER; note = 2'-O-methyl modified nucleotide
  modified_base 75: mod_base = OTHER; note = 2'-O-methyl modified nucleotide
  modified_base 77: mod_base = OTHER; note = 2'-O-methyl modified nucleotide
  modified_base 80: mod_base = OTHER; note = 2'-O-methyl modified nucleotide
  modified_base 86: mod_base = OTHER; note = 2'-O-methyl modified nucleotide
  modified_base 87: mod_base = OTHER; note = 2'-O-methyl modified nucleotide
  modified_base 89: mod_base = OTHER; note = 2'-O-methyl modified nucleotide
  modified_base 90: mod_base = OTHER; note = 2'-O-methyl modified nucleotide
  modified_base 91: mod_base = OTHER; note = 2'-O-methyl modified nucleotide
  modified_base 92: mod_base = OTHER; note = 2'-O-methyl modified nucleotide
  modified_base 99: mod_base = OTHER; note = nucleotide with phosphorothioate linkage
  modified_base 100: mod_base = OTHER; note = 2'-O-methyl modified nucleotide with phosphorothioate linkage
  modified_base 101: mod_base = OTHER; note = 2'-O-methyl modified nucleotide

SEQ ID NO: 2410 - RNA, 101 nt, synthetic construct; identical to SEQ ID NO: 1410
  source 1..101: mol_type = other RNA
  modified_base 1: mod_base = OTHER; note = 2'-O-methyl modified nucleotide with phosphorothioate linkage
  modified_base 2: mod_base = OTHER; note = 2'-O-methyl modified nucleotide with phosphorothioate linkage
  modified_base 3: mod_base = OTHER; note = 2'-O-methyl modified nucleotide with phosphorothioate linkage
  modified_base 4: mod_base = OTHER; note = 2'-O-methyl modified nucleotide
  modified_base 5: mod_base = OTHER; note = 2'-O-methyl modified nucleotide
  modified_base 8: mod_base = OTHER; note = 2'-O-methyl modified nucleotide
  modified_base 9: mod_base = OTHER; note = 2'-O-methyl modified nucleotide
  modified_base 11: mod_base = OTHER; note = 2'-O-methyl modified nucleotide
  modified_base 13: mod_base = OTHER; note = 2'-O-methyl modified nucleotide
  modified_base 18: mod_base = OTHER; note = 2'-O-methyl modified nucleotide
  modified_base 22: mod_base = OTHER; note = 2'-O-methyl modified nucleotide
  modified_base 25: mod_base = OTHER; note = 2'-O-methyl modified nucleotide
  modified_base 29: mod_base = OTHER; note = 2'-O-methyl modified nucleotide
  modified_base 30: mod_base = OTHER; note = 2'-O-methyl modified nucleotide
  modified_base 31: mod_base = OTHER; note = 2'-O-methyl modified nucleotide
  modified_base 32: mod_base = OTHER; note = 2'-O-methyl modified nucleotide
  modified_base 37: mod_base = OTHER; note = 2'-O-methyl modified nucleotide
  modified_base 38: mod_base = OTHER; note = 2'-O-methyl modified nucleotide
  modified_base 39: mod_base = OTHER; note = 2'-O-methyl modified nucleotide
  modified_base 40: mod_base = OTHER; note = 2'-O-methyl modified nucleotide
  modified_base 41: mod_base = OTHER; note = 2'-O-methyl modified nucleotide
  modified_base 42: mod_base = OTHER; note = 2'-O-methyl modified nucleotide
  modified_base 43: mod_base = OTHER; note = 2'-O-methyl modified nucleotide
  modified_base 47: mod_base = OTHER; note = 2'-O-methyl modified nucleotide
  modified_base 48: mod_base = OTHER; note = 2'-O-methyl modified nucleotide
  modified_base 51: mod_base = OTHER; note = 2'-O-methyl modified nucleotide
  modified_base 54: mod_base = OTHER; note = nucleotide with phosphorothioate linkage
  modified_base 58: mod_base = OTHER; note = 2'-O-methyl modified nucleotide
  modified_base 59: mod_base = OTHER; note = 2'-O-methyl modified nucleotide
  modified_base 61: mod_base = OTHER; note = 2'-O-methyl modified nucleotide
  modified_base 62: mod_base = OTHER; note = 2'-O-methyl modified nucleotide
  modified_base 63: mod_base = OTHER; note = 2'-O-methyl modified nucleotide
  modified_base 64: mod_base = OTHER; note = 2'-O-methyl modified nucleotide
  modified_base 65: mod_base = OTHER; note = 2'-O-methyl modified nucleotide
  modified_base 66: mod_base = OTHER; note = 2'-O-methyl modified nucleotide
  modified_base 67: mod_base = OTHER; note = 2'-O-methyl modified nucleotide
  modified_base 68: mod_base = OTHER; note = 2'-O-methyl modified nucleotide
  modified_base 69: mod_base = OTHER; note = 2'-O-methyl modified nucleotide
  modified_base 70: mod_base = OTHER; note = 2'-O-methyl modified nucleotide
  modified_base 75: mod_base = OTHER; note = 2'-O-methyl modified nucleotide
  modified_base 77: mod_base = OTHER; note = 2'-O-methyl modified nucleotide
  modified_base 80: mod_base = OTHER; note = 2'-O-methyl modified nucleotide
  modified_base 86: mod_base = OTHER; note = 2'-O-methyl modified nucleotide
  modified_base 87: mod_base = OTHER; note = 2'-O-methyl modified nucleotide
  modified_base 89: mod_base = OTHER; note = 2'-O-methyl modified nucleotide
  modified_base 90: mod_base = OTHER; note = 2'-O-methyl modified nucleotide
  modified_base 91: mod_base = OTHER; note = 2'-O-methyl modified nucleotide
  modified_base 92: mod_base = OTHER; note = 2'-O-methyl modified nucleotide
  modified_base 99: mod_base = OTHER; note = nucleotide with phosphorothioate linkage
  modified_base 100: mod_base = OTHER; note = 2'-O-methyl modified nucleotide with phosphorothioate linkage
  modified_base 101: mod_base = OTHER; note = 2'-O-methyl modified nucleotide

SEQ ID NO: 2411 - RNA, 101 nt, synthetic construct; identical to SEQ ID NO: 1411
  source 1..101: mol_type = other RNA
  modified_base 1: mod_base = OTHER; note = 2'-O-methyl modified nucleotide with phosphorothioate linkage
  modified_base 2: mod_base = OTHER; note = 2'-O-methyl modified nucleotide with phosphorothioate linkage
  modified_base 3: mod_base = OTHER; note = 2'-O-methyl modified nucleotide with phosphorothioate linkage
  modified_base 4: mod_base = OTHER; note = 2'-O-methyl modified nucleotide
  modified_base 5: mod_base = OTHER; note = 2'-O-methyl modified nucleotide
  modified_base 8: mod_base = OTHER; note = 2'-O-methyl modified nucleotide
  modified_base 9: mod_base = OTHER; note = 2'-O-methyl modified nucleotide
  modified_base 11: mod_base = OTHER; note = 2'-O-methyl modified nucleotide
  modified_base 13: mod_base = OTHER; note = 2'-O-methyl modified nucleotide
  modified_base 18: mod_base = OTHER; note = 2'-O-methyl modified nucleotide
  modified_base 22: mod_base = OTHER; note = 2'-O-methyl modified nucleotide
  modified_base 25: mod_base = OTHER; note = 2'-O-methyl modified nucleotide
  modified_base 29: mod_base = OTHER; note = 2'-O-methyl modified nucleotide
  modified_base 30: mod_base = OTHER; note = 2'-O-methyl modified nucleotide
  modified_base 31: mod_base = OTHER; note = 2'-O-methyl modified nucleotide
  modified_base 32: mod_base = OTHER; note = 2'-O-methyl modified nucleotide
  modified_base 37: mod_base = OTHER; note = 2'-O-methyl modified nucleotide
  modified_base 38: mod_base = OTHER; note = 2'-O-methyl modified nucleotide
  modified_base 39: mod_base = OTHER; note = 2'-O-methyl modified nucleotide
  modified_base 40: mod_base = OTHER; note = 2'-O-methyl modified nucleotide
  modified_base 41: mod_base = OTHER; note = 2'-O-methyl modified nucleotide
  modified_base 42: mod_base = OTHER; note = 2'-O-methyl modified nucleotide
  modified_base 43: mod_base = OTHER; note = 2'-O-methyl modified nucleotide
  modified_base 47: mod_base = OTHER; note = 2'-O-methyl modified nucleotide
  modified_base 48: mod_base = OTHER; note = 2'-O-methyl modified nucleotide
  modified_base 51: mod_base = OTHER; note = 2'-O-methyl modified nucleotide
  modified_base 54: mod_base = OTHER; note = nucleotide with phosphorothioate linkage
  modified_base 58: mod_base = OTHER; note = 2'-O-methyl modified nucleotide
  modified_base 59: mod_base = OTHER; note = 2'-O-methyl modified nucleotide
  modified_base 61: mod_base = OTHER; note = 2'-O-methyl modified nucleotide
  modified_base 62: mod_base = OTHER; note = 2'-O-methyl modified nucleotide
  modified_base 63: mod_base = OTHER; note = 2'-O-methyl modified nucleotide
  modified_base 64: mod_base = OTHER; note = 2'-O-methyl modified nucleotide
  modified_base 65: mod_base = OTHER; note = 2'-O-methyl modified nucleotide
  modified_base 66: mod_base = OTHER; note = 2'-O-methyl modified nucleotide
  modified_base 67: mod_base = OTHER; note = 2'-O-methyl modified nucleotide
  modified_base 68: mod_base = OTHER; note = 2'-O-methyl modified nucleotide
  modified_base 69: mod_base = OTHER; note = 2'-O-methyl modified nucleotide
  modified_base 70: mod_base = OTHER; note = 2'-O-methyl modified nucleotide
  modified_base 75: mod_base = OTHER; note = 2'-O-methyl modified nucleotide
  modified_base 77: mod_base = OTHER; note = 2'-O-methyl modified nucleotide
  modified_base 80: mod_base = OTHER; note = 2'-O-methyl modified nucleotide
  modified_base 86: mod_base = OTHER; note = 2'-O-methyl modified nucleotide
  modified_base 87: mod_base = OTHER; note = 2'-O-methyl modified nucleotide
  modified_base 89: mod_base = OTHER; note = 2'-O-methyl modified nucleotide
  modified_base 90: mod_base = OTHER; note = 2'-O-methyl modified nucleotide
  modified_base 91: mod_base = OTHER; note = 2'-O-methyl modified nucleotide
  modified_base 92: mod_base = OTHER; note = 2'-O-methyl modified nucleotide
  modified_base 99: mod_base = OTHER; note = nucleotide with phosphorothioate linkage
  modified_base 100: mod_base = OTHER; note = 2'-O-methyl modified nucleotide with phosphorothioate linkage
  modified_base 101: mod_base = OTHER; note = 2'-O-methyl modified nucleotide

SEQ ID NO: 2412 - RNA, 101 nt, synthetic construct; identical to SEQ ID NO: 1412
  source 1..101: mol_type = other RNA
  modified_base 1: mod_base = OTHER; note = 2'-O-methyl modified nucleotide with phosphorothioate linkage
  modified_base 2: mod_base = OTHER; note = 2'-O-methyl modified nucleotide with phosphorothioate linkage
  modified_base 3: mod_base = OTHER; note = 2'-O-methyl modified nucleotide with phosphorothioate linkage
  modified_base 4: mod_base = OTHER; note = 2'-O-methyl modified nucleotide
  modified_base 5: mod_base = OTHER; note = 2'-O-methyl modified nucleotide
  modified_base 8: mod_base = OTHER; note = 2'-O-methyl modified nucleotide
  modified_base 9: mod_base = OTHER; note = 2'-O-methyl modified nucleotide
  modified_base 11: mod_base = OTHER; note = 2'-O-methyl modified nucleotide
  modified_base 13: mod_base = OTHER; note = 2'-O-methyl modified nucleotide
  modified_base 18: mod_base = OTHER; note = 2'-O-methyl modified nucleotide
  modified_base 22: mod_base = OTHER; note = 2'-O-methyl modified nucleotide
  modified_base 25: mod_base = OTHER; note = 2'-O-methyl modified nucleotide
  modified_base 29: mod_base = OTHER; note = 2'-O-methyl modified nucleotide
  modified_base 30: mod_base = OTHER; note = 2'-O-methyl modified nucleotide
  modified_base 31: mod_base = OTHER; note = 2'-O-methyl modified nucleotide
  modified_base 32: mod_base = OTHER; note = 2'-O-methyl modified nucleotide
  modified_base 37: mod_base = OTHER; note = 2'-O-methyl modified nucleotide
  modified_base 38: mod_base = OTHER; note = 2'-O-methyl modified nucleotide
  modified_base 39: mod_base = OTHER; note = 2'-O-methyl modified nucleotide
  modified_base 40: mod_base = OTHER; note = 2'-O-methyl modified nucleotide
  modified_base 41: mod_base = OTHER; note = 2'-O-methyl modified nucleotide
  modified_base 42: mod_base = OTHER; note = 2'-O-methyl modified nucleotide
  modified_base 43: mod_base = OTHER; note = 2'-O-methyl modified nucleotide
  modified_base 47: mod_base = OTHER; note = 2'-O-methyl modified nucleotide
  modified_base 48: mod_base = OTHER; note = 2'-O-methyl modified nucleotide
  modified_base 51: mod_base = OTHER; note = 2'-O-methyl modified nucleotide
  modified_base 54: mod_base = OTHER; note = nucleotide with phosphorothioate linkage
  modified_base 58: mod_base = OTHER; note = 2'-O-methyl modified nucleotide
  modified_base 59: mod_base = OTHER; note = 2'-O-methyl modified nucleotide
  modified_base 61: mod_base = OTHER; note = 2'-O-methyl modified nucleotide
  modified_base 62: mod_base = OTHER; note = 2'-O-methyl modified nucleotide
  modified_base 63: mod_base = OTHER; note = 2'-O-methyl modified nucleotide
  modified_base 64: mod_base = OTHER; note = 2'-O-methyl modified nucleotide
  modified_base 65: mod_base = OTHER; note = 2'-O-methyl modified nucleotide
  modified_base 66: mod_base = OTHER; note = 2'-O-methyl modified nucleotide
  modified_base 67: mod_base = OTHER; note = 2'-O-methyl modified nucleotide
  modified_base 68: mod_base = OTHER; note = 2'-O-methyl modified nucleotide
  modified_base 69: mod_base = OTHER; note = 2'-O-methyl modified nucleotide
  modified_base 70: mod_base = OTHER; note = 2'-O-methyl modified nucleotide
  modified_base 75: mod_base = OTHER; note = 2'-O-methyl modified nucleotide
  modified_base 77: mod_base = OTHER; note = 2'-O-methyl modified nucleotide
  modified_base 80: mod_base = OTHER; note = 2'-O-methyl modified nucleotide
  modified_base 86: mod_base = OTHER; note = 2'-O-methyl modified nucleotide
  modified_base 87: mod_base = OTHER; note = 2'-O-methyl modified nucleotide
  modified_base 89: mod_base = OTHER; note = 2'-O-methyl modified nucleotide
  modified_base 90: mod_base = OTHER; note = 2'-O-methyl modified nucleotide
  modified_base 91: mod_base = OTHER; note = 2'-O-methyl modified nucleotide
  modified_base 92: mod_base = OTHER; note = 2'-O-methyl modified nucleotide
  modified_base 99: mod_base = OTHER; note = nucleotide with phosphorothioate linkage
  modified_base 100: mod_base = OTHER; note = 2'-O-methyl modified nucleotide with phosphorothioate linkage
  modified_base 101: mod_base = OTHER; note = 2'-O-methyl modified nucleotide

SEQ ID NO: 2413 - RNA, 101 nt, synthetic construct; identical to SEQ ID NO: 1413
  source 1..101: mol_type = other RNA
  modified_base 1: mod_base = OTHER; note = 2'-O-methyl modified nucleotide with phosphorothioate linkage
  modified_base 2: mod_base = OTHER; note = 2'-O-methyl modified nucleotide with phosphorothioate linkage
  modified_base 3: mod_base = OTHER; note = 2'-O-methyl modified nucleotide with phosphorothioate linkage
  modified_base 4: mod_base = OTHER; note = 2'-O-methyl modified nucleotide
  modified_base 5: mod_base = OTHER; note = 2'-O-methyl modified nucleotide
  modified_base 8: mod_base = OTHER; note = 2'-O-methyl modified nucleotide
  modified_base 9: mod_base = OTHER; note = 2'-O-methyl modified nucleotide
  modified_base 11: mod_base = OTHER; note = 2'-O-methyl modified nucleotide
  modified_base 13: mod_base = OTHER; note = 2'-O-methyl modified nucleotide
  modified_base 18: mod_base = OTHER; note = 2'-O-methyl modified nucleotide
  modified_base 22: mod_base = OTHER; note = 2'-O-methyl modified nucleotide
  modified_base 25: mod_base = OTHER; note = 2'-O-methyl modified nucleotide
  modified_base 29: mod_base = OTHER; note = 2'-O-methyl modified nucleotide
  modified_base 30: mod_base = OTHER; note = 2'-O-methyl modified nucleotide
  modified_base 31: mod_base = OTHER; note = 2'-O-methyl modified nucleotide
  modified_base 32: mod_base = OTHER; note = 2'-O-methyl modified nucleotide
  modified_base 37: mod_base = OTHER; note = 2'-O-methyl modified nucleotide
  modified_base 38: mod_base = OTHER; note = 2'-O-methyl modified nucleotide
  modified_base 39: mod_base = OTHER; note = 2'-O-methyl modified nucleotide
  modified_base 40: mod_base = OTHER; note = 2'-O-methyl modified nucleotide
  modified_base 41: mod_base = OTHER; note = 2'-O-methyl modified nucleotide
  modified_base 42: mod_base = OTHER; note = 2'-O-methyl modified nucleotide
  modified_base 43: mod_base = OTHER; note = 2'-O-methyl modified nucleotide
  modified_base 47: mod_base = OTHER; note = 2'-O-methyl modified nucleotide
  modified_base 48: mod_base = OTHER; note = 2'-O-methyl modified nucleotide
  modified_base 51: mod_base = OTHER; note = 2'-O-methyl modified nucleotide
  modified_base 54: mod_base = OTHER; note = nucleotide with phosphorothioate linkage
  modified_base 58: mod_base = OTHER; note = 2'-O-methyl modified nucleotide
  modified_base 59: mod_base = OTHER; note = 2'-O-methyl modified nucleotide
  modified_base 61: mod_base = OTHER; note = 2'-O-methyl modified nucleotide
  modified_base 62: mod_base = OTHER; note = 2'-O-methyl modified nucleotide
  modified_base 63: mod_base = OTHER; note = 2'-O-methyl modified nucleotide
  modified_base 64: mod_base = OTHER; note = 2'-O-methyl modified nucleotide
  modified_base 65: mod_base = OTHER; note = 2'-O-methyl modified nucleotide
  modified_base 66: mod_base = OTHER; note = 2'-O-methyl modified nucleotide
  modified_base 67: mod_base = OTHER; note = 2'-O-methyl modified nucleotide
  modified_base 68: mod_base = OTHER; note = 2'-O-methyl modified nucleotide
  modified_base 69: mod_base = OTHER; note = 2'-O-methyl modified nucleotide
  modified_base 70: mod_base = OTHER; note = 2'-O-methyl modified nucleotide
  modified_base 75: mod_base = OTHER; note = 2'-O-methyl modified nucleotide
  modified_base 77: mod_base = OTHER; note = 2'-O-methyl modified nucleotide
  modified_base 80: mod_base = OTHER; note = 2'-O-methyl modified nucleotide
  modified_base 86: mod_base = OTHER; note = 2'-O-methyl modified nucleotide
  modified_base 87: mod_base = OTHER; note = 2'-O-methyl modified nucleotide
  modified_base 89: mod_base = OTHER; note = 2'-O-methyl modified nucleotide
  modified_base 90: mod_base = OTHER; note = 2'-O-methyl modified nucleotide
  modified_base 91: mod_base = OTHER; note = 2'-O-methyl modified nucleotide
  modified_base 92: mod_base = OTHER; note = 2'-O-methyl modified nucleotide
  modified_base 99: mod_base = OTHER; note = nucleotide with phosphorothioate linkage
  modified_base 100: mod_base = OTHER; note = 2'-O-methyl modified nucleotide with phosphorothioate linkage
  modified_base 101: mod_base = OTHER; note = 2'-O-methyl modified nucleotide

SEQ ID NO: 2414 - RNA, 101 nt, synthetic construct; identical to SEQ ID NO: 1414
  source 1..101: mol_type = other RNA
  modified_base 1: mod_base = OTHER; note = 2'-O-methyl modified nucleotide with phosphorothioate linkage
  modified_base 2: mod_base = OTHER; note = 2'-O-methyl modified nucleotide with phosphorothioate linkage
  modified_base 3: mod_base = OTHER; note = 2'-O-methyl modified nucleotide with phosphorothioate linkage
  modified_base 4: mod_base = OTHER; note = 2'-O-methyl modified nucleotide
  modified_base 5: mod_base = OTHER; note = 2'-O-methyl modified nucleotide
  modified_base 8: mod_base = OTHER; note = 2'-O-methyl modified nucleotide
  modified_base 9: mod_base = OTHER; note = 2'-O-methyl modified nucleotide
  modified_base 11: mod_base = OTHER; note = 2'-O-methyl modified nucleotide
  modified_base 13: mod_base = OTHER; note = 2'-O-methyl modified nucleotide
  modified_base 18: mod_base = OTHER; note = 2'-O-methyl modified nucleotide
  modified_base 22: mod_base = OTHER; note = 2'-O-methyl modified nucleotide
  modified_base 25: mod_base = OTHER; note = 2'-O-methyl modified nucleotide
  modified_base 29: mod_base = OTHER; note = 2'-O-methyl modified nucleotide
  modified_base 30: mod_base = OTHER; note = 2'-O-methyl modified nucleotide
  modified_base 31: mod_base = OTHER; note = 2'-O-methyl modified nucleotide
  modified_base 32: mod_base = OTHER; note = 2'-O-methyl modified nucleotide
  modified_base 37: mod_base = OTHER; note = 2'-O-methyl modified nucleotide
  modified_base 38: mod_base = OTHER; note = 2'-O-methyl modified nucleotide
  modified_base 39: mod_base = OTHER; note = 2'-O-methyl modified nucleotide
  modified_base 40: mod_base = OTHER; note = 2'-O-methyl modified nucleotide
  modified_base 41: mod_base = OTHER; note = 2'-O-methyl modified nucleotide
  modified_base 42: mod_base = OTHER; note = 2'-O-methyl modified nucleotide
  modified_base 43: mod_base = OTHER; note = 2'-O-methyl modified nucleotide
  modified_base 47: mod_base = OTHER; note = 2'-O-methyl modified nucleotide
  modified_base 48: mod_base = OTHER; note = 2'-O-methyl modified nucleotide
  modified_base 51: mod_base = OTHER; note = 2'-O-methyl modified nucleotide
  modified_base 54: mod_base = OTHER; note = nucleotide with phosphorothioate linkage
  modified_base 58: mod_base = OTHER; note = 2'-O-methyl modified nucleotide
  modified_base 59: mod_base = OTHER; note = 2'-O-methyl modified nucleotide
  modified_base 61: mod_base = OTHER; note = 2'-O-methyl modified nucleotide
  modified_base 62: mod_base = OTHER; note = 2'-O-methyl modified nucleotide
  modified_base 63: mod_base = OTHER; note = 2'-O-methyl modified nucleotide
  modified_base 64: mod_base = OTHER; note = 2'-O-methyl modified nucleotide
  modified_base 65: mod_base = OTHER; note = 2'-O-methyl modified nucleotide
  modified_base 66: mod_base = OTHER; note = 2'-O-methyl modified nucleotide
  modified_base 67: mod_base = OTHER; note = 2'-O-methyl modified nucleotide
  modified_base 68: mod_base = OTHER; note = 2'-O-methyl modified nucleotide
  modified_base 69: mod_base = OTHER; note = 2'-O-methyl modified nucleotide
  modified_base 70: mod_base = OTHER; note = 2'-O-methyl modified nucleotide
  modified_base 75: mod_base = OTHER; note = 2'-O-methyl modified nucleotide
  modified_base 77: mod_base = OTHER; note = 2'-O-methyl modified nucleotide
  modified_base 80: mod_base = OTHER; note = 2'-O-methyl modified nucleotide
  modified_base 86: mod_base = OTHER; note = 2'-O-methyl modified nucleotide
  modified_base 87: mod_base = OTHER; note = 2'-O-methyl modified nucleotide
  modified_base 89: mod_base = OTHER; note = 2'-O-methyl modified nucleotide
  modified_base 90: mod_base = OTHER; note = 2'-O-methyl modified nucleotide
  modified_base 91: mod_base = OTHER; note = 2'-O-methyl modified nucleotide
  modified_base 92: mod_base = OTHER; note = 2'-O-methyl modified nucleotide
  modified_base 99: mod_base = OTHER; note = nucleotide with phosphorothioate linkage
  modified_base 100: mod_base = OTHER; note = 2'-O-methyl modified nucleotide with phosphorothioate linkage
  modified_base 101: mod_base = OTHER; note = 2'-O-methyl modified nucleotide

SEQ ID NO: 2415 - RNA, 101 nt, synthetic construct; identical to SEQ ID NO: 1415
  source 1..101: mol_type = other RNA
  modified_base 1: mod_base = OTHER; note = 2'-O-methyl modified nucleotide with phosphorothioate linkage
  modified_base 2: mod_base = OTHER; note = 2'-O-methyl modified nucleotide with phosphorothioate linkage
  modified_base 3: mod_base = OTHER; note = 2'-O-methyl modified nucleotide with phosphorothioate linkage
  modified_base 4: mod_base = OTHER; note = 2'-O-methyl modified nucleotide
  modified_base 5: mod_base = OTHER; note = 2'-O-methyl modified nucleotide
  modified_base 8: mod_base = OTHER; note = 2'-O-methyl modified nucleotide
  modified_base 9: mod_base = OTHER; note = 2'-O-methyl modified nucleotide
  modified_base 11: mod_base = OTHER; note = 2'-O-methyl modified nucleotide
  modified_base 13: mod_base = OTHER; note = 2'-O-methyl modified nucleotide
  modified_base 18: mod_base = OTHER; note = 2'-O-methyl modified nucleotide
  modified_base 22: mod_base = OTHER; note = 2'-O-methyl modified nucleotide
  modified_base 25: mod_base = OTHER; note = 2'-O-methyl modified nucleotide
  modified_base 29: mod_base = OTHER; note = 2'-O-methyl modified nucleotide
  modified_base 30: mod_base = OTHER; note = 2'-O-methyl modified nucleotide
  modified_base 31: mod_base = OTHER; note = 2'-O-methyl modified nucleotide
  modified_base 32: mod_base = OTHER; note = 2'-O-methyl modified nucleotide
  modified_base 37: mod_base = OTHER; note = 2'-O-methyl modified nucleotide
  modified_base 38: mod_base = OTHER; note = 2'-O-methyl modified nucleotide
  modified_base 39: mod_base = OTHER; note = 2'-O-methyl modified nucleotide
  modified_base 40: mod_base = OTHER; note = 2'-O-methyl modified nucleotide
  modified_base 41: mod_base = OTHER; note = 2'-O-methyl modified nucleotide
  modified_base 42: mod_base = OTHER; note = 2'-O-methyl modified nucleotide
  modified_base 43: mod_base = OTHER; note = 2'-O-methyl modified nucleotide
  modified_base 47: mod_base = OTHER; note = 2'-O-methyl modified nucleotide
  modified_base 48: mod_base = OTHER; note = 2'-O-methyl modified nucleotide
  modified_base 51: mod_base = OTHER; note = 2'-O-methyl modified nucleotide
  modified_base 54: mod_base = OTHER; note = nucleotide with phosphorothioate linkage
  modified_base 58: mod_base = OTHER; note = 2'-O-methyl modified nucleotide
  modified_base 59: mod_base = OTHER; note = 2'-O-methyl modified nucleotide
  modified_base 61: mod_base = OTHER; note = 2'-O-methyl modified nucleotide
  modified_base 62: mod_base = OTHER; note = 2'-O-methyl modified nucleotide
  modified_base 63: mod_base = OTHER; note = 2'-O-methyl modified nucleotide
  modified_base 64: mod_base = OTHER; note = 2'-O-methyl modified nucleotide
  modified_base 65: mod_base = OTHER; note = 2'-O-methyl modified nucleotide
  modified_base 66: mod_base = OTHER; note = 2'-O-methyl modified nucleotide
  modified_base 67: mod_base = OTHER; note = 2'-O-methyl modified nucleotide
  modified_base 68: mod_base = OTHER; note = 2'-O-methyl modified nucleotide
  modified_base 69: mod_base = OTHER; note = 2'-O-methyl modified nucleotide
  modified_base 70: mod_base = OTHER; note = 2'-O-methyl modified nucleotide
  modified_base 75: mod_base = OTHER; note = 2'-O-methyl modified nucleotide
  modified_base 77: mod_base = OTHER; note = 2'-O-methyl modified nucleotide
  modified_base 80: mod_base = OTHER; note = 2'-O-methyl modified nucleotide
  modified_base 86: mod_base = OTHER; note = 2'-O-methyl modified nucleotide
  modified_base 87: mod_base = OTHER; note = 2'-O-methyl modified nucleotide
  modified_base 89: mod_base = OTHER; note = 2'-O-methyl modified nucleotide
  modified_base 90: mod_base = OTHER; note = 2'-O-methyl modified nucleotide
  modified_base 91: mod_base = OTHER; note = 2'-O-methyl modified nucleotide
  modified_base 92: mod_base = OTHER; note = 2'-O-methyl modified nucleotide
  modified_base 99: mod_base = OTHER; note = nucleotide with phosphorothioate linkage
  modified_base 100: mod_base = OTHER; note = 2'-O-methyl modified nucleotide with phosphorothioate linkage
  modified_base 101: mod_base = OTHER; note = 2'-O-methyl modified nucleotide

SEQ ID NO: 2416 - RNA, 101 nt, synthetic construct; identical to SEQ ID NO: 1416
  source 1..101: mol_type = other RNA
  modified_base 1: mod_base = OTHER; note = 2'-O-methyl modified nucleotide with phosphorothioate linkage
  modified_base 2: mod_base = OTHER; note = 2'-O-methyl modified nucleotide with phosphorothioate linkage
  modified_base 3: mod_base = OTHER; note = 2'-O-methyl modified nucleotide with phosphorothioate linkage
  modified_base 4: mod_base = OTHER; note = 2'-O-methyl modified nucleotide
  modified_base 5: mod_base = OTHER; note = 2'-O-methyl modified nucleotide
  modified_base 8: mod_base = OTHER; note = 2'-O-methyl modified nucleotide
  modified_base 9: mod_base = OTHER; note = 2'-O-methyl modified nucleotide
  modified_base 11: mod_base = OTHER; note = 2'-O-methyl modified nucleotide
  modified_base 13: mod_base = OTHER; note = 2'-O-methyl modified nucleotide
  modified_base 18: mod_base = OTHER; note = 2'-O-methyl modified nucleotide
  modified_base 22: mod_base = OTHER; note = 2'-O-methyl modified nucleotide
  modified_base 25: mod_base = OTHER; note = 2'-O-methyl modified nucleotide
  modified_base 29: mod_base = OTHER; note = 2'-O-methyl modified nucleotide
  modified_base 30: mod_base = OTHER; note = 2'-O-methyl modified nucleotide
  modified_base 31: mod_base = OTHER; note = 2'-O-methyl modified nucleotide
  modified_base 32: mod_base = OTHER; note = 2'-O-methyl modified nucleotide
  modified_base 37: mod_base = OTHER; note = 2'-O-methyl modified nucleotide
  modified_base 38: mod_base = OTHER; note = 2'-O-methyl modified nucleotide
  modified_base 39: mod_base = OTHER; note = 2'-O-methyl modified nucleotide
  modified_base 40: mod_base = OTHER; note = 2'-O-methyl modified nucleotide
  modified_base 41: mod_base = OTHER; note = 2'-O-methyl modified nucleotide
  modified_base 42: mod_base = OTHER; note = 2'-O-methyl modified nucleotide
  modified_base 43: mod_base = OTHER; note = 2'-O-methyl modified nucleotide
  modified_base 47: mod_base = OTHER; note = 2'-O-methyl modified nucleotide
  modified_base 48: mod_base = OTHER; note = 2'-O-methyl modified nucleotide
  modified_base 51: mod_base = OTHER; note = 2'-O-methyl modified nucleotide
  modified_base 54: mod_base = OTHER; note = nucleotide with phosphorothioate linkage
  modified_base 58: mod_base = OTHER; note = 2'-O-methyl modified nucleotide
  modified_base 59: mod_base = OTHER; note = 2'-O-methyl modified nucleotide
  modified_base 61: mod_base = OTHER; note = 2'-O-methyl modified nucleotide
  modified_base 62: mod_base = OTHER; note = 2'-O-methyl modified nucleotide
  modified_base 63: mod_base = OTHER; note = 2'-O-methyl modified nucleotide
  modified_base 64: mod_base = OTHER; note = 2'-O-methyl modified nucleotide
  modified_base 65: mod_base = OTHER; note = 2'-O-methyl modified nucleotide
  modified_base 66: mod_base = OTHER; note = 2'-O-methyl modified nucleotide
  modified_base 67: mod_base = OTHER; note = 2'-O-methyl modified nucleotide
  modified_base 68: mod_base = OTHER; note = 2'-O-methyl modified nucleotide
  modified_base 69: mod_base = OTHER; note = 2'-O-methyl modified nucleotide
  modified_base 70: mod_base = OTHER; note = 2'-O-methyl modified nucleotide
  modified_base 75: mod_base = OTHER; note = 2'-O-methyl modified nucleotide
  modified_base 77: mod_base = OTHER; note = 2'-O-methyl modified nucleotide
  modified_base 80: mod_base = OTHER; note = 2'-O-methyl modified nucleotide
  modified_base 86: mod_base = OTHER; note = 2'-O-methyl modified nucleotide
  modified_base 87: mod_base = OTHER; note = 2'-O-methyl modified nucleotide
  modified_base 89: mod_base = OTHER; note = 2'-O-methyl modified nucleotide
  modified_base 90: mod_base = OTHER; note = 2'-O-methyl modified nucleotide
  modified_base 91: mod_base = OTHER; note = 2'-O-methyl modified nucleotide
  modified_base 92: mod_base = OTHER; note = 2'-O-methyl modified nucleotide
  modified_base 99: mod_base = OTHER; note = nucleotide with phosphorothioate linkage
  modified_base 100: mod_base = OTHER; note = 2'-O-methyl modified nucleotide with phosphorothioate linkage
  modified_base 101: mod_base = OTHER; note = 2'-O-methyl modified nucleotide

SEQ ID NO: 2417 - RNA, 101 nt, synthetic construct; identical to SEQ ID NO: 1417
  source 1..101: mol_type = other RNA
  modified_base 1: mod_base = OTHER; note = 2'-O-methyl modified nucleotide with phosphorothioate linkage
  modified_base 2: mod_base = OTHER; note = 2'-O-methyl modified nucleotide with phosphorothioate linkage
  modified_base 3: mod_base = OTHER; note = 2'-O-methyl modified nucleotide with phosphorothioate linkage
  modified_base 4: mod_base = OTHER; note = 2'-O-methyl modified nucleotide
  modified_base 5: mod_base = OTHER; note = 2'-O-methyl modified nucleotide
  modified_base 8: mod_base = OTHER; note = 2'-O-methyl modified nucleotide
  modified_base 9: mod_base = OTHER; note = 2'-O-methyl modified nucleotide
  modified_base 11: mod_base = OTHER; note = 2'-O-methyl modified nucleotide
  modified_base 13: mod_base = OTHER; note = 2'-O-methyl modified nucleotide
  modified_base 18: mod_base = OTHER; note = 2'-O-methyl modified nucleotide
  modified_base 22: mod_base = OTHER; note = 2'-O-methyl modified nucleotide
  modified_base 25: mod_base = OTHER; note = 2'-O-methyl modified nucleotide
  modified_base 29: mod_base = OTHER; note = 2'-O-methyl modified nucleotide
  modified_base 30: mod_base = OTHER; note = 2'-O-methyl modified nucleotide
  modified_base 31: mod_base = OTHER; note = 2'-O-methyl modified nucleotide
  modified_base 32: mod_base = OTHER; note = 2'-O-methyl modified nucleotide
  modified_base 37: mod_base = OTHER; note = 2'-O-methyl modified nucleotide
  modified_base 38: mod_base = OTHER; note = 2'-O-methyl modified nucleotide
  modified_base 39: mod_base = OTHER; note = 2'-O-methyl modified nucleotide
  modified_base 40: mod_base = OTHER; note = 2'-O-methyl modified nucleotide
  modified_base 41: mod_base = OTHER; note = 2'-O-methyl modified nucleotide
  modified_base 42: mod_base = OTHER; note = 2'-O-methyl modified nucleotide
  modified_base 43: mod_base = OTHER; note = 2'-O-methyl modified nucleotide
  modified_base 47: mod_base = OTHER; note = 2'-O-methyl modified nucleotide
  modified_base 48: mod_base = OTHER; note = 2'-O-methyl modified nucleotide
  modified_base 51: mod_base = OTHER; note = 2'-O-methyl modified nucleotide
  modified_base 54: mod_base = OTHER; note = nucleotide with phosphorothioate linkage
  modified_base 58: mod_base = OTHER; note = 2'-O-methyl modified nucleotide
  modified_base 59: mod_base = OTHER; note = 2'-O-methyl modified nucleotide
  modified_base 61: mod_base = OTHER; note = 2'-O-methyl modified nucleotide
  modified_base 62: mod_base = OTHER; note = 2'-O-methyl modified nucleotide
  modified_base 63: mod_base = OTHER; note = 2'-O-methyl modified nucleotide
  modified_base 64: mod_base = OTHER; note = 2'-O-methyl modified nucleotide
  modified_base 65: mod_base = OTHER; note = 2'-O-methyl modified nucleotide
  modified_base 66: mod_base = OTHER; note = 2'-O-methyl modified nucleotide
  modified_base 67: mod_base = OTHER; note = 2'-O-methyl modified nucleotide
  modified_base 68: mod_base = OTHER; note = 2'-O-methyl modified nucleotide
  modified_base 69: mod_base = OTHER; note = 2'-O-methyl modified nucleotide
  modified_base 70: mod_base = OTHER; note = 2'-O-methyl modified nucleotide
  modified_base 75: mod_base = OTHER; note = 2'-O-methyl modified nucleotide
  modified_base 77: mod_base = OTHER; note = 2'-O-methyl modified nucleotide
  modified_base 80: mod_base = OTHER; note = 2'-O-methyl modified nucleotide
  modified_base 86: mod_base = OTHER; note = 2'-O-methyl modified nucleotide
  modified_base 87: mod_base = OTHER; note = 2'-O-methyl modified nucleotide
  modified_base 89: mod_base = OTHER; note = 2'-O-methyl modified nucleotide
  modified_base 90: mod_base = OTHER; note = 2'-O-methyl modified nucleotide
  modified_base 91: mod_base = OTHER; note = 2'-O-methyl modified nucleotide
  modified_base 92: mod_base = OTHER; note = 2'-O-methyl modified nucleotide
  modified_base 99: mod_base = OTHER; note = nucleotide with phosphorothioate linkage
  modified_base 100: mod_base = OTHER; note = 2'-O-methyl modified nucleotide with phosphorothioate linkage
  modified_base 101: mod_base = OTHER; note = 2'-O-methyl modified nucleotide

SEQ ID NO: 2418 - RNA, 101 nt, synthetic construct; identical to SEQ ID NO: 1418
  source 1..101: mol_type = other RNA
  modified_base 1: mod_base = OTHER; note = 2'-O-methyl modified nucleotide with phosphorothioate linkage
  modified_base 2: mod_base = OTHER; note = 2'-O-methyl modified nucleotide with phosphorothioate linkage
  modified_base 3: mod_base = OTHER; note = 2'-O-methyl modified nucleotide with phosphorothioate linkage
  modified_base 4: mod_base = OTHER; note = 2'-O-methyl modified nucleotide
  modified_base 5: mod_base = OTHER; note = 2'-O-methyl modified nucleotide
  modified_base 8: mod_base = OTHER; note = 2'-O-methyl modified nucleotide
  modified_base 9: mod_base = OTHER; note = 2'-O-methyl modified nucleotide
  modified_base 11: mod_base = OTHER; note = 2'-O-methyl modified nucleotide
  modified_base 13: mod_base = OTHER; note = 2'-O-methyl modified nucleotide
  modified_base 18: mod_base = OTHER; note = 2'-O-methyl modified nucleotide
  modified_base 22: mod_base = OTHER; note = 2'-O-methyl modified nucleotide
  modified_base 25: mod_base = OTHER; note = 2'-O-methyl modified nucleotide
  modified_base 29: mod_base = OTHER; note = 2'-O-methyl modified nucleotide
  modified_base 30: mod_base = OTHER; note = 2'-O-methyl modified nucleotide
  modified_base 31: mod_base = OTHER; note = 2'-O-methyl modified nucleotide
  modified_base 32: mod_base = OTHER; note = 2'-O-methyl modified nucleotide
  modified_base 37: mod_base = OTHER; note = 2'-O-methyl modified nucleotide
  modified_base 38: mod_base = OTHER; note = 2'-O-methyl modified nucleotide
  modified_base 39: mod_base = OTHER; note = 2'-O-methyl modified nucleotide
  modified_base 40: mod_base = OTHER; note = 2'-O-methyl modified nucleotide
  modified_base 41: mod_base = OTHER; note = 2'-O-methyl modified nucleotide
  modified_base 42: mod_base = OTHER; note = 2'-O-methyl modified nucleotide
  modified_base 43: mod_base = OTHER; note = 2'-O-methyl modified nucleotide
  modified_base 47: mod_base = OTHER; note = 2'-O-methyl modified nucleotide
  modified_base 48: mod_base = OTHER; note = 2'-O-methyl modified nucleotide
  modified_base 51: mod_base = OTHER; note = 2'-O-methyl modified nucleotide
  modified_base 54: mod_base = OTHER; note = nucleotide with phosphorothioate linkage
  modified_base 58: mod_base = OTHER; note = 2'-O-methyl modified nucleotide
  modified_base 59: mod_base = OTHER; note = 2'-O-methyl modified nucleotide
  modified_base 61: mod_base = OTHER; note = 2'-O-methyl modified nucleotide
  modified_base 62: mod_base = OTHER; note = 2'-O-methyl modified nucleotide
  modified_base 63: mod_base = OTHER; note = 2'-O-methyl modified nucleotide
  modified_base 64: mod_base = OTHER; note = 2'-O-methyl modified nucleotide
  modified_base 65: mod_base = OTHER; note = 2'-O-methyl modified nucleotide
  modified_base 66: mod_base = OTHER; note = 2'-O-methyl modified nucleotide
  modified_base 67: mod_base = OTHER; note = 2'-O-methyl modified nucleotide
  modified_base 68: mod_base = OTHER; note = 2'-O-methyl modified nucleotide
  modified_base 69: mod_base = OTHER; note = 2'-O-methyl modified nucleotide
  modified_base 70: mod_base = OTHER; note = 2'-O-methyl modified nucleotide
  modified_base 75: mod_base = OTHER; note = 2'-O-methyl modified nucleotide
  modified_base 77: mod_base = OTHER; note = 2'-O-methyl modified nucleotide
  modified_base 80: mod_base = OTHER; note = 2'-O-methyl modified nucleotide
  modified_base 86: mod_base = OTHER; note = 2'-O-methyl modified nucleotide
  modified_base 87: mod_base = OTHER; note = 2'-O-methyl modified nucleotide
  modified_base 89: mod_base = OTHER; note = 2'-O-methyl modified nucleotide
  modified_base 90: mod_base = OTHER; note = 2'-O-methyl modified nucleotide
  modified_base 91: mod_base = OTHER; note = 2'-O-methyl modified nucleotide
  modified_base 92: mod_base = OTHER; note = 2'-O-methyl modified nucleotide
  modified_base 99: mod_base = OTHER; note = nucleotide with phosphorothioate linkage
  modified_base 100: mod_base = OTHER; note = 2'-O-methyl modified nucleotide with phosphorothioate linkage
  modified_base 101: mod_base = OTHER; note = 2'-O-methyl modified nucleotide

SEQ ID NO: 2419 - RNA, 101 nt, synthetic construct; identical to SEQ ID NO: 1419
  source 1..101: mol_type = other RNA
  modified_base 1: mod_base = OTHER; note = 2'-O-methyl modified nucleotide with phosphorothioate linkage
  modified_base 2: mod_base = OTHER; note = 2'-O-methyl modified nucleotide with phosphorothioate linkage
  modified_base 3: mod_base = OTHER; note = 2'-O-methyl modified nucleotide with phosphorothioate linkage
  modified_base 4: mod_base = OTHER; note = 2'-O-methyl modified nucleotide
  modified_base 5: mod_base = OTHER; note = 2'-O-methyl modified nucleotide
  modified_base 8: mod_base = OTHER; note = 2'-O-methyl modified nucleotide
  modified_base 9: mod_base = OTHER; note = 2'-O-methyl modified nucleotide
  modified_base 11: mod_base = OTHER; note = 2'-O-methyl modified nucleotide
  modified_base 13: mod_base = OTHER; note = 2'-O-methyl modified nucleotide
  modified_base 18: mod_base = OTHER; note = 2'-O-methyl modified nucleotide
  modified_base 22: mod_base = OTHER; note = 2'-O-methyl modified nucleotide
  modified_base 25: mod_base = OTHER; note = 2'-O-methyl modified nucleotide
  modified_base 29: mod_base = OTHER; note = 2'-O-methyl modified nucleotide
  modified_base 30: mod_base = OTHER; note = 2'-O-methyl modified nucleotide
  modified_base 31: mod_base = OTHER; note = 2'-O-methyl modified nucleotide
  modified_base 32: mod_base = OTHER; note = 2'-O-methyl modified nucleotide
  modified_base 37: mod_base = OTHER; note = 2'-O-methyl modified nucleotide
  modified_base 38: mod_base = OTHER; note = 2'-O-methyl modified nucleotide
  modified_base 39: mod_base = OTHER; note = 2'-O-methyl modified nucleotide
  modified_base 40: mod_base = OTHER; note = 2'-O-methyl modified nucleotide
  modified_base 41: mod_base = OTHER; note = 2'-O-methyl modified nucleotide
  modified_base 42: mod_base = OTHER; note = 2'-O-methyl modified nucleotide
  modified_base 43: mod_base = OTHER; note = 2'-O-methyl modified nucleotide
  modified_base 47: mod_base = OTHER; note = 2'-O-methyl modified nucleotide
  modified_base 48: mod_base = OTHER; note = 2'-O-methyl modified nucleotide
  modified_base 51: mod_base = OTHER; note = 2'-O-methyl modified nucleotide
  modified_base 54: mod_base = OTHER; note = nucleotide with phosphorothioate linkage
  modified_base 58: mod_base = OTHER; note = 2'-O-methyl modified nucleotide
  modified_base 59: mod_base = OTHER; note = 2'-O-methyl modified nucleotide
  modified_base 61: mod_base = OTHER; note = 2'-O-methyl modified nucleotide
  modified_base 62: mod_base = OTHER; note = 2'-O-methyl modified nucleotide
  modified_base 63: mod_base = OTHER; note = 2'-O-methyl modified nucleotide
  modified_base 64: mod_base = OTHER; note = 2'-O-methyl modified nucleotide
  modified_base 65: mod_base = OTHER; note = 2'-O-methyl modified nucleotide
  modified_base 66: mod_base = OTHER; note = 2'-O-methyl modified nucleotide
  modified_base 67: mod_base = OTHER; note = 2'-O-methyl modified nucleotide
  modified_base 68: mod_base = OTHER; note = 2'-O-methyl modified nucleotide
  modified_base 69: mod_base = OTHER; note = 2'-O-methyl modified nucleotide
  modified_base 70: mod_base = OTHER; note = 2'-O-methyl modified nucleotide
  modified_base 75: mod_base = OTHER; note = 2'-O-methyl modified nucleotide
  modified_base 77: mod_base = OTHER; note = 2'-O-methyl modified nucleotide
  modified_base 80: mod_base = OTHER; note = 2'-O-methyl modified nucleotide
  modified_base 86: mod_base = OTHER; note = 2'-O-methyl modified nucleotide
  modified_base 87: mod_base = OTHER; note = 2'-O-methyl modified nucleotide
  modified_base 89: mod_base = OTHER; note = 2'-O-methyl modified nucleotide
  modified_base 90: mod_base = OTHER; note = 2'-O-methyl modified nucleotide
  modified_base 91: mod_base = OTHER; note = 2'-O-methyl modified nucleotide
  modified_base 92: mod_base = OTHER; note = 2'-O-methyl modified nucleotide
  modified_base 99: mod_base = OTHER; note = nucleotide with phosphorothioate linkage
  modified_base 100: mod_base = OTHER; note = 2'-O-methyl modified nucleotide with phosphorothioate linkage
  modified_base 101: mod_base = OTHER; note = 2'-O-methyl modified nucleotide

SEQ ID NO: 2420 - RNA, 101 nt, synthetic construct; identical to SEQ ID NO: 1420
  source 1..101: mol_type = other RNA
  modified_base 1: mod_base = OTHER; note = 2'-O-methyl modified nucleotide with phosphorothioate linkage
  modified_base 2: mod_base = OTHER; note = 2'-O-methyl modified nucleotide with phosphorothioate linkage
  modified_base 3: mod_base = OTHER; note = 2'-O-methyl modified nucleotide with phosphorothioate linkage
  modified_base 4: mod_base = OTHER; note = 2'-O-methyl modified nucleotide
  modified_base 5: mod_base = OTHER; note = 2'-O-methyl modified nucleotide
  modified_base 8: mod_base = OTHER; note = 2'-O-methyl modified nucleotide
  modified_base 9: mod_base = OTHER; note = 2'-O-methyl modified nucleotide
  modified_base 11: mod_base = OTHER; note = 2'-O-methyl modified nucleotide
  modified_base 13: mod_base = OTHER; note = 2'-O-methyl modified nucleotide
  modified_base 18: mod_base = OTHER; note = 2'-O-methyl modified nucleotide
  modified_base 22: mod_base = OTHER; note = 2'-O-methyl modified nucleotide
  modified_base 25: mod_base = OTHER; note = 2'-O-methyl modified nucleotide
  modified_base 29: mod_base = OTHER; note = 2'-O-methyl modified nucleotide
  modified_base 30: mod_base = OTHER; note = 2'-O-methyl modified nucleotide
  modified_base 31: mod_base = OTHER; note = 2'-O-methyl modified nucleotide
  modified_base 32: mod_base = OTHER; note = 2'-O-methyl modified nucleotide
  modified_base 37: mod_base = OTHER; note = 2'-O-methyl modified nucleotide
  modified_base 38: mod_base = OTHER; note = 2'-O-methyl modified nucleotide
  modified_base 39: mod_base = OTHER; note = 2'-O-methyl modified nucleotide
  modified_base 40: mod_base = OTHER; note = 2'-O-methyl modified nucleotide
  modified_base 41: mod_base = OTHER; note = 2'-O-methyl modified nucleotide
  modified_base 42: mod_base = OTHER; note = 2'-O-methyl modified nucleotide
  modified_base 43: mod_base = OTHER; note = 2'-O-methyl modified nucleotide
  modified_base 47: mod_base = OTHER; note = 2'-O-methyl modified nucleotide
  modified_base 48: mod_base = OTHER; note = 2'-O-methyl modified nucleotide
  modified_base 51: mod_base = OTHER; note = 2'-O-methyl modified nucleotide
  modified_base 54: mod_base = OTHER; note = nucleotide with phosphorothioate linkage
  modified_base 58: mod_base = OTHER; note = 2'-O-methyl modified nucleotide
  modified_base 59: mod_base = OTHER; note = 2'-O-methyl modified nucleotide
  modified_base 61: mod_base = OTHER; note = 2'-O-methyl modified nucleotide
  modified_base 62: mod_base = OTHER; note = 2'-O-methyl modified nucleotide
  modified_base 63: mod_base = OTHER; note = 2'-O-methyl modified nucleotide
  modified_base 64: mod_base = OTHER; note = 2'-O-methyl modified nucleotide
  modified_base 65: mod_base = OTHER; note = 2'-O-methyl modified nucleotide
  modified_base 66: mod_base = OTHER; note = 2'-O-methyl modified nucleotide
  modified_base 67: mod_base = OTHER; note = 2'-O-methyl modified nucleotide
  modified_base 68: mod_base = OTHER; note = 2'-O-methyl modified nucleotide
  modified_base 69: mod_base = OTHER; note = 2'-O-methyl modified nucleotide
  modified_base 70: mod_base = OTHER; note = 2'-O-methyl modified nucleotide
  modified_base 75: mod_base = OTHER; note = 2'-O-methyl modified nucleotide
  modified_base 77: mod_base = OTHER; note = 2'-O-methyl modified nucleotide
  modified_base 80: mod_base = OTHER; note = 2'-O-methyl modified nucleotide
  modified_base 86: mod_base = OTHER; note = 2'-O-methyl modified nucleotide
  modified_base 87: mod_base = OTHER; note = 2'-O-methyl modified nucleotide
  modified_base 89: mod_base = OTHER; note = 2'-O-methyl modified nucleotide
  modified_base 90: mod_base = OTHER; note = 2'-O-methyl modified nucleotide
  modified_base 91: mod_base = OTHER; note = 2'-O-methyl modified nucleotide
  modified_base 92: mod_base = OTHER; note = 2'-O-methyl modified nucleotide
  modified_base 99: mod_base = OTHER; note = nucleotide with phosphorothioate linkage
  modified_base 100: mod_base = OTHER; note = 2'-O-methyl modified nucleotide with phosphorothioate linkage
  modified_base 101: mod_base = OTHER; note = 2'-O-methyl modified nucleotide

SEQ ID NO: 2421 - RNA, 101 nt, synthetic construct; identical to SEQ ID NO: 1421
  source 1..101: mol_type = other RNA
  modified_base 1: mod_base = OTHER; note = 2'-O-methyl modified nucleotide with phosphorothioate linkage
  modified_base 2: mod_base = OTHER; note = 2'-O-methyl modified nucleotide with phosphorothioate linkage
  modified_base 3: mod_base = OTHER; note = 2'-O-methyl modified nucleotide with phosphorothioate linkage
  modified_base 4: mod_base = OTHER; note = 2'-O-methyl modified nucleotide
  modified_base 5: mod_base = OTHER; note = 2'-O-methyl modified nucleotide
  modified_base 8: mod_base = OTHER; note = 2'-O-methyl modified nucleotide
  modified_base 9: mod_base = OTHER; note = 2'-O-methyl modified nucleotide
  modified_base 11: mod_base = OTHER; note = 2'-O-methyl modified nucleotide
  modified_base 13: mod_base = OTHER; note = 2'-O-methyl modified nucleotide
  modified_base 18: mod_base = OTHER; note = 2'-O-methyl modified nucleotide
  modified_base 22: mod_base = OTHER; note = 2'-O-methyl modified nucleotide
  modified_base 25: mod_base = OTHER; note = 2'-O-methyl modified nucleotide
  modified_base 29: mod_base = OTHER; note = 2'-O-methyl modified nucleotide
  modified_base 30: mod_base = OTHER; note = 2'-O-methyl modified nucleotide
  modified_base 31: mod_base = OTHER; note = 2'-O-methyl modified nucleotide
  modified_base 32: mod_base = OTHER; note = 2'-O-methyl modified nucleotide
  modified_base 37: mod_base = OTHER; note = 2'-O-methyl modified nucleotide
  modified_base 38: mod_base = OTHER; note = 2'-O-methyl modified nucleotide
  modified_base 39: mod_base = OTHER; note = 2'-O-methyl modified nucleotide
  modified_base 40: mod_base = OTHER; note = 2'-O-methyl modified nucleotide
  modified_base 41: mod_base = OTHER; note = 2'-O-methyl modified nucleotide
  modified_base 42: mod_base = OTHER; note = 2'-O-methyl modified nucleotide
  modified_base 43: mod_base = OTHER; note = 2'-O-methyl modified nucleotide
  modified_base 47: mod_base = OTHER; note = 2'-O-methyl modified nucleotide
  modified_base 48: mod_base = OTHER; note = 2'-O-methyl modified nucleotide
  modified_base 51: mod_base = OTHER; note = 2'-O-methyl modified nucleotide
  modified_base 54: mod_base = OTHER; note = nucleotide with phosphorothioate linkage
  modified_base 58: mod_base = OTHER; note = 2'-O-methyl modified nucleotide
  modified_base 59: mod_base = OTHER; note = 2'-O-methyl modified nucleotide
  modified_base 61: mod_base = OTHER; note = 2'-O-methyl modified nucleotide
  modified_base 62: mod_base = OTHER; note = 2'-O-methyl modified nucleotide
  modified_base 63: mod_base = OTHER; note = 2'-O-methyl modified nucleotide
  modified_base 64: mod_base = OTHER; note = 2'-O-methyl modified nucleotide
  modified_base 65: mod_base = OTHER; note = 2'-O-methyl modified nucleotide
  modified_base 66: mod_base = OTHER; note = 2'-O-methyl modified nucleotide
  modified_base 67: mod_base = OTHER; note = 2'-O-methyl modified nucleotide
  modified_base 68: mod_base = OTHER; note = 2'-O-methyl modified nucleotide
  modified_base 69: mod_base = OTHER; note = 2'-O-methyl modified nucleotide
  modified_base 70: mod_base = OTHER; note = 2'-O-methyl modified nucleotide
  modified_base 75: mod_base = OTHER; note = 2'-O-methyl modified nucleotide
  modified_base 77: mod_base = OTHER; note = 2'-O-methyl modified nucleotide
  modified_base 80: mod_base = OTHER; note = 2'-O-methyl modified nucleotide
  modified_base 86: mod_base = OTHER; note = 2'-O-methyl modified nucleotide
  modified_base 87: mod_base = OTHER; note = 2'-O-methyl modified nucleotide
  modified_base 89: mod_base = OTHER; note = 2'-O-methyl modified nucleotide
  modified_base 90: mod_base = OTHER; note = 2'-O-methyl modified nucleotide
  modified_base 91: mod_base = OTHER; note = 2'-O-methyl modified nucleotide
  modified_base 92: mod_base = OTHER; note = 2'-O-methyl modified nucleotide
  modified_base 99: mod_base = OTHER; note = nucleotide with phosphorothioate linkage
  modified_base 100: mod_base = OTHER; note = 2'-O-methyl modified nucleotide with phosphorothioate linkage
  modified_base 101: mod_base = OTHER; note = 2'-O-methyl modified nucleotide

SEQ ID NO: 2422 - RNA, 101 nt, synthetic construct; identical to SEQ ID NO: 1422
  source 1..101: mol_type = other RNA
  modified_base 1: mod_base = OTHER; note = 2'-O-methyl modified nucleotide with phosphorothioate linkage
  modified_base 2: mod_base = OTHER; note = 2'-O-methyl modified nucleotide with phosphorothioate linkage
  modified_base 3: mod_base = OTHER; note = 2'-O-methyl modified nucleotide with phosphorothioate linkage
  modified_base 4: mod_base = OTHER; note = 2'-O-methyl modified nucleotide
  modified_base 5: mod_base = OTHER; note = 2'-O-methyl modified nucleotide
  modified_base 8: mod_base = OTHER; note = 2'-O-methyl modified nucleotide
  modified_base 9: mod_base = OTHER; note = 2'-O-methyl modified nucleotide
  modified_base 11: mod_base = OTHER; note = 2'-O-methyl modified nucleotide
  modified_base 13: mod_base = OTHER; note = 2'-O-methyl modified nucleotide
  modified_base 18: mod_base = OTHER; note = 2'-O-methyl modified nucleotide
  modified_base 22: mod_base = OTHER; note = 2'-O-methyl modified nucleotide
  modified_base 25: mod_base = OTHER; note = 2'-O-methyl modified nucleotide
  modified_base 29: mod_base = OTHER; note = 2'-O-methyl modified nucleotide
  modified_base 30: mod_base = OTHER; note = 2'-O-methyl modified nucleotide
  modified_base 31: mod_base = OTHER; note = 2'-O-methyl modified nucleotide
  modified_base 32: mod_base = OTHER; note = 2'-O-methyl modified nucleotide
  modified_base 37: mod_base = OTHER; note = 2'-O-methyl modified nucleotide
  modified_base 38: mod_base = OTHER; note = 2'-O-methyl modified nucleotide
  modified_base 39: mod_base = OTHER; note = 2'-O-methyl modified nucleotide
  modified_base 40: mod_base = OTHER; note = 2'-O-methyl modified nucleotide
  modified_base 41: mod_base = OTHER; note = 2'-O-methyl modified nucleotide
  modified_base 42: mod_base = OTHER; note = 2'-O-methyl modified nucleotide
  modified_base 43: mod_base = OTHER; note = 2'-O-methyl modified nucleotide
  modified_base 47: mod_base = OTHER; note = 2'-O-methyl modified nucleotide
  modified_base 48: mod_base = OTHER; note = 2'-O-methyl modified nucleotide
  modified_base 51: mod_base = OTHER; note = 2'-O-methyl modified nucleotide
  modified_base 54: mod_base = OTHER; note = nucleotide with phosphorothioate linkage
  modified_base 58: mod_base = OTHER; note = 2'-O-methyl modified nucleotide
  modified_base 59: mod_base = OTHER; note = 2'-O-methyl modified nucleotide
  modified_base 61: mod_base = OTHER; note = 2'-O-methyl modified nucleotide
  modified_base 62: mod_base = OTHER; note = 2'-O-methyl modified nucleotide
  modified_base 63: mod_base = OTHER; note = 2'-O-methyl modified nucleotide
  modified_base 64: mod_base = OTHER; note = 2'-O-methyl modified nucleotide
  modified_base 65: mod_base = OTHER; note = 2'-O-methyl modified nucleotide
  modified_base 66: mod_base = OTHER; note = 2'-O-methyl modified nucleotide
  modified_base 67: mod_base = OTHER; note = 2'-O-methyl modified nucleotide
  modified_base 68: mod_base = OTHER; note = 2'-O-methyl modified nucleotide
  modified_base 69: mod_base = OTHER; note = 2'-O-methyl modified nucleotide
  modified_base 70: mod_base = OTHER; note = 2'-O-methyl modified nucleotide
  modified_base 75: mod_base = OTHER; note = 2'-O-methyl modified nucleotide
  modified_base 77: mod_base = OTHER; note = 2'-O-methyl modified nucleotide
  modified_base 80: mod_base = OTHER; note = 2'-O-methyl modified nucleotide
  modified_base 86: mod_base = OTHER; note = 2'-O-methyl modified nucleotide
  modified_base 87: mod_base = OTHER; note = 2'-O-methyl modified nucleotide
  modified_base 89: mod_base = OTHER; note = 2'-O-methyl modified nucleotide
  modified_base 90: mod_base = OTHER; note = 2'-O-methyl modified nucleotide
  modified_base 91: mod_base = OTHER; note = 2'-O-methyl modified nucleotide
  modified_base 92: mod_base = OTHER; note = 2'-O-methyl modified nucleotide
  modified_base 99: mod_base = OTHER; note = nucleotide with phosphorothioate linkage
  modified_base 100: mod_base = OTHER; note = 2'-O-methyl modified nucleotide with phosphorothioate linkage
  modified_base 101: mod_base = OTHER; note = 2'-O-methyl modified nucleotide

SEQ ID NO: 2423 - RNA, 101 nt, synthetic construct; identical to SEQ ID NO: 1423
  source 1..101: mol_type = other RNA
  modified_base 1: mod_base = OTHER; note = 2'-O-methyl modified nucleotide with phosphorothioate linkage
  modified_base 2: mod_base = OTHER; note = 2'-O-methyl modified nucleotide with phosphorothioate linkage
  modified_base 3: mod_base = OTHER; note = 2'-O-methyl modified nucleotide with phosphorothioate linkage
  modified_base 4: mod_base = OTHER; note = 2'-O-methyl modified nucleotide
  modified_base 5: mod_base = OTHER; note = 2'-O-methyl modified nucleotide
  modified_base 8: mod_base = OTHER; note = 2'-O-methyl modified nucleotide
  modified_base 9: mod_base = OTHER; note = 2'-O-methyl modified nucleotide
  modified_base 11: mod_base = OTHER; note = 2'-O-methyl modified nucleotide
  modified_base 13: mod_base = OTHER; note = 2'-O-methyl modified nucleotide
  modified_base 18: mod_base = OTHER; note = 2'-O-methyl modified nucleotide
  modified_base 22: mod_base = OTHER; note = 2'-O-methyl modified nucleotide
  modified_base 25: mod_base = OTHER; note = 2'-O-methyl modified nucleotide
  modified_base 29: mod_base = OTHER; note = 2'-O-methyl modified nucleotide
  modified_base 30: mod_base = OTHER; note = 2'-O-methyl modified nucleotide
  modified_base 31: mod_base = OTHER; note = 2'-O-methyl modified nucleotide
  modified_base 32: mod_base = OTHER; note = 2'-O-methyl modified nucleotide
  modified_base 37: mod_base = OTHER; note = 2'-O-methyl modified nucleotide
  modified_base 38: mod_base = OTHER; note = 2'-O-methyl modified nucleotide
  modified_base 39: mod_base = OTHER; note = 2'-O-methyl modified nucleotide
  modified_base 40: mod_base = OTHER; note = 2'-O-methyl modified nucleotide
  modified_base 41: mod_base = OTHER; note = 2'-O-methyl modified nucleotide
  modified_base 42: mod_base = OTHER; note = 2'-O-methyl modified nucleotide
  modified_base 43: mod_base = OTHER; note = 2'-O-methyl modified nucleotide
  modified_base 47: mod_base = OTHER; note = 2'-O-methyl modified nucleotide
  modified_base 48: mod_base = OTHER; note = 2'-O-methyl modified nucleotide
  modified_base 51: mod_base = OTHER; note = 2'-O-methyl modified nucleotide
  modified_base 54: mod_base = OTHER; note = nucleotide with phosphorothioate linkage
  modified_base 58: mod_base = OTHER; note = 2'-O-methyl modified nucleotide
  modified_base 59: mod_base = OTHER; note = 2'-O-methyl modified nucleotide
  modified_base 61: mod_base = OTHER; note = 2'-O-methyl modified nucleotide
  modified_base 62: mod_base = OTHER; note = 2'-O-methyl modified nucleotide
  modified_base 63: mod_base = OTHER; note = 2'-O-methyl modified nucleotide
  modified_base 64: mod_base = OTHER; note = 2'-O-methyl modified nucleotide
  modified_base 65: mod_base = OTHER; note = 2'-O-methyl modified nucleotide
  modified_base 66: mod_base = OTHER; note = 2'-O-methyl modified nucleotide
  modified_base 67: mod_base = OTHER; note = 2'-O-methyl modified nucleotide
  modified_base 68: mod_base = OTHER; note = 2'-O-methyl modified nucleotide
  modified_base 69: mod_base = OTHER; note = 2'-O-methyl modified nucleotide
  modified_base 70: mod_base = OTHER; note = 2'-O-methyl modified nucleotide
  modified_base 75: mod_base = OTHER; note = 2'-O-methyl modified nucleotide
  modified_base 77: mod_base = OTHER; note = 2'-O-methyl modified nucleotide
  modified_base 80: mod_base = OTHER; note = 2'-O-methyl modified nucleotide
  modified_base 86: mod_base = OTHER; note = 2'-O-methyl modified nucleotide
  modified_base 87: mod_base = OTHER; note = 2'-O-methyl modified nucleotide
  modified_base 89: mod_base = OTHER; note = 2'-O-methyl modified nucleotide
  modified_base 90: mod_base = OTHER; note = 2'-O-methyl modified nucleotide
  modified_base 91: mod_base = OTHER; note = 2'-O-methyl modified nucleotide
  modified_base 92: mod_base = OTHER; note = 2'-O-methyl modified nucleotide
  modified_base 99: mod_base = OTHER; note = nucleotide with phosphorothioate linkage
  modified_base 100: mod_base = OTHER; note = 2'-O-methyl modified nucleotide with phosphorothioate linkage
  modified_base 101: mod_base = OTHER; note = 2'-O-methyl modified nucleotide

SEQ ID NO: 2424 - RNA, 101 nt, synthetic construct; identical to SEQ ID NO: 1424
  source 1..101: mol_type = other RNA
  modified_base 1: mod_base = OTHER; note = 2'-O-methyl modified nucleotide with phosphorothioate linkage
  modified_base 2: mod_base = OTHER; note = 2'-O-methyl modified nucleotide with phosphorothioate linkage
  modified_base 3: mod_base = OTHER; note = 2'-O-methyl modified nucleotide with phosphorothioate linkage
  modified_base 4: mod_base = OTHER; note = 2'-O-methyl modified nucleotide
  modified_base 5: mod_base = OTHER; note = 2'-O-methyl modified nucleotide
  modified_base 8: mod_base = OTHER; note = 2'-O-methyl modified nucleotide
  modified_base 9: mod_base = OTHER; note = 2'-O-methyl modified nucleotide
  modified_base 11: mod_base = OTHER; note = 2'-O-methyl modified nucleotide
  modified_base 13: mod_base = OTHER; note = 2'-O-methyl modified nucleotide
  modified_base 18: mod_base = OTHER; note = 2'-O-methyl modified nucleotide
  modified_base 22: mod_base = OTHER; note = 2'-O-methyl modified nucleotide
  modified_base 25: mod_base = OTHER; note = 2'-O-methyl modified nucleotide
  modified_base 29: mod_base = OTHER; note = 2'-O-methyl modified nucleotide
  modified_base 30: mod_base = OTHER; note = 2'-O-methyl modified nucleotide
  modified_base 31: mod_base = OTHER; note = 2'-O-methyl modified nucleotide
  modified_base 32: mod_base = OTHER; note = 2'-O-methyl modified nucleotide
  modified_base 37: mod_base = OTHER; note = 2'-O-methyl modified nucleotide
  modified_base 38: mod_base = OTHER; note = 2'-O-methyl modified nucleotide
  modified_base 39: mod_base = OTHER; note = 2'-O-methyl modified nucleotide
  modified_base 40: mod_base = OTHER; note = 2'-O-methyl modified nucleotide
  modified_base 41: mod_base = OTHER; note = 2'-O-methyl modified nucleotide
  modified_base 42: mod_base = OTHER; note = 2'-O-methyl modified nucleotide
  modified_base 43: mod_base = OTHER; note = 2'-O-methyl modified nucleotide
  modified_base 47: mod_base = OTHER; note = 2'-O-methyl modified nucleotide
  modified_base 48: mod_base = OTHER; note = 2'-O-methyl modified nucleotide
  modified_base 51: mod_base = OTHER; note = 2'-O-methyl modified nucleotide
  modified_base 54: mod_base = OTHER; note = nucleotide with phosphorothioate linkage
  modified_base 58: mod_base = OTHER; note = 2'-O-methyl modified nucleotide
  modified_base 59: mod_base = OTHER; note = 2'-O-methyl modified nucleotide
  modified_base 61: mod_base = OTHER; note = 2'-O-methyl modified nucleotide
  modified_base 62: mod_base = OTHER; note = 2'-O-methyl modified nucleotide
  modified_base 63: mod_base = OTHER; note = 2'-O-methyl modified nucleotide
  modified_base 64: mod_base = OTHER; note = 2'-O-methyl modified nucleotide
  modified_base 65: mod_base = OTHER; note = 2'-O-methyl modified nucleotide
  modified_base 66: mod_base = OTHER; note = 2'-O-methyl modified nucleotide
  modified_base 67: mod_base = OTHER; note = 2'-O-methyl modified nucleotide
  modified_base 68: mod_base = OTHER; note = 2'-O-methyl modified nucleotide
  modified_base 69: mod_base = OTHER; note = 2'-O-methyl modified nucleotide
  modified_base 70: mod_base = OTHER; note = 2'-O-methyl modified nucleotide
  modified_base 75: mod_base = OTHER; note = 2'-O-methyl modified nucleotide
  modified_base 77: mod_base = OTHER; note = 2'-O-methyl modified nucleotide
  modified_base 80: mod_base = OTHER; note = 2'-O-methyl modified nucleotide
  modified_base 86: mod_base = OTHER; note = 2'-O-methyl modified nucleotide
  modified_base 87: mod_base = OTHER; note = 2'-O-methyl modified nucleotide
  modified_base 89: mod_base = OTHER; note = 2'-O-methyl modified nucleotide
  modified_base 90: mod_base = OTHER; note = 2'-O-methyl modified nucleotide
  modified_base 91: mod_base = OTHER; note = 2'-O-methyl modified nucleotide
  modified_base 92: mod_base = OTHER; note = 2'-O-methyl modified nucleotide
  modified_base 99: mod_base = OTHER; note = nucleotide with phosphorothioate linkage
  modified_base 100: mod_base = OTHER; note = 2'-O-methyl modified nucleotide with phosphorothioate linkage
  modified_base 101: mod_base = OTHER; note = 2'-O-methyl modified nucleotide

SEQ ID NO: 2425 - RNA, 101 nt, synthetic construct; identical to SEQ ID NO: 1425
  source 1..101: mol_type = other RNA
  modified_base 1: mod_base = OTHER; note = 2'-O-methyl modified nucleotide with phosphorothioate linkage
  modified_base 2: mod_base = OTHER; note = 2'-O-methyl modified nucleotide with phosphorothioate linkage
  modified_base 3: mod_base = OTHER; note = 2'-O-methyl modified nucleotide with phosphorothioate linkage
  modified_base 4: mod_base = OTHER; note = 2'-O-methyl modified nucleotide
  modified_base 5: mod_base = OTHER; note = 2'-O-methyl modified nucleotide
  modified_base 8: mod_base = OTHER; note = 2'-O-methyl modified nucleotide
  modified_base 9: mod_base = OTHER; note = 2'-O-methyl modified nucleotide
  modified_base 11: mod_base = OTHER; note = 2'-O-methyl modified nucleotide
  modified_base 13: mod_base = OTHER; note = 2'-O-methyl modified nucleotide
  modified_base 18: mod_base = OTHER; note = 2'-O-methyl modified nucleotide
  modified_base 22: mod_base = OTHER; note = 2'-O-methyl modified nucleotide
  modified_base 25: mod_base = OTHER; note = 2'-O-methyl modified nucleotide
  modified_base 29: mod_base = OTHER; note = 2'-O-methyl modified nucleotide
  modified_base 30: mod_base = OTHER; note = 2'-O-methyl modified nucleotide
  modified_base 31: mod_base = OTHER; note = 2'-O-methyl modified nucleotide
  modified_base 32: mod_base = OTHER; note = 2'-O-methyl modified nucleotide
  modified_base 37: mod_base = OTHER; note = 2'-O-methyl modified nucleotide
  modified_base 38: mod_base = OTHER; note = 2'-O-methyl modified nucleotide
  modified_base 39: mod_base = OTHER; note = 2'-O-methyl modified nucleotide
  modified_base 40: mod_base = OTHER; note = 2'-O-methyl modified nucleotide
  modified_base 41: mod_base = OTHER; note = 2'-O-methyl modified nucleotide
  modified_base 42: mod_base = OTHER; note = 2'-O-methyl modified nucleotide
  modified_base 43: mod_base = OTHER; note = 2'-O-methyl modified nucleotide
  modified_base 47: mod_base = OTHER; note = 2'-O-methyl modified nucleotide
  modified_base 48: mod_base = OTHER; note = 2'-O-methyl modified nucleotide
  modified_base 51: mod_base = OTHER; note = 2'-O-methyl modified nucleotide
  modified_base 54: mod_base = OTHER; note = nucleotide with phosphorothioate linkage
  modified_base 58: mod_base = OTHER; note = 2'-O-methyl modified nucleotide
  modified_base 59: mod_base = OTHER; note = 2'-O-methyl modified nucleotide
  modified_base 61: mod_base = OTHER; note = 2'-O-methyl modified nucleotide
  modified_base 62: mod_base = OTHER; note = 2'-O-methyl modified nucleotide
  modified_base 63: mod_base = OTHER; note = 2'-O-methyl modified nucleotide
  modified_base 64: mod_base = OTHER; note = 2'-O-methyl modified nucleotide
  modified_base 65: mod_base = OTHER; note = 2'-O-methyl modified nucleotide
  modified_base 66: mod_base = OTHER; note = 2'-O-methyl modified nucleotide
  modified_base 67: mod_base = OTHER; note = 2'-O-methyl modified nucleotide
  modified_base 68: mod_base = OTHER; note = 2'-O-methyl modified nucleotide
  modified_base 69: mod_base = OTHER; note = 2'-O-methyl modified nucleotide
  modified_base 70: mod_base = OTHER; note = 2'-O-methyl modified nucleotide
  modified_base 75: mod_base = OTHER; note = 2'-O-methyl modified nucleotide
  modified_base 77: mod_base = OTHER; note = 2'-O-methyl modified nucleotide
  modified_base 80: mod_base = OTHER; note = 2'-O-methyl modified nucleotide
  modified_base 86: mod_base = OTHER; note = 2'-O-methyl modified nucleotide
  modified_base 87: mod_base = OTHER; note = 2'-O-methyl modified nucleotide
  modified_base 89: mod_base = OTHER; note = 2'-O-methyl modified nucleotide
  modified_base 90: mod_base = OTHER; note = 2'-O-methyl modified nucleotide
  modified_base 91: mod_base = OTHER; note = 2'-O-methyl modified nucleotide
  modified_base 92: mod_base = OTHER; note = 2'-O-methyl modified nucleotide
  modified_base 99: mod_base = OTHER; note = nucleotide with phosphorothioate linkage
  modified_base 100: mod_base = OTHER; note = 2'-O-methyl modified nucleotide with phosphorothioate linkage
  modified_base 101: mod_base = OTHER; note = 2'-O-methyl modified nucleotide

SEQ ID NO: 2426 - RNA, 101 nt, synthetic construct; identical to SEQ ID NO: 1426
  source 1..101: mol_type = other RNA
  modified_base 1: mod_base = OTHER; note = 2'-O-methyl modified nucleotide with phosphorothioate linkage
  modified_base 2: mod_base = OTHER; note = 2'-O-methyl modified nucleotide with phosphorothioate linkage
  modified_base 3: mod_base = OTHER; note = 2'-O-methyl modified nucleotide with phosphorothioate linkage
  modified_base 4: mod_base = OTHER; note = 2'-O-methyl modified nucleotide
  modified_base 5: mod_base = OTHER; note = 2'-O-methyl modified nucleotide
  modified_base 8: mod_base = OTHER; note = 2'-O-methyl modified nucleotide
  modified_base 9: mod_base = OTHER; note = 2'-O-methyl modified nucleotide
  modified_base 11: mod_base = OTHER; note = 2'-O-methyl modified nucleotide
  modified_base 13: mod_base = OTHER; note = 2'-O-methyl modified nucleotide
  modified_base 18: mod_base = OTHER; note = 2'-O-methyl modified nucleotide
  modified_base 22: mod_base = OTHER; note = 2'-O-methyl modified nucleotide
  modified_base 25: mod_base = OTHER; note = 2'-O-methyl modified nucleotide
  modified_base 29: mod_base = OTHER; note = 2'-O-methyl modified nucleotide
  modified_base 30: mod_base = OTHER; note = 2'-O-methyl modified nucleotide
  modified_base 31: mod_base = OTHER; note = 2'-O-methyl modified nucleotide
  modified_base 32: mod_base = OTHER; note = 2'-O-methyl modified nucleotide
  modified_base 37: mod_base = OTHER; note = 2'-O-methyl modified nucleotide
  modified_base 38: mod_base = OTHER; note = 2'-O-methyl modified nucleotide
  modified_base 39: mod_base = OTHER; note = 2'-O-methyl modified nucleotide
  modified_base 40: mod_base = OTHER; note = 2'-O-methyl modified nucleotide
  modified_base 41: mod_base = OTHER; note = 2'-O-methyl modified nucleotide
  modified_base 42: mod_base = OTHER; note = 2'-O-methyl modified nucleotide
  modified_base 43: mod_base = OTHER; note = 2'-O-methyl modified nucleotide
  modified_base 47: mod_base = OTHER; note = 2'-O-methyl modified nucleotide
  modified_base 48: mod_base = OTHER; note = 2'-O-methyl modified nucleotide
  modified_base 51: mod_base = OTHER; note = 2'-O-methyl modified nucleotide
  modified_base 54: mod_base = OTHER; note = nucleotide with phosphorothioate linkage
  modified_base 58: mod_base = OTHER; note = 2'-O-methyl modified nucleotide
  modified_base 59: mod_base = OTHER; note = 2'-O-methyl modified nucleotide
  modified_base 61: mod_base = OTHER; note = 2'-O-methyl modified nucleotide
  modified_base 62: mod_base = OTHER; note = 2'-O-methyl modified nucleotide
  modified_base 63: mod_base = OTHER; note = 2'-O-methyl modified nucleotide
  modified_base 64: mod_base = OTHER; note = 2'-O-methyl modified nucleotide
  modified_base 65: mod_base = OTHER; note = 2'-O-methyl modified nucleotide
  modified_base 66: mod_base = OTHER; note = 2'-O-methyl modified nucleotide
  modified_base 67: mod_base = OTHER; note = 2'-O-methyl modified nucleotide
  modified_base 68: mod_base = OTHER; note = 2'-O-methyl modified nucleotide
  modified_base 69: mod_base = OTHER; note = 2'-O-methyl modified nucleotide
  modified_base 70: mod_base = OTHER; note = 2'-O-methyl modified nucleotide
  modified_base 75: mod_base = OTHER; note = 2'-O-methyl modified nucleotide
  modified_base 77: mod_base = OTHER; note = 2'-O-methyl modified nucleotide
  modified_base 80: mod_base = OTHER; note = 2'-O-methyl modified nucleotide
  modified_base 86: mod_base = OTHER; note = 2'-O-methyl modified nucleotide
  modified_base 87: mod_base = OTHER; note = 2'-O-methyl modified nucleotide
  modified_base 89: mod_base = OTHER; note = 2'-O-methyl modified nucleotide
  modified_base 90: mod_base = OTHER; note = 2'-O-methyl modified nucleotide
  modified_base 91: mod_base = OTHER; note = 2'-O-methyl modified nucleotide
  modified_base 92: mod_base = OTHER; note = 2'-O-methyl modified nucleotide
  modified_base 99: mod_base = OTHER; note = nucleotide with phosphorothioate linkage
  modified_base 100: mod_base = OTHER; note = 2'-O-methyl modified nucleotide with phosphorothioate linkage
  modified_base 101: mod_base = OTHER; note = 2'-O-methyl modified nucleotide

SEQ ID NO: 2427 - RNA, 101 nt, synthetic construct; identical to SEQ ID NO: 1427
  source 1..101: mol_type = other RNA
  modified_base 1: mod_base = OTHER; note = 2'-O-methyl modified nucleotide with phosphorothioate linkage
  modified_base 2: mod_base = OTHER; note = 2'-O-methyl modified nucleotide with phosphorothioate linkage
  modified_base 3: mod_base = OTHER; note = 2'-O-methyl modified nucleotide with phosphorothioate linkage
  modified_base 4: mod_base = OTHER; note = 2'-O-methyl modified nucleotide
  modified_base 5: mod_base = OTHER; note = 2'-O-methyl modified nucleotide
  modified_base 8: mod_base = OTHER; note = 2'-O-methyl modified nucleotide
  modified_base 9: mod_base = OTHER; note = 2'-O-methyl modified nucleotide
  modified_base 11: mod_base = OTHER; note = 2'-O-methyl modified nucleotide
  modified_base 13: mod_base = OTHER; note = 2'-O-methyl modified nucleotide
  modified_base 18: mod_base = OTHER; note = 2'-O-methyl modified nucleotide
  modified_base 22: mod_base = OTHER; note = 2'-O-methyl modified nucleotide
  modified_base 25: mod_base = OTHER; note = 2'-O-methyl modified nucleotide
  modified_base 29: mod_base = OTHER; note = 2'-O-methyl modified nucleotide
  modified_base 30: mod_base = OTHER; note = 2'-O-methyl modified nucleotide
  modified_base 31: mod_base = OTHER; note = 2'-O-methyl modified nucleotide
  modified_base 32: mod_base = OTHER; note = 2'-O-methyl modified nucleotide
  modified_base 37: mod_base = OTHER; note = 2'-O-methyl modified nucleotide
  modified_base 38: mod_base = OTHER; note = 2'-O-methyl modified nucleotide
  modified_base 39: mod_base = OTHER; note = 2'-O-methyl modified nucleotide
  modified_base 40: mod_base = OTHER; note = 2'-O-methyl modified nucleotide
  modified_base 41: mod_base = OTHER; note = 2'-O-methyl modified nucleotide
  modified_base 42: mod_base = OTHER; note = 2'-O-methyl modified nucleotide
  modified_base 43: mod_base = OTHER; note = 2'-O-methyl modified nucleotide
  modified_base 47: mod_base = OTHER; note = 2'-O-methyl modified nucleotide
  modified_base 48: mod_base = OTHER; note = 2'-O-methyl modified nucleotide
  modified_base 51: mod_base = OTHER; note = 2'-O-methyl modified nucleotide
  modified_base 54: mod_base = OTHER; note = nucleotide with phosphorothioate linkage
  modified_base 58: mod_base = OTHER; note = 2'-O-methyl modified nucleotide
  modified_base 59: mod_base = OTHER; note = 2'-O-methyl modified nucleotide
  modified_base 61: mod_base = OTHER; note = 2'-O-methyl modified nucleotide
  modified_base 62: mod_base = OTHER; note = 2'-O-methyl modified nucleotide
  modified_base 63: mod_base = OTHER; note = 2'-O-methyl modified nucleotide
  modified_base 64: mod_base = OTHER; note = 2'-O-methyl modified nucleotide
  modified_base 65: mod_base = OTHER; note = 2'-O-methyl modified nucleotide
  modified_base 66: mod_base = OTHER; note = 2'-O-methyl modified nucleotide
  modified_base 67: mod_base = OTHER; note = 2'-O-methyl modified nucleotide
  modified_base 68: mod_base = OTHER; note = 2'-O-methyl modified nucleotide
  modified_base 69: mod_base = OTHER; note = 2'-O-methyl modified nucleotide
  modified_base 70: mod_base = OTHER; note = 2'-O-methyl modified nucleotide
  modified_base 75: mod_base = OTHER; note = 2'-O-methyl modified nucleotide
  modified_base 77: mod_base = OTHER; note = 2'-O-methyl modified nucleotide
  modified_base 80: mod_base = OTHER; note = 2'-O-methyl modified nucleotide
  modified_base 86: mod_base = OTHER; note = 2'-O-methyl modified nucleotide
  modified_base 87: mod_base = OTHER; note = 2'-O-methyl modified nucleotide
  modified_base 89: mod_base = OTHER; note = 2'-O-methyl modified nucleotide
  modified_base 90: mod_base = OTHER; note = 2'-O-methyl modified nucleotide
  modified_base 91: mod_base = OTHER; note = 2'-O-methyl modified nucleotide
  modified_base 92: mod_base = OTHER; note = 2'-O-methyl modified nucleotide
  modified_base 99: mod_base = OTHER; note = nucleotide with phosphorothioate linkage
  modified_base 100: mod_base = OTHER; note = 2'-O-methyl modified nucleotide with phosphorothioate linkage
  modified_base 101: mod_base = OTHER; note = 2'-O-methyl modified nucleotide

SEQ ID NO: 2428 - RNA, 101 nt, synthetic construct; identical to SEQ ID NO: 1428
  source 1..101: mol_type = other RNA
  modified_base 1: mod_base = OTHER; note = 2'-O-methyl modified nucleotide with phosphorothioate linkage
  modified_base 2: mod_base = OTHER; note = 2'-O-methyl modified nucleotide with phosphorothioate linkage
  modified_base 3: mod_base = OTHER; note = 2'-O-methyl modified nucleotide with phosphorothioate linkage
  modified_base 4: mod_base = OTHER; note = 2'-O-methyl modified nucleotide
  modified_base 5: mod_base = OTHER; note = 2'-O-methyl modified nucleotide
  modified_base 8: mod_base = OTHER; note = 2'-O-methyl modified nucleotide
  modified_base 9: mod_base = OTHER; note = 2'-O-methyl modified nucleotide
  modified_base 11: mod_base = OTHER; note = 2'-O-methyl modified nucleotide
  modified_base 13: mod_base = OTHER; note = 2'-O-methyl modified nucleotide
  modified_base 18: mod_base = OTHER; note = 2'-O-methyl modified nucleotide
  modified_base 22: mod_base = OTHER; note = 2'-O-methyl modified nucleotide
  modified_base 25: mod_base = OTHER; note = 2'-O-methyl modified nucleotide
  modified_base 29: mod_base = OTHER; note = 2'-O-methyl modified nucleotide
  modified_base 30: mod_base = OTHER; note = 2'-O-methyl modified nucleotide
  modified_base 31: mod_base = OTHER; note = 2'-O-methyl modified nucleotide
  modified_base 32: mod_base = OTHER; note = 2'-O-methyl modified nucleotide
  modified_base 37: mod_base = OTHER; note = 2'-O-methyl modified nucleotide
  modified_base 38: mod_base = OTHER; note = 2'-O-methyl modified nucleotide
  modified_base 39: mod_base = OTHER; note = 2'-O-methyl modified nucleotide
  modified_base 40: mod_base = OTHER; note = 2'-O-methyl modified nucleotide
  modified_base 41: mod_base = OTHER; note = 2'-O-methyl modified nucleotide
  modified_base 42: mod_base = OTHER; note = 2'-O-methyl modified nucleotide
  modified_base 43: mod_base = OTHER; note = 2'-O-methyl modified nucleotide
  modified_base 47: mod_base = OTHER; note = 2'-O-methyl modified nucleotide
  modified_base 48: mod_base = OTHER; note = 2'-O-methyl modified nucleotide
  modified_base 51: mod_base = OTHER; note = 2'-O-methyl modified nucleotide
  modified_base 54: mod_base = OTHER; note = nucleotide with phosphorothioate linkage
  modified_base 58: mod_base = OTHER; note = 2'-O-methyl modified nucleotide
  modified_base 59: mod_base = OTHER; note = 2'-O-methyl modified nucleotide
  modified_base 61: mod_base = OTHER; note = 2'-O-methyl modified nucleotide
  modified_base 62: mod_base = OTHER; note = 2'-O-methyl modified nucleotide
  modified_base 63: mod_base = OTHER; note = 2'-O-methyl modified nucleotide
  modified_base 64: mod_base = OTHER; note = 2'-O-methyl modified nucleotide
  modified_base 65: mod_base = OTHER; note = 2'-O-methyl modified nucleotide
  modified_base 66: mod_base = OTHER; note = 2'-O-methyl modified nucleotide
  modified_base 67: mod_base = OTHER; note = 2'-O-methyl modified nucleotide
  modified_base 68: mod_base = OTHER; note = 2'-O-methyl modified nucleotide
  modified_base 69: mod_base = OTHER; note = 2'-O-methyl modified nucleotide
  modified_base 70: mod_base = OTHER; note = 2'-O-methyl modified nucleotide
  modified_base 75: mod_base = OTHER; note = 2'-O-methyl modified nucleotide
  modified_base 77: mod_base = OTHER; note = 2'-O-methyl modified nucleotide
  modified_base 80: mod_base = OTHER; note = 2'-O-methyl modified nucleotide
  modified_base 86: mod_base = OTHER; note = 2'-O-methyl modified nucleotide
  modified_base 87: mod_base = OTHER; note = 2'-O-methyl modified nucleotide
  modified_base 89: mod_base = OTHER; note = 2'-O-methyl modified nucleotide
  modified_base 90: mod_base = OTHER; note = 2'-O-methyl modified nucleotide
  modified_base 91: mod_base = OTHER; note = 2'-O-methyl modified nucleotide
  modified_base 92: mod_base = OTHER; note = 2'-O-methyl modified nucleotide
  modified_base 99: mod_base = OTHER; note = nucleotide with phosphorothioate linkage
  modified_base 100: mod_base = OTHER; note = 2'-O-methyl modified nucleotide with phosphorothioate linkage
  modified_base 101: mod_base = OTHER; note = 2'-O-methyl modified nucleotide

SEQ ID NO: 2429 - RNA, 101 nt, synthetic construct; identical to SEQ ID NO: 1429
  source 1..101: mol_type = other RNA
  modified_base 1: mod_base = OTHER; note = 2'-O-methyl modified nucleotide with phosphorothioate linkage
  modified_base 2: mod_base = OTHER; note = 2'-O-methyl modified nucleotide with phosphorothioate linkage
  modified_base 3: mod_base = OTHER; note = 2'-O-methyl modified nucleotide with phosphorothioate linkage
  modified_base 4: mod_base = OTHER; note = 2'-O-methyl modified nucleotide
  modified_base 5: mod_base = OTHER; note = 2'-O-methyl modified nucleotide
  modified_base 8: mod_base = OTHER; note = 2'-O-methyl modified nucleotide
  modified_base 9: mod_base = OTHER; note = 2'-O-methyl modified nucleotide
  modified_base 11: mod_base = OTHER; note = 2'-O-methyl modified nucleotide
  modified_base 13: mod_base = OTHER; note = 2'-O-methyl modified nucleotide
  modified_base 18: mod_base = OTHER; note = 2'-O-methyl modified nucleotide
  modified_base 22: mod_base = OTHER; note = 2'-O-methyl modified nucleotide
  modified_base 25: mod_base = OTHER; note = 2'-O-methyl modified nucleotide
  modified_base 29: mod_base = OTHER; note = 2'-O-methyl modified nucleotide
  modified_base 30: mod_base = OTHER; note = 2'-O-methyl modified nucleotide
  modified_base 31: mod_base = OTHER; note = 2'-O-methyl modified nucleotide
  modified_base 32: mod_base = OTHER; note = 2'-O-methyl modified nucleotide
  modified_base 37: mod_base = OTHER; note = 2'-O-methyl modified nucleotide
  modified_base 38: mod_base = OTHER; note = 2'-O-methyl modified nucleotide
  modified_base 39: mod_base = OTHER; note = 2'-O-methyl modified nucleotide
  modified_base 40: mod_base = OTHER; note = 2'-O-methyl modified nucleotide
  modified_base 41: mod_base = OTHER; note = 2'-O-methyl modified nucleotide
  modified_base 42: mod_base = OTHER; note = 2'-O-methyl modified nucleotide
  modified_base 43: mod_base = OTHER; note = 2'-O-methyl modified nucleotide
  modified_base 47: mod_base = OTHER; note = 2'-O-methyl modified nucleotide
  modified_base 48: mod_base = OTHER; note = 2'-O-methyl modified nucleotide
  modified_base 51: mod_base = OTHER; note = 2'-O-methyl modified nucleotide
  modified_base 54: mod_base = OTHER; note = nucleotide with phosphorothioate linkage
  modified_base 58: mod_base = OTHER; note = 2'-O-methyl modified nucleotide
  modified_base 59: mod_base = OTHER; note = 2'-O-methyl modified nucleotide
  modified_base 61: mod_base = OTHER; note = 2'-O-methyl modified nucleotide
  modified_base 62: mod_base = OTHER; note = 2'-O-methyl modified nucleotide
  modified_base 63: mod_base = OTHER; note = 2'-O-methyl modified nucleotide
  modified_base 64: mod_base = OTHER; note = 2'-O-methyl modified nucleotide
  modified_base 65: mod_base = OTHER; note = 2'-O-methyl modified nucleotide
  modified_base 66: mod_base = OTHER; note = 2'-O-methyl modified nucleotide
  modified_base 67: mod_base = OTHER; note = 2'-O-methyl modified nucleotide
  modified_base 68: mod_base = OTHER; note = 2'-O-methyl modified nucleotide
  modified_base 69: mod_base = OTHER; note = 2'-O-methyl modified nucleotide
  modified_base 70: mod_base = OTHER; note = 2'-O-methyl modified nucleotide
  modified_base 75: mod_base = OTHER; note = 2'-O-methyl modified nucleotide
  modified_base 77: mod_base = OTHER; note = 2'-O-methyl modified nucleotide
  modified_base 80: mod_base = OTHER; note = 2'-O-methyl modified nucleotide
  modified_base 86: mod_base = OTHER; note = 2'-O-methyl modified nucleotide
  modified_base 87: mod_base = OTHER; note = 2'-O-methyl modified nucleotide
  modified_base 89: mod_base = OTHER; note = 2'-O-methyl modified nucleotide
  modified_base 90: mod_base = OTHER; note = 2'-O-methyl modified nucleotide
  modified_base 91: mod_base = OTHER; note = 2'-O-methyl modified nucleotide
  modified_base 92: mod_base = OTHER; note = 2'-O-methyl modified nucleotide
  modified_base 99: mod_base = OTHER; note = nucleotide with phosphorothioate linkage
  modified_base 100: mod_base = OTHER; note = 2'-O-methyl modified nucleotide with phosphorothioate linkage
  modified_base 101: mod_base = OTHER; note = 2'-O-methyl modified nucleotide

SEQ ID NO: 2430 - RNA, 101 nt, synthetic construct; identical to SEQ ID NO: 1430
  source 1..101: mol_type = other RNA
  modified_base 1: mod_base = OTHER; note = 2'-O-methyl modified nucleotide with phosphorothioate linkage
  modified_base 2: mod_base = OTHER; note = 2'-O-methyl modified nucleotide with phosphorothioate linkage
  modified_base 3: mod_base = OTHER; note = 2'-O-methyl modified nucleotide with phosphorothioate linkage
  modified_base 4: mod_base = OTHER; note = 2'-O-methyl modified nucleotide
  modified_base 5: mod_base = OTHER; note = 2'-O-methyl modified nucleotide
  modified_base 8: mod_base = OTHER; note = 2'-O-methyl modified nucleotide
  modified_base 9: mod_base = OTHER; note = 2'-O-methyl modified nucleotide
  modified_base 11: mod_base = OTHER; note = 2'-O-methyl modified nucleotide
  modified_base 13: mod_base = OTHER; note = 2'-O-methyl modified nucleotide
  modified_base 18: mod_base = OTHER; note = 2'-O-methyl modified nucleotide
  modified_base 22: mod_base = OTHER; note = 2'-O-methyl modified nucleotide
  modified_base 25: mod_base = OTHER; note = 2'-O-methyl modified nucleotide
  modified_base 29: mod_base = OTHER; note = 2'-O-methyl modified nucleotide
  modified_base 30: mod_base = OTHER; note = 2'-O-methyl modified nucleotide
  modified_base 31: mod_base = OTHER; note = 2'-O-methyl modified nucleotide
  modified_base 32: mod_base = OTHER; note = 2'-O-methyl modified nucleotide
  modified_base 37: mod_base = OTHER; note = 2'-O-methyl modified nucleotide
  modified_base 38: mod_base = OTHER; note = 2'-O-methyl modified nucleotide
  modified_base 39: mod_base = OTHER; note = 2'-O-methyl modified nucleotide
  modified_base 40: mod_base = OTHER; note = 2'-O-methyl modified nucleotide
  modified_base 41: mod_base = OTHER; note = 2'-O-methyl modified nucleotide
  modified_base 42: mod_base = OTHER; note = 2'-O-methyl modified nucleotide
  modified_base 43: mod_base = OTHER; note = 2'-O-methyl modified nucleotide
  modified_base 47: mod_base = OTHER; note = 2'-O-methyl modified nucleotide
  modified_base 48: mod_base = OTHER; note = 2'-O-methyl modified nucleotide
  modified_base 51: mod_base = OTHER; note = 2'-O-methyl modified nucleotide
  modified_base 54: mod_base = OTHER; note = nucleotide with phosphorothioate linkage
  modified_base 58: mod_base = OTHER; note = 2'-O-methyl modified nucleotide
  modified_base 59: mod_base = OTHER; note = 2'-O-methyl modified nucleotide
  modified_base 61: mod_base = OTHER; note = 2'-O-methyl modified nucleotide
  modified_base 62: mod_base = OTHER; note = 2'-O-methyl modified nucleotide
  modified_base 63: mod_base = OTHER; note = 2'-O-methyl modified nucleotide
  modified_base 64: mod_base = OTHER; note = 2'-O-methyl modified nucleotide
  modified_base 65: mod_base = OTHER; note = 2'-O-methyl modified nucleotide
  modified_base 66: mod_base = OTHER; note = 2'-O-methyl modified nucleotide
  modified_base 67: mod_base = OTHER; note = 2'-O-methyl modified nucleotide
  modified_base 68: mod_base = OTHER; note = 2'-O-methyl modified nucleotide
  modified_base 69: mod_base = OTHER; note = 2'-O-methyl modified nucleotide
  modified_base 70: mod_base = OTHER; note = 2'-O-methyl modified nucleotide
  modified_base 75: mod_base = OTHER; note = 2'-O-methyl modified nucleotide
  modified_base 77: mod_base = OTHER; note = 2'-O-methyl modified nucleotide
  modified_base 80: mod_base = OTHER; note = 2'-O-methyl modified nucleotide
  modified_base 86: mod_base = OTHER; note = 2'-O-methyl modified nucleotide
  modified_base 87: mod_base = OTHER; note = 2'-O-methyl modified nucleotide
  modified_base 89: mod_base = OTHER; note = 2'-O-methyl modified nucleotide
  modified_base 90: mod_base = OTHER; note = 2'-O-methyl modified nucleotide
  modified_base 91: mod_base = OTHER; note = 2'-O-methyl modified nucleotide
  modified_base 92: mod_base = OTHER; note = 2'-O-methyl modified nucleotide
  modified_base 99: mod_base = OTHER; note = nucleotide with phosphorothioate linkage
  modified_base 100: mod_base = OTHER; note = 2'-O-methyl modified nucleotide with phosphorothioate linkage
  modified_base 101: mod_base = OTHER; note = 2'-O-methyl modified nucleotide

SEQ ID NO: 2431 - RNA, 101 nt, synthetic construct; identical to SEQ ID NO: 1431
  source 1..101: mol_type = other RNA
  modified_base 1: mod_base = OTHER; note = 2'-O-methyl modified nucleotide with phosphorothioate linkage
  modified_base 2: mod_base = OTHER; note = 2'-O-methyl modified nucleotide with phosphorothioate linkage
  modified_base 3: mod_base = OTHER; note = 2'-O-methyl modified nucleotide with phosphorothioate linkage
  modified_base 4: mod_base = OTHER; note = 2'-O-methyl modified nucleotide
  modified_base 5: mod_base = OTHER; note = 2'-O-methyl modified nucleotide
  modified_base 8: mod_base = OTHER; note = 2'-O-methyl modified nucleotide
  modified_base 9: mod_base = OTHER; note = 2'-O-methyl modified nucleotide
  modified_base 11: mod_base = OTHER; note = 2'-O-methyl modified nucleotide
  modified_base 13: mod_base = OTHER; note = 2'-O-methyl modified nucleotide
  modified_base 18: mod_base = OTHER; note = 2'-O-methyl modified nucleotide
  modified_base 22: mod_base = OTHER; note = 2'-O-methyl modified nucleotide
  modified_base 25: mod_base = OTHER; note = 2'-O-methyl modified nucleotide
  modified_base 29: mod_base = OTHER; note = 2'-O-methyl modified nucleotide
  modified_base 30: mod_base = OTHER; note = 2'-O-methyl modified nucleotide
  modified_base 31: mod_base = OTHER; note = 2'-O-methyl modified nucleotide
  modified_base 32: mod_base = OTHER; note = 2'-O-methyl modified nucleotide
  modified_base 37: mod_base = OTHER; note = 2'-O-methyl modified nucleotide
  modified_base 38: mod_base = OTHER; note = 2'-O-methyl modified nucleotide
  modified_base 39: mod_base = OTHER; note = 2'-O-methyl modified nucleotide
  modified_base 40: mod_base = OTHER; note = 2'-O-methyl modified nucleotide
  modified_base 41: mod_base = OTHER; note = 2'-O-methyl modified nucleotide
  modified_base 42: mod_base = OTHER; note = 2'-O-methyl modified nucleotide
  modified_base 43: mod_base = OTHER; note = 2'-O-methyl modified nucleotide
  modified_base 47: mod_base = OTHER; note = 2'-O-methyl modified nucleotide
  modified_base 48: mod_base = OTHER; note = 2'-O-methyl modified nucleotide
  modified_base 51: mod_base = OTHER; note = 2'-O-methyl modified nucleotide
  modified_base 54: mod_base = OTHER; note = nucleotide with phosphorothioate linkage
  modified_base 58: mod_base = OTHER; note = 2'-O-methyl modified nucleotide
  modified_base 59: mod_base = OTHER; note = 2'-O-methyl modified nucleotide
  modified_base 61: mod_base = OTHER; note = 2'-O-methyl modified nucleotide
  modified_base 62: mod_base = OTHER; note = 2'-O-methyl modified nucleotide
  modified_base 63: mod_base = OTHER; note = 2'-O-methyl modified nucleotide
  modified_base 64: mod_base = OTHER; note = 2'-O-methyl modified nucleotide
  modified_base 65: mod_base = OTHER; note = 2'-O-methyl modified nucleotide
  modified_base 66: mod_base = OTHER; note = 2'-O-methyl modified nucleotide
  modified_base 67: mod_base = OTHER; note = 2'-O-methyl modified nucleotide
  modified_base 68: mod_base = OTHER; note = 2'-O-methyl modified nucleotide
  modified_base 69: mod_base = OTHER; note = 2'-O-methyl modified nucleotide
  modified_base 70: mod_base = OTHER; note = 2'-O-methyl modified nucleotide
  modified_base 75: mod_base = OTHER; note = 2'-O-methyl modified nucleotide
  modified_base 77: mod_base = OTHER; note = 2'-O-methyl modified nucleotide
  modified_base 80: mod_base = OTHER; note = 2'-O-methyl modified nucleotide
  modified_base 86: mod_base = OTHER; note = 2'-O-methyl modified nucleotide
  modified_base 87: mod_base = OTHER; note = 2'-O-methyl modified nucleotide
  modified_base 89: mod_base = OTHER; note = 2'-O-methyl modified nucleotide
  modified_base 90: mod_base = OTHER; note = 2'-O-methyl modified nucleotide
  modified_base 91: mod_base = OTHER; note = 2'-O-methyl modified nucleotide
  modified_base 92: mod_base = OTHER; note = 2'-O-methyl modified nucleotide
  modified_base 99: mod_base = OTHER; note = nucleotide with phosphorothioate linkage
  modified_base 100: mod_base = OTHER; note = 2'-O-methyl modified nucleotide with phosphorothioate linkage
  modified_base 101: mod_base = OTHER; note = 2'-O-methyl modified nucleotide

SEQ ID NO: 2432 - RNA, 101 nt, synthetic construct; identical to SEQ ID NO: 1432
  source 1..101: mol_type = other RNA
  modified_base 1: mod_base = OTHER; note = 2'-O-methyl modified nucleotide with phosphorothioate linkage
  modified_base 2: mod_base = OTHER; note = 2'-O-methyl modified nucleotide with phosphorothioate linkage
  modified_base 3: mod_base = OTHER; note = 2'-O-methyl modified nucleotide with phosphorothioate linkage
  modified_base 4: mod_base = OTHER; note = 2'-O-methyl modified nucleotide
  modified_base 5: mod_base = OTHER; note = 2'-O-methyl modified nucleotide
  modified_base 8: mod_base = OTHER; note = 2'-O-methyl modified nucleotide
  modified_base 9: mod_base = OTHER; note = 2'-O-methyl modified nucleotide
  modified_base 11: mod_base = OTHER; note = 2'-O-methyl modified nucleotide
  modified_base 13: mod_base = OTHER; note = 2'-O-methyl modified nucleotide
  modified_base 18: mod_base = OTHER; note = 2'-O-methyl modified nucleotide
  modified_base 22: mod_base = OTHER; note = 2'-O-methyl modified nucleotide
  modified_base 25: mod_base = OTHER; note = 2'-O-methyl modified nucleotide
  modified_base 29: mod_base = OTHER; note = 2'-O-methyl modified nucleotide
  modified_base 30: mod_base = OTHER; note = 2'-O-methyl modified nucleotide
  modified_base 31: mod_base = OTHER; note = 2'-O-methyl modified nucleotide
  modified_base 32: mod_base = OTHER; note = 2'-O-methyl modified nucleotide
  modified_base 37: mod_base = OTHER; note = 2'-O-methyl modified nucleotide
  modified_base 38: mod_base = OTHER; note = 2'-O-methyl modified nucleotide
  modified_base 39: mod_base = OTHER; note = 2'-O-methyl modified nucleotide
  modified_base 40: mod_base = OTHER; note = 2'-O-methyl modified nucleotide
  modified_base 41: mod_base = OTHER; note = 2'-O-methyl modified nucleotide
  modified_base 42: mod_base = OTHER; note = 2'-O-methyl modified nucleotide
  modified_base 43: mod_base = OTHER; note = 2'-O-methyl modified nucleotide
  modified_base 47: mod_base = OTHER; note = 2'-O-methyl modified nucleotide
  modified_base 48: mod_base = OTHER; note = 2'-O-methyl modified nucleotide
  modified_base 51: mod_base = OTHER; note = 2'-O-methyl modified nucleotide
  modified_base 54: mod_base = OTHER; note = nucleotide with phosphorothioate linkage
  modified_base 58: mod_base = OTHER; note = 2'-O-methyl modified nucleotide
  modified_base 59: mod_base = OTHER; note = 2'-O-methyl modified nucleotide
  modified_base 61: mod_base = OTHER; note = 2'-O-methyl modified nucleotide
  modified_base 62: mod_base = OTHER; note = 2'-O-methyl modified nucleotide
  modified_base 63: mod_base = OTHER; note = 2'-O-methyl modified nucleotide
  modified_base 64: mod_base = OTHER; note = 2'-O-methyl modified nucleotide
  modified_base 65: mod_base = OTHER; note = 2'-O-methyl modified nucleotide
  modified_base 66: mod_base = OTHER; note = 2'-O-methyl modified nucleotide
  modified_base 67: mod_base = OTHER; note = 2'-O-methyl modified nucleotide
  modified_base 68: mod_base = OTHER; note = 2'-O-methyl modified nucleotide
  modified_base 69: mod_base = OTHER; note = 2'-O-methyl modified nucleotide
  modified_base 70: mod_base = OTHER; note = 2'-O-methyl modified nucleotide
  modified_base 75: mod_base = OTHER; note = 2'-O-methyl modified nucleotide
  modified_base 77: mod_base = OTHER; note = 2'-O-methyl modified nucleotide
  modified_base 80: mod_base = OTHER; note = 2'-O-methyl modified nucleotide
  modified_base 86: mod_base = OTHER; note = 2'-O-methyl modified nucleotide
  modified_base 87: mod_base = OTHER; note = 2'-O-methyl modified nucleotide
  modified_base 89: mod_base = OTHER; note = 2'-O-methyl modified nucleotide
  modified_base 90: mod_base = OTHER; note = 2'-O-methyl modified nucleotide
  modified_base 91: mod_base = OTHER; note = 2'-O-methyl modified nucleotide
  modified_base 92: mod_base = OTHER; note = 2'-O-methyl modified nucleotide
  modified_base 99: mod_base = OTHER; note = nucleotide with phosphorothioate linkage
  modified_base 100: mod_base = OTHER; note = 2'-O-methyl modified nucleotide with phosphorothioate linkage
  modified_base 101: mod_base = OTHER; note = 2'-O-methyl modified nucleotide

SEQ ID NO: 2433 - RNA, 101 nt, synthetic construct; identical to SEQ ID NO: 1433
  source 1..101: mol_type = other RNA
  modified_base 1: mod_base = OTHER; note = 2'-O-methyl modified nucleotide with phosphorothioate linkage
  modified_base 2: mod_base = OTHER; note = 2'-O-methyl modified nucleotide with phosphorothioate linkage
  modified_base 3: mod_base = OTHER; note = 2'-O-methyl modified nucleotide with phosphorothioate linkage
  modified_base 4: mod_base = OTHER; note = 2'-O-methyl modified nucleotide
  modified_base 5: mod_base = OTHER; note = 2'-O-methyl modified nucleotide
  modified_base 8: mod_base = OTHER; note = 2'-O-methyl modified nucleotide
  modified_base 9: mod_base = OTHER; note = 2'-O-methyl modified nucleotide
  modified_base 11: mod_base = OTHER; note = 2'-O-methyl modified nucleotide
  modified_base 13: mod_base = OTHER; note = 2'-O-methyl modified nucleotide
  modified_base 18: mod_base = OTHER; note = 2'-O-methyl modified nucleotide
  modified_base 22: mod_base = OTHER; note = 2'-O-methyl modified nucleotide
  modified_base 25: mod_base = OTHER; note = 2'-O-methyl modified nucleotide
  modified_base 29: mod_base = OTHER; note = 2'-O-methyl modified nucleotide
  modified_base 30: mod_base = OTHER; note = 2'-O-methyl modified nucleotide
  modified_base 31: mod_base = OTHER; note = 2'-O-methyl modified nucleotide
  modified_base 32: mod_base = OTHER; note = 2'-O-methyl modified nucleotide
  modified_base 37: mod_base = OTHER; note = 2'-O-methyl modified nucleotide
  modified_base 38: mod_base = OTHER; note = 2'-O-methyl modified nucleotide
  modified_base 39: mod_base = OTHER; note = 2'-O-methyl modified nucleotide
  modified_base 40: mod_base = OTHER; note = 2'-O-methyl modified nucleotide
  modified_base 41: mod_base = OTHER; note = 2'-O-methyl modified nucleotide
  modified_base 42: mod_base = OTHER; note = 2'-O-methyl modified nucleotide
  modified_base 43: mod_base = OTHER; note = 2'-O-methyl modified nucleotide
  modified_base 47: mod_base = OTHER; note = 2'-O-methyl modified nucleotide
  modified_base 48: mod_base = OTHER; note = 2'-O-methyl modified nucleotide
  modified_base 51: mod_base = OTHER; note = 2'-O-methyl modified nucleotide
  modified_base 54: mod_base = OTHER; note = nucleotide with phosphorothioate linkage
  modified_base 58: mod_base = OTHER; note = 2'-O-methyl modified nucleotide
  modified_base 59: mod_base = OTHER; note = 2'-O-methyl modified nucleotide
  modified_base 61: mod_base = OTHER; note = 2'-O-methyl modified nucleotide
  modified_base 62: mod_base = OTHER; note = 2'-O-methyl modified nucleotide
  modified_base 63: mod_base = OTHER; note = 2'-O-methyl modified nucleotide
  modified_base 64: mod_base = OTHER; note = 2'-O-methyl modified nucleotide
  modified_base 65: mod_base = OTHER; note = 2'-O-methyl modified nucleotide
  modified_base 66: mod_base = OTHER; note = 2'-O-methyl modified nucleotide
  modified_base 67: mod_base = OTHER; note = 2'-O-methyl modified nucleotide
  modified_base 68: mod_base = OTHER; note = 2'-O-methyl modified nucleotide
  modified_base 69: mod_base = OTHER; note = 2'-O-methyl modified nucleotide
  modified_base 70: mod_base = OTHER; note = 2'-O-methyl modified nucleotide
  modified_base 75: mod_base = OTHER; note = 2'-O-methyl modified nucleotide
  modified_base 77: mod_base = OTHER; note = 2'-O-methyl modified nucleotide
  modified_base 80: mod_base = OTHER; note = 2'-O-methyl modified nucleotide
  modified_base 86: mod_base = OTHER; note = 2'-O-methyl modified nucleotide
  modified_base 87: mod_base = OTHER; note = 2'-O-methyl modified nucleotide
  modified_base 89: mod_base = OTHER; note = 2'-O-methyl modified nucleotide
  modified_base 90: mod_base = OTHER; note = 2'-O-methyl modified nucleotide
  modified_base 91: mod_base = OTHER; note = 2'-O-methyl modified nucleotide
  modified_base 92: mod_base = OTHER; note = 2'-O-methyl modified nucleotide
  modified_base 99: mod_base = OTHER; note = nucleotide with phosphorothioate linkage
  modified_base 100: mod_base = OTHER; note = 2'-O-methyl modified nucleotide with phosphorothioate linkage
  modified_base 101: mod_base = OTHER; note = 2'-O-methyl modified nucleotide

SEQ ID NO: 2434 - RNA, 101 nt, synthetic construct; identical to SEQ ID NO: 1434
  source 1..101: mol_type = other RNA
  modified_base 1: mod_base = OTHER; note = 2'-O-methyl modified nucleotide with phosphorothioate linkage
  modified_base 2: mod_base = OTHER; note = 2'-O-methyl modified nucleotide with phosphorothioate linkage
  modified_base 3: mod_base = OTHER; note = 2'-O-methyl modified nucleotide with phosphorothioate linkage
  modified_base 4: mod_base = OTHER; note = 2'-O-methyl modified nucleotide
  modified_base 5: mod_base = OTHER; note = 2'-O-methyl modified nucleotide
  modified_base 8: mod_base = OTHER; note = 2'-O-methyl modified nucleotide
  modified_base 9: mod_base = OTHER; note = 2'-O-methyl modified nucleotide
  modified_base 11: mod_base = OTHER; note = 2'-O-methyl modified nucleotide
  modified_base 13: mod_base = OTHER; note = 2'-O-methyl modified nucleotide
  modified_base 18: mod_base = OTHER; note = 2'-O-methyl modified nucleotide
  modified_base 22: mod_base = OTHER; note = 2'-O-methyl modified nucleotide
  modified_base 25: mod_base = OTHER; note = 2'-O-methyl modified nucleotide
  modified_base 29: mod_base = OTHER; note = 2'-O-methyl modified nucleotide
  modified_base 30: mod_base = OTHER; note = 2'-O-methyl modified nucleotide
  modified_base 31: mod_base = OTHER; note = 2'-O-methyl modified nucleotide
  modified_base 32: mod_base = OTHER; note = 2'-O-methyl modified nucleotide
  modified_base 37: mod_base = OTHER; note = 2'-O-methyl modified nucleotide
  modified_base 38: mod_base = OTHER; note = 2'-O-methyl modified nucleotide
  modified_base 39: mod_base = OTHER; note = 2'-O-methyl modified nucleotide
  modified_base 40: mod_base = OTHER; note = 2'-O-methyl modified nucleotide
  modified_base 41: mod_base = OTHER; note = 2'-O-methyl modified nucleotide
  modified_base 42: mod_base = OTHER; note = 2'-O-methyl modified nucleotide
  modified_base 43: mod_base = OTHER; note = 2'-O-methyl modified nucleotide
  modified_base 47: mod_base = OTHER; note = 2'-O-methyl modified nucleotide
  modified_base 48: mod_base = OTHER; note = 2'-O-methyl modified nucleotide
  modified_base 51: mod_base = OTHER; note = 2'-O-methyl modified nucleotide
  modified_base 54: mod_base = OTHER; note = nucleotide with phosphorothioate linkage
  modified_base 58: mod_base = OTHER; note = 2'-O-methyl modified nucleotide
  modified_base 59: mod_base = OTHER; note = 2'-O-methyl modified nucleotide
  modified_base 61: mod_base = OTHER; note = 2'-O-methyl modified nucleotide
  modified_base 62: mod_base = OTHER; note = 2'-O-methyl modified nucleotide
  modified_base 63: mod_base = OTHER; note = 2'-O-methyl modified nucleotide
  modified_base 64: mod_base = OTHER; note = 2'-O-methyl modified nucleotide
  modified_base 65: mod_base = OTHER; note = 2'-O-methyl modified nucleotide
  modified_base 66: mod_base = OTHER; note = 2'-O-methyl modified nucleotide
  modified_base 67: mod_base = OTHER; note = 2'-O-methyl modified nucleotide
  modified_base 68: mod_base = OTHER; note = 2'-O-methyl modified nucleotide
  modified_base 69: mod_base = OTHER; note = 2'-O-methyl modified nucleotide
  modified_base 70: mod_base = OTHER; note = 2'-O-methyl modified nucleotide
  modified_base 75: mod_base = OTHER; note = 2'-O-methyl modified nucleotide
  modified_base 77: mod_base = OTHER; note = 2'-O-methyl modified nucleotide
  modified_base 80: mod_base = OTHER; note = 2'-O-methyl modified nucleotide
  modified_base 86: mod_base = OTHER; note = 2'-O-methyl modified nucleotide
  modified_base 87: mod_base = OTHER; note = 2'-O-methyl modified nucleotide
  modified_base 89: mod_base = OTHER; note = 2'-O-methyl modified nucleotide
  modified_base 90: mod_base = OTHER; note = 2'-O-methyl modified nucleotide
  modified_base 91: mod_base = OTHER; note = 2'-O-methyl modified nucleotide
  modified_base 92: mod_base = OTHER; note = 2'-O-methyl modified nucleotide
  modified_base 99: mod_base = OTHER; note = nucleotide with phosphorothioate linkage
  modified_base 100: mod_base = OTHER; note = 2'-O-methyl modified nucleotide with phosphorothioate linkage
  modified_base 101: mod_base = OTHER; note = 2'-O-methyl modified nucleotide

SEQ ID NO: 2435 - RNA, 101 nt, synthetic construct; identical to SEQ ID NO: 1435
  source 1..101: mol_type = other RNA
  modified_base 1: mod_base = OTHER; note = 2'-O-methyl modified nucleotide with phosphorothioate linkage
  modified_base 2: mod_base = OTHER; note = 2'-O-methyl modified nucleotide with phosphorothioate linkage
  modified_base 3: mod_base = OTHER; note = 2'-O-methyl modified nucleotide with phosphorothioate linkage
  modified_base 4: mod_base = OTHER; note = 2'-O-methyl modified nucleotide
  modified_base 5: mod_base = OTHER; note = 2'-O-methyl modified nucleotide
  modified_base 8: mod_base = OTHER; note = 2'-O-methyl modified nucleotide
  modified_base 9: mod_base = OTHER; note = 2'-O-methyl modified nucleotide
  modified_base 11: mod_base = OTHER; note = 2'-O-methyl modified nucleotide
  modified_base 13: mod_base = OTHER; note = 2'-O-methyl modified nucleotide
  modified_base 18: mod_base = OTHER; note = 2'-O-methyl modified nucleotide
  modified_base 22: mod_base = OTHER; note = 2'-O-methyl modified nucleotide
  modified_base 25: mod_base = OTHER; note = 2'-O-methyl modified nucleotide
  modified_base 29: mod_base = OTHER; note = 2'-O-methyl modified nucleotide
  modified_base 30: mod_base = OTHER; note = 2'-O-methyl modified nucleotide
  modified_base 31: mod_base = OTHER; note = 2'-O-methyl modified nucleotide
  modified_base 32: mod_base = OTHER; note = 2'-O-methyl modified nucleotide
  modified_base 37: mod_base = OTHER; note = 2'-O-methyl modified nucleotide
  modified_base 38: mod_base = OTHER; note = 2'-O-methyl modified nucleotide
  modified_base 39: mod_base = OTHER; note = 2'-O-methyl modified nucleotide
  modified_base 40: mod_base = OTHER; note = 2'-O-methyl modified nucleotide
  modified_base 41: mod_base = OTHER; note = 2'-O-methyl modified nucleotide
  modified_base 42: mod_base = OTHER; note = 2'-O-methyl modified nucleotide
  modified_base 43: mod_base = OTHER; note = 2'-O-methyl modified nucleotide
  modified_base 47: mod_base = OTHER; note = 2'-O-methyl modified nucleotide
  modified_base 48: mod_base = OTHER; note = 2'-O-methyl modified nucleotide
  modified_base 51: mod_base = OTHER; note = 2'-O-methyl modified nucleotide
  modified_base 54: mod_base = OTHER; note = nucleotide with phosphorothioate linkage
  modified_base 58: mod_base = OTHER; note = 2'-O-methyl modified nucleotide
  modified_base 59: mod_base = OTHER; note = 2'-O-methyl modified nucleotide
  modified_base 61: mod_base = OTHER; note = 2'-O-methyl modified nucleotide
  modified_base 62: mod_base = OTHER; note = 2'-O-methyl modified nucleotide
  modified_base 63: mod_base = OTHER; note = 2'-O-methyl modified nucleotide
  modified_base 64: mod_base = OTHER; note = 2'-O-methyl modified nucleotide
  modified_base 65: mod_base = OTHER; note = 2'-O-methyl modified nucleotide
  modified_base 66: mod_base = OTHER; note = 2'-O-methyl modified nucleotide
  modified_base 67: mod_base = OTHER; note = 2'-O-methyl modified nucleotide
  modified_base 68: mod_base = OTHER; note = 2'-O-methyl modified nucleotide
  modified_base 69: mod_base = OTHER; note = 2'-O-methyl modified nucleotide
  modified_base 70: mod_base = OTHER; note = 2'-O-methyl modified nucleotide
  modified_base 75: mod_base = OTHER; note = 2'-O-methyl modified nucleotide
  modified_base 77: mod_base = OTHER; note = 2'-O-methyl modified nucleotide
  modified_base 80: mod_base = OTHER; note = 2'-O-methyl modified nucleotide
  modified_base 86: mod_base = OTHER; note = 2'-O-methyl modified nucleotide
  modified_base 87: mod_base = OTHER; note = 2'-O-methyl modified nucleotide
  modified_base 89: mod_base = OTHER; note = 2'-O-methyl modified nucleotide
  modified_base 90: mod_base = OTHER; note = 2'-O-methyl modified nucleotide
  modified_base 91: mod_base = OTHER; note = 2'-O-methyl modified nucleotide
  modified_base 92: mod_base = OTHER; note = 2'-O-methyl modified nucleotide
  modified_base 99: mod_base = OTHER; note = nucleotide with phosphorothioate linkage
  modified_base 100: mod_base = OTHER; note = 2'-O-methyl modified nucleotide with phosphorothioate linkage
  modified_base 101: mod_base = OTHER; note = 2'-O-methyl modified nucleotide

SEQ ID NO: 2436 - RNA, 101 nt, synthetic construct; identical to SEQ ID NO: 1436
  source 1..101: mol_type = other RNA
  modified_base 1: mod_base = OTHER; note = 2'-O-methyl modified nucleotide with phosphorothioate linkage
  modified_base 2: mod_base = OTHER; note = 2'-O-methyl modified nucleotide with phosphorothioate linkage
  modified_base 3: mod_base = OTHER; note = 2'-O-methyl modified nucleotide with phosphorothioate linkage
  modified_base 4: mod_base = OTHER; note = 2'-O-methyl modified nucleotide
  modified_base 5: mod_base = OTHER; note = 2'-O-methyl modified nucleotide
  modified_base 8: mod_base = OTHER; note = 2'-O-methyl modified nucleotide
  modified_base 9: mod_base = OTHER; note = 2'-O-methyl modified nucleotide
  modified_base 11: mod_base = OTHER; note = 2'-O-methyl modified nucleotide
  modified_base 13: mod_base = OTHER; note = 2'-O-methyl modified nucleotide
  modified_base 18: mod_base = OTHER; note = 2'-O-methyl modified nucleotide
  modified_base 22: mod_base = OTHER; note = 2'-O-methyl modified nucleotide
  modified_base 25: mod_base = OTHER; note = 2'-O-methyl modified nucleotide
  modified_base 29: mod_base = OTHER; note = 2'-O-methyl modified nucleotide
  modified_base 30: mod_base = OTHER; note = 2'-O-methyl modified nucleotide
  modified_base 31: mod_base = OTHER; note = 2'-O-methyl modified nucleotide
  modified_base 32: mod_base = OTHER; note = 2'-O-methyl modified nucleotide
  modified_base 37: mod_base = OTHER; note = 2'-O-methyl modified nucleotide
  modified_base 38: mod_base = OTHER; note = 2'-O-methyl modified nucleotide
  modified_base 39: mod_base = OTHER; note = 2'-O-methyl modified nucleotide
  modified_base 40: mod_base = OTHER; note = 2'-O-methyl modified nucleotide
  modified_base 41: mod_base = OTHER; note = 2'-O-methyl modified nucleotide
  modified_base 42: mod_base = OTHER; note = 2'-O-methyl modified nucleotide
  modified_base 43: mod_base = OTHER; note = 2'-O-methyl modified nucleotide
  modified_base 47: mod_base = OTHER; note = 2'-O-methyl modified nucleotide
  modified_base 48: mod_base = OTHER; note = 2'-O-methyl modified nucleotide
  modified_base 51: mod_base = OTHER; note = 2'-O-methyl modified nucleotide
  modified_base 54: mod_base = OTHER; note = nucleotide with phosphorothioate linkage
  modified_base 58: mod_base = OTHER; note = 2'-O-methyl modified nucleotide
  modified_base 59: mod_base = OTHER; note = 2'-O-methyl modified nucleotide
  modified_base 61: mod_base = OTHER; note = 2'-O-methyl modified nucleotide
  modified_base 62: mod_base = OTHER; note = 2'-O-methyl modified nucleotide
  modified_base 63: mod_base = OTHER; note = 2'-O-methyl modified nucleotide
  modified_base 64: mod_base = OTHER; note = 2'-O-methyl modified nucleotide
  modified_base 65: mod_base = OTHER; note = 2'-O-methyl modified nucleotide
  modified_base 66: mod_base = OTHER; note = 2'-O-methyl modified nucleotide
  modified_base 67: mod_base = OTHER; note = 2'-O-methyl modified nucleotide
  modified_base 68: mod_base = OTHER; note = 2'-O-methyl modified nucleotide
  modified_base 69: mod_base = OTHER; note = 2'-O-methyl modified nucleotide
  modified_base 70: mod_base = OTHER; note = 2'-O-methyl modified nucleotide
  modified_base 75: mod_base = OTHER; note = 2'-O-methyl modified nucleotide
  modified_base 77: mod_base = OTHER; note = 2'-O-methyl modified nucleotide
  modified_base 80: mod_base = OTHER; note = 2'-O-methyl modified nucleotide
  modified_base 86: mod_base = OTHER; note = 2'-O-methyl modified nucleotide
  modified_base 87: mod_base = OTHER; note = 2'-O-methyl modified nucleotide
  modified_base 89: mod_base = OTHER; note = 2'-O-methyl modified nucleotide
  modified_base 90: mod_base = OTHER; note = 2'-O-methyl modified nucleotide
  modified_base 91: mod_base = OTHER; note = 2'-O-methyl modified nucleotide
  modified_base 92: mod_base = OTHER; note = 2'-O-methyl modified nucleotide
  modified_base 99: mod_base = OTHER; note = nucleotide with phosphorothioate linkage
  modified_base 100: mod_base = OTHER; note = 2'-O-methyl modified nucleotide with phosphorothioate linkage
  modified_base 101: mod_base = OTHER; note = 2'-O-methyl modified nucleotide

SEQ ID NO: 2437 - RNA, 101 nt, synthetic construct; identical to SEQ ID NO: 1437
  source 1..101: mol_type = other RNA
  modified_base 1: mod_base = OTHER; note = 2'-O-methyl modified nucleotide with phosphorothioate linkage
  modified_base 2: mod_base = OTHER; note = 2'-O-methyl modified nucleotide with phosphorothioate linkage
  modified_base 3: mod_base = OTHER; note = 2'-O-methyl modified nucleotide with phosphorothioate linkage
  modified_base 4: mod_base = OTHER; note = 2'-O-methyl modified nucleotide
  modified_base 5: mod_base = OTHER; note = 2'-O-methyl modified nucleotide
  modified_base 8: mod_base = OTHER; note = 2'-O-methyl modified nucleotide
  modified_base 9: mod_base = OTHER; note = 2'-O-methyl modified nucleotide
  modified_base 11: mod_base = OTHER; note = 2'-O-methyl modified nucleotide
  modified_base 13: mod_base = OTHER; note = 2'-O-methyl modified nucleotide
  modified_base 18: mod_base = OTHER; note = 2'-O-methyl modified nucleotide
  modified_base 22: mod_base = OTHER; note = 2'-O-methyl modified nucleotide
  modified_base 25: mod_base = OTHER; note = 2'-O-methyl modified nucleotide
  modified_base 29: mod_base = OTHER; note = 2'-O-methyl modified nucleotide
  modified_base 30: mod_base = OTHER; note = 2'-O-methyl modified nucleotide
  modified_base 31: mod_base = OTHER; note = 2'-O-methyl modified nucleotide
  modified_base 32: mod_base = OTHER; note = 2'-O-methyl modified nucleotide
  modified_base 37: mod_base = OTHER; note = 2'-O-methyl modified nucleotide
  modified_base 38: mod_base = OTHER; note = 2'-O-methyl modified nucleotide
  modified_base 39: mod_base = OTHER; note = 2'-O-methyl modified nucleotide
  modified_base 40: mod_base = OTHER; note = 2'-O-methyl modified nucleotide
  modified_base 41: mod_base = OTHER; note = 2'-O-methyl modified nucleotide
  modified_base 42: mod_base = OTHER; note = 2'-O-methyl modified nucleotide
  modified_base 43: mod_base = OTHER; note = 2'-O-methyl modified nucleotide
  modified_base 47: mod_base = OTHER; note = 2'-O-methyl modified nucleotide
  modified_base 48: mod_base = OTHER; note = 2'-O-methyl modified nucleotide
  modified_base 51: mod_base = OTHER; note = 2'-O-methyl modified nucleotide
  modified_base 54: mod_base = OTHER; note = nucleotide with phosphorothioate linkage
  modified_base 58: mod_base = OTHER; note = 2'-O-methyl modified nucleotide
  modified_base 59: mod_base = OTHER; note = 2'-O-methyl modified nucleotide
  modified_base 61: mod_base = OTHER; note = 2'-O-methyl modified nucleotide
  modified_base 62: mod_base = OTHER; note = 2'-O-methyl modified nucleotide
  modified_base 63: mod_base = OTHER; note = 2'-O-methyl modified nucleotide
  modified_base 64: mod_base = OTHER; note = 2'-O-methyl modified nucleotide
  modified_base 65: mod_base = OTHER; note = 2'-O-methyl modified nucleotide
  modified_base 66: mod_base = OTHER; note = 2'-O-methyl modified nucleotide
  modified_base 67: mod_base = OTHER; note = 2'-O-methyl modified nucleotide
  modified_base 68: mod_base = OTHER; note = 2'-O-methyl modified nucleotide
  modified_base 69: mod_base = OTHER; note = 2'-O-methyl modified nucleotide
  modified_base 70: mod_base = OTHER; note = 2'-O-methyl modified nucleotide
  modified_base 75: mod_base = OTHER; note = 2'-O-methyl modified nucleotide
  modified_base 77: mod_base = OTHER; note = 2'-O-methyl modified nucleotide
  modified_base 80: mod_base = OTHER; note = 2'-O-methyl modified nucleotide
  modified_base 86: mod_base = OTHER; note = 2'-O-methyl modified nucleotide
  modified_base 87: mod_base = OTHER; note = 2'-O-methyl modified nucleotide
  modified_base 89: mod_base = OTHER; note = 2'-O-methyl modified nucleotide
  modified_base 90: mod_base = OTHER; note = 2'-O-methyl modified nucleotide
  modified_base 91: mod_base = OTHER; note = 2'-O-methyl modified nucleotide
  modified_base 92: mod_base = OTHER; note = 2'-O-methyl modified nucleotide
  modified_base 99: mod_base = OTHER; note = nucleotide with phosphorothioate linkage
  modified_base 100: mod_base = OTHER; note = 2'-O-methyl modified nucleotide with phosphorothioate linkage
  modified_base 101: mod_base = OTHER; note = 2'-O-methyl modified nucleotide

SEQ ID NO: 2438 - RNA, 101 nt, synthetic construct; identical to SEQ ID NO: 1438
  source 1..101: mol_type = other RNA
  modified_base 1: mod_base = OTHER; note = 2'-O-methyl modified nucleotide with phosphorothioate linkage
  modified_base 2: mod_base = OTHER; note = 2'-O-methyl modified nucleotide with phosphorothioate linkage
  modified_base 3: mod_base = OTHER; note = 2'-O-methyl modified nucleotide with phosphorothioate linkage
  modified_base 4: mod_base = OTHER; note = 2'-O-methyl modified nucleotide
  modified_base 5: mod_base = OTHER; note = 2'-O-methyl modified nucleotide
  modified_base 8: mod_base = OTHER; note = 2'-O-methyl modified nucleotide
  modified_base 9: mod_base = OTHER; note = 2'-O-methyl modified nucleotide
  modified_base 11: mod_base = OTHER; note = 2'-O-methyl modified nucleotide
  modified_base 13: mod_base = OTHER; note = 2'-O-methyl modified nucleotide
  modified_base 18: mod_base = OTHER; note = 2'-O-methyl modified nucleotide
  modified_base 22: mod_base = OTHER; note = 2'-O-methyl modified nucleotide
  modified_base 25: mod_base = OTHER; note = 2'-O-methyl modified nucleotide
  modified_base 29: mod_base = OTHER; note = 2'-O-methyl modified nucleotide
  modified_base 30: mod_base = OTHER; note = 2'-O-methyl modified nucleotide
  modified_base 31: mod_base = OTHER; note = 2'-O-methyl modified nucleotide
  modified_base 32: mod_base = OTHER; note = 2'-O-methyl modified nucleotide
  modified_base 37: mod_base = OTHER; note = 2'-O-methyl modified nucleotide
  modified_base 38: mod_base = OTHER; note = 2'-O-methyl modified nucleotide
  modified_base 39: mod_base = OTHER; note = 2'-O-methyl modified nucleotide
  modified_base 40: mod_base = OTHER; note = 2'-O-methyl modified nucleotide
  modified_base 41: mod_base = OTHER; note = 2'-O-methyl modified nucleotide
  modified_base 42: mod_base = OTHER; note = 2'-O-methyl modified nucleotide
  modified_base 43: mod_base = OTHER; note = 2'-O-methyl modified nucleotide
  modified_base 47: mod_base = OTHER; note = 2'-O-methyl modified nucleotide
  modified_base 48: mod_base = OTHER; note = 2'-O-methyl modified nucleotide
  modified_base 51: mod_base = OTHER; note = 2'-O-methyl modified nucleotide
  modified_base 54: mod_base = OTHER; note = nucleotide with phosphorothioate linkage
  modified_base 58: mod_base = OTHER; note = 2'-O-methyl modified nucleotide
  modified_base 59: mod_base = OTHER; note = 2'-O-methyl modified nucleotide
  modified_base 61: mod_base = OTHER; note = 2'-O-methyl modified nucleotide
  modified_base 62: mod_base = OTHER; note = 2'-O-methyl modified nucleotide
  modified_base 63: mod_base = OTHER; note = 2'-O-methyl modified nucleotide
  modified_base 64: mod_base = OTHER; note = 2'-O-methyl modified nucleotide
  modified_base 65: mod_base = OTHER; note = 2'-O-methyl modified nucleotide
  modified_base 66: mod_base = OTHER; note = 2'-O-methyl modified nucleotide
  modified_base 67: mod_base = OTHER; note = 2'-O-methyl modified nucleotide
  modified_base 68: mod_base = OTHER; note = 2'-O-methyl modified nucleotide
  modified_base 69: mod_base = OTHER; note = 2'-O-methyl modified nucleotide
  modified_base 70: mod_base = OTHER; note = 2'-O-methyl modified nucleotide
  modified_base 75: mod_base = OTHER; note = 2'-O-methyl modified nucleotide
  modified_base 77: mod_base = OTHER; note = 2'-O-methyl modified nucleotide
  modified_base 80: mod_base = OTHER; note = 2'-O-methyl modified nucleotide
  modified_base 86: mod_base = OTHER; note = 2'-O-methyl modified nucleotide
  modified_base 87: mod_base = OTHER; note = 2'-O-methyl modified nucleotide
  modified_base 89: mod_base = OTHER; note = 2'-O-methyl modified nucleotide
  modified_base 90: mod_base = OTHER; note = 2'-O-methyl modified nucleotide
  modified_base 91: mod_base = OTHER; note = 2'-O-methyl modified nucleotide
  modified_base 92: mod_base = OTHER; note = 2'-O-methyl modified nucleotide
  modified_base 99: mod_base = OTHER; note = nucleotide with phosphorothioate linkage
  modified_base 100: mod_base = OTHER; note = 2'-O-methyl modified nucleotide with phosphorothioate linkage
  modified_base 101: mod_base = OTHER; note = 2'-O-methyl modified nucleotide

SEQ ID NO: 2439 - RNA, 101 nt, synthetic construct; identical to SEQ ID NO: 1439
  source 1..101: mol_type = other RNA
  modified_base 1: mod_base = OTHER; note = 2'-O-methyl modified nucleotide with phosphorothioate linkage
  modified_base 2: mod_base = OTHER; note = 2'-O-methyl modified nucleotide with phosphorothioate linkage
  modified_base 3: mod_base = OTHER; note = 2'-O-methyl modified nucleotide with phosphorothioate linkage
  modified_base 4: mod_base = OTHER; note = 2'-O-methyl modified nucleotide
  modified_base 5: mod_base = OTHER; note = 2'-O-methyl modified nucleotide
  modified_base 8: mod_base = OTHER; note = 2'-O-methyl modified nucleotide
  modified_base 9: mod_base = OTHER; note = 2'-O-methyl modified nucleotide
  modified_base 11: mod_base = OTHER; note = 2'-O-methyl modified nucleotide
  modified_base 13: mod_base = OTHER; note = 2'-O-methyl modified nucleotide
  modified_base 18: mod_base = OTHER; note = 2'-O-methyl modified nucleotide
  modified_base 22: mod_base = OTHER; note = 2'-O-methyl modified nucleotide
  modified_base 25: mod_base = OTHER; note = 2'-O-methyl modified nucleotide
  modified_base 29: mod_base = OTHER; note = 2'-O-methyl modified nucleotide
  modified_base 30: mod_base = OTHER; note = 2'-O-methyl modified nucleotide
  modified_base 31: mod_base = OTHER; note = 2'-O-methyl modified nucleotide
  modified_base 32: mod_base = OTHER; note = 2'-O-methyl modified nucleotide
  modified_base 37: mod_base = OTHER; note = 2'-O-methyl modified nucleotide
  modified_base 38: mod_base = OTHER; note = 2'-O-methyl modified nucleotide
  modified_base 39: mod_base = OTHER; note = 2'-O-methyl modified nucleotide
  modified_base 40: mod_base = OTHER; note = 2'-O-methyl modified nucleotide
  modified_base 41: mod_base = OTHER; note = 2'-O-methyl modified nucleotide
  modified_base 42: mod_base = OTHER; note = 2'-O-methyl modified nucleotide
  modified_base 43: mod_base = OTHER; note = 2'-O-methyl modified nucleotide
  modified_base 47: mod_base = OTHER; note = 2'-O-methyl modified nucleotide
  modified_base 48: mod_base = OTHER; note = 2'-O-methyl modified nucleotide
  modified_base 51: mod_base = OTHER; note = 2'-O-methyl modified nucleotide
  modified_base 54: mod_base = OTHER; note = nucleotide with phosphorothioate linkage
  modified_base 58: mod_base = OTHER; note = 2'-O-methyl modified nucleotide
  modified_base 59: mod_base = OTHER; note = 2'-O-methyl modified nucleotide
  modified_base 61: mod_base = OTHER; note = 2'-O-methyl modified nucleotide
  modified_base 62: mod_base = OTHER; note = 2'-O-methyl modified nucleotide
  modified_base 63: mod_base = OTHER; note = 2'-O-methyl modified nucleotide
  modified_base 64: mod_base = OTHER; note = 2'-O-methyl modified nucleotide
  modified_base 65: mod_base = OTHER; note = 2'-O-methyl modified nucleotide
  modified_base 66: mod_base = OTHER; note = 2'-O-methyl modified nucleotide
  modified_base 67: mod_base = OTHER; note = 2'-O-methyl modified nucleotide
  modified_base 68: mod_base = OTHER; note = 2'-O-methyl modified nucleotide
  modified_base 69: mod_base = OTHER; note = 2'-O-methyl modified nucleotide
  modified_base 70: mod_base = OTHER; note = 2'-O-methyl modified nucleotide
  modified_base 75: mod_base = OTHER; note = 2'-O-methyl modified nucleotide
  modified_base 77: mod_base = OTHER; note = 2'-O-methyl modified nucleotide
  modified_base 80: mod_base = OTHER; note = 2'-O-methyl modified nucleotide
  modified_base 86: mod_base = OTHER; note = 2'-O-methyl modified nucleotide
  modified_base 87: mod_base = OTHER; note = 2'-O-methyl modified nucleotide
  modified_base 89: mod_base = OTHER; note = 2'-O-methyl modified nucleotide
  modified_base 90: mod_base = OTHER; note = 2'-O-methyl modified nucleotide
  modified_base 91: mod_base = OTHER; note = 2'-O-methyl modified nucleotide
  modified_base 92: mod_base = OTHER; note = 2'-O-methyl modified nucleotide
  modified_base 99: mod_base = OTHER; note = nucleotide with phosphorothioate linkage
  modified_base 100: mod_base = OTHER; note = 2'-O-methyl modified nucleotide with phosphorothioate linkage
  modified_base 101: mod_base = OTHER; note = 2'-O-methyl modified nucleotide

SEQ ID NO: 2440 - RNA, 101 nt, synthetic construct; identical to SEQ ID NO: 1440
  source 1..101: mol_type = other RNA
  modified_base 1: mod_base = OTHER; note = 2'-O-methyl modified nucleotide with phosphorothioate linkage
  modified_base 2: mod_base = OTHER; note = 2'-O-methyl modified nucleotide with phosphorothioate linkage
  modified_base 3: mod_base = OTHER; note = 2'-O-methyl modified nucleotide with phosphorothioate linkage
  modified_base 4: mod_base = OTHER; note = 2'-O-methyl modified nucleotide
  modified_base 5: mod_base = OTHER; note = 2'-O-methyl modified nucleotide
  modified_base 8: mod_base = OTHER; note = 2'-O-methyl modified nucleotide
  modified_base 9: mod_base = OTHER; note = 2'-O-methyl modified nucleotide
  modified_base 11: mod_base = OTHER; note = 2'-O-methyl modified nucleotide
  modified_base 13: mod_base = OTHER; note = 2'-O-methyl modified nucleotide
  modified_base 18: mod_base = OTHER; note = 2'-O-methyl modified nucleotide
  modified_base 22: mod_base = OTHER; note = 2'-O-methyl modified nucleotide
  modified_base 25: mod_base = OTHER; note = 2'-O-methyl modified nucleotide
  modified_base 29: mod_base = OTHER; note = 2'-O-methyl modified nucleotide
  modified_base 30: mod_base = OTHER; note = 2'-O-methyl modified nucleotide
  modified_base 31: mod_base = OTHER; note = 2'-O-methyl modified nucleotide
  modified_base 32: mod_base = OTHER; note = 2'-O-methyl modified nucleotide
  modified_base 37: mod_base = OTHER; note = 2'-O-methyl modified nucleotide
  modified_base 38: mod_base = OTHER; note = 2'-O-methyl modified nucleotide
  modified_base 39: mod_base = OTHER; note = 2'-O-methyl modified nucleotide
  modified_base 40: mod_base = OTHER; note = 2'-O-methyl modified nucleotide
  modified_base 41: mod_base = OTHER; note = 2'-O-methyl modified nucleotide
  modified_base 42: mod_base = OTHER; note = 2'-O-methyl modified nucleotide
  modified_base 43: mod_base = OTHER; note = 2'-O-methyl modified nucleotide
  modified_base 47: mod_base = OTHER; note = 2'-O-methyl modified nucleotide
  modified_base 48: mod_base = OTHER; note = 2'-O-methyl modified nucleotide
  modified_base 51: mod_base = OTHER; note = 2'-O-methyl modified nucleotide
  modified_base 54: mod_base = OTHER; note = nucleotide with phosphorothioate linkage
  modified_base 58: mod_base = OTHER; note = 2'-O-methyl modified nucleotide
  modified_base 59: mod_base = OTHER; note = 2'-O-methyl modified nucleotide
  modified_base 61: mod_base = OTHER; note = 2'-O-methyl modified nucleotide
  modified_base 62: mod_base = OTHER; note = 2'-O-methyl modified nucleotide
  modified_base 63: mod_base = OTHER; note = 2'-O-methyl modified nucleotide
  modified_base 64: mod_base = OTHER; note = 2'-O-methyl modified nucleotide
  modified_base 65: mod_base = OTHER; note = 2'-O-methyl modified nucleotide
  modified_base 66: mod_base = OTHER; note = 2'-O-methyl modified nucleotide
  modified_base 67: mod_base = OTHER; note = 2'-O-methyl modified nucleotide
  modified_base 68: mod_base = OTHER; note = 2'-O-methyl modified nucleotide
  modified_base 69: mod_base = OTHER; note = 2'-O-methyl modified nucleotide
  modified_base 70: mod_base = OTHER; note = 2'-O-methyl modified nucleotide
  modified_base 75: mod_base = OTHER; note = 2'-O-methyl modified nucleotide
  modified_base 77: mod_base = OTHER; note = 2'-O-methyl modified nucleotide
  modified_base 80: mod_base = OTHER; note = 2'-O-methyl modified nucleotide
  modified_base 86: mod_base = OTHER; note = 2'-O-methyl modified nucleotide
  modified_base 87: mod_base = OTHER; note = 2'-O-methyl modified nucleotide
  modified_base 89: mod_base = OTHER; note = 2'-O-methyl modified nucleotide
  modified_base 90: mod_base = OTHER; note = 2'-O-methyl modified nucleotide
  modified_base 91: mod_base = OTHER; note = 2'-O-methyl modified nucleotide
  modified_base 92: mod_base = OTHER; note = 2'-O-methyl modified nucleotide
  modified_base 99: mod_base = OTHER; note = nucleotide with phosphorothioate linkage
  modified_base 100: mod_base = OTHER; note = 2'-O-methyl modified nucleotide with phosphorothioate linkage
  modified_base 101: mod_base = OTHER; note = 2'-O-methyl modified nucleotide

SEQ ID NO: 2441 - RNA, 101 nt, synthetic construct; identical to SEQ ID NO: 1441
  source 1..101: mol_type = other RNA
  modified_base 1: mod_base = OTHER; note = 2'-O-methyl modified nucleotide with phosphorothioate linkage
  modified_base 2: mod_base = OTHER; note = 2'-O-methyl modified nucleotide with phosphorothioate linkage
  modified_base 3: mod_base = OTHER; note = 2'-O-methyl modified nucleotide with phosphorothioate linkage
  modified_base 4: mod_base = OTHER; note = 2'-O-methyl modified nucleotide
  modified_base 5: mod_base = OTHER; note = 2'-O-methyl modified nucleotide
  modified_base 8: mod_base = OTHER; note = 2'-O-methyl modified nucleotide
  modified_base 9: mod_base = OTHER; note = 2'-O-methyl modified nucleotide
  modified_base 11: mod_base = OTHER; note = 2'-O-methyl modified nucleotide
  modified_base 13: mod_base = OTHER; note = 2'-O-methyl modified nucleotide
  modified_base 18: mod_base = OTHER; note = 2'-O-methyl modified nucleotide
  modified_base 22: mod_base = OTHER; note = 2'-O-methyl modified nucleotide
  modified_base 25: mod_base = OTHER; note = 2'-O-methyl modified nucleotide
  modified_base 29: mod_base = OTHER; note = 2'-O-methyl modified nucleotide
  modified_base 30: mod_base = OTHER; note = 2'-O-methyl modified nucleotide
  modified_base 31: mod_base = OTHER; note = 2'-O-methyl modified nucleotide
  modified_base 32: mod_base = OTHER; note = 2'-O-methyl modified nucleotide
  modified_base 37: mod_base = OTHER; note = 2'-O-methyl modified nucleotide
  modified_base 38: mod_base = OTHER; note = 2'-O-methyl modified nucleotide
  modified_base 39: mod_base = OTHER; note = 2'-O-methyl modified nucleotide
  modified_base 40: mod_base = OTHER; note = 2'-O-methyl modified nucleotide
  modified_base 41: mod_base = OTHER; note = 2'-O-methyl modified nucleotide
  modified_base 42: mod_base = OTHER; note = 2'-O-methyl modified nucleotide
  modified_base 43: mod_base = OTHER; note = 2'-O-methyl modified nucleotide
  modified_base 47: mod_base = OTHER; note = 2'-O-methyl modified nucleotide
  modified_base 48: mod_base = OTHER; note = 2'-O-methyl modified nucleotide
  modified_base 51: mod_base = OTHER; note = 2'-O-methyl modified nucleotide
  modified_base 54: mod_base = OTHER; note = nucleotide with phosphorothioate linkage
  modified_base 58: mod_base = OTHER; note = 2'-O-methyl modified nucleotide
  modified_base 59: mod_base = OTHER; note = 2'-O-methyl modified nucleotide
  modified_base 61: mod_base = OTHER; note = 2'-O-methyl modified nucleotide
  modified_base 62: mod_base = OTHER; note = 2'-O-methyl modified nucleotide
  modified_base 63: mod_base = OTHER; note = 2'-O-methyl modified nucleotide
  modified_base 64: mod_base = OTHER; note = 2'-O-methyl modified nucleotide
  modified_base 65: mod_base = OTHER; note = 2'-O-methyl modified nucleotide
  modified_base 66: mod_base = OTHER; note = 2'-O-methyl modified nucleotide
  modified_base 67: mod_base = OTHER; note = 2'-O-methyl modified nucleotide
  modified_base 68: mod_base = OTHER; note = 2'-O-methyl modified nucleotide
  modified_base 69: mod_base = OTHER; note = 2'-O-methyl modified nucleotide
  modified_base 70: mod_base = OTHER; note = 2'-O-methyl modified nucleotide
  modified_base 75: mod_base = OTHER; note = 2'-O-methyl modified nucleotide
  modified_base 77: mod_base = OTHER; note = 2'-O-methyl modified nucleotide
  modified_base 80: mod_base = OTHER; note = 2'-O-methyl modified nucleotide
  modified_base 86: mod_base = OTHER; note = 2'-O-methyl modified nucleotide
  modified_base 87: mod_base = OTHER; note = 2'-O-methyl modified nucleotide
  modified_base 89: mod_base = OTHER; note = 2'-O-methyl modified nucleotide
  modified_base 90: mod_base = OTHER; note = 2'-O-methyl modified nucleotide
  modified_base 91: mod_base = OTHER; note = 2'-O-methyl modified nucleotide
  modified_base 92: mod_base = OTHER; note = 2'-O-methyl modified nucleotide
  modified_base 99: mod_base = OTHER; note = nucleotide with phosphorothioate linkage
  modified_base 100: mod_base = OTHER; note = 2'-O-methyl modified nucleotide with phosphorothioate linkage
  modified_base 101: mod_base = OTHER; note = 2'-O-methyl modified nucleotide

SEQ ID NO: 2442 - RNA, 101 nt, synthetic construct; identical to SEQ ID NO: 1442
  source 1..101: mol_type = other RNA
  modified_base 1: mod_base = OTHER; note = 2'-O-methyl modified nucleotide with phosphorothioate linkage
  modified_base 2: mod_base = OTHER; note = 2'-O-methyl modified nucleotide with phosphorothioate linkage
  modified_base 3: mod_base = OTHER; note = 2'-O-methyl modified nucleotide with phosphorothioate linkage
  modified_base 4: mod_base = OTHER; note = 2'-O-methyl modified nucleotide
  modified_base 5: mod_base = OTHER; note = 2'-O-methyl modified nucleotide
  modified_base 8: mod_base = OTHER; note = 2'-O-methyl modified nucleotide
  modified_base 9: mod_base = OTHER; note = 2'-O-methyl modified nucleotide
  modified_base 11: mod_base = OTHER; note = 2'-O-methyl modified nucleotide
  modified_base 13: mod_base = OTHER; note = 2'-O-methyl modified nucleotide
  modified_base 18: mod_base = OTHER; note = 2'-O-methyl modified nucleotide
  modified_base 22: mod_base = OTHER; note = 2'-O-methyl modified nucleotide
  modified_base 25: mod_base = OTHER; note = 2'-O-methyl modified nucleotide
  modified_base 29: mod_base = OTHER; note = 2'-O-methyl modified nucleotide
  modified_base 30: mod_base = OTHER; note = 2'-O-methyl modified nucleotide
  modified_base 31: mod_base = OTHER; note = 2'-O-methyl modified nucleotide
  modified_base 32: mod_base = OTHER; note = 2'-O-methyl modified nucleotide
  modified_base 37: mod_base = OTHER; note = 2'-O-methyl modified nucleotide
  modified_base 38: mod_base = OTHER; note = 2'-O-methyl modified nucleotide
  modified_base 39: mod_base = OTHER; note = 2'-O-methyl modified nucleotide
  modified_base 40: mod_base = OTHER; note = 2'-O-methyl modified nucleotide
  modified_base 41: mod_base = OTHER; note = 2'-O-methyl modified nucleotide
  modified_base 42: mod_base = OTHER; note = 2'-O-methyl modified nucleotide
  modified_base 43: mod_base = OTHER; note = 2'-O-methyl modified nucleotide
  modified_base 47: mod_base = OTHER; note = 2'-O-methyl modified nucleotide
  modified_base 48: mod_base = OTHER; note = 2'-O-methyl modified nucleotide
  modified_base 51: mod_base = OTHER; note = 2'-O-methyl modified nucleotide
  modified_base 54: mod_base = OTHER; note = nucleotide with phosphorothioate linkage
  modified_base 58: mod_base = OTHER; note = 2'-O-methyl modified nucleotide
  modified_base 59: mod_base = OTHER; note = 2'-O-methyl modified nucleotide
  modified_base 61: mod_base = OTHER; note = 2'-O-methyl modified nucleotide
  modified_base 62: mod_base = OTHER; note = 2'-O-methyl modified nucleotide
  modified_base 63: mod_base = OTHER; note = 2'-O-methyl modified nucleotide
  modified_base 64: mod_base = OTHER; note = 2'-O-methyl modified nucleotide
  modified_base 65: mod_base = OTHER; note = 2'-O-methyl modified nucleotide
  modified_base 66: mod_base = OTHER; note = 2'-O-methyl modified nucleotide
  modified_base 67: mod_base = OTHER; note = 2'-O-methyl modified nucleotide
  modified_base 68: mod_base = OTHER; note = 2'-O-methyl modified nucleotide
  modified_base 69: mod_base = OTHER; note = 2'-O-methyl modified nucleotide
  modified_base 70: mod_base = OTHER; note = 2'-O-methyl modified nucleotide
  modified_base 75: mod_base = OTHER; note = 2'-O-methyl modified nucleotide
  modified_base 77: mod_base = OTHER; note = 2'-O-methyl modified nucleotide
  modified_base 80: mod_base = OTHER; note = 2'-O-methyl modified nucleotide
  modified_base 86: mod_base = OTHER; note = 2'-O-methyl modified nucleotide
  modified_base 87: mod_base = OTHER; note = 2'-O-methyl modified nucleotide
  modified_base 89: mod_base = OTHER; note = 2'-O-methyl modified nucleotide
  modified_base 90: mod_base = OTHER; note = 2'-O-methyl modified nucleotide
  modified_base 91: mod_base = OTHER; note = 2'-O-methyl modified nucleotide
  modified_base 92: mod_base = OTHER; note = 2'-O-methyl modified nucleotide
  modified_base 99: mod_base = OTHER; note = nucleotide with phosphorothioate linkage
  modified_base 100: mod_base = OTHER; note = 2'-O-methyl modified nucleotide with phosphorothioate linkage
  modified_base 101: mod_base = OTHER; note = 2'-O-methyl modified nucleotide

SEQ ID NO: 2443 - RNA, 101 nt, synthetic construct; identical to SEQ ID NO: 1443
  source 1..101: mol_type = other RNA
  modified_base 1: mod_base = OTHER; note = 2'-O-methyl modified nucleotide with phosphorothioate linkage
  modified_base 2: mod_base = OTHER; note = 2'-O-methyl modified nucleotide with phosphorothioate linkage
  modified_base 3: mod_base = OTHER; note = 2'-O-methyl modified nucleotide with phosphorothioate linkage
  modified_base 4: mod_base = OTHER; note = 2'-O-methyl modified nucleotide
  modified_base 5: mod_base = OTHER; note = 2'-O-methyl modified nucleotide
  modified_base 8: mod_base = OTHER; note = 2'-O-methyl modified nucleotide
  modified_base 9: mod_base = OTHER; note = 2'-O-methyl modified nucleotide
  modified_base 11: mod_base = OTHER; note = 2'-O-methyl modified nucleotide
  modified_base 13: mod_base = OTHER; note = 2'-O-methyl modified nucleotide
  modified_base 18: mod_base = OTHER; note = 2'-O-methyl modified nucleotide
  modified_base 22: mod_base = OTHER; note = 2'-O-methyl modified nucleotide
  modified_base 25: mod_base = OTHER; note = 2'-O-methyl modified nucleotide
  modified_base 29: mod_base = OTHER; note = 2'-O-methyl modified nucleotide
  modified_base 30: mod_base = OTHER; note = 2'-O-methyl modified nucleotide
  modified_base 31: mod_base = OTHER; note = 2'-O-methyl modified nucleotide
  modified_base 32: mod_base = OTHER; note = 2'-O-methyl modified nucleotide
  modified_base 37: mod_base = OTHER; note = 2'-O-methyl modified nucleotide
  modified_base 38: mod_base = OTHER; note = 2'-O-methyl modified nucleotide
  modified_base 39: mod_base = OTHER; note = 2'-O-methyl modified nucleotide
  modified_base 40: mod_base = OTHER; note = 2'-O-methyl modified nucleotide
  modified_base 41: mod_base = OTHER; note = 2'-O-methyl modified nucleotide
  modified_base 42: mod_base = OTHER; note = 2'-O-methyl modified nucleotide
  modified_base 43: mod_base = OTHER; note = 2'-O-methyl modified nucleotide
  modified_base 47: mod_base = OTHER; note = 2'-O-methyl modified nucleotide
  modified_base 48: mod_base = OTHER; note = 2'-O-methyl modified nucleotide
  modified_base 51: mod_base = OTHER; note = 2'-O-methyl modified nucleotide
  modified_base 54: mod_base = OTHER; note = nucleotide with phosphorothioate linkage
  modified_base 58: mod_base = OTHER; note = 2'-O-methyl modified nucleotide
  modified_base 59: mod_base = OTHER; note = 2'-O-methyl modified nucleotide
  modified_base 61: mod_base = OTHER; note = 2'-O-methyl modified nucleotide
  modified_base 62: mod_base = OTHER; note = 2'-O-methyl modified nucleotide
  modified_base 63: mod_base = OTHER; note = 2'-O-methyl modified nucleotide
  modified_base 64: mod_base = OTHER; note = 2'-O-methyl modified nucleotide
  modified_base 65: mod_base = OTHER; note = 2'-O-methyl modified nucleotide
  modified_base 66: mod_base = OTHER; note = 2'-O-methyl modified nucleotide
  modified_base 67: mod_base = OTHER; note = 2'-O-methyl modified nucleotide
  modified_base 68: mod_base = OTHER; note = 2'-O-methyl modified nucleotide
  modified_base 69: mod_base = OTHER; note = 2'-O-methyl modified nucleotide
  modified_base 70: mod_base = OTHER; note = 2'-O-methyl modified nucleotide
  modified_base 75: mod_base = OTHER; note = 2'-O-methyl modified nucleotide
  modified_base 77: mod_base = OTHER; note = 2'-O-methyl modified nucleotide
  modified_base 80: mod_base = OTHER; note = 2'-O-methyl modified nucleotide
  modified_base 86: mod_base = OTHER; note = 2'-O-methyl modified nucleotide
  modified_base 87: mod_base = OTHER; note = 2'-O-methyl modified nucleotide
  modified_base 89: mod_base = OTHER; note = 2'-O-methyl modified nucleotide
  modified_base 90: mod_base = OTHER; note = 2'-O-methyl modified nucleotide
  modified_base 91: mod_base = OTHER; note = 2'-O-methyl modified nucleotide
  modified_base 92: mod_base = OTHER; note = 2'-O-methyl modified nucleotide
  modified_base 99: mod_base = OTHER; note = nucleotide with phosphorothioate linkage
  modified_base 100: mod_base = OTHER; note = 2'-O-methyl modified nucleotide with phosphorothioate linkage
  modified_base 101: mod_base = OTHER; note = 2'-O-methyl modified nucleotide

SEQ ID NO: 2444 - RNA, 101 nt, synthetic construct; identical to SEQ ID NO: 1444
  source 1..101: mol_type = other RNA
  modified_base 1: mod_base = OTHER; note = 2'-O-methyl modified nucleotide with phosphorothioate linkage
  modified_base 2: mod_base = OTHER; note = 2'-O-methyl modified nucleotide with phosphorothioate linkage
  modified_base 3: mod_base = OTHER; note = 2'-O-methyl modified nucleotide with phosphorothioate linkage
  modified_base 4: mod_base = OTHER; note = 2'-O-methyl modified nucleotide
  modified_base 5: mod_base = OTHER; note = 2'-O-methyl modified nucleotide
  modified_base 8: mod_base = OTHER; note = 2'-O-methyl modified nucleotide
  modified_base 9: mod_base = OTHER; note = 2'-O-methyl modified nucleotide
  modified_base 11: mod_base = OTHER; note = 2'-O-methyl modified nucleotide
  modified_base 13: mod_base = OTHER; note = 2'-O-methyl modified nucleotide
  modified_base 18: mod_base = OTHER; note = 2'-O-methyl modified nucleotide
  modified_base 22: mod_base = OTHER; note = 2'-O-methyl modified nucleotide
  modified_base 25: mod_base = OTHER; note = 2'-O-methyl modified nucleotide
  modified_base 29: mod_base = OTHER; note = 2'-O-methyl modified nucleotide
  modified_base 30: mod_base = OTHER; note = 2'-O-methyl modified nucleotide
  modified_base 31: mod_base = OTHER; note = 2'-O-methyl modified nucleotide
  modified_base 32: mod_base = OTHER; note = 2'-O-methyl modified nucleotide
  modified_base 37: mod_base = OTHER; note = 2'-O-methyl modified nucleotide
  modified_base 38: mod_base = OTHER; note = 2'-O-methyl modified nucleotide
  modified_base 39: mod_base = OTHER; note = 2'-O-methyl modified nucleotide
  modified_base 40: mod_base = OTHER; note = 2'-O-methyl modified nucleotide
  modified_base 41: mod_base = OTHER; note = 2'-O-methyl modified nucleotide
  modified_base 42: mod_base = OTHER; note = 2'-O-methyl modified nucleotide
  modified_base 43: mod_base = OTHER; note = 2'-O-methyl modified nucleotide
  modified_base 47: mod_base = OTHER; note = 2'-O-methyl modified nucleotide
  modified_base 48: mod_base = OTHER; note = 2'-O-methyl modified nucleotide
  modified_base 51: mod_base = OTHER; note = 2'-O-methyl modified nucleotide
  modified_base 54: mod_base = OTHER; note = nucleotide with phosphorothioate linkage
  modified_base 58: mod_base = OTHER; note = 2'-O-methyl modified nucleotide
  modified_base 59: mod_base = OTHER; note = 2'-O-methyl modified nucleotide
  modified_base 61: mod_base = OTHER; note = 2'-O-methyl modified nucleotide
  modified_base 62: mod_base = OTHER; note = 2'-O-methyl modified nucleotide
  modified_base 63: mod_base = OTHER; note = 2'-O-methyl modified nucleotide
  modified_base 64: mod_base = OTHER; note = 2'-O-methyl modified nucleotide
  modified_base 65: mod_base = OTHER; note = 2'-O-methyl modified nucleotide
  modified_base 66: mod_base = OTHER; note = 2'-O-methyl modified nucleotide
  modified_base 67: mod_base = OTHER; note = 2'-O-methyl modified nucleotide
  modified_base 68: mod_base = OTHER; note = 2'-O-methyl modified nucleotide
  modified_base 69: mod_base = OTHER; note = 2'-O-methyl modified nucleotide
  modified_base 70: mod_base = OTHER; note = 2'-O-methyl modified nucleotide
  modified_base 75: mod_base = OTHER; note = 2'-O-methyl modified nucleotide
  modified_base 77: mod_base = OTHER; note = 2'-O-methyl modified nucleotide
  modified_base 80: mod_base = OTHER; note = 2'-O-methyl modified nucleotide
  modified_base 86: mod_base = OTHER; note = 2'-O-methyl modified nucleotide
  modified_base 87: mod_base = OTHER; note = 2'-O-methyl modified nucleotide
  modified_base 89: mod_base = OTHER; note = 2'-O-methyl modified nucleotide
  modified_base 90: mod_base = OTHER; note = 2'-O-methyl modified nucleotide
  modified_base 91: mod_base = OTHER; note = 2'-O-methyl modified nucleotide
  modified_base 92: mod_base = OTHER; note = 2'-O-methyl modified nucleotide
  modified_base 99: mod_base = OTHER; note = nucleotide with phosphorothioate linkage
  modified_base 100: mod_base = OTHER; note = 2'-O-methyl modified nucleotide with phosphorothioate linkage
  modified_base 101: mod_base = OTHER; note = 2'-O-methyl modified nucleotide

SEQ ID NO: 2445 - RNA, 101 nt, synthetic construct; identical to SEQ ID NO: 1445
  source 1..101: mol_type = other RNA
  modified_base 1: mod_base = OTHER; note = 2'-O-methyl modified nucleotide with phosphorothioate linkage
  modified_base 2: mod_base = OTHER; note = 2'-O-methyl modified nucleotide with phosphorothioate linkage
  modified_base 3: mod_base = OTHER; note = 2'-O-methyl modified nucleotide with phosphorothioate linkage
  modified_base 4: mod_base = OTHER; note = 2'-O-methyl modified nucleotide
  modified_base 5: mod_base = OTHER; note = 2'-O-methyl modified nucleotide
  modified_base 8: mod_base = OTHER; note = 2'-O-methyl modified nucleotide
  modified_base 9: mod_base = OTHER; note = 2'-O-methyl modified nucleotide
  modified_base 11: mod_base = OTHER; note = 2'-O-methyl modified nucleotide
  modified_base 13: mod_base = OTHER; note = 2'-O-methyl modified nucleotide
  modified_base 18: mod_base = OTHER; note = 2'-O-methyl modified nucleotide
  modified_base 22: mod_base = OTHER; note = 2'-O-methyl modified nucleotide
  modified_base 25: mod_base = OTHER; note = 2'-O-methyl modified nucleotide
  modified_base 29: mod_base = OTHER; note = 2'-O-methyl modified nucleotide
  modified_base 30: mod_base = OTHER; note = 2'-O-methyl modified nucleotide
  modified_base 31: mod_base = OTHER; note = 2'-O-methyl modified nucleotide
  modified_base 32: mod_base = OTHER; note = 2'-O-methyl modified nucleotide
  modified_base 37: mod_base = OTHER; note = 2'-O-methyl modified nucleotide
  modified_base 38: mod_base = OTHER; note = 2'-O-methyl modified nucleotide
  modified_base 39: mod_base = OTHER; note = 2'-O-methyl modified nucleotide
  modified_base 40: mod_base = OTHER; note = 2'-O-methyl modified nucleotide
  modified_base 41: mod_base = OTHER; note = 2'-O-methyl modified nucleotide
  modified_base 42: mod_base = OTHER; note = 2'-O-methyl modified nucleotide
  modified_base 43: mod_base = OTHER; note = 2'-O-methyl modified nucleotide
  modified_base 47: mod_base = OTHER; note = 2'-O-methyl modified nucleotide
  modified_base 48: mod_base = OTHER; note = 2'-O-methyl modified nucleotide
  modified_base 51: mod_base = OTHER; note = 2'-O-methyl modified nucleotide
  modified_base 54: mod_base = OTHER; note = nucleotide with phosphorothioate linkage
  modified_base 58: mod_base = OTHER; note = 2'-O-methyl modified nucleotide
  modified_base 59: mod_base = OTHER; note = 2'-O-methyl modified nucleotide
  modified_base 61: mod_base = OTHER; note = 2'-O-methyl modified nucleotide
  modified_base 62: mod_base = OTHER; note = 2'-O-methyl modified nucleotide
  modified_base 63: mod_base = OTHER; note = 2'-O-methyl modified nucleotide
  modified_base 64: mod_base = OTHER; note = 2'-O-methyl modified nucleotide
  modified_base 65: mod_base = OTHER; note = 2'-O-methyl modified nucleotide
  modified_base 66: mod_base = OTHER; note = 2'-O-methyl modified nucleotide
  modified_base 67: mod_base = OTHER; note = 2'-O-methyl modified nucleotide
  modified_base 68: mod_base = OTHER; note = 2'-O-methyl modified nucleotide
  modified_base 69: mod_base = OTHER; note = 2'-O-methyl modified nucleotide
  modified_base 70: mod_base = OTHER; note = 2'-O-methyl modified nucleotide
  modified_base 75: mod_base = OTHER; note = 2'-O-methyl modified nucleotide
  modified_base 77: mod_base = OTHER; note = 2'-O-methyl modified nucleotide
  modified_base 80: mod_base = OTHER; note = 2'-O-methyl modified nucleotide
  modified_base 86: mod_base = OTHER; note = 2'-O-methyl modified nucleotide
  modified_base 87: mod_base = OTHER; note = 2'-O-methyl modified nucleotide
  modified_base 89: mod_base = OTHER; note = 2'-O-methyl modified nucleotide
  modified_base 90: mod_base = OTHER; note = 2'-O-methyl modified nucleotide
  modified_base 91: mod_base = OTHER; note = 2'-O-methyl modified nucleotide
  modified_base 92: mod_base = OTHER; note = 2'-O-methyl modified nucleotide
  modified_base 99: mod_base = OTHER; note = nucleotide with phosphorothioate linkage
  modified_base 100: mod_base = OTHER; note = 2'-O-methyl modified nucleotide with phosphorothioate linkage
  modified_base 101: mod_base = OTHER; note = 2'-O-methyl modified nucleotide

SEQ ID NO: 2446 - RNA, 101 nt, synthetic construct; identical to SEQ ID NO: 1446
  source 1..101: mol_type = other RNA
  modified_base 1: mod_base = OTHER; note = 2'-O-methyl modified nucleotide with phosphorothioate linkage
  modified_base 2: mod_base = OTHER; note = 2'-O-methyl modified nucleotide with phosphorothioate linkage
  modified_base 3: mod_base = OTHER; note = 2'-O-methyl modified nucleotide with phosphorothioate linkage
  modified_base 4: mod_base = OTHER; note = 2'-O-methyl modified nucleotide
  modified_base 5: mod_base = OTHER; note = 2'-O-methyl modified nucleotide
  modified_base 8: mod_base = OTHER; note = 2'-O-methyl modified nucleotide
  modified_base 9: mod_base = OTHER; note = 2'-O-methyl modified nucleotide
  modified_base 11: mod_base = OTHER; note = 2'-O-methyl modified nucleotide
  modified_base 13: mod_base = OTHER; note = 2'-O-methyl modified nucleotide
  modified_base 18: mod_base = OTHER; note = 2'-O-methyl modified nucleotide
  modified_base 22: mod_base = OTHER; note = 2'-O-methyl modified nucleotide
  modified_base 25: mod_base = OTHER; note = 2'-O-methyl modified nucleotide
  modified_base 29: mod_base = OTHER; note = 2'-O-methyl modified nucleotide
  modified_base 30: mod_base = OTHER; note = 2'-O-methyl modified nucleotide
  modified_base 31: mod_base = OTHER; note = 2'-O-methyl modified nucleotide
  modified_base 32: mod_base = OTHER; note = 2'-O-methyl modified nucleotide
  modified_base 37: mod_base = OTHER; note = 2'-O-methyl modified nucleotide
  modified_base 38: mod_base = OTHER; note = 2'-O-methyl modified nucleotide
  modified_base 39: mod_base = OTHER; note = 2'-O-methyl modified nucleotide
  modified_base 40: mod_base = OTHER; note = 2'-O-methyl modified nucleotide
  modified_base 41: mod_base = OTHER; note = 2'-O-methyl modified nucleotide
  modified_base 42: mod_base = OTHER; note = 2'-O-methyl modified nucleotide
  modified_base 43: mod_base = OTHER; note = 2'-O-methyl modified nucleotide
  modified_base 47: mod_base = OTHER; note = 2'-O-methyl modified nucleotide
  modified_base 48: mod_base = OTHER; note = 2'-O-methyl modified nucleotide
  modified_base 51: mod_base = OTHER; note = 2'-O-methyl modified nucleotide
  modified_base 54: mod_base = OTHER; note = nucleotide with phosphorothioate linkage
  modified_base 58: mod_base = OTHER; note = 2'-O-methyl modified nucleotide
  modified_base 59: mod_base = OTHER; note = 2'-O-methyl modified nucleotide
  modified_base 61: mod_base = OTHER; note = 2'-O-methyl modified nucleotide
  modified_base 62: mod_base = OTHER; note = 2'-O-methyl modified nucleotide
  modified_base 63: mod_base = OTHER; note = 2'-O-methyl modified nucleotide
  modified_base 64: mod_base = OTHER; note = 2'-O-methyl modified nucleotide
  modified_base 65: mod_base = OTHER; note = 2'-O-methyl modified nucleotide
  modified_base 66: mod_base = OTHER; note = 2'-O-methyl modified nucleotide
  modified_base 67: mod_base = OTHER; note = 2'-O-methyl modified nucleotide
  modified_base 68: mod_base = OTHER; note = 2'-O-methyl modified nucleotide
  modified_base 69: mod_base = OTHER; note = 2'-O-methyl modified nucleotide
  modified_base 70: mod_base = OTHER; note = 2'-O-methyl modified nucleotide
  modified_base 75: mod_base = OTHER; note = 2'-O-methyl modified nucleotide
  modified_base 77: mod_base = OTHER; note = 2'-O-methyl modified nucleotide
  modified_base 80: mod_base = OTHER; note = 2'-O-methyl modified nucleotide
  modified_base 86: mod_base = OTHER; note = 2'-O-methyl modified nucleotide
  modified_base 87: mod_base = OTHER; note = 2'-O-methyl modified nucleotide
  modified_base 89: mod_base = OTHER; note = 2'-O-methyl modified nucleotide
  modified_base 90: mod_base = OTHER; note = 2'-O-methyl modified nucleotide
  modified_base 91: mod_base = OTHER; note = 2'-O-methyl modified nucleotide
  modified_base 92: mod_base = OTHER; note = 2'-O-methyl modified nucleotide
  modified_base 99: mod_base = OTHER; note = nucleotide with phosphorothioate linkage
  modified_base 100: mod_base = OTHER; note = 2'-O-methyl modified nucleotide with phosphorothioate linkage
  modified_base 101: mod_base = OTHER; note = 2'-O-methyl modified nucleotide

SEQ ID NO: 2447 - RNA, 101 nt, synthetic construct; identical to SEQ ID NO: 1447
  source 1..101: mol_type = other RNA
  modified_base 1: mod_base = OTHER; note = 2'-O-methyl modified nucleotide with phosphorothioate linkage
  modified_base 2: mod_base = OTHER; note = 2'-O-methyl modified nucleotide with phosphorothioate linkage
  modified_base 3: mod_base = OTHER; note = 2'-O-methyl modified nucleotide with phosphorothioate linkage
  modified_base 4: mod_base = OTHER; note = 2'-O-methyl modified nucleotide
  modified_base 5: mod_base = OTHER; note = 2'-O-methyl modified nucleotide
  modified_base 8: mod_base = OTHER; note = 2'-O-methyl modified nucleotide
  modified_base 9: mod_base = OTHER; note = 2'-O-methyl modified nucleotide
  modified_base 11: mod_base = OTHER; note = 2'-O-methyl modified nucleotide
  modified_base 13: mod_base = OTHER; note = 2'-O-methyl modified nucleotide
  modified_base 18: mod_base = OTHER; note = 2'-O-methyl modified nucleotide
  modified_base 22: mod_base = OTHER; note = 2'-O-methyl modified nucleotide
  modified_base 25: mod_base = OTHER; note = 2'-O-methyl modified nucleotide
  modified_base 29: mod_base = OTHER; note = 2'-O-methyl modified nucleotide
  modified_base 30: mod_base = OTHER; note = 2'-O-methyl modified nucleotide
  modified_base 31: mod_base = OTHER; note = 2'-O-methyl modified nucleotide
  modified_base 32: mod_base = OTHER; note = 2'-O-methyl modified nucleotide
  modified_base 37: mod_base = OTHER; note = 2'-O-methyl modified nucleotide
  modified_base 38: mod_base = OTHER; note = 2'-O-methyl modified nucleotide
  modified_base 39: mod_base = OTHER; note = 2'-O-methyl modified nucleotide
  modified_base 40: mod_base = OTHER; note = 2'-O-methyl modified nucleotide
  modified_base 41: mod_base = OTHER; note = 2'-O-methyl modified nucleotide
  modified_base 42: mod_base = OTHER; note = 2'-O-methyl modified nucleotide
  modified_base 43: mod_base = OTHER; note = 2'-O-methyl modified nucleotide
  modified_base 47: mod_base = OTHER; note = 2'-O-methyl modified nucleotide
  modified_base 48: mod_base = OTHER; note = 2'-O-methyl modified nucleotide
  modified_base 51: mod_base = OTHER; note = 2'-O-methyl modified nucleotide
  modified_base 54: mod_base = OTHER; note = nucleotide with phosphorothioate linkage
  modified_base 58: mod_base = OTHER; note = 2'-O-methyl modified nucleotide
  modified_base 59: mod_base = OTHER; note = 2'-O-methyl modified nucleotide
  modified_base 61: mod_base = OTHER; note = 2'-O-methyl modified nucleotide
  modified_base 62: mod_base = OTHER; note = 2'-O-methyl modified nucleotide
  modified_base 63: mod_base = OTHER; note = 2'-O-methyl modified nucleotide
  modified_base 64: mod_base = OTHER; note = 2'-O-methyl modified nucleotide
  modified_base 65: mod_base = OTHER; note = 2'-O-methyl modified nucleotide
  modified_base 66: mod_base = OTHER; note = 2'-O-methyl modified nucleotide
  modified_base 67: mod_base = OTHER; note = 2'-O-methyl modified nucleotide
  modified_base 68: mod_base = OTHER; note = 2'-O-methyl modified nucleotide
  modified_base 69: mod_base = OTHER; note = 2'-O-methyl modified nucleotide
  modified_base 70: mod_base = OTHER; note = 2'-O-methyl modified nucleotide
  modified_base 75: mod_base = OTHER; note = 2'-O-methyl modified nucleotide
  modified_base 77: mod_base = OTHER; note = 2'-O-methyl modified nucleotide
  modified_base 80: mod_base = OTHER; note = 2'-O-methyl modified nucleotide
  modified_base 86: mod_base = OTHER; note = 2'-O-methyl modified nucleotide
  modified_base 87: mod_base = OTHER; note = 2'-O-methyl modified nucleotide
  modified_base 89: mod_base = OTHER; note = 2'-O-methyl modified nucleotide
  modified_base 90: mod_base = OTHER; note = 2'-O-methyl modified nucleotide
  modified_base 91: mod_base = OTHER; note = 2'-O-methyl modified nucleotide
  modified_base 92: mod_base = OTHER; note = 2'-O-methyl modified nucleotide
  modified_base 99: mod_base = OTHER; note = nucleotide with phosphorothioate linkage
  modified_base 100: mod_base = OTHER; note = 2'-O-methyl modified nucleotide with phosphorothioate linkage
  modified_base 101: mod_base = OTHER; note = 2'-O-methyl modified nucleotide

SEQ ID NO: 2448 - RNA, 101 nt, synthetic construct; identical to SEQ ID NO: 1448
  source 1..101: mol_type = other RNA
  modified_base 1: mod_base = OTHER; note = 2'-O-methyl modified nucleotide with phosphorothioate linkage
  modified_base 2: mod_base = OTHER; note = 2'-O-methyl modified nucleotide with phosphorothioate linkage
  modified_base 3: mod_base = OTHER; note = 2'-O-methyl modified nucleotide with phosphorothioate linkage
  modified_base 4: mod_base = OTHER; note = 2'-O-methyl modified nucleotide
  modified_base 5: mod_base = OTHER; note = 2'-O-methyl modified nucleotide
  modified_base 8: mod_base = OTHER; note = 2'-O-methyl modified nucleotide
  modified_base 9: mod_base = OTHER; note = 2'-O-methyl modified nucleotide
  modified_base 11: mod_base = OTHER; note = 2'-O-methyl modified nucleotide
  modified_base 13: mod_base = OTHER; note = 2'-O-methyl modified nucleotide
  modified_base 18: mod_base = OTHER; note = 2'-O-methyl modified nucleotide
  modified_base 22: mod_base = OTHER; note = 2'-O-methyl modified nucleotide
  modified_base 25: mod_base = OTHER; note = 2'-O-methyl modified nucleotide
  modified_base 29: mod_base = OTHER; note = 2'-O-methyl modified nucleotide
  modified_base 30: mod_base = OTHER; note = 2'-O-methyl modified nucleotide
  modified_base 31: mod_base = OTHER; note = 2'-O-methyl modified nucleotide
  modified_base 32: mod_base = OTHER; note = 2'-O-methyl modified nucleotide
  modified_base 37: mod_base = OTHER; note = 2'-O-methyl modified nucleotide
  modified_base 38: mod_base = OTHER; note = 2'-O-methyl modified nucleotide
  modified_base 39: mod_base = OTHER; note = 2'-O-methyl modified nucleotide
  modified_base 40: mod_base = OTHER; note = 2'-O-methyl modified nucleotide
  modified_base 41: mod_base = OTHER; note = 2'-O-methyl modified nucleotide
  modified_base 42: mod_base = OTHER; note = 2'-O-methyl modified nucleotide
  modified_base 43: mod_base = OTHER; note = 2'-O-methyl modified nucleotide
  modified_base 47: mod_base = OTHER; note = 2'-O-methyl modified nucleotide
  modified_base 48: mod_base = OTHER; note = 2'-O-methyl modified nucleotide
  modified_base 51: mod_base = OTHER; note = 2'-O-methyl modified nucleotide
  modified_base 54: mod_base = OTHER; note = nucleotide with phosphorothioate linkage
  modified_base 58: mod_base = OTHER; note = 2'-O-methyl modified nucleotide
  modified_base 59: mod_base = OTHER; note = 2'-O-methyl modified nucleotide
  modified_base 61: mod_base = OTHER; note = 2'-O-methyl modified nucleotide
  modified_base 62: mod_base = OTHER; note = 2'-O-methyl modified nucleotide
  modified_base 63: mod_base = OTHER; note = 2'-O-methyl modified nucleotide
  modified_base 64: mod_base = OTHER; note = 2'-O-methyl modified nucleotide
  modified_base 65: mod_base = OTHER; note = 2'-O-methyl modified nucleotide
  modified_base 66: mod_base = OTHER; note = 2'-O-methyl modified nucleotide
  modified_base 67: mod_base = OTHER; note = 2'-O-methyl modified nucleotide
  modified_base 68: mod_base = OTHER; note = 2'-O-methyl modified nucleotide
  modified_base 69: mod_base = OTHER; note = 2'-O-methyl modified nucleotide
  modified_base 70: mod_base = OTHER; note = 2'-O-methyl modified nucleotide
  modified_base 75: mod_base = OTHER; note = 2'-O-methyl modified nucleotide
  modified_base 77: mod_base = OTHER; note = 2'-O-methyl modified nucleotide
  modified_base 80: mod_base = OTHER; note = 2'-O-methyl modified nucleotide
  modified_base 86: mod_base = OTHER; note = 2'-O-methyl modified nucleotide
  modified_base 87: mod_base = OTHER; note = 2'-O-methyl modified nucleotide
  modified_base 89: mod_base = OTHER; note = 2'-O-methyl modified nucleotide
  modified_base 90: mod_base = OTHER; note = 2'-O-methyl modified nucleotide
  modified_base 91: mod_base = OTHER; note = 2'-O-methyl modified nucleotide
  modified_base 92: mod_base = OTHER; note = 2'-O-methyl modified nucleotide
  modified_base 99: mod_base = OTHER; note = nucleotide with phosphorothioate linkage
  modified_base 100: mod_base = OTHER; note = 2'-O-methyl modified nucleotide with phosphorothioate linkage
  modified_base 101: mod_base = OTHER; note = 2'-O-methyl modified nucleotide

SEQ ID NO: 2449 - RNA, 101 nt, synthetic construct; identical to SEQ ID NO: 1449
  source 1..101: mol_type = other RNA
  modified_base 1: mod_base = OTHER; note = 2'-O-methyl modified nucleotide with phosphorothioate linkage
  modified_base 2: mod_base = OTHER; note = 2'-O-methyl modified nucleotide with phosphorothioate linkage
  modified_base 3: mod_base = OTHER; note = 2'-O-methyl modified nucleotide with phosphorothioate linkage
  modified_base 4: mod_base = OTHER; note = 2'-O-methyl modified nucleotide
  modified_base 5: mod_base = OTHER; note = 2'-O-methyl modified nucleotide
  modified_base 8: mod_base = OTHER; note = 2'-O-methyl modified nucleotide
  modified_base 9: mod_base = OTHER; note = 2'-O-methyl modified nucleotide
  modified_base 11: mod_base = OTHER; note = 2'-O-methyl modified nucleotide
  modified_base 13: mod_base = OTHER; note = 2'-O-methyl modified nucleotide
  modified_base 18: mod_base = OTHER; note = 2'-O-methyl modified nucleotide
  modified_base 22: mod_base = OTHER; note = 2'-O-methyl modified nucleotide
  modified_base 25: mod_base = OTHER; note = 2'-O-methyl modified nucleotide
  modified_base 29: mod_base = OTHER; note = 2'-O-methyl modified nucleotide
  modified_base 30: mod_base = OTHER; note = 2'-O-methyl modified nucleotide
  modified_base 31: mod_base = OTHER; note = 2'-O-methyl modified nucleotide
  modified_base 32: mod_base = OTHER; note = 2'-O-methyl modified nucleotide
  modified_base 37: mod_base = OTHER; note = 2'-O-methyl modified nucleotide
  modified_base 38: mod_base = OTHER; note = 2'-O-methyl modified nucleotide
  modified_base 39: mod_base = OTHER; note = 2'-O-methyl modified nucleotide
  modified_base 40: mod_base = OTHER; note = 2'-O-methyl modified nucleotide
  modified_base 41: mod_base = OTHER; note = 2'-O-methyl modified nucleotide
  modified_base 42: mod_base = OTHER; note = 2'-O-methyl modified nucleotide
  modified_base 43: mod_base = OTHER; note = 2'-O-methyl modified nucleotide
  modified_base 47: mod_base = OTHER; note = 2'-O-methyl modified nucleotide
  modified_base 48: mod_base = OTHER; note = 2'-O-methyl modified nucleotide
  modified_base 51: mod_base = OTHER; note = 2'-O-methyl modified nucleotide
  modified_base 54: mod_base = OTHER; note = nucleotide with phosphorothioate linkage
  modified_base 58: mod_base = OTHER; note = 2'-O-methyl modified nucleotide
  modified_base 59: mod_base = OTHER; note = 2'-O-methyl modified nucleotide
  modified_base 61: mod_base = OTHER; note = 2'-O-methyl modified nucleotide
  modified_base 62: mod_base = OTHER; note = 2'-O-methyl modified nucleotide
  modified_base 63: mod_base = OTHER; note = 2'-O-methyl modified nucleotide
  modified_base 64: mod_base = OTHER; note = 2'-O-methyl modified nucleotide
  modified_base 65: mod_base = OTHER; note = 2'-O-methyl modified nucleotide
  modified_base 66: mod_base = OTHER; note = 2'-O-methyl modified nucleotide
  modified_base 67: mod_base = OTHER; note = 2'-O-methyl modified nucleotide
  modified_base 68: mod_base = OTHER; note = 2'-O-methyl modified nucleotide
  modified_base 69: mod_base = OTHER; note = 2'-O-methyl modified nucleotide
  modified_base 70: mod_base = OTHER; note = 2'-O-methyl modified nucleotide
  modified_base 75: mod_base = OTHER; note = 2'-O-methyl modified nucleotide
  modified_base 77: mod_base = OTHER; note = 2'-O-methyl modified nucleotide
  modified_base 80: mod_base = OTHER; note = 2'-O-methyl modified nucleotide
  modified_base 86: mod_base = OTHER; note = 2'-O-methyl modified nucleotide
  modified_base 87: mod_base = OTHER; note = 2'-O-methyl modified nucleotide
  modified_base 89: mod_base = OTHER; note = 2'-O-methyl modified nucleotide
  modified_base 90: mod_base = OTHER; note = 2'-O-methyl modified nucleotide
  modified_base 91: mod_base = OTHER; note = 2'-O-methyl modified nucleotide
  modified_base 92: mod_base = OTHER; note = 2'-O-methyl modified nucleotide
  modified_base 99: mod_base = OTHER; note = nucleotide with phosphorothioate linkage
  modified_base 100: mod_base = OTHER; note = 2'-O-methyl modified nucleotide with phosphorothioate linkage
  modified_base 101: mod_base = OTHER; note = 2'-O-methyl modified nucleotide

SEQ ID NO: 2450 - RNA, 101 nt, synthetic construct; identical to SEQ ID NO: 1450
  source 1..101: mol_type = other RNA
  modified_base 1: mod_base = OTHER; note = 2'-O-methyl modified nucleotide with phosphorothioate linkage
  modified_base 2: mod_base = OTHER; note = 2'-O-methyl modified nucleotide with phosphorothioate linkage
  modified_base 3: mod_base = OTHER; note = 2'-O-methyl modified nucleotide with phosphorothioate linkage
  modified_base 4: mod_base = OTHER; note = 2'-O-methyl modified nucleotide
  modified_base 5: mod_base = OTHER; note = 2'-O-methyl modified nucleotide
  modified_base 8: mod_base = OTHER; note = 2'-O-methyl modified nucleotide
  modified_base 9: mod_base = OTHER; note = 2'-O-methyl modified nucleotide
  modified_base 11: mod_base = OTHER; note = 2'-O-methyl modified nucleotide
  modified_base 13: mod_base = OTHER; note = 2'-O-methyl modified nucleotide
  modified_base 18: mod_base = OTHER; note = 2'-O-methyl modified nucleotide
  modified_base 22: mod_base = OTHER; note = 2'-O-methyl modified nucleotide
  modified_base 25: mod_base = OTHER; note = 2'-O-methyl modified nucleotide
  modified_base 29: mod_base = OTHER; note = 2'-O-methyl modified nucleotide
  modified_base 30: mod_base = OTHER; note = 2'-O-methyl modified nucleotide
  modified_base 31: mod_base = OTHER; note = 2'-O-methyl modified nucleotide
  modified_base 32: mod_base = OTHER; note = 2'-O-methyl modified nucleotide
  modified_base 37: mod_base = OTHER; note = 2'-O-methyl modified nucleotide
  modified_base 38: mod_base = OTHER; note = 2'-O-methyl modified nucleotide
  modified_base 39: mod_base = OTHER; note = 2'-O-methyl modified nucleotide
  modified_base 40: mod_base = OTHER; note = 2'-O-methyl modified nucleotide
  modified_base 41: mod_base = OTHER; note = 2'-O-methyl modified nucleotide
  modified_base 42: mod_base = OTHER; note = 2'-O-methyl modified nucleotide
  modified_base 43: mod_base = OTHER; note = 2'-O-methyl modified nucleotide
  modified_base 47: mod_base = OTHER; note = 2'-O-methyl modified nucleotide
  modified_base 48: mod_base = OTHER; note = 2'-O-methyl modified nucleotide
  modified_base 51: mod_base = OTHER; note = 2'-O-methyl modified nucleotide
  modified_base 54: mod_base = OTHER; note = nucleotide with phosphorothioate linkage
  modified_base 58: mod_base = OTHER; note = 2'-O-methyl modified nucleotide
  modified_base 59: mod_base = OTHER; note = 2'-O-methyl modified nucleotide
  modified_base 61: mod_base = OTHER; note = 2'-O-methyl modified nucleotide
  modified_base 62: mod_base = OTHER; note = 2'-O-methyl modified nucleotide
  modified_base 63: mod_base = OTHER; note = 2'-O-methyl modified nucleotide
  modified_base 64: mod_base = OTHER; note = 2'-O-methyl modified nucleotide
  modified_base 65: mod_base = OTHER; note = 2'-O-methyl modified nucleotide
  modified_base 66: mod_base = OTHER; note = 2'-O-methyl modified nucleotide
  modified_base 67: mod_base = OTHER; note = 2'-O-methyl modified nucleotide
  modified_base 68: mod_base = OTHER; note = 2'-O-methyl modified nucleotide
  modified_base 69: mod_base = OTHER; note = 2'-O-methyl modified nucleotide
  modified_base 70: mod_base = OTHER; note = 2'-O-methyl modified nucleotide
  modified_base 75: mod_base = OTHER; note = 2'-O-methyl modified nucleotide
  modified_base 77: mod_base = OTHER; note = 2'-O-methyl modified nucleotide
  modified_base 80: mod_base = OTHER; note = 2'-O-methyl modified nucleotide
  modified_base 86: mod_base = OTHER; note = 2'-O-methyl modified nucleotide
  modified_base 87: mod_base = OTHER; note = 2'-O-methyl modified nucleotide
  modified_base 89: mod_base = OTHER; note = 2'-O-methyl modified nucleotide
  modified_base 90: mod_base = OTHER; note = 2'-O-methyl modified nucleotide
  modified_base 91: mod_base = OTHER; note = 2'-O-methyl modified nucleotide
  modified_base 92: mod_base = OTHER; note = 2'-O-methyl modified nucleotide
  modified_base 99: mod_base = OTHER; note = nucleotide with phosphorothioate linkage
  modified_base 100: mod_base = OTHER; note = 2'-O-methyl modified nucleotide with phosphorothioate linkage
  modified_base 101: mod_base = OTHER; note = 2'-O-methyl modified nucleotide

SEQ ID NO: 2451 - RNA, 101 nt, synthetic construct; identical to SEQ ID NO: 1451
  source 1..101: mol_type = other RNA
  modified_base 1: mod_base = OTHER; note = 2'-O-methyl modified nucleotide with phosphorothioate linkage
  modified_base 2: mod_base = OTHER; note = 2'-O-methyl modified nucleotide with phosphorothioate linkage
  modified_base 3: mod_base = OTHER; note = 2'-O-methyl modified nucleotide with phosphorothioate linkage
  modified_base 4: mod_base = OTHER; note = 2'-O-methyl modified nucleotide
  modified_base 5: mod_base = OTHER; note = 2'-O-methyl modified nucleotide
  modified_base 8: mod_base = OTHER; note = 2'-O-methyl modified nucleotide
  modified_base 9: mod_base = OTHER; note = 2'-O-methyl modified nucleotide
  modified_base 11: mod_base = OTHER; note = 2'-O-methyl modified nucleotide
  modified_base 13: mod_base = OTHER; note = 2'-O-methyl modified nucleotide
  modified_base 18: mod_base = OTHER; note = 2'-O-methyl modified nucleotide
  modified_base 22: mod_base = OTHER; note = 2'-O-methyl modified nucleotide
  modified_base 25: mod_base = OTHER; note = 2'-O-methyl modified nucleotide
  modified_base 29: mod_base = OTHER; note = 2'-O-methyl modified nucleotide
  modified_base 30: mod_base = OTHER; note = 2'-O-methyl modified nucleotide
  modified_base 31: mod_base = OTHER; note = 2'-O-methyl modified nucleotide
  modified_base 32: mod_base = OTHER; note = 2'-O-methyl modified nucleotide
  modified_base 37: mod_base = OTHER; note = 2'-O-methyl modified nucleotide
  modified_base 38: mod_base = OTHER; note = 2'-O-methyl modified nucleotide
  modified_base 39: mod_base = OTHER; note = 2'-O-methyl modified nucleotide
  modified_base 40: mod_base = OTHER; note = 2'-O-methyl modified nucleotide
  modified_base 41: mod_base = OTHER; note = 2'-O-methyl modified nucleotide
  modified_base 42: mod_base = OTHER; note = 2'-O-methyl modified nucleotide
  modified_base 43: mod_base = OTHER; note = 2'-O-methyl modified nucleotide
  modified_base 47: mod_base = OTHER; note = 2'-O-methyl modified nucleotide
  modified_base 48: mod_base = OTHER; note = 2'-O-methyl modified nucleotide
  modified_base 51: mod_base = OTHER; note = 2'-O-methyl modified nucleotide
  modified_base 54: mod_base = OTHER; note = nucleotide with phosphorothioate linkage
  modified_base 58: mod_base = OTHER; note = 2'-O-methyl modified nucleotide
  modified_base 59: mod_base = OTHER; note = 2'-O-methyl modified nucleotide
  modified_base 61: mod_base = OTHER; note = 2'-O-methyl modified nucleotide
  modified_base 62: mod_base = OTHER; note = 2'-O-methyl modified nucleotide
  modified_base 63: mod_base = OTHER; note = 2'-O-methyl modified nucleotide
  modified_base 64: mod_base = OTHER; note = 2'-O-methyl modified nucleotide
  modified_base 65: mod_base = OTHER; note = 2'-O-methyl modified nucleotide
  modified_base 66: mod_base = OTHER; note = 2'-O-methyl modified nucleotide
  modified_base 67: mod_base = OTHER; note = 2'-O-methyl modified nucleotide
  modified_base 68: mod_base = OTHER; note = 2'-O-methyl modified nucleotide
  modified_base 69: mod_base = OTHER; note = 2'-O-methyl modified nucleotide
  modified_base 70: mod_base = OTHER; note = 2'-O-methyl modified nucleotide
  modified_base 75: mod_base = OTHER; note = 2'-O-methyl modified nucleotide
  modified_base 77: mod_base = OTHER; note = 2'-O-methyl modified nucleotide
  modified_base 80: mod_base = OTHER; note = 2'-O-methyl modified nucleotide
  modified_base 86: mod_base = OTHER; note = 2'-O-methyl modified nucleotide
  modified_base 87: mod_base = OTHER; note = 2'-O-methyl modified nucleotide
  modified_base 89: mod_base = OTHER; note = 2'-O-methyl modified nucleotide
  modified_base 90: mod_base = OTHER; note = 2'-O-methyl modified nucleotide
  modified_base 91: mod_base = OTHER; note = 2'-O-methyl modified nucleotide
  modified_base 92: mod_base = OTHER; note = 2'-O-methyl modified nucleotide
  modified_base 99: mod_base = OTHER; note = nucleotide with phosphorothioate linkage
  modified_base 100: mod_base = OTHER; note = 2'-O-methyl modified nucleotide with phosphorothioate linkage
  modified_base 101: mod_base = OTHER; note = 2'-O-methyl modified nucleotide

SEQ ID NO: 2452 - RNA, 101 nt, synthetic construct; identical to SEQ ID NO: 1452
  source 1..101: mol_type = other RNA
  modified_base 1: mod_base = OTHER; note = 2'-O-methyl modified nucleotide with phosphorothioate linkage
  modified_base 2: mod_base = OTHER; note = 2'-O-methyl modified nucleotide with phosphorothioate linkage
  modified_base 3: mod_base = OTHER; note = 2'-O-methyl modified nucleotide with phosphorothioate linkage
  modified_base 4: mod_base = OTHER; note = 2'-O-methyl modified nucleotide
  modified_base 5: mod_base = OTHER; note = 2'-O-methyl modified nucleotide
  modified_base 8: mod_base = OTHER; note = 2'-O-methyl modified nucleotide
  modified_base 9: mod_base = OTHER; note = 2'-O-methyl modified nucleotide
  modified_base 11: mod_base = OTHER; note = 2'-O-methyl modified nucleotide
  modified_base 13: mod_base = OTHER; note = 2'-O-methyl modified nucleotide
  modified_base 18: mod_base = OTHER; note = 2'-O-methyl modified nucleotide
  modified_base 22: mod_base = OTHER; note = 2'-O-methyl modified nucleotide
  modified_base 25: mod_base = OTHER; note = 2'-O-methyl modified nucleotide
  modified_base 29: mod_base = OTHER; note = 2'-O-methyl modified nucleotide
  modified_base 30: mod_base = OTHER; note = 2'-O-methyl modified nucleotide
  modified_base 31: mod_base = OTHER; note = 2'-O-methyl modified nucleotide
  modified_base 32: mod_base = OTHER; note = 2'-O-methyl modified nucleotide
  modified_base 37: mod_base = OTHER; note = 2'-O-methyl modified nucleotide
  modified_base 38: mod_base = OTHER; note = 2'-O-methyl modified nucleotide
  modified_base 39: mod_base = OTHER; note = 2'-O-methyl modified nucleotide
  modified_base 40: mod_base = OTHER; note = 2'-O-methyl modified nucleotide
  modified_base 41: mod_base = OTHER; note = 2'-O-methyl modified nucleotide
  modified_base 42: mod_base = OTHER; note = 2'-O-methyl modified nucleotide
  modified_base 43: mod_base = OTHER; note = 2'-O-methyl modified nucleotide
  modified_base 47: mod_base = OTHER; note = 2'-O-methyl modified nucleotide
  modified_base 48: mod_base = OTHER; note = 2'-O-methyl modified nucleotide
  modified_base 51: mod_base = OTHER; note = 2'-O-methyl modified nucleotide
  modified_base 54: mod_base = OTHER; note = nucleotide with phosphorothioate linkage
  modified_base 58: mod_base = OTHER; note = 2'-O-methyl modified nucleotide
  modified_base 59: mod_base = OTHER; note = 2'-O-methyl modified nucleotide
  modified_base 61: mod_base = OTHER; note = 2'-O-methyl modified nucleotide
  modified_base 62: mod_base = OTHER; note = 2'-O-methyl modified nucleotide
  modified_base 63: mod_base = OTHER; note = 2'-O-methyl modified nucleotide
  modified_base 64: mod_base = OTHER; note = 2'-O-methyl modified nucleotide
  modified_base 65: mod_base = OTHER; note = 2'-O-methyl modified nucleotide
  modified_base 66: mod_base = OTHER; note = 2'-O-methyl modified nucleotide
  modified_base 67: mod_base = OTHER; note = 2'-O-methyl modified nucleotide
  modified_base 68: mod_base = OTHER; note = 2'-O-methyl modified nucleotide
  modified_base 69: mod_base = OTHER; note = 2'-O-methyl modified nucleotide
  modified_base 70: mod_base = OTHER; note = 2'-O-methyl modified nucleotide
  modified_base 75: mod_base = OTHER; note = 2'-O-methyl modified nucleotide
  modified_base 77: mod_base = OTHER; note = 2'-O-methyl modified nucleotide
  modified_base 80: mod_base = OTHER; note = 2'-O-methyl modified nucleotide
  modified_base 86: mod_base = OTHER; note = 2'-O-methyl modified nucleotide
  modified_base 87: mod_base = OTHER; note = 2'-O-methyl modified nucleotide
  modified_base 89: mod_base = OTHER; note = 2'-O-methyl modified nucleotide
  modified_base 90: mod_base = OTHER; note = 2'-O-methyl modified nucleotide
  modified_base 91: mod_base = OTHER; note = 2'-O-methyl modified nucleotide
  modified_base 92: mod_base = OTHER; note = 2'-O-methyl modified nucleotide
  modified_base 99: mod_base = OTHER; note = nucleotide with phosphorothioate linkage
  modified_base 100: mod_base = OTHER; note = 2'-O-methyl modified nucleotide with phosphorothioate linkage
  modified_base 101: mod_base = OTHER; note = 2'-O-methyl modified nucleotide

SEQ ID NO: 2453 - RNA, 101 nt, synthetic construct; identical to SEQ ID NO: 1453
  source 1..101: mol_type = other RNA
  modified_base 1: mod_base = OTHER; note = 2'-O-methyl modified nucleotide with phosphorothioate linkage
  modified_base 2: mod_base = OTHER; note = 2'-O-methyl modified nucleotide with phosphorothioate linkage
  modified_base 3: mod_base = OTHER; note = 2'-O-methyl modified nucleotide with phosphorothioate linkage
  modified_base 4: mod_base = OTHER; note = 2'-O-methyl modified nucleotide
  modified_base 5: mod_base = OTHER; note = 2'-O-methyl modified nucleotide
  modified_base 8: mod_base = OTHER; note = 2'-O-methyl modified nucleotide
  modified_base 9: mod_base = OTHER; note = 2'-O-methyl modified nucleotide
  modified_base 11: mod_base = OTHER; note = 2'-O-methyl modified nucleotide
  modified_base 13: mod_base = OTHER; note = 2'-O-methyl modified nucleotide
  modified_base 18: mod_base = OTHER; note = 2'-O-methyl modified nucleotide
  modified_base 22: mod_base = OTHER; note = 2'-O-methyl modified nucleotide
  modified_base 25: mod_base = OTHER; note = 2'-O-methyl modified nucleotide
  modified_base 29: mod_base = OTHER; note = 2'-O-methyl modified nucleotide
  modified_base 30: mod_base = OTHER; note = 2'-O-methyl modified nucleotide
  modified_base 31: mod_base = OTHER; note = 2'-O-methyl modified nucleotide
  modified_base 32: mod_base = OTHER; note = 2'-O-methyl modified nucleotide
  modified_base 37: mod_base = OTHER; note = 2'-O-methyl modified nucleotide
  modified_base 38: mod_base = OTHER; note = 2'-O-methyl modified nucleotide
  modified_base 39: mod_base = OTHER; note = 2'-O-methyl modified nucleotide
  modified_base 40: mod_base = OTHER; note = 2'-O-methyl modified nucleotide
  modified_base 41: mod_base = OTHER; note = 2'-O-methyl modified nucleotide
  modified_base 42: mod_base = OTHER; note = 2'-O-methyl modified nucleotide
  modified_base 43: mod_base = OTHER; note = 2'-O-methyl modified nucleotide
  modified_base 47: mod_base = OTHER; note = 2'-O-methyl modified nucleotide
  modified_base 48: mod_base = OTHER; note = 2'-O-methyl modified nucleotide
  modified_base 51: mod_base = OTHER; note = 2'-O-methyl modified nucleotide
  modified_base 54: mod_base = OTHER; note = nucleotide with phosphorothioate linkage
  modified_base 58: mod_base = OTHER; note = 2'-O-methyl modified nucleotide
  modified_base 59: mod_base = OTHER; note = 2'-O-methyl modified nucleotide
  modified_base 61: mod_base = OTHER; note = 2'-O-methyl modified nucleotide
  modified_base 62: mod_base = OTHER; note = 2'-O-methyl modified nucleotide
  modified_base 63: mod_base = OTHER; note = 2'-O-methyl modified nucleotide
  modified_base 64: mod_base = OTHER; note = 2'-O-methyl modified nucleotide
  modified_base 65: mod_base = OTHER; note = 2'-O-methyl modified nucleotide
  modified_base 66: mod_base = OTHER; note = 2'-O-methyl modified nucleotide
  modified_base 67: mod_base = OTHER; note = 2'-O-methyl modified nucleotide
  modified_base 68: mod_base = OTHER; note = 2'-O-methyl modified nucleotide
  modified_base 69: mod_base = OTHER; note = 2'-O-methyl modified nucleotide
  modified_base 70: mod_base = OTHER; note = 2'-O-methyl modified nucleotide
  modified_base 75: mod_base = OTHER; note = 2'-O-methyl modified nucleotide
  modified_base 77: mod_base = OTHER; note = 2'-O-methyl modified nucleotide
  modified_base 80: mod_base = OTHER; note = 2'-O-methyl modified nucleotide
  modified_base 86: mod_base = OTHER; note = 2'-O-methyl modified nucleotide
  modified_base 87: mod_base = OTHER; note = 2'-O-methyl modified nucleotide
  modified_base 89: mod_base = OTHER; note = 2'-O-methyl modified nucleotide
  modified_base 90: mod_base = OTHER; note = 2'-O-methyl modified nucleotide
  modified_base 91: mod_base = OTHER; note = 2'-O-methyl modified nucleotide
  modified_base 92: mod_base = OTHER; note = 2'-O-methyl modified nucleotide
  modified_base 99: mod_base = OTHER; note = nucleotide with phosphorothioate linkage
  modified_base 100: mod_base = OTHER; note = 2'-O-methyl modified nucleotide with phosphorothioate linkage
  modified_base 101: mod_base = OTHER; note = 2'-O-methyl modified nucleotide

SEQ ID NO: 2454 - RNA, 101 nt, synthetic construct; identical to SEQ ID NO: 1454
  source 1..101: mol_type = other RNA
  modified_base 1: mod_base = OTHER; note = 2'-O-methyl modified nucleotide with phosphorothioate linkage
  modified_base 2: mod_base = OTHER; note = 2'-O-methyl modified nucleotide with phosphorothioate linkage
  modified_base 3: mod_base = OTHER; note = 2'-O-methyl modified nucleotide with phosphorothioate linkage
  modified_base 4: mod_base = OTHER; note = 2'-O-methyl modified nucleotide
  modified_base 5: mod_base = OTHER; note = 2'-O-methyl modified nucleotide
  modified_base 8: mod_base = OTHER; note = 2'-O-methyl modified nucleotide
  modified_base 9: mod_base = OTHER; note = 2'-O-methyl modified nucleotide
  modified_base 11: mod_base = OTHER; note = 2'-O-methyl modified nucleotide
  modified_base 13: mod_base = OTHER; note = 2'-O-methyl modified nucleotide
  modified_base 18: mod_base = OTHER; note = 2'-O-methyl modified nucleotide
  modified_base 22: mod_base = OTHER; note = 2'-O-methyl modified nucleotide
  modified_base 25: mod_base = OTHER; note = 2'-O-methyl modified nucleotide
  modified_base 29: mod_base = OTHER; note = 2'-O-methyl modified nucleotide
  modified_base 30: mod_base = OTHER; note = 2'-O-methyl modified nucleotide
  modified_base 31: mod_base = OTHER; note = 2'-O-methyl modified nucleotide
  modified_base 32: mod_base = OTHER; note = 2'-O-methyl modified nucleotide
  modified_base 37: mod_base = OTHER; note = 2'-O-methyl modified nucleotide
  modified_base 38: mod_base = OTHER; note = 2'-O-methyl modified nucleotide
  modified_base 39: mod_base = OTHER; note = 2'-O-methyl modified nucleotide
  modified_base 40: mod_base = OTHER; note = 2'-O-methyl modified nucleotide
  modified_base 41: mod_base = OTHER; note = 2'-O-methyl modified nucleotide
  modified_base 42: mod_base = OTHER; note = 2'-O-methyl modified nucleotide
  modified_base 43: mod_base = OTHER; note = 2'-O-methyl modified nucleotide
  modified_base 47: mod_base = OTHER; note = 2'-O-methyl modified nucleotide
  modified_base 48: mod_base = OTHER; note = 2'-O-methyl modified nucleotide
  modified_base 51: mod_base = OTHER; note = 2'-O-methyl modified nucleotide
  modified_base 54: mod_base = OTHER; note = nucleotide with phosphorothioate linkage
  modified_base 58: mod_base = OTHER; note = 2'-O-methyl modified nucleotide
  modified_base 59: mod_base = OTHER; note = 2'-O-methyl modified nucleotide
  modified_base 61: mod_base = OTHER; note = 2'-O-methyl modified nucleotide
  modified_base 62: mod_base = OTHER; note = 2'-O-methyl modified nucleotide
  modified_base 63: mod_base = OTHER; note = 2'-O-methyl modified nucleotide
  modified_base 64: mod_base = OTHER; note = 2'-O-methyl modified nucleotide
  modified_base 65: mod_base = OTHER; note = 2'-O-methyl modified nucleotide
  modified_base 66: mod_base = OTHER; note = 2'-O-methyl modified nucleotide
  modified_base 67: mod_base = OTHER; note = 2'-O-methyl modified nucleotide
  modified_base 68: mod_base = OTHER; note = 2'-O-methyl modified nucleotide
  modified_base 69: mod_base = OTHER; note = 2'-O-methyl modified nucleotide
  modified_base 70: mod_base = OTHER; note = 2'-O-methyl modified nucleotide
  modified_base 75: mod_base = OTHER; note = 2'-O-methyl modified nucleotide
  modified_base 77: mod_base = OTHER; note = 2'-O-methyl modified nucleotide
  modified_base 80: mod_base = OTHER; note = 2'-O-methyl modified nucleotide
  modified_base 86: mod_base = OTHER; note = 2'-O-methyl modified nucleotide
  modified_base 87: mod_base = OTHER; note = 2'-O-methyl modified nucleotide
  modified_base 89: mod_base = OTHER; note = 2'-O-methyl modified nucleotide
  modified_base 90: mod_base = OTHER; note = 2'-O-methyl modified nucleotide
  modified_base 91: mod_base = OTHER; note = 2'-O-methyl modified nucleotide
  modified_base 92: mod_base = OTHER; note = 2'-O-methyl modified nucleotide
  modified_base 99: mod_base = OTHER; note = nucleotide with phosphorothioate linkage
  modified_base 100: mod_base = OTHER; note = 2'-O-methyl modified nucleotide with phosphorothioate linkage
  modified_base 101: mod_base = OTHER; note = 2'-O-methyl modified nucleotide

SEQ ID NO: 2455 - RNA, 101 nt, synthetic construct; identical to SEQ ID NO: 1455
  source 1..101: mol_type = other RNA
  modified_base 1: mod_base = OTHER; note = 2'-O-methyl modified nucleotide with phosphorothioate linkage
  modified_base 2: mod_base = OTHER; note = 2'-O-methyl modified nucleotide with phosphorothioate linkage
  modified_base 3: mod_base = OTHER; note = 2'-O-methyl modified nucleotide with phosphorothioate linkage
  modified_base 4: mod_base = OTHER; note = 2'-O-methyl modified nucleotide
  modified_base 5: mod_base = OTHER; note = 2'-O-methyl modified nucleotide
  modified_base 8: mod_base = OTHER; note = 2'-O-methyl modified nucleotide
  modified_base 9: mod_base = OTHER; note = 2'-O-methyl modified nucleotide
  modified_base 11: mod_base = OTHER; note = 2'-O-methyl modified nucleotide
  modified_base 13: mod_base = OTHER; note = 2'-O-methyl modified nucleotide
  modified_base 18: mod_base = OTHER; note = 2'-O-methyl modified nucleotide
  modified_base 22: mod_base = OTHER; note = 2'-O-methyl modified nucleotide
  modified_base 25: mod_base = OTHER; note = 2'-O-methyl modified nucleotide
  modified_base 29: mod_base = OTHER; note = 2'-O-methyl modified nucleotide
  modified_base 30: mod_base = OTHER; note = 2'-O-methyl modified nucleotide
  modified_base 31: mod_base = OTHER; note = 2'-O-methyl modified nucleotide
  modified_base 32: mod_base = OTHER; note = 2'-O-methyl modified nucleotide
  modified_base 37: mod_base = OTHER; note = 2'-O-methyl modified nucleotide
  modified_base 38: mod_base = OTHER; note = 2'-O-methyl modified nucleotide
  modified_base 39: mod_base = OTHER; note = 2'-O-methyl modified nucleotide
  modified_base 40: mod_base = OTHER; note = 2'-O-methyl modified nucleotide
  modified_base 41: mod_base = OTHER; note = 2'-O-methyl modified nucleotide
  modified_base 42: mod_base = OTHER; note = 2'-O-methyl modified nucleotide
  modified_base 43: mod_base = OTHER; note = 2'-O-methyl modified nucleotide
  modified_base 47: mod_base = OTHER; note = 2'-O-methyl modified nucleotide
  modified_base 48: mod_base = OTHER; note = 2'-O-methyl modified nucleotide
  modified_base 51: mod_base = OTHER; note = 2'-O-methyl modified nucleotide
  modified_base 54: mod_base = OTHER; note = nucleotide with phosphorothioate linkage
  modified_base 58: mod_base = OTHER; note = 2'-O-methyl modified nucleotide
  modified_base 59: mod_base = OTHER; note = 2'-O-methyl modified nucleotide
  modified_base 61: mod_base = OTHER; note = 2'-O-methyl modified nucleotide
  modified_base 62: mod_base = OTHER; note = 2'-O-methyl modified nucleotide
  modified_base 63: mod_base = OTHER; note = 2'-O-methyl modified nucleotide
  modified_base 64: mod_base = OTHER; note = 2'-O-methyl modified nucleotide
  modified_base 65: mod_base = OTHER; note = 2'-O-methyl modified nucleotide
  modified_base 66: mod_base = OTHER; note = 2'-O-methyl modified nucleotide
  modified_base 67: mod_base = OTHER; note = 2'-O-methyl modified nucleotide
  modified_base 68: mod_base = OTHER; note = 2'-O-methyl modified nucleotide
  modified_base 69: mod_base = OTHER; note = 2'-O-methyl modified nucleotide
  modified_base 70: mod_base = OTHER; note = 2'-O-methyl modified nucleotide
  modified_base 75: mod_base = OTHER; note = 2'-O-methyl modified nucleotide
  modified_base 77: mod_base = OTHER; note = 2'-O-methyl modified nucleotide
  modified_base 80: mod_base = OTHER; note = 2'-O-methyl modified nucleotide
  modified_base 86: mod_base = OTHER; note = 2'-O-methyl modified nucleotide
  modified_base 87: mod_base = OTHER; note = 2'-O-methyl modified nucleotide
  modified_base 89: mod_base = OTHER; note = 2'-O-methyl modified nucleotide
  modified_base 90: mod_base = OTHER; note = 2'-O-methyl modified nucleotide
  modified_base 91: mod_base = OTHER; note = 2'-O-methyl modified nucleotide
  modified_base 92: mod_base = OTHER; note = 2'-O-methyl modified nucleotide
  modified_base 99: mod_base = OTHER; note = nucleotide with phosphorothioate linkage
  modified_base 100: mod_base = OTHER; note = 2'-O-methyl modified nucleotide with phosphorothioate linkage
  modified_base 101: mod_base = OTHER; note = 2'-O-methyl modified nucleotide

SEQ ID NO: 2456 - RNA, 101 nt, synthetic construct; identical to SEQ ID NO: 1456
  source 1..101: mol_type = other RNA
  modified_base 1: mod_base = OTHER; note = 2'-O-methyl modified nucleotide with phosphorothioate linkage
  modified_base 2: mod_base = OTHER; note = 2'-O-methyl modified nucleotide with phosphorothioate linkage
  modified_base 3: mod_base = OTHER; note = 2'-O-methyl modified nucleotide with phosphorothioate linkage
  modified_base 4: mod_base = OTHER; note = 2'-O-methyl modified nucleotide
  modified_base 5: mod_base = OTHER; note = 2'-O-methyl modified nucleotide
  modified_base 8: mod_base = OTHER; note = 2'-O-methyl modified nucleotide
  modified_base 9: mod_base = OTHER; note = 2'-O-methyl modified nucleotide
  modified_base 11: mod_base = OTHER; note = 2'-O-methyl modified nucleotide
  modified_base 13: mod_base = OTHER; note = 2'-O-methyl modified nucleotide
  modified_base 18: mod_base = OTHER; note = 2'-O-methyl modified nucleotide
  modified_base 22: mod_base = OTHER; note = 2'-O-methyl modified nucleotide
  modified_base 25: mod_base = OTHER; note = 2'-O-methyl modified nucleotide
  modified_base 29: mod_base = OTHER; note = 2'-O-methyl modified nucleotide
  modified_base 30: mod_base = OTHER; note = 2'-O-methyl modified nucleotide
  modified_base 31: mod_base = OTHER; note = 2'-O-methyl modified nucleotide
  modified_base 32: mod_base = OTHER; note = 2'-O-methyl modified nucleotide
  modified_base 37: mod_base = OTHER; note = 2'-O-methyl modified nucleotide
  modified_base 38: mod_base = OTHER; note = 2'-O-methyl modified nucleotide
  modified_base 39: mod_base = OTHER; note = 2'-O-methyl modified nucleotide
  modified_base 40: mod_base = OTHER; note = 2'-O-methyl modified nucleotide
  modified_base 41: mod_base = OTHER; note = 2'-O-methyl modified nucleotide
  modified_base 42: mod_base = OTHER; note = 2'-O-methyl modified nucleotide
  modified_base 43: mod_base = OTHER; note = 2'-O-methyl modified nucleotide
  modified_base 47: mod_base = OTHER; note = 2'-O-methyl modified nucleotide
  modified_base 48: mod_base = OTHER; note = 2'-O-methyl modified nucleotide
  modified_base 51: mod_base = OTHER; note = 2'-O-methyl modified nucleotide
  modified_base 54: mod_base = OTHER; note = nucleotide with phosphorothioate linkage
  modified_base 58: mod_base = OTHER; note = 2'-O-methyl modified nucleotide
  modified_base 59: mod_base = OTHER; note = 2'-O-methyl modified nucleotide
  modified_base 61: mod_base = OTHER; note = 2'-O-methyl modified nucleotide
  modified_base 62: mod_base = OTHER; note = 2'-O-methyl modified nucleotide
  modified_base 63: mod_base = OTHER; note = 2'-O-methyl modified nucleotide
  modified_base 64: mod_base = OTHER; note = 2'-O-methyl modified nucleotide
  modified_base 65: mod_base = OTHER; note = 2'-O-methyl modified nucleotide
  modified_base 66: mod_base = OTHER; note = 2'-O-methyl modified nucleotide
  modified_base 67: mod_base = OTHER; note = 2'-O-methyl modified nucleotide
  modified_base 68: mod_base = OTHER; note = 2'-O-methyl modified nucleotide
  modified_base 69: mod_base = OTHER; note = 2'-O-methyl modified nucleotide
  modified_base 70: mod_base = OTHER; note = 2'-O-methyl modified nucleotide
  modified_base 75: mod_base = OTHER; note = 2'-O-methyl modified nucleotide
  modified_base 77: mod_base = OTHER; note = 2'-O-methyl modified nucleotide
  modified_base 80: mod_base = OTHER; note = 2'-O-methyl modified nucleotide
  modified_base 86: mod_base = OTHER; note = 2'-O-methyl modified nucleotide
  modified_base 87: mod_base = OTHER; note = 2'-O-methyl modified nucleotide
  modified_base 89: mod_base = OTHER; note = 2'-O-methyl modified nucleotide
  modified_base 90: mod_base = OTHER; note = 2'-O-methyl modified nucleotide
  modified_base 91: mod_base = OTHER; note = 2'-O-methyl modified nucleotide
  modified_base 92: mod_base = OTHER; note = 2'-O-methyl modified nucleotide
  modified_base 99: mod_base = OTHER; note = nucleotide with phosphorothioate linkage
  modified_base 100: mod_base = OTHER; note = 2'-O-methyl modified nucleotide with phosphorothioate linkage
  modified_base 101: mod_base = OTHER; note = 2'-O-methyl modified nucleotide

SEQ ID NO: 2457 - RNA, 101 nt, synthetic construct; identical to SEQ ID NO: 1457
  source 1..101: mol_type = other RNA
  modified_base 1: mod_base = OTHER; note = 2'-O-methyl modified nucleotide with phosphorothioate linkage
  modified_base 2: mod_base = OTHER; note = 2'-O-methyl modified nucleotide with phosphorothioate linkage
  modified_base 3: mod_base = OTHER; note = 2'-O-methyl modified nucleotide with phosphorothioate linkage
  modified_base 4: mod_base = OTHER; note = 2'-O-methyl modified nucleotide
  modified_base 5: mod_base = OTHER; note = 2'-O-methyl modified nucleotide
  modified_base 8: mod_base = OTHER; note = 2'-O-methyl modified nucleotide
  modified_base 9: mod_base = OTHER; note = 2'-O-methyl modified nucleotide
  modified_base 11: mod_base = OTHER; note = 2'-O-methyl modified nucleotide
  modified_base 13: mod_base = OTHER; note = 2'-O-methyl modified nucleotide
  modified_base 18: mod_base = OTHER; note = 2'-O-methyl modified nucleotide
  modified_base 22: mod_base = OTHER; note = 2'-O-methyl modified nucleotide
  modified_base 25: mod_base = OTHER; note = 2'-O-methyl modified nucleotide
  modified_base 29: mod_base = OTHER; note = 2'-O-methyl modified nucleotide
  modified_base 30: mod_base = OTHER; note = 2'-O-methyl modified nucleotide
  modified_base 31: mod_base = OTHER; note = 2'-O-methyl modified nucleotide
  modified_base 32: mod_base = OTHER; note = 2'-O-methyl modified nucleotide
  modified_base 37: mod_base = OTHER; note = 2'-O-methyl modified nucleotide
  modified_base 38: mod_base = OTHER; note = 2'-O-methyl modified nucleotide
  modified_base 39: mod_base = OTHER; note = 2'-O-methyl modified nucleotide
  modified_base 40: mod_base = OTHER; note = 2'-O-methyl modified nucleotide
  modified_base 41: mod_base = OTHER; note = 2'-O-methyl modified nucleotide
  modified_base 42: mod_base = OTHER; note = 2'-O-methyl modified nucleotide
  modified_base 43: mod_base = OTHER; note = 2'-O-methyl modified nucleotide
  modified_base 47: mod_base = OTHER; note = 2'-O-methyl modified nucleotide
  modified_base 48: mod_base = OTHER; note = 2'-O-methyl modified nucleotide
  modified_base 51: mod_base = OTHER; note = 2'-O-methyl modified nucleotide
  modified_base 54: mod_base = OTHER; note = nucleotide with phosphorothioate linkage
  modified_base 58: mod_base = OTHER; note = 2'-O-methyl modified nucleotide
  modified_base 59: mod_base = OTHER; note = 2'-O-methyl modified nucleotide
  modified_base 61: mod_base = OTHER; note = 2'-O-methyl modified nucleotide
  modified_base 62: mod_base = OTHER; note = 2'-O-methyl modified nucleotide
  modified_base 63: mod_base = OTHER; note = 2'-O-methyl modified nucleotide
  modified_base 64: mod_base = OTHER; note = 2'-O-methyl modified nucleotide
  modified_base 65: mod_base = OTHER; note = 2'-O-methyl modified nucleotide
  modified_base 66: mod_base = OTHER; note = 2'-O-methyl modified nucleotide
  modified_base 67: mod_base = OTHER; note = 2'-O-methyl modified nucleotide
  modified_base 68: mod_base = OTHER; note = 2'-O-methyl modified nucleotide
  modified_base 69: mod_base = OTHER; note = 2'-O-methyl modified nucleotide
  modified_base 70: mod_base = OTHER; note = 2'-O-methyl modified nucleotide
  modified_base 75: mod_base = OTHER; note = 2'-O-methyl modified nucleotide
  modified_base 77: mod_base = OTHER; note = 2'-O-methyl modified nucleotide
  modified_base 80: mod_base = OTHER; note = 2'-O-methyl modified nucleotide
  modified_base 86: mod_base = OTHER; note = 2'-O-methyl modified nucleotide
  modified_base 87: mod_base = OTHER; note = 2'-O-methyl modified nucleotide
  modified_base 89: mod_base = OTHER; note = 2'-O-methyl modified nucleotide
  modified_base 90: mod_base = OTHER; note = 2'-O-methyl modified nucleotide
  modified_base 91: mod_base = OTHER; note = 2'-O-methyl modified nucleotide
  modified_base 92: mod_base = OTHER; note = 2'-O-methyl modified nucleotide
  modified_base 99: mod_base = OTHER; note = nucleotide with phosphorothioate linkage
  modified_base 100: mod_base = OTHER; note = 2'-O-methyl modified nucleotide with phosphorothioate linkage
  modified_base 101: mod_base = OTHER; note = 2'-O-methyl modified nucleotide

SEQ ID NO: 2458 - RNA, 101 nt, synthetic construct; identical to SEQ ID NO: 1458
  source 1..101: mol_type = other RNA
  modified_base 1: mod_base = OTHER; note = 2'-O-methyl modified nucleotide with phosphorothioate linkage
  modified_base 2: mod_base = OTHER; note = 2'-O-methyl modified nucleotide with phosphorothioate linkage
  modified_base 3: mod_base = OTHER; note = 2'-O-methyl modified nucleotide with phosphorothioate linkage
  modified_base 4: mod_base = OTHER; note = 2'-O-methyl modified nucleotide
  modified_base 5: mod_base = OTHER; note = 2'-O-methyl modified nucleotide
  modified_base 8: mod_base = OTHER; note = 2'-O-methyl modified nucleotide
  modified_base 9: mod_base = OTHER; note = 2'-O-methyl modified nucleotide
  modified_base 11: mod_base = OTHER; note = 2'-O-methyl modified nucleotide
  modified_base 13: mod_base = OTHER; note = 2'-O-methyl modified nucleotide
  modified_base 18: mod_base = OTHER; note = 2'-O-methyl modified nucleotide
  modified_base 22: mod_base = OTHER; note = 2'-O-methyl modified nucleotide
  modified_base 25: mod_base = OTHER; note = 2'-O-methyl modified nucleotide
  modified_base 29: mod_base = OTHER; note = 2'-O-methyl modified nucleotide
  modified_base 30: mod_base = OTHER; note = 2'-O-methyl modified nucleotide
  modified_base 31: mod_base = OTHER; note = 2'-O-methyl modified nucleotide
  modified_base 32: mod_base = OTHER; note = 2'-O-methyl modified nucleotide
  modified_base 37: mod_base = OTHER; note = 2'-O-methyl modified nucleotide
  modified_base 38: mod_base = OTHER; note = 2'-O-methyl modified nucleotide
  modified_base 39: mod_base = OTHER; note = 2'-O-methyl modified nucleotide
  modified_base 40: mod_base = OTHER; note = 2'-O-methyl modified nucleotide
  modified_base 41: mod_base = OTHER; note = 2'-O-methyl modified nucleotide
  modified_base 42: mod_base = OTHER; note = 2'-O-methyl modified nucleotide
  modified_base 43: mod_base = OTHER; note = 2'-O-methyl modified nucleotide
  modified_base 47: mod_base = OTHER; note = 2'-O-methyl modified nucleotide
  modified_base 48: mod_base = OTHER; note = 2'-O-methyl modified nucleotide
  modified_base 51: mod_base = OTHER; note = 2'-O-methyl modified nucleotide
  modified_base 54: mod_base = OTHER; note = nucleotide with phosphorothioate linkage
  modified_base 58: mod_base = OTHER; note = 2'-O-methyl modified nucleotide
  modified_base 59: mod_base = OTHER; note = 2'-O-methyl modified nucleotide
  modified_base 61: mod_base = OTHER; note = 2'-O-methyl modified nucleotide
  modified_base 62: mod_base = OTHER; note = 2'-O-methyl modified nucleotide
  modified_base 63: mod_base = OTHER; note = 2'-O-methyl modified nucleotide
  modified_base 64: mod_base = OTHER; note = 2'-O-methyl modified nucleotide
  modified_base 65: mod_base = OTHER; note = 2'-O-methyl modified nucleotide
  modified_base 66: mod_base = OTHER; note = 2'-O-methyl modified nucleotide
  modified_base 67: mod_base = OTHER; note = 2'-O-methyl modified nucleotide
  modified_base 68: mod_base = OTHER; note = 2'-O-methyl modified nucleotide
  modified_base 69: mod_base = OTHER; note = 2'-O-methyl modified nucleotide
  modified_base 70: mod_base = OTHER; note = 2'-O-methyl modified nucleotide
  modified_base 75: mod_base = OTHER; note = 2'-O-methyl modified nucleotide
  modified_base 77: mod_base = OTHER; note = 2'-O-methyl modified nucleotide
  modified_base 80: mod_base = OTHER; note = 2'-O-methyl modified nucleotide
  modified_base 86: mod_base = OTHER; note = 2'-O-methyl modified nucleotide
  modified_base 87: mod_base = OTHER; note = 2'-O-methyl modified nucleotide
  modified_base 89: mod_base = OTHER; note = 2'-O-methyl modified nucleotide
  modified_base 90: mod_base = OTHER; note = 2'-O-methyl modified nucleotide
  modified_base 91: mod_base = OTHER; note = 2'-O-methyl modified nucleotide
  modified_base 92: mod_base = OTHER; note = 2'-O-methyl modified nucleotide
  modified_base 99: mod_base = OTHER; note = nucleotide with phosphorothioate linkage
  modified_base 100: mod_base = OTHER; note = 2'-O-methyl modified nucleotide with phosphorothioate linkage
  modified_base 101: mod_base = OTHER; note = 2'-O-methyl modified nucleotide

SEQ ID NO: 2459 - RNA, 101 nt, synthetic construct; identical to SEQ ID NO: 1459
  source 1..101: mol_type = other RNA
  modified_base 1: mod_base = OTHER; note = 2'-O-methyl modified nucleotide with phosphorothioate linkage
  modified_base 2: mod_base = OTHER; note = 2'-O-methyl modified nucleotide with phosphorothioate linkage
  modified_base 3: mod_base = OTHER; note = 2'-O-methyl modified nucleotide with phosphorothioate linkage
  modified_base 4: mod_base = OTHER; note = 2'-O-methyl modified nucleotide
  modified_base 5: mod_base = OTHER; note = 2'-O-methyl modified nucleotide
  modified_base 8: mod_base = OTHER; note = 2'-O-methyl modified nucleotide
  modified_base 9: mod_base = OTHER; note = 2'-O-methyl modified nucleotide
  modified_base 11: mod_base = OTHER; note = 2'-O-methyl modified nucleotide
  modified_base 13: mod_base = OTHER; note = 2'-O-methyl modified nucleotide
  modified_base 18: mod_base = OTHER; note = 2'-O-methyl modified nucleotide
  modified_base 22: mod_base = OTHER; note = 2'-O-methyl modified nucleotide
  modified_base 25: mod_base = OTHER; note = 2'-O-methyl modified nucleotide
  modified_base 29: mod_base = OTHER; note = 2'-O-methyl modified nucleotide
  modified_base 30: mod_base = OTHER; note = 2'-O-methyl modified nucleotide
  modified_base 31: mod_base = OTHER; note = 2'-O-methyl modified nucleotide
  modified_base 32: mod_base = OTHER; note = 2'-O-methyl modified nucleotide
  modified_base 37: mod_base = OTHER; note = 2'-O-methyl modified nucleotide
  modified_base 38: mod_base = OTHER; note = 2'-O-methyl modified nucleotide
  modified_base 39: mod_base = OTHER; note = 2'-O-methyl modified nucleotide
  modified_base 40: mod_base = OTHER; note = 2'-O-methyl modified nucleotide
  modified_base 41: mod_base = OTHER; note = 2'-O-methyl modified nucleotide
  modified_base 42: mod_base = OTHER; note = 2'-O-methyl modified nucleotide
  modified_base 43: mod_base = OTHER; note = 2'-O-methyl modified nucleotide
  modified_base 47: mod_base = OTHER; note = 2'-O-methyl modified nucleotide
  modified_base 48: mod_base = OTHER; note = 2'-O-methyl modified nucleotide
  modified_base 51: mod_base = OTHER; note = 2'-O-methyl modified nucleotide
  modified_base 54: mod_base = OTHER; note = nucleotide with phosphorothioate linkage
  modified_base 58: mod_base = OTHER; note = 2'-O-methyl modified nucleotide
  modified_base 59: mod_base = OTHER; note = 2'-O-methyl modified nucleotide
  modified_base 61: mod_base = OTHER; note = 2'-O-methyl modified nucleotide
  modified_base 62: mod_base = OTHER; note = 2'-O-methyl modified nucleotide
  modified_base 63: mod_base = OTHER; note = 2'-O-methyl modified nucleotide
  modified_base 64: mod_base = OTHER; note = 2'-O-methyl modified nucleotide
  modified_base 65: mod_base = OTHER; note = 2'-O-methyl modified nucleotide
  modified_base 66: mod_base = OTHER; note = 2'-O-methyl modified nucleotide
  modified_base 67: mod_base = OTHER; note = 2'-O-methyl modified nucleotide
  modified_base 68: mod_base = OTHER; note = 2'-O-methyl modified nucleotide
  modified_base 69: mod_base = OTHER; note = 2'-O-methyl modified nucleotide
  modified_base 70: mod_base = OTHER; note = 2'-O-methyl modified nucleotide
  modified_base 75: mod_base = OTHER; note = 2'-O-methyl modified nucleotide
  modified_base 77: mod_base = OTHER; note = 2'-O-methyl modified nucleotide
  modified_base 80: mod_base = OTHER; note = 2'-O-methyl modified nucleotide
  modified_base 86: mod_base = OTHER; note = 2'-O-methyl modified nucleotide
  modified_base 87: mod_base = OTHER; note = 2'-O-methyl modified nucleotide
  modified_base 89: mod_base = OTHER; note = 2'-O-methyl modified nucleotide
  modified_base 90: mod_base = OTHER; note = 2'-O-methyl modified nucleotide
  modified_base 91: mod_base = OTHER; note = 2'-O-methyl modified nucleotide
  modified_base 92: mod_base = OTHER; note = 2'-O-methyl modified nucleotide
  modified_base 99: mod_base = OTHER; note = nucleotide with phosphorothioate linkage
  modified_base 100: mod_base = OTHER; note = 2'-O-methyl modified nucleotide with phosphorothioate linkage
  modified_base 101: mod_base = OTHER; note = 2'-O-methyl modified nucleotide

SEQ ID NO: 2460 - RNA, 101 nt, synthetic construct; identical to SEQ ID NO: 1460
  source 1..101: mol_type = other RNA
  modified_base 1: mod_base = OTHER; note = 2'-O-methyl modified nucleotide with phosphorothioate linkage
  modified_base 2: mod_base = OTHER; note = 2'-O-methyl modified nucleotide with phosphorothioate linkage
  modified_base 3: mod_base = OTHER; note = 2'-O-methyl modified nucleotide with phosphorothioate linkage
  modified_base 4: mod_base = OTHER; note = 2'-O-methyl modified nucleotide
  modified_base 5: mod_base = OTHER; note = 2'-O-methyl modified nucleotide
  modified_base 8: mod_base = OTHER; note = 2'-O-methyl modified nucleotide
  modified_base 9: mod_base = OTHER; note = 2'-O-methyl modified nucleotide
  modified_base 11: mod_base = OTHER; note = 2'-O-methyl modified nucleotide
  modified_base 13: mod_base = OTHER; note = 2'-O-methyl modified nucleotide
  modified_base 18: mod_base = OTHER; note = 2'-O-methyl modified nucleotide
  modified_base 22: mod_base = OTHER; note = 2'-O-methyl modified nucleotide
  modified_base 25: mod_base = OTHER; note = 2'-O-methyl modified nucleotide
  modified_base 29: mod_base = OTHER; note = 2'-O-methyl modified nucleotide
  modified_base 30: mod_base = OTHER; note = 2'-O-methyl modified nucleotide
  modified_base 31: mod_base = OTHER; note = 2'-O-methyl modified nucleotide
  modified_base 32: mod_base = OTHER; note = 2'-O-methyl modified nucleotide
  modified_base 37: mod_base = OTHER; note = 2'-O-methyl modified nucleotide
  modified_base 38: mod_base = OTHER; note = 2'-O-methyl modified nucleotide
  modified_base 39: mod_base = OTHER; note = 2'-O-methyl modified nucleotide
  modified_base 40: mod_base = OTHER; note = 2'-O-methyl modified nucleotide
  modified_base 41: mod_base = OTHER; note = 2'-O-methyl modified nucleotide
  modified_base 42: mod_base = OTHER; note = 2'-O-methyl modified nucleotide
  modified_base 43: mod_base = OTHER; note = 2'-O-methyl modified nucleotide
  modified_base 47: mod_base = OTHER; note = 2'-O-methyl modified nucleotide
  modified_base 48: mod_base = OTHER; note = 2'-O-methyl modified nucleotide
  modified_base 51: mod_base = OTHER; note = 2'-O-methyl modified nucleotide
  modified_base 54: mod_base = OTHER; note = nucleotide with phosphorothioate linkage
  modified_base 58: mod_base = OTHER; note = 2'-O-methyl modified nucleotide
  modified_base 59: mod_base = OTHER; note = 2'-O-methyl modified nucleotide
  modified_base 61: mod_base = OTHER; note = 2'-O-methyl modified nucleotide
  modified_base 62: mod_base = OTHER; note = 2'-O-methyl modified nucleotide
  modified_base 63: mod_base = OTHER; note = 2'-O-methyl modified nucleotide
  modified_base 64: mod_base = OTHER; note = 2'-O-methyl modified nucleotide
  modified_base 65: mod_base = OTHER; note = 2'-O-methyl modified nucleotide
  modified_base 66: mod_base = OTHER; note = 2'-O-methyl modified nucleotide
  modified_base 67: mod_base = OTHER; note = 2'-O-methyl modified nucleotide
  modified_base 68: mod_base = OTHER; note = 2'-O-methyl modified nucleotide
  modified_base 69: mod_base = OTHER; note = 2'-O-methyl modified nucleotide
  modified_base 70: mod_base = OTHER; note = 2'-O-methyl modified nucleotide
  modified_base 75: mod_base = OTHER; note = 2'-O-methyl modified nucleotide
  modified_base 77: mod_base = OTHER; note = 2'-O-methyl modified nucleotide
  modified_base 80: mod_base = OTHER; note = 2'-O-methyl modified nucleotide
  modified_base 86: mod_base = OTHER; note = 2'-O-methyl modified nucleotide
  modified_base 87: mod_base = OTHER; note = 2'-O-methyl modified nucleotide
  modified_base 89: mod_base = OTHER; note = 2'-O-methyl modified nucleotide
  modified_base 90: mod_base = OTHER; note = 2'-O-methyl modified nucleotide
  modified_base 91: mod_base = OTHER; note = 2'-O-methyl modified nucleotide
  modified_base 92: mod_base = OTHER; note = 2'-O-methyl modified nucleotide
  modified_base 99: mod_base = OTHER; note = nucleotide with phosphorothioate linkage
  modified_base 100: mod_base = OTHER; note = 2'-O-methyl modified nucleotide with phosphorothioate linkage
  modified_base 101: mod_base = OTHER; note = 2'-O-methyl modified nucleotide

SEQ ID NO: 2461 - RNA, 101 nt, synthetic construct; identical to SEQ ID NO: 1461
  source 1..101: mol_type = other RNA
  modified_base 1: mod_base = OTHER; note = 2'-O-methyl modified nucleotide with phosphorothioate linkage
  modified_base 2: mod_base = OTHER; note = 2'-O-methyl modified nucleotide with phosphorothioate linkage
  modified_base 3: mod_base = OTHER; note = 2'-O-methyl modified nucleotide with phosphorothioate linkage
  modified_base 4: mod_base = OTHER; note = 2'-O-methyl modified nucleotide
  modified_base 5: mod_base = OTHER; note = 2'-O-methyl modified nucleotide
  modified_base 8: mod_base = OTHER; note = 2'-O-methyl modified nucleotide
  modified_base 9: mod_base = OTHER; note = 2'-O-methyl modified nucleotide
  modified_base 11: mod_base = OTHER; note = 2'-O-methyl modified nucleotide
  modified_base 13: mod_base = OTHER; note = 2'-O-methyl modified nucleotide
  modified_base 18: mod_base = OTHER; note = 2'-O-methyl modified nucleotide
  modified_base 22: mod_base = OTHER; note = 2'-O-methyl modified nucleotide
  modified_base 25: mod_base = OTHER; note = 2'-O-methyl modified nucleotide
  modified_base 29: mod_base = OTHER; note = 2'-O-methyl modified nucleotide
  modified_base 30: mod_base = OTHER; note = 2'-O-methyl modified nucleotide
  modified_base 31: mod_base = OTHER; note = 2'-O-methyl modified nucleotide
  modified_base 32: mod_base = OTHER; note = 2'-O-methyl modified nucleotide
  modified_base 37: mod_base = OTHER; note = 2'-O-methyl modified nucleotide
  modified_base 38: mod_base = OTHER; note = 2'-O-methyl modified nucleotide
  modified_base 39: mod_base = OTHER; note = 2'-O-methyl modified nucleotide
  modified_base 40: mod_base = OTHER; note = 2'-O-methyl modified nucleotide
  modified_base 41: mod_base = OTHER; note = 2'-O-methyl modified nucleotide
  modified_base 42: mod_base = OTHER; note = 2'-O-methyl modified nucleotide
  modified_base 43: mod_base = OTHER; note = 2'-O-methyl modified nucleotide
  modified_base 47: mod_base = OTHER; note = 2'-O-methyl modified nucleotide
  modified_base 48: mod_base = OTHER; note = 2'-O-methyl modified nucleotide
  modified_base 51: mod_base = OTHER; note = 2'-O-methyl modified nucleotide
  modified_base 54: mod_base = OTHER; note = nucleotide with phosphorothioate linkage
  modified_base 58: mod_base = OTHER; note = 2'-O-methyl modified nucleotide
  modified_base 59: mod_base = OTHER; note = 2'-O-methyl modified nucleotide
  modified_base 61: mod_base = OTHER; note = 2'-O-methyl modified nucleotide
  modified_base 62: mod_base = OTHER; note = 2'-O-methyl modified nucleotide
  modified_base 63: mod_base = OTHER; note = 2'-O-methyl modified nucleotide
  modified_base 64: mod_base = OTHER; note = 2'-O-methyl modified nucleotide
  modified_base 65: mod_base = OTHER; note = 2'-O-methyl modified nucleotide
  modified_base 66: mod_base = OTHER; note = 2'-O-methyl modified nucleotide
  modified_base 67: mod_base = OTHER; note = 2'-O-methyl modified nucleotide
  modified_base 68: mod_base = OTHER; note = 2'-O-methyl modified nucleotide
  modified_base 69: mod_base = OTHER; note = 2'-O-methyl modified nucleotide
  modified_base 70: mod_base = OTHER; note = 2'-O-methyl modified nucleotide
  modified_base 75: mod_base = OTHER; note = 2'-O-methyl modified nucleotide
  modified_base 77: mod_base = OTHER; note = 2'-O-methyl modified nucleotide
  modified_base 80: mod_base = OTHER; note = 2'-O-methyl modified nucleotide
  modified_base 86: mod_base = OTHER; note = 2'-O-methyl modified nucleotide
  modified_base 87: mod_base = OTHER; note = 2'-O-methyl modified nucleotide
  modified_base 89: mod_base = OTHER; note = 2'-O-methyl modified nucleotide
  modified_base 90: mod_base = OTHER; note = 2'-O-methyl modified nucleotide
  modified_base 91: mod_base = OTHER; note = 2'-O-methyl modified nucleotide
  modified_base 92: mod_base = OTHER; note = 2'-O-methyl modified nucleotide
  modified_base 99: mod_base = OTHER; note = nucleotide with phosphorothioate linkage
  modified_base 100: mod_base = OTHER; note = 2'-O-methyl modified nucleotide with phosphorothioate linkage
  modified_base 101: mod_base = OTHER; note = 2'-O-methyl modified nucleotide

SEQ ID NO: 2462 - RNA, 101 nt, synthetic construct; identical to SEQ ID NO: 1462
  source 1..101: mol_type = other RNA
  modified_base 1: mod_base = OTHER; note = 2'-O-methyl modified nucleotide with phosphorothioate linkage
  modified_base 2: mod_base = OTHER; note = 2'-O-methyl modified nucleotide with phosphorothioate linkage
  modified_base 3: mod_base = OTHER; note = 2'-O-methyl modified nucleotide with phosphorothioate linkage
  modified_base 4: mod_base = OTHER; note = 2'-O-methyl modified nucleotide
  modified_base 5: mod_base = OTHER; note = 2'-O-methyl modified nucleotide
  modified_base 8: mod_base = OTHER; note = 2'-O-methyl modified nucleotide
  modified_base 9: mod_base = OTHER; note = 2'-O-methyl modified nucleotide
  modified_base 11: mod_base = OTHER; note = 2'-O-methyl modified nucleotide
  modified_base 13: mod_base = OTHER; note = 2'-O-methyl modified nucleotide
  modified_base 18: mod_base = OTHER; note = 2'-O-methyl modified nucleotide
  modified_base 22: mod_base = OTHER; note = 2'-O-methyl modified nucleotide
  modified_base 25: mod_base = OTHER; note = 2'-O-methyl modified nucleotide
  modified_base 29: mod_base = OTHER; note = 2'-O-methyl modified nucleotide
  modified_base 30: mod_base = OTHER; note = 2'-O-methyl modified nucleotide
  modified_base 31: mod_base = OTHER; note = 2'-O-methyl modified nucleotide
  modified_base 32: mod_base = OTHER; note = 2'-O-methyl modified nucleotide
  modified_base 37: mod_base = OTHER; note = 2'-O-methyl modified nucleotide
  modified_base 38: mod_base = OTHER; note = 2'-O-methyl modified nucleotide
  modified_base 39: mod_base = OTHER; note = 2'-O-methyl modified nucleotide
  modified_base 40: mod_base = OTHER; note = 2'-O-methyl modified nucleotide
  modified_base 41: mod_base = OTHER; note = 2'-O-methyl modified nucleotide
  modified_base 42: mod_base = OTHER; note = 2'-O-methyl modified nucleotide
  modified_base 43: mod_base = OTHER; note = 2'-O-methyl modified nucleotide
  modified_base 47: mod_base = OTHER; note = 2'-O-methyl modified nucleotide
  modified_base 48: mod_base = OTHER; note = 2'-O-methyl modified nucleotide
  modified_base 51: mod_base = OTHER; note = 2'-O-methyl modified nucleotide
  modified_base 54: mod_base = OTHER; note = nucleotide with phosphorothioate linkage
  modified_base 58: mod_base = OTHER; note = 2'-O-methyl modified nucleotide
  modified_base 59: mod_base = OTHER; note = 2'-O-methyl modified nucleotide
  modified_base 61: mod_base = OTHER; note = 2'-O-methyl modified nucleotide
  modified_base 62: mod_base = OTHER; note = 2'-O-methyl modified nucleotide
  modified_base 63: mod_base = OTHER; note = 2'-O-methyl modified nucleotide
  modified_base 64: mod_base = OTHER; note = 2'-O-methyl modified nucleotide
  modified_base 65: mod_base = OTHER; note = 2'-O-methyl modified nucleotide
  modified_base 66: mod_base = OTHER; note = 2'-O-methyl modified nucleotide
  modified_base 67: mod_base = OTHER; note = 2'-O-methyl modified nucleotide
  modified_base 68: mod_base = OTHER; note = 2'-O-methyl modified nucleotide
  modified_base 69: mod_base = OTHER; note = 2'-O-methyl modified nucleotide
  modified_base 70: mod_base = OTHER; note = 2'-O-methyl modified nucleotide
  modified_base 75: mod_base = OTHER; note = 2'-O-methyl modified nucleotide
  modified_base 77: mod_base = OTHER; note = 2'-O-methyl modified nucleotide
  modified_base 80: mod_base = OTHER; note = 2'-O-methyl modified nucleotide
  modified_base 86: mod_base = OTHER; note = 2'-O-methyl modified nucleotide
  modified_base 87: mod_base = OTHER; note = 2'-O-methyl modified nucleotide
  modified_base 89: mod_base = OTHER; note = 2'-O-methyl modified nucleotide
  modified_base 90: mod_base = OTHER; note = 2'-O-methyl modified nucleotide
  modified_base 91: mod_base = OTHER; note = 2'-O-methyl modified nucleotide
  modified_base 92: mod_base = OTHER; note = 2'-O-methyl modified nucleotide
  modified_base 99: mod_base = OTHER; note = nucleotide with phosphorothioate linkage
  modified_base 100: mod_base = OTHER; note = 2'-O-methyl modified nucleotide with phosphorothioate linkage
  modified_base 101: mod_base = OTHER; note = 2'-O-methyl modified nucleotide

SEQ ID NO: 2463 - RNA, 101 nt, synthetic construct; identical to SEQ ID NO: 1463
  source 1..101: mol_type = other RNA
  modified_base 1: mod_base = OTHER; note = 2'-O-methyl modified nucleotide with phosphorothioate linkage
  modified_base 2: mod_base = OTHER; note = 2'-O-methyl modified nucleotide with phosphorothioate linkage
  modified_base 3: mod_base = OTHER; note = 2'-O-methyl modified nucleotide with phosphorothioate linkage
  modified_base 4: mod_base = OTHER; note = 2'-O-methyl modified nucleotide
  modified_base 5: mod_base = OTHER; note = 2'-O-methyl modified nucleotide
  modified_base 8: mod_base = OTHER; note = 2'-O-methyl modified nucleotide
  modified_base 9: mod_base = OTHER; note = 2'-O-methyl modified nucleotide
  modified_base 11: mod_base = OTHER; note = 2'-O-methyl modified nucleotide
  modified_base 13: mod_base = OTHER; note = 2'-O-methyl modified nucleotide
  modified_base 18: mod_base = OTHER; note = 2'-O-methyl modified nucleotide
  modified_base 22: mod_base = OTHER; note = 2'-O-methyl modified nucleotide
  modified_base 25: mod_base = OTHER; note = 2'-O-methyl modified nucleotide
  modified_base 29: mod_base = OTHER; note = 2'-O-methyl modified nucleotide
  modified_base 30: mod_base = OTHER; note = 2'-O-methyl modified nucleotide
  modified_base 31: mod_base = OTHER; note = 2'-O-methyl modified nucleotide
  modified_base 32: mod_base = OTHER; note = 2'-O-methyl modified nucleotide
  modified_base 37: mod_base = OTHER; note = 2'-O-methyl modified nucleotide
  modified_base 38: mod_base = OTHER; note = 2'-O-methyl modified nucleotide
  modified_base 39: mod_base = OTHER; note = 2'-O-methyl modified nucleotide
  modified_base 40: mod_base = OTHER; note = 2'-O-methyl modified nucleotide
  modified_base 41: mod_base = OTHER; note = 2'-O-methyl modified nucleotide
  modified_base 42: mod_base = OTHER; note = 2'-O-methyl modified nucleotide
  modified_base 43: mod_base = OTHER; note = 2'-O-methyl modified nucleotide
  modified_base 47: mod_base = OTHER; note = 2'-O-methyl modified nucleotide
  modified_base 48: mod_base = OTHER; note = 2'-O-methyl modified nucleotide
  modified_base 51: mod_base = OTHER; note = 2'-O-methyl modified nucleotide
  modified_base 54: mod_base = OTHER; note = nucleotide with phosphorothioate linkage
  modified_base 58: mod_base = OTHER; note = 2'-O-methyl modified nucleotide
  modified_base 59: mod_base = OTHER; note = 2'-O-methyl modified nucleotide
  modified_base 61: mod_base = OTHER; note = 2'-O-methyl modified nucleotide
  modified_base 62: mod_base = OTHER; note = 2'-O-methyl modified nucleotide
  modified_base 63: mod_base = OTHER; note = 2'-O-methyl modified nucleotide
  modified_base 64: mod_base = OTHER; note = 2'-O-methyl modified nucleotide
  modified_base 65: mod_base = OTHER; note = 2'-O-methyl modified nucleotide
  modified_base 66: mod_base = OTHER; note = 2'-O-methyl modified nucleotide
  modified_base 67: mod_base = OTHER; note = 2'-O-methyl modified nucleotide
  modified_base 68: mod_base = OTHER; note = 2'-O-methyl modified nucleotide
  modified_base 69: mod_base = OTHER; note = 2'-O-methyl modified nucleotide
  modified_base 70: mod_base = OTHER; note = 2'-O-methyl modified nucleotide
  modified_base 75: mod_base = OTHER; note = 2'-O-methyl modified nucleotide
  modified_base 77: mod_base = OTHER; note = 2'-O-methyl modified nucleotide
  modified_base 80: mod_base = OTHER; note = 2'-O-methyl modified nucleotide
  modified_base 86: mod_base = OTHER; note = 2'-O-methyl modified nucleotide
  modified_base 87: mod_base = OTHER; note = 2'-O-methyl modified nucleotide
  modified_base 89: mod_base = OTHER; note = 2'-O-methyl modified nucleotide
  modified_base 90: mod_base = OTHER; note = 2'-O-methyl modified nucleotide
  modified_base 91: mod_base = OTHER; note = 2'-O-methyl modified nucleotide
  modified_base 92: mod_base = OTHER; note = 2'-O-methyl modified nucleotide
  modified_base 99: mod_base = OTHER; note = nucleotide with phosphorothioate linkage
  modified_base 100: mod_base = OTHER; note = 2'-O-methyl modified nucleotide with phosphorothioate linkage
  modified_base 101: mod_base = OTHER; note = 2'-O-methyl modified nucleotide

SEQ ID NO: 2464 - RNA, 101 nt, synthetic construct; identical to SEQ ID NO: 1464
  source 1..101: mol_type = other RNA
  modified_base 1: mod_base = OTHER; note = 2'-O-methyl modified nucleotide with phosphorothioate linkage
  modified_base 2: mod_base = OTHER; note = 2'-O-methyl modified nucleotide with phosphorothioate linkage
  modified_base 3: mod_base = OTHER; note = 2'-O-methyl modified nucleotide with phosphorothioate linkage
  modified_base 4: mod_base = OTHER; note = 2'-O-methyl modified nucleotide
  modified_base 5: mod_base = OTHER; note = 2'-O-methyl modified nucleotide
  modified_base 8: mod_base = OTHER; note = 2'-O-methyl modified nucleotide
  modified_base 9: mod_base = OTHER; note = 2'-O-methyl modified nucleotide
  modified_base 11: mod_base = OTHER; note = 2'-O-methyl modified nucleotide
  modified_base 13: mod_base = OTHER; note = 2'-O-methyl modified nucleotide
  modified_base 18: mod_base = OTHER; note = 2'-O-methyl modified nucleotide
  modified_base 22: mod_base = OTHER; note = 2'-O-methyl modified nucleotide
  modified_base 25: mod_base = OTHER; note = 2'-O-methyl modified nucleotide
  modified_base 29: mod_base = OTHER; note = 2'-O-methyl modified nucleotide
  modified_base 30: mod_base = OTHER; note = 2'-O-methyl modified nucleotide
  modified_base 31: mod_base = OTHER; note = 2'-O-methyl modified nucleotide
  modified_base 32: mod_base = OTHER; note = 2'-O-methyl modified nucleotide
  modified_base 37: mod_base = OTHER; note = 2'-O-methyl modified nucleotide
  modified_base 38: mod_base = OTHER; note = 2'-O-methyl modified nucleotide
  modified_base 39: mod_base = OTHER; note = 2'-O-methyl modified nucleotide
  modified_base 40: mod_base = OTHER; note = 2'-O-methyl modified nucleotide
  modified_base 41: mod_base = OTHER; note = 2'-O-methyl modified nucleotide
  modified_base 42: mod_base = OTHER; note = 2'-O-methyl modified nucleotide
  modified_base 43: mod_base = OTHER; note = 2'-O-methyl modified nucleotide
  modified_base 47: mod_base = OTHER; note = 2'-O-methyl modified nucleotide
  modified_base 48: mod_base = OTHER; note = 2'-O-methyl modified nucleotide
  modified_base 51: mod_base = OTHER; note = 2'-O-methyl modified nucleotide
  modified_base 54: mod_base = OTHER; note = nucleotide with phosphorothioate linkage
  modified_base 58: mod_base = OTHER; note = 2'-O-methyl modified nucleotide
  modified_base 59: mod_base = OTHER; note = 2'-O-methyl modified nucleotide
  modified_base 61: mod_base = OTHER; note = 2'-O-methyl modified nucleotide
  modified_base 62: mod_base = OTHER; note = 2'-O-methyl modified nucleotide
  modified_base 63: mod_base = OTHER; note = 2'-O-methyl modified nucleotide
  modified_base 64: mod_base = OTHER; note = 2'-O-methyl modified nucleotide
  modified_base 65: mod_base = OTHER; note = 2'-O-methyl modified nucleotide
  modified_base 66: mod_base = OTHER; note = 2'-O-methyl modified nucleotide
  modified_base 67: mod_base = OTHER; note = 2'-O-methyl modified nucleotide
  modified_base 68: mod_base = OTHER; note = 2'-O-methyl modified nucleotide
  modified_base 69: mod_base = OTHER; note = 2'-O-methyl modified nucleotide
  modified_base 70: mod_base = OTHER; note = 2'-O-methyl modified nucleotide
  modified_base 75: mod_base = OTHER; note = 2'-O-methyl modified nucleotide
  modified_base 77: mod_base = OTHER; note = 2'-O-methyl modified nucleotide
  modified_base 80: mod_base = OTHER; note = 2'-O-methyl modified nucleotide
  modified_base 86: mod_base = OTHER; note = 2'-O-methyl modified nucleotide
  modified_base 87: mod_base = OTHER; note = 2'-O-methyl modified nucleotide
  modified_base 89: mod_base = OTHER; note = 2'-O-methyl modified nucleotide
  modified_base 90: mod_base = OTHER; note = 2'-O-methyl modified nucleotide
  modified_base 91: mod_base = OTHER; note = 2'-O-methyl modified nucleotide
  modified_base 92: mod_base = OTHER; note = 2'-O-methyl modified nucleotide
  modified_base 99: mod_base = OTHER; note = nucleotide with phosphorothioate linkage
  modified_base 100: mod_base = OTHER; note = 2'-O-methyl modified nucleotide with phosphorothioate linkage
  modified_base 101: mod_base = OTHER; note = 2'-O-methyl modified nucleotide

SEQ ID NO: 2465 - RNA, 101 nt, synthetic construct; identical to SEQ ID NO: 1465
  source 1..101: mol_type = other RNA
  modified_base 1: mod_base = OTHER; note = 2'-O-methyl modified nucleotide with phosphorothioate linkage
  modified_base 2: mod_base = OTHER; note = 2'-O-methyl modified nucleotide with phosphorothioate linkage
  modified_base 3: mod_base = OTHER; note = 2'-O-methyl modified nucleotide with phosphorothioate linkage
  modified_base 4: mod_base = OTHER; note = 2'-O-methyl modified nucleotide
  modified_base 5: mod_base = OTHER; note = 2'-O-methyl modified nucleotide
  modified_base 8: mod_base = OTHER; note = 2'-O-methyl modified nucleotide
  modified_base 9: mod_base = OTHER; note = 2'-O-methyl modified nucleotide
  modified_base 11: mod_base = OTHER; note = 2'-O-methyl modified nucleotide
  modified_base 13: mod_base = OTHER; note = 2'-O-methyl modified nucleotide
  modified_base 18: mod_base = OTHER; note = 2'-O-methyl modified nucleotide
  modified_base 22: mod_base = OTHER; note = 2'-O-methyl modified nucleotide
  modified_base 25: mod_base = OTHER; note = 2'-O-methyl modified nucleotide
  modified_base 29: mod_base = OTHER; note = 2'-O-methyl modified nucleotide
  modified_base 30: mod_base = OTHER; note = 2'-O-methyl modified nucleotide
  modified_base 31: mod_base = OTHER; note = 2'-O-methyl modified nucleotide
  modified_base 32: mod_base = OTHER; note = 2'-O-methyl modified nucleotide
  modified_base 37: mod_base = OTHER; note = 2'-O-methyl modified nucleotide
  modified_base 38: mod_base = OTHER; note = 2'-O-methyl modified nucleotide
  modified_base 39: mod_base = OTHER; note = 2'-O-methyl modified nucleotide
  modified_base 40: mod_base = OTHER; note = 2'-O-methyl modified nucleotide
  modified_base 41: mod_base = OTHER; note = 2'-O-methyl modified nucleotide
  modified_base 42: mod_base = OTHER; note = 2'-O-methyl modified nucleotide
  modified_base 43: mod_base = OTHER; note = 2'-O-methyl modified nucleotide
  modified_base 47: mod_base = OTHER; note = 2'-O-methyl modified nucleotide
  modified_base 48: mod_base = OTHER; note = 2'-O-methyl modified nucleotide
  modified_base 51: mod_base = OTHER; note = 2'-O-methyl modified nucleotide
  modified_base 54: mod_base = OTHER; note = nucleotide with phosphorothioate linkage
  modified_base 58: mod_base = OTHER; note = 2'-O-methyl modified nucleotide
  modified_base 59: mod_base = OTHER; note = 2'-O-methyl modified nucleotide
  modified_base 61: mod_base = OTHER; note = 2'-O-methyl modified nucleotide
  modified_base 62: mod_base = OTHER; note = 2'-O-methyl modified nucleotide
  modified_base 63: mod_base = OTHER; note = 2'-O-methyl modified nucleotide
  modified_base 64: mod_base = OTHER; note = 2'-O-methyl modified nucleotide
  modified_base 65: mod_base = OTHER; note = 2'-O-methyl modified nucleotide
  modified_base 66: mod_base = OTHER; note = 2'-O-methyl modified nucleotide
  modified_base 67: mod_base = OTHER; note = 2'-O-methyl modified nucleotide
  modified_base 68: mod_base = OTHER; note = 2'-O-methyl modified nucleotide
  modified_base 69: mod_base = OTHER; note = 2'-O-methyl modified nucleotide
  modified_base 70: mod_base = OTHER; note = 2'-O-methyl modified nucleotide
  modified_base 75: mod_base = OTHER; note = 2'-O-methyl modified nucleotide
  modified_base 77: mod_base = OTHER; note = 2'-O-methyl modified nucleotide
  modified_base 80: mod_base = OTHER; note = 2'-O-methyl modified nucleotide
  modified_base 86: mod_base = OTHER; note = 2'-O-methyl modified nucleotide
  modified_base 87: mod_base = OTHER; note = 2'-O-methyl modified nucleotide
  modified_base 89: mod_base = OTHER; note = 2'-O-methyl modified nucleotide
  modified_base 90: mod_base = OTHER; note = 2'-O-methyl modified nucleotide
  modified_base 91: mod_base = OTHER; note = 2'-O-methyl modified nucleotide
  modified_base 92: mod_base = OTHER; note = 2'-O-methyl modified nucleotide
  modified_base 99: mod_base = OTHER; note = nucleotide with phosphorothioate linkage
  modified_base 100: mod_base = OTHER; note = 2'-O-methyl modified nucleotide with phosphorothioate linkage
  modified_base 101: mod_base = OTHER; note = 2'-O-methyl modified nucleotide

SEQ ID NO: 2466 - RNA, 101 nt, synthetic construct; identical to SEQ ID NO: 1466
  source 1..101: mol_type = other RNA
  modified_base 1: mod_base = OTHER; note = 2'-O-methyl modified nucleotide with phosphorothioate linkage
  modified_base 2: mod_base = OTHER; note = 2'-O-methyl modified nucleotide with phosphorothioate linkage
  modified_base 3: mod_base = OTHER; note = 2'-O-methyl modified nucleotide with phosphorothioate linkage
  modified_base 4: mod_base = OTHER; note = 2'-O-methyl modified nucleotide
  modified_base 5: mod_base = OTHER; note = 2'-O-methyl modified nucleotide
  modified_base 8: mod_base = OTHER; note = 2'-O-methyl modified nucleotide
  modified_base 9: mod_base = OTHER; note = 2'-O-methyl modified nucleotide
  modified_base 11: mod_base = OTHER; note = 2'-O-methyl modified nucleotide
  modified_base 13: mod_base = OTHER; note = 2'-O-methyl modified nucleotide
  modified_base 18: mod_base = OTHER; note = 2'-O-methyl modified nucleotide
  modified_base 22: mod_base = OTHER; note = 2'-O-methyl modified nucleotide
  modified_base 25: mod_base = OTHER; note = 2'-O-methyl modified nucleotide
  modified_base 29: mod_base = OTHER; note = 2'-O-methyl modified nucleotide
  modified_base 30: mod_base = OTHER; note = 2'-O-methyl modified nucleotide
  modified_base 31: mod_base = OTHER; note = 2'-O-methyl modified nucleotide
  modified_base 32: mod_base = OTHER; note = 2'-O-methyl modified nucleotide
  modified_base 37: mod_base = OTHER; note = 2'-O-methyl modified nucleotide
  modified_base 38: mod_base = OTHER; note = 2'-O-methyl modified nucleotide
  modified_base 39: mod_base = OTHER; note = 2'-O-methyl modified nucleotide
  modified_base 40: mod_base = OTHER; note = 2'-O-methyl modified nucleotide
  modified_base 41: mod_base = OTHER; note = 2'-O-methyl modified nucleotide
  modified_base 42: mod_base = OTHER; note = 2'-O-methyl modified nucleotide
  modified_base 43: mod_base = OTHER; note = 2'-O-methyl modified nucleotide
  modified_base 47: mod_base = OTHER; note = 2'-O-methyl modified nucleotide
  modified_base 48: mod_base = OTHER; note = 2'-O-methyl modified nucleotide
  modified_base 51: mod_base = OTHER; note = 2'-O-methyl modified nucleotide
  modified_base 54: mod_base = OTHER; note = nucleotide with phosphorothioate linkage
  modified_base 58: mod_base = OTHER; note = 2'-O-methyl modified nucleotide
  modified_base 59: mod_base = OTHER; note = 2'-O-methyl modified nucleotide
  modified_base 61: mod_base = OTHER; note = 2'-O-methyl modified nucleotide
  modified_base 62: mod_base = OTHER; note = 2'-O-methyl modified nucleotide
  modified_base 63: mod_base = OTHER; note = 2'-O-methyl modified nucleotide
  modified_base 64: mod_base = OTHER; note = 2'-O-methyl modified nucleotide
  modified_base 65: mod_base = OTHER; note = 2'-O-methyl modified nucleotide
  modified_base 66: mod_base = OTHER; note = 2'-O-methyl modified nucleotide
  modified_base 67: mod_base = OTHER; note = 2'-O-methyl modified nucleotide
  modified_base 68: mod_base = OTHER; note = 2'-O-methyl modified nucleotide
  modified_base 69: mod_base = OTHER; note = 2'-O-methyl modified nucleotide
  modified_base 70: mod_base = OTHER; note = 2'-O-methyl modified nucleotide
  modified_base 75: mod_base = OTHER; note = 2'-O-methyl modified nucleotide
  modified_base 77: mod_base = OTHER; note = 2'-O-methyl modified nucleotide
  modified_base 80: mod_base = OTHER; note = 2'-O-methyl modified nucleotide
  modified_base 86: mod_base = OTHER; note = 2'-O-methyl modified nucleotide
  modified_base 87: mod_base = OTHER; note = 2'-O-methyl modified nucleotide
  modified_base 89: mod_base = OTHER; note = 2'-O-methyl modified nucleotide
  modified_base 90: mod_base = OTHER; note = 2'-O-methyl modified nucleotide
  modified_base 91: mod_base = OTHER; note = 2'-O-methyl modified nucleotide
  modified_base 92: mod_base = OTHER; note = 2'-O-methyl modified nucleotide
  modified_base 99: mod_base = OTHER; note = nucleotide with phosphorothioate linkage
  modified_base 100: mod_base = OTHER; note = 2'-O-methyl modified nucleotide with phosphorothioate linkage
  modified_base 101: mod_base = OTHER; note = 2'-O-methyl modified nucleotide

SEQ ID NO: 2467 - RNA, 101 nt, synthetic construct; identical to SEQ ID NO: 1467
  source 1..101: mol_type = other RNA
  modified_base 1: mod_base = OTHER; note = 2'-O-methyl modified nucleotide with phosphorothioate linkage
  modified_base 2: mod_base = OTHER; note = 2'-O-methyl modified nucleotide with phosphorothioate linkage
  modified_base 3: mod_base = OTHER; note = 2'-O-methyl modified nucleotide with phosphorothioate linkage
  modified_base 4: mod_base = OTHER; note = 2'-O-methyl modified nucleotide
  modified_base 5: mod_base = OTHER; note = 2'-O-methyl modified nucleotide
  modified_base 8: mod_base = OTHER; note = 2'-O-methyl modified nucleotide
  modified_base 9: mod_base = OTHER; note = 2'-O-methyl modified nucleotide
  modified_base 11: mod_base = OTHER; note = 2'-O-methyl modified nucleotide
  modified_base 13: mod_base = OTHER; note = 2'-O-methyl modified nucleotide
  modified_base 18: mod_base = OTHER; note = 2'-O-methyl modified nucleotide
  modified_base 22: mod_base = OTHER; note = 2'-O-methyl modified nucleotide
  modified_base 25: mod_base = OTHER; note = 2'-O-methyl modified nucleotide
  modified_base 29: mod_base = OTHER; note = 2'-O-methyl modified nucleotide
  modified_base 30: mod_base = OTHER; note = 2'-O-methyl modified nucleotide
  modified_base 31: mod_base = OTHER; note = 2'-O-methyl modified nucleotide
  modified_base 32: mod_base = OTHER; note = 2'-O-methyl modified nucleotide
  modified_base 37: mod_base = OTHER; note = 2'-O-methyl modified nucleotide
  modified_base 38: mod_base = OTHER; note = 2'-O-methyl modified nucleotide
  modified_base 39: mod_base = OTHER; note = 2'-O-methyl modified nucleotide
  modified_base 40: mod_base = OTHER; note = 2'-O-methyl modified nucleotide
  modified_base 41: mod_base = OTHER; note = 2'-O-methyl modified nucleotide
  modified_base 42: mod_base = OTHER; note = 2'-O-methyl modified nucleotide
  modified_base 43: mod_base = OTHER; note = 2'-O-methyl modified nucleotide
  modified_base 47: mod_base = OTHER; note = 2'-O-methyl modified nucleotide
  modified_base 48: mod_base = OTHER; note = 2'-O-methyl modified nucleotide
  modified_base 51: mod_base = OTHER; note = 2'-O-methyl modified nucleotide
  modified_base 54: mod_base = OTHER; note = nucleotide with phosphorothioate linkage
  modified_base 58: mod_base = OTHER; note = 2'-O-methyl modified nucleotide
  modified_base 59: mod_base = OTHER; note = 2'-O-methyl modified nucleotide
  modified_base 61: mod_base = OTHER; note = 2'-O-methyl modified nucleotide
  modified_base 62: mod_base = OTHER; note = 2'-O-methyl modified nucleotide
  modified_base 63: mod_base = OTHER; note = 2'-O-methyl modified nucleotide
  modified_base 64: mod_base = OTHER; note = 2'-O-methyl modified nucleotide
  modified_base 65: mod_base = OTHER; note = 2'-O-methyl modified nucleotide
  modified_base 66: mod_base = OTHER; note = 2'-O-methyl modified nucleotide
  modified_base 67: mod_base = OTHER; note = 2'-O-methyl modified nucleotide
  modified_base 68: mod_base = OTHER; note = 2'-O-methyl modified nucleotide
  modified_base 69: mod_base = OTHER; note = 2'-O-methyl modified nucleotide
  modified_base 70: mod_base = OTHER; note = 2'-O-methyl modified nucleotide
  modified_base 75: mod_base = OTHER; note = 2'-O-methyl modified nucleotide
  modified_base 77: mod_base = OTHER; note = 2'-O-methyl modified nucleotide
  modified_base 80: mod_base = OTHER; note = 2'-O-methyl modified nucleotide
  modified_base 86: mod_base = OTHER; note = 2'-O-methyl modified nucleotide
  modified_base 87: mod_base = OTHER; note = 2'-O-methyl modified nucleotide
  modified_base 89: mod_base = OTHER; note = 2'-O-methyl modified nucleotide
  modified_base 90: mod_base = OTHER; note = 2'-O-methyl modified nucleotide
  modified_base 91: mod_base = OTHER; note = 2'-O-methyl modified nucleotide
  modified_base 92: mod_base = OTHER; note = 2'-O-methyl modified nucleotide
  modified_base 99: mod_base = OTHER; note = nucleotide with phosphorothioate linkage
  modified_base 100: mod_base = OTHER; note = 2'-O-methyl modified nucleotide with phosphorothioate linkage
  modified_base 101: mod_base = OTHER; note = 2'-O-methyl modified nucleotide

SEQ ID NO: 2468 - RNA, 101 nt, synthetic construct; identical to SEQ ID NO: 1468
  source 1..101: mol_type = other RNA
  modified_base 1: mod_base = OTHER; note = 2'-O-methyl modified nucleotide with phosphorothioate linkage
  modified_base 2: mod_base = OTHER; note = 2'-O-methyl modified nucleotide with phosphorothioate linkage
  modified_base 3: mod_base = OTHER; note = 2'-O-methyl modified nucleotide with phosphorothioate linkage
  modified_base 4: mod_base = OTHER; note = 2'-O-methyl modified nucleotide
  modified_base 5: mod_base = OTHER; note = 2'-O-methyl modified nucleotide
  modified_base 8: mod_base = OTHER; note = 2'-O-methyl modified nucleotide
  modified_base 9: mod_base = OTHER; note = 2'-O-methyl modified nucleotide
  modified_base 11: mod_base = OTHER; note = 2'-O-methyl modified nucleotide
  modified_base 13: mod_base = OTHER; note = 2'-O-methyl modified nucleotide
  modified_base 18: mod_base = OTHER; note = 2'-O-methyl modified nucleotide
  modified_base 22: mod_base = OTHER; note = 2'-O-methyl modified nucleotide
  modified_base 25: mod_base = OTHER; note = 2'-O-methyl modified nucleotide
  modified_base 29: mod_base = OTHER; note = 2'-O-methyl modified nucleotide
  modified_base 30: mod_base = OTHER; note = 2'-O-methyl modified nucleotide
  modified_base 31: mod_base = OTHER; note = 2'-O-methyl modified nucleotide
  modified_base 32: mod_base = OTHER; note = 2'-O-methyl modified nucleotide
  modified_base 37: mod_base = OTHER; note = 2'-O-methyl modified nucleotide
  modified_base 38: mod_base = OTHER; note = 2'-O-methyl modified nucleotide
  modified_base 39: mod_base = OTHER; note = 2'-O-methyl modified nucleotide
  modified_base 40: mod_base = OTHER; note = 2'-O-methyl modified nucleotide
  modified_base 41: mod_base = OTHER; note = 2'-O-methyl modified nucleotide
  modified_base 42: mod_base = OTHER; note = 2'-O-methyl modified nucleotide
  modified_base 43: mod_base = OTHER; note = 2'-O-methyl modified nucleotide
  modified_base 47: mod_base = OTHER; note = 2'-O-methyl modified nucleotide
  modified_base 48: mod_base = OTHER; note = 2'-O-methyl modified nucleotide
  modified_base 51: mod_base = OTHER; note = 2'-O-methyl modified nucleotide
  modified_base 54: mod_base = OTHER; note = nucleotide with phosphorothioate linkage
  modified_base 58: mod_base = OTHER; note = 2'-O-methyl modified nucleotide
  modified_base 59: mod_base = OTHER; note = 2'-O-methyl modified nucleotide
  modified_base 61: mod_base = OTHER; note = 2'-O-methyl modified nucleotide
  modified_base 62: mod_base = OTHER; note = 2'-O-methyl modified nucleotide
  modified_base 63: mod_base = OTHER; note = 2'-O-methyl modified nucleotide
  modified_base 64: mod_base = OTHER; note = 2'-O-methyl modified nucleotide
  modified_base 65: mod_base = OTHER; note = 2'-O-methyl modified nucleotide
  modified_base 66: mod_base = OTHER; note = 2'-O-methyl modified nucleotide
  modified_base 67: mod_base = OTHER; note = 2'-O-methyl modified nucleotide
  modified_base 68: mod_base = OTHER; note = 2'-O-methyl modified nucleotide
  modified_base 69: mod_base = OTHER; note = 2'-O-methyl modified nucleotide
  modified_base 70: mod_base = OTHER; note = 2'-O-methyl modified nucleotide
  modified_base 75: mod_base = OTHER; note = 2'-O-methyl modified nucleotide
  modified_base 77: mod_base = OTHER; note = 2'-O-methyl modified nucleotide
  modified_base 80: mod_base = OTHER; note = 2'-O-methyl modified nucleotide
  modified_base 86: mod_base = OTHER; note = 2'-O-methyl modified nucleotide
  modified_base 87: mod_base = OTHER; note = 2'-O-methyl modified nucleotide
  modified_base 89: mod_base = OTHER; note = 2'-O-methyl modified nucleotide
  modified_base 90: mod_base = OTHER; note = 2'-O-methyl modified nucleotide
  modified_base 91: mod_base = OTHER; note = 2'-O-methyl modified nucleotide
  modified_base 92: mod_base = OTHER; note = 2'-O-methyl modified nucleotide
  modified_base 99: mod_base = OTHER; note = nucleotide with phosphorothioate linkage
  modified_base 100: mod_base = OTHER; note = 2'-O-methyl modified nucleotide with phosphorothioate linkage
  modified_base 101: mod_base = OTHER; note = 2'-O-methyl modified nucleotide

SEQ ID NO: 2469 - RNA, 101 nt, synthetic construct; identical to SEQ ID NO: 1469
  source 1..101: mol_type = other RNA
  modified_base 1: mod_base = OTHER; note = 2'-O-methyl modified nucleotide with phosphorothioate linkage
  modified_base 2: mod_base = OTHER; note = 2'-O-methyl modified nucleotide with phosphorothioate linkage
  modified_base 3: mod_base = OTHER; note = 2'-O-methyl modified nucleotide with phosphorothioate linkage
  modified_base 4: mod_base = OTHER; note = 2'-O-methyl modified nucleotide
  modified_base 5: mod_base = OTHER; note = 2'-O-methyl modified nucleotide
  modified_base 8: mod_base = OTHER; note = 2'-O-methyl modified nucleotide
  modified_base 9: mod_base = OTHER; note = 2'-O-methyl modified nucleotide
  modified_base 11: mod_base = OTHER; note = 2'-O-methyl modified nucleotide
  modified_base 13: mod_base = OTHER; note = 2'-O-methyl modified nucleotide
  modified_base 18: mod_base = OTHER; note = 2'-O-methyl modified nucleotide
  modified_base 22: mod_base = OTHER; note = 2'-O-methyl modified nucleotide
  modified_base 25: mod_base = OTHER; note = 2'-O-methyl modified nucleotide
  modified_base 29: mod_base = OTHER; note = 2'-O-methyl modified nucleotide
  modified_base 30: mod_base = OTHER; note = 2'-O-methyl modified nucleotide
  modified_base 31: mod_base = OTHER; note = 2'-O-methyl modified nucleotide
  modified_base 32: mod_base = OTHER; note = 2'-O-methyl modified nucleotide
  modified_base 37: mod_base = OTHER; note = 2'-O-methyl modified nucleotide
  modified_base 38: mod_base = OTHER; note = 2'-O-methyl modified nucleotide
  modified_base 39: mod_base = OTHER; note = 2'-O-methyl modified nucleotide
  modified_base 40: mod_base = OTHER; note = 2'-O-methyl modified nucleotide
  modified_base 41: mod_base = OTHER; note = 2'-O-methyl modified nucleotide
  modified_base 42: mod_base = OTHER; note = 2'-O-methyl modified nucleotide
  modified_base 43: mod_base = OTHER; note = 2'-O-methyl modified nucleotide
  modified_base 47: mod_base = OTHER; note = 2'-O-methyl modified nucleotide
  modified_base 48: mod_base = OTHER; note = 2'-O-methyl modified nucleotide
  modified_base 51: mod_base = OTHER; note = 2'-O-methyl modified nucleotide
  modified_base 54: mod_base = OTHER; note = nucleotide with phosphorothioate linkage
  modified_base 58: mod_base = OTHER; note = 2'-O-methyl modified nucleotide
  modified_base 59: mod_base = OTHER; note = 2'-O-methyl modified nucleotide
  modified_base 61: mod_base = OTHER; note = 2'-O-methyl modified nucleotide
  modified_base 62: mod_base = OTHER; note = 2'-O-methyl modified nucleotide
  modified_base 63: mod_base = OTHER; note = 2'-O-methyl modified nucleotide
  modified_base 64: mod_base = OTHER; note = 2'-O-methyl modified nucleotide
  modified_base 65: mod_base = OTHER; note = 2'-O-methyl modified nucleotide
  modified_base 66: mod_base = OTHER; note = 2'-O-methyl modified nucleotide
  modified_base 67: mod_base = OTHER; note = 2'-O-methyl modified nucleotide
  modified_base 68: mod_base = OTHER; note = 2'-O-methyl modified nucleotide
  modified_base 69: mod_base = OTHER; note = 2'-O-methyl modified nucleotide
  modified_base 70: mod_base = OTHER; note = 2'-O-methyl modified nucleotide
  modified_base 75: mod_base = OTHER; note = 2'-O-methyl modified nucleotide
  modified_base 77: mod_base = OTHER; note = 2'-O-methyl modified nucleotide
  modified_base 80: mod_base = OTHER; note = 2'-O-methyl modified nucleotide
  modified_base 86: mod_base = OTHER; note = 2'-O-methyl modified nucleotide
  modified_base 87: mod_base = OTHER; note = 2'-O-methyl modified nucleotide
  modified_base 89: mod_base = OTHER; note = 2'-O-methyl modified nucleotide
  modified_base 90: mod_base = OTHER; note = 2'-O-methyl modified nucleotide
  modified_base 91: mod_base = OTHER; note = 2'-O-methyl modified nucleotide
  modified_base 92: mod_base = OTHER; note = 2'-O-methyl modified nucleotide
  modified_base 99: mod_base = OTHER; note = nucleotide with phosphorothioate linkage
  modified_base 100: mod_base = OTHER; note = 2'-O-methyl modified nucleotide with phosphorothioate linkage
  modified_base 101: mod_base = OTHER; note = 2'-O-methyl modified nucleotide

SEQ ID NO: 2470 - RNA, 101 nt, synthetic construct; identical to SEQ ID NO: 1470
  source 1..101: mol_type = other RNA
  modified_base 1: mod_base = OTHER; note = 2'-O-methyl modified nucleotide with phosphorothioate linkage
  modified_base 2: mod_base = OTHER; note = 2'-O-methyl modified nucleotide with phosphorothioate linkage
  modified_base 3: mod_base = OTHER; note = 2'-O-methyl modified nucleotide with phosphorothioate linkage
  modified_base 4: mod_base = OTHER; note = 2'-O-methyl modified nucleotide
  modified_base 5: mod_base = OTHER; note = 2'-O-methyl modified nucleotide
  modified_base 8: mod_base = OTHER; note = 2'-O-methyl modified nucleotide
  modified_base 9: mod_base = OTHER; note = 2'-O-methyl modified nucleotide
  modified_base 11: mod_base = OTHER; note = 2'-O-methyl modified nucleotide
  modified_base 13: mod_base = OTHER; note = 2'-O-methyl modified nucleotide
  modified_base 18: mod_base = OTHER; note = 2'-O-methyl modified nucleotide
  modified_base 22: mod_base = OTHER; note = 2'-O-methyl modified nucleotide
  modified_base 25: mod_base = OTHER; note = 2'-O-methyl modified nucleotide
  modified_base 29: mod_base = OTHER; note = 2'-O-methyl modified nucleotide
  modified_base 30: mod_base = OTHER; note = 2'-O-methyl modified nucleotide
  modified_base 31: mod_base = OTHER; note = 2'-O-methyl modified nucleotide
  modified_base 32: mod_base = OTHER; note = 2'-O-methyl modified nucleotide
  modified_base 37: mod_base = OTHER; note = 2'-O-methyl modified nucleotide
  modified_base 38: mod_base = OTHER; note = 2'-O-methyl modified nucleotide
  modified_base 39: mod_base = OTHER; note = 2'-O-methyl modified nucleotide
  modified_base 40: mod_base = OTHER; note = 2'-O-methyl modified nucleotide
  modified_base 41: mod_base = OTHER; note = 2'-O-methyl modified nucleotide
  modified_base 42: mod_base = OTHER; note = 2'-O-methyl modified nucleotide
  modified_base 43: mod_base = OTHER; note = 2'-O-methyl modified nucleotide
  modified_base 47: mod_base = OTHER; note = 2'-O-methyl modified nucleotide
  modified_base 48: mod_base = OTHER; note = 2'-O-methyl modified nucleotide
  modified_base 51: mod_base = OTHER; note = 2'-O-methyl modified nucleotide
  modified_base 54: mod_base = OTHER; note = nucleotide with phosphorothioate linkage
  modified_base 58: mod_base = OTHER; note = 2'-O-methyl modified nucleotide
  modified_base 59: mod_base = OTHER; note = 2'-O-methyl modified nucleotide
  modified_base 61: mod_base = OTHER; note = 2'-O-methyl modified nucleotide
  modified_base 62: mod_base = OTHER; note = 2'-O-methyl modified nucleotide
  modified_base 63: mod_base = OTHER; note = 2'-O-methyl modified nucleotide
  modified_base 64: mod_base = OTHER; note = 2'-O-methyl modified nucleotide
  modified_base 65: mod_base = OTHER; note = 2'-O-methyl modified nucleotide
  modified_base 66: mod_base = OTHER; note = 2'-O-methyl modified nucleotide
  modified_base 67: mod_base = OTHER; note = 2'-O-methyl modified nucleotide
  modified_base 68: mod_base = OTHER; note = 2'-O-methyl modified nucleotide
  modified_base 69: mod_base = OTHER; note = 2'-O-methyl modified nucleotide
  modified_base 70: mod_base = OTHER; note = 2'-O-methyl modified nucleotide
  modified_base 75: mod_base = OTHER; note = 2'-O-methyl modified nucleotide
  modified_base 77: mod_base = OTHER; note = 2'-O-methyl modified nucleotide
  modified_base 80: mod_base = OTHER; note = 2'-O-methyl modified nucleotide
  modified_base 86: mod_base = OTHER; note = 2'-O-methyl modified nucleotide
  modified_base 87: mod_base = OTHER; note = 2'-O-methyl modified nucleotide
  modified_base 89: mod_base = OTHER; note = 2'-O-methyl modified nucleotide
  modified_base 90: mod_base = OTHER; note = 2'-O-methyl modified nucleotide
  modified_base 91: mod_base = OTHER; note = 2'-O-methyl modified nucleotide
  modified_base 92: mod_base = OTHER; note = 2'-O-methyl modified nucleotide
  modified_base 99: mod_base = OTHER; note = nucleotide with phosphorothioate linkage
  modified_base 100: mod_base = OTHER; note = 2'-O-methyl modified nucleotide with phosphorothioate linkage
  modified_base 101: mod_base = OTHER; note = 2'-O-methyl modified nucleotide

SEQ ID NO: 2471 - RNA, 101 nt, synthetic construct; identical to SEQ ID NO: 1471
  source 1..101: mol_type = other RNA
  modified_base 1: mod_base = OTHER; note = 2'-O-methyl modified nucleotide with phosphorothioate linkage
  modified_base 2: mod_base = OTHER; note = 2'-O-methyl modified nucleotide with phosphorothioate linkage
  modified_base 3: mod_base = OTHER; note = 2'-O-methyl modified nucleotide with phosphorothioate linkage
  modified_base 4: mod_base = OTHER; note = 2'-O-methyl modified nucleotide
  modified_base 5: mod_base = OTHER; note = 2'-O-methyl modified nucleotide
  modified_base 8: mod_base = OTHER; note = 2'-O-methyl modified nucleotide
  modified_base 9: mod_base = OTHER; note = 2'-O-methyl modified nucleotide
  modified_base 11: mod_base = OTHER; note = 2'-O-methyl modified nucleotide
  modified_base 13: mod_base = OTHER; note = 2'-O-methyl modified nucleotide
  modified_base 18: mod_base = OTHER; note = 2'-O-methyl modified nucleotide
  modified_base 22: mod_base = OTHER; note = 2'-O-methyl modified nucleotide
  modified_base 25: mod_base = OTHER; note = 2'-O-methyl modified nucleotide
  modified_base 29: mod_base = OTHER; note = 2'-O-methyl modified nucleotide
  modified_base 30: mod_base = OTHER; note = 2'-O-methyl modified nucleotide
  modified_base 31: mod_base = OTHER; note = 2'-O-methyl modified nucleotide
  modified_base 32: mod_base = OTHER; note = 2'-O-methyl modified nucleotide
  modified_base 37: mod_base = OTHER; note = 2'-O-methyl modified nucleotide
  modified_base 38: mod_base = OTHER; note = 2'-O-methyl modified nucleotide
  modified_base 39: mod_base = OTHER; note = 2'-O-methyl modified nucleotide
  modified_base 40: mod_base = OTHER; note = 2'-O-methyl modified nucleotide
  modified_base 41: mod_base = OTHER; note = 2'-O-methyl modified nucleotide
  modified_base 42: mod_base = OTHER; note = 2'-O-methyl modified nucleotide
  modified_base 43: mod_base = OTHER; note = 2'-O-methyl modified nucleotide
  modified_base 47: mod_base = OTHER; note = 2'-O-methyl modified nucleotide
  modified_base 48: mod_base = OTHER; note = 2'-O-methyl modified nucleotide
  modified_base 51: mod_base = OTHER; note = 2'-O-methyl modified nucleotide
  modified_base 54: mod_base = OTHER; note = nucleotide with phosphorothioate linkage
  modified_base 58: mod_base = OTHER; note = 2'-O-methyl modified nucleotide
  modified_base 59: mod_base = OTHER; note = 2'-O-methyl modified nucleotide
  modified_base 61: mod_base = OTHER; note = 2'-O-methyl modified nucleotide
  modified_base 62: mod_base = OTHER; note = 2'-O-methyl modified nucleotide
  modified_base 63: mod_base = OTHER; note = 2'-O-methyl modified nucleotide
  modified_base 64: mod_base = OTHER; note = 2'-O-methyl modified nucleotide
  modified_base 65: mod_base = OTHER; note = 2'-O-methyl modified nucleotide
  modified_base 66: mod_base = OTHER; note = 2'-O-methyl modified nucleotide
  modified_base 67: mod_base = OTHER; note = 2'-O-methyl modified nucleotide
  modified_base 68: mod_base = OTHER; note = 2'-O-methyl modified nucleotide
  modified_base 69: mod_base = OTHER; note = 2'-O-methyl modified nucleotide
  modified_base 70: mod_base = OTHER; note = 2'-O-methyl modified nucleotide
  modified_base 75: mod_base = OTHER; note = 2'-O-methyl modified nucleotide
  modified_base 77: mod_base = OTHER; note = 2'-O-methyl modified nucleotide
  modified_base 80: mod_base = OTHER; note = 2'-O-methyl modified nucleotide
  modified_base 86: mod_base = OTHER; note = 2'-O-methyl modified nucleotide
  modified_base 87: mod_base = OTHER; note = 2'-O-methyl modified nucleotide
  modified_base 89: mod_base = OTHER; note = 2'-O-methyl modified nucleotide
  modified_base 90: mod_base = OTHER; note = 2'-O-methyl modified nucleotide
  modified_base 91: mod_base = OTHER; note = 2'-O-methyl modified nucleotide
  modified_base 92: mod_base = OTHER; note = 2'-O-methyl modified nucleotide
  modified_base 99: mod_base = OTHER; note = nucleotide with phosphorothioate linkage
  modified_base 100: mod_base = OTHER; note = 2'-O-methyl modified nucleotide with phosphorothioate linkage
  modified_base 101: mod_base = OTHER; note = 2'-O-methyl modified nucleotide

SEQ ID NO: 2472 - RNA, 101 nt, synthetic construct; identical to SEQ ID NO: 1472
  source 1..101: mol_type = other RNA
  modified_base 1: mod_base = OTHER; note = 2'-O-methyl modified nucleotide with phosphorothioate linkage
  modified_base 2: mod_base = OTHER; note = 2'-O-methyl modified nucleotide with phosphorothioate linkage
  modified_base 3: mod_base = OTHER; note = 2'-O-methyl modified nucleotide with phosphorothioate linkage
  modified_base 4: mod_base = OTHER; note = 2'-O-methyl modified nucleotide
  modified_base 5: mod_base = OTHER; note = 2'-O-methyl modified nucleotide
  modified_base 8: mod_base = OTHER; note = 2'-O-methyl modified nucleotide
  modified_base 9: mod_base = OTHER; note = 2'-O-methyl modified nucleotide
  modified_base 11: mod_base = OTHER; note = 2'-O-methyl modified nucleotide
  modified_base 13: mod_base = OTHER; note = 2'-O-methyl modified nucleotide
  modified_base 18: mod_base = OTHER; note = 2'-O-methyl modified nucleotide
  modified_base 22: mod_base = OTHER; note = 2'-O-methyl modified nucleotide
  modified_base 25: mod_base = OTHER; note = 2'-O-methyl modified nucleotide
  modified_base 29: mod_base = OTHER; note = 2'-O-methyl modified nucleotide
  modified_base 30: mod_base = OTHER; note = 2'-O-methyl modified nucleotide
  modified_base 31: mod_base = OTHER; note = 2'-O-methyl modified nucleotide
  modified_base 32: mod_base = OTHER; note = 2'-O-methyl modified nucleotide
  modified_base 37: mod_base = OTHER; note = 2'-O-methyl modified nucleotide
  modified_base 38: mod_base = OTHER; note = 2'-O-methyl modified nucleotide
  modified_base 39: mod_base = OTHER; note = 2'-O-methyl modified nucleotide
  modified_base 40: mod_base = OTHER; note = 2'-O-methyl modified nucleotide
  modified_base 41: mod_base = OTHER; note = 2'-O-methyl modified nucleotide
  modified_base 42: mod_base = OTHER; note = 2'-O-methyl modified nucleotide
  modified_base 43: mod_base = OTHER; note = 2'-O-methyl modified nucleotide
  modified_base 47: mod_base = OTHER; note = 2'-O-methyl modified nucleotide
  modified_base 48: mod_base = OTHER; note = 2'-O-methyl modified nucleotide
  modified_base 51: mod_base = OTHER; note = 2'-O-methyl modified nucleotide
  modified_base 54: mod_base = OTHER; note = nucleotide with phosphorothioate linkage
  modified_base 58: mod_base = OTHER; note = 2'-O-methyl modified nucleotide
  modified_base 59: mod_base = OTHER; note = 2'-O-methyl modified nucleotide
  modified_base 61: mod_base = OTHER; note = 2'-O-methyl modified nucleotide
  modified_base 62: mod_base = OTHER; note = 2'-O-methyl modified nucleotide
  modified_base 63: mod_base = OTHER; note = 2'-O-methyl modified nucleotide
  modified_base 64: mod_base = OTHER; note = 2'-O-methyl modified nucleotide
  modified_base 65: mod_base = OTHER; note = 2'-O-methyl modified nucleotide
  modified_base 66: mod_base = OTHER; note = 2'-O-methyl modified nucleotide
  modified_base 67: mod_base = OTHER; note = 2'-O-methyl modified nucleotide
  modified_base 68: mod_base = OTHER; note = 2'-O-methyl modified nucleotide
  modified_base 69: mod_base = OTHER; note = 2'-O-methyl modified nucleotide
  modified_base 70: mod_base = OTHER; note = 2'-O-methyl modified nucleotide
  modified_base 75: mod_base = OTHER; note = 2'-O-methyl modified nucleotide
  modified_base 77: mod_base = OTHER; note = 2'-O-methyl modified nucleotide
  modified_base 80: mod_base = OTHER; note = 2'-O-methyl modified nucleotide
  modified_base 86: mod_base = OTHER; note = 2'-O-methyl modified nucleotide
  modified_base 87: mod_base = OTHER; note = 2'-O-methyl modified nucleotide
  modified_base 89: mod_base = OTHER; note = 2'-O-methyl modified nucleotide
  modified_base 90: mod_base = OTHER; note = 2'-O-methyl modified nucleotide
  modified_base 91: mod_base = OTHER; note = 2'-O-methyl modified nucleotide
  modified_base 92: mod_base = OTHER; note = 2'-O-methyl modified nucleotide
  modified_base 99: mod_base = OTHER; note = nucleotide with phosphorothioate linkage
  modified_base 100: mod_base = OTHER; note = 2'-O-methyl modified nucleotide with phosphorothioate linkage
  modified_base 101: mod_base = OTHER; note = 2'-O-methyl modified nucleotide

SEQ ID NO: 2473 - RNA, 101 nt, synthetic construct; identical to SEQ ID NO: 1473
  source 1..101: mol_type = other RNA
  modified_base 1: mod_base = OTHER; note = 2'-O-methyl modified nucleotide with phosphorothioate linkage
  modified_base 2: mod_base = OTHER; note = 2'-O-methyl modified nucleotide with phosphorothioate linkage
  modified_base 3: mod_base = OTHER; note = 2'-O-methyl modified nucleotide with phosphorothioate linkage
  modified_base 4: mod_base = OTHER; note = 2'-O-methyl modified nucleotide
  modified_base 5: mod_base = OTHER; note = 2'-O-methyl modified nucleotide
  modified_base 8: mod_base = OTHER; note = 2'-O-methyl modified nucleotide
  modified_base 9: mod_base = OTHER; note = 2'-O-methyl modified nucleotide
  modified_base 11: mod_base = OTHER; note = 2'-O-methyl modified nucleotide
  modified_base 13: mod_base = OTHER; note = 2'-O-methyl modified nucleotide
  modified_base 18: mod_base = OTHER; note = 2'-O-methyl modified nucleotide
  modified_base 22: mod_base = OTHER; note = 2'-O-methyl modified nucleotide
  modified_base 25: mod_base = OTHER; note = 2'-O-methyl modified nucleotide
  modified_base 29: mod_base = OTHER; note = 2'-O-methyl modified nucleotide
  modified_base 30: mod_base = OTHER; note = 2'-O-methyl modified nucleotide
  modified_base 31: mod_base = OTHER; note = 2'-O-methyl modified nucleotide
  modified_base 32: mod_base = OTHER; note = 2'-O-methyl modified nucleotide
  modified_base 37: mod_base = OTHER; note = 2'-O-methyl modified nucleotide
  modified_base 38: mod_base = OTHER; note = 2'-O-methyl modified nucleotide
  modified_base 39: mod_base = OTHER; note = 2'-O-methyl modified nucleotide
  modified_base 40: mod_base = OTHER; note = 2'-O-methyl modified nucleotide
  modified_base 41: mod_base = OTHER; note = 2'-O-methyl modified nucleotide
  modified_base 42: mod_base = OTHER; note = 2'-O-methyl modified nucleotide
  modified_base 43: mod_base = OTHER; note = 2'-O-methyl modified nucleotide
  modified_base 47: mod_base = OTHER; note = 2'-O-methyl modified nucleotide
  modified_base 48: mod_base = OTHER; note = 2'-O-methyl modified nucleotide
  modified_base 51: mod_base = OTHER; note = 2'-O-methyl modified nucleotide
  modified_base 54: mod_base = OTHER; note = nucleotide with phosphorothioate linkage
  modified_base 58: mod_base = OTHER; note = 2'-O-methyl modified nucleotide
  modified_base 59: mod_base = OTHER; note = 2'-O-methyl modified nucleotide
  modified_base 61: mod_base = OTHER; note = 2'-O-methyl modified nucleotide
  modified_base 62: mod_base = OTHER; note = 2'-O-methyl modified nucleotide
  modified_base 63: mod_base = OTHER; note = 2'-O-methyl modified nucleotide
  modified_base 64: mod_base = OTHER; note = 2'-O-methyl modified nucleotide
  modified_base 65: mod_base = OTHER; note = 2'-O-methyl modified nucleotide
  modified_base 66: mod_base = OTHER; note = 2'-O-methyl modified nucleotide
  modified_base 67: mod_base = OTHER; note = 2'-O-methyl modified nucleotide
  modified_base 68: mod_base = OTHER; note = 2'-O-methyl modified nucleotide
  modified_base 69: mod_base = OTHER; note = 2'-O-methyl modified nucleotide
  modified_base 70: mod_base = OTHER; note = 2'-O-methyl modified nucleotide
  modified_base 75: mod_base = OTHER; note = 2'-O-methyl modified nucleotide
  modified_base 77: mod_base = OTHER; note = 2'-O-methyl modified nucleotide
  modified_base 80: mod_base = OTHER; note = 2'-O-methyl modified nucleotide
  modified_base 86: mod_base = OTHER; note = 2'-O-methyl modified nucleotide
  modified_base 87: mod_base = OTHER; note = 2'-O-methyl modified nucleotide
  modified_base 89: mod_base = OTHER; note = 2'-O-methyl modified nucleotide
  modified_base 90: mod_base = OTHER; note = 2'-O-methyl modified nucleotide
  modified_base 91: mod_base = OTHER; note = 2'-O-methyl modified nucleotide
  modified_base 92: mod_base = OTHER; note = 2'-O-methyl modified nucleotide
  modified_base 99: mod_base = OTHER; note = nucleotide with phosphorothioate linkage
  modified_base 100: mod_base = OTHER; note = 2'-O-methyl modified nucleotide with phosphorothioate linkage
  modified_base 101: mod_base = OTHER; note = 2'-O-methyl modified nucleotide

SEQ ID NO: 2474 - RNA, 101 nt, synthetic construct; identical to SEQ ID NO: 1474
  source 1..101: mol_type = other RNA
  modified_base 1: mod_base = OTHER; note = 2'-O-methyl modified nucleotide with phosphorothioate linkage
  modified_base 2: mod_base = OTHER; note = 2'-O-methyl modified nucleotide with phosphorothioate linkage
  modified_base 3: mod_base = OTHER; note = 2'-O-methyl modified nucleotide with phosphorothioate linkage
  modified_base 4: mod_base = OTHER; note = 2'-O-methyl modified nucleotide
  modified_base 5: mod_base = OTHER; note = 2'-O-methyl modified nucleotide
  modified_base 8: mod_base = OTHER; note = 2'-O-methyl modified nucleotide
  modified_base 9: mod_base = OTHER; note = 2'-O-methyl modified nucleotide
  modified_base 11: mod_base = OTHER; note = 2'-O-methyl modified nucleotide
  modified_base 13: mod_base = OTHER; note = 2'-O-methyl modified nucleotide
  modified_base 18: mod_base = OTHER; note = 2'-O-methyl modified nucleotide
  modified_base 22: mod_base = OTHER; note = 2'-O-methyl modified nucleotide
  modified_base 25: mod_base = OTHER; note = 2'-O-methyl modified nucleotide
  modified_base 29: mod_base = OTHER; note = 2'-O-methyl modified nucleotide
  modified_base 30: mod_base = OTHER; note = 2'-O-methyl modified nucleotide
  modified_base 31: mod_base = OTHER; note = 2'-O-methyl modified nucleotide
  modified_base 32: mod_base = OTHER; note = 2'-O-methyl modified nucleotide
  modified_base 37: mod_base = OTHER; note = 2'-O-methyl modified nucleotide
  modified_base 38: mod_base = OTHER; note = 2'-O-methyl modified nucleotide
  modified_base 39: mod_base = OTHER; note = 2'-O-methyl modified nucleotide
  modified_base 40: mod_base = OTHER; note = 2'-O-methyl modified nucleotide
  modified_base 41: mod_base = OTHER; note = 2'-O-methyl modified nucleotide
  modified_base 42: mod_base = OTHER; note = 2'-O-methyl modified nucleotide
  modified_base 43: mod_base = OTHER; note = 2'-O-methyl modified nucleotide
  modified_base 47: mod_base = OTHER; note = 2'-O-methyl modified nucleotide
  modified_base 48: mod_base = OTHER; note = 2'-O-methyl modified nucleotide
  modified_base 51: mod_base = OTHER; note = 2'-O-methyl modified nucleotide
  modified_base 54: mod_base = OTHER; note = nucleotide with phosphorothioate linkage
  modified_base 58: mod_base = OTHER; note = 2'-O-methyl modified nucleotide
  modified_base 59: mod_base = OTHER; note = 2'-O-methyl modified nucleotide
  modified_base 61: mod_base = OTHER; note = 2'-O-methyl modified nucleotide
  modified_base 62: mod_base = OTHER; note = 2'-O-methyl modified nucleotide
  modified_base 63: mod_base = OTHER; note = 2'-O-methyl modified nucleotide
  modified_base 64: mod_base = OTHER; note = 2'-O-methyl modified nucleotide
  modified_base 65: mod_base = OTHER; note = 2'-O-methyl modified nucleotide
  modified_base 66: mod_base = OTHER; note = 2'-O-methyl modified nucleotide
  modified_base 67: mod_base = OTHER; note = 2'-O-methyl modified nucleotide
  modified_base 68: mod_base = OTHER; note = 2'-O-methyl modified nucleotide
  modified_base 69: mod_base = OTHER; note = 2'-O-methyl modified nucleotide
  modified_base 70: mod_base = OTHER; note = 2'-O-methyl modified nucleotide
  modified_base 75: mod_base = OTHER; note = 2'-O-methyl modified nucleotide
  modified_base 77: mod_base = OTHER; note = 2'-O-methyl modified nucleotide
  modified_base 80: mod_base = OTHER; note = 2'-O-methyl modified nucleotide
  modified_base 86: mod_base = OTHER; note = 2'-O-methyl modified nucleotide
  modified_base 87: mod_base = OTHER; note = 2'-O-methyl modified nucleotide
  modified_base 89: mod_base = OTHER; note = 2'-O-methyl modified nucleotide
  modified_base 90: mod_base = OTHER; note = 2'-O-methyl modified nucleotide
  modified_base 91: mod_base = OTHER; note = 2'-O-methyl modified nucleotide
  modified_base 92: mod_base = OTHER; note = 2'-O-methyl modified nucleotide
  modified_base 99: mod_base = OTHER; note = nucleotide with phosphorothioate linkage
  modified_base 100: mod_base = OTHER; note = 2'-O-methyl modified nucleotide with phosphorothioate linkage
  modified_base 101: mod_base = OTHER; note = 2'-O-methyl modified nucleotide

SEQ ID NO: 2475 - RNA, 101 nt, synthetic construct; identical to SEQ ID NO: 1475
  source 1..101: mol_type = other RNA
  modified_base 1: mod_base = OTHER; note = 2'-O-methyl modified nucleotide with phosphorothioate linkage
  modified_base 2: mod_base = OTHER; note = 2'-O-methyl modified nucleotide with phosphorothioate linkage
  modified_base 3: mod_base = OTHER; note = 2'-O-methyl modified nucleotide with phosphorothioate linkage
  modified_base 4: mod_base = OTHER; note = 2'-O-methyl modified nucleotide
  modified_base 5: mod_base = OTHER; note = 2'-O-methyl modified nucleotide
  modified_base 8: mod_base = OTHER; note = 2'-O-methyl modified nucleotide
  modified_base 9: mod_base = OTHER; note = 2'-O-methyl modified nucleotide
  modified_base 11: mod_base = OTHER; note = 2'-O-methyl modified nucleotide
  modified_base 13: mod_base = OTHER; note = 2'-O-methyl modified nucleotide
  modified_base 18: mod_base = OTHER; note = 2'-O-methyl modified nucleotide
  modified_base 22: mod_base = OTHER; note = 2'-O-methyl modified nucleotide
  modified_base 25: mod_base = OTHER; note = 2'-O-methyl modified nucleotide
  modified_base 29: mod_base = OTHER; note = 2'-O-methyl modified nucleotide
  modified_base 30: mod_base = OTHER; note = 2'-O-methyl modified nucleotide
  modified_base 31: mod_base = OTHER; note = 2'-O-methyl modified nucleotide
  modified_base 32: mod_base = OTHER; note = 2'-O-methyl modified nucleotide
  modified_base 37: mod_base = OTHER; note = 2'-O-methyl modified nucleotide
  modified_base 38: mod_base = OTHER; note = 2'-O-methyl modified nucleotide
  modified_base 39: mod_base = OTHER; note = 2'-O-methyl modified nucleotide
  modified_base 40: mod_base = OTHER; note = 2'-O-methyl modified nucleotide
  modified_base 41: mod_base = OTHER; note = 2'-O-methyl modified nucleotide
  modified_base 42: mod_base = OTHER; note = 2'-O-methyl modified nucleotide
  modified_base 43: mod_base = OTHER; note = 2'-O-methyl modified nucleotide
  modified_base 47: mod_base = OTHER; note = 2'-O-methyl modified nucleotide
  modified_base 48: mod_base = OTHER; note = 2'-O-methyl modified nucleotide
  modified_base 51: mod_base = OTHER; note = 2'-O-methyl modified nucleotide
  modified_base 54: mod_base = OTHER; note = nucleotide with phosphorothioate linkage
  modified_base 58: mod_base = OTHER; note = 2'-O-methyl modified nucleotide
  modified_base 59: mod_base = OTHER; note = 2'-O-methyl modified nucleotide
  modified_base 61: mod_base = OTHER; note = 2'-O-methyl modified nucleotide
  modified_base 62: mod_base = OTHER; note = 2'-O-methyl modified nucleotide
  modified_base 63: mod_base = OTHER; note = 2'-O-methyl modified nucleotide
  modified_base 64: mod_base = OTHER; note = 2'-O-methyl modified nucleotide
  modified_base 65: mod_base = OTHER; note = 2'-O-methyl modified nucleotide
  modified_base 66: mod_base = OTHER; note = 2'-O-methyl modified nucleotide
  modified_base 67: mod_base = OTHER; note = 2'-O-methyl modified nucleotide
  modified_base 68: mod_base = OTHER; note = 2'-O-methyl modified nucleotide
  modified_base 69: mod_base = OTHER; note = 2'-O-methyl modified nucleotide
  modified_base 70: mod_base = OTHER; note = 2'-O-methyl modified nucleotide
  modified_base 75: mod_base = OTHER; note = 2'-O-methyl modified nucleotide
  modified_base 77: mod_base = OTHER; note = 2'-O-methyl modified nucleotide
  modified_base 80: mod_base = OTHER; note = 2'-O-methyl modified nucleotide
  modified_base 86: mod_base = OTHER; note = 2'-O-methyl modified nucleotide
  modified_base 87: mod_base = OTHER; note = 2'-O-methyl modified nucleotide
  modified_base 89: mod_base = OTHER; note = 2'-O-methyl modified nucleotide
  modified_base 90: mod_base = OTHER; note = 2'-O-methyl modified nucleotide
  modified_base 91: mod_base = OTHER; note = 2'-O-methyl modified nucleotide
  modified_base 92: mod_base = OTHER; note = 2'-O-methyl modified nucleotide
  modified_base 99: mod_base = OTHER; note = nucleotide with phosphorothioate linkage
  modified_base 100: mod_base = OTHER; note = 2'-O-methyl modified nucleotide with phosphorothioate linkage
  modified_base 101: mod_base = OTHER; note = 2'-O-methyl modified nucleotide

SEQ ID NO: 2476 - RNA, 101 nt, synthetic construct; identical to SEQ ID NO: 1476
  source 1..101: mol_type = other RNA
  modified_base 1: mod_base = OTHER; note = 2'-O-methyl modified nucleotide with phosphorothioate linkage
  modified_base 2: mod_base = OTHER; note = 2'-O-methyl modified nucleotide with phosphorothioate linkage
  modified_base 3: mod_base = OTHER; note = 2'-O-methyl modified nucleotide with phosphorothioate linkage
  modified_base 4: mod_base = OTHER; note = 2'-O-methyl modified nucleotide
  modified_base 5: mod_base = OTHER; note = 2'-O-methyl modified nucleotide
  modified_base 8: mod_base = OTHER; note = 2'-O-methyl modified nucleotide
  modified_base 9: mod_base = OTHER; note = 2'-O-methyl modified nucleotide
  modified_base 11: mod_base = OTHER; note = 2'-O-methyl modified nucleotide
  modified_base 13: mod_base = OTHER; note = 2'-O-methyl modified nucleotide
  modified_base 18: mod_base = OTHER; note = 2'-O-methyl modified nucleotide
  modified_base 22: mod_base = OTHER; note = 2'-O-methyl modified nucleotide
  modified_base 25: mod_base = OTHER; note = 2'-O-methyl modified nucleotide
  modified_base 29: mod_base = OTHER; note = 2'-O-methyl modified nucleotide
  modified_base 30: mod_base = OTHER; note = 2'-O-methyl modified nucleotide
  modified_base 31: mod_base = OTHER; note = 2'-O-methyl modified nucleotide
  modified_base 32: mod_base = OTHER; note = 2'-O-methyl modified nucleotide
  modified_base 37: mod_base = OTHER; note = 2'-O-methyl modified nucleotide
  modified_base 38: mod_base = OTHER; note = 2'-O-methyl modified nucleotide
  modified_base 39: mod_base = OTHER; note = 2'-O-methyl modified nucleotide
  modified_base 40: mod_base = OTHER; note = 2'-O-methyl modified nucleotide
  modified_base 41: mod_base = OTHER; note = 2'-O-methyl modified nucleotide
  modified_base 42: mod_base = OTHER; note = 2'-O-methyl modified nucleotide
  modified_base 43: mod_base = OTHER; note = 2'-O-methyl modified nucleotide
  modified_base 47: mod_base = OTHER; note = 2'-O-methyl modified nucleotide
  modified_base 48: mod_base = OTHER; note = 2'-O-methyl modified nucleotide
  modified_base 51: mod_base = OTHER; note = 2'-O-methyl modified nucleotide
  modified_base 54: mod_base = OTHER; note = nucleotide with phosphorothioate linkage
  modified_base 58: mod_base = OTHER; note = 2'-O-methyl modified nucleotide
  modified_base 59: mod_base = OTHER; note = 2'-O-methyl modified nucleotide
  modified_base 61: mod_base = OTHER; note = 2'-O-methyl modified nucleotide
  modified_base 62: mod_base = OTHER; note = 2'-O-methyl modified nucleotide
  modified_base 63: mod_base = OTHER; note = 2'-O-methyl modified nucleotide
  modified_base 64: mod_base = OTHER; note = 2'-O-methyl modified nucleotide
  modified_base 65: mod_base = OTHER; note = 2'-O-methyl modified nucleotide
  modified_base 66: mod_base = OTHER; note = 2'-O-methyl modified nucleotide
  modified_base 67: mod_base = OTHER; note = 2'-O-methyl modified nucleotide
  modified_base 68: mod_base = OTHER; note = 2'-O-methyl modified nucleotide
  modified_base 69: mod_base = OTHER; note = 2'-O-methyl modified nucleotide
  modified_base 70: mod_base = OTHER; note = 2'-O-methyl modified nucleotide
  modified_base 75: mod_base = OTHER; note = 2'-O-methyl modified nucleotide
  modified_base 77: mod_base = OTHER; note = 2'-O-methyl modified nucleotide
  modified_base 80: mod_base = OTHER; note = 2'-O-methyl modified nucleotide
  modified_base 86: mod_base = OTHER; note = 2'-O-methyl modified nucleotide
  modified_base 87: mod_base = OTHER; note = 2'-O-methyl modified nucleotide
  modified_base 89: mod_base = OTHER; note = 2'-O-methyl modified nucleotide
  modified_base 90: mod_base = OTHER; note = 2'-O-methyl modified nucleotide
  modified_base 91: mod_base = OTHER; note = 2'-O-methyl modified nucleotide
  modified_base 92: mod_base = OTHER; note = 2'-O-methyl modified nucleotide
  modified_base 99: mod_base = OTHER; note = nucleotide with phosphorothioate linkage
  modified_base 100: mod_base = OTHER; note = 2'-O-methyl modified nucleotide with phosphorothioate linkage
  modified_base 101: mod_base = OTHER; note = 2'-O-methyl modified nucleotide

SEQ ID NO: 2477 - RNA, 101 nt, synthetic construct; identical to SEQ ID NO: 1477
  source 1..101: mol_type = other RNA
  modified_base 1: mod_base = OTHER; note = 2'-O-methyl modified nucleotide with phosphorothioate linkage
  modified_base 2: mod_base = OTHER; note = 2'-O-methyl modified nucleotide with phosphorothioate linkage
  modified_base 3: mod_base = OTHER; note = 2'-O-methyl modified nucleotide with phosphorothioate linkage
  modified_base 4: mod_base = OTHER; note = 2'-O-methyl modified nucleotide
  modified_base 5: mod_base = OTHER; note = 2'-O-methyl modified nucleotide
  modified_base 8: mod_base = OTHER; note = 2'-O-methyl modified nucleotide
  modified_base 9: mod_base = OTHER; note = 2'-O-methyl modified nucleotide
  modified_base 11: mod_base = OTHER; note = 2'-O-methyl modified nucleotide
  modified_base 13: mod_base = OTHER; note = 2'-O-methyl modified nucleotide
  modified_base 18: mod_base = OTHER; note = 2'-O-methyl modified nucleotide
  modified_base 22: mod_base = OTHER; note = 2'-O-methyl modified nucleotide
  modified_base 25: mod_base = OTHER; note = 2'-O-methyl modified nucleotide
  modified_base 29: mod_base = OTHER; note = 2'-O-methyl modified nucleotide
  modified_base 30: mod_base = OTHER; note = 2'-O-methyl modified nucleotide
  modified_base 31: mod_base = OTHER; note = 2'-O-methyl modified nucleotide
  modified_base 32: mod_base = OTHER; note = 2'-O-methyl modified nucleotide
  modified_base 37: mod_base = OTHER; note = 2'-O-methyl modified nucleotide
  modified_base 38: mod_base = OTHER; note = 2'-O-methyl modified nucleotide
  modified_base 39: mod_base = OTHER; note = 2'-O-methyl modified nucleotide
  modified_base 40: mod_base = OTHER; note = 2'-O-methyl modified nucleotide
  modified_base 41: mod_base = OTHER; note = 2'-O-methyl modified nucleotide
  modified_base 42: mod_base = OTHER; note = 2'-O-methyl modified nucleotide
  modified_base 43: mod_base = OTHER; note = 2'-O-methyl modified nucleotide
  modified_base 47: mod_base = OTHER; note = 2'-O-methyl modified nucleotide
  modified_base 48: mod_base = OTHER; note = 2'-O-methyl modified nucleotide
  modified_base 51: mod_base = OTHER; note = 2'-O-methyl modified nucleotide
  modified_base 54: mod_base = OTHER; note = nucleotide with phosphorothioate linkage
  modified_base 58: mod_base = OTHER; note = 2'-O-methyl modified nucleotide
  modified_base 59: mod_base = OTHER; note = 2'-O-methyl modified nucleotide
  modified_base 61: mod_base = OTHER; note = 2'-O-methyl modified nucleotide
  modified_base 62: mod_base = OTHER; note = 2'-O-methyl modified nucleotide
  modified_base 63: mod_base = OTHER; note = 2'-O-methyl modified nucleotide
  modified_base 64: mod_base = OTHER; note = 2'-O-methyl modified nucleotide
  modified_base 65: mod_base = OTHER; note = 2'-O-methyl modified nucleotide
  modified_base 66: mod_base = OTHER; note = 2'-O-methyl modified nucleotide
  modified_base 67: mod_base = OTHER; note = 2'-O-methyl modified nucleotide
  modified_base 68: mod_base = OTHER; note = 2'-O-methyl modified nucleotide
  modified_base 69: mod_base = OTHER; note = 2'-O-methyl modified nucleotide
  modified_base 70: mod_base = OTHER; note = 2'-O-methyl modified nucleotide
  modified_base 75: mod_base = OTHER; note = 2'-O-methyl modified nucleotide
  modified_base 77: mod_base = OTHER; note = 2'-O-methyl modified nucleotide
  modified_base 80: mod_base = OTHER; note = 2'-O-methyl modified nucleotide
  modified_base 86: mod_base = OTHER; note = 2'-O-methyl modified nucleotide
  modified_base 87: mod_base = OTHER; note = 2'-O-methyl modified nucleotide
  modified_base 89: mod_base = OTHER; note = 2'-O-methyl modified nucleotide
  modified_base 90: mod_base = OTHER; note = 2'-O-methyl modified nucleotide
  modified_base 91: mod_base = OTHER; note = 2'-O-methyl modified nucleotide
  modified_base 92: mod_base = OTHER; note = 2'-O-methyl modified nucleotide
  modified_base 99: mod_base = OTHER; note = nucleotide with phosphorothioate linkage
  modified_base 100: mod_base = OTHER; note = 2'-O-methyl modified nucleotide with phosphorothioate linkage
  modified_base 101: mod_base = OTHER; note = 2'-O-methyl modified nucleotide

SEQ ID NO: 2478 - RNA, 101 nt, synthetic construct; identical to SEQ ID NO: 1478
  source 1..101: mol_type = other RNA
  modified_base 1: mod_base = OTHER; note = 2'-O-methyl modified nucleotide with phosphorothioate linkage
  modified_base 2: mod_base = OTHER; note = 2'-O-methyl modified nucleotide with phosphorothioate linkage
  modified_base 3: mod_base = OTHER; note = 2'-O-methyl modified nucleotide with phosphorothioate linkage
  modified_base 4: mod_base = OTHER; note = 2'-O-methyl modified nucleotide
  modified_base 5: mod_base = OTHER; note = 2'-O-methyl modified nucleotide
  modified_base 8: mod_base = OTHER; note = 2'-O-methyl modified nucleotide
  modified_base 9: mod_base = OTHER; note = 2'-O-methyl modified nucleotide
  modified_base 11: mod_base = OTHER; note = 2'-O-methyl modified nucleotide
  modified_base 13: mod_base = OTHER; note = 2'-O-methyl modified nucleotide
  modified_base 18: mod_base = OTHER; note = 2'-O-methyl modified nucleotide
  modified_base 22: mod_base = OTHER; note = 2'-O-methyl modified nucleotide
  modified_base 25: mod_base = OTHER; note = 2'-O-methyl modified nucleotide
  modified_base 29: mod_base = OTHER; note = 2'-O-methyl modified nucleotide
  modified_base 30: mod_base = OTHER; note = 2'-O-methyl modified nucleotide
  modified_base 31: mod_base = OTHER; note = 2'-O-methyl modified nucleotide
  modified_base 32: mod_base = OTHER; note = 2'-O-methyl modified nucleotide
  modified_base 37: mod_base = OTHER; note = 2'-O-methyl modified nucleotide
  modified_base 38: mod_base = OTHER; note = 2'-O-methyl modified nucleotide
  modified_base 39: mod_base = OTHER; note = 2'-O-methyl modified nucleotide
  modified_base 40: mod_base = OTHER; note = 2'-O-methyl modified nucleotide
  modified_base 41: mod_base = OTHER; note = 2'-O-methyl modified nucleotide
  modified_base 42: mod_base = OTHER; note = 2'-O-methyl modified nucleotide
  modified_base 43: mod_base = OTHER; note = 2'-O-methyl modified nucleotide
  modified_base 47: mod_base = OTHER; note = 2'-O-methyl modified nucleotide
  modified_base 48: mod_base = OTHER; note = 2'-O-methyl modified nucleotide
  modified_base 51: mod_base = OTHER; note = 2'-O-methyl modified nucleotide
  modified_base 54: mod_base = OTHER; note = nucleotide with phosphorothioate linkage
  modified_base 58: mod_base = OTHER; note = 2'-O-methyl modified nucleotide
  modified_base 59: mod_base = OTHER; note = 2'-O-methyl modified nucleotide
  modified_base 61: mod_base = OTHER; note = 2'-O-methyl modified nucleotide
  modified_base 62: mod_base = OTHER; note = 2'-O-methyl modified nucleotide
  modified_base 63: mod_base = OTHER; note = 2'-O-methyl modified nucleotide
  modified_base 64: mod_base = OTHER; note = 2'-O-methyl modified nucleotide
  modified_base 65: mod_base = OTHER; note = 2'-O-methyl modified nucleotide
  modified_base 66: mod_base = OTHER; note = 2'-O-methyl modified nucleotide
  modified_base 67: mod_base = OTHER; note = 2'-O-methyl modified nucleotide
  modified_base 68: mod_base = OTHER; note = 2'-O-methyl modified nucleotide
  modified_base 69: mod_base = OTHER; note = 2'-O-methyl modified nucleotide
  modified_base 70: mod_base = OTHER; note = 2'-O-methyl modified nucleotide
  modified_base 75: mod_base = OTHER; note = 2'-O-methyl modified nucleotide
  modified_base 77: mod_base = OTHER; note = 2'-O-methyl modified nucleotide
  modified_base 80: mod_base = OTHER; note = 2'-O-methyl modified nucleotide
  modified_base 86: mod_base = OTHER; note = 2'-O-methyl modified nucleotide
  modified_base 87: mod_base = OTHER; note = 2'-O-methyl modified nucleotide
  modified_base 89: mod_base = OTHER; note = 2'-O-methyl modified nucleotide
  modified_base 90: mod_base = OTHER; note = 2'-O-methyl modified nucleotide
  modified_base 91: mod_base = OTHER; note = 2'-O-methyl modified nucleotide
  modified_base 92: mod_base = OTHER; note = 2'-O-methyl modified nucleotide
  modified_base 99: mod_base = OTHER; note = nucleotide with phosphorothioate linkage
  modified_base 100: mod_base = OTHER; note = 2'-O-methyl modified nucleotide with phosphorothioate linkage
  modified_base 101: mod_base = OTHER; note = 2'-O-methyl modified nucleotide

SEQ ID NO: 2479 - RNA, 101 nt, synthetic construct; identical to SEQ ID NO: 1479
  source 1..101: mol_type = other RNA
  modified_base 1: mod_base = OTHER; note = 2'-O-methyl modified nucleotide with phosphorothioate linkage
  modified_base 2: mod_base = OTHER; note = 2'-O-methyl modified nucleotide with phosphorothioate linkage
  modified_base 3: mod_base = OTHER; note = 2'-O-methyl modified nucleotide with phosphorothioate linkage
  modified_base 4: mod_base = OTHER; note = 2'-O-methyl modified nucleotide
  modified_base 5: mod_base = OTHER; note = 2'-O-methyl modified nucleotide
  modified_base 8: mod_base = OTHER; note = 2'-O-methyl modified nucleotide
  modified_base 9: mod_base = OTHER; note = 2'-O-methyl modified nucleotide
  modified_base 11: mod_base = OTHER; note = 2'-O-methyl modified nucleotide
  modified_base 13: mod_base = OTHER; note = 2'-O-methyl modified nucleotide
  modified_base 18: mod_base = OTHER; note = 2'-O-methyl modified nucleotide
  modified_base 22: mod_base = OTHER; note = 2'-O-methyl modified nucleotide
  modified_base 25: mod_base = OTHER; note = 2'-O-methyl modified nucleotide
  modified_base 29: mod_base = OTHER; note = 2'-O-methyl modified nucleotide
  modified_base 30: mod_base = OTHER; note = 2'-O-methyl modified nucleotide
  modified_base 31: mod_base = OTHER; note = 2'-O-methyl modified nucleotide
  modified_base 32: mod_base = OTHER; note = 2'-O-methyl modified nucleotide
  modified_base 37: mod_base = OTHER; note = 2'-O-methyl modified nucleotide
  modified_base 38: mod_base = OTHER; note = 2'-O-methyl modified nucleotide
  modified_base 39: mod_base = OTHER; note = 2'-O-methyl modified nucleotide
  modified_base 40: mod_base = OTHER; note = 2'-O-methyl modified nucleotide
  modified_base 41: mod_base = OTHER; note = 2'-O-methyl modified nucleotide
  modified_base 42: mod_base = OTHER; note = 2'-O-methyl modified nucleotide
  modified_base 43: mod_base = OTHER; note = 2'-O-methyl modified nucleotide
  modified_base 47: mod_base = OTHER; note = 2'-O-methyl modified nucleotide
  modified_base 48: mod_base = OTHER; note = 2'-O-methyl modified nucleotide
  modified_base 51: mod_base = OTHER; note = 2'-O-methyl modified nucleotide
  modified_base 54: mod_base = OTHER; note = nucleotide with phosphorothioate linkage
  modified_base 58: mod_base = OTHER; note = 2'-O-methyl modified nucleotide
  modified_base 59: mod_base = OTHER; note = 2'-O-methyl modified nucleotide
  modified_base 61: mod_base = OTHER; note = 2'-O-methyl modified nucleotide
  modified_base 62: mod_base = OTHER; note = 2'-O-methyl modified nucleotide
  modified_base 63: mod_base = OTHER; note = 2'-O-methyl modified nucleotide
  modified_base 64: mod_base = OTHER; note = 2'-O-methyl modified nucleotide
  modified_base 65: mod_base = OTHER; note = 2'-O-methyl modified nucleotide
  modified_base 66: mod_base = OTHER; note = 2'-O-methyl modified nucleotide
  modified_base 67: mod_base = OTHER; note = 2'-O-methyl modified nucleotide
  modified_base 68: mod_base = OTHER; note = 2'-O-methyl modified nucleotide
  modified_base 69: mod_base = OTHER; note = 2'-O-methyl modified nucleotide
  modified_base 70: mod_base = OTHER; note = 2'-O-methyl modified nucleotide
  modified_base 75: mod_base = OTHER; note = 2'-O-methyl modified nucleotide
  modified_base 77: mod_base = OTHER; note = 2'-O-methyl modified nucleotide
  modified_base 80: mod_base = OTHER; note = 2'-O-methyl modified nucleotide
  modified_base 86: mod_base = OTHER; note = 2'-O-methyl modified nucleotide
  modified_base 87: mod_base = OTHER; note = 2'-O-methyl modified nucleotide
  modified_base 89: mod_base = OTHER; note = 2'-O-methyl modified nucleotide
  modified_base 90: mod_base = OTHER; note = 2'-O-methyl modified nucleotide
  modified_base 91: mod_base = OTHER; note = 2'-O-methyl modified nucleotide
  modified_base 92: mod_base = OTHER; note = 2'-O-methyl modified nucleotide
  modified_base 99: mod_base = OTHER; note = nucleotide with phosphorothioate linkage
  modified_base 100: mod_base = OTHER; note = 2'-O-methyl modified nucleotide with phosphorothioate linkage
  modified_base 101: mod_base = OTHER; note = 2'-O-methyl modified nucleotide

SEQ ID NO: 2480 - RNA, 101 nt, synthetic construct; identical to SEQ ID NO: 1480
  source 1..101: mol_type = other RNA
  modified_base 1: mod_base = OTHER; note = 2'-O-methyl modified nucleotide with phosphorothioate linkage
  modified_base 2: mod_base = OTHER; note = 2'-O-methyl modified nucleotide with phosphorothioate linkage
  modified_base 3: mod_base = OTHER; note = 2'-O-methyl modified nucleotide with phosphorothioate linkage
  modified_base 4: mod_base = OTHER; note = 2'-O-methyl modified nucleotide
  modified_base 5: mod_base = OTHER; note = 2'-O-methyl modified nucleotide
  modified_base 8: mod_base = OTHER; note = 2'-O-methyl modified nucleotide
  modified_base 9: mod_base = OTHER; note = 2'-O-methyl modified nucleotide
  modified_base 11: mod_base = OTHER; note = 2'-O-methyl modified nucleotide
  modified_base 13: mod_base = OTHER; note = 2'-O-methyl modified nucleotide
  modified_base 18: mod_base = OTHER; note = 2'-O-methyl modified nucleotide
  modified_base 22: mod_base = OTHER; note = 2'-O-methyl modified nucleotide
  modified_base 25: mod_base = OTHER; note = 2'-O-methyl modified nucleotide
  modified_base 29: mod_base = OTHER; note = 2'-O-methyl modified nucleotide
  modified_base 30: mod_base = OTHER; note = 2'-O-methyl modified nucleotide
  modified_base 31: mod_base = OTHER; note = 2'-O-methyl modified nucleotide
  modified_base 32: mod_base = OTHER; note = 2'-O-methyl modified nucleotide
  modified_base 37: mod_base = OTHER; note = 2'-O-methyl modified nucleotide
  modified_base 38: mod_base = OTHER; note = 2'-O-methyl modified nucleotide
  modified_base 39: mod_base = OTHER; note = 2'-O-methyl modified nucleotide
  modified_base 40: mod_base = OTHER; note = 2'-O-methyl modified nucleotide
  modified_base 41: mod_base = OTHER; note = 2'-O-methyl modified nucleotide
  modified_base 42: mod_base = OTHER; note = 2'-O-methyl modified nucleotide
  modified_base 43: mod_base = OTHER; note = 2'-O-methyl modified nucleotide
  modified_base 47: mod_base = OTHER; note = 2'-O-methyl modified nucleotide
  modified_base 48: mod_base = OTHER; note = 2'-O-methyl modified nucleotide
  modified_base 51: mod_base = OTHER; note = 2'-O-methyl modified nucleotide
  modified_base 54: mod_base = OTHER; note = nucleotide with phosphorothioate linkage
  modified_base 58: mod_base = OTHER; note = 2'-O-methyl modified nucleotide
  modified_base 59: mod_base = OTHER; note = 2'-O-methyl modified nucleotide
  modified_base 61: mod_base = OTHER; note = 2'-O-methyl modified nucleotide
  modified_base 62: mod_base = OTHER; note = 2'-O-methyl modified nucleotide
  modified_base 63: mod_base = OTHER; note = 2'-O-methyl modified nucleotide
  modified_base 64: mod_base = OTHER; note = 2'-O-methyl modified nucleotide
  modified_base 65: mod_base = OTHER; note = 2'-O-methyl modified nucleotide
  modified_base 66: mod_base = OTHER; note = 2'-O-methyl modified nucleotide
  modified_base 67: mod_base = OTHER; note = 2'-O-methyl modified nucleotide
  modified_base 68: mod_base = OTHER; note = 2'-O-methyl modified nucleotide
  modified_base 69: mod_base = OTHER; note = 2'-O-methyl modified nucleotide
  modified_base 70: mod_base = OTHER; note = 2'-O-methyl modified nucleotide
  modified_base 75: mod_base = OTHER; note = 2'-O-methyl modified nucleotide
  modified_base 77: mod_base = OTHER; note = 2'-O-methyl modified nucleotide
  modified_base 80: mod_base = OTHER; note = 2'-O-methyl modified nucleotide
  modified_base 86: mod_base = OTHER; note = 2'-O-methyl modified nucleotide
  modified_base 87: mod_base = OTHER; note = 2'-O-methyl modified nucleotide
  modified_base 89: mod_base = OTHER; note = 2'-O-methyl modified nucleotide
  modified_base 90: mod_base = OTHER; note = 2'-O-methyl modified nucleotide
  modified_base 91: mod_base = OTHER; note = 2'-O-methyl modified nucleotide
  modified_base 92: mod_base = OTHER; note = 2'-O-methyl modified nucleotide
  modified_base 99: mod_base = OTHER; note = nucleotide with phosphorothioate linkage
  modified_base 100: mod_base = OTHER; note = 2'-O-methyl modified nucleotide with phosphorothioate linkage
  modified_base 101: mod_base = OTHER; note = 2'-O-methyl modified nucleotide

SEQ ID NO: 2481 - RNA, 101 nt, synthetic construct; identical to SEQ ID NO: 1481
  source 1..101: mol_type = other RNA
  modified_base 1: mod_base = OTHER; note = 2'-O-methyl modified nucleotide with phosphorothioate linkage
  modified_base 2: mod_base = OTHER; note = 2'-O-methyl modified nucleotide with phosphorothioate linkage
  modified_base 3: mod_base = OTHER; note = 2'-O-methyl modified nucleotide with phosphorothioate linkage
  modified_base 4: mod_base = OTHER; note = 2'-O-methyl modified nucleotide
  modified_base 5: mod_base = OTHER; note = 2'-O-methyl modified nucleotide
  modified_base 8: mod_base = OTHER; note = 2'-O-methyl modified nucleotide
  modified_base 9: mod_base = OTHER; note = 2'-O-methyl modified nucleotide
  modified_base 11: mod_base = OTHER; note = 2'-O-methyl modified nucleotide
  modified_base 13: mod_base = OTHER; note = 2'-O-methyl modified nucleotide
  modified_base 18: mod_base = OTHER; note = 2'-O-methyl modified nucleotide
  modified_base 22: mod_base = OTHER; note = 2'-O-methyl modified nucleotide
  modified_base 25: mod_base = OTHER; note = 2'-O-methyl modified nucleotide
  modified_base 29: mod_base = OTHER; note = 2'-O-methyl modified nucleotide
  modified_base 30: mod_base = OTHER; note = 2'-O-methyl modified nucleotide
  modified_base 31: mod_base = OTHER; note = 2'-O-methyl modified nucleotide
  modified_base 32: mod_base = OTHER; note = 2'-O-methyl modified nucleotide
  modified_base 37: mod_base = OTHER; note = 2'-O-methyl modified nucleotide
  modified_base 38: mod_base = OTHER; note = 2'-O-methyl modified nucleotide
  modified_base 39: mod_base = OTHER; note = 2'-O-methyl modified nucleotide
  modified_base 40: mod_base = OTHER; note = 2'-O-methyl modified nucleotide
  modified_base 41: mod_base = OTHER; note = 2'-O-methyl modified nucleotide
  modified_base 42: mod_base = OTHER; note = 2'-O-methyl modified nucleotide
  modified_base 43: mod_base = OTHER; note = 2'-O-methyl modified nucleotide
  modified_base 47: mod_base = OTHER; note = 2'-O-methyl modified nucleotide
  modified_base 48: mod_base = OTHER; note = 2'-O-methyl modified nucleotide
  modified_base 51: mod_base = OTHER; note = 2'-O-methyl modified nucleotide
  modified_base 54: mod_base = OTHER; note = nucleotide with phosphorothioate linkage
  modified_base 58: mod_base = OTHER; note = 2'-O-methyl modified nucleotide
  modified_base 59: mod_base = OTHER; note = 2'-O-methyl modified nucleotide
  modified_base 61: mod_base = OTHER; note = 2'-O-methyl modified nucleotide
  modified_base 62: mod_base = OTHER; note = 2'-O-methyl modified nucleotide
  modified_base 63: mod_base = OTHER; note = 2'-O-methyl modified nucleotide
  modified_base 64: mod_base = OTHER; note = 2'-O-methyl modified nucleotide
  modified_base 65: mod_base = OTHER; note = 2'-O-methyl modified nucleotide
  modified_base 66: mod_base = OTHER; note = 2'-O-methyl modified nucleotide
  modified_base 67: mod_base = OTHER; note = 2'-O-methyl modified nucleotide
  modified_base 68: mod_base = OTHER; note = 2'-O-methyl modified nucleotide
  modified_base 69: mod_base = OTHER; note = 2'-O-methyl modified nucleotide
  modified_base 70: mod_base = OTHER; note = 2'-O-methyl modified nucleotide
  modified_base 75: mod_base = OTHER; note = 2'-O-methyl modified nucleotide
  modified_base 77: mod_base = OTHER; note = 2'-O-methyl modified nucleotide
  modified_base 80: mod_base = OTHER; note = 2'-O-methyl modified nucleotide
  modified_base 86: mod_base = OTHER; note = 2'-O-methyl modified nucleotide
  modified_base 87: mod_base = OTHER; note = 2'-O-methyl modified nucleotide
  modified_base 89: mod_base = OTHER; note = 2'-O-methyl modified nucleotide
  modified_base 90: mod_base = OTHER; note = 2'-O-methyl modified nucleotide
  modified_base 91: mod_base = OTHER; note = 2'-O-methyl modified nucleotide
  modified_base 92: mod_base = OTHER; note = 2'-O-methyl modified nucleotide
  modified_base 99: mod_base = OTHER; note = nucleotide with phosphorothioate linkage
  modified_base 100: mod_base = OTHER; note = 2'-O-methyl modified nucleotide with phosphorothioate linkage
  modified_base 101: mod_base = OTHER; note = 2'-O-methyl modified nucleotide

SEQ ID NO: 2482 - RNA, 37 nt, synthetic construct
  source 1..37: mol_type = other RNA
  modified_base 1: mod_base = OTHER; note = 2'-O-methyl modified nucleotide with phosphorothioate linkage
  modified_base 2: mod_base = OTHER; note = 2'-O-methyl modified nucleotide with phosphorothioate linkage
  modified_base 3: mod_base = OTHER; note = 2'-O-methyl modified nucleotide with phosphorothioate linkage
  modified_base 4: mod_base = OTHER; note = 2'-O-methyl modified nucleotide
  modified_base 5: mod_base = OTHER; note = 2'-O-methyl modified nucleotide
  modified_base 8: mod_base = OTHER; note = 2'-O-methyl modified nucleotide
  modified_base 9: mod_base = OTHER; note = 2'-O-methyl modified nucleotide
  modified_base 11: mod_base = OTHER; note = 2'-O-methyl modified nucleotide
  modified_base 13: mod_base = OTHER; note = 2'-O-methyl modified nucleotide
  modified_base 18: mod_base = OTHER; note = 2'-O-methyl modified nucleotide
  modified_base 22: mod_base = OTHER; note = 2'-O-methyl modified nucleotide
  modified_base 25: mod_base = OTHER; note = 2'-O-methyl modified nucleotide
  modified_base 29: mod_base = OTHER; note = 2'-O-methyl modified nucleotide
  modified_base 30: mod_base = OTHER; note = 2'-O-methyl modified nucleotide
  modified_base 31: mod_base = OTHER; note = 2'-O-methyl modified nucleotide
  modified_base 32: mod_base = OTHER; note = 2'-O-methyl modified nucleotide
  modified_base 37: mod_base = OTHER; note = 2'-O-methyl modified nucleotide attached to position 1 of SEQ ID NO: 3016 via a L1 linker
taccgctcactgcaggacacgtatgttgtagctccct

SEQ ID NO: 2483 - RNA, 37 nt, synthetic construct
  source 1..37: mol_type = other RNA
  modified_base 1: mod_base = OTHER; note = 2'-O-methyl modified nucleotide with phosphorothioate linkage
  modified_base 2: mod_base = OTHER; note = 2'-O-methyl modified nucleotide with phosphorothioate linkage
  modified_base 3: mod_base = OTHER; note = 2'-O-methyl modified nucleotide with phosphorothioate linkage
  modified_base 4: mod_base = OTHER; note = 2'-O-methyl modified nucleotide
  modified_base 5: mod_base = OTHER; note = 2'-O-methyl modified nucleotide
  modified_base 8: mod_base = OTHER; note = 2'-O-methyl modified nucleotide
  modified_base 9: mod_base = OTHER; note = 2'-O-methyl modified nucleotide
  modified_base 11: mod_base = OTHER; note = 2'-O-methyl modified nucleotide
  modified_base 13: mod_base = OTHER; note = 2'-O-methyl modified nucleotide
  modified_base 18: mod_base = OTHER; note = 2'-O-methyl modified nucleotide
  modified_base 22: mod_base = OTHER; note = 2'-O-methyl modified nucleotide
  modified_base 25: mod_base = OTHER; note = 2'-O-methyl modified nucleotide
  modified_base 29: mod_base = OTHER; note = 2'-O-methyl modified nucleotide
  modified_base 30: mod_base = OTHER; note = 2'-O-methyl modified nucleotide
  modified_base 31: mod_base = OTHER; note = 2'-O-methyl modified nucleotide
  modified_base 32: mod_base = OTHER; note = 2'-O-methyl modified nucleotide
  modified_base 37: mod_base = OTHER; note = 2'-O-methyl modified nucleotide attached to position 1 of SEQ ID NO: 3017 via a L1 linker
ctcactgcaggacacgtatggtgcgttgtagctccct

SEQ ID NO: 2484 - RNA, 37 nt, synthetic construct
  source 1..37: mol_type = other RNA
  modified_base 1: mod_base = OTHER; note = 2'-O-methyl modified nucleotide with phosphorothioate linkage
  modified_base 2: mod_base = OTHER; note = 2'-O-methyl modified nucleotide with phosphorothioate linkage
  modified_base 3: mod_base = OTHER; note = 2'-O-methyl modified nucleotide with phosphorothioate linkage
  modified_base 4: mod_base = OTHER; note = 2'-O-methyl modified nucleotide
  modified_base 5: mod_base = OTHER; note = 2'-O-methyl modified nucleotide
  modified_base 8: mod_base = OTHER; note = 2'-O-methyl modified nucleotide
  modified_base 9: mod_base = OTHER; note = 2'-O-methyl modified nucleotide
  modified_base 11: mod_base = OTHER; note = 2'-O-methyl modified nucleotide
  modified_base 13: mod_base = OTHER; note = 2'-O-methyl modified nucleotide
  modified_base 18: mod_base = OTHER; note = 2'-O-methyl modified nucleotide
  modified_base 22: mod_base = OTHER; note = 2'-O-methyl modified nucleotide
  modified_base 25: mod_base = OTHER; note = 2'-O-methyl modified nucleotide
  modified_base 29: mod_base = OTHER; note = 2'-O-methyl modified nucleotide
  modified_base 30: mod_base = OTHER; note = 2'-O-methyl modified nucleotide
  modified_base 31: mod_base = OTHER; note = 2'-O-methyl modified nucleotide
  modified_base 32: mod_base = OTHER; note = 2'-O-methyl modified nucleotide
  modified_base 37: mod_base = OTHER; note = 2'-O-methyl modified nucleotide attached to position 1 of SEQ ID NO: 3018 via a L1 linker
tcactgcaggacacgtatggtgccgttgtagctccct

SEQ ID NO: 2485 - RNA, 37 nt, synthetic construct
  source 1..37: mol_type = other RNA
  modified_base 1: mod_base = OTHER; note = 2'-O-methyl modified nucleotide with phosphorothioate linkage
  modified_base 2: mod_base = OTHER; note = 2'-O-methyl modified nucleotide with phosphorothioate linkage
  modified_base 3: mod_base = OTHER; note = 2'-O-methyl modified nucleotide with phosphorothioate linkage
  modified_base 4: mod_base = OTHER; note = 2'-O-methyl modified nucleotide
  modified_base 5: mod_base = OTHER; note = 2'-O-methyl modified nucleotide
  modified_base 8: mod_base = OTHER; note = 2'-O-methyl modified nucleotide
  modified_base 9: mod_base = OTHER; note = 2'-O-methyl modified nucleotide
  modified_base 11: mod_base = OTHER; note = 2'-O-methyl modified nucleotide
  modified_base 13: mod_base = OTHER; note = 2'-O-methyl modified nucleotide
  modified_base 18: mod_base = OTHER; note = 2'-O-methyl modified nucleotide
  modified_base 22: mod_base = OTHER; note = 2'-O-methyl modified nucleotide
  modified_base 25: mod_base = OTHER; note = 2'-O-methyl modified nucleotide
  modified_base 29: mod_base = OTHER; note = 2'-O-methyl modified nucleotide
  modified_base 30: mod_base = OTHER; note = 2'-O-methyl modified nucleotide
  modified_base 31: mod_base = OTHER; note = 2'-O-methyl modified nucleotide
  modified_base 32: mod_base = OTHER; note = 2'-O-methyl modified nucleotide
  modified_base 37: mod_base = OTHER; note = 2'-O-methyl modified nucleotide attached to position 1 of SEQ ID NO: 3019 via a L1 linker
aggacacgtatggtgccgagcccggttgtagctccct

SEQ ID NO: 2486 - RNA, 37 nt, synthetic construct
  source 1..37: mol_type = other RNA
  modified_base 1: mod_base = OTHER; note = 2'-O-methyl modified nucleotide with phosphorothioate linkage
  modified_base 2: mod_base = OTHER; note = 2'-O-methyl modified nucleotide with phosphorothioate linkage
  modified_base 3: mod_base = OTHER; note = 2'-O-methyl modified nucleotide with phosphorothioate linkage
  modified_base 4: mod_base = OTHER; note = 2'-O-methyl modified nucleotide
  modified_base 5: mod_base = OTHER; note = 2'-O-methyl modified nucleotide
  modified_base 8: mod_base = OTHER; note = 2'-O-methyl modified nucleotide
  modified_base 9: mod_base = OTHER; note = 2'-O-methyl modified nucleotide
  modified_base 11: mod_base = OTHER; note = 2'-O-methyl modified nucleotide
  modified_base 13: mod_base = OTHER; note = 2'-O-methyl modified nucleotide
  modified_base 18: mod_base = OTHER; note = 2'-O-methyl modified nucleotide
  modified_base 22: mod_base = OTHER; note = 2'-O-methyl modified nucleotide
  modified_base 25: mod_base = OTHER; note = 2'-O-methyl modified nucleotide
  modified_base 29: mod_base = OTHER; note = 2'-O-methyl modified nucleotide
  modified_base 30: mod_base = OTHER; note = 2'-O-methyl modified nucleotide
  modified_base 31: mod_base = OTHER; note = 2'-O-methyl modified nucleotide
  modified_base 32: mod_base = OTHER; note = 2'-O-methyl modified nucleotide
  modified_base 37: mod_base = OTHER; note = 2'-O-methyl modified nucleotide attached to position 1 of SEQ ID NO: 3020 via a L1 linker
ggacacgtatggtgccgagcccgcgttgtagctccct

SEQ ID NO: 2487 - RNA, 37 nt, synthetic construct
  source 1..37: mol_type = other RNA
  modified_base 1: mod_base = OTHER; note = 2'-O-methyl modified nucleotide with phosphorothioate linkage
  modified_base 2: mod_base = OTHER; note = 2'-O-methyl modified nucleotide with phosphorothioate linkage
  modified_base 3: mod_base = OTHER; note = 2'-O-methyl modified nucleotide with phosphorothioate linkage
  modified_base 4: mod_base = OTHER; note = 2'-O-methyl modified nucleotide
  modified_base 5: mod_base = OTHER; note = 2'-O-methyl modified nucleotide
  modified_base 8: mod_base = OTHER; note = 2'-O-methyl modified nucleotide
  modified_base 9: mod_base = OTHER; note = 2'-O-methyl modified nucleotide
  modified_base 11: mod_base = OTHER; note = 2'-O-methyl modified nucleotide
  modified_base 13: mod_base = OTHER; note = 2'-O-methyl modified nucleotide
  modified_base 18: mod_base = OTHER; note = 2'-O-methyl modified nucleotide
  modified_base 22: mod_base = OTHER; note = 2'-O-methyl modified nucleotide
  modified_base 25: mod_base = OTHER; note = 2'-O-methyl modified nucleotide
  modified_base 29: mod_base = OTHER; note = 2'-O-methyl modified nucleotide
  modified_base 30: mod_base = OTHER; note = 2'-O-methyl modified nucleotide
  modified_base 31: mod_base = OTHER; note = 2'-O-methyl modified nucleotide
  modified_base 32: mod_base = OTHER; note = 2'-O-methyl modified nucleotide
  modified_base 37: mod_base = OTHER; note = 2'-O-methyl modified nucleotide attached to position 1 of SEQ ID NO: 3021 via a L1 linker
atcctagtggaggtggatctggtggttgtagctccct

SEQ ID NO: 2488 - RNA, 37 nt, synthetic construct
  source 1..37: mol_type = other RNA
  modified_base 1: mod_base = OTHER; note = 2'-O-methyl modified nucleotide with phosphorothioate linkage
  modified_base 2: mod_base = OTHER; note = 2'-O-methyl modified nucleotide with phosphorothioate linkage
  modified_base 3: mod_base = OTHER; note = 2'-O-methyl modified nucleotide with phosphorothioate linkage
  modified_base 4: mod_base = OTHER; note = 2'-O-methyl modified nucleotide
  modified_base 5: mod_base = OTHER; note = 2'-O-methyl modified nucleotide
  modified_base 8: mod_base = OTHER; note = 2'-O-methyl modified nucleotide
  modified_base 9: mod_base = OTHER; note = 2'-O-methyl modified nucleotide
  modified_base 11: mod_base = OTHER; note = 2'-O-methyl modified nucleotide
  modified_base 13: mod_base = OTHER; note = 2'-O-methyl modified nucleotide
  modified_base 18: mod_base = OTHER; note = 2'-O-methyl modified nucleotide
  modified_base 22: mod_base = OTHER; note = 2'-O-methyl modified nucleotide
  modified_base 25: mod_base = OTHER; note = 2'-O-methyl modified nucleotide
  modified_base 29: mod_base = OTHER; note = 2'-O-methyl modified nucleotide
  modified_base 30: mod_base = OTHER; note = 2'-O-methyl modified nucleotide
  modified_base 31: mod_base = OTHER; note = 2'-O-methyl modified nucleotide
  modified_base 32: mod_base = OTHER; note = 2'-O-methyl modified nucleotide
  modified_base 37: mod_base = OTHER; note = 2'-O-methyl modified nucleotide attached to position 1 of SEQ ID NO: 3022 via a L1 linker
gcaagagcctggagcgggaactgggttgtagctccct

SEQ ID NO: 2489 - RNA, 37 nt, synthetic construct
  source 1..37: mol_type = other RNA
  modified_base 1: mod_base = OTHER; note = 2'-O-methyl modified nucleotide with phosphorothioate linkage
  modified_base 2: mod_base = OTHER; note = 2'-O-methyl modified nucleotide with phosphorothioate linkage
  modified_base 3: mod_base = OTHER; note = 2'-O-methyl modified nucleotide with phosphorothioate linkage
  modified_base 4: mod_base = OTHER; note = 2'-O-methyl modified nucleotide
  modified_base 5: mod_base = OTHER; note = 2'-O-methyl modified nucleotide
  modified_base 8: mod_base = OTHER; note = 2'-O-methyl modified nucleotide
  modified_base 9: mod_base = OTHER; note = 2'-O-methyl modified nucleotide
  modified_base 11: mod_base = OTHER; note = 2'-O-methyl modified nucleotide
  modified_base 13: mod_base = OTHER; note = 2'-O-methyl modified nucleotide
  modified_base 18: mod_base = OTHER; note = 2'-O-methyl modified nucleotide
  modified_base 22: mod_base = OTHER; note = 2'-O-methyl modified nucleotide
  modified_base 25: mod_base = OTHER; note = 2'-O-methyl modified nucleotide
  modified_base 29: mod_base = OTHER; note = 2'-O-methyl modified nucleotide
  modified_base 30: mod_base = OTHER; note = 2'-O-methyl modified nucleotide
  modified_base 31: mod_base = OTHER; note = 2'-O-methyl modified nucleotide
  modified_base 32: mod_base = OTHER; note = 2'-O-methyl modified nucleotide
  modified_base 37: mod_base = OTHER; note = 2'-O-methyl modified nucleotide attached to position 1 of SEQ ID NO: 3023 via a L1 linker
caagagcctggagcgggaactggcgttgtagctccct

SEQ ID NO: 2490 - RNA, 37 nt, synthetic construct
  source 1..37: mol_type = other RNA
  modified_base 1: mod_base = OTHER; note = 2'-O-methyl modified nucleotide with phosphorothioate linkage
  modified_base 2: mod_base = OTHER; note = 2'-O-methyl modified nucleotide with phosphorothioate linkage
  modified_base 3: mod_base = OTHER; note = 2'-O-methyl modified nucleotide with phosphorothioate linkage
  modified_base 4: mod_base = OTHER; note = 2'-O-methyl modified nucleotide
  modified_base 5: mod_base = OTHER; note = 2'-O-methyl modified nucleotide
  modified_base 8: mod_base = OTHER; note = 2'-O-methyl modified nucleotide
  modified_base 9: mod_base = OTHER; note = 2'-O-methyl modified nucleotide
  modified_base 11: mod_base = OTHER; note = 2'-O-methyl modified nucleotide
  modified_base 13: mod_base = OTHER; note = 2'-O-methyl modified nucleotide
  modified_base 18: mod_base = OTHER; note = 2'-O-methyl modified nucleotide
  modified_base 22: mod_base = OTHER; note = 2'-O-methyl modified nucleotide
  modified_base 25: mod_base = OTHER; note = 2'-O-methyl modified nucleotide
  modified_base 29: mod_base = OTHER; note = 2'-O-methyl modified nucleotide
  modified_base 30: mod_base = OTHER; note = 2'-O-methyl modified nucleotide
  modified_base 31: mod_base = OTHER; note = 2'-O-methyl modified nucleotide
  modified_base 32: mod_base = OTHER; note = 2'-O-methyl modified nucleotide
  modified_base 37: mod_base = OTHER; note = 2'-O-methyl modified nucleotide attached to position 1 of SEQ ID NO: 3024 via a L1 linker
gggcagaacggcagctggcccaaggttgtagctccct

SEQ ID NO: 2491 - RNA, 37 nt, synthetic construct
  source 1..37: mol_type = other RNA
  modified_base 1: mod_base = OTHER; note = 2'-O-methyl modified nucleotide with phosphorothioate linkage
  modified_base 2: mod_base = OTHER; note = 2'-O-methyl modified nucleotide with phosphorothioate linkage
  modified_base 3: mod_base = OTHER; note = 2'-O-methyl modified nucleotide with phosphorothioate linkage
  modified_base 4: mod_base = OTHER; note = 2'-O-methyl modified nucleotide
  modified_base 5: mod_base = OTHER; note = 2'-O-methyl modified nucleotide
  modified_base 8: mod_base = OTHER; note = 2'-O-methyl modified nucleotide
  modified_base 9: mod_base = OTHER; note = 2'-O-methyl modified nucleotide
  modified_base 11: mod_base = OTHER; note = 2'-O-methyl modified nucleotide
  modified_base 13: mod_base = OTHER; note = 2'-O-methyl modified nucleotide
  modified_base 18: mod_base = OTHER; note = 2'-O-methyl modified nucleotide
  modified_base 22: mod_base = OTHER; note = 2'-O-methyl modified nucleotide
  modified_base 25: mod_base = OTHER; note = 2'-O-methyl modified nucleotide
  modified_base 29: mod_base = OTHER; note = 2'-O-methyl modified nucleotide
  modified_base 30: mod_base = OTHER; note = 2'-O-methyl modified nucleotide
  modified_base 31: mod_base = OTHER; note = 2'-O-methyl modified nucleotide
  modified_base 32: mod_base = OTHER; note = 2'-O-methyl modified nucleotide
  modified_base 37: mod_base = OTHER; note = 2'-O-methyl modified nucleotide attached to position 1 of SEQ ID NO: 3025 via a L1 linker
gcacagcaatcactcgtgtctcacgttgtagctccct

SEQ ID NO: 2492 - RNA, 37 nt, synthetic construct
  source 1..37: mol_type = other RNA
  modified_base 1: mod_base = OTHER; note = 2'-O-methyl modified nucleotide with phosphorothioate linkage
  modified_base 2: mod_base = OTHER; note = 2'-O-methyl modified nucleotide with phosphorothioate linkage
  modified_base 3: mod_base = OTHER; note = 2'-O-methyl modified nucleotide with phosphorothioate linkage
  modified_base 4: mod_base = OTHER; note = 2'-O-methyl modified nucleotide
  modified_base 5: mod_base = OTHER; note = 2'-O-methyl modified nucleotide
  modified_base 8: mod_base = OTHER; note = 2'-O-methyl modified nucleotide
  modified_base 9: mod_base = OTHER; note = 2'-O-methyl modified nucleotide
  modified_base 11: mod_base = OTHER; note = 2'-O-methyl modified nucleotide
  modified_base 13: mod_base = OTHER; note = 2'-O-methyl modified nucleotide
  modified_base 18: mod_base = OTHER; note = 2'-O-methyl modified nucleotide
  modified_base 22: mod_base = OTHER; note = 2'-O-methyl modified nucleotide
  modified_base 25: mod_base = OTHER; note = 2'-O-methyl modified nucleotide
  modified_base 29: mod_base = OTHER; note = 2'-O-methyl modified nucleotide
  modified_base 30: mod_base = OTHER; note = 2'-O-methyl modified nucleotide
  modified_base 31: mod_base = OTHER; note = 2'-O-methyl modified nucleotide
  modified_base 32: mod_base = OTHER; note = 2'-O-methyl modified nucleotide
  modified_base 37: mod_base = OTHER; note = 2'-O-methyl modified nucleotide attached to position 1 of SEQ ID NO: 3026 via a L1 linker
caatagctcttgccctgaccagctgttgtagctccct

SEQ ID NO: 2493 - RNA, 37 nt, synthetic construct
  source 1..37: mol_type = other RNA
  modified_base 1: mod_base = OTHER; note = 2'-O-methyl modified nucleotide with phosphorothioate linkage
  modified_base 2: mod_base = OTHER; note = 2'-O-methyl modified nucleotide with phosphorothioate linkage
  modified_base 3: mod_base = OTHER; note = 2'-O-methyl modified nucleotide with phosphorothioate linkage
  modified_base 4: mod_base = OTHER; note = 2'-O-methyl modified nucleotide
  modified_base 5: mod_base = OTHER; note = 2'-O-methyl modified nucleotide
  modified_base 8: mod_base = OTHER; note = 2'-O-methyl modified nucleotide
  modified_base 9: mod_base = OTHER; note = 2'-O-methyl modified nucleotide
  modified_base 11: mod_base = OTHER; note = 2'-O-methyl modified nucleotide
  modified_base 13: mod_base = OTHER; note = 2'-O-methyl modified nucleotide
  modified_base 18: mod_base = OTHER; note = 2'-O-methyl modified nucleotide
  modified_base 22: mod_base = OTHER; note = 2'-O-methyl modified nucleotide
  modified_base 25: mod_base = OTHER; note = 2'-O-methyl modified nucleotide
  modified_base 29: mod_base = OTHER; note = 2'-O-methyl modified nucleotide
  modified_base 30: mod_base = OTHER; note = 2'-O-methyl modified nucleotide
  modified_base 31: mod_base = OTHER; note = 2'-O-methyl modified nucleotide
  modified_base 32: mod_base = OTHER; note = 2'-O-methyl modified nucleotide
  modified_base 37: mod_base = OTHER; note = 2'-O-methyl modified nucleotide attached to position 1 of SEQ ID NO: 3027 via a L1 linker
ccaatagctcttgccctgaccagcgttgtagctccct

SEQ ID NO: 2494 - RNA, 37 nt, synthetic construct
  source 1..37: mol_type = other RNA
  modified_base 1: mod_base = OTHER; note = 2'-O-methyl modified nucleotide with phosphorothioate linkage
  modified_base 2: mod_base = OTHER; note = 2'-O-methyl modified nucleotide with phosphorothioate linkage
  modified_base 3: mod_base = OTHER; note = 2'-O-methyl modified nucleotide with phosphorothioate linkage
  modified_base 4: mod_base = OTHER; note = 2'-O-methyl modified nucleotide
  modified_base 5: mod_base = OTHER; note = 2'-O-methyl modified nucleotide
  modified_base 8: mod_base = OTHER; note = 2'-O-methyl modified nucleotide
  modified_base 9: mod_base = OTHER; note = 2'-O-methyl modified nucleotide
  modified_base 11: mod_base = OTHER; note = 2'-O-methyl modified nucleotide
  modified_base 13: mod_base = OTHER; note = 2'-O-methyl modified nucleotide
  modified_base 18: mod_base = OTHER; note = 2'-O-methyl modified nucleotide
  modified_base 22: mod_base = OTHER; note = 2'-O-methyl modified nucleotide
  modified_base 25: mod_base = OTHER; note = 2'-O-methyl modified nucleotide
  modified_base 29: mod_base = OTHER; note = 2'-O-methyl modified nucleotide
  modified_base 30: mod_base = OTHER; note = 2'-O-methyl modified nucleotide
  modified_base 31: mod_base = OTHER; note = 2'-O-methyl modified nucleotide
  modified_base 32: mod_base = OTHER; note = 2'-O-methyl modified nucleotide
  modified_base 37: mod_base = OTHER; note = 2'-O-methyl modified nucleotide attached to position 1 of SEQ ID NO: 3028 via a L1 linker
agccgggcctgggcttgtggccgggttgtagctccct

SEQ ID NO: 2495 - RNA, 37 nt, synthetic construct
  source 1..37: mol_type = other RNA
  modified_base 1: mod_base = OTHER; note = 2'-O-methyl modified nucleotide with phosphorothioate linkage
  modified_base 2: mod_base = OTHER; note = 2'-O-methyl modified nucleotide with phosphorothioate linkage
  modified_base 3: mod_base = OTHER; note = 2'-O-methyl modified nucleotide with phosphorothioate linkage
  modified_base 4: mod_base = OTHER; note = 2'-O-methyl modified nucleotide
  modified_base 5: mod_base = OTHER; note = 2'-O-methyl modified nucleotide
  modified_base 8: mod_base = OTHER; note = 2'-O-methyl modified nucleotide
  modified_base 9: mod_base = OTHER; note = 2'-O-methyl modified nucleotide
  modified_base 11: mod_base = OTHER; note = 2'-O-methyl modified nucleotide
  modified_base 13: mod_base = OTHER; note = 2'-O-methyl modified nucleotide
  modified_base 18: mod_base = OTHER; note = 2'-O-methyl modified nucleotide
  modified_base 22: mod_base = OTHER; note = 2'-O-methyl modified nucleotide
  modified_base 25: mod_base = OTHER; note = 2'-O-methyl modified nucleotide
  modified_base 29: mod_base = OTHER; note = 2'-O-methyl modified nucleotide
  modified_base 30: mod_base = OTHER; note = 2'-O-methyl modified nucleotide
  modified_base 31: mod_base = OTHER; note = 2'-O-methyl modified nucleotide
  modified_base 32: mod_base = OTHER; note = 2'-O-methyl modified nucleotide
  modified_base 37: mod_base = OTHER; note = 2'-O-methyl modified nucleotide attached to position 1 of SEQ ID NO: 3029 via a L1 linker
cagagaagacaaagtcgtactggggttgtagctccct

SEQ ID NO: 2496 - RNA, 37 nt, synthetic construct
  source 1..37: mol_type = other RNA
  modified_base 1: mod_base = OTHER; note = 2'-O-methyl modified nucleotide with phosphorothioate linkage
  modified_base 2: mod_base = OTHER; note = 2'-O-methyl modified nucleotide with phosphorothioate linkage
  modified_base 3: mod_base = OTHER; note = 2'-O-methyl modified nucleotide with phosphorothioate linkage
  modified_base 4: mod_base = OTHER; note = 2'-O-methyl modified nucleotide
  modified_base 5: mod_base = OTHER; note = 2'-O-methyl modified nucleotide
  modified_base 8: mod_base = OTHER; note = 2'-O-methyl modified nucleotide
  modified_base 9: mod_base = OTHER; note = 2'-O-methyl modified nucleotide
  modified_base 11: mod_base = OTHER; note = 2'-O-methyl modified nucleotide
  modified_base 13: mod_base = OTHER; note = 2'-O-methyl modified nucleotide
  modified_base 18: mod_base = OTHER; note = 2'-O-methyl modified nucleotide
  modified_base 22: mod_base = OTHER; note = 2'-O-methyl modified nucleotide
  modified_base 25: mod_base = OTHER; note = 2'-O-methyl modified nucleotide
  modified_base 29: mod_base = OTHER; note = 2'-O-methyl modified nucleotide
  modified_base 30: mod_base = OTHER; note = 2'-O-methyl modified nucleotide
  modified_base 31: mod_base = OTHER; note = 2'-O-methyl modified nucleotide
  modified_base 32: mod_base = OTHER; note = 2'-O-methyl modified nucleotide
  modified_base 37: mod_base = OTHER; note = 2'-O-methyl modified nucleotide attached to position 1 of SEQ ID NO: 3030 via a L1 linker
agtacgactttgtcttctctgtccgttgtagctccct

SEQ ID NO: 2497 - RNA, 37 nt, synthetic construct
  source 1..37: mol_type = other RNA
  modified_base 1: mod_base = OTHER; note = 2'-O-methyl modified nucleotide with phosphorothioate linkage
  modified_base 2: mod_base = OTHER; note = 2'-O-methyl modified nucleotide with phosphorothioate linkage
  modified_base 3: mod_base = OTHER; note = 2'-O-methyl modified nucleotide with phosphorothioate linkage
  modified_base 4: mod_base = OTHER; note = 2'-O-methyl modified nucleotide
  modified_base 5: mod_base = OTHER; note = 2'-O-methyl modified nucleotide
  modified_base 8: mod_base = OTHER; note = 2'-O-methyl modified nucleotide
  modified_base 9: mod_base = OTHER; note = 2'-O-methyl modified nucleotide
  modified_base 11: mod_base = OTHER; note = 2'-O-methyl modified nucleotide
  modified_base 13: mod_base = OTHER; note = 2'-O-methyl modified nucleotide
  modified_base 18: mod_base = OTHER; note = 2'-O-methyl modified nucleotide
  modified_base 22: mod_base = OTHER; note = 2'-O-methyl modified nucleotide
  modified_base 25: mod_base = OTHER; note = 2'-O-methyl modified nucleotide
  modified_base 29: mod_base = OTHER; note = 2'-O-methyl modified nucleotide
  modified_base 30: mod_base = OTHER; note = 2'-O-methyl modified nucleotide
  modified_base 31: mod_base = OTHER; note = 2'-O-methyl modified nucleotide
  modified_base 32: mod_base = OTHER; note = 2'-O-methyl modified nucleotide
  modified_base 37: mod_base = OTHER; note = 2'-O-methyl modified nucleotide attached to position 1 of SEQ ID NO: 3031 via a L1 linker
agcagatcctgcaggccataggcagttgtagctccct

SEQ ID NO: 2498 - RNA, 37 nt, synthetic construct
  source 1..37: mol_type = other RNA
  modified_base 1: mod_base = OTHER; note = 2'-O-methyl modified nucleotide with phosphorothioate linkage
  modified_base 2: mod_base = OTHER; note = 2'-O-methyl modified nucleotide with phosphorothioate linkage
  modified_base 3: mod_base = OTHER; note = 2'-O-methyl modified nucleotide with phosphorothioate linkage
  modified_base 4: mod_base = OTHER; note = 2'-O-methyl modified nucleotide
  modified_base 5: mod_base = OTHER; note = 2'-O-methyl modified nucleotide
  modified_base 8: mod_base = OTHER; note = 2'-O-methyl modified nucleotide
  modified_base 9: mod_base = OTHER; note = 2'-O-methyl modified nucleotide
  modified_base 11: mod_base = OTHER; note = 2'-O-methyl modified nucleotide
  modified_base 13: mod_base = OTHER; note = 2'-O-methyl modified nucleotide
  modified_base 18: mod_base = OTHER; note = 2'-O-methyl modified nucleotide
  modified_base 22: mod_base = OTHER; note = 2'-O-methyl modified nucleotide
  modified_base 25: mod_base = OTHER; note = 2'-O-methyl modified nucleotide
  modified_base 29: mod_base = OTHER; note = 2'-O-methyl modified nucleotide
  modified_base 30: mod_base = OTHER; note = 2'-O-methyl modified nucleotide
  modified_base 31: mod_base = OTHER; note = 2'-O-methyl modified nucleotide
  modified_base 32: mod_base = OTHER; note = 2'-O-methyl modified nucleotide
  modified_base 37: mod_base = OTHER; note = 2'-O-methyl modified nucleotide attached to position 1 of SEQ ID NO: 3032 via a L1 linker
gcctatggcctgcaggatctgctcgttgtagctccct

SEQ ID NO: 2499 - RNA, 37 nt, synthetic construct
  source 1..37: mol_type = other RNA
  modified_base 1: mod_base = OTHER; note = 2'-O-methyl modified nucleotide with phosphorothioate linkage
  modified_base 2: mod_base = OTHER; note = 2'-O-methyl modified nucleotide with phosphorothioate linkage
  modified_base 3: mod_base = OTHER; note = 2'-O-methyl modified nucleotide with phosphorothioate linkage
  modified_base 4: mod_base = OTHER; note = 2'-O-methyl modified nucleotide
  modified_base 5: mod_base = OTHER; note = 2'-O-methyl modified nucleotide
  modified_base 8: mod_base = OTHER; note = 2'-O-methyl modified nucleotide
  modified_base 9: mod_base = OTHER; note = 2'-O-methyl modified nucleotide
  modified_base 11: mod_base = OTHER; note = 2'-O-methyl modified nucleotide
  modified_base 13: mod_base = OTHER; note = 2'-O-methyl modified nucleotide
  modified_base 18: mod_base = OTHER; note = 2'-O-methyl modified nucleotide
  modified_base 22: mod_base = OTHER; note = 2'-O-methyl modified nucleotide
  modified_base 25: mod_base = OTHER; note = 2'-O-methyl modified nucleotide
  modified_base 29: mod_base = OTHER; note = 2'-O-methyl modified nucleotide
  modified_base 30: mod_base = OTHER; note = 2'-O-methyl modified nucleotide
  modified_base 31: mod_base = OTHER; note = 2'-O-methyl modified nucleotide
  modified_base 32: mod_base = OTHER; note = 2'-O-methyl modified nucleotide
  modified_base 37: mod_base = OTHER; note = 2'-O-methyl modified nucleotide attached to position 1 of SEQ ID NO: 3033 via a L1 linker
gagcagatcctgcaggccataggcgttgtagctccct

SEQ ID NO: 2500 - RNA, 37 nt, synthetic construct
  source 1..37: mol_type = other RNA
  modified_base 1: mod_base = OTHER; note = 2'-O-methyl modified nucleotide with phosphorothioate linkage
  modified_base 2: mod_base = OTHER; note = 2'-O-methyl modified nucleotide with phosphorothioate linkage
  modified_base 3: mod_base = OTHER; note = 2'-O-methyl modified nucleotide with phosphorothioate linkage
  modified_base 4: mod_base = OTHER; note = 2'-O-methyl modified nucleotide
  modified_base 5: mod_base = OTHER; note = 2'-O-methyl modified nucleotide
  modified_base 8: mod_base = OTHER; note = 2'-O-methyl modified nucleotide
  modified_base 9: mod_base = OTHER; note = 2'-O-methyl modified nucleotide
  modified_base 11: mod_base = OTHER; note = 2'-O-methyl modified nucleotide
  modified_base 13: mod_base = OTHER; note = 2'-O-methyl modified nucleotide
  modified_base 18: mod_base = OTHER; note = 2'-O-methyl modified nucleotide
  modified_base 22: mod_base = OTHER; note = 2'-O-methyl modified nucleotide
  modified_base 25: mod_base = OTHER; note = 2'-O-methyl modified nucleotide
  modified_base 29: mod_base = OTHER; note = 2'-O-methyl modified nucleotide
  modified_base 30: mod_base = OTHER; note = 2'-O-methyl modified nucleotide
  modified_base 31: mod_base = OTHER; note = 2'-O-methyl modified nucleotide
  modified_base 32: mod_base = OTHER; note = 2'-O-methyl modified nucleotide
  modified_base 37: mod_base = OTHER; note = 2'-O-methyl modified nucleotide attached to position 1 of SEQ ID NO: 3034 via a L1 linker
cctatggcctgcaggatctgctctgttgtagctccct

SEQ ID NO: 2501 - RNA, 37 nt, synthetic construct
  source 1..37: mol_type = other RNA
  modified_base 1: mod_base = OTHER; note = 2'-O-methyl modified nucleotide with phosphorothioate linkage
  modified_base 2: mod_base = OTHER; note = 2'-O-methyl modified nucleotide with phosphorothioate linkage
  modified_base 3: mod_base = OTHER; note = 2'-O-methyl modified nucleotide with phosphorothioate linkage
  modified_base 4: mod_base = OTHER; note = 2'-O-methyl modified nucleotide
  modified_base 5: mod_base = OTHER; note = 2'-O-methyl modified nucleotide
  modified_base 8: mod_base = OTHER; note = 2'-O-methyl modified nucleotide
  modified_base 9: mod_base = OTHER; note = 2'-O-methyl modified nucleotide
  modified_base 11: mod_base = OTHER; note = 2'-O-methyl modified nucleotide
  modified_base 13: mod_base = OTHER; note = 2'-O-methyl modified nucleotide
  modified_base 18: mod_base = OTHER; note = 2'-O-methyl modified nucleotide
  modified_base 22: mod_base = OTHER; note = 2'-O-methyl modified nucleotide
  modified_base 25: mod_base = OTHER; note = 2'-O-methyl modified nucleotide
  modified_base 29: mod_base = OTHER; note = 2'-O-methyl modified nucleotide
  modified_base 30: mod_base = OTHER; note = 2'-O-methyl modified nucleotide
  modified_base 31: mod_base = OTHER; note = 2'-O-methyl modified nucleotide
  modified_base 32: mod_base = OTHER; note = 2'-O-methyl modified nucleotide
  modified_base 37: mod_base = OTHER; note = 2'-O-methyl modified nucleotide attached to position 1 of SEQ ID NO: 3035 via a L1 linker
agagcagatcctgcaggccatagggttgtagctccct

SEQ ID NO: 2502 - RNA, 37 nt, synthetic construct
  source 1..37: mol_type = other RNA
  modified_base 1: mod_base = OTHER; note = 2'-O-methyl modified nucleotide with phosphorothioate linkage
  modified_base 2: mod_base = OTHER; note = 2'-O-methyl modified nucleotide with phosphorothioate linkage
  modified_base 3: mod_base = OTHER; note = 2'-O-methyl modified nucleotide with phosphorothioate linkage
  modified_base 4: mod_base = OTHER; note = 2'-O-methyl modified nucleotide
  modified_base 5: mod_base = OTHER; note = 2'-O-methyl modified nucleotide
  modified_base 8: mod_base = OTHER; note = 2'-O-methyl modified nucleotide
  modified_base 9: mod_base = OTHER; note = 2'-O-methyl modified nucleotide
  modified_base 11: mod_base = OTHER; note = 2'-O-methyl modified nucleotide
  modified_base 13: mod_base = OTHER; note = 2'-O-methyl modified nucleotide
  modified_base 18: mod_base = OTHER; note = 2'-O-methyl modified nucleotide
  modified_base 22: mod_base = OTHER; note = 2'-O-methyl modified nucleotide
  modified_base 25: mod_base = OTHER; note = 2'-O-methyl modified nucleotide
  modified_base 29: mod_base = OTHER; note = 2'-O-methyl modified nucleotide
  modified_base 30: mod_base = OTHER; note = 2'-O-methyl modified nucleotide
  modified_base 31: mod_base = OTHER; note = 2'-O-methyl modified nucleotide
  modified_base 32: mod_base = OTHER; note = 2'-O-methyl modified nucleotide
  modified_base 37: mod_base = OTHER; note = 2'-O-methyl modified nucleotide attached to position 1 of SEQ ID NO: 3036 via a L1 linker
aagagcagatcctgcaggccataggttgtagctccct

SEQ ID NO: 2503 - RNA, 37 nt, synthetic construct
  source 1..37: mol_type = other RNA
  modified_base 1: mod_base = OTHER; note = 2'-O-methyl modified nucleotide with phosphorothioate linkage
  modified_base 2: mod_base = OTHER; note = 2'-O-methyl modified nucleotide with phosphorothioate linkage
  modified_base 3: mod_base = OTHER; note = 2'-O-methyl modified nucleotide with phosphorothioate linkage
  modified_base 4: mod_base = OTHER; note = 2'-O-methyl modified nucleotide
  modified_base 5: mod_base = OTHER; note = 2'-O-methyl modified nucleotide
  modified_base 8: mod_base = OTHER; note = 2'-O-methyl modified nucleotide
  modified_base 9: mod_base = OTHER; note = 2'-O-methyl modified nucleotide
  modified_base 11: mod_base = OTHER; note = 2'-O-methyl modified nucleotide
  modified_base 13: mod_base = OTHER; note = 2'-O-methyl modified nucleotide
  modified_base 18: mod_base = OTHER; note = 2'-O-methyl modified nucleotide
  modified_base 22: mod_base = OTHER; note = 2'-O-methyl modified nucleotide
  modified_base 25: mod_base = OTHER; note = 2'-O-methyl modified nucleotide
  modified_base 29: mod_base = OTHER; note = 2'-O-methyl modified nucleotide
  modified_base 30: mod_base = OTHER; note = 2'-O-methyl modified nucleotide
  modified_base 31: mod_base = OTHER; note = 2'-O-methyl modified nucleotide
  modified_base 32: mod_base = OTHER; note = 2'-O-methyl modified nucleotide
  modified_base 37: mod_base = OTHER; note = 2'-O-methyl modified nucleotide attached to position 1 of SEQ ID NO: 3037 via a L1 linker
gcctgcaggatctgctcttctcccgttgtagctccct

SEQ ID NO: 2504 - RNA, 37 nt, synthetic construct
  source 1..37: mol_type = other RNA
  modified_base 1: mod_base = OTHER; note = 2'-O-methyl modified nucleotide with phosphorothioate linkage
  modified_base 2: mod_base = OTHER; note = 2'-O-methyl modified nucleotide with phosphorothioate linkage
  modified_base 3: mod_base = OTHER; note = 2'-O-methyl modified nucleotide with phosphorothioate linkage
  modified_base 4: mod_base = OTHER; note = 2'-O-methyl modified nucleotide
  modified_base 5: mod_base = OTHER; note = 2'-O-methyl modified nucleotide
  modified_base 8: mod_base = OTHER; note = 2'-O-methyl modified nucleotide
  modified_base 9: mod_base = OTHER; note = 2'-O-methyl modified nucleotide
  modified_base 11: mod_base = OTHER; note = 2'-O-methyl modified nucleotide
  modified_base 13: mod_base = OTHER; note = 2'-O-methyl modified nucleotide
  modified_base 18: mod_base = OTHER; note = 2'-O-methyl modified nucleotide
  modified_base 22: mod_base = OTHER; note = 2'-O-methyl modified nucleotide
  modified_base 25: mod_base = OTHER; note = 2'-O-methyl modified nucleotide
  modified_base 29: mod_base = OTHER; note = 2'-O-methyl modified nucleotide
  modified_base 30: mod_base = OTHER; note = 2'-O-methyl modified nucleotide
  modified_base 31: mod_base = OTHER; note = 2'-O-methyl modified nucleotide
  modified_base 32: mod_base = OTHER; note = 2'-O-methyl modified nucleotide
  modified_base 37: mod_base = OTHER; note = 2'-O-methyl modified nucleotide attached to position 1 of SEQ ID NO: 3038 via a L1 linker
ggatctgctcttctccctgggcccgttgtagctccct

SEQ ID NO: 2505 - RNA, 37 nt, synthetic construct
  source 1..37: mol_type = other RNA
  modified_base 1: mod_base = OTHER; note = 2'-O-methyl modified nucleotide with phosphorothioate linkage
  modified_base 2: mod_base = OTHER; note = 2'-O-methyl modified nucleotide with phosphorothioate linkage
  modified_base 3: mod_base = OTHER; note = 2'-O-methyl modified nucleotide with phosphorothioate linkage
  modified_base 4: mod_base = OTHER; note = 2'-O-methyl modified nucleotide
  modified_base 5: mod_base = OTHER; note = 2'-O-methyl modified nucleotide
  modified_base 8: mod_base = OTHER; note = 2'-O-methyl modified nucleotide
  modified_base 9: mod_base = OTHER; note = 2'-O-methyl modified nucleotide
  modified_base 11: mod_base = OTHER; note = 2'-O-methyl modified nucleotide
  modified_base 13: mod_base = OTHER; note = 2'-O-methyl modified nucleotide
  modified_base 18: mod_base = OTHER; note = 2'-O-methyl modified nucleotide
  modified_base 22: mod_base = OTHER; note = 2'-O-methyl modified nucleotide
  modified_base 25: mod_base = OTHER; note = 2'-O-methyl modified nucleotide
  modified_base 29: mod_base = OTHER; note = 2'-O-methyl modified nucleotide
  modified_base 30: mod_base = OTHER; note = 2'-O-methyl modified nucleotide
  modified_base 31: mod_base = OTHER; note = 2'-O-methyl modified nucleotide
  modified_base 32: mod_base = OTHER; note = 2'-O-methyl modified nucleotide
  modified_base 37: mod_base = OTHER; note = 2'-O-methyl modified nucleotide attached to position 1 of SEQ ID NO: 3039 via a L1 linker
cactcgtggcggccgatgaggtttgttgtagctccct

SEQ ID NO: 2506 - RNA, 37 nt, synthetic construct
  source 1..37: mol_type = other RNA
  modified_base 1: mod_base = OTHER; note = 2'-O-methyl modified nucleotide with phosphorothioate linkage
  modified_base 2: mod_base = OTHER; note = 2'-O-methyl modified nucleotide with phosphorothioate linkage
  modified_base 3: mod_base = OTHER; note = 2'-O-methyl modified nucleotide with phosphorothioate linkage
  modified_base 4: mod_base = OTHER; note = 2'-O-methyl modified nucleotide
  modified_base 5: mod_base = OTHER; note = 2'-O-methyl modified nucleotide
  modified_base 8: mod_base = OTHER; note = 2'-O-methyl modified nucleotide
  modified_base 9: mod_base = OTHER; note = 2'-O-methyl modified nucleotide
  modified_base 11: mod_base = OTHER; note = 2'-O-methyl modified nucleotide
  modified_base 13: mod_base = OTHER; note = 2'-O-methyl modified nucleotide
  modified_base 18: mod_base = OTHER; note = 2'-O-methyl modified nucleotide
  modified_base 22: mod_base = OTHER; note = 2'-O-methyl modified nucleotide
  modified_base 25: mod_base = OTHER; note = 2'-O-methyl modified nucleotide
  modified_base 29: mod_base = OTHER; note = 2'-O-methyl modified nucleotide
  modified_base 30: mod_base = OTHER; note = 2'-O-methyl modified nucleotide
  modified_base 31: mod_base = OTHER; note = 2'-O-methyl modified nucleotide
  modified_base 32: mod_base = OTHER; note = 2'-O-methyl modified nucleotide
  modified_base 37: mod_base = OTHER; note = 2'-O-methyl modified nucleotide attached to position 1 of SEQ ID NO: 3040 via a L1 linker
tgaggttttcagccacatcttgaagttgtagctccct

SEQ ID NO: 2507 - RNA, 37 nt, synthetic construct
  source 1..37: mol_type = other RNA
  modified_base 1: mod_base = OTHER; note = 2'-O-methyl modified nucleotide with phosphorothioate linkage
  modified_base 2: mod_base = OTHER; note = 2'-O-methyl modified nucleotide with phosphorothioate linkage
  modified_base 3: mod_base = OTHER; note = 2'-O-methyl modified nucleotide with phosphorothioate linkage
  modified_base 4: mod_base = OTHER; note = 2'-O-methyl modified nucleotide
  modified_base 5: mod_base = OTHER; note = 2'-O-methyl modified nucleotide
  modified_base 8: mod_base = OTHER; note = 2'-O-methyl modified nucleotide
  modified_base 9: mod_base = OTHER; note = 2'-O-methyl modified nucleotide
  modified_base 11: mod_base = OTHER; note = 2'-O-methyl modified nucleotide
  modified_base 13: mod_base = OTHER; note = 2'-O-methyl modified nucleotide
  modified_base 18: mod_base = OTHER; note = 2'-O-methyl modified nucleotide
  modified_base 22: mod_base = OTHER; note = 2'-O-methyl modified nucleotide
  modified_base 25: mod_base = OTHER; note = 2'-O-methyl modified nucleotide
  modified_base 29: mod_base = OTHER; note = 2'-O-methyl modified nucleotide
  modified_base 30: mod_base = OTHER; note = 2'-O-methyl modified nucleotide
  modified_base 31: mod_base = OTHER; note = 2'-O-methyl modified nucleotide
  modified_base 32: mod_base = OTHER; note = 2'-O-methyl modified nucleotide
  modified_base 37: mod_base = OTHER; note = 2'-O-methyl modified nucleotide attached to position 1 of SEQ ID NO: 3041 via a L1 linker
tgaagagacctgaccgcgttctgcgttgtagctccct

SEQ ID NO: 2508 - RNA, 37 nt, synthetic construct
  source 1..37: mol_type = other RNA
  modified_base 1: mod_base = OTHER; note = 2'-O-methyl modified nucleotide with phosphorothioate linkage
  modified_base 2: mod_base = OTHER; note = 2'-O-methyl modified nucleotide with phosphorothioate linkage
  modified_base 3: mod_base = OTHER; note = 2'-O-methyl modified nucleotide with phosphorothioate linkage
  modified_base 4: mod_base = OTHER; note = 2'-O-methyl modified nucleotide
  modified_base 5: mod_base = OTHER; note = 2'-O-methyl modified nucleotide
  modified_base 8: mod_base = OTHER; note = 2'-O-methyl modified nucleotide
  modified_base 9: mod_base = OTHER; note = 2'-O-methyl modified nucleotide
  modified_base 11: mod_base = OTHER; note = 2'-O-methyl modified nucleotide
  modified_base 13: mod_base = OTHER; note = 2'-O-methyl modified nucleotide
  modified_base 18: mod_base = OTHER; note = 2'-O-methyl modified nucleotide
  modified_base 22: mod_base = OTHER; note = 2'-O-methyl modified nucleotide
  modified_base 25: mod_base = OTHER; note = 2'-O-methyl modified nucleotide
  modified_base 29: mod_base = OTHER; note = 2'-O-methyl modified nucleotide
  modified_base 30: mod_base = OTHER; note = 2'-O-methyl modified nucleotide
  modified_base 31: mod_base = OTHER; note = 2'-O-methyl modified nucleotide
  modified_base 32: mod_base = OTHER; note = 2'-O-methyl modified nucleotide
  modified_base 37: mod_base = OTHER; note = 2'-O-methyl modified nucleotide attached to position 1 of SEQ ID NO: 3042 via a L1 linker
tcgaggagctggaagcgcaagatggttgtagctccct

SEQ ID NO: 2509 - RNA, 37 nt, synthetic construct
  source 1..37: mol_type = other RNA
  modified_base 1: mod_base = OTHER; note = 2'-O-methyl modified nucleotide with phosphorothioate linkage
  modified_base 2: mod_base = OTHER; note = 2'-O-methyl modified nucleotide with phosphorothioate linkage
  modified_base 3: mod_base = OTHER; note = 2'-O-methyl modified nucleotide with phosphorothioate linkage
  modified_base 4: mod_base = OTHER; note = 2'-O-methyl modified nucleotide
  modified_base 5: mod_base = OTHER; note = 2'-O-methyl modified nucleotide
  modified_base 8: mod_base = OTHER; note = 2'-O-methyl modified nucleotide
  modified_base 9: mod_base = OTHER; note = 2'-O-methyl modified nucleotide
  modified_base 11: mod_base = OTHER; note = 2'-O-methyl modified nucleotide
  modified_base 13: mod_base = OTHER; note = 2'-O-methyl modified nucleotide
  modified_base 18: mod_base = OTHER; note = 2'-O-methyl modified nucleotide
  modified_base 22: mod_base = OTHER; note = 2'-O-methyl modified nucleotide
  modified_base 25: mod_base = OTHER; note = 2'-O-methyl modified nucleotide
  modified_base 29: mod_base = OTHER; note = 2'-O-methyl modified nucleotide
  modified_base 30: mod_base = OTHER; note = 2'-O-methyl modified nucleotide
  modified_base 31: mod_base = OTHER; note = 2'-O-methyl modified nucleotide
  modified_base 32: mod_base = OTHER; note = 2'-O-methyl modified nucleotide
  modified_base 37: mod_base = OTHER; note = 2'-O-methyl modified nucleotide attached to position 1 of SEQ ID NO: 3043 via a L1 linker
agatggcttcctgcacagcacgtggttgtagctccct

SEQ ID NO: 2510 - RNA, 37 nt, synthetic construct
  source 1..37: mol_type = other RNA
  modified_base 1: mod_base = OTHER; note = 2'-O-methyl modified nucleotide with phosphorothioate linkage
  modified_base 2: mod_base = OTHER; note = 2'-O-methyl modified nucleotide with phosphorothioate linkage
  modified_base 3: mod_base = OTHER; note = 2'-O-methyl modified nucleotide with phosphorothioate linkage
  modified_base 4: mod_base = OTHER; note = 2'-O-methyl modified nucleotide
  modified_base 5: mod_base = OTHER; note = 2'-O-methyl modified nucleotide
  modified_base 8: mod_base = OTHER; note = 2'-O-methyl modified nucleotide
  modified_base 9: mod_base = OTHER; note = 2'-O-methyl modified nucleotide
  modified_base 11: mod_base = OTHER; note = 2'-O-methyl modified nucleotide
  modified_base 13: mod_base = OTHER; note = 2'-O-methyl modified nucleotide
  modified_base 18: mod_base = OTHER; note = 2'-O-methyl modified nucleotide
  modified_base 22: mod_base = OTHER; note = 2'-O-methyl modified nucleotide
  modified_base 25: mod_base = OTHER; note = 2'-O-methyl modified nucleotide
  modified_base 29: mod_base = OTHER; note = 2'-O-methyl modified nucleotide
  modified_base 30: mod_base = OTHER; note = 2'-O-methyl modified nucleotide
  modified_base 31: mod_base = OTHER; note = 2'-O-methyl modified nucleotide
  modified_base 32: mod_base = OTHER; note = 2'-O-methyl modified nucleotide
  modified_base 37: mod_base = OTHER; note = 2'-O-methyl modified nucleotide attached to position 1 of SEQ ID NO: 3044 via a L1 linker
tggccggccttttccagaagaagcgttgtagctccct

SEQ ID NO: 2511 - RNA, 37 nt, synthetic construct
  source 1..37: mol_type = other RNA
  modified_base 1: mod_base = OTHER; note = 2'-O-methyl modified nucleotide with phosphorothioate linkage
  modified_base 2: mod_base = OTHER; note = 2'-O-methyl modified nucleotide with phosphorothioate linkage
  modified_base 3: mod_base = OTHER; note = 2'-O-methyl modified nucleotide with phosphorothioate linkage
  modified_base 4: mod_base = OTHER; note = 2'-O-methyl modified nucleotide
  modified_base 5: mod_base = OTHER; note = 2'-O-methyl modified nucleotide
  modified_base 8: mod_base = OTHER; note = 2'-O-methyl modified nucleotide
  modified_base 9: mod_base = OTHER; note = 2'-O-methyl modified nucleotide
  modified_base 11: mod_base = OTHER; note = 2'-O-methyl modified nucleotide
  modified_base 13: mod_base = OTHER; note = 2'-O-methyl modified nucleotide
  modified_base 18: mod_base = OTHER; note = 2'-O-methyl modified nucleotide
  modified_base 22: mod_base = OTHER; note = 2'-O-methyl modified nucleotide
  modified_base 25: mod_base = OTHER; note = 2'-O-methyl modified nucleotide
  modified_base 29: mod_base = OTHER; note = 2'-O-methyl modified nucleotide
  modified_base 30: mod_base = OTHER; note = 2'-O-methyl modified nucleotide
  modified_base 31: mod_base = OTHER; note = 2'-O-methyl modified nucleotide
  modified_base 32: mod_base = OTHER; note = 2'-O-methyl modified nucleotide
  modified_base 37: mod_base = OTHER; note = 2'-O-methyl modified nucleotide attached to position 1 of SEQ ID NO: 3045 via a L1 linker
ttccagaagaagctgctccgaggtgttgtagctccct

SEQ ID NO: 2512 - RNA, 37 nt, synthetic construct
  source 1..37: mol_type = other RNA
  modified_base 1: mod_base = OTHER; note = 2'-O-methyl modified nucleotide with phosphorothioate linkage
  modified_base 2: mod_base = OTHER; note = 2'-O-methyl modified nucleotide with phosphorothioate linkage
  modified_base 3: mod_base = OTHER; note = 2'-O-methyl modified nucleotide with phosphorothioate linkage
  modified_base 4: mod_base = OTHER; note = 2'-O-methyl modified nucleotide
  modified_base 5: mod_base = OTHER; note = 2'-O-methyl modified nucleotide
  modified_base 8: mod_base = OTHER; note = 2'-O-methyl modified nucleotide
  modified_base 9: mod_base = OTHER; note = 2'-O-methyl modified nucleotide
  modified_base 11: mod_base = OTHER; note = 2'-O-methyl modified nucleotide
  modified_base 13: mod_base = OTHER; note = 2'-O-methyl modified nucleotide
  modified_base 18: mod_base = OTHER; note = 2'-O-methyl modified nucleotide
  modified_base 22: mod_base = OTHER; note = 2'-O-methyl modified nucleotide
  modified_base 25: mod_base = OTHER; note = 2'-O-methyl modified nucleotide
  modified_base 29: mod_base = OTHER; note = 2'-O-methyl modified nucleotide
  modified_base 30: mod_base = OTHER; note = 2'-O-methyl modified nucleotide
  modified_base 31: mod_base = OTHER; note = 2'-O-methyl modified nucleotide
  modified_base 32: mod_base = OTHER; note = 2'-O-methyl modified nucleotide
  modified_base 37: mod_base = OTHER; note = 2'-O-methyl modified nucleotide attached to position 1 of SEQ ID NO: 3046 via a L1 linker
tccagaagaagctgctccgaggttgttgtagctccct

SEQ ID NO: 2513 - RNA, 37 nt, synthetic construct
  source 1..37: mol_type = other RNA
  modified_base 1: mod_base = OTHER; note = 2'-O-methyl modified nucleotide with phosphorothioate linkage
  modified_base 2: mod_base = OTHER; note = 2'-O-methyl modified nucleotide with phosphorothioate linkage
  modified_base 3: mod_base = OTHER; note = 2'-O-methyl modified nucleotide with phosphorothioate linkage
  modified_base 4: mod_base = OTHER; note = 2'-O-methyl modified nucleotide
  modified_base 5: mod_base = OTHER; note = 2'-O-methyl modified nucleotide
  modified_base 8: mod_base = OTHER; note = 2'-O-methyl modified nucleotide
  modified_base 9: mod_base = OTHER; note = 2'-O-methyl modified nucleotide
  modified_base 11: mod_base = OTHER; note = 2'-O-methyl modified nucleotide
  modified_base 13: mod_base = OTHER; note = 2'-O-methyl modified nucleotide
  modified_base 18: mod_base = OTHER; note = 2'-O-methyl modified nucleotide
  modified_base 22: mod_base = OTHER; note = 2'-O-methyl modified nucleotide
  modified_base 25: mod_base = OTHER; note = 2'-O-methyl modified nucleotide
  modified_base 29: mod_base = OTHER; note = 2'-O-methyl modified nucleotide
  modified_base 30: mod_base = OTHER; note = 2'-O-methyl modified nucleotide
  modified_base 31: mod_base = OTHER; note = 2'-O-methyl modified nucleotide
  modified_base 32: mod_base = OTHER; note = 2'-O-methyl modified nucleotide
  modified_base 37: mod_base = OTHER; note = 2'-O-methyl modified nucleotide attached to position 1 of SEQ ID NO: 3047 via a L1 linker
agaagaagctgctccgaggttgcagttgtagctccct

SEQ ID NO: 2514 - RNA, 37 nt, synthetic construct
  source 1..37: mol_type = other RNA
  modified_base 1: mod_base = OTHER; note = 2'-O-methyl modified nucleotide with phosphorothioate linkage
  modified_base 2: mod_base = OTHER; note = 2'-O-methyl modified nucleotide with phosphorothioate linkage
  modified_base 3: mod_base = OTHER; note = 2'-O-methyl modified nucleotide with phosphorothioate linkage
  modified_base 4: mod_base = OTHER; note = 2'-O-methyl modified nucleotide
  modified_base 5: mod_base = OTHER; note = 2'-O-methyl modified nucleotide
  modified_base 8: mod_base = OTHER; note = 2'-O-methyl modified nucleotide
  modified_base 9: mod_base = OTHER; note = 2'-O-methyl modified nucleotide
  modified_base 11: mod_base = OTHER; note = 2'-O-methyl modified nucleotide
  modified_base 13: mod_base = OTHER; note = 2'-O-methyl modified nucleotide
  modified_base 18: mod_base = OTHER; note = 2'-O-methyl modified nucleotide
  modified_base 22: mod_base = OTHER; note = 2'-O-methyl modified nucleotide
  modified_base 25: mod_base = OTHER; note = 2'-O-methyl modified nucleotide
  modified_base 29: mod_base = OTHER; note = 2'-O-methyl modified nucleotide
  modified_base 30: mod_base = OTHER; note = 2'-O-methyl modified nucleotide
  modified_base 31: mod_base = OTHER; note = 2'-O-methyl modified nucleotide
  modified_base 32: mod_base = OTHER; note = 2'-O-methyl modified nucleotide
  modified_base 37: mod_base = OTHER; note = 2'-O-methyl modified nucleotide attached to position 1 of SEQ ID NO: 3048 via a L1 linker
agaagctgctccgaggttgcacccgttgtagctccct

SEQ ID NO: 2515 - RNA, 37 nt, synthetic construct
  source 1..37: mol_type = other RNA
  modified_base 1: mod_base = OTHER; note = 2'-O-methyl modified nucleotide with phosphorothioate linkage
  modified_base 2: mod_base = OTHER; note = 2'-O-methyl modified nucleotide with phosphorothioate linkage
  modified_base 3: mod_base = OTHER; note = 2'-O-methyl modified nucleotide with phosphorothioate linkage
  modified_base 4: mod_base = OTHER; note = 2'-O-methyl modified nucleotide
  modified_base 5: mod_base = OTHER; note = 2'-O-methyl modified nucleotide
  modified_base 8: mod_base = OTHER; note = 2'-O-methyl modified nucleotide
  modified_base 9: mod_base = OTHER; note = 2'-O-methyl modified nucleotide
  modified_base 11: mod_base = OTHER; note = 2'-O-methyl modified nucleotide
  modified_base 13: mod_base = OTHER; note = 2'-O-methyl modified nucleotide
  modified_base 18: mod_base = OTHER; note = 2'-O-methyl modified nucleotide
  modified_base 22: mod_base = OTHER; note = 2'-O-methyl modified nucleotide
  modified_base 25: mod_base = OTHER; note = 2'-O-methyl modified nucleotide
  modified_base 29: mod_base = OTHER; note = 2'-O-methyl modified nucleotide
  modified_base 30: mod_base = OTHER; note = 2'-O-methyl modified nucleotide
  modified_base 31: mod_base = OTHER; note = 2'-O-methyl modified nucleotide
  modified_base 32: mod_base = OTHER; note = 2'-O-methyl modified nucleotide
  modified_base 37: mod_base = OTHER; note = 2'-O-methyl modified nucleotide attached to position 1 of SEQ ID NO: 3049 via a L1 linker
ctccgaggttgcaccctcctcctcgttgtagctccct

SEQ ID NO: 2516 - RNA, 37 nt, synthetic construct
  source 1..37: mol_type = other RNA
  modified_base 1: mod_base = OTHER; note = 2'-O-methyl modified nucleotide with phosphorothioate linkage
  modified_base 2: mod_base = OTHER; note = 2'-O-methyl modified nucleotide with phosphorothioate linkage
  modified_base 3: mod_base = OTHER; note = 2'-O-methyl modified nucleotide with phosphorothioate linkage
  modified_base 4: mod_base = OTHER; note = 2'-O-methyl modified nucleotide
  modified_base 5: mod_base = OTHER; note = 2'-O-methyl modified nucleotide
  modified_base 8: mod_base = OTHER; note = 2'-O-methyl modified nucleotide
  modified_base 9: mod_base = OTHER; note = 2'-O-methyl modified nucleotide
  modified_base 11: mod_base = OTHER; note = 2'-O-methyl modified nucleotide
  modified_base 13: mod_base = OTHER; note = 2'-O-methyl modified nucleotide
  modified_base 18: mod_base = OTHER; note = 2'-O-methyl modified nucleotide
  modified_base 22: mod_base = OTHER; note = 2'-O-methyl modified nucleotide
  modified_base 25: mod_base = OTHER; note = 2'-O-methyl modified nucleotide
  modified_base 29: mod_base = OTHER; note = 2'-O-methyl modified nucleotide
  modified_base 30: mod_base = OTHER; note = 2'-O-methyl modified nucleotide
  modified_base 31: mod_base = OTHER; note = 2'-O-methyl modified nucleotide
  modified_base 32: mod_base = OTHER; note = 2'-O-methyl modified nucleotide
  modified_base 37: mod_base = OTHER; note = 2'-O-methyl modified nucleotide attached to position 1 of SEQ ID NO: 3050 via a L1 linker
aggttgcaccctcctcctcacagcgttgtagctccct

SEQ ID NO: 2517 - RNA, 37 nt, synthetic construct
  source 1..37: mol_type = other RNA
  modified_base 1: mod_base = OTHER; note = 2'-O-methyl modified nucleotide with phosphorothioate linkage
  modified_base 2: mod_base = OTHER; note = 2'-O-methyl modified nucleotide with phosphorothioate linkage
  modified_base 3: mod_base = OTHER; note = 2'-O-methyl modified nucleotide with phosphorothioate linkage
  modified_base 4: mod_base = OTHER; note = 2'-O-methyl modified nucleotide
  modified_base 5: mod_base = OTHER; note = 2'-O-methyl modified nucleotide
  modified_base 8: mod_base = OTHER; note = 2'-O-methyl modified nucleotide
  modified_base 9: mod_base = OTHER; note = 2'-O-methyl modified nucleotide
  modified_base 11: mod_base = OTHER; note = 2'-O-methyl modified nucleotide
  modified_base 13: mod_base = OTHER; note = 2'-O-methyl modified nucleotide
  modified_base 18: mod_base = OTHER; note = 2'-O-methyl modified nucleotide
  modified_base 22: mod_base = OTHER; note = 2'-O-methyl modified nucleotide
  modified_base 25: mod_base = OTHER; note = 2'-O-methyl modified nucleotide
  modified_base 29: mod_base = OTHER; note = 2'-O-methyl modified nucleotide
  modified_base 30: mod_base = OTHER; note = 2'-O-methyl modified nucleotide
  modified_base 31: mod_base = OTHER; note = 2'-O-methyl modified nucleotide
  modified_base 32: mod_base = OTHER; note = 2'-O-methyl modified nucleotide
  modified_base 37: mod_base = OTHER; note = 2'-O-methyl modified nucleotide attached to position 1 of SEQ ID NO: 3051 via a L1 linker
ctggtccagagcctgagcaaggccgttgtagctccct

SEQ ID NO: 2518 - RNA, 37 nt, synthetic construct
  source 1..37: mol_type = other RNA
  modified_base 1: mod_base = OTHER; note = 2'-O-methyl modified nucleotide with phosphorothioate linkage
  modified_base 2: mod_base = OTHER; note = 2'-O-methyl modified nucleotide with phosphorothioate linkage
  modified_base 3: mod_base = OTHER; note = 2'-O-methyl modified nucleotide with phosphorothioate linkage
  modified_base 4: mod_base = OTHER; note = 2'-O-methyl modified nucleotide
  modified_base 5: mod_base = OTHER; note = 2'-O-methyl modified nucleotide
  modified_base 8: mod_base = OTHER; note = 2'-O-methyl modified nucleotide
  modified_base 9: mod_base = OTHER; note = 2'-O-methyl modified nucleotide
  modified_base 11: mod_base = OTHER; note = 2'-O-methyl modified nucleotide
  modified_base 13: mod_base = OTHER; note = 2'-O-methyl modified nucleotide
  modified_base 18: mod_base = OTHER; note = 2'-O-methyl modified nucleotide
  modified_base 22: mod_base = OTHER; note = 2'-O-methyl modified nucleotide
  modified_base 25: mod_base = OTHER; note = 2'-O-methyl modified nucleotide
  modified_base 29: mod_base = OTHER; note = 2'-O-methyl modified nucleotide
  modified_base 30: mod_base = OTHER; note = 2'-O-methyl modified nucleotide
  modified_base 31: mod_base = OTHER; note = 2'-O-methyl modified nucleotide
  modified_base 32: mod_base = OTHER; note = 2'-O-methyl modified nucleotide
  modified_base 37: mod_base = OTHER; note = 2'-O-methyl modified nucleotide attached to position 1 of SEQ ID NO: 3052 via a L1 linker
tggtccagagcctgagcaaggccggttgtagctccct

SEQ ID NO: 2519 - RNA, 37 nt, synthetic construct
  source 1..37: mol_type = other RNA
  modified_base 1: mod_base = OTHER; note = 2'-O-methyl modified nucleotide with phosphorothioate linkage
  modified_base 2: mod_base = OTHER; note = 2'-O-methyl modified nucleotide with phosphorothioate linkage
  modified_base 3: mod_base = OTHER; note = 2'-O-methyl modified nucleotide with phosphorothioate linkage
  modified_base 4: mod_base = OTHER; note = 2'-O-methyl modified nucleotide
  modified_base 5: mod_base = OTHER; note = 2'-O-methyl modified nucleotide
  modified_base 8: mod_base = OTHER; note = 2'-O-methyl modified nucleotide
  modified_base 9: mod_base = OTHER; note = 2'-O-methyl modified nucleotide
  modified_base 11: mod_base = OTHER; note = 2'-O-methyl modified nucleotide
  modified_base 13: mod_base = OTHER; note = 2'-O-methyl modified nucleotide
  modified_base 18: mod_base = OTHER; note = 2'-O-methyl modified nucleotide
  modified_base 22: mod_base = OTHER; note = 2'-O-methyl modified nucleotide
  modified_base 25: mod_base = OTHER; note = 2'-O-methyl modified nucleotide
  modified_base 29: mod_base = OTHER; note = 2'-O-methyl modified nucleotide
  modified_base 30: mod_base = OTHER; note = 2'-O-methyl modified nucleotide
  modified_base 31: mod_base = OTHER; note = 2'-O-methyl modified nucleotide
  modified_base 32: mod_base = OTHER; note = 2'-O-methyl modified nucleotide
  modified_base 37: mod_base = OTHER; note = 2'-O-methyl modified nucleotide attached to position 1 of SEQ ID NO: 3053 via a L1 linker
agcaaggccgacgccctatttgaggttgtagctccct

SEQ ID NO: 2520 - RNA, 37 nt, synthetic construct
  source 1..37: mol_type = other RNA
  modified_base 1: mod_base = OTHER; note = 2'-O-methyl modified nucleotide with phosphorothioate linkage
  modified_base 2: mod_base = OTHER; note = 2'-O-methyl modified nucleotide with phosphorothioate linkage
  modified_base 3: mod_base = OTHER; note = 2'-O-methyl modified nucleotide with phosphorothioate linkage
  modified_base 4: mod_base = OTHER; note = 2'-O-methyl modified nucleotide
  modified_base 5: mod_base = OTHER; note = 2'-O-methyl modified nucleotide
  modified_base 8: mod_base = OTHER; note = 2'-O-methyl modified nucleotide
  modified_base 9: mod_base = OTHER; note = 2'-O-methyl modified nucleotide
  modified_base 11: mod_base = OTHER; note = 2'-O-methyl modified nucleotide
  modified_base 13: mod_base = OTHER; note = 2'-O-methyl modified nucleotide
  modified_base 18: mod_base = OTHER; note = 2'-O-methyl modified nucleotide
  modified_base 22: mod_base = OTHER; note = 2'-O-methyl modified nucleotide
  modified_base 25: mod_base = OTHER; note = 2'-O-methyl modified nucleotide
  modified_base 29: mod_base = OTHER; note = 2'-O-methyl modified nucleotide
  modified_base 30: mod_base = OTHER; note = 2'-O-methyl modified nucleotide
  modified_base 31: mod_base = OTHER; note = 2'-O-methyl modified nucleotide
  modified_base 32: mod_base = OTHER; note = 2'-O-methyl modified nucleotide
  modified_base 37: mod_base = OTHER; note = 2'-O-methyl modified nucleotide attached to position 1 of SEQ ID NO: 3054 via a L1 linker
gacgccctatttgagctgtccggcgttgtagctccct

SEQ ID NO: 2521 - RNA, 37 nt, synthetic construct
  source 1..37: mol_type = other RNA
  modified_base 1: mod_base = OTHER; note = 2'-O-methyl modified nucleotide with phosphorothioate linkage
  modified_base 2: mod_base = OTHER; note = 2'-O-methyl modified nucleotide with phosphorothioate linkage
  modified_base 3: mod_base = OTHER; note = 2'-O-methyl modified nucleotide with phosphorothioate linkage
  modified_base 4: mod_base = OTHER; note = 2'-O-methyl modified nucleotide
  modified_base 5: mod_base = OTHER; note = 2'-O-methyl modified nucleotide
  modified_base 8: mod_base = OTHER; note = 2'-O-methyl modified nucleotide
  modified_base 9: mod_base = OTHER; note = 2'-O-methyl modified nucleotide
  modified_base 11: mod_base = OTHER; note = 2'-O-methyl modified nucleotide
  modified_base 13: mod_base = OTHER; note = 2'-O-methyl modified nucleotide
  modified_base 18: mod_base = OTHER; note = 2'-O-methyl modified nucleotide
  modified_base 22: mod_base = OTHER; note = 2'-O-methyl modified nucleotide
  modified_base 25: mod_base = OTHER; note = 2'-O-methyl modified nucleotide
  modified_base 29: mod_base = OTHER; note = 2'-O-methyl modified nucleotide
  modified_base 30: mod_base = OTHER; note = 2'-O-methyl modified nucleotide
  modified_base 31: mod_base = OTHER; note = 2'-O-methyl modified nucleotide
  modified_base 32: mod_base = OTHER; note = 2'-O-methyl modified nucleotide
  modified_base 37: mod_base = OTHER; note = 2'-O-methyl modified nucleotide attached to position 1 of SEQ ID NO: 3055 via a L1 linker
aagccggacagctcaaatagggcggttgtagctccct

SEQ ID NO: 2522 - RNA, 37 nt, synthetic construct
  source 1..37: mol_type = other RNA
  modified_base 1: mod_base = OTHER; note = 2'-O-methyl modified nucleotide with phosphorothioate linkage
  modified_base 2: mod_base = OTHER; note = 2'-O-methyl modified nucleotide with phosphorothioate linkage
  modified_base 3: mod_base = OTHER; note = 2'-O-methyl modified nucleotide with phosphorothioate linkage
  modified_base 4: mod_base = OTHER; note = 2'-O-methyl modified nucleotide
  modified_base 5: mod_base = OTHER; note = 2'-O-methyl modified nucleotide
  modified_base 8: mod_base = OTHER; note = 2'-O-methyl modified nucleotide
  modified_base 9: mod_base = OTHER; note = 2'-O-methyl modified nucleotide
  modified_base 11: mod_base = OTHER; note = 2'-O-methyl modified nucleotide
  modified_base 13: mod_base = OTHER; note = 2'-O-methyl modified nucleotide
  modified_base 18: mod_base = OTHER; note = 2'-O-methyl modified nucleotide
  modified_base 22: mod_base = OTHER; note = 2'-O-methyl modified nucleotide
  modified_base 25: mod_base = OTHER; note = 2'-O-methyl modified nucleotide
  modified_base 29: mod_base = OTHER; note = 2'-O-methyl modified nucleotide
  modified_base 30: mod_base = OTHER; note = 2'-O-methyl modified nucleotide
  modified_base 31: mod_base = OTHER; note = 2'-O-methyl modified nucleotide
  modified_base 32: mod_base = OTHER; note = 2'-O-methyl modified nucleotide
  modified_base 37: mod_base = OTHER; note = 2'-O-methyl modified nucleotide attached to position 1 of SEQ ID NO: 3056 via a L1 linker
gagctgtccggcttctccatggaggttgtagctccct

SEQ ID NO: 2523 - RNA, 37 nt, synthetic construct
  source 1..37: mol_type = other RNA
  modified_base 1: mod_base = OTHER; note = 2'-O-methyl modified nucleotide with phosphorothioate linkage
  modified_base 2: mod_base = OTHER; note = 2'-O-methyl modified nucleotide with phosphorothioate linkage
  modified_base 3: mod_base = OTHER; note = 2'-O-methyl modified nucleotide with phosphorothioate linkage
  modified_base 4: mod_base = OTHER; note = 2'-O-methyl modified nucleotide
  modified_base 5: mod_base = OTHER; note = 2'-O-methyl modified nucleotide
  modified_base 8: mod_base = OTHER; note = 2'-O-methyl modified nucleotide
  modified_base 9: mod_base = OTHER; note = 2'-O-methyl modified nucleotide
  modified_base 11: mod_base = OTHER; note = 2'-O-methyl modified nucleotide
  modified_base 13: mod_base = OTHER; note = 2'-O-methyl modified nucleotide
  modified_base 18: mod_base = OTHER; note = 2'-O-methyl modified nucleotide
  modified_base 22: mod_base = OTHER; note = 2'-O-methyl modified nucleotide
  modified_base 25: mod_base = OTHER; note = 2'-O-methyl modified nucleotide
  modified_base 29: mod_base = OTHER; note = 2'-O-methyl modified nucleotide
  modified_base 30: mod_base = OTHER; note = 2'-O-methyl modified nucleotide
  modified_base 31: mod_base = OTHER; note = 2'-O-methyl modified nucleotide
  modified_base 32: mod_base = OTHER; note = 2'-O-methyl modified nucleotide
  modified_base 37: mod_base = OTHER; note = 2'-O-methyl modified nucleotide attached to position 1 of SEQ ID NO: 3057 via a L1 linker
agctgtccggcttctccatggagcgttgtagctccct

SEQ ID NO: 2524 - RNA, 37 nt, synthetic construct
  source 1..37: mol_type = other RNA
  modified_base 1: mod_base = OTHER; note = 2'-O-methyl modified nucleotide with phosphorothioate linkage
  modified_base 2: mod_base = OTHER; note = 2'-O-methyl modified nucleotide with phosphorothioate linkage
  modified_base 3: mod_base = OTHER; note = 2'-O-methyl modified nucleotide with phosphorothioate linkage
  modified_base 4: mod_base = OTHER; note = 2'-O-methyl modified nucleotide
  modified_base 5: mod_base = OTHER; note = 2'-O-methyl modified nucleotide
  modified_base 8: mod_base = OTHER; note = 2'-O-methyl modified nucleotide
  modified_base 9: mod_base = OTHER; note = 2'-O-methyl modified nucleotide
  modified_base 11: mod_base = OTHER; note = 2'-O-methyl modified nucleotide
  modified_base 13: mod_base = OTHER; note = 2'-O-methyl modified nucleotide
  modified_base 18: mod_base = OTHER; note = 2'-O-methyl modified nucleotide
  modified_base 22: mod_base = OTHER; note = 2'-O-methyl modified nucleotide
  modified_base 25: mod_base = OTHER; note = 2'-O-methyl modified nucleotide
  modified_base 29: mod_base = OTHER; note = 2'-O-methyl modified nucleotide
  modified_base 30: mod_base = OTHER; note = 2'-O-methyl modified nucleotide
  modified_base 31: mod_base = OTHER; note = 2'-O-methyl modified nucleotide
  modified_base 32: mod_base = OTHER; note = 2'-O-methyl modified nucleotide
  modified_base 37: mod_base = OTHER; note = 2'-O-methyl modified nucleotide attached to position 1 of SEQ ID NO: 3058 via a L1 linker
tcagggatgacagagcaccaagacgttgtagctccct

SEQ ID NO: 2525 - RNA, 37 nt, synthetic construct
  source 1..37: mol_type = other RNA
  modified_base 1: mod_base = OTHER; note = 2'-O-methyl modified nucleotide with phosphorothioate linkage
  modified_base 2: mod_base = OTHER; note = 2'-O-methyl modified nucleotide with phosphorothioate linkage
  modified_base 3: mod_base = OTHER; note = 2'-O-methyl modified nucleotide with phosphorothioate linkage
  modified_base 4: mod_base = OTHER; note = 2'-O-methyl modified nucleotide
  modified_base 5: mod_base = OTHER; note = 2'-O-methyl modified nucleotide
  modified_base 8: mod_base = OTHER; note = 2'-O-methyl modified nucleotide
  modified_base 9: mod_base = OTHER; note = 2'-O-methyl modified nucleotide
  modified_base 11: mod_base = OTHER; note = 2'-O-methyl modified nucleotide
  modified_base 13: mod_base = OTHER; note = 2'-O-methyl modified nucleotide
  modified_base 18: mod_base = OTHER; note = 2'-O-methyl modified nucleotide
  modified_base 22: mod_base = OTHER; note = 2'-O-methyl modified nucleotide
  modified_base 25: mod_base = OTHER; note = 2'-O-methyl modified nucleotide
  modified_base 29: mod_base = OTHER; note = 2'-O-methyl modified nucleotide
  modified_base 30: mod_base = OTHER; note = 2'-O-methyl modified nucleotide
  modified_base 31: mod_base = OTHER; note = 2'-O-methyl modified nucleotide
  modified_base 32: mod_base = OTHER; note = 2'-O-methyl modified nucleotide
  modified_base 37: mod_base = OTHER; note = 2'-O-methyl modified nucleotide attached to position 1 of SEQ ID NO: 3059 via a L1 linker
cagagcaccaagacagagccctgagttgtagctccct

SEQ ID NO: 2526 - RNA, 37 nt, synthetic construct
  source 1..37: mol_type = other RNA
  modified_base 1: mod_base = OTHER; note = 2'-O-methyl modified nucleotide with phosphorothioate linkage
  modified_base 2: mod_base = OTHER; note = 2'-O-methyl modified nucleotide with phosphorothioate linkage
  modified_base 3: mod_base = OTHER; note = 2'-O-methyl modified nucleotide with phosphorothioate linkage
  modified_base 4: mod_base = OTHER; note = 2'-O-methyl modified nucleotide
  modified_base 5: mod_base = OTHER; note = 2'-O-methyl modified nucleotide
  modified_base 8: mod_base = OTHER; note = 2'-O-methyl modified nucleotide
  modified_base 9: mod_base = OTHER; note = 2'-O-methyl modified nucleotide
  modified_base 11: mod_base = OTHER; note = 2'-O-methyl modified nucleotide
  modified_base 13: mod_base = OTHER; note = 2'-O-methyl modified nucleotide
  modified_base 18: mod_base = OTHER; note = 2'-O-methyl modified nucleotide
  modified_base 22: mod_base = OTHER; note = 2'-O-methyl modified nucleotide
  modified_base 25: mod_base = OTHER; note = 2'-O-methyl modified nucleotide
  modified_base 29: mod_base = OTHER; note = 2'-O-methyl modified nucleotide
  modified_base 30: mod_base = OTHER; note = 2'-O-methyl modified nucleotide
  modified_base 31: mod_base = OTHER; note = 2'-O-methyl modified nucleotide
  modified_base 32: mod_base = OTHER; note = 2'-O-methyl modified nucleotide
  modified_base 37: mod_base = OTHER; note = 2'-O-methyl modified nucleotide attached to position 1 of SEQ ID NO: 3060 via a L1 linker
agcaccaagacagagccctgacgcgttgtagctccct

SEQ ID NO: 2527 - RNA, 37 nt, synthetic construct
  source 1..37: mol_type = other RNA
  modified_base 1: mod_base = OTHER; note = 2'-O-methyl modified nucleotide with phosphorothioate linkage
  modified_base 2: mod_base = OTHER; note = 2'-O-methyl modified nucleotide with phosphorothioate linkage
  modified_base 3: mod_base = OTHER; note = 2'-O-methyl modified nucleotide with phosphorothioate linkage
  modified_base 4: mod_base = OTHER; note = 2'-O-methyl modified nucleotide
  modified_base 5: mod_base = OTHER; note = 2'-O-methyl modified nucleotide
  modified_base 8: mod_base = OTHER; note = 2'-O-methyl modified nucleotide
  modified_base 9: mod_base = OTHER; note = 2'-O-methyl modified nucleotide
  modified_base 11: mod_base = OTHER; note = 2'-O-methyl modified nucleotide
  modified_base 13: mod_base = OTHER; note = 2'-O-methyl modified nucleotide
  modified_base 18: mod_base = OTHER; note = 2'-O-methyl modified nucleotide
  modified_base 22: mod_base = OTHER; note = 2'-O-methyl modified nucleotide
  modified_base 25: mod_base = OTHER; note = 2'-O-methyl modified nucleotide
  modified_base 29: mod_base = OTHER; note = 2'-O-methyl modified nucleotide
  modified_base 30: mod_base = OTHER; note = 2'-O-methyl modified nucleotide
  modified_base 31: mod_base = OTHER; note = 2'-O-methyl modified nucleotide
  modified_base 32: mod_base = OTHER; note = 2'-O-methyl modified nucleotide
  modified_base 37: mod_base = OTHER; note = 2'-O-methyl modified nucleotide attached to position 1 of SEQ ID NO: 3061 via a L1 linker
gggaccggccacttcttctcagtcgttgtagctccct

SEQ ID NO: 2528 - RNA, 37 nt, synthetic construct
  source 1..37: mol_type = other RNA
  modified_base 1: mod_base = OTHER; note = 2'-O-methyl modified nucleotide with phosphorothioate linkage
  modified_base 2: mod_base = OTHER; note = 2'-O-methyl modified nucleotide with phosphorothioate linkage
  modified_base 3: mod_base = OTHER; note = 2'-O-methyl modified nucleotide with phosphorothioate linkage
  modified_base 4: mod_base = OTHER; note = 2'-O-methyl modified nucleotide
  modified_base 5: mod_base = OTHER; note = 2'-O-methyl modified nucleotide
  modified_base 8: mod_base = OTHER; note = 2'-O-methyl modified nucleotide
  modified_base 9: mod_base = OTHER; note = 2'-O-methyl modified nucleotide
  modified_base 11: mod_base = OTHER; note = 2'-O-methyl modified nucleotide
  modified_base 13: mod_base = OTHER; note = 2'-O-methyl modified nucleotide
  modified_base 18: mod_base = OTHER; note = 2'-O-methyl modified nucleotide
  modified_base 22: mod_base = OTHER; note = 2'-O-methyl modified nucleotide
  modified_base 25: mod_base = OTHER; note = 2'-O-methyl modified nucleotide
  modified_base 29: mod_base = OTHER; note = 2'-O-methyl modified nucleotide
  modified_base 30: mod_base = OTHER; note = 2'-O-methyl modified nucleotide
  modified_base 31: mod_base = OTHER; note = 2'-O-methyl modified nucleotide
  modified_base 32: mod_base = OTHER; note = 2'-O-methyl modified nucleotide
  modified_base 37: mod_base = OTHER; note = 2'-O-methyl modified nucleotide attached to position 1 of SEQ ID NO: 3062 via a L1 linker
ggccacttcttctcagtcacagccgttgtagctccct

SEQ ID NO: 2529 - RNA, 37 nt, synthetic construct
  source 1..37: mol_type = other RNA
  modified_base 1: mod_base = OTHER; note = 2'-O-methyl modified nucleotide with phosphorothioate linkage
  modified_base 2: mod_base = OTHER; note = 2'-O-methyl modified nucleotide with phosphorothioate linkage
  modified_base 3: mod_base = OTHER; note = 2'-O-methyl modified nucleotide with phosphorothioate linkage
  modified_base 4: mod_base = OTHER; note = 2'-O-methyl modified nucleotide
  modified_base 5: mod_base = OTHER; note = 2'-O-methyl modified nucleotide
  modified_base 8: mod_base = OTHER; note = 2'-O-methyl modified nucleotide
  modified_base 9: mod_base = OTHER; note = 2'-O-methyl modified nucleotide
  modified_base 11: mod_base = OTHER; note = 2'-O-methyl modified nucleotide
  modified_base 13: mod_base = OTHER; note = 2'-O-methyl modified nucleotide
  modified_base 18: mod_base = OTHER; note = 2'-O-methyl modified nucleotide
  modified_base 22: mod_base = OTHER; note = 2'-O-methyl modified nucleotide
  modified_base 25: mod_base = OTHER; note = 2'-O-methyl modified nucleotide
  modified_base 29: mod_base = OTHER; note = 2'-O-methyl modified nucleotide
  modified_base 30: mod_base = OTHER; note = 2'-O-methyl modified nucleotide
  modified_base 31: mod_base = OTHER; note = 2'-O-methyl modified nucleotide
  modified_base 32: mod_base = OTHER; note = 2'-O-methyl modified nucleotide
  modified_base 37: mod_base = OTHER; note = 2'-O-methyl modified nucleotide attached to position 1 of SEQ ID NO: 3063 via a L1 linker
acagccctactttgtgccgggcaggttgtagctccct

SEQ ID NO: 2530 - RNA, 37 nt, synthetic construct
  source 1..37: mol_type = other RNA
  modified_base 1: mod_base = OTHER; note = 2'-O-methyl modified nucleotide with phosphorothioate linkage
  modified_base 2: mod_base = OTHER; note = 2'-O-methyl modified nucleotide with phosphorothioate linkage
  modified_base 3: mod_base = OTHER; note = 2'-O-methyl modified nucleotide with phosphorothioate linkage
  modified_base 4: mod_base = OTHER; note = 2'-O-methyl modified nucleotide
  modified_base 5: mod_base = OTHER; note = 2'-O-methyl modified nucleotide
  modified_base 8: mod_base = OTHER; note = 2'-O-methyl modified nucleotide
  modified_base 9: mod_base = OTHER; note = 2'-O-methyl modified nucleotide
  modified_base 11: mod_base = OTHER; note = 2'-O-methyl modified nucleotide
  modified_base 13: mod_base = OTHER; note = 2'-O-methyl modified nucleotide
  modified_base 18: mod_base = OTHER; note = 2'-O-methyl modified nucleotide
  modified_base 22: mod_base = OTHER; note = 2'-O-methyl modified nucleotide
  modified_base 25: mod_base = OTHER; note = 2'-O-methyl modified nucleotide
  modified_base 29: mod_base = OTHER; note = 2'-O-methyl modified nucleotide
  modified_base 30: mod_base = OTHER; note = 2'-O-methyl modified nucleotide
  modified_base 31: mod_base = OTHER; note = 2'-O-methyl modified nucleotide
  modified_base 32: mod_base = OTHER; note = 2'-O-methyl modified nucleotide
  modified_base 37: mod_base = OTHER; note = 2'-O-methyl modified nucleotide attached to position 1 of SEQ ID NO: 3064 via a L1 linker
tgccgggcagtgtgccagctctcagttgtagctccct

SEQ ID NO: 2531 - RNA, 37 nt, synthetic construct
  source 1..37: mol_type = other RNA
  modified_base 1: mod_base = OTHER; note = 2'-O-methyl modified nucleotide with phosphorothioate linkage
  modified_base 2: mod_base = OTHER; note = 2'-O-methyl modified nucleotide with phosphorothioate linkage
  modified_base 3: mod_base = OTHER; note = 2'-O-methyl modified nucleotide with phosphorothioate linkage
  modified_base 4: mod_base = OTHER; note = 2'-O-methyl modified nucleotide
  modified_base 5: mod_base = OTHER; note = 2'-O-methyl modified nucleotide
  modified_base 8: mod_base = OTHER; note = 2'-O-methyl modified nucleotide
  modified_base 9: mod_base = OTHER; note = 2'-O-methyl modified nucleotide
  modified_base 11: mod_base = OTHER; note = 2'-O-methyl modified nucleotide
  modified_base 13: mod_base = OTHER; note = 2'-O-methyl modified nucleotide
  modified_base 18: mod_base = OTHER; note = 2'-O-methyl modified nucleotide
  modified_base 22: mod_base = OTHER; note = 2'-O-methyl modified nucleotide
  modified_base 25: mod_base = OTHER; note = 2'-O-methyl modified nucleotide
  modified_base 29: mod_base = OTHER; note = 2'-O-methyl modified nucleotide
  modified_base 30: mod_base = OTHER; note = 2'-O-methyl modified nucleotide
  modified_base 31: mod_base = OTHER; note = 2'-O-methyl modified nucleotide
  modified_base 32: mod_base = OTHER; note = 2'-O-methyl modified nucleotide
  modified_base 37: mod_base = OTHER; note = 2'-O-methyl modified nucleotide attached to position 1 of SEQ ID NO: 3065 via a L1 linker
gccgggcagtgtgccagctctcaggttgtagctccct

SEQ ID NO: 2532 - RNA, 37 nt, synthetic construct
  source 1..37: mol_type = other RNA
  modified_base 1: mod_base = OTHER; note = 2'-O-methyl modified nucleotide with phosphorothioate linkage
  modified_base 2: mod_base = OTHER; note = 2'-O-methyl modified nucleotide with phosphorothioate linkage
  modified_base 3: mod_base = OTHER; note = 2'-O-methyl modified nucleotide with phosphorothioate linkage
  modified_base 4: mod_base = OTHER; note = 2'-O-methyl modified nucleotide
  modified_base 5: mod_base = OTHER; note = 2'-O-methyl modified nucleotide
  modified_base 8: mod_base = OTHER; note = 2'-O-methyl modified nucleotide
  modified_base 9: mod_base = OTHER; note = 2'-O-methyl modified nucleotide
  modified_base 11: mod_base = OTHER; note = 2'-O-methyl modified nucleotide
  modified_base 13: mod_base = OTHER; note = 2'-O-methyl modified nucleotide
  modified_base 18: mod_base = OTHER; note = 2'-O-methyl modified nucleotide
  modified_base 22: mod_base = OTHER; note = 2'-O-methyl modified nucleotide
  modified_base 25: mod_base = OTHER; note = 2'-O-methyl modified nucleotide
  modified_base 29: mod_base = OTHER; note = 2'-O-methyl modified nucleotide
  modified_base 30: mod_base = OTHER; note = 2'-O-methyl modified nucleotide
  modified_base 31: mod_base = OTHER; note = 2'-O-methyl modified nucleotide
  modified_base 32: mod_base = OTHER; note = 2'-O-methyl modified nucleotide
  modified_base 37: mod_base = OTHER; note = 2'-O-methyl modified nucleotide attached to position 1 of SEQ ID NO: 3066 via a L1 linker
cctccacgctcacgggactctatggttgtagctccct

SEQ ID NO: 2533 - RNA, 37 nt, synthetic construct
  source 1..37: mol_type = other RNA
  modified_base 1: mod_base = OTHER; note = 2'-O-methyl modified nucleotide with phosphorothioate linkage
  modified_base 2: mod_base = OTHER; note = 2'-O-methyl modified nucleotide with phosphorothioate linkage
  modified_base 3: mod_base = OTHER; note = 2'-O-methyl modified nucleotide with phosphorothioate linkage
  modified_base 4: mod_base = OTHER; note = 2'-O-methyl modified nucleotide
  modified_base 5: mod_base = OTHER; note = 2'-O-methyl modified nucleotide
  modified_base 8: mod_base = OTHER; note = 2'-O-methyl modified nucleotide
  modified_base 9: mod_base = OTHER; note = 2'-O-methyl modified nucleotide
  modified_base 11: mod_base = OTHER; note = 2'-O-methyl modified nucleotide
  modified_base 13: mod_base = OTHER; note = 2'-O-methyl modified nucleotide
  modified_base 18: mod_base = OTHER; note = 2'-O-methyl modified nucleotide
  modified_base 22: mod_base = OTHER; note = 2'-O-methyl modified nucleotide
  modified_base 25: mod_base = OTHER; note = 2'-O-methyl modified nucleotide
  modified_base 29: mod_base = OTHER; note = 2'-O-methyl modified nucleotide
  modified_base 30: mod_base = OTHER; note = 2'-O-methyl modified nucleotide
  modified_base 31: mod_base = OTHER; note = 2'-O-methyl modified nucleotide
  modified_base 32: mod_base = OTHER; note = 2'-O-methyl modified nucleotide
  modified_base 37: mod_base = OTHER; note = 2'-O-methyl modified nucleotide attached to position 1 of SEQ ID NO: 3067 via a L1 linker
tcacgggactctatgtcggcctgcgttgtagctccct

SEQ ID NO: 2534 - RNA, 37 nt, synthetic construct
  source 1..37: mol_type = other RNA
  modified_base 1: mod_base = OTHER; note = 2'-O-methyl modified nucleotide with phosphorothioate linkage
  modified_base 2: mod_base = OTHER; note = 2'-O-methyl modified nucleotide with phosphorothioate linkage
  modified_base 3: mod_base = OTHER; note = 2'-O-methyl modified nucleotide with phosphorothioate linkage
  modified_base 4: mod_base = OTHER; note = 2'-O-methyl modified nucleotide
  modified_base 5: mod_base = OTHER; note = 2'-O-methyl modified nucleotide
  modified_base 8: mod_base = OTHER; note = 2'-O-methyl modified nucleotide
  modified_base 9: mod_base = OTHER; note = 2'-O-methyl modified nucleotide
  modified_base 11: mod_base = OTHER; note = 2'-O-methyl modified nucleotide
  modified_base 13: mod_base = OTHER; note = 2'-O-methyl modified nucleotide
  modified_base 18: mod_base = OTHER; note = 2'-O-methyl modified nucleotide
  modified_base 22: mod_base = OTHER; note = 2'-O-methyl modified nucleotide
  modified_base 25: mod_base = OTHER; note = 2'-O-methyl modified nucleotide
  modified_base 29: mod_base = OTHER; note = 2'-O-methyl modified nucleotide
  modified_base 30: mod_base = OTHER; note = 2'-O-methyl modified nucleotide
  modified_base 31: mod_base = OTHER; note = 2'-O-methyl modified nucleotide
  modified_base 32: mod_base = OTHER; note = 2'-O-methyl modified nucleotide
  modified_base 37: mod_base = OTHER; note = 2'-O-methyl modified nucleotide attached to position 1 of SEQ ID NO: 3068 via a L1 linker
tgggagctgggccgcagacatcaagttgtagctccct

SEQ ID NO: 2535 - RNA, 37 nt, synthetic construct
  source 1..37: mol_type = other RNA
  modified_base 1: mod_base = OTHER; note = 2'-O-methyl modified nucleotide with phosphorothioate linkage
  modified_base 2: mod_base = OTHER; note = 2'-O-methyl modified nucleotide with phosphorothioate linkage
  modified_base 3: mod_base = OTHER; note = 2'-O-methyl modified nucleotide with phosphorothioate linkage
  modified_base 4: mod_base = OTHER; note = 2'-O-methyl modified nucleotide
  modified_base 5: mod_base = OTHER; note = 2'-O-methyl modified nucleotide
  modified_base 8: mod_base = OTHER; note = 2'-O-methyl modified nucleotide
  modified_base 9: mod_base = OTHER; note = 2'-O-methyl modified nucleotide
  modified_base 11: mod_base = OTHER; note = 2'-O-methyl modified nucleotide
  modified_base 13: mod_base = OTHER; note = 2'-O-methyl modified nucleotide
  modified_base 18: mod_base = OTHER; note = 2'-O-methyl modified nucleotide
  modified_base 22: mod_base = OTHER; note = 2'-O-methyl modified nucleotide
  modified_base 25: mod_base = OTHER; note = 2'-O-methyl modified nucleotide
  modified_base 29: mod_base = OTHER; note = 2'-O-methyl modified nucleotide
  modified_base 30: mod_base = OTHER; note = 2'-O-methyl modified nucleotide
  modified_base 31: mod_base = OTHER; note = 2'-O-methyl modified nucleotide
  modified_base 32: mod_base = OTHER; note = 2'-O-methyl modified nucleotide
  modified_base 37: mod_base = OTHER; note = 2'-O-methyl modified nucleotide attached to position 1 of SEQ ID NO: 3069 via a L1 linker
gggagctgggccgcagacatcaaagttgtagctccct

SEQ ID NO: 2536 - RNA, 37 nt, synthetic construct
  source 1..37: mol_type = other RNA
  modified_base 1: mod_base = OTHER; note = 2'-O-methyl modified nucleotide with phosphorothioate linkage
  modified_base 2: mod_base = OTHER; note = 2'-O-methyl modified nucleotide with phosphorothioate linkage
  modified_base 3: mod_base = OTHER; note = 2'-O-methyl modified nucleotide with phosphorothioate linkage
  modified_base 4: mod_base = OTHER; note = 2'-O-methyl modified nucleotide
  modified_base 5: mod_base = OTHER; note = 2'-O-methyl modified nucleotide
  modified_base 8: mod_base = OTHER; note = 2'-O-methyl modified nucleotide
  modified_base 9: mod_base = OTHER; note = 2'-O-methyl modified nucleotide
  modified_base 11: mod_base = OTHER; note = 2'-O-methyl modified nucleotide
  modified_base 13: mod_base = OTHER; note = 2'-O-methyl modified nucleotide
  modified_base 18: mod_base = OTHER; note = 2'-O-methyl modified nucleotide
  modified_base 22: mod_base = OTHER; note = 2'-O-methyl modified nucleotide
  modified_base 25: mod_base = OTHER; note = 2'-O-methyl modified nucleotide
  modified_base 29: mod_base = OTHER; note = 2'-O-methyl modified nucleotide
  modified_base 30: mod_base = OTHER; note = 2'-O-methyl modified nucleotide
  modified_base 31: mod_base = OTHER; note = 2'-O-methyl modified nucleotide
  modified_base 32: mod_base = OTHER; note = 2'-O-methyl modified nucleotide
  modified_base 37: mod_base = OTHER; note = 2'-O-methyl modified nucleotide attached to position 1 of SEQ ID NO: 3070 via a L1 linker
gcagacatcaaagtaccctacagggttgtagctccct

SEQ ID NO: 2537 - RNA, 37 nt, synthetic construct
  source 1..37: mol_type = other RNA
  modified_base 1: mod_base = OTHER; note = 2'-O-methyl modified nucleotide with phosphorothioate linkage
  modified_base 2: mod_base = OTHER; note = 2'-O-methyl modified nucleotide with phosphorothioate linkage
  modified_base 3: mod_base = OTHER; note = 2'-O-methyl modified nucleotide with phosphorothioate linkage
  modified_base 4: mod_base = OTHER; note = 2'-O-methyl modified nucleotide
  modified_base 5: mod_base = OTHER; note = 2'-O-methyl modified nucleotide
  modified_base 8: mod_base = OTHER; note = 2'-O-methyl modified nucleotide
  modified_base 9: mod_base = OTHER; note = 2'-O-methyl modified nucleotide
  modified_base 11: mod_base = OTHER; note = 2'-O-methyl modified nucleotide
  modified_base 13: mod_base = OTHER; note = 2'-O-methyl modified nucleotide
  modified_base 18: mod_base = OTHER; note = 2'-O-methyl modified nucleotide
  modified_base 22: mod_base = OTHER; note = 2'-O-methyl modified nucleotide
  modified_base 25: mod_base = OTHER; note = 2'-O-methyl modified nucleotide
  modified_base 29: mod_base = OTHER; note = 2'-O-methyl modified nucleotide
  modified_base 30: mod_base = OTHER; note = 2'-O-methyl modified nucleotide
  modified_base 31: mod_base = OTHER; note = 2'-O-methyl modified nucleotide
  modified_base 32: mod_base = OTHER; note = 2'-O-methyl modified nucleotide
  modified_base 37: mod_base = OTHER; note = 2'-O-methyl modified nucleotide attached to position 1 of SEQ ID NO: 3071 via a L1 linker
atcaaagtaccctacaggaggaccgttgtagctccct

SEQ ID NO: 2538 - RNA, 37 nt, synthetic construct
  source 1..37: mol_type = other RNA
  modified_base 1: mod_base = OTHER; note = 2'-O-methyl modified nucleotide with phosphorothioate linkage
  modified_base 2: mod_base = OTHER; note = 2'-O-methyl modified nucleotide with phosphorothioate linkage
  modified_base 3: mod_base = OTHER; note = 2'-O-methyl modified nucleotide with phosphorothioate linkage
  modified_base 4: mod_base = OTHER; note = 2'-O-methyl modified nucleotide
  modified_base 5: mod_base = OTHER; note = 2'-O-methyl modified nucleotide
  modified_base 8: mod_base = OTHER; note = 2'-O-methyl modified nucleotide
  modified_base 9: mod_base = OTHER; note = 2'-O-methyl modified nucleotide
  modified_base 11: mod_base = OTHER; note = 2'-O-methyl modified nucleotide
  modified_base 13: mod_base = OTHER; note = 2'-O-methyl modified nucleotide
  modified_base 18: mod_base = OTHER; note = 2'-O-methyl modified nucleotide
  modified_base 22: mod_base = OTHER; note = 2'-O-methyl modified nucleotide
  modified_base 25: mod_base = OTHER; note = 2'-O-methyl modified nucleotide
  modified_base 29: mod_base = OTHER; note = 2'-O-methyl modified nucleotide
  modified_base 30: mod_base = OTHER; note = 2'-O-methyl modified nucleotide
  modified_base 31: mod_base = OTHER; note = 2'-O-methyl modified nucleotide
  modified_base 32: mod_base = OTHER; note = 2'-O-methyl modified nucleotide
  modified_base 37: mod_base = OTHER; note = 2'-O-methyl modified nucleotide attached to position 1 of SEQ ID NO: 3072 via a L1 linker
tcaaagtaccctacaggaggaccagttgtagctccct

SEQ ID NO: 2539 - RNA, 37 nt, synthetic construct
  source 1..37: mol_type = other RNA
  modified_base 1: mod_base = OTHER; note = 2'-O-methyl modified nucleotide with phosphorothioate linkage
  modified_base 2: mod_base = OTHER; note = 2'-O-methyl modified nucleotide with phosphorothioate linkage
  modified_base 3: mod_base = OTHER; note = 2'-O-methyl modified nucleotide with phosphorothioate linkage
  modified_base 4: mod_base = OTHER; note = 2'-O-methyl modified nucleotide
  modified_base 5: mod_base = OTHER; note = 2'-O-methyl modified nucleotide
  modified_base 8: mod_base = OTHER; note = 2'-O-methyl modified nucleotide
  modified_base 9: mod_base = OTHER; note = 2'-O-methyl modified nucleotide
  modified_base 11: mod_base = OTHER; note = 2'-O-methyl modified nucleotide
  modified_base 13: mod_base = OTHER; note = 2'-O-methyl modified nucleotide
  modified_base 18: mod_base = OTHER; note = 2'-O-methyl modified nucleotide
  modified_base 22: mod_base = OTHER; note = 2'-O-methyl modified nucleotide
  modified_base 25: mod_base = OTHER; note = 2'-O-methyl modified nucleotide
  modified_base 29: mod_base = OTHER; note = 2'-O-methyl modified nucleotide
  modified_base 30: mod_base = OTHER; note = 2'-O-methyl modified nucleotide
  modified_base 31: mod_base = OTHER; note = 2'-O-methyl modified nucleotide
  modified_base 32: mod_base = OTHER; note = 2'-O-methyl modified nucleotide
  modified_base 37: mod_base = OTHER; note = 2'-O-methyl modified nucleotide attached to position 1 of SEQ ID NO: 3073 via a L1 linker
agtaccctacaggaggaccagttcgttgtagctccct

SEQ ID NO: 2540 - RNA, 37 nt, synthetic construct
  source 1..37: mol_type = other RNA
  modified_base 1: mod_base = OTHER; note = 2'-O-methyl modified nucleotide with phosphorothioate linkage
  modified_base 2: mod_base = OTHER; note = 2'-O-methyl modified nucleotide with phosphorothioate linkage
  modified_base 3: mod_base = OTHER; note = 2'-O-methyl modified nucleotide with phosphorothioate linkage
  modified_base 4: mod_base = OTHER; note = 2'-O-methyl modified nucleotide
  modified_base 5: mod_base = OTHER; note = 2'-O-methyl modified nucleotide
  modified_base 8: mod_base = OTHER; note = 2'-O-methyl modified nucleotide
  modified_base 9: mod_base = OTHER; note = 2'-O-methyl modified nucleotide
  modified_base 11: mod_base = OTHER; note = 2'-O-methyl modified nucleotide
  modified_base 13: mod_base = OTHER; note = 2'-O-methyl modified nucleotide
  modified_base 18: mod_base = OTHER; note = 2'-O-methyl modified nucleotide
  modified_base 22: mod_base = OTHER; note = 2'-O-methyl modified nucleotide
  modified_base 25: mod_base = OTHER; note = 2'-O-methyl modified nucleotide
  modified_base 29: mod_base = OTHER; note = 2'-O-methyl modified nucleotide
  modified_base 30: mod_base = OTHER; note = 2'-O-methyl modified nucleotide
  modified_base 31: mod_base = OTHER; note = 2'-O-methyl modified nucleotide
  modified_base 32: mod_base = OTHER; note = 2'-O-methyl modified nucleotide
  modified_base 37: mod_base = OTHER; note = 2'-O-methyl modified nucleotide attached to position 1 of SEQ ID NO: 3074 via a L1 linker
tccgcagacgtgaggacctgggcggttgtagctccct

SEQ ID NO: 2541 - RNA, 37 nt, synthetic construct
  source 1..37: mol_type = other RNA
  modified_base 1: mod_base = OTHER; note = 2'-O-methyl modified nucleotide with phosphorothioate linkage
  modified_base 2: mod_base = OTHER; note = 2'-O-methyl modified nucleotide with phosphorothioate linkage
  modified_base 3: mod_base = OTHER; note = 2'-O-methyl modified nucleotide with phosphorothioate linkage
  modified_base 4: mod_base = OTHER; note = 2'-O-methyl modified nucleotide
  modified_base 5: mod_base = OTHER; note = 2'-O-methyl modified nucleotide
  modified_base 8: mod_base = OTHER; note = 2'-O-methyl modified nucleotide
  modified_base 9: mod_base = OTHER; note = 2'-O-methyl modified nucleotide
  modified_base 11: mod_base = OTHER; note = 2'-O-methyl modified nucleotide
  modified_base 13: mod_base = OTHER; note = 2'-O-methyl modified nucleotide
  modified_base 18: mod_base = OTHER; note = 2'-O-methyl modified nucleotide
  modified_base 22: mod_base = OTHER; note = 2'-O-methyl modified nucleotide
  modified_base 25: mod_base = OTHER; note = 2'-O-methyl modified nucleotide
  modified_base 29: mod_base = OTHER; note = 2'-O-methyl modified nucleotide
  modified_base 30: mod_base = OTHER; note = 2'-O-methyl modified nucleotide
  modified_base 31: mod_base = OTHER; note = 2'-O-methyl modified nucleotide
  modified_base 32: mod_base = OTHER; note = 2'-O-methyl modified nucleotide
  modified_base 37: mod_base = OTHER; note = 2'-O-methyl modified nucleotide attached to position 1 of SEQ ID NO: 3075 via a L1 linker
ggacctgggcgatggccaaaggctgttgtagctccct

SEQ ID NO: 2542 - RNA, 37 nt, synthetic construct
  source 1..37: mol_type = other RNA
  modified_base 1: mod_base = OTHER; note = 2'-O-methyl modified nucleotide with phosphorothioate linkage
  modified_base 2: mod_base = OTHER; note = 2'-O-methyl modified nucleotide with phosphorothioate linkage
  modified_base 3: mod_base = OTHER; note = 2'-O-methyl modified nucleotide with phosphorothioate linkage
  modified_base 4: mod_base = OTHER; note = 2'-O-methyl modified nucleotide
  modified_base 5: mod_base = OTHER; note = 2'-O-methyl modified nucleotide
  modified_base 8: mod_base = OTHER; note = 2'-O-methyl modified nucleotide
  modified_base 9: mod_base = OTHER; note = 2'-O-methyl modified nucleotide
  modified_base 11: mod_base = OTHER; note = 2'-O-methyl modified nucleotide
  modified_base 13: mod_base = OTHER; note = 2'-O-methyl modified nucleotide
  modified_base 18: mod_base = OTHER; note = 2'-O-methyl modified nucleotide
  modified_base 22: mod_base = OTHER; note = 2'-O-methyl modified nucleotide
  modified_base 25: mod_base = OTHER; note = 2'-O-methyl modified nucleotide
  modified_base 29: mod_base = OTHER; note = 2'-O-methyl modified nucleotide
  modified_base 30: mod_base = OTHER; note = 2'-O-methyl modified nucleotide
  modified_base 31: mod_base = OTHER; note = 2'-O-methyl modified nucleotide
  modified_base 32: mod_base = OTHER; note = 2'-O-methyl modified nucleotide
  modified_base 37: mod_base = OTHER; note = 2'-O-methyl modified nucleotide attached to position 1 of SEQ ID NO: 3076 via a L1 linker
gggcgatggccaaaggcttagtccgttgtagctccct

SEQ ID NO: 2543 - RNA, 37 nt, synthetic construct
  source 1..37: mol_type = other RNA
  modified_base 1: mod_base = OTHER; note = 2'-O-methyl modified nucleotide with phosphorothioate linkage
  modified_base 2: mod_base = OTHER; note = 2'-O-methyl modified nucleotide with phosphorothioate linkage
  modified_base 3: mod_base = OTHER; note = 2'-O-methyl modified nucleotide with phosphorothioate linkage
  modified_base 4: mod_base = OTHER; note = 2'-O-methyl modified nucleotide
  modified_base 5: mod_base = OTHER; note = 2'-O-methyl modified nucleotide
  modified_base 8: mod_base = OTHER; note = 2'-O-methyl modified nucleotide
  modified_base 9: mod_base = OTHER; note = 2'-O-methyl modified nucleotide
  modified_base 11: mod_base = OTHER; note = 2'-O-methyl modified nucleotide
  modified_base 13: mod_base = OTHER; note = 2'-O-methyl modified nucleotide
  modified_base 18: mod_base = OTHER; note = 2'-O-methyl modified nucleotide
  modified_base 22: mod_base = OTHER; note = 2'-O-methyl modified nucleotide
  modified_base 25: mod_base = OTHER; note = 2'-O-methyl modified nucleotide
  modified_base 29: mod_base = OTHER; note = 2'-O-methyl modified nucleotide
  modified_base 30: mod_base = OTHER; note = 2'-O-methyl modified nucleotide
  modified_base 31: mod_base = OTHER; note = 2'-O-methyl modified nucleotide
  modified_base 32: mod_base = OTHER; note = 2'-O-methyl modified nucleotide
  modified_base 37: mod_base = OTHER; note = 2'-O-methyl modified nucleotide attached to position 1 of SEQ ID NO: 3077 via a L1 linker
ggcgatggccaaaggcttagtccagttgtagctccct

SEQ ID NO: 2544 - RNA, 37 nt, synthetic construct
  source 1..37: mol_type = other RNA
  modified_base 1: mod_base = OTHER; note = 2'-O-methyl modified nucleotide with phosphorothioate linkage
  modified_base 2: mod_base = OTHER; note = 2'-O-methyl modified nucleotide with phosphorothioate linkage
  modified_base 3: mod_base = OTHER; note = 2'-O-methyl modified nucleotide with phosphorothioate linkage
  modified_base 4: mod_base = OTHER; note = 2'-O-methyl modified nucleotide
  modified_base 5: mod_base = OTHER; note = 2'-O-methyl modified nucleotide
  modified_base 8: mod_base = OTHER; note = 2'-O-methyl modified nucleotide
  modified_base 9: mod_base = OTHER; note = 2'-O-methyl modified nucleotide
  modified_base 11: mod_base = OTHER; note = 2'-O-methyl modified nucleotide
  modified_base 13: mod_base = OTHER; note = 2'-O-methyl modified nucleotide
  modified_base 18: mod_base = OTHER; note = 2'-O-methyl modified nucleotide
  modified_base 22: mod_base = OTHER; note = 2'-O-methyl modified nucleotide
  modified_base 25: mod_base = OTHER; note = 2'-O-methyl modified nucleotide
  modified_base 29: mod_base = OTHER; note = 2'-O-methyl modified nucleotide
  modified_base 30: mod_base = OTHER; note = 2'-O-methyl modified nucleotide
  modified_base 31: mod_base = OTHER; note = 2'-O-methyl modified nucleotide
  modified_base 32: mod_base = OTHER; note = 2'-O-methyl modified nucleotide
  modified_base 37: mod_base = OTHER; note = 2'-O-methyl modified nucleotide attached to position 1 of SEQ ID NO: 3078 via a L1 linker
cgcgggccgcagagtccgagctgggttgtagctccct

SEQ ID NO: 2545 - RNA, 37 nt, synthetic construct
  source 1..37: mol_type = other RNA
  modified_base 1: mod_base = OTHER; note = 2'-O-methyl modified nucleotide with phosphorothioate linkage
  modified_base 2: mod_base = OTHER; note = 2'-O-methyl modified nucleotide with phosphorothioate linkage
  modified_base 3: mod_base = OTHER; note = 2'-O-methyl modified nucleotide with phosphorothioate linkage
  modified_base 4: mod_base = OTHER; note = 2'-O-methyl modified nucleotide
  modified_base 5: mod_base = OTHER; note = 2'-O-methyl modified nucleotide
  modified_base 8: mod_base = OTHER; note = 2'-O-methyl modified nucleotide
  modified_base 9: mod_base = OTHER; note = 2'-O-methyl modified nucleotide
  modified_base 11: mod_base = OTHER; note = 2'-O-methyl modified nucleotide
  modified_base 13: mod_base = OTHER; note = 2'-O-methyl modified nucleotide
  modified_base 18: mod_base = OTHER; note = 2'-O-methyl modified nucleotide
  modified_base 22: mod_base = OTHER; note = 2'-O-methyl modified nucleotide
  modified_base 25: mod_base = OTHER; note = 2'-O-methyl modified nucleotide
  modified_base 29: mod_base = OTHER; note = 2'-O-methyl modified nucleotide
  modified_base 30: mod_base = OTHER; note = 2'-O-methyl modified nucleotide
  modified_base 31: mod_base = OTHER; note = 2'-O-methyl modified nucleotide
  modified_base 32: mod_base = OTHER; note = 2'-O-methyl modified nucleotide
  modified_base 37: mod_base = OTHER; note = 2'-O-methyl modified nucleotide attached to position 1 of SEQ ID NO: 3079 via a L1 linker
gcgggccgcagagtccgagctggcgttgtagctccct

SEQ ID NO: 2546 - RNA, 37 nt, synthetic construct
  source 1..37: mol_type = other RNA
  modified_base 1: mod_base = OTHER; note = 2'-O-methyl modified nucleotide with phosphorothioate linkage
  modified_base 2: mod_base = OTHER; note = 2'-O-methyl modified nucleotide with phosphorothioate linkage
  modified_base 3: mod_base = OTHER; note = 2'-O-methyl modified nucleotide with phosphorothioate linkage
  modified_base 4: mod_base = OTHER; note = 2'-O-methyl modified nucleotide
  modified_base 5: mod_base = OTHER; note = 2'-O-methyl modified nucleotide
  modified_base 8: mod_base = OTHER; note = 2'-O-methyl modified nucleotide
  modified_base 9: mod_base = OTHER; note = 2'-O-methyl modified nucleotide
  modified_base 11: mod_base = OTHER; note = 2'-O-methyl modified nucleotide
  modified_base 13: mod_base = OTHER; note = 2'-O-methyl modified nucleotide
  modified_base 18: mod_base = OTHER; note = 2'-O-methyl modified nucleotide
  modified_base 22: mod_base = OTHER; note = 2'-O-methyl modified nucleotide
  modified_base 25: mod_base = OTHER; note = 2'-O-methyl modified nucleotide
  modified_base 29: mod_base = OTHER; note = 2'-O-methyl modified nucleotide
  modified_base 30: mod_base = OTHER; note = 2'-O-methyl modified nucleotide
  modified_base 31: mod_base = OTHER; note = 2'-O-methyl modified nucleotide
  modified_base 32: mod_base = OTHER; note = 2'-O-methyl modified nucleotide
  modified_base 37: mod_base = OTHER; note = 2'-O-methyl modified nucleotide attached to position 1 of SEQ ID NO: 3080 via a L1 linker
cgggccgcagagtccgagctggccgttgtagctccct

SEQ ID NO: 2547 - RNA, 37 nt, synthetic construct
  source 1..37: mol_type = other RNA
  modified_base 1: mod_base = OTHER; note = 2'-O-methyl modified nucleotide with phosphorothioate linkage
  modified_base 2: mod_base = OTHER; note = 2'-O-methyl modified nucleotide with phosphorothioate linkage
  modified_base 3: mod_base = OTHER; note = 2'-O-methyl modified nucleotide with phosphorothioate linkage
  modified_base 4: mod_base = OTHER; note = 2'-O-methyl modified nucleotide
  modified_base 5: mod_base = OTHER; note = 2'-O-methyl modified nucleotide
  modified_base 8: mod_base = OTHER; note = 2'-O-methyl modified nucleotide
  modified_base 9: mod_base = OTHER; note = 2'-O-methyl modified nucleotide
  modified_base 11: mod_base = OTHER; note = 2'-O-methyl modified nucleotide
  modified_base 13: mod_base = OTHER; note = 2'-O-methyl modified nucleotide
  modified_base 18: mod_base = OTHER; note = 2'-O-methyl modified nucleotide
  modified_base 22: mod_base = OTHER; note = 2'-O-methyl modified nucleotide
  modified_base 25: mod_base = OTHER; note = 2'-O-methyl modified nucleotide
  modified_base 29: mod_base = OTHER; note = 2'-O-methyl modified nucleotide
  modified_base 30: mod_base = OTHER; note = 2'-O-methyl modified nucleotide
  modified_base 31: mod_base = OTHER; note = 2'-O-methyl modified nucleotide
  modified_base 32: mod_base = OTHER; note = 2'-O-methyl modified nucleotide
  modified_base 37: mod_base = OTHER; note = 2'-O-methyl modified nucleotide attached to position 1 of SEQ ID NO: 3081 via a L1 linker
tgagtggcgaaatcaaggacaagggttgtagctccct

SEQ ID NO: 2548 - RNA, 37 nt, synthetic construct
  source 1..37: mol_type = other RNA
  modified_base 1: mod_base = OTHER; note = 2'-O-methyl modified nucleotide with phosphorothioate linkage
  modified_base 2: mod_base = OTHER; note = 2'-O-methyl modified nucleotide with phosphorothioate linkage
  modified_base 3: mod_base = OTHER; note = 2'-O-methyl modified nucleotide with phosphorothioate linkage
  modified_base 4: mod_base = OTHER; note = 2'-O-methyl modified nucleotide
  modified_base 5: mod_base = OTHER; note = 2'-O-methyl modified nucleotide
  modified_base 8: mod_base = OTHER; note = 2'-O-methyl modified nucleotide
  modified_base 9: mod_base = OTHER; note = 2'-O-methyl modified nucleotide
  modified_base 11: mod_base = OTHER; note = 2'-O-methyl modified nucleotide
  modified_base 13: mod_base = OTHER; note = 2'-O-methyl modified nucleotide
  modified_base 18: mod_base = OTHER; note = 2'-O-methyl modified nucleotide
  modified_base 22: mod_base = OTHER; note = 2'-O-methyl modified nucleotide
  modified_base 25: mod_base = OTHER; note = 2'-O-methyl modified nucleotide
  modified_base 29: mod_base = OTHER; note = 2'-O-methyl modified nucleotide
  modified_base 30: mod_base = OTHER; note = 2'-O-methyl modified nucleotide
  modified_base 31: mod_base = OTHER; note = 2'-O-methyl modified nucleotide
  modified_base 32: mod_base = OTHER; note = 2'-O-methyl modified nucleotide
  modified_base 37: mod_base = OTHER; note = 2'-O-methyl modified nucleotide attached to position 1 of SEQ ID NO: 3082 via a L1 linker
gagtggcgaaatcaaggacaaggagttgtagctccct

SEQ ID NO: 2549 - RNA, 37 nt, synthetic construct
  source 1..37: mol_type = other RNA
  modified_base 1: mod_base = OTHER; note = 2'-O-methyl modified nucleotide with phosphorothioate linkage
  modified_base 2: mod_base = OTHER; note = 2'-O-methyl modified nucleotide with phosphorothioate linkage
  modified_base 3: mod_base = OTHER; note = 2'-O-methyl modified nucleotide with phosphorothioate linkage
  modified_base 4: mod_base = OTHER; note = 2'-O-methyl modified nucleotide
  modified_base 5: mod_base = OTHER; note = 2'-O-methyl modified nucleotide
  modified_base 8: mod_base = OTHER; note = 2'-O-methyl modified nucleotide
  modified_base 9: mod_base = OTHER; note = 2'-O-methyl modified nucleotide
  modified_base 11: mod_base = OTHER; note = 2'-O-methyl modified nucleotide
  modified_base 13: mod_base = OTHER; note = 2'-O-methyl modified nucleotide
  modified_base 18: mod_base = OTHER; note = 2'-O-methyl modified nucleotide
  modified_base 22: mod_base = OTHER; note = 2'-O-methyl modified nucleotide
  modified_base 25: mod_base = OTHER; note = 2'-O-methyl modified nucleotide
  modified_base 29: mod_base = OTHER; note = 2'-O-methyl modified nucleotide
  modified_base 30: mod_base = OTHER; note = 2'-O-methyl modified nucleotide
  modified_base 31: mod_base = OTHER; note = 2'-O-methyl modified nucleotide
  modified_base 32: mod_base = OTHER; note = 2'-O-methyl modified nucleotide
  modified_base 37: mod_base = OTHER; note = 2'-O-methyl modified nucleotide attached to position 1 of SEQ ID NO: 3083 via a L1 linker
aaatcaaggacaaggagctcccgcgttgtagctccct

SEQ ID NO: 2550 - RNA, 37 nt, synthetic construct
  source 1..37: mol_type = other RNA
  modified_base 1: mod_base = OTHER; note = 2'-O-methyl modified nucleotide with phosphorothioate linkage
  modified_base 2: mod_base = OTHER; note = 2'-O-methyl modified nucleotide with phosphorothioate linkage
  modified_base 3: mod_base = OTHER; note = 2'-O-methyl modified nucleotide with phosphorothioate linkage
  modified_base 4: mod_base = OTHER; note = 2'-O-methyl modified nucleotide
  modified_base 5: mod_base = OTHER; note = 2'-O-methyl modified nucleotide
  modified_base 8: mod_base = OTHER; note = 2'-O-methyl modified nucleotide
  modified_base 9: mod_base = OTHER; note = 2'-O-methyl modified nucleotide
  modified_base 11: mod_base = OTHER; note = 2'-O-methyl modified nucleotide
  modified_base 13: mod_base = OTHER; note = 2'-O-methyl modified nucleotide
  modified_base 18: mod_base = OTHER; note = 2'-O-methyl modified nucleotide
  modified_base 22: mod_base = OTHER; note = 2'-O-methyl modified nucleotide
  modified_base 25: mod_base = OTHER; note = 2'-O-methyl modified nucleotide
  modified_base 29: mod_base = OTHER; note = 2'-O-methyl modified nucleotide
  modified_base 30: mod_base = OTHER; note = 2'-O-methyl modified nucleotide
  modified_base 31: mod_base = OTHER; note = 2'-O-methyl modified nucleotide
  modified_base 32: mod_base = OTHER; note = 2'-O-methyl modified nucleotide
  modified_base 37: mod_base = OTHER; note = 2'-O-methyl modified nucleotide attached to position 1 of SEQ ID NO: 3084 via a L1 linker
aaggagctcccgcagtacctagcagttgtagctccct

SEQ ID NO: 2551 - RNA, 37 nt, synthetic construct
  source 1..37: mol_type = other RNA
  modified_base 1: mod_base = OTHER; note = 2'-O-methyl modified nucleotide with phosphorothioate linkage
  modified_base 2: mod_base = OTHER; note = 2'-O-methyl modified nucleotide with phosphorothioate linkage
  modified_base 3: mod_base = OTHER; note = 2'-O-methyl modified nucleotide with phosphorothioate linkage
  modified_base 4: mod_base = OTHER; note = 2'-O-methyl modified nucleotide
  modified_base 5: mod_base = OTHER; note = 2'-O-methyl modified nucleotide
  modified_base 8: mod_base = OTHER; note = 2'-O-methyl modified nucleotide
  modified_base 9: mod_base = OTHER; note = 2'-O-methyl modified nucleotide
  modified_base 11: mod_base = OTHER; note = 2'-O-methyl modified nucleotide
  modified_base 13: mod_base = OTHER; note = 2'-O-methyl modified nucleotide
  modified_base 18: mod_base = OTHER; note = 2'-O-methyl modified nucleotide
  modified_base 22: mod_base = OTHER; note = 2'-O-methyl modified nucleotide
  modified_base 25: mod_base = OTHER; note = 2'-O-methyl modified nucleotide
  modified_base 29: mod_base = OTHER; note = 2'-O-methyl modified nucleotide
  modified_base 30: mod_base = OTHER; note = 2'-O-methyl modified nucleotide
  modified_base 31: mod_base = OTHER; note = 2'-O-methyl modified nucleotide
  modified_base 32: mod_base = OTHER; note = 2'-O-methyl modified nucleotide
  modified_base 37: mod_base = OTHER; note = 2'-O-methyl modified nucleotide attached to position 1 of SEQ ID NO: 3085 via a L1 linker
aggagctcccgcagtacctagcatgttgtagctccct

SEQ ID NO: 2552 - RNA, 37 nt, synthetic construct
  source 1..37: mol_type = other RNA
  modified_base 1: mod_base = OTHER; note = 2'-O-methyl modified nucleotide with phosphorothioate linkage
  modified_base 2: mod_base = OTHER; note = 2'-O-methyl modified nucleotide with phosphorothioate linkage
  modified_base 3: mod_base = OTHER; note = 2'-O-methyl modified nucleotide with phosphorothioate linkage
  modified_base 4: mod_base = OTHER; note = 2'-O-methyl modified nucleotide
  modified_base 5: mod_base = OTHER; note = 2'-O-methyl modified nucleotide
  modified_base 8: mod_base = OTHER; note = 2'-O-methyl modified nucleotide
  modified_base 9: mod_base = OTHER; note = 2'-O-methyl modified nucleotide
  modified_base 11: mod_base = OTHER; note = 2'-O-methyl modified nucleotide
  modified_base 13: mod_base = OTHER; note = 2'-O-methyl modified nucleotide
  modified_base 18: mod_base = OTHER; note = 2'-O-methyl modified nucleotide
  modified_base 22: mod_base = OTHER; note = 2'-O-methyl modified nucleotide
  modified_base 25: mod_base = OTHER; note = 2'-O-methyl modified nucleotide
  modified_base 29: mod_base = OTHER; note = 2'-O-methyl modified nucleotide
  modified_base 30: mod_base = OTHER; note = 2'-O-methyl modified nucleotide
  modified_base 31: mod_base = OTHER; note = 2'-O-methyl modified nucleotide
  modified_base 32: mod_base = OTHER; note = 2'-O-methyl modified nucleotide
  modified_base 37: mod_base = OTHER; note = 2'-O-methyl modified nucleotide attached to position 1 of SEQ ID NO: 3086 via a L1 linker
ggagctcccgcagtacctagcattgttgtagctccct

SEQ ID NO: 2553 - RNA, 37 nt, synthetic construct
  source 1..37: mol_type = other RNA
  modified_base 1: mod_base = OTHER; note = 2'-O-methyl modified nucleotide with phosphorothioate linkage
  modified_base 2: mod_base = OTHER; note = 2'-O-methyl modified nucleotide with phosphorothioate linkage
  modified_base 3: mod_base = OTHER; note = 2'-O-methyl modified nucleotide with phosphorothioate linkage
  modified_base 4: mod_base = OTHER; note = 2'-O-methyl modified nucleotide
  modified_base 5: mod_base = OTHER; note = 2'-O-methyl modified nucleotide
  modified_base 8: mod_base = OTHER; note = 2'-O-methyl modified nucleotide
  modified_base 9: mod_base = OTHER; note = 2'-O-methyl modified nucleotide
  modified_base 11: mod_base = OTHER; note = 2'-O-methyl modified nucleotide
  modified_base 13: mod_base = OTHER; note = 2'-O-methyl modified nucleotide
  modified_base 18: mod_base = OTHER; note = 2'-O-methyl modified nucleotide
  modified_base 22: mod_base = OTHER; note = 2'-O-methyl modified nucleotide
  modified_base 25: mod_base = OTHER; note = 2'-O-methyl modified nucleotide
  modified_base 29: mod_base = OTHER; note = 2'-O-methyl modified nucleotide
  modified_base 30: mod_base = OTHER; note = 2'-O-methyl modified nucleotide
  modified_base 31: mod_base = OTHER; note = 2'-O-methyl modified nucleotide
  modified_base 32: mod_base = OTHER; note = 2'-O-methyl modified nucleotide
  modified_base 37: mod_base = OTHER; note = 2'-O-methyl modified nucleotide attached to position 1 of SEQ ID NO: 3087 via a L1 linker
gccctatgacaactggctggaggggttgtagctccct

SEQ ID NO: 2554 - RNA, 37 nt, synthetic construct
  source 1..37: mol_type = other RNA
  modified_base 1: mod_base = OTHER; note = 2'-O-methyl modified nucleotide with phosphorothioate linkage
  modified_base 2: mod_base = OTHER; note = 2'-O-methyl modified nucleotide with phosphorothioate linkage
  modified_base 3: mod_base = OTHER; note = 2'-O-methyl modified nucleotide with phosphorothioate linkage
  modified_base 4: mod_base = OTHER; note = 2'-O-methyl modified nucleotide
  modified_base 5: mod_base = OTHER; note = 2'-O-methyl modified nucleotide
  modified_base 8: mod_base = OTHER; note = 2'-O-methyl modified nucleotide
  modified_base 9: mod_base = OTHER; note = 2'-O-methyl modified nucleotide
  modified_base 11: mod_base = OTHER; note = 2'-O-methyl modified nucleotide
  modified_base 13: mod_base = OTHER; note = 2'-O-methyl modified nucleotide
  modified_base 18: mod_base = OTHER; note = 2'-O-methyl modified nucleotide
  modified_base 22: mod_base = OTHER; note = 2'-O-methyl modified nucleotide
  modified_base 25: mod_base = OTHER; note = 2'-O-methyl modified nucleotide
  modified_base 29: mod_base = OTHER; note = 2'-O-methyl modified nucleotide
  modified_base 30: mod_base = OTHER; note = 2'-O-methyl modified nucleotide
  modified_base 31: mod_base = OTHER; note = 2'-O-methyl modified nucleotide
  modified_base 32: mod_base = OTHER; note = 2'-O-methyl modified nucleotide
  modified_base 37: mod_base = OTHER; note = 2'-O-methyl modified nucleotide attached to position 1 of SEQ ID NO: 3088 via a L1 linker
tgccacgctttctggctgggctgagttgtagctccct

SEQ ID NO: 2555 - RNA, 37 nt, synthetic construct
  source 1..37: mol_type = other RNA
  modified_base 1: mod_base = OTHER; note = 2'-O-methyl modified nucleotide with phosphorothioate linkage
  modified_base 2: mod_base = OTHER; note = 2'-O-methyl modified nucleotide with phosphorothioate linkage
  modified_base 3: mod_base = OTHER; note = 2'-O-methyl modified nucleotide with phosphorothioate linkage
  modified_base 4: mod_base = OTHER; note = 2'-O-methyl modified nucleotide
  modified_base 5: mod_base = OTHER; note = 2'-O-methyl modified nucleotide
  modified_base 8: mod_base = OTHER; note = 2'-O-methyl modified nucleotide
  modified_base 9: mod_base = OTHER; note = 2'-O-methyl modified nucleotide
  modified_base 11: mod_base = OTHER; note = 2'-O-methyl modified nucleotide
  modified_base 13: mod_base = OTHER; note = 2'-O-methyl modified nucleotide
  modified_base 18: mod_base = OTHER; note = 2'-O-methyl modified nucleotide
  modified_base 22: mod_base = OTHER; note = 2'-O-methyl modified nucleotide
  modified_base 25: mod_base = OTHER; note = 2'-O-methyl modified nucleotide
  modified_base 29: mod_base = OTHER; note = 2'-O-methyl modified nucleotide
  modified_base 30: mod_base = OTHER; note = 2'-O-methyl modified nucleotide
  modified_base 31: mod_base = OTHER; note = 2'-O-methyl modified nucleotide
  modified_base 32: mod_base = OTHER; note = 2'-O-methyl modified nucleotide
  modified_base 37: mod_base = OTHER; note = 2'-O-methyl modified nucleotide attached to position 1 of SEQ ID NO: 3089 via a L1 linker
acgctttctggctgggctgatcttgttgtagctccct

SEQ ID NO: 2556 - RNA, 37 nt, synthetic construct
  source 1..37: mol_type = other RNA
  modified_base 1: mod_base = OTHER; note = 2'-O-methyl modified nucleotide with phosphorothioate linkage
  modified_base 2: mod_base = OTHER; note = 2'-O-methyl modified nucleotide with phosphorothioate linkage
  modified_base 3: mod_base = OTHER; note = 2'-O-methyl modified nucleotide with phosphorothioate linkage
  modified_base 4: mod_base = OTHER; note = 2'-O-methyl modified nucleotide
  modified_base 5: mod_base = OTHER; note = 2'-O-methyl modified nucleotide
  modified_base 8: mod_base = OTHER; note = 2'-O-methyl modified nucleotide
  modified_base 9: mod_base = OTHER; note = 2'-O-methyl modified nucleotide
  modified_base 11: mod_base = OTHER; note = 2'-O-methyl modified nucleotide
  modified_base 13: mod_base = OTHER; note = 2'-O-methyl modified nucleotide
  modified_base 18: mod_base = OTHER; note = 2'-O-methyl modified nucleotide
  modified_base 22: mod_base = OTHER; note = 2'-O-methyl modified nucleotide
  modified_base 25: mod_base = OTHER; note = 2'-O-methyl modified nucleotide
  modified_base 29: mod_base = OTHER; note = 2'-O-methyl modified nucleotide
  modified_base 30: mod_base = OTHER; note = 2'-O-methyl modified nucleotide
  modified_base 31: mod_base = OTHER; note = 2'-O-methyl modified nucleotide
  modified_base 32: mod_base = OTHER; note = 2'-O-methyl modified nucleotide
  modified_base 37: mod_base = OTHER; note = 2'-O-methyl modified nucleotide attached to position 1 of SEQ ID NO: 3090 via a L1 linker
ctttctggctgggctgatcttccagttgtagctccct

SEQ ID NO: 2557 - RNA, 37 nt, synthetic construct
  source 1..37: mol_type = other RNA
  modified_base 1: mod_base = OTHER; note = 2'-O-methyl modified nucleotide with phosphorothioate linkage
  modified_base 2: mod_base = OTHER; note = 2'-O-methyl modified nucleotide with phosphorothioate linkage
  modified_base 3: mod_base = OTHER; note = 2'-O-methyl modified nucleotide with phosphorothioate linkage
  modified_base 4: mod_base = OTHER; note = 2'-O-methyl modified nucleotide
  modified_base 5: mod_base = OTHER; note = 2'-O-methyl modified nucleotide
  modified_base 8: mod_base = OTHER; note = 2'-O-methyl modified nucleotide
  modified_base 9: mod_base = OTHER; note = 2'-O-methyl modified nucleotide
  modified_base 11: mod_base = OTHER; note = 2'-O-methyl modified nucleotide
  modified_base 13: mod_base = OTHER; note = 2'-O-methyl modified nucleotide
  modified_base 18: mod_base = OTHER; note = 2'-O-methyl modified nucleotide
  modified_base 22: mod_base = OTHER; note = 2'-O-methyl modified nucleotide
  modified_base 25: mod_base = OTHER; note = 2'-O-methyl modified nucleotide
  modified_base 29: mod_base = OTHER; note = 2'-O-methyl modified nucleotide
  modified_base 30: mod_base = OTHER; note = 2'-O-methyl modified nucleotide
  modified_base 31: mod_base = OTHER; note = 2'-O-methyl modified nucleotide
  modified_base 32: mod_base = OTHER; note = 2'-O-methyl modified nucleotide
  modified_base 37: mod_base = OTHER; note = 2'-O-methyl modified nucleotide attached to position 1 of SEQ ID NO: 3091 via a L1 linker
ctggctgggctgatcttccagcctgttgtagctccct

SEQ ID NO: 2558 - RNA, 37 nt, synthetic construct
  source 1..37: mol_type = other RNA
  modified_base 1: mod_base = OTHER; note = 2'-O-methyl modified nucleotide with phosphorothioate linkage
  modified_base 2: mod_base = OTHER; note = 2'-O-methyl modified nucleotide with phosphorothioate linkage
  modified_base 3: mod_base = OTHER; note = 2'-O-methyl modified nucleotide with phosphorothioate linkage
  modified_base 4: mod_base = OTHER; note = 2'-O-methyl modified nucleotide
  modified_base 5: mod_base = OTHER; note = 2'-O-methyl modified nucleotide
  modified_base 8: mod_base = OTHER; note = 2'-O-methyl modified nucleotide
  modified_base 9: mod_base = OTHER; note = 2'-O-methyl modified nucleotide
  modified_base 11: mod_base = OTHER; note = 2'-O-methyl modified nucleotide
  modified_base 13: mod_base = OTHER; note = 2'-O-methyl modified nucleotide
  modified_base 18: mod_base = OTHER; note = 2'-O-methyl modified nucleotide
  modified_base 22: mod_base = OTHER; note = 2'-O-methyl modified nucleotide
  modified_base 25: mod_base = OTHER; note = 2'-O-methyl modified nucleotide
  modified_base 29: mod_base = OTHER; note = 2'-O-methyl modified nucleotide
  modified_base 30: mod_base = OTHER; note = 2'-O-methyl modified nucleotide
  modified_base 31: mod_base = OTHER; note = 2'-O-methyl modified nucleotide
  modified_base 32: mod_base = OTHER; note = 2'-O-methyl modified nucleotide
  modified_base 37: mod_base = OTHER; note = 2'-O-methyl modified nucleotide attached to position 1 of SEQ ID NO: 3092 via a L1 linker
tggctgggctgatcttccagcctcgttgtagctccct

SEQ ID NO: 2559 - RNA, 37 nt, synthetic construct
  source 1..37: mol_type = other RNA
  modified_base 1: mod_base = OTHER; note = 2'-O-methyl modified nucleotide with phosphorothioate linkage
  modified_base 2: mod_base = OTHER; note = 2'-O-methyl modified nucleotide with phosphorothioate linkage
  modified_base 3: mod_base = OTHER; note = 2'-O-methyl modified nucleotide with phosphorothioate linkage
  modified_base 4: mod_base = OTHER; note = 2'-O-methyl modified nucleotide
  modified_base 5: mod_base = OTHER; note = 2'-O-methyl modified nucleotide
  modified_base 8: mod_base = OTHER; note = 2'-O-methyl modified nucleotide
  modified_base 9: mod_base = OTHER; note = 2'-O-methyl modified nucleotide
  modified_base 11: mod_base = OTHER; note = 2'-O-methyl modified nucleotide
  modified_base 13: mod_base = OTHER; note = 2'-O-methyl modified nucleotide
  modified_base 18: mod_base = OTHER; note = 2'-O-methyl modified nucleotide
  modified_base 22: mod_base = OTHER; note = 2'-O-methyl modified nucleotide
  modified_base 25: mod_base = OTHER; note = 2'-O-methyl modified nucleotide
  modified_base 29: mod_base = OTHER; note = 2'-O-methyl modified nucleotide
  modified_base 30: mod_base = OTHER; note = 2'-O-methyl modified nucleotide
  modified_base 31: mod_base = OTHER; note = 2'-O-methyl modified nucleotide
  modified_base 32: mod_base = OTHER; note = 2'-O-methyl modified nucleotide
  modified_base 37: mod_base = OTHER; note = 2'-O-methyl modified nucleotide attached to position 1 of SEQ ID NO: 3093 via a L1 linker
ggagccctactcgggccatcggcggttgtagctccct

SEQ ID NO: 2560 - RNA, 37 nt, synthetic construct
  source 1..37: mol_type = other RNA
  modified_base 1: mod_base = OTHER; note = 2'-O-methyl modified nucleotide with phosphorothioate linkage
  modified_base 2: mod_base = OTHER; note = 2'-O-methyl modified nucleotide with phosphorothioate linkage
  modified_base 3: mod_base = OTHER; note = 2'-O-methyl modified nucleotide with phosphorothioate linkage
  modified_base 4: mod_base = OTHER; note = 2'-O-methyl modified nucleotide
  modified_base 5: mod_base = OTHER; note = 2'-O-methyl modified nucleotide
  modified_base 8: mod_base = OTHER; note = 2'-O-methyl modified nucleotide
  modified_base 9: mod_base = OTHER; note = 2'-O-methyl modified nucleotide
  modified_base 11: mod_base = OTHER; note = 2'-O-methyl modified nucleotide
  modified_base 13: mod_base = OTHER; note = 2'-O-methyl modified nucleotide
  modified_base 18: mod_base = OTHER; note = 2'-O-methyl modified nucleotide
  modified_base 22: mod_base = OTHER; note = 2'-O-methyl modified nucleotide
  modified_base 25: mod_base = OTHER; note = 2'-O-methyl modified nucleotide
  modified_base 29: mod_base = OTHER; note = 2'-O-methyl modified nucleotide
  modified_base 30: mod_base = OTHER; note = 2'-O-methyl modified nucleotide
  modified_base 31: mod_base = OTHER; note = 2'-O-methyl modified nucleotide
  modified_base 32: mod_base = OTHER; note = 2'-O-methyl modified nucleotide
  modified_base 37: mod_base = OTHER; note = 2'-O-methyl modified nucleotide attached to position 1 of SEQ ID NO: 3094 via a L1 linker
acaggaagcagaaggtgcttgcgagttgtagctccct

SEQ ID NO: 2561 - RNA, 37 nt, synthetic construct
  source 1..37: mol_type = other RNA
  modified_base 1: mod_base = OTHER; note = 2'-O-methyl modified nucleotide with phosphorothioate linkage
  modified_base 2: mod_base = OTHER; note = 2'-O-methyl modified nucleotide with phosphorothioate linkage
  modified_base 3: mod_base = OTHER; note = 2'-O-methyl modified nucleotide with phosphorothioate linkage
  modified_base 4: mod_base = OTHER; note = 2'-O-methyl modified nucleotide
  modified_base 5: mod_base = OTHER; note = 2'-O-methyl modified nucleotide
  modified_base 8: mod_base = OTHER; note = 2'-O-methyl modified nucleotide
  modified_base 9: mod_base = OTHER; note = 2'-O-methyl modified nucleotide
  modified_base 11: mod_base = OTHER; note = 2'-O-methyl modified nucleotide
  modified_base 13: mod_base = OTHER; note = 2'-O-methyl modified nucleotide
  modified_base 18: mod_base = OTHER; note = 2'-O-methyl modified nucleotide
  modified_base 22: mod_base = OTHER; note = 2'-O-methyl modified nucleotide
  modified_base 25: mod_base = OTHER; note = 2'-O-methyl modified nucleotide
  modified_base 29: mod_base = OTHER; note = 2'-O-methyl modified nucleotide
  modified_base 30: mod_base = OTHER; note = 2'-O-methyl modified nucleotide
  modified_base 31: mod_base = OTHER; note = 2'-O-methyl modified nucleotide
  modified_base 32: mod_base = OTHER; note = 2'-O-methyl modified nucleotide
  modified_base 37: mod_base = OTHER; note = 2'-O-methyl modified nucleotide attached to position 1 of SEQ ID NO: 3095 via a L1 linker
gcttgcgaggtacctgaagcggctgttgtagctccct

SEQ ID NO: 2562 - RNA, 37 nt, synthetic construct
  source 1..37: mol_type = other RNA
  modified_base 1: mod_base = OTHER; note = 2'-O-methyl modified nucleotide with phosphorothioate linkage
  modified_base 2: mod_base = OTHER; note = 2'-O-methyl modified nucleotide with phosphorothioate linkage
  modified_base 3: mod_base = OTHER; note = 2'-O-methyl modified nucleotide with phosphorothioate linkage
  modified_base 4: mod_base = OTHER; note = 2'-O-methyl modified nucleotide
  modified_base 5: mod_base = OTHER; note = 2'-O-methyl modified nucleotide
  modified_base 8: mod_base = OTHER; note = 2'-O-methyl modified nucleotide
  modified_base 9: mod_base = OTHER; note = 2'-O-methyl modified nucleotide
  modified_base 11: mod_base = OTHER; note = 2'-O-methyl modified nucleotide
  modified_base 13: mod_base = OTHER; note = 2'-O-methyl modified nucleotide
  modified_base 18: mod_base = OTHER; note = 2'-O-methyl modified nucleotide
  modified_base 22: mod_base = OTHER; note = 2'-O-methyl modified nucleotide
  modified_base 25: mod_base = OTHER; note = 2'-O-methyl modified nucleotide
  modified_base 29: mod_base = OTHER; note = 2'-O-methyl modified nucleotide
  modified_base 30: mod_base = OTHER; note = 2'-O-methyl modified nucleotide
  modified_base 31: mod_base = OTHER; note = 2'-O-methyl modified nucleotide
  modified_base 32: mod_base = OTHER; note = 2'-O-methyl modified nucleotide
  modified_base 37: mod_base = OTHER; note = 2'-O-methyl modified nucleotide attached to position 1 of SEQ ID NO: 3096 via a L1 linker
gaatttggcagcacgtggtacagggttgtagctccct

SEQ ID NO: 2563 - RNA, 37 nt, synthetic construct
  source 1..37: mol_type = other RNA
  modified_base 1: mod_base = OTHER; note = 2'-O-methyl modified nucleotide with phosphorothioate linkage
  modified_base 2: mod_base = OTHER; note = 2'-O-methyl modified nucleotide with phosphorothioate linkage
  modified_base 3: mod_base = OTHER; note = 2'-O-methyl modified nucleotide with phosphorothioate linkage
  modified_base 4: mod_base = OTHER; note = 2'-O-methyl modified nucleotide
  modified_base 5: mod_base = OTHER; note = 2'-O-methyl modified nucleotide
  modified_base 8: mod_base = OTHER; note = 2'-O-methyl modified nucleotide
  modified_base 9: mod_base = OTHER; note = 2'-O-methyl modified nucleotide
  modified_base 11: mod_base = OTHER; note = 2'-O-methyl modified nucleotide
  modified_base 13: mod_base = OTHER; note = 2'-O-methyl modified nucleotide
  modified_base 18: mod_base = OTHER; note = 2'-O-methyl modified nucleotide
  modified_base 22: mod_base = OTHER; note = 2'-O-methyl modified nucleotide
  modified_base 25: mod_base = OTHER; note = 2'-O-methyl modified nucleotide
  modified_base 29: mod_base = OTHER; note = 2'-O-methyl modified nucleotide
  modified_base 30: mod_base = OTHER; note = 2'-O-methyl modified nucleotide
  modified_base 31: mod_base = OTHER; note = 2'-O-methyl modified nucleotide
  modified_base 32: mod_base = OTHER; note = 2'-O-methyl modified nucleotide
  modified_base 37: mod_base = OTHER; note = 2'-O-methyl modified nucleotide attached to position 1 of SEQ ID NO: 3097 via a L1 linker
aatttggcagcacgtggtacaggagttgtagctccct

SEQ ID NO: 2564 - RNA, 37 nt, synthetic construct
  source 1..37: mol_type = other RNA
  modified_base 1: mod_base = OTHER; note = 2'-O-methyl modified nucleotide with phosphorothioate linkage
  modified_base 2: mod_base = OTHER; note = 2'-O-methyl modified nucleotide with phosphorothioate linkage
  modified_base 3: mod_base = OTHER; note = 2'-O-methyl modified nucleotide with phosphorothioate linkage
  modified_base 4: mod_base = OTHER; note = 2'-O-methyl modified nucleotide
  modified_base 5: mod_base = OTHER; note = 2'-O-methyl modified nucleotide
  modified_base 8: mod_base = OTHER; note = 2'-O-methyl modified nucleotide
  modified_base 9: mod_base = OTHER; note = 2'-O-methyl modified nucleotide
  modified_base 11: mod_base = OTHER; note = 2'-O-methyl modified nucleotide
  modified_base 13: mod_base = OTHER; note = 2'-O-methyl modified nucleotide
  modified_base 18: mod_base = OTHER; note = 2'-O-methyl modified nucleotide
  modified_base 22: mod_base = OTHER; note = 2'-O-methyl modified nucleotide
  modified_base 25: mod_base = OTHER; note = 2'-O-methyl modified nucleotide
  modified_base 29: mod_base = OTHER; note = 2'-O-methyl modified nucleotide
  modified_base 30: mod_base = OTHER; note = 2'-O-methyl modified nucleotide
  modified_base 31: mod_base = OTHER; note = 2'-O-methyl modified nucleotide
  modified_base 32: mod_base = OTHER; note = 2'-O-methyl modified nucleotide
  modified_base 37: mod_base = OTHER; note = 2'-O-methyl modified nucleotide attached to position 1 of SEQ ID NO: 3098 via a L1 linker
atttggcagcacgtggtacaggaggttgtagctccct

SEQ ID NO: 2565 - RNA, 37 nt, synthetic construct
  source 1..37: mol_type = other RNA
  modified_base 1: mod_base = OTHER; note = 2'-O-methyl modified nucleotide with phosphorothioate linkage
  modified_base 2: mod_base = OTHER; note = 2'-O-methyl modified nucleotide with phosphorothioate linkage
  modified_base 3: mod_base = OTHER; note = 2'-O-methyl modified nucleotide with phosphorothioate linkage
  modified_base 4: mod_base = OTHER; note = 2'-O-methyl modified nucleotide
  modified_base 5: mod_base = OTHER; note = 2'-O-methyl modified nucleotide
  modified_base 8: mod_base = OTHER; note = 2'-O-methyl modified nucleotide
  modified_base 9: mod_base = OTHER; note = 2'-O-methyl modified nucleotide
  modified_base 11: mod_base = OTHER; note = 2'-O-methyl modified nucleotide
  modified_base 13: mod_base = OTHER; note = 2'-O-methyl modified nucleotide
  modified_base 18: mod_base = OTHER; note = 2'-O-methyl modified nucleotide
  modified_base 22: mod_base = OTHER; note = 2'-O-methyl modified nucleotide
  modified_base 25: mod_base = OTHER; note = 2'-O-methyl modified nucleotide
  modified_base 29: mod_base = OTHER; note = 2'-O-methyl modified nucleotide
  modified_base 30: mod_base = OTHER; note = 2'-O-methyl modified nucleotide
  modified_base 31: mod_base = OTHER; note = 2'-O-methyl modified nucleotide
  modified_base 32: mod_base = OTHER; note = 2'-O-methyl modified nucleotide
  modified_base 37: mod_base = OTHER; note = 2'-O-methyl modified nucleotide attached to position 1 of SEQ ID NO: 3099 via a L1 linker
ccggccgcctctcttttctgggcagttgtagctccct

SEQ ID NO: 2566 - RNA, 37 nt, synthetic construct
  source 1..37: mol_type = other RNA
  modified_base 1: mod_base = OTHER; note = 2'-O-methyl modified nucleotide with phosphorothioate linkage
  modified_base 2: mod_base = OTHER; note = 2'-O-methyl modified nucleotide with phosphorothioate linkage
  modified_base 3: mod_base = OTHER; note = 2'-O-methyl modified nucleotide with phosphorothioate linkage
  modified_base 4: mod_base = OTHER; note = 2'-O-methyl modified nucleotide
  modified_base 5: mod_base = OTHER; note = 2'-O-methyl modified nucleotide
  modified_base 8: mod_base = OTHER; note = 2'-O-methyl modified nucleotide
  modified_base 9: mod_base = OTHER; note = 2'-O-methyl modified nucleotide
  modified_base 11: mod_base = OTHER; note = 2'-O-methyl modified nucleotide
  modified_base 13: mod_base = OTHER; note = 2'-O-methyl modified nucleotide
  modified_base 18: mod_base = OTHER; note = 2'-O-methyl modified nucleotide
  modified_base 22: mod_base = OTHER; note = 2'-O-methyl modified nucleotide
  modified_base 25: mod_base = OTHER; note = 2'-O-methyl modified nucleotide
  modified_base 29: mod_base = OTHER; note = 2'-O-methyl modified nucleotide
  modified_base 30: mod_base = OTHER; note = 2'-O-methyl modified nucleotide
  modified_base 31: mod_base = OTHER; note = 2'-O-methyl modified nucleotide
  modified_base 32: mod_base = OTHER; note = 2'-O-methyl modified nucleotide
  modified_base 37: mod_base = OTHER; note = 2'-O-methyl modified nucleotide attached to position 1 of SEQ ID NO: 3100 via a L1 linker
cctctcttttctgggcacccgcctgttgtagctccct

SEQ ID NO: 2567 - RNA, 37 nt, synthetic construct
  source 1..37: mol_type = other RNA
  modified_base 1: mod_base = OTHER; note = 2'-O-methyl modified nucleotide with phosphorothioate linkage
  modified_base 2: mod_base = OTHER; note = 2'-O-methyl modified nucleotide with phosphorothioate linkage
  modified_base 3: mod_base = OTHER; note = 2'-O-methyl modified nucleotide with phosphorothioate linkage
  modified_base 4: mod_base = OTHER; note = 2'-O-methyl modified nucleotide
  modified_base 5: mod_base = OTHER; note = 2'-O-methyl modified nucleotide
  modified_base 8: mod_base = OTHER; note = 2'-O-methyl modified nucleotide
  modified_base 9: mod_base = OTHER; note = 2'-O-methyl modified nucleotide
  modified_base 11: mod_base = OTHER; note = 2'-O-methyl modified nucleotide
  modified_base 13: mod_base = OTHER; note = 2'-O-methyl modified nucleotide
  modified_base 18: mod_base = OTHER; note = 2'-O-methyl modified nucleotide
  modified_base 22: mod_base = OTHER; note = 2'-O-methyl modified nucleotide
  modified_base 25: mod_base = OTHER; note = 2'-O-methyl modified nucleotide
  modified_base 29: mod_base = OTHER; note = 2'-O-methyl modified nucleotide
  modified_base 30: mod_base = OTHER; note = 2'-O-methyl modified nucleotide
  modified_base 31: mod_base = OTHER; note = 2'-O-methyl modified nucleotide
  modified_base 32: mod_base = OTHER; note = 2'-O-methyl modified nucleotide
  modified_base 37: mod_base = OTHER; note = 2'-O-methyl modified nucleotide attached to position 1 of SEQ ID NO: 3101 via a L1 linker
cctcctgatgcacatgtactgggcgttgtagctccct

SEQ ID NO: 2568 - RNA, 37 nt, synthetic construct
  source 1..37: mol_type = other RNA
  modified_base 1: mod_base = OTHER; note = 2'-O-methyl modified nucleotide with phosphorothioate linkage
  modified_base 2: mod_base = OTHER; note = 2'-O-methyl modified nucleotide with phosphorothioate linkage
  modified_base 3: mod_base = OTHER; note = 2'-O-methyl modified nucleotide with phosphorothioate linkage
  modified_base 4: mod_base = OTHER; note = 2'-O-methyl modified nucleotide
  modified_base 5: mod_base = OTHER; note = 2'-O-methyl modified nucleotide
  modified_base 8: mod_base = OTHER; note = 2'-O-methyl modified nucleotide
  modified_base 9: mod_base = OTHER; note = 2'-O-methyl modified nucleotide
  modified_base 11: mod_base = OTHER; note = 2'-O-methyl modified nucleotide
  modified_base 13: mod_base = OTHER; note = 2'-O-methyl modified nucleotide
  modified_base 18: mod_base = OTHER; note = 2'-O-methyl modified nucleotide
  modified_base 22: mod_base = OTHER; note = 2'-O-methyl modified nucleotide
  modified_base 25: mod_base = OTHER; note = 2'-O-methyl modified nucleotide
  modified_base 29: mod_base = OTHER; note = 2'-O-methyl modified nucleotide
  modified_base 30: mod_base = OTHER; note = 2'-O-methyl modified nucleotide
  modified_base 31: mod_base = OTHER; note = 2'-O-methyl modified nucleotide
  modified_base 32: mod_base = OTHER; note = 2'-O-methyl modified nucleotide
  modified_base 37: mod_base = OTHER; note = 2'-O-methyl modified nucleotide attached to position 1 of SEQ ID NO: 3102 via a L1 linker
gccttggaggcggcgggccaagacgttgtagctccct

SEQ ID NO: 2569 - RNA, 37 nt, synthetic construct
  source 1..37: mol_type = other RNA
  modified_base 1: mod_base = OTHER; note = 2'-O-methyl modified nucleotide with phosphorothioate linkage
  modified_base 2: mod_base = OTHER; note = 2'-O-methyl modified nucleotide with phosphorothioate linkage
  modified_base 3: mod_base = OTHER; note = 2'-O-methyl modified nucleotide with phosphorothioate linkage
  modified_base 4: mod_base = OTHER; note = 2'-O-methyl modified nucleotide
  modified_base 5: mod_base = OTHER; note = 2'-O-methyl modified nucleotide
  modified_base 8: mod_base = OTHER; note = 2'-O-methyl modified nucleotide
  modified_base 9: mod_base = OTHER; note = 2'-O-methyl modified nucleotide
  modified_base 11: mod_base = OTHER; note = 2'-O-methyl modified nucleotide
  modified_base 13: mod_base = OTHER; note = 2'-O-methyl modified nucleotide
  modified_base 18: mod_base = OTHER; note = 2'-O-methyl modified nucleotide
  modified_base 22: mod_base = OTHER; note = 2'-O-methyl modified nucleotide
  modified_base 25: mod_base = OTHER; note = 2'-O-methyl modified nucleotide
  modified_base 29: mod_base = OTHER; note = 2'-O-methyl modified nucleotide
  modified_base 30: mod_base = OTHER; note = 2'-O-methyl modified nucleotide
  modified_base 31: mod_base = OTHER; note = 2'-O-methyl modified nucleotide
  modified_base 32: mod_base = OTHER; note = 2'-O-methyl modified nucleotide
  modified_base 37: mod_base = OTHER; note = 2'-O-methyl modified nucleotide attached to position 1 of SEQ ID NO: 3103 via a L1 linker
ccttggaggcggcgggccaagactgttgtagctccct

SEQ ID NO: 2570 - RNA, 37 nt, synthetic construct
  source 1..37: mol_type = other RNA
  modified_base 1: mod_base = OTHER; note = 2'-O-methyl modified nucleotide with phosphorothioate linkage
  modified_base 2: mod_base = OTHER; note = 2'-O-methyl modified nucleotide with phosphorothioate linkage
  modified_base 3: mod_base = OTHER; note = 2'-O-methyl modified nucleotide with phosphorothioate linkage
  modified_base 4: mod_base = OTHER; note = 2'-O-methyl modified nucleotide
  modified_base 5: mod_base = OTHER; note = 2'-O-methyl modified nucleotide
  modified_base 8: mod_base = OTHER; note = 2'-O-methyl modified nucleotide
  modified_base 9: mod_base = OTHER; note = 2'-O-methyl modified nucleotide
  modified_base 11: mod_base = OTHER; note = 2'-O-methyl modified nucleotide
  modified_base 13: mod_base = OTHER; note = 2'-O-methyl modified nucleotide
  modified_base 18: mod_base = OTHER; note = 2'-O-methyl modified nucleotide
  modified_base 22: mod_base = OTHER; note = 2'-O-methyl modified nucleotide
  modified_base 25: mod_base = OTHER; note = 2'-O-methyl modified nucleotide
  modified_base 29: mod_base = OTHER; note = 2'-O-methyl modified nucleotide
  modified_base 30: mod_base = OTHER; note = 2'-O-methyl modified nucleotide
  modified_base 31: mod_base = OTHER; note = 2'-O-methyl modified nucleotide
  modified_base 32: mod_base = OTHER; note = 2'-O-methyl modified nucleotide
  modified_base 37: mod_base = OTHER; note = 2'-O-methyl modified nucleotide attached to position 1 of SEQ ID NO: 3104 via a L1 linker
aggcggcgggccaagacttctcccgttgtagctccct

SEQ ID NO: 2571 - RNA, 37 nt, synthetic construct
  source 1..37: mol_type = other RNA
  modified_base 1: mod_base = OTHER; note = 2'-O-methyl modified nucleotide with phosphorothioate linkage
  modified_base 2: mod_base = OTHER; note = 2'-O-methyl modified nucleotide with phosphorothioate linkage
  modified_base 3: mod_base = OTHER; note = 2'-O-methyl modified nucleotide with phosphorothioate linkage
  modified_base 4: mod_base = OTHER; note = 2'-O-methyl modified nucleotide
  modified_base 5: mod_base = OTHER; note = 2'-O-methyl modified nucleotide
  modified_base 8: mod_base = OTHER; note = 2'-O-methyl modified nucleotide
  modified_base 9: mod_base = OTHER; note = 2'-O-methyl modified nucleotide
  modified_base 11: mod_base = OTHER; note = 2'-O-methyl modified nucleotide
  modified_base 13: mod_base = OTHER; note = 2'-O-methyl modified nucleotide
  modified_base 18: mod_base = OTHER; note = 2'-O-methyl modified nucleotide
  modified_base 22: mod_base = OTHER; note = 2'-O-methyl modified nucleotide
  modified_base 25: mod_base = OTHER; note = 2'-O-methyl modified nucleotide
  modified_base 29: mod_base = OTHER; note = 2'-O-methyl modified nucleotide
  modified_base 30: mod_base = OTHER; note = 2'-O-methyl modified nucleotide
  modified_base 31: mod_base = OTHER; note = 2'-O-methyl modified nucleotide
  modified_base 32: mod_base = OTHER; note = 2'-O-methyl modified nucleotide
  modified_base 37: mod_base = OTHER; note = 2'-O-methyl modified nucleotide attached to position 1 of SEQ ID NO: 3105 via a L1 linker
cggcgggccaagacttctccctgggttgtagctccct

SEQ ID NO: 2572 - RNA, 37 nt, synthetic construct
  source 1..37: mol_type = other RNA
  modified_base 1: mod_base = OTHER; note = 2'-O-methyl modified nucleotide with phosphorothioate linkage
  modified_base 2: mod_base = OTHER; note = 2'-O-methyl modified nucleotide with phosphorothioate linkage
  modified_base 3: mod_base = OTHER; note = 2'-O-methyl modified nucleotide with phosphorothioate linkage
  modified_base 4: mod_base = OTHER; note = 2'-O-methyl modified nucleotide
  modified_base 5: mod_base = OTHER; note = 2'-O-methyl modified nucleotide
  modified_base 8: mod_base = OTHER; note = 2'-O-methyl modified nucleotide
  modified_base 9: mod_base = OTHER; note = 2'-O-methyl modified nucleotide
  modified_base 11: mod_base = OTHER; note = 2'-O-methyl modified nucleotide
  modified_base 13: mod_base = OTHER; note = 2'-O-methyl modified nucleotide
  modified_base 18: mod_base = OTHER; note = 2'-O-methyl modified nucleotide
  modified_base 22: mod_base = OTHER; note = 2'-O-methyl modified nucleotide
  modified_base 25: mod_base = OTHER; note = 2'-O-methyl modified nucleotide
  modified_base 29: mod_base = OTHER; note = 2'-O-methyl modified nucleotide
  modified_base 30: mod_base = OTHER; note = 2'-O-methyl modified nucleotide
  modified_base 31: mod_base = OTHER; note = 2'-O-methyl modified nucleotide
  modified_base 32: mod_base = OTHER; note = 2'-O-methyl modified nucleotide
  modified_base 37: mod_base = OTHER; note = 2'-O-methyl modified nucleotide attached to position 1 of SEQ ID NO: 3106 via a L1 linker
ccctggacctccgcagcactggcagttgtagctccct

SEQ ID NO: 2573 - RNA, 37 nt, synthetic construct
  source 1..37: mol_type = other RNA
  modified_base 1: mod_base = OTHER; note = 2'-O-methyl modified nucleotide with phosphorothioate linkage
  modified_base 2: mod_base = OTHER; note = 2'-O-methyl modified nucleotide with phosphorothioate linkage
  modified_base 3: mod_base = OTHER; note = 2'-O-methyl modified nucleotide with phosphorothioate linkage
  modified_base 4: mod_base = OTHER; note = 2'-O-methyl modified nucleotide
  modified_base 5: mod_base = OTHER; note = 2'-O-methyl modified nucleotide
  modified_base 8: mod_base = OTHER; note = 2'-O-methyl modified nucleotide
  modified_base 9: mod_base = OTHER; note = 2'-O-methyl modified nucleotide
  modified_base 11: mod_base = OTHER; note = 2'-O-methyl modified nucleotide
  modified_base 13: mod_base = OTHER; note = 2'-O-methyl modified nucleotide
  modified_base 18: mod_base = OTHER; note = 2'-O-methyl modified nucleotide
  modified_base 22: mod_base = OTHER; note = 2'-O-methyl modified nucleotide
  modified_base 25: mod_base = OTHER; note = 2'-O-methyl modified nucleotide
  modified_base 29: mod_base = OTHER; note = 2'-O-methyl modified nucleotide
  modified_base 30: mod_base = OTHER; note = 2'-O-methyl modified nucleotide
  modified_base 31: mod_base = OTHER; note = 2'-O-methyl modified nucleotide
  modified_base 32: mod_base = OTHER; note = 2'-O-methyl modified nucleotide
  modified_base 37: mod_base = OTHER; note = 2'-O-methyl modified nucleotide attached to position 1 of SEQ ID NO: 3107 via a L1 linker
cctggacctccgcagcactggcatgttgtagctccct

SEQ ID NO: 2574 - RNA, 37 nt, synthetic construct
  source 1..37: mol_type = other RNA
  modified_base 1: mod_base = OTHER; note = 2'-O-methyl modified nucleotide with phosphorothioate linkage
  modified_base 2: mod_base = OTHER; note = 2'-O-methyl modified nucleotide with phosphorothioate linkage
  modified_base 3: mod_base = OTHER; note = 2'-O-methyl modified nucleotide with phosphorothioate linkage
  modified_base 4: mod_base = OTHER; note = 2'-O-methyl modified nucleotide
  modified_base 5: mod_base = OTHER; note = 2'-O-methyl modified nucleotide
  modified_base 8: mod_base = OTHER; note = 2'-O-methyl modified nucleotide
  modified_base 9: mod_base = OTHER; note = 2'-O-methyl modified nucleotide
  modified_base 11: mod_base = OTHER; note = 2'-O-methyl modified nucleotide
  modified_base 13: mod_base = OTHER; note = 2'-O-methyl modified nucleotide
  modified_base 18: mod_base = OTHER; note = 2'-O-methyl modified nucleotide
  modified_base 22: mod_base = OTHER; note = 2'-O-methyl modified nucleotide
  modified_base 25: mod_base = OTHER; note = 2'-O-methyl modified nucleotide
  modified_base 29: mod_base = OTHER; note = 2'-O-methyl modified nucleotide
  modified_base 30: mod_base = OTHER; note = 2'-O-methyl modified nucleotide
  modified_base 31: mod_base = OTHER; note = 2'-O-methyl modified nucleotide
  modified_base 32: mod_base = OTHER; note = 2'-O-methyl modified nucleotide
  modified_base 37: mod_base = OTHER; note = 2'-O-methyl modified nucleotide attached to position 1 of SEQ ID NO: 3108 via a L1 linker
ctggacctccgcagcactggcattgttgtagctccct

SEQ ID NO: 2575 - RNA, 37 nt, synthetic construct
  source 1..37: mol_type = other RNA
  modified_base 1: mod_base = OTHER; note = 2'-O-methyl modified nucleotide with phosphorothioate linkage
  modified_base 2: mod_base = OTHER; note = 2'-O-methyl modified nucleotide with phosphorothioate linkage
  modified_base 3: mod_base = OTHER; note = 2'-O-methyl modified nucleotide with phosphorothioate linkage
  modified_base 4: mod_base = OTHER; note = 2'-O-methyl modified nucleotide
  modified_base 5: mod_base = OTHER; note = 2'-O-methyl modified nucleotide
  modified_base 8: mod_base = OTHER; note = 2'-O-methyl modified nucleotide
  modified_base 9: mod_base = OTHER; note = 2'-O-methyl modified nucleotide
  modified_base 11: mod_base = OTHER; note = 2'-O-methyl modified nucleotide
  modified_base 13: mod_base = OTHER; note = 2'-O-methyl modified nucleotide
  modified_base 18: mod_base = OTHER; note = 2'-O-methyl modified nucleotide
  modified_base 22: mod_base = OTHER; note = 2'-O-methyl modified nucleotide
  modified_base 25: mod_base = OTHER; note = 2'-O-methyl modified nucleotide
  modified_base 29: mod_base = OTHER; note = 2'-O-methyl modified nucleotide
  modified_base 30: mod_base = OTHER; note = 2'-O-methyl modified nucleotide
  modified_base 31: mod_base = OTHER; note = 2'-O-methyl modified nucleotide
  modified_base 32: mod_base = OTHER; note = 2'-O-methyl modified nucleotide
  modified_base 37: mod_base = OTHER; note = 2'-O-methyl modified nucleotide attached to position 1 of SEQ ID NO: 3109 via a L1 linker
gggagcctcgtgggactcagctgtgttgtagctccct

SEQ ID NO: 2576 - RNA, 37 nt, synthetic construct
  source 1..37: mol_type = other RNA
  modified_base 1: mod_base = OTHER; note = 2'-O-methyl modified nucleotide with phosphorothioate linkage
  modified_base 2: mod_base = OTHER; note = 2'-O-methyl modified nucleotide with phosphorothioate linkage
  modified_base 3: mod_base = OTHER; note = 2'-O-methyl modified nucleotide with phosphorothioate linkage
  modified_base 4: mod_base = OTHER; note = 2'-O-methyl modified nucleotide
  modified_base 5: mod_base = OTHER; note = 2'-O-methyl modified nucleotide
  modified_base 8: mod_base = OTHER; note = 2'-O-methyl modified nucleotide
  modified_base 9: mod_base = OTHER; note = 2'-O-methyl modified nucleotide
  modified_base 11: mod_base = OTHER; note = 2'-O-methyl modified nucleotide
  modified_base 13: mod_base = OTHER; note = 2'-O-methyl modified nucleotide
  modified_base 18: mod_base = OTHER; note = 2'-O-methyl modified nucleotide
  modified_base 22: mod_base = OTHER; note = 2'-O-methyl modified nucleotide
  modified_base 25: mod_base = OTHER; note = 2'-O-methyl modified nucleotide
  modified_base 29: mod_base = OTHER; note = 2'-O-methyl modified nucleotide
  modified_base 30: mod_base = OTHER; note = 2'-O-methyl modified nucleotide
  modified_base 31: mod_base = OTHER; note = 2'-O-methyl modified nucleotide
  modified_base 32: mod_base = OTHER; note = 2'-O-methyl modified nucleotide
  modified_base 37: mod_base = OTHER; note = 2'-O-methyl modified nucleotide attached to position 1 of SEQ ID NO: 3110 via a L1 linker
ggagcctcgtgggactcagctgtggttgtagctccct

SEQ ID NO: 2577-2600 - skipped (24 entries)

SEQ ID NO: 2601 - RNA, 101 nt, synthetic construct; identical to SEQ ID NO: 1101
  source 1..101: mol_type = other RNA
  modified_base 1: mod_base = OTHER; note = 2'-O-methyl modified nucleotide with phosphorothioate linkage
  modified_base 2: mod_base = OTHER; note = 2'-O-methyl modified nucleotide with phosphorothioate linkage
  modified_base 3: mod_base = OTHER; note = 2'-O-methyl modified nucleotide with phosphorothioate linkage
  modified_base 4: mod_base = OTHER; note = 2'-O-methyl modified nucleotide
  modified_base 5: mod_base = OTHER; note = 2'-O-methyl modified nucleotide
  modified_base 8: mod_base = OTHER; note = 2'-O-methyl modified nucleotide
  modified_base 9: mod_base = OTHER; note = 2'-O-methyl modified nucleotide
  modified_base 11: mod_base = OTHER; note = 2'-O-methyl modified nucleotide
  modified_base 13: mod_base = OTHER; note = 2'-O-methyl modified nucleotide
  modified_base 18: mod_base = OTHER; note = 2'-O-methyl modified nucleotide
  modified_base 22: mod_base = OTHER; note = 2'-O-methyl modified nucleotide
  modified_base 25: mod_base = OTHER; note = 2'-O-methyl modified nucleotide
  modified_base 29: mod_base = OTHER; note = 2'-O-methyl modified nucleotide
  modified_base 30: mod_base = OTHER; note = 2'-O-methyl modified nucleotide
  modified_base 31: mod_base = OTHER; note = 2'-O-methyl modified nucleotide
  modified_base 32: mod_base = OTHER; note = 2'-O-methyl modified nucleotide
  modified_base 37: mod_base = OTHER; note = 2'-O-methyl modified nucleotide
  modified_base 38: mod_base = OTHER; note = 2'-O-methyl modified nucleotide
  modified_base 39: mod_base = OTHER; note = 2'-O-methyl modified nucleotide
  modified_base 40: mod_base = OTHER; note = 2'-O-methyl modified nucleotide
  modified_base 41: mod_base = OTHER; note = 2'-O-methyl modified nucleotide
  modified_base 42: mod_base = OTHER; note = 2'-O-methyl modified nucleotide
  modified_base 43: mod_base = OTHER; note = 2'-O-methyl modified nucleotide
  modified_base 47: mod_base = OTHER; note = 2'-O-methyl modified nucleotide
  modified_base 48: mod_base = OTHER; note = 2'-O-methyl modified nucleotide
  modified_base 51: mod_base = OTHER; note = 2'-O-methyl modified nucleotide
  modified_base 54: mod_base = OTHER; note = nucleotide with phosphorothioate linkage
  modified_base 58: mod_base = OTHER; note = 2'-O-methyl modified nucleotide
  modified_base 59: mod_base = OTHER; note = 2'-O-methyl modified nucleotide
  modified_base 61: mod_base = OTHER; note = 2'-O-methyl modified nucleotide
  modified_base 62: mod_base = OTHER; note = 2'-O-methyl modified nucleotide
  modified_base 63: mod_base = OTHER; note = 2'-O-methyl modified nucleotide
  modified_base 64: mod_base = OTHER; note = 2'-O-methyl modified nucleotide
  modified_base 65: mod_base = OTHER; note = 2'-O-methyl modified nucleotide
  modified_base 66: mod_base = OTHER; note = 2'-O-methyl modified nucleotide
  modified_base 67: mod_base = OTHER; note = 2'-O-methyl modified nucleotide
  modified_base 68: mod_base = OTHER; note = 2'-O-methyl modified nucleotide
  modified_base 69: mod_base = OTHER; note = 2'-O-methyl modified nucleotide
  modified_base 70: mod_base = OTHER; note = 2'-O-methyl modified nucleotide
  modified_base 75: mod_base = OTHER; note = 2'-O-methyl modified nucleotide
  modified_base 77: mod_base = OTHER; note = 2'-O-methyl modified nucleotide
  modified_base 80: mod_base = OTHER; note = 2'-O-methyl modified nucleotide
  modified_base 86: mod_base = OTHER; note = 2'-O-methyl modified nucleotide
  modified_base 87: mod_base = OTHER; note = 2'-O-methyl modified nucleotide
  modified_base 89: mod_base = OTHER; note = 2'-O-methyl modified nucleotide
  modified_base 90: mod_base = OTHER; note = 2'-O-methyl modified nucleotide
  modified_base 91: mod_base = OTHER; note = 2'-O-methyl modified nucleotide
  modified_base 92: mod_base = OTHER; note = 2'-O-methyl modified nucleotide
  modified_base 99: mod_base = OTHER; note = nucleotide with phosphorothioate linkage
  modified_base 100: mod_base = OTHER; note = 2'-O-methyl modified nucleotide with phosphorothioate linkage
  modified_base 101: mod_base = OTHER; note = 2'-O-methyl modified nucleotide

SEQ ID NO: 2602 - RNA, 101 nt, synthetic construct; identical to SEQ ID NO: 805
  source 1..101: mol_type = other RNA
  modified_base 1: mod_base = OTHER; note = 2'-O-methyl modified nucleotide with phosphorothioate linkage
  modified_base 2: mod_base = OTHER; note = 2'-O-methyl modified nucleotide with phosphorothioate linkage
  modified_base 3: mod_base = OTHER; note = 2'-O-methyl modified nucleotide with phosphorothioate linkage
  modified_base 4: mod_base = OTHER; note = 2'-O-methyl modified nucleotide
  modified_base 5: mod_base = OTHER; note = 2'-O-methyl modified nucleotide
  modified_base 8: mod_base = OTHER; note = 2'-O-methyl modified nucleotide
  modified_base 9: mod_base = OTHER; note = 2'-O-methyl modified nucleotide
  modified_base 11: mod_base = OTHER; note = 2'-O-methyl modified nucleotide
  modified_base 13: mod_base = OTHER; note = 2'-O-methyl modified nucleotide
  modified_base 18: mod_base = OTHER; note = 2'-O-methyl modified nucleotide
  modified_base 22: mod_base = OTHER; note = 2'-O-methyl modified nucleotide
  modified_base 25: mod_base = OTHER; note = 2'-O-methyl modified nucleotide
  modified_base 29: mod_base = OTHER; note = 2'-O-methyl modified nucleotide
  modified_base 30: mod_base = OTHER; note = 2'-O-methyl modified nucleotide
  modified_base 31: mod_base = OTHER; note = 2'-O-methyl modified nucleotide
  modified_base 32: mod_base = OTHER; note = 2'-O-methyl modified nucleotide
  modified_base 37: mod_base = OTHER; note = 2'-O-methyl modified nucleotide
  modified_base 38: mod_base = OTHER; note = 2'-O-methyl modified nucleotide
  modified_base 39: mod_base = OTHER; note = 2'-O-methyl modified nucleotide
  modified_base 40: mod_base = OTHER; note = 2'-O-methyl modified nucleotide
  modified_base 41: mod_base = OTHER; note = 2'-O-methyl modified nucleotide
  modified_base 42: mod_base = OTHER; note = 2'-O-methyl modified nucleotide
  modified_base 43: mod_base = OTHER; note = 2'-O-methyl modified nucleotide
  modified_base 47: mod_base = OTHER; note = 2'-O-methyl modified nucleotide
  modified_base 48: mod_base = OTHER; note = 2'-O-methyl modified nucleotide
  modified_base 51: mod_base = OTHER; note = 2'-O-methyl modified nucleotide
  modified_base 54: mod_base = OTHER; note = nucleotide with phosphorothioate linkage
  modified_base 58: mod_base = OTHER; note = 2'-O-methyl modified nucleotide
  modified_base 59: mod_base = OTHER; note = 2'-O-methyl modified nucleotide
  modified_base 61: mod_base = OTHER; note = 2'-O-methyl modified nucleotide
  modified_base 62: mod_base = OTHER; note = 2'-O-methyl modified nucleotide
  modified_base 63: mod_base = OTHER; note = 2'-O-methyl modified nucleotide
  modified_base 64: mod_base = OTHER; note = 2'-O-methyl modified nucleotide
  modified_base 65: mod_base = OTHER; note = 2'-O-methyl modified nucleotide
  modified_base 66: mod_base = OTHER; note = 2'-O-methyl modified nucleotide
  modified_base 67: mod_base = OTHER; note = 2'-O-methyl modified nucleotide
  modified_base 68: mod_base = OTHER; note = 2'-O-methyl modified nucleotide
  modified_base 69: mod_base = OTHER; note = 2'-O-methyl modified nucleotide
  modified_base 70: mod_base = OTHER; note = 2'-O-methyl modified nucleotide
  modified_base 75: mod_base = OTHER; note = 2'-O-methyl modified nucleotide
  modified_base 77: mod_base = OTHER; note = 2'-O-methyl modified nucleotide
  modified_base 80: mod_base = OTHER; note = 2'-O-methyl modified nucleotide
  modified_base 86: mod_base = OTHER; note = 2'-O-methyl modified nucleotide
  modified_base 87: mod_base = OTHER; note = 2'-O-methyl modified nucleotide
  modified_base 89: mod_base = OTHER; note = 2'-O-methyl modified nucleotide
  modified_base 90: mod_base = OTHER; note = 2'-O-methyl modified nucleotide
  modified_base 91: mod_base = OTHER; note = 2'-O-methyl modified nucleotide
  modified_base 92: mod_base = OTHER; note = 2'-O-methyl modified nucleotide
  modified_base 99: mod_base = OTHER; note = nucleotide with phosphorothioate linkage
  modified_base 100: mod_base = OTHER; note = 2'-O-methyl modified nucleotide with phosphorothioate linkage
  modified_base 101: mod_base = OTHER; note = 2'-O-methyl modified nucleotide

SEQ ID NO: 2603 - RNA, 101 nt, synthetic construct; identical to SEQ ID NO: 806
  source 1..101: mol_type = other RNA
  modified_base 1: mod_base = OTHER; note = 2'-O-methyl modified nucleotide with phosphorothioate linkage
  modified_base 2: mod_base = OTHER; note = 2'-O-methyl modified nucleotide with phosphorothioate linkage
  modified_base 3: mod_base = OTHER; note = 2'-O-methyl modified nucleotide with phosphorothioate linkage
  modified_base 4: mod_base = OTHER; note = 2'-O-methyl modified nucleotide
  modified_base 5: mod_base = OTHER; note = 2'-O-methyl modified nucleotide
  modified_base 8: mod_base = OTHER; note = 2'-O-methyl modified nucleotide
  modified_base 9: mod_base = OTHER; note = 2'-O-methyl modified nucleotide
  modified_base 11: mod_base = OTHER; note = 2'-O-methyl modified nucleotide
  modified_base 13: mod_base = OTHER; note = 2'-O-methyl modified nucleotide
  modified_base 18: mod_base = OTHER; note = 2'-O-methyl modified nucleotide
  modified_base 22: mod_base = OTHER; note = 2'-O-methyl modified nucleotide
  modified_base 25: mod_base = OTHER; note = 2'-O-methyl modified nucleotide
  modified_base 29: mod_base = OTHER; note = 2'-O-methyl modified nucleotide
  modified_base 30: mod_base = OTHER; note = 2'-O-methyl modified nucleotide
  modified_base 31: mod_base = OTHER; note = 2'-O-methyl modified nucleotide
  modified_base 32: mod_base = OTHER; note = 2'-O-methyl modified nucleotide
  modified_base 37: mod_base = OTHER; note = 2'-O-methyl modified nucleotide
  modified_base 38: mod_base = OTHER; note = 2'-O-methyl modified nucleotide
  modified_base 39: mod_base = OTHER; note = 2'-O-methyl modified nucleotide
  modified_base 40: mod_base = OTHER; note = 2'-O-methyl modified nucleotide
  modified_base 41: mod_base = OTHER; note = 2'-O-methyl modified nucleotide
  modified_base 42: mod_base = OTHER; note = 2'-O-methyl modified nucleotide
  modified_base 43: mod_base = OTHER; note = 2'-O-methyl modified nucleotide
  modified_base 47: mod_base = OTHER; note = 2'-O-methyl modified nucleotide
  modified_base 48: mod_base = OTHER; note = 2'-O-methyl modified nucleotide
  modified_base 51: mod_base = OTHER; note = 2'-O-methyl modified nucleotide
  modified_base 54: mod_base = OTHER; note = nucleotide with phosphorothioate linkage
  modified_base 58: mod_base = OTHER; note = 2'-O-methyl modified nucleotide
  modified_base 59: mod_base = OTHER; note = 2'-O-methyl modified nucleotide
  modified_base 61: mod_base = OTHER; note = 2'-O-methyl modified nucleotide
  modified_base 62: mod_base = OTHER; note = 2'-O-methyl modified nucleotide
  modified_base 63: mod_base = OTHER; note = 2'-O-methyl modified nucleotide
  modified_base 64: mod_base = OTHER; note = 2'-O-methyl modified nucleotide
  modified_base 65: mod_base = OTHER; note = 2'-O-methyl modified nucleotide
  modified_base 66: mod_base = OTHER; note = 2'-O-methyl modified nucleotide
  modified_base 67: mod_base = OTHER; note = 2'-O-methyl modified nucleotide
  modified_base 68: mod_base = OTHER; note = 2'-O-methyl modified nucleotide
  modified_base 69: mod_base = OTHER; note = 2'-O-methyl modified nucleotide
  modified_base 70: mod_base = OTHER; note = 2'-O-methyl modified nucleotide
  modified_base 75: mod_base = OTHER; note = 2'-O-methyl modified nucleotide
  modified_base 77: mod_base = OTHER; note = 2'-O-methyl modified nucleotide
  modified_base 80: mod_base = OTHER; note = 2'-O-methyl modified nucleotide
  modified_base 86: mod_base = OTHER; note = 2'-O-methyl modified nucleotide
  modified_base 87: mod_base = OTHER; note = 2'-O-methyl modified nucleotide
  modified_base 89: mod_base = OTHER; note = 2'-O-methyl modified nucleotide
  modified_base 90: mod_base = OTHER; note = 2'-O-methyl modified nucleotide
  modified_base 91: mod_base = OTHER; note = 2'-O-methyl modified nucleotide
  modified_base 92: mod_base = OTHER; note = 2'-O-methyl modified nucleotide
  modified_base 99: mod_base = OTHER; note = nucleotide with phosphorothioate linkage
  modified_base 100: mod_base = OTHER; note = 2'-O-methyl modified nucleotide with phosphorothioate linkage
  modified_base 101: mod_base = OTHER; note = 2'-O-methyl modified nucleotide

SEQ ID NO: 2604 - RNA, 101 nt, synthetic construct; identical to SEQ ID NO: 807
  source 1..101: mol_type = other RNA
  modified_base 1: mod_base = OTHER; note = 2'-O-methyl modified nucleotide with phosphorothioate linkage
  modified_base 2: mod_base = OTHER; note = 2'-O-methyl modified nucleotide with phosphorothioate linkage
  modified_base 3: mod_base = OTHER; note = 2'-O-methyl modified nucleotide with phosphorothioate linkage
  modified_base 4: mod_base = OTHER; note = 2'-O-methyl modified nucleotide
  modified_base 5: mod_base = OTHER; note = 2'-O-methyl modified nucleotide
  modified_base 8: mod_base = OTHER; note = 2'-O-methyl modified nucleotide
  modified_base 9: mod_base = OTHER; note = 2'-O-methyl modified nucleotide
  modified_base 11: mod_base = OTHER; note = 2'-O-methyl modified nucleotide
  modified_base 13: mod_base = OTHER; note = 2'-O-methyl modified nucleotide
  modified_base 18: mod_base = OTHER; note = 2'-O-methyl modified nucleotide
  modified_base 22: mod_base = OTHER; note = 2'-O-methyl modified nucleotide
  modified_base 25: mod_base = OTHER; note = 2'-O-methyl modified nucleotide
  modified_base 29: mod_base = OTHER; note = 2'-O-methyl modified nucleotide
  modified_base 30: mod_base = OTHER; note = 2'-O-methyl modified nucleotide
  modified_base 31: mod_base = OTHER; note = 2'-O-methyl modified nucleotide
  modified_base 32: mod_base = OTHER; note = 2'-O-methyl modified nucleotide
  modified_base 37: mod_base = OTHER; note = 2'-O-methyl modified nucleotide
  modified_base 38: mod_base = OTHER; note = 2'-O-methyl modified nucleotide
  modified_base 39: mod_base = OTHER; note = 2'-O-methyl modified nucleotide
  modified_base 40: mod_base = OTHER; note = 2'-O-methyl modified nucleotide
  modified_base 41: mod_base = OTHER; note = 2'-O-methyl modified nucleotide
  modified_base 42: mod_base = OTHER; note = 2'-O-methyl modified nucleotide
  modified_base 43: mod_base = OTHER; note = 2'-O-methyl modified nucleotide
  modified_base 47: mod_base = OTHER; note = 2'-O-methyl modified nucleotide
  modified_base 48: mod_base = OTHER; note = 2'-O-methyl modified nucleotide
  modified_base 51: mod_base = OTHER; note = 2'-O-methyl modified nucleotide
  modified_base 54: mod_base = OTHER; note = nucleotide with phosphorothioate linkage
  modified_base 58: mod_base = OTHER; note = 2'-O-methyl modified nucleotide
  modified_base 59: mod_base = OTHER; note = 2'-O-methyl modified nucleotide
  modified_base 61: mod_base = OTHER; note = 2'-O-methyl modified nucleotide
  modified_base 62: mod_base = OTHER; note = 2'-O-methyl modified nucleotide
  modified_base 63: mod_base = OTHER; note = 2'-O-methyl modified nucleotide
  modified_base 64: mod_base = OTHER; note = 2'-O-methyl modified nucleotide
  modified_base 65: mod_base = OTHER; note = 2'-O-methyl modified nucleotide
  modified_base 66: mod_base = OTHER; note = 2'-O-methyl modified nucleotide
  modified_base 67: mod_base = OTHER; note = 2'-O-methyl modified nucleotide
  modified_base 68: mod_base = OTHER; note = 2'-O-methyl modified nucleotide
  modified_base 69: mod_base = OTHER; note = 2'-O-methyl modified nucleotide
  modified_base 70: mod_base = OTHER; note = 2'-O-methyl modified nucleotide
  modified_base 75: mod_base = OTHER; note = 2'-O-methyl modified nucleotide
  modified_base 77: mod_base = OTHER; note = 2'-O-methyl modified nucleotide
  modified_base 80: mod_base = OTHER; note = 2'-O-methyl modified nucleotide
  modified_base 86: mod_base = OTHER; note = 2'-O-methyl modified nucleotide
  modified_base 87: mod_base = OTHER; note = 2'-O-methyl modified nucleotide
  modified_base 89: mod_base = OTHER; note = 2'-O-methyl modified nucleotide
  modified_base 90: mod_base = OTHER; note = 2'-O-methyl modified nucleotide
  modified_base 91: mod_base = OTHER; note = 2'-O-methyl modified nucleotide
  modified_base 92: mod_base = OTHER; note = 2'-O-methyl modified nucleotide
  modified_base 99: mod_base = OTHER; note = nucleotide with phosphorothioate linkage
  modified_base 100: mod_base = OTHER; note = 2'-O-methyl modified nucleotide with phosphorothioate linkage
  modified_base 101: mod_base = OTHER; note = 2'-O-methyl modified nucleotide

SEQ ID NO: 2605 - RNA, 101 nt, synthetic construct; identical to SEQ ID NO: 808
  source 1..101: mol_type = other RNA
  modified_base 1: mod_base = OTHER; note = 2'-O-methyl modified nucleotide with phosphorothioate linkage
  modified_base 2: mod_base = OTHER; note = 2'-O-methyl modified nucleotide with phosphorothioate linkage
  modified_base 3: mod_base = OTHER; note = 2'-O-methyl modified nucleotide with phosphorothioate linkage
  modified_base 4: mod_base = OTHER; note = 2'-O-methyl modified nucleotide
  modified_base 5: mod_base = OTHER; note = 2'-O-methyl modified nucleotide
  modified_base 8: mod_base = OTHER; note = 2'-O-methyl modified nucleotide
  modified_base 9: mod_base = OTHER; note = 2'-O-methyl modified nucleotide
  modified_base 11: mod_base = OTHER; note = 2'-O-methyl modified nucleotide
  modified_base 13: mod_base = OTHER; note = 2'-O-methyl modified nucleotide
  modified_base 18: mod_base = OTHER; note = 2'-O-methyl modified nucleotide
  modified_base 22: mod_base = OTHER; note = 2'-O-methyl modified nucleotide
  modified_base 25: mod_base = OTHER; note = 2'-O-methyl modified nucleotide
  modified_base 29: mod_base = OTHER; note = 2'-O-methyl modified nucleotide
  modified_base 30: mod_base = OTHER; note = 2'-O-methyl modified nucleotide
  modified_base 31: mod_base = OTHER; note = 2'-O-methyl modified nucleotide
  modified_base 32: mod_base = OTHER; note = 2'-O-methyl modified nucleotide
  modified_base 37: mod_base = OTHER; note = 2'-O-methyl modified nucleotide
  modified_base 38: mod_base = OTHER; note = 2'-O-methyl modified nucleotide
  modified_base 39: mod_base = OTHER; note = 2'-O-methyl modified nucleotide
  modified_base 40: mod_base = OTHER; note = 2'-O-methyl modified nucleotide
  modified_base 41: mod_base = OTHER; note = 2'-O-methyl modified nucleotide
  modified_base 42: mod_base = OTHER; note = 2'-O-methyl modified nucleotide
  modified_base 43: mod_base = OTHER; note = 2'-O-methyl modified nucleotide
  modified_base 47: mod_base = OTHER; note = 2'-O-methyl modified nucleotide
  modified_base 48: mod_base = OTHER; note = 2'-O-methyl modified nucleotide
  modified_base 51: mod_base = OTHER; note = 2'-O-methyl modified nucleotide
  modified_base 54: mod_base = OTHER; note = nucleotide with phosphorothioate linkage
  modified_base 58: mod_base = OTHER; note = 2'-O-methyl modified nucleotide
  modified_base 59: mod_base = OTHER; note = 2'-O-methyl modified nucleotide
  modified_base 61: mod_base = OTHER; note = 2'-O-methyl modified nucleotide
  modified_base 62: mod_base = OTHER; note = 2'-O-methyl modified nucleotide
  modified_base 63: mod_base = OTHER; note = 2'-O-methyl modified nucleotide
  modified_base 64: mod_base = OTHER; note = 2'-O-methyl modified nucleotide
  modified_base 65: mod_base = OTHER; note = 2'-O-methyl modified nucleotide
  modified_base 66: mod_base = OTHER; note = 2'-O-methyl modified nucleotide
  modified_base 67: mod_base = OTHER; note = 2'-O-methyl modified nucleotide
  modified_base 68: mod_base = OTHER; note = 2'-O-methyl modified nucleotide
  modified_base 69: mod_base = OTHER; note = 2'-O-methyl modified nucleotide
  modified_base 70: mod_base = OTHER; note = 2'-O-methyl modified nucleotide
  modified_base 75: mod_base = OTHER; note = 2'-O-methyl modified nucleotide
  modified_base 77: mod_base = OTHER; note = 2'-O-methyl modified nucleotide
  modified_base 80: mod_base = OTHER; note = 2'-O-methyl modified nucleotide
  modified_base 86: mod_base = OTHER; note = 2'-O-methyl modified nucleotide
  modified_base 87: mod_base = OTHER; note = 2'-O-methyl modified nucleotide
  modified_base 89: mod_base = OTHER; note = 2'-O-methyl modified nucleotide
  modified_base 90: mod_base = OTHER; note = 2'-O-methyl modified nucleotide
  modified_base 91: mod_base = OTHER; note = 2'-O-methyl modified nucleotide
  modified_base 92: mod_base = OTHER; note = 2'-O-methyl modified nucleotide
  modified_base 99: mod_base = OTHER; note = nucleotide with phosphorothioate linkage
  modified_base 100: mod_base = OTHER; note = 2'-O-methyl modified nucleotide with phosphorothioate linkage
  modified_base 101: mod_base = OTHER; note = 2'-O-methyl modified nucleotide

SEQ ID NO: 2606 - RNA, 101 nt, synthetic construct; identical to SEQ ID NO: 809
  source 1..101: mol_type = other RNA
  modified_base 1: mod_base = OTHER; note = 2'-O-methyl modified nucleotide with phosphorothioate linkage
  modified_base 2: mod_base = OTHER; note = 2'-O-methyl modified nucleotide with phosphorothioate linkage
  modified_base 3: mod_base = OTHER; note = 2'-O-methyl modified nucleotide with phosphorothioate linkage
  modified_base 4: mod_base = OTHER; note = 2'-O-methyl modified nucleotide
  modified_base 5: mod_base = OTHER; note = 2'-O-methyl modified nucleotide
  modified_base 8: mod_base = OTHER; note = 2'-O-methyl modified nucleotide
  modified_base 9: mod_base = OTHER; note = 2'-O-methyl modified nucleotide
  modified_base 11: mod_base = OTHER; note = 2'-O-methyl modified nucleotide
  modified_base 13: mod_base = OTHER; note = 2'-O-methyl modified nucleotide
  modified_base 18: mod_base = OTHER; note = 2'-O-methyl modified nucleotide
  modified_base 22: mod_base = OTHER; note = 2'-O-methyl modified nucleotide
  modified_base 25: mod_base = OTHER; note = 2'-O-methyl modified nucleotide
  modified_base 29: mod_base = OTHER; note = 2'-O-methyl modified nucleotide
  modified_base 30: mod_base = OTHER; note = 2'-O-methyl modified nucleotide
  modified_base 31: mod_base = OTHER; note = 2'-O-methyl modified nucleotide
  modified_base 32: mod_base = OTHER; note = 2'-O-methyl modified nucleotide
  modified_base 37: mod_base = OTHER; note = 2'-O-methyl modified nucleotide
  modified_base 38: mod_base = OTHER; note = 2'-O-methyl modified nucleotide
  modified_base 39: mod_base = OTHER; note = 2'-O-methyl modified nucleotide
  modified_base 40: mod_base = OTHER; note = 2'-O-methyl modified nucleotide
  modified_base 41: mod_base = OTHER; note = 2'-O-methyl modified nucleotide
  modified_base 42: mod_base = OTHER; note = 2'-O-methyl modified nucleotide
  modified_base 43: mod_base = OTHER; note = 2'-O-methyl modified nucleotide
  modified_base 47: mod_base = OTHER; note = 2'-O-methyl modified nucleotide
  modified_base 48: mod_base = OTHER; note = 2'-O-methyl modified nucleotide
  modified_base 51: mod_base = OTHER; note = 2'-O-methyl modified nucleotide
  modified_base 54: mod_base = OTHER; note = nucleotide with phosphorothioate linkage
  modified_base 58: mod_base = OTHER; note = 2'-O-methyl modified nucleotide
  modified_base 59: mod_base = OTHER; note = 2'-O-methyl modified nucleotide
  modified_base 61: mod_base = OTHER; note = 2'-O-methyl modified nucleotide
  modified_base 62: mod_base = OTHER; note = 2'-O-methyl modified nucleotide
  modified_base 63: mod_base = OTHER; note = 2'-O-methyl modified nucleotide
  modified_base 64: mod_base = OTHER; note = 2'-O-methyl modified nucleotide
  modified_base 65: mod_base = OTHER; note = 2'-O-methyl modified nucleotide
  modified_base 66: mod_base = OTHER; note = 2'-O-methyl modified nucleotide
  modified_base 67: mod_base = OTHER; note = 2'-O-methyl modified nucleotide
  modified_base 68: mod_base = OTHER; note = 2'-O-methyl modified nucleotide
  modified_base 69: mod_base = OTHER; note = 2'-O-methyl modified nucleotide
  modified_base 70: mod_base = OTHER; note = 2'-O-methyl modified nucleotide
  modified_base 75: mod_base = OTHER; note = 2'-O-methyl modified nucleotide
  modified_base 77: mod_base = OTHER; note = 2'-O-methyl modified nucleotide
  modified_base 80: mod_base = OTHER; note = 2'-O-methyl modified nucleotide
  modified_base 86: mod_base = OTHER; note = 2'-O-methyl modified nucleotide
  modified_base 87: mod_base = OTHER; note = 2'-O-methyl modified nucleotide
  modified_base 89: mod_base = OTHER; note = 2'-O-methyl modified nucleotide
  modified_base 90: mod_base = OTHER; note = 2'-O-methyl modified nucleotide
  modified_base 91: mod_base = OTHER; note = 2'-O-methyl modified nucleotide
  modified_base 92: mod_base = OTHER; note = 2'-O-methyl modified nucleotide
  modified_base 99: mod_base = OTHER; note = nucleotide with phosphorothioate linkage
  modified_base 100: mod_base = OTHER; note = 2'-O-methyl modified nucleotide with phosphorothioate linkage
  modified_base 101: mod_base = OTHER; note = 2'-O-methyl modified nucleotide

SEQ ID NO: 2607 - RNA, 101 nt, synthetic construct; identical to SEQ ID NO: 810
  source 1..101: mol_type = other RNA
  modified_base 1: mod_base = OTHER; note = 2'-O-methyl modified nucleotide with phosphorothioate linkage
  modified_base 2: mod_base = OTHER; note = 2'-O-methyl modified nucleotide with phosphorothioate linkage
  modified_base 3: mod_base = OTHER; note = 2'-O-methyl modified nucleotide with phosphorothioate linkage
  modified_base 4: mod_base = OTHER; note = 2'-O-methyl modified nucleotide
  modified_base 5: mod_base = OTHER; note = 2'-O-methyl modified nucleotide
  modified_base 8: mod_base = OTHER; note = 2'-O-methyl modified nucleotide
  modified_base 9: mod_base = OTHER; note = 2'-O-methyl modified nucleotide
  modified_base 11: mod_base = OTHER; note = 2'-O-methyl modified nucleotide
  modified_base 13: mod_base = OTHER; note = 2'-O-methyl modified nucleotide
  modified_base 18: mod_base = OTHER; note = 2'-O-methyl modified nucleotide
  modified_base 22: mod_base = OTHER; note = 2'-O-methyl modified nucleotide
  modified_base 25: mod_base = OTHER; note = 2'-O-methyl modified nucleotide
  modified_base 29: mod_base = OTHER; note = 2'-O-methyl modified nucleotide
  modified_base 30: mod_base = OTHER; note = 2'-O-methyl modified nucleotide
  modified_base 31: mod_base = OTHER; note = 2'-O-methyl modified nucleotide
  modified_base 32: mod_base = OTHER; note = 2'-O-methyl modified nucleotide
  modified_base 37: mod_base = OTHER; note = 2'-O-methyl modified nucleotide
  modified_base 38: mod_base = OTHER; note = 2'-O-methyl modified nucleotide
  modified_base 39: mod_base = OTHER; note = 2'-O-methyl modified nucleotide
  modified_base 40: mod_base = OTHER; note = 2'-O-methyl modified nucleotide
  modified_base 41: mod_base = OTHER; note = 2'-O-methyl modified nucleotide
  modified_base 42: mod_base = OTHER; note = 2'-O-methyl modified nucleotide
  modified_base 43: mod_base = OTHER; note = 2'-O-methyl modified nucleotide
  modified_base 47: mod_base = OTHER; note = 2'-O-methyl modified nucleotide
  modified_base 48: mod_base = OTHER; note = 2'-O-methyl modified nucleotide
  modified_base 51: mod_base = OTHER; note = 2'-O-methyl modified nucleotide
  modified_base 54: mod_base = OTHER; note = nucleotide with phosphorothioate linkage
  modified_base 58: mod_base = OTHER; note = 2'-O-methyl modified nucleotide
  modified_base 59: mod_base = OTHER; note = 2'-O-methyl modified nucleotide
  modified_base 61: mod_base = OTHER; note = 2'-O-methyl modified nucleotide
  modified_base 62: mod_base = OTHER; note = 2'-O-methyl modified nucleotide
  modified_base 63: mod_base = OTHER; note = 2'-O-methyl modified nucleotide
  modified_base 64: mod_base = OTHER; note = 2'-O-methyl modified nucleotide
  modified_base 65: mod_base = OTHER; note = 2'-O-methyl modified nucleotide
  modified_base 66: mod_base = OTHER; note = 2'-O-methyl modified nucleotide
  modified_base 67: mod_base = OTHER; note = 2'-O-methyl modified nucleotide
  modified_base 68: mod_base = OTHER; note = 2'-O-methyl modified nucleotide
  modified_base 69: mod_base = OTHER; note = 2'-O-methyl modified nucleotide
  modified_base 70: mod_base = OTHER; note = 2'-O-methyl modified nucleotide
  modified_base 75: mod_base = OTHER; note = 2'-O-methyl modified nucleotide
  modified_base 77: mod_base = OTHER; note = 2'-O-methyl modified nucleotide
  modified_base 80: mod_base = OTHER; note = 2'-O-methyl modified nucleotide
  modified_base 86: mod_base = OTHER; note = 2'-O-methyl modified nucleotide
  modified_base 87: mod_base = OTHER; note = 2'-O-methyl modified nucleotide
  modified_base 89: mod_base = OTHER; note = 2'-O-methyl modified nucleotide
  modified_base 90: mod_base = OTHER; note = 2'-O-methyl modified nucleotide
  modified_base 91: mod_base = OTHER; note = 2'-O-methyl modified nucleotide
  modified_base 92: mod_base = OTHER; note = 2'-O-methyl modified nucleotide
  modified_base 99: mod_base = OTHER; note = nucleotide with phosphorothioate linkage
  modified_base 100: mod_base = OTHER; note = 2'-O-methyl modified nucleotide with phosphorothioate linkage
  modified_base 101: mod_base = OTHER; note = 2'-O-methyl modified nucleotide

SEQ ID NO: 2608 - RNA, 101 nt, synthetic construct; identical to SEQ ID NO: 811
  source 1..101: mol_type = other RNA
  modified_base 1: mod_base = OTHER; note = 2'-O-methyl modified nucleotide with phosphorothioate linkage
  modified_base 2: mod_base = OTHER; note = 2'-O-methyl modified nucleotide with phosphorothioate linkage
  modified_base 3: mod_base = OTHER; note = 2'-O-methyl modified nucleotide with phosphorothioate linkage
  modified_base 4: mod_base = OTHER; note = 2'-O-methyl modified nucleotide
  modified_base 5: mod_base = OTHER; note = 2'-O-methyl modified nucleotide
  modified_base 8: mod_base = OTHER; note = 2'-O-methyl modified nucleotide
  modified_base 9: mod_base = OTHER; note = 2'-O-methyl modified nucleotide
  modified_base 11: mod_base = OTHER; note = 2'-O-methyl modified nucleotide
  modified_base 13: mod_base = OTHER; note = 2'-O-methyl modified nucleotide
  modified_base 18: mod_base = OTHER; note = 2'-O-methyl modified nucleotide
  modified_base 22: mod_base = OTHER; note = 2'-O-methyl modified nucleotide
  modified_base 25: mod_base = OTHER; note = 2'-O-methyl modified nucleotide
  modified_base 29: mod_base = OTHER; note = 2'-O-methyl modified nucleotide
  modified_base 30: mod_base = OTHER; note = 2'-O-methyl modified nucleotide
  modified_base 31: mod_base = OTHER; note = 2'-O-methyl modified nucleotide
  modified_base 32: mod_base = OTHER; note = 2'-O-methyl modified nucleotide
  modified_base 37: mod_base = OTHER; note = 2'-O-methyl modified nucleotide
  modified_base 38: mod_base = OTHER; note = 2'-O-methyl modified nucleotide
  modified_base 39: mod_base = OTHER; note = 2'-O-methyl modified nucleotide
  modified_base 40: mod_base = OTHER; note = 2'-O-methyl modified nucleotide
  modified_base 41: mod_base = OTHER; note = 2'-O-methyl modified nucleotide
  modified_base 42: mod_base = OTHER; note = 2'-O-methyl modified nucleotide
  modified_base 43: mod_base = OTHER; note = 2'-O-methyl modified nucleotide
  modified_base 47: mod_base = OTHER; note = 2'-O-methyl modified nucleotide
  modified_base 48: mod_base = OTHER; note = 2'-O-methyl modified nucleotide
  modified_base 51: mod_base = OTHER; note = 2'-O-methyl modified nucleotide
  modified_base 54: mod_base = OTHER; note = nucleotide with phosphorothioate linkage
  modified_base 58: mod_base = OTHER; note = 2'-O-methyl modified nucleotide
  modified_base 59: mod_base = OTHER; note = 2'-O-methyl modified nucleotide
  modified_base 61: mod_base = OTHER; note = 2'-O-methyl modified nucleotide
  modified_base 62: mod_base = OTHER; note = 2'-O-methyl modified nucleotide
  modified_base 63: mod_base = OTHER; note = 2'-O-methyl modified nucleotide
  modified_base 64: mod_base = OTHER; note = 2'-O-methyl modified nucleotide
  modified_base 65: mod_base = OTHER; note = 2'-O-methyl modified nucleotide
  modified_base 66: mod_base = OTHER; note = 2'-O-methyl modified nucleotide
  modified_base 67: mod_base = OTHER; note = 2'-O-methyl modified nucleotide
  modified_base 68: mod_base = OTHER; note = 2'-O-methyl modified nucleotide
  modified_base 69: mod_base = OTHER; note = 2'-O-methyl modified nucleotide
  modified_base 70: mod_base = OTHER; note = 2'-O-methyl modified nucleotide
  modified_base 75: mod_base = OTHER; note = 2'-O-methyl modified nucleotide
  modified_base 77: mod_base = OTHER; note = 2'-O-methyl modified nucleotide
  modified_base 80: mod_base = OTHER; note = 2'-O-methyl modified nucleotide
  modified_base 86: mod_base = OTHER; note = 2'-O-methyl modified nucleotide
  modified_base 87: mod_base = OTHER; note = 2'-O-methyl modified nucleotide
  modified_base 89: mod_base = OTHER; note = 2'-O-methyl modified nucleotide
  modified_base 90: mod_base = OTHER; note = 2'-O-methyl modified nucleotide
  modified_base 91: mod_base = OTHER; note = 2'-O-methyl modified nucleotide
  modified_base 92: mod_base = OTHER; note = 2'-O-methyl modified nucleotide
  modified_base 99: mod_base = OTHER; note = nucleotide with phosphorothioate linkage
  modified_base 100: mod_base = OTHER; note = 2'-O-methyl modified nucleotide with phosphorothioate linkage
  modified_base 101: mod_base = OTHER; note = 2'-O-methyl modified nucleotide

SEQ ID NO: 2609 - RNA, 101 nt, synthetic construct; identical to SEQ ID NO: 1609
  source 1..101: mol_type = other RNA
  modified_base 1: mod_base = OTHER; note = 2'-O-methyl modified nucleotide with phosphorothioate linkage
  modified_base 2: mod_base = OTHER; note = 2'-O-methyl modified nucleotide with phosphorothioate linkage
  modified_base 3: mod_base = OTHER; note = 2'-O-methyl modified nucleotide with phosphorothioate linkage
  modified_base 4: mod_base = OTHER; note = 2'-O-methyl modified nucleotide
  modified_base 5: mod_base = OTHER; note = 2'-O-methyl modified nucleotide
  modified_base 8: mod_base = OTHER; note = 2'-O-methyl modified nucleotide
  modified_base 9: mod_base = OTHER; note = 2'-O-methyl modified nucleotide
  modified_base 11: mod_base = OTHER; note = 2'-O-methyl modified nucleotide
  modified_base 13: mod_base = OTHER; note = 2'-O-methyl modified nucleotide
  modified_base 18: mod_base = OTHER; note = 2'-O-methyl modified nucleotide
  modified_base 22: mod_base = OTHER; note = 2'-O-methyl modified nucleotide
  modified_base 25: mod_base = OTHER; note = 2'-O-methyl modified nucleotide
  modified_base 29: mod_base = OTHER; note = 2'-O-methyl modified nucleotide
  modified_base 30: mod_base = OTHER; note = 2'-O-methyl modified nucleotide
  modified_base 31: mod_base = OTHER; note = 2'-O-methyl modified nucleotide
  modified_base 32: mod_base = OTHER; note = 2'-O-methyl modified nucleotide
  modified_base 37: mod_base = OTHER; note = 2'-O-methyl modified nucleotide
  modified_base 38: mod_base = OTHER; note = 2'-O-methyl modified nucleotide
  modified_base 39: mod_base = OTHER; note = 2'-O-methyl modified nucleotide
  modified_base 40: mod_base = OTHER; note = 2'-O-methyl modified nucleotide
  modified_base 41: mod_base = OTHER; note = 2'-O-methyl modified nucleotide
  modified_base 42: mod_base = OTHER; note = 2'-O-methyl modified nucleotide
  modified_base 43: mod_base = OTHER; note = 2'-O-methyl modified nucleotide
  modified_base 47: mod_base = OTHER; note = 2'-O-methyl modified nucleotide
  modified_base 48: mod_base = OTHER; note = 2'-O-methyl modified nucleotide
  modified_base 51: mod_base = OTHER; note = 2'-O-methyl modified nucleotide
  modified_base 54: mod_base = OTHER; note = nucleotide with phosphorothioate linkage
  modified_base 58: mod_base = OTHER; note = 2'-O-methyl modified nucleotide
  modified_base 59: mod_base = OTHER; note = 2'-O-methyl modified nucleotide
  modified_base 61: mod_base = OTHER; note = 2'-O-methyl modified nucleotide
  modified_base 62: mod_base = OTHER; note = 2'-O-methyl modified nucleotide
  modified_base 63: mod_base = OTHER; note = 2'-O-methyl modified nucleotide
  modified_base 64: mod_base = OTHER; note = 2'-O-methyl modified nucleotide
  modified_base 65: mod_base = OTHER; note = 2'-O-methyl modified nucleotide
  modified_base 66: mod_base = OTHER; note = 2'-O-methyl modified nucleotide
  modified_base 67: mod_base = OTHER; note = 2'-O-methyl modified nucleotide
  modified_base 68: mod_base = OTHER; note = 2'-O-methyl modified nucleotide
  modified_base 69: mod_base = OTHER; note = 2'-O-methyl modified nucleotide
  modified_base 70: mod_base = OTHER; note = 2'-O-methyl modified nucleotide
  modified_base 75: mod_base = OTHER; note = 2'-O-methyl modified nucleotide
  modified_base 77: mod_base = OTHER; note = 2'-O-methyl modified nucleotide
  modified_base 80: mod_base = OTHER; note = 2'-O-methyl modified nucleotide
  modified_base 86: mod_base = OTHER; note = 2'-O-methyl modified nucleotide
  modified_base 87: mod_base = OTHER; note = 2'-O-methyl modified nucleotide
  modified_base 89: mod_base = OTHER; note = 2'-O-methyl modified nucleotide
  modified_base 90: mod_base = OTHER; note = 2'-O-methyl modified nucleotide
  modified_base 91: mod_base = OTHER; note = 2'-O-methyl modified nucleotide
  modified_base 92: mod_base = OTHER; note = 2'-O-methyl modified nucleotide
  modified_base 99: mod_base = OTHER; note = nucleotide with phosphorothioate linkage
  modified_base 100: mod_base = OTHER; note = 2'-O-methyl modified nucleotide with phosphorothioate linkage
  modified_base 101: mod_base = OTHER; note = 2'-O-methyl modified nucleotide

SEQ ID NO: 2610 - RNA, 101 nt, synthetic construct; identical to SEQ ID NO: 1610
  source 1..101: mol_type = other RNA
  modified_base 1: mod_base = OTHER; note = 2'-O-methyl modified nucleotide with phosphorothioate linkage
  modified_base 2: mod_base = OTHER; note = 2'-O-methyl modified nucleotide with phosphorothioate linkage
  modified_base 3: mod_base = OTHER; note = 2'-O-methyl modified nucleotide with phosphorothioate linkage
  modified_base 4: mod_base = OTHER; note = 2'-O-methyl modified nucleotide
  modified_base 5: mod_base = OTHER; note = 2'-O-methyl modified nucleotide
  modified_base 8: mod_base = OTHER; note = 2'-O-methyl modified nucleotide
  modified_base 9: mod_base = OTHER; note = 2'-O-methyl modified nucleotide
  modified_base 11: mod_base = OTHER; note = 2'-O-methyl modified nucleotide
  modified_base 13: mod_base = OTHER; note = 2'-O-methyl modified nucleotide
  modified_base 18: mod_base = OTHER; note = 2'-O-methyl modified nucleotide
  modified_base 22: mod_base = OTHER; note = 2'-O-methyl modified nucleotide
  modified_base 25: mod_base = OTHER; note = 2'-O-methyl modified nucleotide
  modified_base 29: mod_base = OTHER; note = 2'-O-methyl modified nucleotide
  modified_base 30: mod_base = OTHER; note = 2'-O-methyl modified nucleotide
  modified_base 31: mod_base = OTHER; note = 2'-O-methyl modified nucleotide
  modified_base 32: mod_base = OTHER; note = 2'-O-methyl modified nucleotide
  modified_base 37: mod_base = OTHER; note = 2'-O-methyl modified nucleotide
  modified_base 38: mod_base = OTHER; note = 2'-O-methyl modified nucleotide
  modified_base 39: mod_base = OTHER; note = 2'-O-methyl modified nucleotide
  modified_base 40: mod_base = OTHER; note = 2'-O-methyl modified nucleotide
  modified_base 41: mod_base = OTHER; note = 2'-O-methyl modified nucleotide
  modified_base 42: mod_base = OTHER; note = 2'-O-methyl modified nucleotide
  modified_base 43: mod_base = OTHER; note = 2'-O-methyl modified nucleotide
  modified_base 47: mod_base = OTHER; note = 2'-O-methyl modified nucleotide
  modified_base 48: mod_base = OTHER; note = 2'-O-methyl modified nucleotide
  modified_base 51: mod_base = OTHER; note = 2'-O-methyl modified nucleotide
  modified_base 54: mod_base = OTHER; note = nucleotide with phosphorothioate linkage
  modified_base 58: mod_base = OTHER; note = 2'-O-methyl modified nucleotide
  modified_base 59: mod_base = OTHER; note = 2'-O-methyl modified nucleotide
  modified_base 61: mod_base = OTHER; note = 2'-O-methyl modified nucleotide
  modified_base 62: mod_base = OTHER; note = 2'-O-methyl modified nucleotide
  modified_base 63: mod_base = OTHER; note = 2'-O-methyl modified nucleotide
  modified_base 64: mod_base = OTHER; note = 2'-O-methyl modified nucleotide
  modified_base 65: mod_base = OTHER; note = 2'-O-methyl modified nucleotide
  modified_base 66: mod_base = OTHER; note = 2'-O-methyl modified nucleotide
  modified_base 67: mod_base = OTHER; note = 2'-O-methyl modified nucleotide
  modified_base 68: mod_base = OTHER; note = 2'-O-methyl modified nucleotide
  modified_base 69: mod_base = OTHER; note = 2'-O-methyl modified nucleotide
  modified_base 70: mod_base = OTHER; note = 2'-O-methyl modified nucleotide
  modified_base 75: mod_base = OTHER; note = 2'-O-methyl modified nucleotide
  modified_base 77: mod_base = OTHER; note = 2'-O-methyl modified nucleotide
  modified_base 80: mod_base = OTHER; note = 2'-O-methyl modified nucleotide
  modified_base 86: mod_base = OTHER; note = 2'-O-methyl modified nucleotide
  modified_base 87: mod_base = OTHER; note = 2'-O-methyl modified nucleotide
  modified_base 89: mod_base = OTHER; note = 2'-O-methyl modified nucleotide
  modified_base 90: mod_base = OTHER; note = 2'-O-methyl modified nucleotide
  modified_base 91: mod_base = OTHER; note = 2'-O-methyl modified nucleotide
  modified_base 92: mod_base = OTHER; note = 2'-O-methyl modified nucleotide
  modified_base 99: mod_base = OTHER; note = nucleotide with phosphorothioate linkage
  modified_base 100: mod_base = OTHER; note = 2'-O-methyl modified nucleotide with phosphorothioate linkage
  modified_base 101: mod_base = OTHER; note = 2'-O-methyl modified nucleotide

SEQ ID NO: 2611 - RNA, 101 nt, synthetic construct; identical to SEQ ID NO: 1611
  source 1..101: mol_type = other RNA
  modified_base 1: mod_base = OTHER; note = 2'-O-methyl modified nucleotide with phosphorothioate linkage
  modified_base 2: mod_base = OTHER; note = 2'-O-methyl modified nucleotide with phosphorothioate linkage
  modified_base 3: mod_base = OTHER; note = 2'-O-methyl modified nucleotide with phosphorothioate linkage
  modified_base 4: mod_base = OTHER; note = 2'-O-methyl modified nucleotide
  modified_base 5: mod_base = OTHER; note = 2'-O-methyl modified nucleotide
  modified_base 8: mod_base = OTHER; note = 2'-O-methyl modified nucleotide
  modified_base 9: mod_base = OTHER; note = 2'-O-methyl modified nucleotide
  modified_base 11: mod_base = OTHER; note = 2'-O-methyl modified nucleotide
  modified_base 13: mod_base = OTHER; note = 2'-O-methyl modified nucleotide
  modified_base 18: mod_base = OTHER; note = 2'-O-methyl modified nucleotide
  modified_base 22: mod_base = OTHER; note = 2'-O-methyl modified nucleotide
  modified_base 25: mod_base = OTHER; note = 2'-O-methyl modified nucleotide
  modified_base 29: mod_base = OTHER; note = 2'-O-methyl modified nucleotide
  modified_base 30: mod_base = OTHER; note = 2'-O-methyl modified nucleotide
  modified_base 31: mod_base = OTHER; note = 2'-O-methyl modified nucleotide
  modified_base 32: mod_base = OTHER; note = 2'-O-methyl modified nucleotide
  modified_base 37: mod_base = OTHER; note = 2'-O-methyl modified nucleotide
  modified_base 38: mod_base = OTHER; note = 2'-O-methyl modified nucleotide
  modified_base 39: mod_base = OTHER; note = 2'-O-methyl modified nucleotide
  modified_base 40: mod_base = OTHER; note = 2'-O-methyl modified nucleotide
  modified_base 41: mod_base = OTHER; note = 2'-O-methyl modified nucleotide
  modified_base 42: mod_base = OTHER; note = 2'-O-methyl modified nucleotide
  modified_base 43: mod_base = OTHER; note = 2'-O-methyl modified nucleotide
  modified_base 47: mod_base = OTHER; note = 2'-O-methyl modified nucleotide
  modified_base 48: mod_base = OTHER; note = 2'-O-methyl modified nucleotide
  modified_base 51: mod_base = OTHER; note = 2'-O-methyl modified nucleotide
  modified_base 54: mod_base = OTHER; note = nucleotide with phosphorothioate linkage
  modified_base 58: mod_base = OTHER; note = 2'-O-methyl modified nucleotide
  modified_base 59: mod_base = OTHER; note = 2'-O-methyl modified nucleotide
  modified_base 61: mod_base = OTHER; note = 2'-O-methyl modified nucleotide
  modified_base 62: mod_base = OTHER; note = 2'-O-methyl modified nucleotide
  modified_base 63: mod_base = OTHER; note = 2'-O-methyl modified nucleotide
  modified_base 64: mod_base = OTHER; note = 2'-O-methyl modified nucleotide
  modified_base 65: mod_base = OTHER; note = 2'-O-methyl modified nucleotide
  modified_base 66: mod_base = OTHER; note = 2'-O-methyl modified nucleotide
  modified_base 67: mod_base = OTHER; note = 2'-O-methyl modified nucleotide
  modified_base 68: mod_base = OTHER; note = 2'-O-methyl modified nucleotide
  modified_base 69: mod_base = OTHER; note = 2'-O-methyl modified nucleotide
  modified_base 70: mod_base = OTHER; note = 2'-O-methyl modified nucleotide
  modified_base 75: mod_base = OTHER; note = 2'-O-methyl modified nucleotide
  modified_base 77: mod_base = OTHER; note = 2'-O-methyl modified nucleotide
  modified_base 80: mod_base = OTHER; note = 2'-O-methyl modified nucleotide
  modified_base 86: mod_base = OTHER; note = 2'-O-methyl modified nucleotide
  modified_base 87: mod_base = OTHER; note = 2'-O-methyl modified nucleotide
  modified_base 89: mod_base = OTHER; note = 2'-O-methyl modified nucleotide
  modified_base 90: mod_base = OTHER; note = 2'-O-methyl modified nucleotide
  modified_base 91: mod_base = OTHER; note = 2'-O-methyl modified nucleotide
  modified_base 92: mod_base = OTHER; note = 2'-O-methyl modified nucleotide
  modified_base 99: mod_base = OTHER; note = nucleotide with phosphorothioate linkage
  modified_base 100: mod_base = OTHER; note = 2'-O-methyl modified nucleotide with phosphorothioate linkage
  modified_base 101: mod_base = OTHER; note = 2'-O-methyl modified nucleotide

SEQ ID NO: 2612 - RNA, 101 nt, synthetic construct; identical to SEQ ID NO: 1612
  source 1..101: mol_type = other RNA
  modified_base 1: mod_base = OTHER; note = 2'-O-methyl modified nucleotide with phosphorothioate linkage
  modified_base 2: mod_base = OTHER; note = 2'-O-methyl modified nucleotide with phosphorothioate linkage
  modified_base 3: mod_base = OTHER; note = 2'-O-methyl modified nucleotide with phosphorothioate linkage
  modified_base 4: mod_base = OTHER; note = 2'-O-methyl modified nucleotide
  modified_base 5: mod_base = OTHER; note = 2'-O-methyl modified nucleotide
  modified_base 8: mod_base = OTHER; note = 2'-O-methyl modified nucleotide
  modified_base 9: mod_base = OTHER; note = 2'-O-methyl modified nucleotide
  modified_base 11: mod_base = OTHER; note = 2'-O-methyl modified nucleotide
  modified_base 13: mod_base = OTHER; note = 2'-O-methyl modified nucleotide
  modified_base 18: mod_base = OTHER; note = 2'-O-methyl modified nucleotide
  modified_base 22: mod_base = OTHER; note = 2'-O-methyl modified nucleotide
  modified_base 25: mod_base = OTHER; note = 2'-O-methyl modified nucleotide
  modified_base 29: mod_base = OTHER; note = 2'-O-methyl modified nucleotide
  modified_base 30: mod_base = OTHER; note = 2'-O-methyl modified nucleotide
  modified_base 31: mod_base = OTHER; note = 2'-O-methyl modified nucleotide
  modified_base 32: mod_base = OTHER; note = 2'-O-methyl modified nucleotide
  modified_base 37: mod_base = OTHER; note = 2'-O-methyl modified nucleotide
  modified_base 38: mod_base = OTHER; note = 2'-O-methyl modified nucleotide
  modified_base 39: mod_base = OTHER; note = 2'-O-methyl modified nucleotide
  modified_base 40: mod_base = OTHER; note = 2'-O-methyl modified nucleotide
  modified_base 41: mod_base = OTHER; note = 2'-O-methyl modified nucleotide
  modified_base 42: mod_base = OTHER; note = 2'-O-methyl modified nucleotide
  modified_base 43: mod_base = OTHER; note = 2'-O-methyl modified nucleotide
  modified_base 47: mod_base = OTHER; note = 2'-O-methyl modified nucleotide
  modified_base 48: mod_base = OTHER; note = 2'-O-methyl modified nucleotide
  modified_base 51: mod_base = OTHER; note = 2'-O-methyl modified nucleotide
  modified_base 54: mod_base = OTHER; note = nucleotide with phosphorothioate linkage
  modified_base 58: mod_base = OTHER; note = 2'-O-methyl modified nucleotide
  modified_base 59: mod_base = OTHER; note = 2'-O-methyl modified nucleotide
  modified_base 61: mod_base = OTHER; note = 2'-O-methyl modified nucleotide
  modified_base 62: mod_base = OTHER; note = 2'-O-methyl modified nucleotide
  modified_base 63: mod_base = OTHER; note = 2'-O-methyl modified nucleotide
  modified_base 64: mod_base = OTHER; note = 2'-O-methyl modified nucleotide
  modified_base 65: mod_base = OTHER; note = 2'-O-methyl modified nucleotide
  modified_base 66: mod_base = OTHER; note = 2'-O-methyl modified nucleotide
  modified_base 67: mod_base = OTHER; note = 2'-O-methyl modified nucleotide
  modified_base 68: mod_base = OTHER; note = 2'-O-methyl modified nucleotide
  modified_base 69: mod_base = OTHER; note = 2'-O-methyl modified nucleotide
  modified_base 70: mod_base = OTHER; note = 2'-O-methyl modified nucleotide
  modified_base 75: mod_base = OTHER; note = 2'-O-methyl modified nucleotide
  modified_base 77: mod_base = OTHER; note = 2'-O-methyl modified nucleotide
  modified_base 80: mod_base = OTHER; note = 2'-O-methyl modified nucleotide
  modified_base 86: mod_base = OTHER; note = 2'-O-methyl modified nucleotide
  modified_base 87: mod_base = OTHER; note = 2'-O-methyl modified nucleotide
  modified_base 89: mod_base = OTHER; note = 2'-O-methyl modified nucleotide
  modified_base 90: mod_base = OTHER; note = 2'-O-methyl modified nucleotide
  modified_base 91: mod_base = OTHER; note = 2'-O-methyl modified nucleotide
  modified_base 92: mod_base = OTHER; note = 2'-O-methyl modified nucleotide
  modified_base 99: mod_base = OTHER; note = nucleotide with phosphorothioate linkage
  modified_base 100: mod_base = OTHER; note = 2'-O-methyl modified nucleotide with phosphorothioate linkage
  modified_base 101: mod_base = OTHER; note = 2'-O-methyl modified nucleotide

SEQ ID NO: 2613 - RNA, 101 nt, synthetic construct; identical to SEQ ID NO: 1613
  source 1..101: mol_type = other RNA
  modified_base 1: mod_base = OTHER; note = 2'-O-methyl modified nucleotide with phosphorothioate linkage
  modified_base 2: mod_base = OTHER; note = 2'-O-methyl modified nucleotide with phosphorothioate linkage
  modified_base 3: mod_base = OTHER; note = 2'-O-methyl modified nucleotide with phosphorothioate linkage
  modified_base 4: mod_base = OTHER; note = 2'-O-methyl modified nucleotide
  modified_base 5: mod_base = OTHER; note = 2'-O-methyl modified nucleotide
  modified_base 8: mod_base = OTHER; note = 2'-O-methyl modified nucleotide
  modified_base 9: mod_base = OTHER; note = 2'-O-methyl modified nucleotide
  modified_base 11: mod_base = OTHER; note = 2'-O-methyl modified nucleotide
  modified_base 13: mod_base = OTHER; note = 2'-O-methyl modified nucleotide
  modified_base 18: mod_base = OTHER; note = 2'-O-methyl modified nucleotide
  modified_base 22: mod_base = OTHER; note = 2'-O-methyl modified nucleotide
  modified_base 25: mod_base = OTHER; note = 2'-O-methyl modified nucleotide
  modified_base 29: mod_base = OTHER; note = 2'-O-methyl modified nucleotide
  modified_base 30: mod_base = OTHER; note = 2'-O-methyl modified nucleotide
  modified_base 31: mod_base = OTHER; note = 2'-O-methyl modified nucleotide
  modified_base 32: mod_base = OTHER; note = 2'-O-methyl modified nucleotide
  modified_base 37: mod_base = OTHER; note = 2'-O-methyl modified nucleotide
  modified_base 38: mod_base = OTHER; note = 2'-O-methyl modified nucleotide
  modified_base 39: mod_base = OTHER; note = 2'-O-methyl modified nucleotide
  modified_base 40: mod_base = OTHER; note = 2'-O-methyl modified nucleotide
  modified_base 41: mod_base = OTHER; note = 2'-O-methyl modified nucleotide
  modified_base 42: mod_base = OTHER; note = 2'-O-methyl modified nucleotide
  modified_base 43: mod_base = OTHER; note = 2'-O-methyl modified nucleotide
  modified_base 47: mod_base = OTHER; note = 2'-O-methyl modified nucleotide
  modified_base 48: mod_base = OTHER; note = 2'-O-methyl modified nucleotide
  modified_base 51: mod_base = OTHER; note = 2'-O-methyl modified nucleotide
  modified_base 54: mod_base = OTHER; note = nucleotide with phosphorothioate linkage
  modified_base 58: mod_base = OTHER; note = 2'-O-methyl modified nucleotide
  modified_base 59: mod_base = OTHER; note = 2'-O-methyl modified nucleotide
  modified_base 61: mod_base = OTHER; note = 2'-O-methyl modified nucleotide
  modified_base 62: mod_base = OTHER; note = 2'-O-methyl modified nucleotide
  modified_base 63: mod_base = OTHER; note = 2'-O-methyl modified nucleotide
  modified_base 64: mod_base = OTHER; note = 2'-O-methyl modified nucleotide
  modified_base 65: mod_base = OTHER; note = 2'-O-methyl modified nucleotide
  modified_base 66: mod_base = OTHER; note = 2'-O-methyl modified nucleotide
  modified_base 67: mod_base = OTHER; note = 2'-O-methyl modified nucleotide
  modified_base 68: mod_base = OTHER; note = 2'-O-methyl modified nucleotide
  modified_base 69: mod_base = OTHER; note = 2'-O-methyl modified nucleotide
  modified_base 70: mod_base = OTHER; note = 2'-O-methyl modified nucleotide
  modified_base 75: mod_base = OTHER; note = 2'-O-methyl modified nucleotide
  modified_base 77: mod_base = OTHER; note = 2'-O-methyl modified nucleotide
  modified_base 80: mod_base = OTHER; note = 2'-O-methyl modified nucleotide
  modified_base 86: mod_base = OTHER; note = 2'-O-methyl modified nucleotide
  modified_base 87: mod_base = OTHER; note = 2'-O-methyl modified nucleotide
  modified_base 89: mod_base = OTHER; note = 2'-O-methyl modified nucleotide
  modified_base 90: mod_base = OTHER; note = 2'-O-methyl modified nucleotide
  modified_base 91: mod_base = OTHER; note = 2'-O-methyl modified nucleotide
  modified_base 92: mod_base = OTHER; note = 2'-O-methyl modified nucleotide
  modified_base 99: mod_base = OTHER; note = nucleotide with phosphorothioate linkage
  modified_base 100: mod_base = OTHER; note = 2'-O-methyl modified nucleotide with phosphorothioate linkage
  modified_base 101: mod_base = OTHER; note = 2'-O-methyl modified nucleotide

SEQ ID NO: 2614 - RNA, 101 nt, synthetic construct; identical to SEQ ID NO: 1614
  source 1..101: mol_type = other RNA
  modified_base 1: mod_base = OTHER; note = 2'-O-methyl modified nucleotide with phosphorothioate linkage
  modified_base 2: mod_base = OTHER; note = 2'-O-methyl modified nucleotide with phosphorothioate linkage
  modified_base 3: mod_base = OTHER; note = 2'-O-methyl modified nucleotide with phosphorothioate linkage
  modified_base 4: mod_base = OTHER; note = 2'-O-methyl modified nucleotide
  modified_base 5: mod_base = OTHER; note = 2'-O-methyl modified nucleotide
  modified_base 8: mod_base = OTHER; note = 2'-O-methyl modified nucleotide
  modified_base 9: mod_base = OTHER; note = 2'-O-methyl modified nucleotide
  modified_base 11: mod_base = OTHER; note = 2'-O-methyl modified nucleotide
  modified_base 13: mod_base = OTHER; note = 2'-O-methyl modified nucleotide
  modified_base 18: mod_base = OTHER; note = 2'-O-methyl modified nucleotide
  modified_base 22: mod_base = OTHER; note = 2'-O-methyl modified nucleotide
  modified_base 25: mod_base = OTHER; note = 2'-O-methyl modified nucleotide
  modified_base 29: mod_base = OTHER; note = 2'-O-methyl modified nucleotide
  modified_base 30: mod_base = OTHER; note = 2'-O-methyl modified nucleotide
  modified_base 31: mod_base = OTHER; note = 2'-O-methyl modified nucleotide
  modified_base 32: mod_base = OTHER; note = 2'-O-methyl modified nucleotide
  modified_base 37: mod_base = OTHER; note = 2'-O-methyl modified nucleotide
  modified_base 38: mod_base = OTHER; note = 2'-O-methyl modified nucleotide
  modified_base 39: mod_base = OTHER; note = 2'-O-methyl modified nucleotide
  modified_base 40: mod_base = OTHER; note = 2'-O-methyl modified nucleotide
  modified_base 41: mod_base = OTHER; note = 2'-O-methyl modified nucleotide
  modified_base 42: mod_base = OTHER; note = 2'-O-methyl modified nucleotide
  modified_base 43: mod_base = OTHER; note = 2'-O-methyl modified nucleotide
  modified_base 47: mod_base = OTHER; note = 2'-O-methyl modified nucleotide
  modified_base 48: mod_base = OTHER; note = 2'-O-methyl modified nucleotide
  modified_base 51: mod_base = OTHER; note = 2'-O-methyl modified nucleotide
  modified_base 54: mod_base = OTHER; note = nucleotide with phosphorothioate linkage
  modified_base 58: mod_base = OTHER; note = 2'-O-methyl modified nucleotide
  modified_base 59: mod_base = OTHER; note = 2'-O-methyl modified nucleotide
  modified_base 61: mod_base = OTHER; note = 2'-O-methyl modified nucleotide
  modified_base 62: mod_base = OTHER; note = 2'-O-methyl modified nucleotide
  modified_base 63: mod_base = OTHER; note = 2'-O-methyl modified nucleotide
  modified_base 64: mod_base = OTHER; note = 2'-O-methyl modified nucleotide
  modified_base 65: mod_base = OTHER; note = 2'-O-methyl modified nucleotide
  modified_base 66: mod_base = OTHER; note = 2'-O-methyl modified nucleotide
  modified_base 67: mod_base = OTHER; note = 2'-O-methyl modified nucleotide
  modified_base 68: mod_base = OTHER; note = 2'-O-methyl modified nucleotide
  modified_base 69: mod_base = OTHER; note = 2'-O-methyl modified nucleotide
  modified_base 70: mod_base = OTHER; note = 2'-O-methyl modified nucleotide
  modified_base 75: mod_base = OTHER; note = 2'-O-methyl modified nucleotide
  modified_base 77: mod_base = OTHER; note = 2'-O-methyl modified nucleotide
  modified_base 80: mod_base = OTHER; note = 2'-O-methyl modified nucleotide
  modified_base 86: mod_base = OTHER; note = 2'-O-methyl modified nucleotide
  modified_base 87: mod_base = OTHER; note = 2'-O-methyl modified nucleotide
  modified_base 89: mod_base = OTHER; note = 2'-O-methyl modified nucleotide
  modified_base 90: mod_base = OTHER; note = 2'-O-methyl modified nucleotide
  modified_base 91: mod_base = OTHER; note = 2'-O-methyl modified nucleotide
  modified_base 92: mod_base = OTHER; note = 2'-O-methyl modified nucleotide
  modified_base 99: mod_base = OTHER; note = nucleotide with phosphorothioate linkage
  modified_base 100: mod_base = OTHER; note = 2'-O-methyl modified nucleotide with phosphorothioate linkage
  modified_base 101: mod_base = OTHER; note = 2'-O-methyl modified nucleotide

SEQ ID NO: 2615 - RNA, 101 nt, synthetic construct; identical to SEQ ID NO: 1615
  source 1..101: mol_type = other RNA
  modified_base 1: mod_base = OTHER; note = 2'-O-methyl modified nucleotide with phosphorothioate linkage
  modified_base 2: mod_base = OTHER; note = 2'-O-methyl modified nucleotide with phosphorothioate linkage
  modified_base 3: mod_base = OTHER; note = 2'-O-methyl modified nucleotide with phosphorothioate linkage
  modified_base 4: mod_base = OTHER; note = 2'-O-methyl modified nucleotide
  modified_base 5: mod_base = OTHER; note = 2'-O-methyl modified nucleotide
  modified_base 8: mod_base = OTHER; note = 2'-O-methyl modified nucleotide
  modified_base 9: mod_base = OTHER; note = 2'-O-methyl modified nucleotide
  modified_base 11: mod_base = OTHER; note = 2'-O-methyl modified nucleotide
  modified_base 13: mod_base = OTHER; note = 2'-O-methyl modified nucleotide
  modified_base 18: mod_base = OTHER; note = 2'-O-methyl modified nucleotide
  modified_base 22: mod_base = OTHER; note = 2'-O-methyl modified nucleotide
  modified_base 25: mod_base = OTHER; note = 2'-O-methyl modified nucleotide
  modified_base 29: mod_base = OTHER; note = 2'-O-methyl modified nucleotide
  modified_base 30: mod_base = OTHER; note = 2'-O-methyl modified nucleotide
  modified_base 31: mod_base = OTHER; note = 2'-O-methyl modified nucleotide
  modified_base 32: mod_base = OTHER; note = 2'-O-methyl modified nucleotide
  modified_base 37: mod_base = OTHER; note = 2'-O-methyl modified nucleotide
  modified_base 38: mod_base = OTHER; note = 2'-O-methyl modified nucleotide
  modified_base 39: mod_base = OTHER; note = 2'-O-methyl modified nucleotide
  modified_base 40: mod_base = OTHER; note = 2'-O-methyl modified nucleotide
  modified_base 41: mod_base = OTHER; note = 2'-O-methyl modified nucleotide
  modified_base 42: mod_base = OTHER; note = 2'-O-methyl modified nucleotide
  modified_base 43: mod_base = OTHER; note = 2'-O-methyl modified nucleotide
  modified_base 47: mod_base = OTHER; note = 2'-O-methyl modified nucleotide
  modified_base 48: mod_base = OTHER; note = 2'-O-methyl modified nucleotide
  modified_base 51: mod_base = OTHER; note = 2'-O-methyl modified nucleotide
  modified_base 54: mod_base = OTHER; note = nucleotide with phosphorothioate linkage
  modified_base 58: mod_base = OTHER; note = 2'-O-methyl modified nucleotide
  modified_base 59: mod_base = OTHER; note = 2'-O-methyl modified nucleotide
  modified_base 61: mod_base = OTHER; note = 2'-O-methyl modified nucleotide
  modified_base 62: mod_base = OTHER; note = 2'-O-methyl modified nucleotide
  modified_base 63: mod_base = OTHER; note = 2'-O-methyl modified nucleotide
  modified_base 64: mod_base = OTHER; note = 2'-O-methyl modified nucleotide
  modified_base 65: mod_base = OTHER; note = 2'-O-methyl modified nucleotide
  modified_base 66: mod_base = OTHER; note = 2'-O-methyl modified nucleotide
  modified_base 67: mod_base = OTHER; note = 2'-O-methyl modified nucleotide
  modified_base 68: mod_base = OTHER; note = 2'-O-methyl modified nucleotide
  modified_base 69: mod_base = OTHER; note = 2'-O-methyl modified nucleotide
  modified_base 70: mod_base = OTHER; note = 2'-O-methyl modified nucleotide
  modified_base 75: mod_base = OTHER; note = 2'-O-methyl modified nucleotide
  modified_base 77: mod_base = OTHER; note = 2'-O-methyl modified nucleotide
  modified_base 80: mod_base = OTHER; note = 2'-O-methyl modified nucleotide
  modified_base 86: mod_base = OTHER; note = 2'-O-methyl modified nucleotide
  modified_base 87: mod_base = OTHER; note = 2'-O-methyl modified nucleotide
  modified_base 89: mod_base = OTHER; note = 2'-O-methyl modified nucleotide
  modified_base 90: mod_base = OTHER; note = 2'-O-methyl modified nucleotide
  modified_base 91: mod_base = OTHER; note = 2'-O-methyl modified nucleotide
  modified_base 92: mod_base = OTHER; note = 2'-O-methyl modified nucleotide
  modified_base 99: mod_base = OTHER; note = nucleotide with phosphorothioate linkage
  modified_base 100: mod_base = OTHER; note = 2'-O-methyl modified nucleotide with phosphorothioate linkage
  modified_base 101: mod_base = OTHER; note = 2'-O-methyl modified nucleotide

SEQ ID NO: 2616 - RNA, 101 nt, synthetic construct; identical to SEQ ID NO: 1616
  source 1..101: mol_type = other RNA
  modified_base 1: mod_base = OTHER; note = 2'-O-methyl modified nucleotide with phosphorothioate linkage
  modified_base 2: mod_base = OTHER; note = 2'-O-methyl modified nucleotide with phosphorothioate linkage
  modified_base 3: mod_base = OTHER; note = 2'-O-methyl modified nucleotide with phosphorothioate linkage
  modified_base 4: mod_base = OTHER; note = 2'-O-methyl modified nucleotide
  modified_base 5: mod_base = OTHER; note = 2'-O-methyl modified nucleotide
  modified_base 8: mod_base = OTHER; note = 2'-O-methyl modified nucleotide
  modified_base 9: mod_base = OTHER; note = 2'-O-methyl modified nucleotide
  modified_base 11: mod_base = OTHER; note = 2'-O-methyl modified nucleotide
  modified_base 13: mod_base = OTHER; note = 2'-O-methyl modified nucleotide
  modified_base 18: mod_base = OTHER; note = 2'-O-methyl modified nucleotide
  modified_base 22: mod_base = OTHER; note = 2'-O-methyl modified nucleotide
  modified_base 25: mod_base = OTHER; note = 2'-O-methyl modified nucleotide
  modified_base 29: mod_base = OTHER; note = 2'-O-methyl modified nucleotide
  modified_base 30: mod_base = OTHER; note = 2'-O-methyl modified nucleotide
  modified_base 31: mod_base = OTHER; note = 2'-O-methyl modified nucleotide
  modified_base 32: mod_base = OTHER; note = 2'-O-methyl modified nucleotide
  modified_base 37: mod_base = OTHER; note = 2'-O-methyl modified nucleotide
  modified_base 38: mod_base = OTHER; note = 2'-O-methyl modified nucleotide
  modified_base 39: mod_base = OTHER; note = 2'-O-methyl modified nucleotide
  modified_base 40: mod_base = OTHER; note = 2'-O-methyl modified nucleotide
  modified_base 41: mod_base = OTHER; note = 2'-O-methyl modified nucleotide
  modified_base 42: mod_base = OTHER; note = 2'-O-methyl modified nucleotide
  modified_base 43: mod_base = OTHER; note = 2'-O-methyl modified nucleotide
  modified_base 47: mod_base = OTHER; note = 2'-O-methyl modified nucleotide
  modified_base 48: mod_base = OTHER; note = 2'-O-methyl modified nucleotide
  modified_base 51: mod_base = OTHER; note = 2'-O-methyl modified nucleotide
  modified_base 54: mod_base = OTHER; note = nucleotide with phosphorothioate linkage
  modified_base 58: mod_base = OTHER; note = 2'-O-methyl modified nucleotide
  modified_base 59: mod_base = OTHER; note = 2'-O-methyl modified nucleotide
  modified_base 61: mod_base = OTHER; note = 2'-O-methyl modified nucleotide
  modified_base 62: mod_base = OTHER; note = 2'-O-methyl modified nucleotide
  modified_base 63: mod_base = OTHER; note = 2'-O-methyl modified nucleotide
  modified_base 64: mod_base = OTHER; note = 2'-O-methyl modified nucleotide
  modified_base 65: mod_base = OTHER; note = 2'-O-methyl modified nucleotide
  modified_base 66: mod_base = OTHER; note = 2'-O-methyl modified nucleotide
  modified_base 67: mod_base = OTHER; note = 2'-O-methyl modified nucleotide
  modified_base 68: mod_base = OTHER; note = 2'-O-methyl modified nucleotide
  modified_base 69: mod_base = OTHER; note = 2'-O-methyl modified nucleotide
  modified_base 70: mod_base = OTHER; note = 2'-O-methyl modified nucleotide
  modified_base 75: mod_base = OTHER; note = 2'-O-methyl modified nucleotide
  modified_base 77: mod_base = OTHER; note = 2'-O-methyl modified nucleotide
  modified_base 80: mod_base = OTHER; note = 2'-O-methyl modified nucleotide
  modified_base 86: mod_base = OTHER; note = 2'-O-methyl modified nucleotide
  modified_base 87: mod_base = OTHER; note = 2'-O-methyl modified nucleotide
  modified_base 89: mod_base = OTHER; note = 2'-O-methyl modified nucleotide
  modified_base 90: mod_base = OTHER; note = 2'-O-methyl modified nucleotide
  modified_base 91: mod_base = OTHER; note = 2'-O-methyl modified nucleotide
  modified_base 92: mod_base = OTHER; note = 2'-O-methyl modified nucleotide
  modified_base 99: mod_base = OTHER; note = nucleotide with phosphorothioate linkage
  modified_base 100: mod_base = OTHER; note = 2'-O-methyl modified nucleotide with phosphorothioate linkage
  modified_base 101: mod_base = OTHER; note = 2'-O-methyl modified nucleotide

SEQ ID NO: 2617 - RNA, 101 nt, synthetic construct; identical to SEQ ID NO: 1617
  source 1..101: mol_type = other RNA
  modified_base 1: mod_base = OTHER; note = 2'-O-methyl modified nucleotide with phosphorothioate linkage
  modified_base 2: mod_base = OTHER; note = 2'-O-methyl modified nucleotide with phosphorothioate linkage
  modified_base 3: mod_base = OTHER; note = 2'-O-methyl modified nucleotide with phosphorothioate linkage
  modified_base 4: mod_base = OTHER; note = 2'-O-methyl modified nucleotide
  modified_base 5: mod_base = OTHER; note = 2'-O-methyl modified nucleotide
  modified_base 8: mod_base = OTHER; note = 2'-O-methyl modified nucleotide
  modified_base 9: mod_base = OTHER; note = 2'-O-methyl modified nucleotide
  modified_base 11: mod_base = OTHER; note = 2'-O-methyl modified nucleotide
  modified_base 13: mod_base = OTHER; note = 2'-O-methyl modified nucleotide
  modified_base 18: mod_base = OTHER; note = 2'-O-methyl modified nucleotide
  modified_base 22: mod_base = OTHER; note = 2'-O-methyl modified nucleotide
  modified_base 25: mod_base = OTHER; note = 2'-O-methyl modified nucleotide
  modified_base 29: mod_base = OTHER; note = 2'-O-methyl modified nucleotide
  modified_base 30: mod_base = OTHER; note = 2'-O-methyl modified nucleotide
  modified_base 31: mod_base = OTHER; note = 2'-O-methyl modified nucleotide
  modified_base 32: mod_base = OTHER; note = 2'-O-methyl modified nucleotide
  modified_base 37: mod_base = OTHER; note = 2'-O-methyl modified nucleotide
  modified_base 38: mod_base = OTHER; note = 2'-O-methyl modified nucleotide
  modified_base 39: mod_base = OTHER; note = 2'-O-methyl modified nucleotide
  modified_base 40: mod_base = OTHER; note = 2'-O-methyl modified nucleotide
  modified_base 41: mod_base = OTHER; note = 2'-O-methyl modified nucleotide
  modified_base 42: mod_base = OTHER; note = 2'-O-methyl modified nucleotide
  modified_base 43: mod_base = OTHER; note = 2'-O-methyl modified nucleotide
  modified_base 47: mod_base = OTHER; note = 2'-O-methyl modified nucleotide
  modified_base 48: mod_base = OTHER; note = 2'-O-methyl modified nucleotide
  modified_base 51: mod_base = OTHER; note = 2'-O-methyl modified nucleotide
  modified_base 54: mod_base = OTHER; note = nucleotide with phosphorothioate linkage
  modified_base 58: mod_base = OTHER; note = 2'-O-methyl modified nucleotide
  modified_base 59: mod_base = OTHER; note = 2'-O-methyl modified nucleotide
  modified_base 61: mod_base = OTHER; note = 2'-O-methyl modified nucleotide
  modified_base 62: mod_base = OTHER; note = 2'-O-methyl modified nucleotide
  modified_base 63: mod_base = OTHER; note = 2'-O-methyl modified nucleotide
  modified_base 64: mod_base = OTHER; note = 2'-O-methyl modified nucleotide
  modified_base 65: mod_base = OTHER; note = 2'-O-methyl modified nucleotide
  modified_base 66: mod_base = OTHER; note = 2'-O-methyl modified nucleotide
  modified_base 67: mod_base = OTHER; note = 2'-O-methyl modified nucleotide
  modified_base 68: mod_base = OTHER; note = 2'-O-methyl modified nucleotide
  modified_base 69: mod_base = OTHER; note = 2'-O-methyl modified nucleotide
  modified_base 70: mod_base = OTHER; note = 2'-O-methyl modified nucleotide
  modified_base 75: mod_base = OTHER; note = 2'-O-methyl modified nucleotide
  modified_base 77: mod_base = OTHER; note = 2'-O-methyl modified nucleotide
  modified_base 80: mod_base = OTHER; note = 2'-O-methyl modified nucleotide
  modified_base 86: mod_base = OTHER; note = 2'-O-methyl modified nucleotide
  modified_base 87: mod_base = OTHER; note = 2'-O-methyl modified nucleotide
  modified_base 89: mod_base = OTHER; note = 2'-O-methyl modified nucleotide
  modified_base 90: mod_base = OTHER; note = 2'-O-methyl modified nucleotide
  modified_base 91: mod_base = OTHER; note = 2'-O-methyl modified nucleotide
  modified_base 92: mod_base = OTHER; note = 2'-O-methyl modified nucleotide
  modified_base 99: mod_base = OTHER; note = nucleotide with phosphorothioate linkage
  modified_base 100: mod_base = OTHER; note = 2'-O-methyl modified nucleotide with phosphorothioate linkage
  modified_base 101: mod_base = OTHER; note = 2'-O-methyl modified nucleotide

SEQ ID NO: 2618 - RNA, 101 nt, synthetic construct; identical to SEQ ID NO: 1618
  source 1..101: mol_type = other RNA
  modified_base 1: mod_base = OTHER; note = 2'-O-methyl modified nucleotide with phosphorothioate linkage
  modified_base 2: mod_base = OTHER; note = 2'-O-methyl modified nucleotide with phosphorothioate linkage
  modified_base 3: mod_base = OTHER; note = 2'-O-methyl modified nucleotide with phosphorothioate linkage
  modified_base 4: mod_base = OTHER; note = 2'-O-methyl modified nucleotide
  modified_base 5: mod_base = OTHER; note = 2'-O-methyl modified nucleotide
  modified_base 8: mod_base = OTHER; note = 2'-O-methyl modified nucleotide
  modified_base 9: mod_base = OTHER; note = 2'-O-methyl modified nucleotide
  modified_base 11: mod_base = OTHER; note = 2'-O-methyl modified nucleotide
  modified_base 13: mod_base = OTHER; note = 2'-O-methyl modified nucleotide
  modified_base 18: mod_base = OTHER; note = 2'-O-methyl modified nucleotide
  modified_base 22: mod_base = OTHER; note = 2'-O-methyl modified nucleotide
  modified_base 25: mod_base = OTHER; note = 2'-O-methyl modified nucleotide
  modified_base 29: mod_base = OTHER; note = 2'-O-methyl modified nucleotide
  modified_base 30: mod_base = OTHER; note = 2'-O-methyl modified nucleotide
  modified_base 31: mod_base = OTHER; note = 2'-O-methyl modified nucleotide
  modified_base 32: mod_base = OTHER; note = 2'-O-methyl modified nucleotide
  modified_base 37: mod_base = OTHER; note = 2'-O-methyl modified nucleotide
  modified_base 38: mod_base = OTHER; note = 2'-O-methyl modified nucleotide
  modified_base 39: mod_base = OTHER; note = 2'-O-methyl modified nucleotide
  modified_base 40: mod_base = OTHER; note = 2'-O-methyl modified nucleotide
  modified_base 41: mod_base = OTHER; note = 2'-O-methyl modified nucleotide
  modified_base 42: mod_base = OTHER; note = 2'-O-methyl modified nucleotide
  modified_base 43: mod_base = OTHER; note = 2'-O-methyl modified nucleotide
  modified_base 47: mod_base = OTHER; note = 2'-O-methyl modified nucleotide
  modified_base 48: mod_base = OTHER; note = 2'-O-methyl modified nucleotide
  modified_base 51: mod_base = OTHER; note = 2'-O-methyl modified nucleotide
  modified_base 54: mod_base = OTHER; note = nucleotide with phosphorothioate linkage
  modified_base 58: mod_base = OTHER; note = 2'-O-methyl modified nucleotide
  modified_base 59: mod_base = OTHER; note = 2'-O-methyl modified nucleotide
  modified_base 61: mod_base = OTHER; note = 2'-O-methyl modified nucleotide
  modified_base 62: mod_base = OTHER; note = 2'-O-methyl modified nucleotide
  modified_base 63: mod_base = OTHER; note = 2'-O-methyl modified nucleotide
  modified_base 64: mod_base = OTHER; note = 2'-O-methyl modified nucleotide
  modified_base 65: mod_base = OTHER; note = 2'-O-methyl modified nucleotide
  modified_base 66: mod_base = OTHER; note = 2'-O-methyl modified nucleotide
  modified_base 67: mod_base = OTHER; note = 2'-O-methyl modified nucleotide
  modified_base 68: mod_base = OTHER; note = 2'-O-methyl modified nucleotide
  modified_base 69: mod_base = OTHER; note = 2'-O-methyl modified nucleotide
  modified_base 70: mod_base = OTHER; note = 2'-O-methyl modified nucleotide
  modified_base 75: mod_base = OTHER; note = 2'-O-methyl modified nucleotide
  modified_base 77: mod_base = OTHER; note = 2'-O-methyl modified nucleotide
  modified_base 80: mod_base = OTHER; note = 2'-O-methyl modified nucleotide
  modified_base 86: mod_base = OTHER; note = 2'-O-methyl modified nucleotide
  modified_base 87: mod_base = OTHER; note = 2'-O-methyl modified nucleotide
  modified_base 89: mod_base = OTHER; note = 2'-O-methyl modified nucleotide
  modified_base 90: mod_base = OTHER; note = 2'-O-methyl modified nucleotide
  modified_base 91: mod_base = OTHER; note = 2'-O-methyl modified nucleotide
  modified_base 92: mod_base = OTHER; note = 2'-O-methyl modified nucleotide
  modified_base 99: mod_base = OTHER; note = nucleotide with phosphorothioate linkage
  modified_base 100: mod_base = OTHER; note = 2'-O-methyl modified nucleotide with phosphorothioate linkage
  modified_base 101: mod_base = OTHER; note = 2'-O-methyl modified nucleotide

SEQ ID NO: 2619 - RNA, 101 nt, synthetic construct; identical to SEQ ID NO: 1619
  source 1..101: mol_type = other RNA
  modified_base 1: mod_base = OTHER; note = 2'-O-methyl modified nucleotide with phosphorothioate linkage
  modified_base 2: mod_base = OTHER; note = 2'-O-methyl modified nucleotide with phosphorothioate linkage
  modified_base 3: mod_base = OTHER; note = 2'-O-methyl modified nucleotide with phosphorothioate linkage
  modified_base 4: mod_base = OTHER; note = 2'-O-methyl modified nucleotide
  modified_base 5: mod_base = OTHER; note = 2'-O-methyl modified nucleotide
  modified_base 8: mod_base = OTHER; note = 2'-O-methyl modified nucleotide
  modified_base 9: mod_base = OTHER; note = 2'-O-methyl modified nucleotide
  modified_base 11: mod_base = OTHER; note = 2'-O-methyl modified nucleotide
  modified_base 13: mod_base = OTHER; note = 2'-O-methyl modified nucleotide
  modified_base 18: mod_base = OTHER; note = 2'-O-methyl modified nucleotide
  modified_base 22: mod_base = OTHER; note = 2'-O-methyl modified nucleotide
  modified_base 25: mod_base = OTHER; note = 2'-O-methyl modified nucleotide
  modified_base 29: mod_base = OTHER; note = 2'-O-methyl modified nucleotide
  modified_base 30: mod_base = OTHER; note = 2'-O-methyl modified nucleotide
  modified_base 31: mod_base = OTHER; note = 2'-O-methyl modified nucleotide
  modified_base 32: mod_base = OTHER; note = 2'-O-methyl modified nucleotide
  modified_base 37: mod_base = OTHER; note = 2'-O-methyl modified nucleotide
  modified_base 38: mod_base = OTHER; note = 2'-O-methyl modified nucleotide
  modified_base 39: mod_base = OTHER; note = 2'-O-methyl modified nucleotide
  modified_base 40: mod_base = OTHER; note = 2'-O-methyl modified nucleotide
  modified_base 41: mod_base = OTHER; note = 2'-O-methyl modified nucleotide
  modified_base 42: mod_base = OTHER; note = 2'-O-methyl modified nucleotide
  modified_base 43: mod_base = OTHER; note = 2'-O-methyl modified nucleotide
  modified_base 47: mod_base = OTHER; note = 2'-O-methyl modified nucleotide
  modified_base 48: mod_base = OTHER; note = 2'-O-methyl modified nucleotide
  modified_base 51: mod_base = OTHER; note = 2'-O-methyl modified nucleotide
  modified_base 54: mod_base = OTHER; note = nucleotide with phosphorothioate linkage
  modified_base 58: mod_base = OTHER; note = 2'-O-methyl modified nucleotide
  modified_base 59: mod_base = OTHER; note = 2'-O-methyl modified nucleotide
  modified_base 61: mod_base = OTHER; note = 2'-O-methyl modified nucleotide
  modified_base 62: mod_base = OTHER; note = 2'-O-methyl modified nucleotide
  modified_base 63: mod_base = OTHER; note = 2'-O-methyl modified nucleotide
  modified_base 64: mod_base = OTHER; note = 2'-O-methyl modified nucleotide
  modified_base 65: mod_base = OTHER; note = 2'-O-methyl modified nucleotide
  modified_base 66: mod_base = OTHER; note = 2'-O-methyl modified nucleotide
  modified_base 67: mod_base = OTHER; note = 2'-O-methyl modified nucleotide
  modified_base 68: mod_base = OTHER; note = 2'-O-methyl modified nucleotide
  modified_base 69: mod_base = OTHER; note = 2'-O-methyl modified nucleotide
  modified_base 70: mod_base = OTHER; note = 2'-O-methyl modified nucleotide
  modified_base 75: mod_base = OTHER; note = 2'-O-methyl modified nucleotide
  modified_base 77: mod_base = OTHER; note = 2'-O-methyl modified nucleotide
  modified_base 80: mod_base = OTHER; note = 2'-O-methyl modified nucleotide
  modified_base 86: mod_base = OTHER; note = 2'-O-methyl modified nucleotide
  modified_base 87: mod_base = OTHER; note = 2'-O-methyl modified nucleotide
  modified_base 89: mod_base = OTHER; note = 2'-O-methyl modified nucleotide
  modified_base 90: mod_base = OTHER; note = 2'-O-methyl modified nucleotide
  modified_base 91: mod_base = OTHER; note = 2'-O-methyl modified nucleotide
  modified_base 92: mod_base = OTHER; note = 2'-O-methyl modified nucleotide
  modified_base 99: mod_base = OTHER; note = nucleotide with phosphorothioate linkage
  modified_base 100: mod_base = OTHER; note = 2'-O-methyl modified nucleotide with phosphorothioate linkage
  modified_base 101: mod_base = OTHER; note = 2'-O-methyl modified nucleotide

SEQ ID NO: 2620 - RNA, 101 nt, synthetic construct; identical to SEQ ID NO: 1620
  source 1..101: mol_type = other RNA
  modified_base 1: mod_base = OTHER; note = 2'-O-methyl modified nucleotide with phosphorothioate linkage
  modified_base 2: mod_base = OTHER; note = 2'-O-methyl modified nucleotide with phosphorothioate linkage
  modified_base 3: mod_base = OTHER; note = 2'-O-methyl modified nucleotide with phosphorothioate linkage
  modified_base 4: mod_base = OTHER; note = 2'-O-methyl modified nucleotide
  modified_base 5: mod_base = OTHER; note = 2'-O-methyl modified nucleotide
  modified_base 8: mod_base = OTHER; note = 2'-O-methyl modified nucleotide
  modified_base 9: mod_base = OTHER; note = 2'-O-methyl modified nucleotide
  modified_base 11: mod_base = OTHER; note = 2'-O-methyl modified nucleotide
  modified_base 13: mod_base = OTHER; note = 2'-O-methyl modified nucleotide
  modified_base 18: mod_base = OTHER; note = 2'-O-methyl modified nucleotide
  modified_base 22: mod_base = OTHER; note = 2'-O-methyl modified nucleotide
  modified_base 25: mod_base = OTHER; note = 2'-O-methyl modified nucleotide
  modified_base 29: mod_base = OTHER; note = 2'-O-methyl modified nucleotide
  modified_base 30: mod_base = OTHER; note = 2'-O-methyl modified nucleotide
  modified_base 31: mod_base = OTHER; note = 2'-O-methyl modified nucleotide
  modified_base 32: mod_base = OTHER; note = 2'-O-methyl modified nucleotide
  modified_base 37: mod_base = OTHER; note = 2'-O-methyl modified nucleotide
  modified_base 38: mod_base = OTHER; note = 2'-O-methyl modified nucleotide
  modified_base 39: mod_base = OTHER; note = 2'-O-methyl modified nucleotide
  modified_base 40: mod_base = OTHER; note = 2'-O-methyl modified nucleotide
  modified_base 41: mod_base = OTHER; note = 2'-O-methyl modified nucleotide
  modified_base 42: mod_base = OTHER; note = 2'-O-methyl modified nucleotide
  modified_base 43: mod_base = OTHER; note = 2'-O-methyl modified nucleotide
  modified_base 47: mod_base = OTHER; note = 2'-O-methyl modified nucleotide
  modified_base 48: mod_base = OTHER; note = 2'-O-methyl modified nucleotide
  modified_base 51: mod_base = OTHER; note = 2'-O-methyl modified nucleotide
  modified_base 54: mod_base = OTHER; note = nucleotide with phosphorothioate linkage
  modified_base 58: mod_base = OTHER; note = 2'-O-methyl modified nucleotide
  modified_base 59: mod_base = OTHER; note = 2'-O-methyl modified nucleotide
  modified_base 61: mod_base = OTHER; note = 2'-O-methyl modified nucleotide
  modified_base 62: mod_base = OTHER; note = 2'-O-methyl modified nucleotide
  modified_base 63: mod_base = OTHER; note = 2'-O-methyl modified nucleotide
  modified_base 64: mod_base = OTHER; note = 2'-O-methyl modified nucleotide
  modified_base 65: mod_base = OTHER; note = 2'-O-methyl modified nucleotide
  modified_base 66: mod_base = OTHER; note = 2'-O-methyl modified nucleotide
  modified_base 67: mod_base = OTHER; note = 2'-O-methyl modified nucleotide
  modified_base 68: mod_base = OTHER; note = 2'-O-methyl modified nucleotide
  modified_base 69: mod_base = OTHER; note = 2'-O-methyl modified nucleotide
  modified_base 70: mod_base = OTHER; note = 2'-O-methyl modified nucleotide
  modified_base 75: mod_base = OTHER; note = 2'-O-methyl modified nucleotide
  modified_base 77: mod_base = OTHER; note = 2'-O-methyl modified nucleotide
  modified_base 80: mod_base = OTHER; note = 2'-O-methyl modified nucleotide
  modified_base 86: mod_base = OTHER; note = 2'-O-methyl modified nucleotide
  modified_base 87: mod_base = OTHER; note = 2'-O-methyl modified nucleotide
  modified_base 89: mod_base = OTHER; note = 2'-O-methyl modified nucleotide
  modified_base 90: mod_base = OTHER; note = 2'-O-methyl modified nucleotide
  modified_base 91: mod_base = OTHER; note = 2'-O-methyl modified nucleotide
  modified_base 92: mod_base = OTHER; note = 2'-O-methyl modified nucleotide
  modified_base 99: mod_base = OTHER; note = nucleotide with phosphorothioate linkage
  modified_base 100: mod_base = OTHER; note = 2'-O-methyl modified nucleotide with phosphorothioate linkage
  modified_base 101: mod_base = OTHER; note = 2'-O-methyl modified nucleotide

SEQ ID NO: 2621 - RNA, 101 nt, synthetic construct; identical to SEQ ID NO: 1621
  source 1..101: mol_type = other RNA
  modified_base 1: mod_base = OTHER; note = 2'-O-methyl modified nucleotide with phosphorothioate linkage
  modified_base 2: mod_base = OTHER; note = 2'-O-methyl modified nucleotide with phosphorothioate linkage
  modified_base 3: mod_base = OTHER; note = 2'-O-methyl modified nucleotide with phosphorothioate linkage
  modified_base 4: mod_base = OTHER; note = 2'-O-methyl modified nucleotide
  modified_base 5: mod_base = OTHER; note = 2'-O-methyl modified nucleotide
  modified_base 8: mod_base = OTHER; note = 2'-O-methyl modified nucleotide
  modified_base 9: mod_base = OTHER; note = 2'-O-methyl modified nucleotide
  modified_base 11: mod_base = OTHER; note = 2'-O-methyl modified nucleotide
  modified_base 13: mod_base = OTHER; note = 2'-O-methyl modified nucleotide
  modified_base 18: mod_base = OTHER; note = 2'-O-methyl modified nucleotide
  modified_base 22: mod_base = OTHER; note = 2'-O-methyl modified nucleotide
  modified_base 25: mod_base = OTHER; note = 2'-O-methyl modified nucleotide
  modified_base 29: mod_base = OTHER; note = 2'-O-methyl modified nucleotide
  modified_base 30: mod_base = OTHER; note = 2'-O-methyl modified nucleotide
  modified_base 31: mod_base = OTHER; note = 2'-O-methyl modified nucleotide
  modified_base 32: mod_base = OTHER; note = 2'-O-methyl modified nucleotide
  modified_base 37: mod_base = OTHER; note = 2'-O-methyl modified nucleotide
  modified_base 38: mod_base = OTHER; note = 2'-O-methyl modified nucleotide
  modified_base 39: mod_base = OTHER; note = 2'-O-methyl modified nucleotide
  modified_base 40: mod_base = OTHER; note = 2'-O-methyl modified nucleotide
  modified_base 41: mod_base = OTHER; note = 2'-O-methyl modified nucleotide
  modified_base 42: mod_base = OTHER; note = 2'-O-methyl modified nucleotide
  modified_base 43: mod_base = OTHER; note = 2'-O-methyl modified nucleotide
  modified_base 47: mod_base = OTHER; note = 2'-O-methyl modified nucleotide
  modified_base 48: mod_base = OTHER; note = 2'-O-methyl modified nucleotide
  modified_base 51: mod_base = OTHER; note = 2'-O-methyl modified nucleotide
  modified_base 54: mod_base = OTHER; note = nucleotide with phosphorothioate linkage
  modified_base 58: mod_base = OTHER; note = 2'-O-methyl modified nucleotide
  modified_base 59: mod_base = OTHER; note = 2'-O-methyl modified nucleotide
  modified_base 61: mod_base = OTHER; note = 2'-O-methyl modified nucleotide
  modified_base 62: mod_base = OTHER; note = 2'-O-methyl modified nucleotide
  modified_base 63: mod_base = OTHER; note = 2'-O-methyl modified nucleotide
  modified_base 64: mod_base = OTHER; note = 2'-O-methyl modified nucleotide
  modified_base 65: mod_base = OTHER; note = 2'-O-methyl modified nucleotide
  modified_base 66: mod_base = OTHER; note = 2'-O-methyl modified nucleotide
  modified_base 67: mod_base = OTHER; note = 2'-O-methyl modified nucleotide
  modified_base 68: mod_base = OTHER; note = 2'-O-methyl modified nucleotide
  modified_base 69: mod_base = OTHER; note = 2'-O-methyl modified nucleotide
  modified_base 70: mod_base = OTHER; note = 2'-O-methyl modified nucleotide
  modified_base 75: mod_base = OTHER; note = 2'-O-methyl modified nucleotide
  modified_base 77: mod_base = OTHER; note = 2'-O-methyl modified nucleotide
  modified_base 80: mod_base = OTHER; note = 2'-O-methyl modified nucleotide
  modified_base 86: mod_base = OTHER; note = 2'-O-methyl modified nucleotide
  modified_base 87: mod_base = OTHER; note = 2'-O-methyl modified nucleotide
  modified_base 89: mod_base = OTHER; note = 2'-O-methyl modified nucleotide
  modified_base 90: mod_base = OTHER; note = 2'-O-methyl modified nucleotide
  modified_base 91: mod_base = OTHER; note = 2'-O-methyl modified nucleotide
  modified_base 92: mod_base = OTHER; note = 2'-O-methyl modified nucleotide
  modified_base 99: mod_base = OTHER; note = nucleotide with phosphorothioate linkage
  modified_base 100: mod_base = OTHER; note = 2'-O-methyl modified nucleotide with phosphorothioate linkage
  modified_base 101: mod_base = OTHER; note = 2'-O-methyl modified nucleotide

SEQ ID NO: 2622 - RNA, 101 nt, synthetic construct; identical to SEQ ID NO: 1622
  source 1..101: mol_type = other RNA
  modified_base 1: mod_base = OTHER; note = 2'-O-methyl modified nucleotide with phosphorothioate linkage
  modified_base 2: mod_base = OTHER; note = 2'-O-methyl modified nucleotide with phosphorothioate linkage
  modified_base 3: mod_base = OTHER; note = 2'-O-methyl modified nucleotide with phosphorothioate linkage
  modified_base 4: mod_base = OTHER; note = 2'-O-methyl modified nucleotide
  modified_base 5: mod_base = OTHER; note = 2'-O-methyl modified nucleotide
  modified_base 8: mod_base = OTHER; note = 2'-O-methyl modified nucleotide
  modified_base 9: mod_base = OTHER; note = 2'-O-methyl modified nucleotide
  modified_base 11: mod_base = OTHER; note = 2'-O-methyl modified nucleotide
  modified_base 13: mod_base = OTHER; note = 2'-O-methyl modified nucleotide
  modified_base 18: mod_base = OTHER; note = 2'-O-methyl modified nucleotide
  modified_base 22: mod_base = OTHER; note = 2'-O-methyl modified nucleotide
  modified_base 25: mod_base = OTHER; note = 2'-O-methyl modified nucleotide
  modified_base 29: mod_base = OTHER; note = 2'-O-methyl modified nucleotide
  modified_base 30: mod_base = OTHER; note = 2'-O-methyl modified nucleotide
  modified_base 31: mod_base = OTHER; note = 2'-O-methyl modified nucleotide
  modified_base 32: mod_base = OTHER; note = 2'-O-methyl modified nucleotide
  modified_base 37: mod_base = OTHER; note = 2'-O-methyl modified nucleotide
  modified_base 38: mod_base = OTHER; note = 2'-O-methyl modified nucleotide
  modified_base 39: mod_base = OTHER; note = 2'-O-methyl modified nucleotide
  modified_base 40: mod_base = OTHER; note = 2'-O-methyl modified nucleotide
  modified_base 41: mod_base = OTHER; note = 2'-O-methyl modified nucleotide
  modified_base 42: mod_base = OTHER; note = 2'-O-methyl modified nucleotide
  modified_base 43: mod_base = OTHER; note = 2'-O-methyl modified nucleotide
  modified_base 47: mod_base = OTHER; note = 2'-O-methyl modified nucleotide
  modified_base 48: mod_base = OTHER; note = 2'-O-methyl modified nucleotide
  modified_base 51: mod_base = OTHER; note = 2'-O-methyl modified nucleotide
  modified_base 54: mod_base = OTHER; note = nucleotide with phosphorothioate linkage
  modified_base 58: mod_base = OTHER; note = 2'-O-methyl modified nucleotide
  modified_base 59: mod_base = OTHER; note = 2'-O-methyl modified nucleotide
  modified_base 61: mod_base = OTHER; note = 2'-O-methyl modified nucleotide
  modified_base 62: mod_base = OTHER; note = 2'-O-methyl modified nucleotide
  modified_base 63: mod_base = OTHER; note = 2'-O-methyl modified nucleotide
  modified_base 64: mod_base = OTHER; note = 2'-O-methyl modified nucleotide
  modified_base 65: mod_base = OTHER; note = 2'-O-methyl modified nucleotide
  modified_base 66: mod_base = OTHER; note = 2'-O-methyl modified nucleotide
  modified_base 67: mod_base = OTHER; note = 2'-O-methyl modified nucleotide
  modified_base 68: mod_base = OTHER; note = 2'-O-methyl modified nucleotide
  modified_base 69: mod_base = OTHER; note = 2'-O-methyl modified nucleotide
  modified_base 70: mod_base = OTHER; note = 2'-O-methyl modified nucleotide
  modified_base 75: mod_base = OTHER; note = 2'-O-methyl modified nucleotide
  modified_base 77: mod_base = OTHER; note = 2'-O-methyl modified nucleotide
  modified_base 80: mod_base = OTHER; note = 2'-O-methyl modified nucleotide
  modified_base 86: mod_base = OTHER; note = 2'-O-methyl modified nucleotide
  modified_base 87: mod_base = OTHER; note = 2'-O-methyl modified nucleotide
  modified_base 89: mod_base = OTHER; note = 2'-O-methyl modified nucleotide
  modified_base 90: mod_base = OTHER; note = 2'-O-methyl modified nucleotide
  modified_base 91: mod_base = OTHER; note = 2'-O-methyl modified nucleotide
  modified_base 92: mod_base = OTHER; note = 2'-O-methyl modified nucleotide
  modified_base 99: mod_base = OTHER; note = nucleotide with phosphorothioate linkage
  modified_base 100: mod_base = OTHER; note = 2'-O-methyl modified nucleotide with phosphorothioate linkage
  modified_base 101: mod_base = OTHER; note = 2'-O-methyl modified nucleotide

SEQ ID NO: 2623 - RNA, 101 nt, synthetic construct; identical to SEQ ID NO: 1623
  source 1..101: mol_type = other RNA
  modified_base 1: mod_base = OTHER; note = 2'-O-methyl modified nucleotide with phosphorothioate linkage
  modified_base 2: mod_base = OTHER; note = 2'-O-methyl modified nucleotide with phosphorothioate linkage
  modified_base 3: mod_base = OTHER; note = 2'-O-methyl modified nucleotide with phosphorothioate linkage
  modified_base 4: mod_base = OTHER; note = 2'-O-methyl modified nucleotide
  modified_base 5: mod_base = OTHER; note = 2'-O-methyl modified nucleotide
  modified_base 8: mod_base = OTHER; note = 2'-O-methyl modified nucleotide
  modified_base 9: mod_base = OTHER; note = 2'-O-methyl modified nucleotide
  modified_base 11: mod_base = OTHER; note = 2'-O-methyl modified nucleotide
  modified_base 13: mod_base = OTHER; note = 2'-O-methyl modified nucleotide
  modified_base 18: mod_base = OTHER; note = 2'-O-methyl modified nucleotide
  modified_base 22: mod_base = OTHER; note = 2'-O-methyl modified nucleotide
  modified_base 25: mod_base = OTHER; note = 2'-O-methyl modified nucleotide
  modified_base 29: mod_base = OTHER; note = 2'-O-methyl modified nucleotide
  modified_base 30: mod_base = OTHER; note = 2'-O-methyl modified nucleotide
  modified_base 31: mod_base = OTHER; note = 2'-O-methyl modified nucleotide
  modified_base 32: mod_base = OTHER; note = 2'-O-methyl modified nucleotide
  modified_base 37: mod_base = OTHER; note = 2'-O-methyl modified nucleotide
  modified_base 38: mod_base = OTHER; note = 2'-O-methyl modified nucleotide
  modified_base 39: mod_base = OTHER; note = 2'-O-methyl modified nucleotide
  modified_base 40: mod_base = OTHER; note = 2'-O-methyl modified nucleotide
  modified_base 41: mod_base = OTHER; note = 2'-O-methyl modified nucleotide
  modified_base 42: mod_base = OTHER; note = 2'-O-methyl modified nucleotide
  modified_base 43: mod_base = OTHER; note = 2'-O-methyl modified nucleotide
  modified_base 47: mod_base = OTHER; note = 2'-O-methyl modified nucleotide
  modified_base 48: mod_base = OTHER; note = 2'-O-methyl modified nucleotide
  modified_base 51: mod_base = OTHER; note = 2'-O-methyl modified nucleotide
  modified_base 54: mod_base = OTHER; note = nucleotide with phosphorothioate linkage
  modified_base 58: mod_base = OTHER; note = 2'-O-methyl modified nucleotide
  modified_base 59: mod_base = OTHER; note = 2'-O-methyl modified nucleotide
  modified_base 61: mod_base = OTHER; note = 2'-O-methyl modified nucleotide
  modified_base 62: mod_base = OTHER; note = 2'-O-methyl modified nucleotide
  modified_base 63: mod_base = OTHER; note = 2'-O-methyl modified nucleotide
  modified_base 64: mod_base = OTHER; note = 2'-O-methyl modified nucleotide
  modified_base 65: mod_base = OTHER; note = 2'-O-methyl modified nucleotide
  modified_base 66: mod_base = OTHER; note = 2'-O-methyl modified nucleotide
  modified_base 67: mod_base = OTHER; note = 2'-O-methyl modified nucleotide
  modified_base 68: mod_base = OTHER; note = 2'-O-methyl modified nucleotide
  modified_base 69: mod_base = OTHER; note = 2'-O-methyl modified nucleotide
  modified_base 70: mod_base = OTHER; note = 2'-O-methyl modified nucleotide
  modified_base 75: mod_base = OTHER; note = 2'-O-methyl modified nucleotide
  modified_base 77: mod_base = OTHER; note = 2'-O-methyl modified nucleotide
  modified_base 80: mod_base = OTHER; note = 2'-O-methyl modified nucleotide
  modified_base 86: mod_base = OTHER; note = 2'-O-methyl modified nucleotide
  modified_base 87: mod_base = OTHER; note = 2'-O-methyl modified nucleotide
  modified_base 89: mod_base = OTHER; note = 2'-O-methyl modified nucleotide
  modified_base 90: mod_base = OTHER; note = 2'-O-methyl modified nucleotide
  modified_base 91: mod_base = OTHER; note = 2'-O-methyl modified nucleotide
  modified_base 92: mod_base = OTHER; note = 2'-O-methyl modified nucleotide
  modified_base 99: mod_base = OTHER; note = nucleotide with phosphorothioate linkage
  modified_base 100: mod_base = OTHER; note = 2'-O-methyl modified nucleotide with phosphorothioate linkage
  modified_base 101: mod_base = OTHER; note = 2'-O-methyl modified nucleotide

SEQ ID NO: 2624 - RNA, 101 nt, synthetic construct; identical to SEQ ID NO: 1624
  source 1..101: mol_type = other RNA
  modified_base 1: mod_base = OTHER; note = 2'-O-methyl modified nucleotide with phosphorothioate linkage
  modified_base 2: mod_base = OTHER; note = 2'-O-methyl modified nucleotide with phosphorothioate linkage
  modified_base 3: mod_base = OTHER; note = 2'-O-methyl modified nucleotide with phosphorothioate linkage
  modified_base 4: mod_base = OTHER; note = 2'-O-methyl modified nucleotide
  modified_base 5: mod_base = OTHER; note = 2'-O-methyl modified nucleotide
  modified_base 8: mod_base = OTHER; note = 2'-O-methyl modified nucleotide
  modified_base 9: mod_base = OTHER; note = 2'-O-methyl modified nucleotide
  modified_base 11: mod_base = OTHER; note = 2'-O-methyl modified nucleotide
  modified_base 13: mod_base = OTHER; note = 2'-O-methyl modified nucleotide
  modified_base 18: mod_base = OTHER; note = 2'-O-methyl modified nucleotide
  modified_base 22: mod_base = OTHER; note = 2'-O-methyl modified nucleotide
  modified_base 25: mod_base = OTHER; note = 2'-O-methyl modified nucleotide
  modified_base 29: mod_base = OTHER; note = 2'-O-methyl modified nucleotide
  modified_base 30: mod_base = OTHER; note = 2'-O-methyl modified nucleotide
  modified_base 31: mod_base = OTHER; note = 2'-O-methyl modified nucleotide
  modified_base 32: mod_base = OTHER; note = 2'-O-methyl modified nucleotide
  modified_base 37: mod_base = OTHER; note = 2'-O-methyl modified nucleotide
  modified_base 38: mod_base = OTHER; note = 2'-O-methyl modified nucleotide
  modified_base 39: mod_base = OTHER; note = 2'-O-methyl modified nucleotide
  modified_base 40: mod_base = OTHER; note = 2'-O-methyl modified nucleotide
  modified_base 41: mod_base = OTHER; note = 2'-O-methyl modified nucleotide
  modified_base 42: mod_base = OTHER; note = 2'-O-methyl modified nucleotide
  modified_base 43: mod_base = OTHER; note = 2'-O-methyl modified nucleotide
  modified_base 47: mod_base = OTHER; note = 2'-O-methyl modified nucleotide
  modified_base 48: mod_base = OTHER; note = 2'-O-methyl modified nucleotide
  modified_base 51: mod_base = OTHER; note = 2'-O-methyl modified nucleotide
  modified_base 54: mod_base = OTHER; note = nucleotide with phosphorothioate linkage
  modified_base 58: mod_base = OTHER; note = 2'-O-methyl modified nucleotide
  modified_base 59: mod_base = OTHER; note = 2'-O-methyl modified nucleotide
  modified_base 61: mod_base = OTHER; note = 2'-O-methyl modified nucleotide
  modified_base 62: mod_base = OTHER; note = 2'-O-methyl modified nucleotide
  modified_base 63: mod_base = OTHER; note = 2'-O-methyl modified nucleotide
  modified_base 64: mod_base = OTHER; note = 2'-O-methyl modified nucleotide
  modified_base 65: mod_base = OTHER; note = 2'-O-methyl modified nucleotide
  modified_base 66: mod_base = OTHER; note = 2'-O-methyl modified nucleotide
  modified_base 67: mod_base = OTHER; note = 2'-O-methyl modified nucleotide
  modified_base 68: mod_base = OTHER; note = 2'-O-methyl modified nucleotide
  modified_base 69: mod_base = OTHER; note = 2'-O-methyl modified nucleotide
  modified_base 70: mod_base = OTHER; note = 2'-O-methyl modified nucleotide
  modified_base 75: mod_base = OTHER; note = 2'-O-methyl modified nucleotide
  modified_base 77: mod_base = OTHER; note = 2'-O-methyl modified nucleotide
  modified_base 80: mod_base = OTHER; note = 2'-O-methyl modified nucleotide
  modified_base 86: mod_base = OTHER; note = 2'-O-methyl modified nucleotide
  modified_base 87: mod_base = OTHER; note = 2'-O-methyl modified nucleotide
  modified_base 89: mod_base = OTHER; note = 2'-O-methyl modified nucleotide
  modified_base 90: mod_base = OTHER; note = 2'-O-methyl modified nucleotide
  modified_base 91: mod_base = OTHER; note = 2'-O-methyl modified nucleotide
  modified_base 92: mod_base = OTHER; note = 2'-O-methyl modified nucleotide
  modified_base 99: mod_base = OTHER; note = nucleotide with phosphorothioate linkage
  modified_base 100: mod_base = OTHER; note = 2'-O-methyl modified nucleotide with phosphorothioate linkage
  modified_base 101: mod_base = OTHER; note = 2'-O-methyl modified nucleotide

SEQ ID NO: 2625 - RNA, 101 nt, synthetic construct; identical to SEQ ID NO: 1625
  source 1..101: mol_type = other RNA
  modified_base 1: mod_base = OTHER; note = 2'-O-methyl modified nucleotide with phosphorothioate linkage
  modified_base 2: mod_base = OTHER; note = 2'-O-methyl modified nucleotide with phosphorothioate linkage
  modified_base 3: mod_base = OTHER; note = 2'-O-methyl modified nucleotide with phosphorothioate linkage
  modified_base 4: mod_base = OTHER; note = 2'-O-methyl modified nucleotide
  modified_base 5: mod_base = OTHER; note = 2'-O-methyl modified nucleotide
  modified_base 8: mod_base = OTHER; note = 2'-O-methyl modified nucleotide
  modified_base 9: mod_base = OTHER; note = 2'-O-methyl modified nucleotide
  modified_base 11: mod_base = OTHER; note = 2'-O-methyl modified nucleotide
  modified_base 13: mod_base = OTHER; note = 2'-O-methyl modified nucleotide
  modified_base 18: mod_base = OTHER; note = 2'-O-methyl modified nucleotide
  modified_base 22: mod_base = OTHER; note = 2'-O-methyl modified nucleotide
  modified_base 25: mod_base = OTHER; note = 2'-O-methyl modified nucleotide
  modified_base 29: mod_base = OTHER; note = 2'-O-methyl modified nucleotide
  modified_base 30: mod_base = OTHER; note = 2'-O-methyl modified nucleotide
  modified_base 31: mod_base = OTHER; note = 2'-O-methyl modified nucleotide
  modified_base 32: mod_base = OTHER; note = 2'-O-methyl modified nucleotide
  modified_base 37: mod_base = OTHER; note = 2'-O-methyl modified nucleotide
  modified_base 38: mod_base = OTHER; note = 2'-O-methyl modified nucleotide
  modified_base 39: mod_base = OTHER; note = 2'-O-methyl modified nucleotide
  modified_base 40: mod_base = OTHER; note = 2'-O-methyl modified nucleotide
  modified_base 41: mod_base = OTHER; note = 2'-O-methyl modified nucleotide
  modified_base 42: mod_base = OTHER; note = 2'-O-methyl modified nucleotide
  modified_base 43: mod_base = OTHER; note = 2'-O-methyl modified nucleotide
  modified_base 47: mod_base = OTHER; note = 2'-O-methyl modified nucleotide
  modified_base 48: mod_base = OTHER; note = 2'-O-methyl modified nucleotide
  modified_base 51: mod_base = OTHER; note = 2'-O-methyl modified nucleotide
  modified_base 54: mod_base = OTHER; note = nucleotide with phosphorothioate linkage
  modified_base 58: mod_base = OTHER; note = 2'-O-methyl modified nucleotide
  modified_base 59: mod_base = OTHER; note = 2'-O-methyl modified nucleotide
  modified_base 61: mod_base = OTHER; note = 2'-O-methyl modified nucleotide
  modified_base 62: mod_base = OTHER; note = 2'-O-methyl modified nucleotide
  modified_base 63: mod_base = OTHER; note = 2'-O-methyl modified nucleotide
  modified_base 64: mod_base = OTHER; note = 2'-O-methyl modified nucleotide
  modified_base 65: mod_base = OTHER; note = 2'-O-methyl modified nucleotide
  modified_base 66: mod_base = OTHER; note = 2'-O-methyl modified nucleotide
  modified_base 67: mod_base = OTHER; note = 2'-O-methyl modified nucleotide
  modified_base 68: mod_base = OTHER; note = 2'-O-methyl modified nucleotide
  modified_base 69: mod_base = OTHER; note = 2'-O-methyl modified nucleotide
  modified_base 70: mod_base = OTHER; note = 2'-O-methyl modified nucleotide
  modified_base 75: mod_base = OTHER; note = 2'-O-methyl modified nucleotide
  modified_base 77: mod_base = OTHER; note = 2'-O-methyl modified nucleotide
  modified_base 80: mod_base = OTHER; note = 2'-O-methyl modified nucleotide
  modified_base 86: mod_base = OTHER; note = 2'-O-methyl modified nucleotide
  modified_base 87: mod_base = OTHER; note = 2'-O-methyl modified nucleotide
  modified_base 89: mod_base = OTHER; note = 2'-O-methyl modified nucleotide
  modified_base 90: mod_base = OTHER; note = 2'-O-methyl modified nucleotide
  modified_base 91: mod_base = OTHER; note = 2'-O-methyl modified nucleotide
  modified_base 92: mod_base = OTHER; note = 2'-O-methyl modified nucleotide
  modified_base 99: mod_base = OTHER; note = nucleotide with phosphorothioate linkage
  modified_base 100: mod_base = OTHER; note = 2'-O-methyl modified nucleotide with phosphorothioate linkage
  modified_base 101: mod_base = OTHER; note = 2'-O-methyl modified nucleotide

SEQ ID NO: 2626 - RNA, 101 nt, synthetic construct; identical to SEQ ID NO: 1626
  source 1..101: mol_type = other RNA
  modified_base 1: mod_base = OTHER; note = 2'-O-methyl modified nucleotide with phosphorothioate linkage
  modified_base 2: mod_base = OTHER; note = 2'-O-methyl modified nucleotide with phosphorothioate linkage
  modified_base 3: mod_base = OTHER; note = 2'-O-methyl modified nucleotide with phosphorothioate linkage
  modified_base 4: mod_base = OTHER; note = 2'-O-methyl modified nucleotide
  modified_base 5: mod_base = OTHER; note = 2'-O-methyl modified nucleotide
  modified_base 8: mod_base = OTHER; note = 2'-O-methyl modified nucleotide
  modified_base 9: mod_base = OTHER; note = 2'-O-methyl modified nucleotide
  modified_base 11: mod_base = OTHER; note = 2'-O-methyl modified nucleotide
  modified_base 13: mod_base = OTHER; note = 2'-O-methyl modified nucleotide
  modified_base 18: mod_base = OTHER; note = 2'-O-methyl modified nucleotide
  modified_base 22: mod_base = OTHER; note = 2'-O-methyl modified nucleotide
  modified_base 25: mod_base = OTHER; note = 2'-O-methyl modified nucleotide
  modified_base 29: mod_base = OTHER; note = 2'-O-methyl modified nucleotide
  modified_base 30: mod_base = OTHER; note = 2'-O-methyl modified nucleotide
  modified_base 31: mod_base = OTHER; note = 2'-O-methyl modified nucleotide
  modified_base 32: mod_base = OTHER; note = 2'-O-methyl modified nucleotide
  modified_base 37: mod_base = OTHER; note = 2'-O-methyl modified nucleotide
  modified_base 38: mod_base = OTHER; note = 2'-O-methyl modified nucleotide
  modified_base 39: mod_base = OTHER; note = 2'-O-methyl modified nucleotide
  modified_base 40: mod_base = OTHER; note = 2'-O-methyl modified nucleotide
  modified_base 41: mod_base = OTHER; note = 2'-O-methyl modified nucleotide
  modified_base 42: mod_base = OTHER; note = 2'-O-methyl modified nucleotide
  modified_base 43: mod_base = OTHER; note = 2'-O-methyl modified nucleotide
  modified_base 47: mod_base = OTHER; note = 2'-O-methyl modified nucleotide
  modified_base 48: mod_base = OTHER; note = 2'-O-methyl modified nucleotide
  modified_base 51: mod_base = OTHER; note = 2'-O-methyl modified nucleotide
  modified_base 54: mod_base = OTHER; note = nucleotide with phosphorothioate linkage
  modified_base 58: mod_base = OTHER; note = 2'-O-methyl modified nucleotide
  modified_base 59: mod_base = OTHER; note = 2'-O-methyl modified nucleotide
  modified_base 61: mod_base = OTHER; note = 2'-O-methyl modified nucleotide
  modified_base 62: mod_base = OTHER; note = 2'-O-methyl modified nucleotide
  modified_base 63: mod_base = OTHER; note = 2'-O-methyl modified nucleotide
  modified_base 64: mod_base = OTHER; note = 2'-O-methyl modified nucleotide
  modified_base 65: mod_base = OTHER; note = 2'-O-methyl modified nucleotide
  modified_base 66: mod_base = OTHER; note = 2'-O-methyl modified nucleotide
  modified_base 67: mod_base = OTHER; note = 2'-O-methyl modified nucleotide
  modified_base 68: mod_base = OTHER; note = 2'-O-methyl modified nucleotide
  modified_base 69: mod_base = OTHER; note = 2'-O-methyl modified nucleotide
  modified_base 70: mod_base = OTHER; note = 2'-O-methyl modified nucleotide
  modified_base 75: mod_base = OTHER; note = 2'-O-methyl modified nucleotide
  modified_base 77: mod_base = OTHER; note = 2'-O-methyl modified nucleotide
  modified_base 80: mod_base = OTHER; note = 2'-O-methyl modified nucleotide
  modified_base 86: mod_base = OTHER; note = 2'-O-methyl modified nucleotide
  modified_base 87: mod_base = OTHER; note = 2'-O-methyl modified nucleotide
  modified_base 89: mod_base = OTHER; note = 2'-O-methyl modified nucleotide
  modified_base 90: mod_base = OTHER; note = 2'-O-methyl modified nucleotide
  modified_base 91: mod_base = OTHER; note = 2'-O-methyl modified nucleotide
  modified_base 92: mod_base = OTHER; note = 2'-O-methyl modified nucleotide
  modified_base 99: mod_base = OTHER; note = nucleotide with phosphorothioate linkage
  modified_base 100: mod_base = OTHER; note = 2'-O-methyl modified nucleotide with phosphorothioate linkage
  modified_base 101: mod_base = OTHER; note = 2'-O-methyl modified nucleotide

SEQ ID NO: 2627 - RNA, 101 nt, synthetic construct; identical to SEQ ID NO: 1627
  source 1..101: mol_type = other RNA
  modified_base 1: mod_base = OTHER; note = 2'-O-methyl modified nucleotide with phosphorothioate linkage
  modified_base 2: mod_base = OTHER; note = 2'-O-methyl modified nucleotide with phosphorothioate linkage
  modified_base 3: mod_base = OTHER; note = 2'-O-methyl modified nucleotide with phosphorothioate linkage
  modified_base 4: mod_base = OTHER; note = 2'-O-methyl modified nucleotide
  modified_base 5: mod_base = OTHER; note = 2'-O-methyl modified nucleotide
  modified_base 8: mod_base = OTHER; note = 2'-O-methyl modified nucleotide
  modified_base 9: mod_base = OTHER; note = 2'-O-methyl modified nucleotide
  modified_base 11: mod_base = OTHER; note = 2'-O-methyl modified nucleotide
  modified_base 13: mod_base = OTHER; note = 2'-O-methyl modified nucleotide
  modified_base 18: mod_base = OTHER; note = 2'-O-methyl modified nucleotide
  modified_base 22: mod_base = OTHER; note = 2'-O-methyl modified nucleotide
  modified_base 25: mod_base = OTHER; note = 2'-O-methyl modified nucleotide
  modified_base 29: mod_base = OTHER; note = 2'-O-methyl modified nucleotide
  modified_base 30: mod_base = OTHER; note = 2'-O-methyl modified nucleotide
  modified_base 31: mod_base = OTHER; note = 2'-O-methyl modified nucleotide
  modified_base 32: mod_base = OTHER; note = 2'-O-methyl modified nucleotide
  modified_base 37: mod_base = OTHER; note = 2'-O-methyl modified nucleotide
  modified_base 38: mod_base = OTHER; note = 2'-O-methyl modified nucleotide
  modified_base 39: mod_base = OTHER; note = 2'-O-methyl modified nucleotide
  modified_base 40: mod_base = OTHER; note = 2'-O-methyl modified nucleotide
  modified_base 41: mod_base = OTHER; note = 2'-O-methyl modified nucleotide
  modified_base 42: mod_base = OTHER; note = 2'-O-methyl modified nucleotide
  modified_base 43: mod_base = OTHER; note = 2'-O-methyl modified nucleotide
  modified_base 47: mod_base = OTHER; note = 2'-O-methyl modified nucleotide
  modified_base 48: mod_base = OTHER; note = 2'-O-methyl modified nucleotide
  modified_base 51: mod_base = OTHER; note = 2'-O-methyl modified nucleotide
  modified_base 54: mod_base = OTHER; note = nucleotide with phosphorothioate linkage
  modified_base 58: mod_base = OTHER; note = 2'-O-methyl modified nucleotide
  modified_base 59: mod_base = OTHER; note = 2'-O-methyl modified nucleotide
  modified_base 61: mod_base = OTHER; note = 2'-O-methyl modified nucleotide
  modified_base 62: mod_base = OTHER; note = 2'-O-methyl modified nucleotide
  modified_base 63: mod_base = OTHER; note = 2'-O-methyl modified nucleotide
  modified_base 64: mod_base = OTHER; note = 2'-O-methyl modified nucleotide
  modified_base 65: mod_base = OTHER; note = 2'-O-methyl modified nucleotide
  modified_base 66: mod_base = OTHER; note = 2'-O-methyl modified nucleotide
  modified_base 67: mod_base = OTHER; note = 2'-O-methyl modified nucleotide
  modified_base 68: mod_base = OTHER; note = 2'-O-methyl modified nucleotide
  modified_base 69: mod_base = OTHER; note = 2'-O-methyl modified nucleotide
  modified_base 70: mod_base = OTHER; note = 2'-O-methyl modified nucleotide
  modified_base 75: mod_base = OTHER; note = 2'-O-methyl modified nucleotide
  modified_base 77: mod_base = OTHER; note = 2'-O-methyl modified nucleotide
  modified_base 80: mod_base = OTHER; note = 2'-O-methyl modified nucleotide
  modified_base 86: mod_base = OTHER; note = 2'-O-methyl modified nucleotide
  modified_base 87: mod_base = OTHER; note = 2'-O-methyl modified nucleotide
  modified_base 89: mod_base = OTHER; note = 2'-O-methyl modified nucleotide
  modified_base 90: mod_base = OTHER; note = 2'-O-methyl modified nucleotide
  modified_base 91: mod_base = OTHER; note = 2'-O-methyl modified nucleotide
  modified_base 92: mod_base = OTHER; note = 2'-O-methyl modified nucleotide
  modified_base 99: mod_base = OTHER; note = nucleotide with phosphorothioate linkage
  modified_base 100: mod_base = OTHER; note = 2'-O-methyl modified nucleotide with phosphorothioate linkage
  modified_base 101: mod_base = OTHER; note = 2'-O-methyl modified nucleotide

SEQ ID NO: 2628 - RNA, 101 nt, synthetic construct; identical to SEQ ID NO: 1628
  source 1..101: mol_type = other RNA
  modified_base 1: mod_base = OTHER; note = 2'-O-methyl modified nucleotide with phosphorothioate linkage
  modified_base 2: mod_base = OTHER; note = 2'-O-methyl modified nucleotide with phosphorothioate linkage
  modified_base 3: mod_base = OTHER; note = 2'-O-methyl modified nucleotide with phosphorothioate linkage
  modified_base 4: mod_base = OTHER; note = 2'-O-methyl modified nucleotide
  modified_base 5: mod_base = OTHER; note = 2'-O-methyl modified nucleotide
  modified_base 8: mod_base = OTHER; note = 2'-O-methyl modified nucleotide
  modified_base 9: mod_base = OTHER; note = 2'-O-methyl modified nucleotide
  modified_base 11: mod_base = OTHER; note = 2'-O-methyl modified nucleotide
  modified_base 13: mod_base = OTHER; note = 2'-O-methyl modified nucleotide
  modified_base 18: mod_base = OTHER; note = 2'-O-methyl modified nucleotide
  modified_base 22: mod_base = OTHER; note = 2'-O-methyl modified nucleotide
  modified_base 25: mod_base = OTHER; note = 2'-O-methyl modified nucleotide
  modified_base 29: mod_base = OTHER; note = 2'-O-methyl modified nucleotide
  modified_base 30: mod_base = OTHER; note = 2'-O-methyl modified nucleotide
  modified_base 31: mod_base = OTHER; note = 2'-O-methyl modified nucleotide
  modified_base 32: mod_base = OTHER; note = 2'-O-methyl modified nucleotide
  modified_base 37: mod_base = OTHER; note = 2'-O-methyl modified nucleotide
  modified_base 38: mod_base = OTHER; note = 2'-O-methyl modified nucleotide
  modified_base 39: mod_base = OTHER; note = 2'-O-methyl modified nucleotide
  modified_base 40: mod_base = OTHER; note = 2'-O-methyl modified nucleotide
  modified_base 41: mod_base = OTHER; note = 2'-O-methyl modified nucleotide
  modified_base 42: mod_base = OTHER; note = 2'-O-methyl modified nucleotide
  modified_base 43: mod_base = OTHER; note = 2'-O-methyl modified nucleotide
  modified_base 47: mod_base = OTHER; note = 2'-O-methyl modified nucleotide
  modified_base 48: mod_base = OTHER; note = 2'-O-methyl modified nucleotide
  modified_base 51: mod_base = OTHER; note = 2'-O-methyl modified nucleotide
  modified_base 54: mod_base = OTHER; note = nucleotide with phosphorothioate linkage
  modified_base 58: mod_base = OTHER; note = 2'-O-methyl modified nucleotide
  modified_base 59: mod_base = OTHER; note = 2'-O-methyl modified nucleotide
  modified_base 61: mod_base = OTHER; note = 2'-O-methyl modified nucleotide
  modified_base 62: mod_base = OTHER; note = 2'-O-methyl modified nucleotide
  modified_base 63: mod_base = OTHER; note = 2'-O-methyl modified nucleotide
  modified_base 64: mod_base = OTHER; note = 2'-O-methyl modified nucleotide
  modified_base 65: mod_base = OTHER; note = 2'-O-methyl modified nucleotide
  modified_base 66: mod_base = OTHER; note = 2'-O-methyl modified nucleotide
  modified_base 67: mod_base = OTHER; note = 2'-O-methyl modified nucleotide
  modified_base 68: mod_base = OTHER; note = 2'-O-methyl modified nucleotide
  modified_base 69: mod_base = OTHER; note = 2'-O-methyl modified nucleotide
  modified_base 70: mod_base = OTHER; note = 2'-O-methyl modified nucleotide
  modified_base 75: mod_base = OTHER; note = 2'-O-methyl modified nucleotide
  modified_base 77: mod_base = OTHER; note = 2'-O-methyl modified nucleotide
  modified_base 80: mod_base = OTHER; note = 2'-O-methyl modified nucleotide
  modified_base 86: mod_base = OTHER; note = 2'-O-methyl modified nucleotide
  modified_base 87: mod_base = OTHER; note = 2'-O-methyl modified nucleotide
  modified_base 89: mod_base = OTHER; note = 2'-O-methyl modified nucleotide
  modified_base 90: mod_base = OTHER; note = 2'-O-methyl modified nucleotide
  modified_base 91: mod_base = OTHER; note = 2'-O-methyl modified nucleotide
  modified_base 92: mod_base = OTHER; note = 2'-O-methyl modified nucleotide
  modified_base 99: mod_base = OTHER; note = nucleotide with phosphorothioate linkage
  modified_base 100: mod_base = OTHER; note = 2'-O-methyl modified nucleotide with phosphorothioate linkage
  modified_base 101: mod_base = OTHER; note = 2'-O-methyl modified nucleotide

SEQ ID NO: 2629 - RNA, 101 nt, synthetic construct; identical to SEQ ID NO: 1629
  source 1..101: mol_type = other RNA
  modified_base 1: mod_base = OTHER; note = 2'-O-methyl modified nucleotide with phosphorothioate linkage
  modified_base 2: mod_base = OTHER; note = 2'-O-methyl modified nucleotide with phosphorothioate linkage
  modified_base 3: mod_base = OTHER; note = 2'-O-methyl modified nucleotide with phosphorothioate linkage
  modified_base 4: mod_base = OTHER; note = 2'-O-methyl modified nucleotide
  modified_base 5: mod_base = OTHER; note = 2'-O-methyl modified nucleotide
  modified_base 8: mod_base = OTHER; note = 2'-O-methyl modified nucleotide
  modified_base 9: mod_base = OTHER; note = 2'-O-methyl modified nucleotide
  modified_base 11: mod_base = OTHER; note = 2'-O-methyl modified nucleotide
  modified_base 13: mod_base = OTHER; note = 2'-O-methyl modified nucleotide
  modified_base 18: mod_base = OTHER; note = 2'-O-methyl modified nucleotide
  modified_base 22: mod_base = OTHER; note = 2'-O-methyl modified nucleotide
  modified_base 25: mod_base = OTHER; note = 2'-O-methyl modified nucleotide
  modified_base 29: mod_base = OTHER; note = 2'-O-methyl modified nucleotide
  modified_base 30: mod_base = OTHER; note = 2'-O-methyl modified nucleotide
  modified_base 31: mod_base = OTHER; note = 2'-O-methyl modified nucleotide
  modified_base 32: mod_base = OTHER; note = 2'-O-methyl modified nucleotide
  modified_base 37: mod_base = OTHER; note = 2'-O-methyl modified nucleotide
  modified_base 38: mod_base = OTHER; note = 2'-O-methyl modified nucleotide
  modified_base 39: mod_base = OTHER; note = 2'-O-methyl modified nucleotide
  modified_base 40: mod_base = OTHER; note = 2'-O-methyl modified nucleotide
  modified_base 41: mod_base = OTHER; note = 2'-O-methyl modified nucleotide
  modified_base 42: mod_base = OTHER; note = 2'-O-methyl modified nucleotide
  modified_base 43: mod_base = OTHER; note = 2'-O-methyl modified nucleotide
  modified_base 47: mod_base = OTHER; note = 2'-O-methyl modified nucleotide
  modified_base 48: mod_base = OTHER; note = 2'-O-methyl modified nucleotide
  modified_base 51: mod_base = OTHER; note = 2'-O-methyl modified nucleotide
  modified_base 54: mod_base = OTHER; note = nucleotide with phosphorothioate linkage
  modified_base 58: mod_base = OTHER; note = 2'-O-methyl modified nucleotide
  modified_base 59: mod_base = OTHER; note = 2'-O-methyl modified nucleotide
  modified_base 61: mod_base = OTHER; note = 2'-O-methyl modified nucleotide
  modified_base 62: mod_base = OTHER; note = 2'-O-methyl modified nucleotide
  modified_base 63: mod_base = OTHER; note = 2'-O-methyl modified nucleotide
  modified_base 64: mod_base = OTHER; note = 2'-O-methyl modified nucleotide
  modified_base 65: mod_base = OTHER; note = 2'-O-methyl modified nucleotide
  modified_base 66: mod_base = OTHER; note = 2'-O-methyl modified nucleotide
  modified_base 67: mod_base = OTHER; note = 2'-O-methyl modified nucleotide
  modified_base 68: mod_base = OTHER; note = 2'-O-methyl modified nucleotide
  modified_base 69: mod_base = OTHER; note = 2'-O-methyl modified nucleotide
  modified_base 70: mod_base = OTHER; note = 2'-O-methyl modified nucleotide
  modified_base 75: mod_base = OTHER; note = 2'-O-methyl modified nucleotide
  modified_base 77: mod_base = OTHER; note = 2'-O-methyl modified nucleotide
  modified_base 80: mod_base = OTHER; note = 2'-O-methyl modified nucleotide
  modified_base 86: mod_base = OTHER; note = 2'-O-methyl modified nucleotide
  modified_base 87: mod_base = OTHER; note = 2'-O-methyl modified nucleotide
  modified_base 89: mod_base = OTHER; note = 2'-O-methyl modified nucleotide
  modified_base 90: mod_base = OTHER; note = 2'-O-methyl modified nucleotide
  modified_base 91: mod_base = OTHER; note = 2'-O-methyl modified nucleotide
  modified_base 92: mod_base = OTHER; note = 2'-O-methyl modified nucleotide
  modified_base 99: mod_base = OTHER; note = nucleotide with phosphorothioate linkage
  modified_base 100: mod_base = OTHER; note = 2'-O-methyl modified nucleotide with phosphorothioate linkage
  modified_base 101: mod_base = OTHER; note = 2'-O-methyl modified nucleotide

SEQ ID NO: 2630 - RNA, 101 nt, synthetic construct; identical to SEQ ID NO: 1630
  source 1..101: mol_type = other RNA
  modified_base 1: mod_base = OTHER; note = 2'-O-methyl modified nucleotide with phosphorothioate linkage
  modified_base 2: mod_base = OTHER; note = 2'-O-methyl modified nucleotide with phosphorothioate linkage
  modified_base 3: mod_base = OTHER; note = 2'-O-methyl modified nucleotide with phosphorothioate linkage
  modified_base 4: mod_base = OTHER; note = 2'-O-methyl modified nucleotide
  modified_base 5: mod_base = OTHER; note = 2'-O-methyl modified nucleotide
  modified_base 8: mod_base = OTHER; note = 2'-O-methyl modified nucleotide
  modified_base 9: mod_base = OTHER; note = 2'-O-methyl modified nucleotide
  modified_base 11: mod_base = OTHER; note = 2'-O-methyl modified nucleotide
  modified_base 13: mod_base = OTHER; note = 2'-O-methyl modified nucleotide
  modified_base 18: mod_base = OTHER; note = 2'-O-methyl modified nucleotide
  modified_base 22: mod_base = OTHER; note = 2'-O-methyl modified nucleotide
  modified_base 25: mod_base = OTHER; note = 2'-O-methyl modified nucleotide
  modified_base 29: mod_base = OTHER; note = 2'-O-methyl modified nucleotide
  modified_base 30: mod_base = OTHER; note = 2'-O-methyl modified nucleotide
  modified_base 31: mod_base = OTHER; note = 2'-O-methyl modified nucleotide
  modified_base 32: mod_base = OTHER; note = 2'-O-methyl modified nucleotide
  modified_base 37: mod_base = OTHER; note = 2'-O-methyl modified nucleotide
  modified_base 38: mod_base = OTHER; note = 2'-O-methyl modified nucleotide
  modified_base 39: mod_base = OTHER; note = 2'-O-methyl modified nucleotide
  modified_base 40: mod_base = OTHER; note = 2'-O-methyl modified nucleotide
  modified_base 41: mod_base = OTHER; note = 2'-O-methyl modified nucleotide
  modified_base 42: mod_base = OTHER; note = 2'-O-methyl modified nucleotide
  modified_base 43: mod_base = OTHER; note = 2'-O-methyl modified nucleotide
  modified_base 47: mod_base = OTHER; note = 2'-O-methyl modified nucleotide
  modified_base 48: mod_base = OTHER; note = 2'-O-methyl modified nucleotide
  modified_base 51: mod_base = OTHER; note = 2'-O-methyl modified nucleotide
  modified_base 54: mod_base = OTHER; note = nucleotide with phosphorothioate linkage
  modified_base 58: mod_base = OTHER; note = 2'-O-methyl modified nucleotide
  modified_base 59: mod_base = OTHER; note = 2'-O-methyl modified nucleotide
  modified_base 61: mod_base = OTHER; note = 2'-O-methyl modified nucleotide
  modified_base 62: mod_base = OTHER; note = 2'-O-methyl modified nucleotide
  modified_base 63: mod_base = OTHER; note = 2'-O-methyl modified nucleotide
  modified_base 64: mod_base = OTHER; note = 2'-O-methyl modified nucleotide
  modified_base 65: mod_base = OTHER; note = 2'-O-methyl modified nucleotide
  modified_base 66: mod_base = OTHER; note = 2'-O-methyl modified nucleotide
  modified_base 67: mod_base = OTHER; note = 2'-O-methyl modified nucleotide
  modified_base 68: mod_base = OTHER; note = 2'-O-methyl modified nucleotide
  modified_base 69: mod_base = OTHER; note = 2'-O-methyl modified nucleotide
  modified_base 70: mod_base = OTHER; note = 2'-O-methyl modified nucleotide
  modified_base 75: mod_base = OTHER; note = 2'-O-methyl modified nucleotide
  modified_base 77: mod_base = OTHER; note = 2'-O-methyl modified nucleotide
  modified_base 80: mod_base = OTHER; note = 2'-O-methyl modified nucleotide
  modified_base 86: mod_base = OTHER; note = 2'-O-methyl modified nucleotide
  modified_base 87: mod_base = OTHER; note = 2'-O-methyl modified nucleotide
  modified_base 89: mod_base = OTHER; note = 2'-O-methyl modified nucleotide
  modified_base 90: mod_base = OTHER; note = 2'-O-methyl modified nucleotide
  modified_base 91: mod_base = OTHER; note = 2'-O-methyl modified nucleotide
  modified_base 92: mod_base = OTHER; note = 2'-O-methyl modified nucleotide
  modified_base 99: mod_base = OTHER; note = nucleotide with phosphorothioate linkage
  modified_base 100: mod_base = OTHER; note = 2'-O-methyl modified nucleotide with phosphorothioate linkage
  modified_base 101: mod_base = OTHER; note = 2'-O-methyl modified nucleotide

SEQ ID NO: 2631 - RNA, 101 nt, synthetic construct; identical to SEQ ID NO: 1631
  source 1..101: mol_type = other RNA
  modified_base 1: mod_base = OTHER; note = 2'-O-methyl modified nucleotide with phosphorothioate linkage
  modified_base 2: mod_base = OTHER; note = 2'-O-methyl modified nucleotide with phosphorothioate linkage
  modified_base 3: mod_base = OTHER; note = 2'-O-methyl modified nucleotide with phosphorothioate linkage
  modified_base 4: mod_base = OTHER; note = 2'-O-methyl modified nucleotide
  modified_base 5: mod_base = OTHER; note = 2'-O-methyl modified nucleotide
  modified_base 8: mod_base = OTHER; note = 2'-O-methyl modified nucleotide
  modified_base 9: mod_base = OTHER; note = 2'-O-methyl modified nucleotide
  modified_base 11: mod_base = OTHER; note = 2'-O-methyl modified nucleotide
  modified_base 13: mod_base = OTHER; note = 2'-O-methyl modified nucleotide
  modified_base 18: mod_base = OTHER; note = 2'-O-methyl modified nucleotide
  modified_base 22: mod_base = OTHER; note = 2'-O-methyl modified nucleotide
  modified_base 25: mod_base = OTHER; note = 2'-O-methyl modified nucleotide
  modified_base 29: mod_base = OTHER; note = 2'-O-methyl modified nucleotide
  modified_base 30: mod_base = OTHER; note = 2'-O-methyl modified nucleotide
  modified_base 31: mod_base = OTHER; note = 2'-O-methyl modified nucleotide
  modified_base 32: mod_base = OTHER; note = 2'-O-methyl modified nucleotide
  modified_base 37: mod_base = OTHER; note = 2'-O-methyl modified nucleotide
  modified_base 38: mod_base = OTHER; note = 2'-O-methyl modified nucleotide
  modified_base 39: mod_base = OTHER; note = 2'-O-methyl modified nucleotide
  modified_base 40: mod_base = OTHER; note = 2'-O-methyl modified nucleotide
  modified_base 41: mod_base = OTHER; note = 2'-O-methyl modified nucleotide
  modified_base 42: mod_base = OTHER; note = 2'-O-methyl modified nucleotide
  modified_base 43: mod_base = OTHER; note = 2'-O-methyl modified nucleotide
  modified_base 47: mod_base = OTHER; note = 2'-O-methyl modified nucleotide
  modified_base 48: mod_base = OTHER; note = 2'-O-methyl modified nucleotide
  modified_base 51: mod_base = OTHER; note = 2'-O-methyl modified nucleotide
  modified_base 54: mod_base = OTHER; note = nucleotide with phosphorothioate linkage
  modified_base 58: mod_base = OTHER; note = 2'-O-methyl modified nucleotide
  modified_base 59: mod_base = OTHER; note = 2'-O-methyl modified nucleotide
  modified_base 61: mod_base = OTHER; note = 2'-O-methyl modified nucleotide
  modified_base 62: mod_base = OTHER; note = 2'-O-methyl modified nucleotide
  modified_base 63: mod_base = OTHER; note = 2'-O-methyl modified nucleotide
  modified_base 64: mod_base = OTHER; note = 2'-O-methyl modified nucleotide
  modified_base 65: mod_base = OTHER; note = 2'-O-methyl modified nucleotide
  modified_base 66: mod_base = OTHER; note = 2'-O-methyl modified nucleotide
  modified_base 67: mod_base = OTHER; note = 2'-O-methyl modified nucleotide
  modified_base 68: mod_base = OTHER; note = 2'-O-methyl modified nucleotide
  modified_base 69: mod_base = OTHER; note = 2'-O-methyl modified nucleotide
  modified_base 70: mod_base = OTHER; note = 2'-O-methyl modified nucleotide
  modified_base 75: mod_base = OTHER; note = 2'-O-methyl modified nucleotide
  modified_base 77: mod_base = OTHER; note = 2'-O-methyl modified nucleotide
  modified_base 80: mod_base = OTHER; note = 2'-O-methyl modified nucleotide
  modified_base 86: mod_base = OTHER; note = 2'-O-methyl modified nucleotide
  modified_base 87: mod_base = OTHER; note = 2'-O-methyl modified nucleotide
  modified_base 89: mod_base = OTHER; note = 2'-O-methyl modified nucleotide
  modified_base 90: mod_base = OTHER; note = 2'-O-methyl modified nucleotide
  modified_base 91: mod_base = OTHER; note = 2'-O-methyl modified nucleotide
  modified_base 92: mod_base = OTHER; note = 2'-O-methyl modified nucleotide
  modified_base 99: mod_base = OTHER; note = nucleotide with phosphorothioate linkage
  modified_base 100: mod_base = OTHER; note = 2'-O-methyl modified nucleotide with phosphorothioate linkage
  modified_base 101: mod_base = OTHER; note = 2'-O-methyl modified nucleotide

SEQ ID NO: 2632 - RNA, 101 nt, synthetic construct; identical to SEQ ID NO: 1632
  source 1..101: mol_type = other RNA
  modified_base 1: mod_base = OTHER; note = 2'-O-methyl modified nucleotide with phosphorothioate linkage
  modified_base 2: mod_base = OTHER; note = 2'-O-methyl modified nucleotide with phosphorothioate linkage
  modified_base 3: mod_base = OTHER; note = 2'-O-methyl modified nucleotide with phosphorothioate linkage
  modified_base 4: mod_base = OTHER; note = 2'-O-methyl modified nucleotide
  modified_base 5: mod_base = OTHER; note = 2'-O-methyl modified nucleotide
  modified_base 8: mod_base = OTHER; note = 2'-O-methyl modified nucleotide
  modified_base 9: mod_base = OTHER; note = 2'-O-methyl modified nucleotide
  modified_base 11: mod_base = OTHER; note = 2'-O-methyl modified nucleotide
  modified_base 13: mod_base = OTHER; note = 2'-O-methyl modified nucleotide
  modified_base 18: mod_base = OTHER; note = 2'-O-methyl modified nucleotide
  modified_base 22: mod_base = OTHER; note = 2'-O-methyl modified nucleotide
  modified_base 25: mod_base = OTHER; note = 2'-O-methyl modified nucleotide
  modified_base 29: mod_base = OTHER; note = 2'-O-methyl modified nucleotide
  modified_base 30: mod_base = OTHER; note = 2'-O-methyl modified nucleotide
  modified_base 31: mod_base = OTHER; note = 2'-O-methyl modified nucleotide
  modified_base 32: mod_base = OTHER; note = 2'-O-methyl modified nucleotide
  modified_base 37: mod_base = OTHER; note = 2'-O-methyl modified nucleotide
  modified_base 38: mod_base = OTHER; note = 2'-O-methyl modified nucleotide
  modified_base 39: mod_base = OTHER; note = 2'-O-methyl modified nucleotide
  modified_base 40: mod_base = OTHER; note = 2'-O-methyl modified nucleotide
  modified_base 41: mod_base = OTHER; note = 2'-O-methyl modified nucleotide
  modified_base 42: mod_base = OTHER; note = 2'-O-methyl modified nucleotide
  modified_base 43: mod_base = OTHER; note = 2'-O-methyl modified nucleotide
  modified_base 47: mod_base = OTHER; note = 2'-O-methyl modified nucleotide
  modified_base 48: mod_base = OTHER; note = 2'-O-methyl modified nucleotide
  modified_base 51: mod_base = OTHER; note = 2'-O-methyl modified nucleotide
  modified_base 54: mod_base = OTHER; note = nucleotide with phosphorothioate linkage
  modified_base 58: mod_base = OTHER; note = 2'-O-methyl modified nucleotide
  modified_base 59: mod_base = OTHER; note = 2'-O-methyl modified nucleotide
  modified_base 61: mod_base = OTHER; note = 2'-O-methyl modified nucleotide
  modified_base 62: mod_base = OTHER; note = 2'-O-methyl modified nucleotide
  modified_base 63: mod_base = OTHER; note = 2'-O-methyl modified nucleotide
  modified_base 64: mod_base = OTHER; note = 2'-O-methyl modified nucleotide
  modified_base 65: mod_base = OTHER; note = 2'-O-methyl modified nucleotide
  modified_base 66: mod_base = OTHER; note = 2'-O-methyl modified nucleotide
  modified_base 67: mod_base = OTHER; note = 2'-O-methyl modified nucleotide
  modified_base 68: mod_base = OTHER; note = 2'-O-methyl modified nucleotide
  modified_base 69: mod_base = OTHER; note = 2'-O-methyl modified nucleotide
  modified_base 70: mod_base = OTHER; note = 2'-O-methyl modified nucleotide
  modified_base 75: mod_base = OTHER; note = 2'-O-methyl modified nucleotide
  modified_base 77: mod_base = OTHER; note = 2'-O-methyl modified nucleotide
  modified_base 80: mod_base = OTHER; note = 2'-O-methyl modified nucleotide
  modified_base 86: mod_base = OTHER; note = 2'-O-methyl modified nucleotide
  modified_base 87: mod_base = OTHER; note = 2'-O-methyl modified nucleotide
  modified_base 89: mod_base = OTHER; note = 2'-O-methyl modified nucleotide
  modified_base 90: mod_base = OTHER; note = 2'-O-methyl modified nucleotide
  modified_base 91: mod_base = OTHER; note = 2'-O-methyl modified nucleotide
  modified_base 92: mod_base = OTHER; note = 2'-O-methyl modified nucleotide
  modified_base 99: mod_base = OTHER; note = nucleotide with phosphorothioate linkage
  modified_base 100: mod_base = OTHER; note = 2'-O-methyl modified nucleotide with phosphorothioate linkage
  modified_base 101: mod_base = OTHER; note = 2'-O-methyl modified nucleotide

SEQ ID NO: 2633 - RNA, 101 nt, synthetic construct; identical to SEQ ID NO: 1633
  source 1..101: mol_type = other RNA
  modified_base 1: mod_base = OTHER; note = 2'-O-methyl modified nucleotide with phosphorothioate linkage
  modified_base 2: mod_base = OTHER; note = 2'-O-methyl modified nucleotide with phosphorothioate linkage
  modified_base 3: mod_base = OTHER; note = 2'-O-methyl modified nucleotide with phosphorothioate linkage
  modified_base 4: mod_base = OTHER; note = 2'-O-methyl modified nucleotide
  modified_base 5: mod_base = OTHER; note = 2'-O-methyl modified nucleotide
  modified_base 8: mod_base = OTHER; note = 2'-O-methyl modified nucleotide
  modified_base 9: mod_base = OTHER; note = 2'-O-methyl modified nucleotide
  modified_base 11: mod_base = OTHER; note = 2'-O-methyl modified nucleotide
  modified_base 13: mod_base = OTHER; note = 2'-O-methyl modified nucleotide
  modified_base 18: mod_base = OTHER; note = 2'-O-methyl modified nucleotide
  modified_base 22: mod_base = OTHER; note = 2'-O-methyl modified nucleotide
  modified_base 25: mod_base = OTHER; note = 2'-O-methyl modified nucleotide
  modified_base 29: mod_base = OTHER; note = 2'-O-methyl modified nucleotide
  modified_base 30: mod_base = OTHER; note = 2'-O-methyl modified nucleotide
  modified_base 31: mod_base = OTHER; note = 2'-O-methyl modified nucleotide
  modified_base 32: mod_base = OTHER; note = 2'-O-methyl modified nucleotide
  modified_base 37: mod_base = OTHER; note = 2'-O-methyl modified nucleotide
  modified_base 38: mod_base = OTHER; note = 2'-O-methyl modified nucleotide
  modified_base 39: mod_base = OTHER; note = 2'-O-methyl modified nucleotide
  modified_base 40: mod_base = OTHER; note = 2'-O-methyl modified nucleotide
  modified_base 41: mod_base = OTHER; note = 2'-O-methyl modified nucleotide
  modified_base 42: mod_base = OTHER; note = 2'-O-methyl modified nucleotide
  modified_base 43: mod_base = OTHER; note = 2'-O-methyl modified nucleotide
  modified_base 47: mod_base = OTHER; note = 2'-O-methyl modified nucleotide
  modified_base 48: mod_base = OTHER; note = 2'-O-methyl modified nucleotide
  modified_base 51: mod_base = OTHER; note = 2'-O-methyl modified nucleotide
  modified_base 54: mod_base = OTHER; note = nucleotide with phosphorothioate linkage
  modified_base 58: mod_base = OTHER; note = 2'-O-methyl modified nucleotide
  modified_base 59: mod_base = OTHER; note = 2'-O-methyl modified nucleotide
  modified_base 61: mod_base = OTHER; note = 2'-O-methyl modified nucleotide
  modified_base 62: mod_base = OTHER; note = 2'-O-methyl modified nucleotide
  modified_base 63: mod_base = OTHER; note = 2'-O-methyl modified nucleotide
  modified_base 64: mod_base = OTHER; note = 2'-O-methyl modified nucleotide
  modified_base 65: mod_base = OTHER; note = 2'-O-methyl modified nucleotide
  modified_base 66: mod_base = OTHER; note = 2'-O-methyl modified nucleotide
  modified_base 67: mod_base = OTHER; note = 2'-O-methyl modified nucleotide
  modified_base 68: mod_base = OTHER; note = 2'-O-methyl modified nucleotide
  modified_base 69: mod_base = OTHER; note = 2'-O-methyl modified nucleotide
  modified_base 70: mod_base = OTHER; note = 2'-O-methyl modified nucleotide
  modified_base 75: mod_base = OTHER; note = 2'-O-methyl modified nucleotide
  modified_base 77: mod_base = OTHER; note = 2'-O-methyl modified nucleotide
  modified_base 80: mod_base = OTHER; note = 2'-O-methyl modified nucleotide
  modified_base 86: mod_base = OTHER; note = 2'-O-methyl modified nucleotide
  modified_base 87: mod_base = OTHER; note = 2'-O-methyl modified nucleotide
  modified_base 89: mod_base = OTHER; note = 2'-O-methyl modified nucleotide
  modified_base 90: mod_base = OTHER; note = 2'-O-methyl modified nucleotide
  modified_base 91: mod_base = OTHER; note = 2'-O-methyl modified nucleotide
  modified_base 92: mod_base = OTHER; note = 2'-O-methyl modified nucleotide
  modified_base 99: mod_base = OTHER; note = nucleotide with phosphorothioate linkage
  modified_base 100: mod_base = OTHER; note = 2'-O-methyl modified nucleotide with phosphorothioate linkage
  modified_base 101: mod_base = OTHER; note = 2'-O-methyl modified nucleotide

SEQ ID NO: 2634 - RNA, 101 nt, synthetic construct; identical to SEQ ID NO: 1634
  source 1..101: mol_type = other RNA
  modified_base 1: mod_base = OTHER; note = 2'-O-methyl modified nucleotide with phosphorothioate linkage
  modified_base 2: mod_base = OTHER; note = 2'-O-methyl modified nucleotide with phosphorothioate linkage
  modified_base 3: mod_base = OTHER; note = 2'-O-methyl modified nucleotide with phosphorothioate linkage
  modified_base 4: mod_base = OTHER; note = 2'-O-methyl modified nucleotide
  modified_base 5: mod_base = OTHER; note = 2'-O-methyl modified nucleotide
  modified_base 8: mod_base = OTHER; note = 2'-O-methyl modified nucleotide
  modified_base 9: mod_base = OTHER; note = 2'-O-methyl modified nucleotide
  modified_base 11: mod_base = OTHER; note = 2'-O-methyl modified nucleotide
  modified_base 13: mod_base = OTHER; note = 2'-O-methyl modified nucleotide
  modified_base 18: mod_base = OTHER; note = 2'-O-methyl modified nucleotide
  modified_base 22: mod_base = OTHER; note = 2'-O-methyl modified nucleotide
  modified_base 25: mod_base = OTHER; note = 2'-O-methyl modified nucleotide
  modified_base 29: mod_base = OTHER; note = 2'-O-methyl modified nucleotide
  modified_base 30: mod_base = OTHER; note = 2'-O-methyl modified nucleotide
  modified_base 31: mod_base = OTHER; note = 2'-O-methyl modified nucleotide
  modified_base 32: mod_base = OTHER; note = 2'-O-methyl modified nucleotide
  modified_base 37: mod_base = OTHER; note = 2'-O-methyl modified nucleotide
  modified_base 38: mod_base = OTHER; note = 2'-O-methyl modified nucleotide
  modified_base 39: mod_base = OTHER; note = 2'-O-methyl modified nucleotide
  modified_base 40: mod_base = OTHER; note = 2'-O-methyl modified nucleotide
  modified_base 41: mod_base = OTHER; note = 2'-O-methyl modified nucleotide
  modified_base 42: mod_base = OTHER; note = 2'-O-methyl modified nucleotide
  modified_base 43: mod_base = OTHER; note = 2'-O-methyl modified nucleotide
  modified_base 47: mod_base = OTHER; note = 2'-O-methyl modified nucleotide
  modified_base 48: mod_base = OTHER; note = 2'-O-methyl modified nucleotide
  modified_base 51: mod_base = OTHER; note = 2'-O-methyl modified nucleotide
  modified_base 54: mod_base = OTHER; note = nucleotide with phosphorothioate linkage
  modified_base 58: mod_base = OTHER; note = 2'-O-methyl modified nucleotide
  modified_base 59: mod_base = OTHER; note = 2'-O-methyl modified nucleotide
  modified_base 61: mod_base = OTHER; note = 2'-O-methyl modified nucleotide
  modified_base 62: mod_base = OTHER; note = 2'-O-methyl modified nucleotide
  modified_base 63: mod_base = OTHER; note = 2'-O-methyl modified nucleotide
  modified_base 64: mod_base = OTHER; note = 2'-O-methyl modified nucleotide
  modified_base 65: mod_base = OTHER; note = 2'-O-methyl modified nucleotide
  modified_base 66: mod_base = OTHER; note = 2'-O-methyl modified nucleotide
  modified_base 67: mod_base = OTHER; note = 2'-O-methyl modified nucleotide
  modified_base 68: mod_base = OTHER; note = 2'-O-methyl modified nucleotide
  modified_base 69: mod_base = OTHER; note = 2'-O-methyl modified nucleotide
  modified_base 70: mod_base = OTHER; note = 2'-O-methyl modified nucleotide
  modified_base 75: mod_base = OTHER; note = 2'-O-methyl modified nucleotide
  modified_base 77: mod_base = OTHER; note = 2'-O-methyl modified nucleotide
  modified_base 80: mod_base = OTHER; note = 2'-O-methyl modified nucleotide
  modified_base 86: mod_base = OTHER; note = 2'-O-methyl modified nucleotide
  modified_base 87: mod_base = OTHER; note = 2'-O-methyl modified nucleotide
  modified_base 89: mod_base = OTHER; note = 2'-O-methyl modified nucleotide
  modified_base 90: mod_base = OTHER; note = 2'-O-methyl modified nucleotide
  modified_base 91: mod_base = OTHER; note = 2'-O-methyl modified nucleotide
  modified_base 92: mod_base = OTHER; note = 2'-O-methyl modified nucleotide
  modified_base 99: mod_base = OTHER; note = nucleotide with phosphorothioate linkage
  modified_base 100: mod_base = OTHER; note = 2'-O-methyl modified nucleotide with phosphorothioate linkage
  modified_base 101: mod_base = OTHER; note = 2'-O-methyl modified nucleotide

SEQ ID NO: 2635 - RNA, 101 nt, synthetic construct; identical to SEQ ID NO: 1635
  source 1..101: mol_type = other RNA
  modified_base 1: mod_base = OTHER; note = 2'-O-methyl modified nucleotide with phosphorothioate linkage
  modified_base 2: mod_base = OTHER; note = 2'-O-methyl modified nucleotide with phosphorothioate linkage
  modified_base 3: mod_base = OTHER; note = 2'-O-methyl modified nucleotide with phosphorothioate linkage
  modified_base 4: mod_base = OTHER; note = 2'-O-methyl modified nucleotide
  modified_base 5: mod_base = OTHER; note = 2'-O-methyl modified nucleotide
  modified_base 8: mod_base = OTHER; note = 2'-O-methyl modified nucleotide
  modified_base 9: mod_base = OTHER; note = 2'-O-methyl modified nucleotide
  modified_base 11: mod_base = OTHER; note = 2'-O-methyl modified nucleotide
  modified_base 13: mod_base = OTHER; note = 2'-O-methyl modified nucleotide
  modified_base 18: mod_base = OTHER; note = 2'-O-methyl modified nucleotide
  modified_base 22: mod_base = OTHER; note = 2'-O-methyl modified nucleotide
  modified_base 25: mod_base = OTHER; note = 2'-O-methyl modified nucleotide
  modified_base 29: mod_base = OTHER; note = 2'-O-methyl modified nucleotide
  modified_base 30: mod_base = OTHER; note = 2'-O-methyl modified nucleotide
  modified_base 31: mod_base = OTHER; note = 2'-O-methyl modified nucleotide
  modified_base 32: mod_base = OTHER; note = 2'-O-methyl modified nucleotide
  modified_base 37: mod_base = OTHER; note = 2'-O-methyl modified nucleotide
  modified_base 38: mod_base = OTHER; note = 2'-O-methyl modified nucleotide
  modified_base 39: mod_base = OTHER; note = 2'-O-methyl modified nucleotide
  modified_base 40: mod_base = OTHER; note = 2'-O-methyl modified nucleotide
  modified_base 41: mod_base = OTHER; note = 2'-O-methyl modified nucleotide
  modified_base 42: mod_base = OTHER; note = 2'-O-methyl modified nucleotide
  modified_base 43: mod_base = OTHER; note = 2'-O-methyl modified nucleotide
  modified_base 47: mod_base = OTHER; note = 2'-O-methyl modified nucleotide
  modified_base 48: mod_base = OTHER; note = 2'-O-methyl modified nucleotide
  modified_base 51: mod_base = OTHER; note = 2'-O-methyl modified nucleotide
  modified_base 54: mod_base = OTHER; note = nucleotide with phosphorothioate linkage
  modified_base 58: mod_base = OTHER; note = 2'-O-methyl modified nucleotide
  modified_base 59: mod_base = OTHER; note = 2'-O-methyl modified nucleotide
  modified_base 61: mod_base = OTHER; note = 2'-O-methyl modified nucleotide
  modified_base 62: mod_base = OTHER; note = 2'-O-methyl modified nucleotide
  modified_base 63: mod_base = OTHER; note = 2'-O-methyl modified nucleotide
  modified_base 64: mod_base = OTHER; note = 2'-O-methyl modified nucleotide
  modified_base 65: mod_base = OTHER; note = 2'-O-methyl modified nucleotide
  modified_base 66: mod_base = OTHER; note = 2'-O-methyl modified nucleotide
  modified_base 67: mod_base = OTHER; note = 2'-O-methyl modified nucleotide
  modified_base 68: mod_base = OTHER; note = 2'-O-methyl modified nucleotide
  modified_base 69: mod_base = OTHER; note = 2'-O-methyl modified nucleotide
  modified_base 70: mod_base = OTHER; note = 2'-O-methyl modified nucleotide
  modified_base 75: mod_base = OTHER; note = 2'-O-methyl modified nucleotide
  modified_base 77: mod_base = OTHER; note = 2'-O-methyl modified nucleotide
  modified_base 80: mod_base = OTHER; note = 2'-O-methyl modified nucleotide
  modified_base 86: mod_base = OTHER; note = 2'-O-methyl modified nucleotide
  modified_base 87: mod_base = OTHER; note = 2'-O-methyl modified nucleotide
  modified_base 89: mod_base = OTHER; note = 2'-O-methyl modified nucleotide
  modified_base 90: mod_base = OTHER; note = 2'-O-methyl modified nucleotide
  modified_base 91: mod_base = OTHER; note = 2'-O-methyl modified nucleotide
  modified_base 92: mod_base = OTHER; note = 2'-O-methyl modified nucleotide
  modified_base 99: mod_base = OTHER; note = nucleotide with phosphorothioate linkage
  modified_base 100: mod_base = OTHER; note = 2'-O-methyl modified nucleotide with phosphorothioate linkage
  modified_base 101: mod_base = OTHER; note = 2'-O-methyl modified nucleotide

SEQ ID NO: 2636 - RNA, 101 nt, synthetic construct; identical to SEQ ID NO: 1636
  source 1..101: mol_type = other RNA
  modified_base 1: mod_base = OTHER; note = 2'-O-methyl modified nucleotide with phosphorothioate linkage
  modified_base 2: mod_base = OTHER; note = 2'-O-methyl modified nucleotide with phosphorothioate linkage
  modified_base 3: mod_base = OTHER; note = 2'-O-methyl modified nucleotide with phosphorothioate linkage
  modified_base 4: mod_base = OTHER; note = 2'-O-methyl modified nucleotide
  modified_base 5: mod_base = OTHER; note = 2'-O-methyl modified nucleotide
  modified_base 8: mod_base = OTHER; note = 2'-O-methyl modified nucleotide
  modified_base 9: mod_base = OTHER; note = 2'-O-methyl modified nucleotide
  modified_base 11: mod_base = OTHER; note = 2'-O-methyl modified nucleotide
  modified_base 13: mod_base = OTHER; note = 2'-O-methyl modified nucleotide
  modified_base 18: mod_base = OTHER; note = 2'-O-methyl modified nucleotide
  modified_base 22: mod_base = OTHER; note = 2'-O-methyl modified nucleotide
  modified_base 25: mod_base = OTHER; note = 2'-O-methyl modified nucleotide
  modified_base 29: mod_base = OTHER; note = 2'-O-methyl modified nucleotide
  modified_base 30: mod_base = OTHER; note = 2'-O-methyl modified nucleotide
  modified_base 31: mod_base = OTHER; note = 2'-O-methyl modified nucleotide
  modified_base 32: mod_base = OTHER; note = 2'-O-methyl modified nucleotide
  modified_base 37: mod_base = OTHER; note = 2'-O-methyl modified nucleotide
  modified_base 38: mod_base = OTHER; note = 2'-O-methyl modified nucleotide
  modified_base 39: mod_base = OTHER; note = 2'-O-methyl modified nucleotide
  modified_base 40: mod_base = OTHER; note = 2'-O-methyl modified nucleotide
  modified_base 41: mod_base = OTHER; note = 2'-O-methyl modified nucleotide
  modified_base 42: mod_base = OTHER; note = 2'-O-methyl modified nucleotide
  modified_base 43: mod_base = OTHER; note = 2'-O-methyl modified nucleotide
  modified_base 47: mod_base = OTHER; note = 2'-O-methyl modified nucleotide
  modified_base 48: mod_base = OTHER; note = 2'-O-methyl modified nucleotide
  modified_base 51: mod_base = OTHER; note = 2'-O-methyl modified nucleotide
  modified_base 54: mod_base = OTHER; note = nucleotide with phosphorothioate linkage
  modified_base 58: mod_base = OTHER; note = 2'-O-methyl modified nucleotide
  modified_base 59: mod_base = OTHER; note = 2'-O-methyl modified nucleotide
  modified_base 61: mod_base = OTHER; note = 2'-O-methyl modified nucleotide
  modified_base 62: mod_base = OTHER; note = 2'-O-methyl modified nucleotide
  modified_base 63: mod_base = OTHER; note = 2'-O-methyl modified nucleotide
  modified_base 64: mod_base = OTHER; note = 2'-O-methyl modified nucleotide
  modified_base 65: mod_base = OTHER; note = 2'-O-methyl modified nucleotide
  modified_base 66: mod_base = OTHER; note = 2'-O-methyl modified nucleotide
  modified_base 67: mod_base = OTHER; note = 2'-O-methyl modified nucleotide
  modified_base 68: mod_base = OTHER; note = 2'-O-methyl modified nucleotide
  modified_base 69: mod_base = OTHER; note = 2'-O-methyl modified nucleotide
  modified_base 70: mod_base = OTHER; note = 2'-O-methyl modified nucleotide
  modified_base 75: mod_base = OTHER; note = 2'-O-methyl modified nucleotide
  modified_base 77: mod_base = OTHER; note = 2'-O-methyl modified nucleotide
  modified_base 80: mod_base = OTHER; note = 2'-O-methyl modified nucleotide
  modified_base 86: mod_base = OTHER; note = 2'-O-methyl modified nucleotide
  modified_base 87: mod_base = OTHER; note = 2'-O-methyl modified nucleotide
  modified_base 89: mod_base = OTHER; note = 2'-O-methyl modified nucleotide
  modified_base 90: mod_base = OTHER; note = 2'-O-methyl modified nucleotide
  modified_base 91: mod_base = OTHER; note = 2'-O-methyl modified nucleotide
  modified_base 92: mod_base = OTHER; note = 2'-O-methyl modified nucleotide
  modified_base 99: mod_base = OTHER; note = nucleotide with phosphorothioate linkage
  modified_base 100: mod_base = OTHER; note = 2'-O-methyl modified nucleotide with phosphorothioate linkage
  modified_base 101: mod_base = OTHER; note = 2'-O-methyl modified nucleotide

SEQ ID NO: 2637 - RNA, 101 nt, synthetic construct; identical to SEQ ID NO: 1637
  source 1..101: mol_type = other RNA
  modified_base 1: mod_base = OTHER; note = 2'-O-methyl modified nucleotide with phosphorothioate linkage
  modified_base 2: mod_base = OTHER; note = 2'-O-methyl modified nucleotide with phosphorothioate linkage
  modified_base 3: mod_base = OTHER; note = 2'-O-methyl modified nucleotide with phosphorothioate linkage
  modified_base 4: mod_base = OTHER; note = 2'-O-methyl modified nucleotide
  modified_base 5: mod_base = OTHER; note = 2'-O-methyl modified nucleotide
  modified_base 8: mod_base = OTHER; note = 2'-O-methyl modified nucleotide
  modified_base 9: mod_base = OTHER; note = 2'-O-methyl modified nucleotide
  modified_base 11: mod_base = OTHER; note = 2'-O-methyl modified nucleotide
  modified_base 13: mod_base = OTHER; note = 2'-O-methyl modified nucleotide
  modified_base 18: mod_base = OTHER; note = 2'-O-methyl modified nucleotide
  modified_base 22: mod_base = OTHER; note = 2'-O-methyl modified nucleotide
  modified_base 25: mod_base = OTHER; note = 2'-O-methyl modified nucleotide
  modified_base 29: mod_base = OTHER; note = 2'-O-methyl modified nucleotide
  modified_base 30: mod_base = OTHER; note = 2'-O-methyl modified nucleotide
  modified_base 31: mod_base = OTHER; note = 2'-O-methyl modified nucleotide
  modified_base 32: mod_base = OTHER; note = 2'-O-methyl modified nucleotide
  modified_base 37: mod_base = OTHER; note = 2'-O-methyl modified nucleotide
  modified_base 38: mod_base = OTHER; note = 2'-O-methyl modified nucleotide
  modified_base 39: mod_base = OTHER; note = 2'-O-methyl modified nucleotide
  modified_base 40: mod_base = OTHER; note = 2'-O-methyl modified nucleotide
  modified_base 41: mod_base = OTHER; note = 2'-O-methyl modified nucleotide
  modified_base 42: mod_base = OTHER; note = 2'-O-methyl modified nucleotide
  modified_base 43: mod_base = OTHER; note = 2'-O-methyl modified nucleotide
  modified_base 47: mod_base = OTHER; note = 2'-O-methyl modified nucleotide
  modified_base 48: mod_base = OTHER; note = 2'-O-methyl modified nucleotide
  modified_base 51: mod_base = OTHER; note = 2'-O-methyl modified nucleotide
  modified_base 54: mod_base = OTHER; note = nucleotide with phosphorothioate linkage
  modified_base 58: mod_base = OTHER; note = 2'-O-methyl modified nucleotide
  modified_base 59: mod_base = OTHER; note = 2'-O-methyl modified nucleotide
  modified_base 61: mod_base = OTHER; note = 2'-O-methyl modified nucleotide
  modified_base 62: mod_base = OTHER; note = 2'-O-methyl modified nucleotide
  modified_base 63: mod_base = OTHER; note = 2'-O-methyl modified nucleotide
  modified_base 64: mod_base = OTHER; note = 2'-O-methyl modified nucleotide
  modified_base 65: mod_base = OTHER; note = 2'-O-methyl modified nucleotide
  modified_base 66: mod_base = OTHER; note = 2'-O-methyl modified nucleotide
  modified_base 67: mod_base = OTHER; note = 2'-O-methyl modified nucleotide
  modified_base 68: mod_base = OTHER; note = 2'-O-methyl modified nucleotide
  modified_base 69: mod_base = OTHER; note = 2'-O-methyl modified nucleotide
  modified_base 70: mod_base = OTHER; note = 2'-O-methyl modified nucleotide
  modified_base 75: mod_base = OTHER; note = 2'-O-methyl modified nucleotide
  modified_base 77: mod_base = OTHER; note = 2'-O-methyl modified nucleotide
  modified_base 80: mod_base = OTHER; note = 2'-O-methyl modified nucleotide
  modified_base 86: mod_base = OTHER; note = 2'-O-methyl modified nucleotide
  modified_base 87: mod_base = OTHER; note = 2'-O-methyl modified nucleotide
  modified_base 89: mod_base = OTHER; note = 2'-O-methyl modified nucleotide
  modified_base 90: mod_base = OTHER; note = 2'-O-methyl modified nucleotide
  modified_base 91: mod_base = OTHER; note = 2'-O-methyl modified nucleotide
  modified_base 92: mod_base = OTHER; note = 2'-O-methyl modified nucleotide
  modified_base 99: mod_base = OTHER; note = nucleotide with phosphorothioate linkage
  modified_base 100: mod_base = OTHER; note = 2'-O-methyl modified nucleotide with phosphorothioate linkage
  modified_base 101: mod_base = OTHER; note = 2'-O-methyl modified nucleotide

SEQ ID NO: 2638 - RNA, 101 nt, synthetic construct; identical to SEQ ID NO: 1638
  source 1..101: mol_type = other RNA
  modified_base 1: mod_base = OTHER; note = 2'-O-methyl modified nucleotide with phosphorothioate linkage
  modified_base 2: mod_base = OTHER; note = 2'-O-methyl modified nucleotide with phosphorothioate linkage
  modified_base 3: mod_base = OTHER; note = 2'-O-methyl modified nucleotide with phosphorothioate linkage
  modified_base 4: mod_base = OTHER; note = 2'-O-methyl modified nucleotide
  modified_base 5: mod_base = OTHER; note = 2'-O-methyl modified nucleotide
  modified_base 8: mod_base = OTHER; note = 2'-O-methyl modified nucleotide
  modified_base 9: mod_base = OTHER; note = 2'-O-methyl modified nucleotide
  modified_base 11: mod_base = OTHER; note = 2'-O-methyl modified nucleotide
  modified_base 13: mod_base = OTHER; note = 2'-O-methyl modified nucleotide
  modified_base 18: mod_base = OTHER; note = 2'-O-methyl modified nucleotide
  modified_base 22: mod_base = OTHER; note = 2'-O-methyl modified nucleotide
  modified_base 25: mod_base = OTHER; note = 2'-O-methyl modified nucleotide
  modified_base 29: mod_base = OTHER; note = 2'-O-methyl modified nucleotide
  modified_base 30: mod_base = OTHER; note = 2'-O-methyl modified nucleotide
  modified_base 31: mod_base = OTHER; note = 2'-O-methyl modified nucleotide
  modified_base 32: mod_base = OTHER; note = 2'-O-methyl modified nucleotide
  modified_base 37: mod_base = OTHER; note = 2'-O-methyl modified nucleotide
  modified_base 38: mod_base = OTHER; note = 2'-O-methyl modified nucleotide
  modified_base 39: mod_base = OTHER; note = 2'-O-methyl modified nucleotide
  modified_base 40: mod_base = OTHER; note = 2'-O-methyl modified nucleotide
  modified_base 41: mod_base = OTHER; note = 2'-O-methyl modified nucleotide
  modified_base 42: mod_base = OTHER; note = 2'-O-methyl modified nucleotide
  modified_base 43: mod_base = OTHER; note = 2'-O-methyl modified nucleotide
  modified_base 47: mod_base = OTHER; note = 2'-O-methyl modified nucleotide
  modified_base 48: mod_base = OTHER; note = 2'-O-methyl modified nucleotide
  modified_base 51: mod_base = OTHER; note = 2'-O-methyl modified nucleotide
  modified_base 54: mod_base = OTHER; note = nucleotide with phosphorothioate linkage
  modified_base 58: mod_base = OTHER; note = 2'-O-methyl modified nucleotide
  modified_base 59: mod_base = OTHER; note = 2'-O-methyl modified nucleotide
  modified_base 61: mod_base = OTHER; note = 2'-O-methyl modified nucleotide
  modified_base 62: mod_base = OTHER; note = 2'-O-methyl modified nucleotide
  modified_base 63: mod_base = OTHER; note = 2'-O-methyl modified nucleotide
  modified_base 64: mod_base = OTHER; note = 2'-O-methyl modified nucleotide
  modified_base 65: mod_base = OTHER; note = 2'-O-methyl modified nucleotide
  modified_base 66: mod_base = OTHER; note = 2'-O-methyl modified nucleotide
  modified_base 67: mod_base = OTHER; note = 2'-O-methyl modified nucleotide
  modified_base 68: mod_base = OTHER; note = 2'-O-methyl modified nucleotide
  modified_base 69: mod_base = OTHER; note = 2'-O-methyl modified nucleotide
  modified_base 70: mod_base = OTHER; note = 2'-O-methyl modified nucleotide
  modified_base 75: mod_base = OTHER; note = 2'-O-methyl modified nucleotide
  modified_base 77: mod_base = OTHER; note = 2'-O-methyl modified nucleotide
  modified_base 80: mod_base = OTHER; note = 2'-O-methyl modified nucleotide
  modified_base 86: mod_base = OTHER; note = 2'-O-methyl modified nucleotide
  modified_base 87: mod_base = OTHER; note = 2'-O-methyl modified nucleotide
  modified_base 89: mod_base = OTHER; note = 2'-O-methyl modified nucleotide
  modified_base 90: mod_base = OTHER; note = 2'-O-methyl modified nucleotide
  modified_base 91: mod_base = OTHER; note = 2'-O-methyl modified nucleotide
  modified_base 92: mod_base = OTHER; note = 2'-O-methyl modified nucleotide
  modified_base 99: mod_base = OTHER; note = nucleotide with phosphorothioate linkage
  modified_base 100: mod_base = OTHER; note = 2'-O-methyl modified nucleotide with phosphorothioate linkage
  modified_base 101: mod_base = OTHER; note = 2'-O-methyl modified nucleotide

SEQ ID NO: 2639 - RNA, 101 nt, synthetic construct; identical to SEQ ID NO: 1639
  source 1..101: mol_type = other RNA
  modified_base 1: mod_base = OTHER; note = 2'-O-methyl modified nucleotide with phosphorothioate linkage
  modified_base 2: mod_base = OTHER; note = 2'-O-methyl modified nucleotide with phosphorothioate linkage
  modified_base 3: mod_base = OTHER; note = 2'-O-methyl modified nucleotide with phosphorothioate linkage
  modified_base 4: mod_base = OTHER; note = 2'-O-methyl modified nucleotide
  modified_base 5: mod_base = OTHER; note = 2'-O-methyl modified nucleotide
  modified_base 8: mod_base = OTHER; note = 2'-O-methyl modified nucleotide
  modified_base 9: mod_base = OTHER; note = 2'-O-methyl modified nucleotide
  modified_base 11: mod_base = OTHER; note = 2'-O-methyl modified nucleotide
  modified_base 13: mod_base = OTHER; note = 2'-O-methyl modified nucleotide
  modified_base 18: mod_base = OTHER; note = 2'-O-methyl modified nucleotide
  modified_base 22: mod_base = OTHER; note = 2'-O-methyl modified nucleotide
  modified_base 25: mod_base = OTHER; note = 2'-O-methyl modified nucleotide
  modified_base 29: mod_base = OTHER; note = 2'-O-methyl modified nucleotide
  modified_base 30: mod_base = OTHER; note = 2'-O-methyl modified nucleotide
  modified_base 31: mod_base = OTHER; note = 2'-O-methyl modified nucleotide
  modified_base 32: mod_base = OTHER; note = 2'-O-methyl modified nucleotide
  modified_base 37: mod_base = OTHER; note = 2'-O-methyl modified nucleotide
  modified_base 38: mod_base = OTHER; note = 2'-O-methyl modified nucleotide
  modified_base 39: mod_base = OTHER; note = 2'-O-methyl modified nucleotide
  modified_base 40: mod_base = OTHER; note = 2'-O-methyl modified nucleotide
  modified_base 41: mod_base = OTHER; note = 2'-O-methyl modified nucleotide
  modified_base 42: mod_base = OTHER; note = 2'-O-methyl modified nucleotide
  modified_base 43: mod_base = OTHER; note = 2'-O-methyl modified nucleotide
  modified_base 47: mod_base = OTHER; note = 2'-O-methyl modified nucleotide
  modified_base 48: mod_base = OTHER; note = 2'-O-methyl modified nucleotide
  modified_base 51: mod_base = OTHER; note = 2'-O-methyl modified nucleotide
  modified_base 54: mod_base = OTHER; note = nucleotide with phosphorothioate linkage
  modified_base 58: mod_base = OTHER; note = 2'-O-methyl modified nucleotide
  modified_base 59: mod_base = OTHER; note = 2'-O-methyl modified nucleotide
  modified_base 61: mod_base = OTHER; note = 2'-O-methyl modified nucleotide
  modified_base 62: mod_base = OTHER; note = 2'-O-methyl modified nucleotide
  modified_base 63: mod_base = OTHER; note = 2'-O-methyl modified nucleotide
  modified_base 64: mod_base = OTHER; note = 2'-O-methyl modified nucleotide
  modified_base 65: mod_base = OTHER; note = 2'-O-methyl modified nucleotide
  modified_base 66: mod_base = OTHER; note = 2'-O-methyl modified nucleotide
  modified_base 67: mod_base = OTHER; note = 2'-O-methyl modified nucleotide
  modified_base 68: mod_base = OTHER; note = 2'-O-methyl modified nucleotide
  modified_base 69: mod_base = OTHER; note = 2'-O-methyl modified nucleotide
  modified_base 70: mod_base = OTHER; note = 2'-O-methyl modified nucleotide
  modified_base 75: mod_base = OTHER; note = 2'-O-methyl modified nucleotide
  modified_base 77: mod_base = OTHER; note = 2'-O-methyl modified nucleotide
  modified_base 80: mod_base = OTHER; note = 2'-O-methyl modified nucleotide
  modified_base 86: mod_base = OTHER; note = 2'-O-methyl modified nucleotide
  modified_base 87: mod_base = OTHER; note = 2'-O-methyl modified nucleotide
  modified_base 89: mod_base = OTHER; note = 2'-O-methyl modified nucleotide
  modified_base 90: mod_base = OTHER; note = 2'-O-methyl modified nucleotide
  modified_base 91: mod_base = OTHER; note = 2'-O-methyl modified nucleotide
  modified_base 92: mod_base = OTHER; note = 2'-O-methyl modified nucleotide
  modified_base 99: mod_base = OTHER; note = nucleotide with phosphorothioate linkage
  modified_base 100: mod_base = OTHER; note = 2'-O-methyl modified nucleotide with phosphorothioate linkage
  modified_base 101: mod_base = OTHER; note = 2'-O-methyl modified nucleotide

SEQ ID NO: 2640 - RNA, 101 nt, synthetic construct; identical to SEQ ID NO: 1640
  source 1..101: mol_type = other RNA
  modified_base 1: mod_base = OTHER; note = 2'-O-methyl modified nucleotide with phosphorothioate linkage
  modified_base 2: mod_base = OTHER; note = 2'-O-methyl modified nucleotide with phosphorothioate linkage
  modified_base 3: mod_base = OTHER; note = 2'-O-methyl modified nucleotide with phosphorothioate linkage
  modified_base 4: mod_base = OTHER; note = 2'-O-methyl modified nucleotide
  modified_base 5: mod_base = OTHER; note = 2'-O-methyl modified nucleotide
  modified_base 8: mod_base = OTHER; note = 2'-O-methyl modified nucleotide
  modified_base 9: mod_base = OTHER; note = 2'-O-methyl modified nucleotide
  modified_base 11: mod_base = OTHER; note = 2'-O-methyl modified nucleotide
  modified_base 13: mod_base = OTHER; note = 2'-O-methyl modified nucleotide
  modified_base 18: mod_base = OTHER; note = 2'-O-methyl modified nucleotide
  modified_base 22: mod_base = OTHER; note = 2'-O-methyl modified nucleotide
  modified_base 25: mod_base = OTHER; note = 2'-O-methyl modified nucleotide
  modified_base 29: mod_base = OTHER; note = 2'-O-methyl modified nucleotide
  modified_base 30: mod_base = OTHER; note = 2'-O-methyl modified nucleotide
  modified_base 31: mod_base = OTHER; note = 2'-O-methyl modified nucleotide
  modified_base 32: mod_base = OTHER; note = 2'-O-methyl modified nucleotide
  modified_base 37: mod_base = OTHER; note = 2'-O-methyl modified nucleotide
  modified_base 38: mod_base = OTHER; note = 2'-O-methyl modified nucleotide
  modified_base 39: mod_base = OTHER; note = 2'-O-methyl modified nucleotide
  modified_base 40: mod_base = OTHER; note = 2'-O-methyl modified nucleotide
  modified_base 41: mod_base = OTHER; note = 2'-O-methyl modified nucleotide
  modified_base 42: mod_base = OTHER; note = 2'-O-methyl modified nucleotide
  modified_base 43: mod_base = OTHER; note = 2'-O-methyl modified nucleotide
  modified_base 47: mod_base = OTHER; note = 2'-O-methyl modified nucleotide
  modified_base 48: mod_base = OTHER; note = 2'-O-methyl modified nucleotide
  modified_base 51: mod_base = OTHER; note = 2'-O-methyl modified nucleotide
  modified_base 54: mod_base = OTHER; note = nucleotide with phosphorothioate linkage
  modified_base 58: mod_base = OTHER; note = 2'-O-methyl modified nucleotide
  modified_base 59: mod_base = OTHER; note = 2'-O-methyl modified nucleotide
  modified_base 61: mod_base = OTHER; note = 2'-O-methyl modified nucleotide
  modified_base 62: mod_base = OTHER; note = 2'-O-methyl modified nucleotide
  modified_base 63: mod_base = OTHER; note = 2'-O-methyl modified nucleotide
  modified_base 64: mod_base = OTHER; note = 2'-O-methyl modified nucleotide
  modified_base 65: mod_base = OTHER; note = 2'-O-methyl modified nucleotide
  modified_base 66: mod_base = OTHER; note = 2'-O-methyl modified nucleotide
  modified_base 67: mod_base = OTHER; note = 2'-O-methyl modified nucleotide
  modified_base 68: mod_base = OTHER; note = 2'-O-methyl modified nucleotide
  modified_base 69: mod_base = OTHER; note = 2'-O-methyl modified nucleotide
  modified_base 70: mod_base = OTHER; note = 2'-O-methyl modified nucleotide
  modified_base 75: mod_base = OTHER; note = 2'-O-methyl modified nucleotide
  modified_base 77: mod_base = OTHER; note = 2'-O-methyl modified nucleotide
  modified_base 80: mod_base = OTHER; note = 2'-O-methyl modified nucleotide
  modified_base 86: mod_base = OTHER; note = 2'-O-methyl modified nucleotide
  modified_base 87: mod_base = OTHER; note = 2'-O-methyl modified nucleotide
  modified_base 89: mod_base = OTHER; note = 2'-O-methyl modified nucleotide
  modified_base 90: mod_base = OTHER; note = 2'-O-methyl modified nucleotide
  modified_base 91: mod_base = OTHER; note = 2'-O-methyl modified nucleotide
  modified_base 92: mod_base = OTHER; note = 2'-O-methyl modified nucleotide
  modified_base 99: mod_base = OTHER; note = nucleotide with phosphorothioate linkage
  modified_base 100: mod_base = OTHER; note = 2'-O-methyl modified nucleotide with phosphorothioate linkage
  modified_base 101: mod_base = OTHER; note = 2'-O-methyl modified nucleotide

SEQ ID NO: 2641 - RNA, 101 nt, synthetic construct; identical to SEQ ID NO: 1641
  source 1..101: mol_type = other RNA
  modified_base 1: mod_base = OTHER; note = 2'-O-methyl modified nucleotide with phosphorothioate linkage
  modified_base 2: mod_base = OTHER; note = 2'-O-methyl modified nucleotide with phosphorothioate linkage
  modified_base 3: mod_base = OTHER; note = 2'-O-methyl modified nucleotide with phosphorothioate linkage
  modified_base 4: mod_base = OTHER; note = 2'-O-methyl modified nucleotide
  modified_base 5: mod_base = OTHER; note = 2'-O-methyl modified nucleotide
  modified_base 8: mod_base = OTHER; note = 2'-O-methyl modified nucleotide
  modified_base 9: mod_base = OTHER; note = 2'-O-methyl modified nucleotide
  modified_base 11: mod_base = OTHER; note = 2'-O-methyl modified nucleotide
  modified_base 13: mod_base = OTHER; note = 2'-O-methyl modified nucleotide
  modified_base 18: mod_base = OTHER; note = 2'-O-methyl modified nucleotide
  modified_base 22: mod_base = OTHER; note = 2'-O-methyl modified nucleotide
  modified_base 25: mod_base = OTHER; note = 2'-O-methyl modified nucleotide
  modified_base 29: mod_base = OTHER; note = 2'-O-methyl modified nucleotide
  modified_base 30: mod_base = OTHER; note = 2'-O-methyl modified nucleotide
  modified_base 31: mod_base = OTHER; note = 2'-O-methyl modified nucleotide
  modified_base 32: mod_base = OTHER; note = 2'-O-methyl modified nucleotide
  modified_base 37: mod_base = OTHER; note = 2'-O-methyl modified nucleotide
  modified_base 38: mod_base = OTHER; note = 2'-O-methyl modified nucleotide
  modified_base 39: mod_base = OTHER; note = 2'-O-methyl modified nucleotide
  modified_base 40: mod_base = OTHER; note = 2'-O-methyl modified nucleotide
  modified_base 41: mod_base = OTHER; note = 2'-O-methyl modified nucleotide
  modified_base 42: mod_base = OTHER; note = 2'-O-methyl modified nucleotide
  modified_base 43: mod_base = OTHER; note = 2'-O-methyl modified nucleotide
  modified_base 47: mod_base = OTHER; note = 2'-O-methyl modified nucleotide
  modified_base 48: mod_base = OTHER; note = 2'-O-methyl modified nucleotide
  modified_base 51: mod_base = OTHER; note = 2'-O-methyl modified nucleotide
  modified_base 54: mod_base = OTHER; note = nucleotide with phosphorothioate linkage
  modified_base 58: mod_base = OTHER; note = 2'-O-methyl modified nucleotide
  modified_base 59: mod_base = OTHER; note = 2'-O-methyl modified nucleotide
  modified_base 61: mod_base = OTHER; note = 2'-O-methyl modified nucleotide
  modified_base 62: mod_base = OTHER; note = 2'-O-methyl modified nucleotide
  modified_base 63: mod_base = OTHER; note = 2'-O-methyl modified nucleotide
  modified_base 64: mod_base = OTHER; note = 2'-O-methyl modified nucleotide
  modified_base 65: mod_base = OTHER; note = 2'-O-methyl modified nucleotide
  modified_base 66: mod_base = OTHER; note = 2'-O-methyl modified nucleotide
  modified_base 67: mod_base = OTHER; note = 2'-O-methyl modified nucleotide
  modified_base 68: mod_base = OTHER; note = 2'-O-methyl modified nucleotide
  modified_base 69: mod_base = OTHER; note = 2'-O-methyl modified nucleotide
  modified_base 70: mod_base = OTHER; note = 2'-O-methyl modified nucleotide
  modified_base 75: mod_base = OTHER; note = 2'-O-methyl modified nucleotide
  modified_base 77: mod_base = OTHER; note = 2'-O-methyl modified nucleotide
  modified_base 80: mod_base = OTHER; note = 2'-O-methyl modified nucleotide
  modified_base 86: mod_base = OTHER; note = 2'-O-methyl modified nucleotide
  modified_base 87: mod_base = OTHER; note = 2'-O-methyl modified nucleotide
  modified_base 89: mod_base = OTHER; note = 2'-O-methyl modified nucleotide
  modified_base 90: mod_base = OTHER; note = 2'-O-methyl modified nucleotide
  modified_base 91: mod_base = OTHER; note = 2'-O-methyl modified nucleotide
  modified_base 92: mod_base = OTHER; note = 2'-O-methyl modified nucleotide
  modified_base 99: mod_base = OTHER; note = nucleotide with phosphorothioate linkage
  modified_base 100: mod_base = OTHER; note = 2'-O-methyl modified nucleotide with phosphorothioate linkage
  modified_base 101: mod_base = OTHER; note = 2'-O-methyl modified nucleotide

SEQ ID NO: 2642 - RNA, 101 nt, synthetic construct; identical to SEQ ID NO: 1642
  source 1..101: mol_type = other RNA
  modified_base 1: mod_base = OTHER; note = 2'-O-methyl modified nucleotide with phosphorothioate linkage
  modified_base 2: mod_base = OTHER; note = 2'-O-methyl modified nucleotide with phosphorothioate linkage
  modified_base 3: mod_base = OTHER; note = 2'-O-methyl modified nucleotide with phosphorothioate linkage
  modified_base 4: mod_base = OTHER; note = 2'-O-methyl modified nucleotide
  modified_base 5: mod_base = OTHER; note = 2'-O-methyl modified nucleotide
  modified_base 8: mod_base = OTHER; note = 2'-O-methyl modified nucleotide
  modified_base 9: mod_base = OTHER; note = 2'-O-methyl modified nucleotide
  modified_base 11: mod_base = OTHER; note = 2'-O-methyl modified nucleotide
  modified_base 13: mod_base = OTHER; note = 2'-O-methyl modified nucleotide
  modified_base 18: mod_base = OTHER; note = 2'-O-methyl modified nucleotide
  modified_base 22: mod_base = OTHER; note = 2'-O-methyl modified nucleotide
  modified_base 25: mod_base = OTHER; note = 2'-O-methyl modified nucleotide
  modified_base 29: mod_base = OTHER; note = 2'-O-methyl modified nucleotide
  modified_base 30: mod_base = OTHER; note = 2'-O-methyl modified nucleotide
  modified_base 31: mod_base = OTHER; note = 2'-O-methyl modified nucleotide
  modified_base 32: mod_base = OTHER; note = 2'-O-methyl modified nucleotide
  modified_base 37: mod_base = OTHER; note = 2'-O-methyl modified nucleotide
  modified_base 38: mod_base = OTHER; note = 2'-O-methyl modified nucleotide
  modified_base 39: mod_base = OTHER; note = 2'-O-methyl modified nucleotide
  modified_base 40: mod_base = OTHER; note = 2'-O-methyl modified nucleotide
  modified_base 41: mod_base = OTHER; note = 2'-O-methyl modified nucleotide
  modified_base 42: mod_base = OTHER; note = 2'-O-methyl modified nucleotide
  modified_base 43: mod_base = OTHER; note = 2'-O-methyl modified nucleotide
  modified_base 47: mod_base = OTHER; note = 2'-O-methyl modified nucleotide
  modified_base 48: mod_base = OTHER; note = 2'-O-methyl modified nucleotide
  modified_base 51: mod_base = OTHER; note = 2'-O-methyl modified nucleotide
  modified_base 54: mod_base = OTHER; note = nucleotide with phosphorothioate linkage
  modified_base 58: mod_base = OTHER; note = 2'-O-methyl modified nucleotide
  modified_base 59: mod_base = OTHER; note = 2'-O-methyl modified nucleotide
  modified_base 61: mod_base = OTHER; note = 2'-O-methyl modified nucleotide
  modified_base 62: mod_base = OTHER; note = 2'-O-methyl modified nucleotide
  modified_base 63: mod_base = OTHER; note = 2'-O-methyl modified nucleotide
  modified_base 64: mod_base = OTHER; note = 2'-O-methyl modified nucleotide
  modified_base 65: mod_base = OTHER; note = 2'-O-methyl modified nucleotide
  modified_base 66: mod_base = OTHER; note = 2'-O-methyl modified nucleotide
  modified_base 67: mod_base = OTHER; note = 2'-O-methyl modified nucleotide
  modified_base 68: mod_base = OTHER; note = 2'-O-methyl modified nucleotide
  modified_base 69: mod_base = OTHER; note = 2'-O-methyl modified nucleotide
  modified_base 70: mod_base = OTHER; note = 2'-O-methyl modified nucleotide
  modified_base 75: mod_base = OTHER; note = 2'-O-methyl modified nucleotide
  modified_base 77: mod_base = OTHER; note = 2'-O-methyl modified nucleotide
  modified_base 80: mod_base = OTHER; note = 2'-O-methyl modified nucleotide
  modified_base 86: mod_base = OTHER; note = 2'-O-methyl modified nucleotide
  modified_base 87: mod_base = OTHER; note = 2'-O-methyl modified nucleotide
  modified_base 89: mod_base = OTHER; note = 2'-O-methyl modified nucleotide
  modified_base 90: mod_base = OTHER; note = 2'-O-methyl modified nucleotide
  modified_base 91: mod_base = OTHER; note = 2'-O-methyl modified nucleotide
  modified_base 92: mod_base = OTHER; note = 2'-O-methyl modified nucleotide
  modified_base 99: mod_base = OTHER; note = nucleotide with phosphorothioate linkage
  modified_base 100: mod_base = OTHER; note = 2'-O-methyl modified nucleotide with phosphorothioate linkage
  modified_base 101: mod_base = OTHER; note = 2'-O-methyl modified nucleotide

SEQ ID NO: 2643 - RNA, 101 nt, synthetic construct; identical to SEQ ID NO: 1643
  source 1..101: mol_type = other RNA
  modified_base 1: mod_base = OTHER; note = 2'-O-methyl modified nucleotide with phosphorothioate linkage
  modified_base 2: mod_base = OTHER; note = 2'-O-methyl modified nucleotide with phosphorothioate linkage
  modified_base 3: mod_base = OTHER; note = 2'-O-methyl modified nucleotide with phosphorothioate linkage
  modified_base 4: mod_base = OTHER; note = 2'-O-methyl modified nucleotide
  modified_base 5: mod_base = OTHER; note = 2'-O-methyl modified nucleotide
  modified_base 8: mod_base = OTHER; note = 2'-O-methyl modified nucleotide
  modified_base 9: mod_base = OTHER; note = 2'-O-methyl modified nucleotide
  modified_base 11: mod_base = OTHER; note = 2'-O-methyl modified nucleotide
  modified_base 13: mod_base = OTHER; note = 2'-O-methyl modified nucleotide
  modified_base 18: mod_base = OTHER; note = 2'-O-methyl modified nucleotide
  modified_base 22: mod_base = OTHER; note = 2'-O-methyl modified nucleotide
  modified_base 25: mod_base = OTHER; note = 2'-O-methyl modified nucleotide
  modified_base 29: mod_base = OTHER; note = 2'-O-methyl modified nucleotide
  modified_base 30: mod_base = OTHER; note = 2'-O-methyl modified nucleotide
  modified_base 31: mod_base = OTHER; note = 2'-O-methyl modified nucleotide
  modified_base 32: mod_base = OTHER; note = 2'-O-methyl modified nucleotide
  modified_base 37: mod_base = OTHER; note = 2'-O-methyl modified nucleotide
  modified_base 38: mod_base = OTHER; note = 2'-O-methyl modified nucleotide
  modified_base 39: mod_base = OTHER; note = 2'-O-methyl modified nucleotide
  modified_base 40: mod_base = OTHER; note = 2'-O-methyl modified nucleotide
  modified_base 41: mod_base = OTHER; note = 2'-O-methyl modified nucleotide
  modified_base 42: mod_base = OTHER; note = 2'-O-methyl modified nucleotide
  modified_base 43: mod_base = OTHER; note = 2'-O-methyl modified nucleotide
  modified_base 47: mod_base = OTHER; note = 2'-O-methyl modified nucleotide
  modified_base 48: mod_base = OTHER; note = 2'-O-methyl modified nucleotide
  modified_base 51: mod_base = OTHER; note = 2'-O-methyl modified nucleotide
  modified_base 54: mod_base = OTHER; note = nucleotide with phosphorothioate linkage
  modified_base 58: mod_base = OTHER; note = 2'-O-methyl modified nucleotide
  modified_base 59: mod_base = OTHER; note = 2'-O-methyl modified nucleotide
  modified_base 61: mod_base = OTHER; note = 2'-O-methyl modified nucleotide
  modified_base 62: mod_base = OTHER; note = 2'-O-methyl modified nucleotide
  modified_base 63: mod_base = OTHER; note = 2'-O-methyl modified nucleotide
  modified_base 64: mod_base = OTHER; note = 2'-O-methyl modified nucleotide
  modified_base 65: mod_base = OTHER; note = 2'-O-methyl modified nucleotide
  modified_base 66: mod_base = OTHER; note = 2'-O-methyl modified nucleotide
  modified_base 67: mod_base = OTHER; note = 2'-O-methyl modified nucleotide
  modified_base 68: mod_base = OTHER; note = 2'-O-methyl modified nucleotide
  modified_base 69: mod_base = OTHER; note = 2'-O-methyl modified nucleotide
  modified_base 70: mod_base = OTHER; note = 2'-O-methyl modified nucleotide
  modified_base 75: mod_base = OTHER; note = 2'-O-methyl modified nucleotide
  modified_base 77: mod_base = OTHER; note = 2'-O-methyl modified nucleotide
  modified_base 80: mod_base = OTHER; note = 2'-O-methyl modified nucleotide
  modified_base 86: mod_base = OTHER; note = 2'-O-methyl modified nucleotide
  modified_base 87: mod_base = OTHER; note = 2'-O-methyl modified nucleotide
  modified_base 89: mod_base = OTHER; note = 2'-O-methyl modified nucleotide
  modified_base 90: mod_base = OTHER; note = 2'-O-methyl modified nucleotide
  modified_base 91: mod_base = OTHER; note = 2'-O-methyl modified nucleotide
  modified_base 92: mod_base = OTHER; note = 2'-O-methyl modified nucleotide
  modified_base 99: mod_base = OTHER; note = nucleotide with phosphorothioate linkage
  modified_base 100: mod_base = OTHER; note = 2'-O-methyl modified nucleotide with phosphorothioate linkage
  modified_base 101: mod_base = OTHER; note = 2'-O-methyl modified nucleotide

SEQ ID NO: 2644 - RNA, 101 nt, synthetic construct; identical to SEQ ID NO: 1644
  source 1..101: mol_type = other RNA
  modified_base 1: mod_base = OTHER; note = 2'-O-methyl modified nucleotide with phosphorothioate linkage
  modified_base 2: mod_base = OTHER; note = 2'-O-methyl modified nucleotide with phosphorothioate linkage
  modified_base 3: mod_base = OTHER; note = 2'-O-methyl modified nucleotide with phosphorothioate linkage
  modified_base 4: mod_base = OTHER; note = 2'-O-methyl modified nucleotide
  modified_base 5: mod_base = OTHER; note = 2'-O-methyl modified nucleotide
  modified_base 8: mod_base = OTHER; note = 2'-O-methyl modified nucleotide
  modified_base 9: mod_base = OTHER; note = 2'-O-methyl modified nucleotide
  modified_base 11: mod_base = OTHER; note = 2'-O-methyl modified nucleotide
  modified_base 13: mod_base = OTHER; note = 2'-O-methyl modified nucleotide
  modified_base 18: mod_base = OTHER; note = 2'-O-methyl modified nucleotide
  modified_base 22: mod_base = OTHER; note = 2'-O-methyl modified nucleotide
  modified_base 25: mod_base = OTHER; note = 2'-O-methyl modified nucleotide
  modified_base 29: mod_base = OTHER; note = 2'-O-methyl modified nucleotide
  modified_base 30: mod_base = OTHER; note = 2'-O-methyl modified nucleotide
  modified_base 31: mod_base = OTHER; note = 2'-O-methyl modified nucleotide
  modified_base 32: mod_base = OTHER; note = 2'-O-methyl modified nucleotide
  modified_base 37: mod_base = OTHER; note = 2'-O-methyl modified nucleotide
  modified_base 38: mod_base = OTHER; note = 2'-O-methyl modified nucleotide
  modified_base 39: mod_base = OTHER; note = 2'-O-methyl modified nucleotide
  modified_base 40: mod_base = OTHER; note = 2'-O-methyl modified nucleotide
  modified_base 41: mod_base = OTHER; note = 2'-O-methyl modified nucleotide
  modified_base 42: mod_base = OTHER; note = 2'-O-methyl modified nucleotide
  modified_base 43: mod_base = OTHER; note = 2'-O-methyl modified nucleotide
  modified_base 47: mod_base = OTHER; note = 2'-O-methyl modified nucleotide
  modified_base 48: mod_base = OTHER; note = 2'-O-methyl modified nucleotide
  modified_base 51: mod_base = OTHER; note = 2'-O-methyl modified nucleotide
  modified_base 54: mod_base = OTHER; note = nucleotide with phosphorothioate linkage
  modified_base 58: mod_base = OTHER; note = 2'-O-methyl modified nucleotide
  modified_base 59: mod_base = OTHER; note = 2'-O-methyl modified nucleotide
  modified_base 61: mod_base = OTHER; note = 2'-O-methyl modified nucleotide
  modified_base 62: mod_base = OTHER; note = 2'-O-methyl modified nucleotide
  modified_base 63: mod_base = OTHER; note = 2'-O-methyl modified nucleotide
  modified_base 64: mod_base = OTHER; note = 2'-O-methyl modified nucleotide
  modified_base 65: mod_base = OTHER; note = 2'-O-methyl modified nucleotide
  modified_base 66: mod_base = OTHER; note = 2'-O-methyl modified nucleotide
  modified_base 67: mod_base = OTHER; note = 2'-O-methyl modified nucleotide
  modified_base 68: mod_base = OTHER; note = 2'-O-methyl modified nucleotide
  modified_base 69: mod_base = OTHER; note = 2'-O-methyl modified nucleotide
  modified_base 70: mod_base = OTHER; note = 2'-O-methyl modified nucleotide
  modified_base 75: mod_base = OTHER; note = 2'-O-methyl modified nucleotide
  modified_base 77: mod_base = OTHER; note = 2'-O-methyl modified nucleotide
  modified_base 80: mod_base = OTHER; note = 2'-O-methyl modified nucleotide
  modified_base 86: mod_base = OTHER; note = 2'-O-methyl modified nucleotide
  modified_base 87: mod_base = OTHER; note = 2'-O-methyl modified nucleotide
  modified_base 89: mod_base = OTHER; note = 2'-O-methyl modified nucleotide
  modified_base 90: mod_base = OTHER; note = 2'-O-methyl modified nucleotide
  modified_base 91: mod_base = OTHER; note = 2'-O-methyl modified nucleotide
  modified_base 92: mod_base = OTHER; note = 2'-O-methyl modified nucleotide
  modified_base 99: mod_base = OTHER; note = nucleotide with phosphorothioate linkage
  modified_base 100: mod_base = OTHER; note = 2'-O-methyl modified nucleotide with phosphorothioate linkage
  modified_base 101: mod_base = OTHER; note = 2'-O-methyl modified nucleotide

SEQ ID NO: 2645 - RNA, 101 nt, synthetic construct; identical to SEQ ID NO: 1645
  source 1..101: mol_type = other RNA
  modified_base 1: mod_base = OTHER; note = 2'-O-methyl modified nucleotide with phosphorothioate linkage
  modified_base 2: mod_base = OTHER; note = 2'-O-methyl modified nucleotide with phosphorothioate linkage
  modified_base 3: mod_base = OTHER; note = 2'-O-methyl modified nucleotide with phosphorothioate linkage
  modified_base 4: mod_base = OTHER; note = 2'-O-methyl modified nucleotide
  modified_base 5: mod_base = OTHER; note = 2'-O-methyl modified nucleotide
  modified_base 8: mod_base = OTHER; note = 2'-O-methyl modified nucleotide
  modified_base 9: mod_base = OTHER; note = 2'-O-methyl modified nucleotide
  modified_base 11: mod_base = OTHER; note = 2'-O-methyl modified nucleotide
  modified_base 13: mod_base = OTHER; note = 2'-O-methyl modified nucleotide
  modified_base 18: mod_base = OTHER; note = 2'-O-methyl modified nucleotide
  modified_base 22: mod_base = OTHER; note = 2'-O-methyl modified nucleotide
  modified_base 25: mod_base = OTHER; note = 2'-O-methyl modified nucleotide
  modified_base 29: mod_base = OTHER; note = 2'-O-methyl modified nucleotide
  modified_base 30: mod_base = OTHER; note = 2'-O-methyl modified nucleotide
  modified_base 31: mod_base = OTHER; note = 2'-O-methyl modified nucleotide
  modified_base 32: mod_base = OTHER; note = 2'-O-methyl modified nucleotide
  modified_base 37: mod_base = OTHER; note = 2'-O-methyl modified nucleotide
  modified_base 38: mod_base = OTHER; note = 2'-O-methyl modified nucleotide
  modified_base 39: mod_base = OTHER; note = 2'-O-methyl modified nucleotide
  modified_base 40: mod_base = OTHER; note = 2'-O-methyl modified nucleotide
  modified_base 41: mod_base = OTHER; note = 2'-O-methyl modified nucleotide
  modified_base 42: mod_base = OTHER; note = 2'-O-methyl modified nucleotide
  modified_base 43: mod_base = OTHER; note = 2'-O-methyl modified nucleotide
  modified_base 47: mod_base = OTHER; note = 2'-O-methyl modified nucleotide
  modified_base 48: mod_base = OTHER; note = 2'-O-methyl modified nucleotide
  modified_base 51: mod_base = OTHER; note = 2'-O-methyl modified nucleotide
  modified_base 54: mod_base = OTHER; note = nucleotide with phosphorothioate linkage
  modified_base 58: mod_base = OTHER; note = 2'-O-methyl modified nucleotide
  modified_base 59: mod_base = OTHER; note = 2'-O-methyl modified nucleotide
  modified_base 61: mod_base = OTHER; note = 2'-O-methyl modified nucleotide
  modified_base 62: mod_base = OTHER; note = 2'-O-methyl modified nucleotide
  modified_base 63: mod_base = OTHER; note = 2'-O-methyl modified nucleotide
  modified_base 64: mod_base = OTHER; note = 2'-O-methyl modified nucleotide
  modified_base 65: mod_base = OTHER; note = 2'-O-methyl modified nucleotide
  modified_base 66: mod_base = OTHER; note = 2'-O-methyl modified nucleotide
  modified_base 67: mod_base = OTHER; note = 2'-O-methyl modified nucleotide
  modified_base 68: mod_base = OTHER; note = 2'-O-methyl modified nucleotide
  modified_base 69: mod_base = OTHER; note = 2'-O-methyl modified nucleotide
  modified_base 70: mod_base = OTHER; note = 2'-O-methyl modified nucleotide
  modified_base 75: mod_base = OTHER; note = 2'-O-methyl modified nucleotide
  modified_base 77: mod_base = OTHER; note = 2'-O-methyl modified nucleotide
  modified_base 80: mod_base = OTHER; note = 2'-O-methyl modified nucleotide
  modified_base 86: mod_base = OTHER; note = 2'-O-methyl modified nucleotide
  modified_base 87: mod_base = OTHER; note = 2'-O-methyl modified nucleotide
  modified_base 89: mod_base = OTHER; note = 2'-O-methyl modified nucleotide
  modified_base 90: mod_base = OTHER; note = 2'-O-methyl modified nucleotide
  modified_base 91: mod_base = OTHER; note = 2'-O-methyl modified nucleotide
  modified_base 92: mod_base = OTHER; note = 2'-O-methyl modified nucleotide
  modified_base 99: mod_base = OTHER; note = nucleotide with phosphorothioate linkage
  modified_base 100: mod_base = OTHER; note = 2'-O-methyl modified nucleotide with phosphorothioate linkage
  modified_base 101: mod_base = OTHER; note = 2'-O-methyl modified nucleotide

SEQ ID NO: 2646 - RNA, 101 nt, synthetic construct; identical to SEQ ID NO: 1646
  source 1..101: mol_type = other RNA
  modified_base 1: mod_base = OTHER; note = 2'-O-methyl modified nucleotide with phosphorothioate linkage
  modified_base 2: mod_base = OTHER; note = 2'-O-methyl modified nucleotide with phosphorothioate linkage
  modified_base 3: mod_base = OTHER; note = 2'-O-methyl modified nucleotide with phosphorothioate linkage
  modified_base 4: mod_base = OTHER; note = 2'-O-methyl modified nucleotide
  modified_base 5: mod_base = OTHER; note = 2'-O-methyl modified nucleotide
  modified_base 8: mod_base = OTHER; note = 2'-O-methyl modified nucleotide
  modified_base 9: mod_base = OTHER; note = 2'-O-methyl modified nucleotide
  modified_base 11: mod_base = OTHER; note = 2'-O-methyl modified nucleotide
  modified_base 13: mod_base = OTHER; note = 2'-O-methyl modified nucleotide
  modified_base 18: mod_base = OTHER; note = 2'-O-methyl modified nucleotide
  modified_base 22: mod_base = OTHER; note = 2'-O-methyl modified nucleotide
  modified_base 25: mod_base = OTHER; note = 2'-O-methyl modified nucleotide
  modified_base 29: mod_base = OTHER; note = 2'-O-methyl modified nucleotide
  modified_base 30: mod_base = OTHER; note = 2'-O-methyl modified nucleotide
  modified_base 31: mod_base = OTHER; note = 2'-O-methyl modified nucleotide
  modified_base 32: mod_base = OTHER; note = 2'-O-methyl modified nucleotide
  modified_base 37: mod_base = OTHER; note = 2'-O-methyl modified nucleotide
  modified_base 38: mod_base = OTHER; note = 2'-O-methyl modified nucleotide
  modified_base 39: mod_base = OTHER; note = 2'-O-methyl modified nucleotide
  modified_base 40: mod_base = OTHER; note = 2'-O-methyl modified nucleotide
  modified_base 41: mod_base = OTHER; note = 2'-O-methyl modified nucleotide
  modified_base 42: mod_base = OTHER; note = 2'-O-methyl modified nucleotide
  modified_base 43: mod_base = OTHER; note = 2'-O-methyl modified nucleotide
  modified_base 47: mod_base = OTHER; note = 2'-O-methyl modified nucleotide
  modified_base 48: mod_base = OTHER; note = 2'-O-methyl modified nucleotide
  modified_base 51: mod_base = OTHER; note = 2'-O-methyl modified nucleotide
  modified_base 54: mod_base = OTHER; note = nucleotide with phosphorothioate linkage
  modified_base 58: mod_base = OTHER; note = 2'-O-methyl modified nucleotide
  modified_base 59: mod_base = OTHER; note = 2'-O-methyl modified nucleotide
  modified_base 61: mod_base = OTHER; note = 2'-O-methyl modified nucleotide
  modified_base 62: mod_base = OTHER; note = 2'-O-methyl modified nucleotide
  modified_base 63: mod_base = OTHER; note = 2'-O-methyl modified nucleotide
  modified_base 64: mod_base = OTHER; note = 2'-O-methyl modified nucleotide
  modified_base 65: mod_base = OTHER; note = 2'-O-methyl modified nucleotide
  modified_base 66: mod_base = OTHER; note = 2'-O-methyl modified nucleotide
  modified_base 67: mod_base = OTHER; note = 2'-O-methyl modified nucleotide
  modified_base 68: mod_base = OTHER; note = 2'-O-methyl modified nucleotide
  modified_base 69: mod_base = OTHER; note = 2'-O-methyl modified nucleotide
  modified_base 70: mod_base = OTHER; note = 2'-O-methyl modified nucleotide
  modified_base 75: mod_base = OTHER; note = 2'-O-methyl modified nucleotide
  modified_base 77: mod_base = OTHER; note = 2'-O-methyl modified nucleotide
  modified_base 80: mod_base = OTHER; note = 2'-O-methyl modified nucleotide
  modified_base 86: mod_base = OTHER; note = 2'-O-methyl modified nucleotide
  modified_base 87: mod_base = OTHER; note = 2'-O-methyl modified nucleotide
  modified_base 89: mod_base = OTHER; note = 2'-O-methyl modified nucleotide
  modified_base 90: mod_base = OTHER; note = 2'-O-methyl modified nucleotide
  modified_base 91: mod_base = OTHER; note = 2'-O-methyl modified nucleotide
  modified_base 92: mod_base = OTHER; note = 2'-O-methyl modified nucleotide
  modified_base 99: mod_base = OTHER; note = nucleotide with phosphorothioate linkage
  modified_base 100: mod_base = OTHER; note = 2'-O-methyl modified nucleotide with phosphorothioate linkage
  modified_base 101: mod_base = OTHER; note = 2'-O-methyl modified nucleotide

SEQ ID NO: 2647 - RNA, 101 nt, synthetic construct; identical to SEQ ID NO: 1647
  source 1..101: mol_type = other RNA
  modified_base 1: mod_base = OTHER; note = 2'-O-methyl modified nucleotide with phosphorothioate linkage
  modified_base 2: mod_base = OTHER; note = 2'-O-methyl modified nucleotide with phosphorothioate linkage
  modified_base 3: mod_base = OTHER; note = 2'-O-methyl modified nucleotide with phosphorothioate linkage
  modified_base 4: mod_base = OTHER; note = 2'-O-methyl modified nucleotide
  modified_base 5: mod_base = OTHER; note = 2'-O-methyl modified nucleotide
  modified_base 8: mod_base = OTHER; note = 2'-O-methyl modified nucleotide
  modified_base 9: mod_base = OTHER; note = 2'-O-methyl modified nucleotide
  modified_base 11: mod_base = OTHER; note = 2'-O-methyl modified nucleotide
  modified_base 13: mod_base = OTHER; note = 2'-O-methyl modified nucleotide
  modified_base 18: mod_base = OTHER; note = 2'-O-methyl modified nucleotide
  modified_base 22: mod_base = OTHER; note = 2'-O-methyl modified nucleotide
  modified_base 25: mod_base = OTHER; note = 2'-O-methyl modified nucleotide
  modified_base 29: mod_base = OTHER; note = 2'-O-methyl modified nucleotide
  modified_base 30: mod_base = OTHER; note = 2'-O-methyl modified nucleotide
  modified_base 31: mod_base = OTHER; note = 2'-O-methyl modified nucleotide
  modified_base 32: mod_base = OTHER; note = 2'-O-methyl modified nucleotide
  modified_base 37: mod_base = OTHER; note = 2'-O-methyl modified nucleotide
  modified_base 38: mod_base = OTHER; note = 2'-O-methyl modified nucleotide
  modified_base 39: mod_base = OTHER; note = 2'-O-methyl modified nucleotide
  modified_base 40: mod_base = OTHER; note = 2'-O-methyl modified nucleotide
  modified_base 41: mod_base = OTHER; note = 2'-O-methyl modified nucleotide
  modified_base 42: mod_base = OTHER; note = 2'-O-methyl modified nucleotide
  modified_base 43: mod_base = OTHER; note = 2'-O-methyl modified nucleotide
  modified_base 47: mod_base = OTHER; note = 2'-O-methyl modified nucleotide
  modified_base 48: mod_base = OTHER; note = 2'-O-methyl modified nucleotide
  modified_base 51: mod_base = OTHER; note = 2'-O-methyl modified nucleotide
  modified_base 54: mod_base = OTHER; note = nucleotide with phosphorothioate linkage
  modified_base 58: mod_base = OTHER; note = 2'-O-methyl modified nucleotide
  modified_base 59: mod_base = OTHER; note = 2'-O-methyl modified nucleotide
  modified_base 61: mod_base = OTHER; note = 2'-O-methyl modified nucleotide
  modified_base 62: mod_base = OTHER; note = 2'-O-methyl modified nucleotide
  modified_base 63: mod_base = OTHER; note = 2'-O-methyl modified nucleotide
  modified_base 64: mod_base = OTHER; note = 2'-O-methyl modified nucleotide
  modified_base 65: mod_base = OTHER; note = 2'-O-methyl modified nucleotide
  modified_base 66: mod_base = OTHER; note = 2'-O-methyl modified nucleotide
  modified_base 67: mod_base = OTHER; note = 2'-O-methyl modified nucleotide
  modified_base 68: mod_base = OTHER; note = 2'-O-methyl modified nucleotide
  modified_base 69: mod_base = OTHER; note = 2'-O-methyl modified nucleotide
  modified_base 70: mod_base = OTHER; note = 2'-O-methyl modified nucleotide
  modified_base 75: mod_base = OTHER; note = 2'-O-methyl modified nucleotide
  modified_base 77: mod_base = OTHER; note = 2'-O-methyl modified nucleotide
  modified_base 80: mod_base = OTHER; note = 2'-O-methyl modified nucleotide
  modified_base 86: mod_base = OTHER; note = 2'-O-methyl modified nucleotide
  modified_base 87: mod_base = OTHER; note = 2'-O-methyl modified nucleotide
  modified_base 89: mod_base = OTHER; note = 2'-O-methyl modified nucleotide
  modified_base 90: mod_base = OTHER; note = 2'-O-methyl modified nucleotide
  modified_base 91: mod_base = OTHER; note = 2'-O-methyl modified nucleotide
  modified_base 92: mod_base = OTHER; note = 2'-O-methyl modified nucleotide
  modified_base 99: mod_base = OTHER; note = nucleotide with phosphorothioate linkage
  modified_base 100: mod_base = OTHER; note = 2'-O-methyl modified nucleotide with phosphorothioate linkage
  modified_base 101: mod_base = OTHER; note = 2'-O-methyl modified nucleotide

SEQ ID NO: 2648 - RNA, 101 nt, synthetic construct; identical to SEQ ID NO: 1648
  source 1..101: mol_type = other RNA
  modified_base 1: mod_base = OTHER; note = 2'-O-methyl modified nucleotide with phosphorothioate linkage
  modified_base 2: mod_base = OTHER; note = 2'-O-methyl modified nucleotide with phosphorothioate linkage
  modified_base 3: mod_base = OTHER; note = 2'-O-methyl modified nucleotide with phosphorothioate linkage
  modified_base 4: mod_base = OTHER; note = 2'-O-methyl modified nucleotide
  modified_base 5: mod_base = OTHER; note = 2'-O-methyl modified nucleotide
  modified_base 8: mod_base = OTHER; note = 2'-O-methyl modified nucleotide
  modified_base 9: mod_base = OTHER; note = 2'-O-methyl modified nucleotide
  modified_base 11: mod_base = OTHER; note = 2'-O-methyl modified nucleotide
  modified_base 13: mod_base = OTHER; note = 2'-O-methyl modified nucleotide
  modified_base 18: mod_base = OTHER; note = 2'-O-methyl modified nucleotide
  modified_base 22: mod_base = OTHER; note = 2'-O-methyl modified nucleotide
  modified_base 25: mod_base = OTHER; note = 2'-O-methyl modified nucleotide
  modified_base 29: mod_base = OTHER; note = 2'-O-methyl modified nucleotide
  modified_base 30: mod_base = OTHER; note = 2'-O-methyl modified nucleotide
  modified_base 31: mod_base = OTHER; note = 2'-O-methyl modified nucleotide
  modified_base 32: mod_base = OTHER; note = 2'-O-methyl modified nucleotide
  modified_base 37: mod_base = OTHER; note = 2'-O-methyl modified nucleotide
  modified_base 38: mod_base = OTHER; note = 2'-O-methyl modified nucleotide
  modified_base 39: mod_base = OTHER; note = 2'-O-methyl modified nucleotide
  modified_base 40: mod_base = OTHER; note = 2'-O-methyl modified nucleotide
  modified_base 41: mod_base = OTHER; note = 2'-O-methyl modified nucleotide
  modified_base 42: mod_base = OTHER; note = 2'-O-methyl modified nucleotide
  modified_base 43: mod_base = OTHER; note = 2'-O-methyl modified nucleotide
  modified_base 47: mod_base = OTHER; note = 2'-O-methyl modified nucleotide
  modified_base 48: mod_base = OTHER; note = 2'-O-methyl modified nucleotide
  modified_base 51: mod_base = OTHER; note = 2'-O-methyl modified nucleotide
  modified_base 54: mod_base = OTHER; note = nucleotide with phosphorothioate linkage
  modified_base 58: mod_base = OTHER; note = 2'-O-methyl modified nucleotide
  modified_base 59: mod_base = OTHER; note = 2'-O-methyl modified nucleotide
  modified_base 61: mod_base = OTHER; note = 2'-O-methyl modified nucleotide
  modified_base 62: mod_base = OTHER; note = 2'-O-methyl modified nucleotide
  modified_base 63: mod_base = OTHER; note = 2'-O-methyl modified nucleotide
  modified_base 64: mod_base = OTHER; note = 2'-O-methyl modified nucleotide
  modified_base 65: mod_base = OTHER; note = 2'-O-methyl modified nucleotide
  modified_base 66: mod_base = OTHER; note = 2'-O-methyl modified nucleotide
  modified_base 67: mod_base = OTHER; note = 2'-O-methyl modified nucleotide
  modified_base 68: mod_base = OTHER; note = 2'-O-methyl modified nucleotide
  modified_base 69: mod_base = OTHER; note = 2'-O-methyl modified nucleotide
  modified_base 70: mod_base = OTHER; note = 2'-O-methyl modified nucleotide
  modified_base 75: mod_base = OTHER; note = 2'-O-methyl modified nucleotide
  modified_base 77: mod_base = OTHER; note = 2'-O-methyl modified nucleotide
  modified_base 80: mod_base = OTHER; note = 2'-O-methyl modified nucleotide
  modified_base 86: mod_base = OTHER; note = 2'-O-methyl modified nucleotide
  modified_base 87: mod_base = OTHER; note = 2'-O-methyl modified nucleotide
  modified_base 89: mod_base = OTHER; note = 2'-O-methyl modified nucleotide
  modified_base 90: mod_base = OTHER; note = 2'-O-methyl modified nucleotide
  modified_base 91: mod_base = OTHER; note = 2'-O-methyl modified nucleotide
  modified_base 92: mod_base = OTHER; note = 2'-O-methyl modified nucleotide
  modified_base 99: mod_base = OTHER; note = nucleotide with phosphorothioate linkage
  modified_base 100: mod_base = OTHER; note = 2'-O-methyl modified nucleotide with phosphorothioate linkage
  modified_base 101: mod_base = OTHER; note = 2'-O-methyl modified nucleotide

SEQ ID NO: 2649 - RNA, 101 nt, synthetic construct; identical to SEQ ID NO: 1649
  source 1..101: mol_type = other RNA
  modified_base 1: mod_base = OTHER; note = 2'-O-methyl modified nucleotide with phosphorothioate linkage
  modified_base 2: mod_base = OTHER; note = 2'-O-methyl modified nucleotide with phosphorothioate linkage
  modified_base 3: mod_base = OTHER; note = 2'-O-methyl modified nucleotide with phosphorothioate linkage
  modified_base 4: mod_base = OTHER; note = 2'-O-methyl modified nucleotide
  modified_base 5: mod_base = OTHER; note = 2'-O-methyl modified nucleotide
  modified_base 8: mod_base = OTHER; note = 2'-O-methyl modified nucleotide
  modified_base 9: mod_base = OTHER; note = 2'-O-methyl modified nucleotide
  modified_base 11: mod_base = OTHER; note = 2'-O-methyl modified nucleotide
  modified_base 13: mod_base = OTHER; note = 2'-O-methyl modified nucleotide
  modified_base 18: mod_base = OTHER; note = 2'-O-methyl modified nucleotide
  modified_base 22: mod_base = OTHER; note = 2'-O-methyl modified nucleotide
  modified_base 25: mod_base = OTHER; note = 2'-O-methyl modified nucleotide
  modified_base 29: mod_base = OTHER; note = 2'-O-methyl modified nucleotide
  modified_base 30: mod_base = OTHER; note = 2'-O-methyl modified nucleotide
  modified_base 31: mod_base = OTHER; note = 2'-O-methyl modified nucleotide
  modified_base 32: mod_base = OTHER; note = 2'-O-methyl modified nucleotide
  modified_base 37: mod_base = OTHER; note = 2'-O-methyl modified nucleotide
  modified_base 38: mod_base = OTHER; note = 2'-O-methyl modified nucleotide
  modified_base 39: mod_base = OTHER; note = 2'-O-methyl modified nucleotide
  modified_base 40: mod_base = OTHER; note = 2'-O-methyl modified nucleotide
  modified_base 41: mod_base = OTHER; note = 2'-O-methyl modified nucleotide
  modified_base 42: mod_base = OTHER; note = 2'-O-methyl modified nucleotide
  modified_base 43: mod_base = OTHER; note = 2'-O-methyl modified nucleotide
  modified_base 47: mod_base = OTHER; note = 2'-O-methyl modified nucleotide
  modified_base 48: mod_base = OTHER; note = 2'-O-methyl modified nucleotide
  modified_base 51: mod_base = OTHER; note = 2'-O-methyl modified nucleotide
  modified_base 54: mod_base = OTHER; note = nucleotide with phosphorothioate linkage
  modified_base 58: mod_base = OTHER; note = 2'-O-methyl modified nucleotide
  modified_base 59: mod_base = OTHER; note = 2'-O-methyl modified nucleotide
  modified_base 61: mod_base = OTHER; note = 2'-O-methyl modified nucleotide
  modified_base 62: mod_base = OTHER; note = 2'-O-methyl modified nucleotide
  modified_base 63: mod_base = OTHER; note = 2'-O-methyl modified nucleotide
  modified_base 64: mod_base = OTHER; note = 2'-O-methyl modified nucleotide
  modified_base 65: mod_base = OTHER; note = 2'-O-methyl modified nucleotide
  modified_base 66: mod_base = OTHER; note = 2'-O-methyl modified nucleotide
  modified_base 67: mod_base = OTHER; note = 2'-O-methyl modified nucleotide
  modified_base 68: mod_base = OTHER; note = 2'-O-methyl modified nucleotide
  modified_base 69: mod_base = OTHER; note = 2'-O-methyl modified nucleotide
  modified_base 70: mod_base = OTHER; note = 2'-O-methyl modified nucleotide
  modified_base 75: mod_base = OTHER; note = 2'-O-methyl modified nucleotide
  modified_base 77: mod_base = OTHER; note = 2'-O-methyl modified nucleotide
  modified_base 80: mod_base = OTHER; note = 2'-O-methyl modified nucleotide
  modified_base 86: mod_base = OTHER; note = 2'-O-methyl modified nucleotide
  modified_base 87: mod_base = OTHER; note = 2'-O-methyl modified nucleotide
  modified_base 89: mod_base = OTHER; note = 2'-O-methyl modified nucleotide
  modified_base 90: mod_base = OTHER; note = 2'-O-methyl modified nucleotide
  modified_base 91: mod_base = OTHER; note = 2'-O-methyl modified nucleotide
  modified_base 92: mod_base = OTHER; note = 2'-O-methyl modified nucleotide
  modified_base 99: mod_base = OTHER; note = nucleotide with phosphorothioate linkage
  modified_base 100: mod_base = OTHER; note = 2'-O-methyl modified nucleotide with phosphorothioate linkage
  modified_base 101: mod_base = OTHER; note = 2'-O-methyl modified nucleotide

SEQ ID NO: 2650 - RNA, 101 nt, synthetic construct; identical to SEQ ID NO: 1650
  source 1..101: mol_type = other RNA
  modified_base 1: mod_base = OTHER; note = 2'-O-methyl modified nucleotide with phosphorothioate linkage
  modified_base 2: mod_base = OTHER; note = 2'-O-methyl modified nucleotide with phosphorothioate linkage
  modified_base 3: mod_base = OTHER; note = 2'-O-methyl modified nucleotide with phosphorothioate linkage
  modified_base 4: mod_base = OTHER; note = 2'-O-methyl modified nucleotide
  modified_base 5: mod_base = OTHER; note = 2'-O-methyl modified nucleotide
  modified_base 8: mod_base = OTHER; note = 2'-O-methyl modified nucleotide
  modified_base 9: mod_base = OTHER; note = 2'-O-methyl modified nucleotide
  modified_base 11: mod_base = OTHER; note = 2'-O-methyl modified nucleotide
  modified_base 13: mod_base = OTHER; note = 2'-O-methyl modified nucleotide
  modified_base 18: mod_base = OTHER; note = 2'-O-methyl modified nucleotide
  modified_base 22: mod_base = OTHER; note = 2'-O-methyl modified nucleotide
  modified_base 25: mod_base = OTHER; note = 2'-O-methyl modified nucleotide
  modified_base 29: mod_base = OTHER; note = 2'-O-methyl modified nucleotide
  modified_base 30: mod_base = OTHER; note = 2'-O-methyl modified nucleotide
  modified_base 31: mod_base = OTHER; note = 2'-O-methyl modified nucleotide
  modified_base 32: mod_base = OTHER; note = 2'-O-methyl modified nucleotide
  modified_base 37: mod_base = OTHER; note = 2'-O-methyl modified nucleotide
  modified_base 38: mod_base = OTHER; note = 2'-O-methyl modified nucleotide
  modified_base 39: mod_base = OTHER; note = 2'-O-methyl modified nucleotide
  modified_base 40: mod_base = OTHER; note = 2'-O-methyl modified nucleotide
  modified_base 41: mod_base = OTHER; note = 2'-O-methyl modified nucleotide
  modified_base 42: mod_base = OTHER; note = 2'-O-methyl modified nucleotide
  modified_base 43: mod_base = OTHER; note = 2'-O-methyl modified nucleotide
  modified_base 47: mod_base = OTHER; note = 2'-O-methyl modified nucleotide
  modified_base 48: mod_base = OTHER; note = 2'-O-methyl modified nucleotide
  modified_base 51: mod_base = OTHER; note = 2'-O-methyl modified nucleotide
  modified_base 54: mod_base = OTHER; note = nucleotide with phosphorothioate linkage
  modified_base 58: mod_base = OTHER; note = 2'-O-methyl modified nucleotide
  modified_base 59: mod_base = OTHER; note = 2'-O-methyl modified nucleotide
  modified_base 61: mod_base = OTHER; note = 2'-O-methyl modified nucleotide
  modified_base 62: mod_base = OTHER; note = 2'-O-methyl modified nucleotide
  modified_base 63: mod_base = OTHER; note = 2'-O-methyl modified nucleotide
  modified_base 64: mod_base = OTHER; note = 2'-O-methyl modified nucleotide
  modified_base 65: mod_base = OTHER; note = 2'-O-methyl modified nucleotide
  modified_base 66: mod_base = OTHER; note = 2'-O-methyl modified nucleotide
  modified_base 67: mod_base = OTHER; note = 2'-O-methyl modified nucleotide
  modified_base 68: mod_base = OTHER; note = 2'-O-methyl modified nucleotide
  modified_base 69: mod_base = OTHER; note = 2'-O-methyl modified nucleotide
  modified_base 70: mod_base = OTHER; note = 2'-O-methyl modified nucleotide
  modified_base 75: mod_base = OTHER; note = 2'-O-methyl modified nucleotide
  modified_base 77: mod_base = OTHER; note = 2'-O-methyl modified nucleotide
  modified_base 80: mod_base = OTHER; note = 2'-O-methyl modified nucleotide
  modified_base 86: mod_base = OTHER; note = 2'-O-methyl modified nucleotide
  modified_base 87: mod_base = OTHER; note = 2'-O-methyl modified nucleotide
  modified_base 89: mod_base = OTHER; note = 2'-O-methyl modified nucleotide
  modified_base 90: mod_base = OTHER; note = 2'-O-methyl modified nucleotide
  modified_base 91: mod_base = OTHER; note = 2'-O-methyl modified nucleotide
  modified_base 92: mod_base = OTHER; note = 2'-O-methyl modified nucleotide
  modified_base 99: mod_base = OTHER; note = nucleotide with phosphorothioate linkage
  modified_base 100: mod_base = OTHER; note = 2'-O-methyl modified nucleotide with phosphorothioate linkage
  modified_base 101: mod_base = OTHER; note = 2'-O-methyl modified nucleotide

SEQ ID NO: 2651 - RNA, 101 nt, synthetic construct; identical to SEQ ID NO: 1651
  source 1..101: mol_type = other RNA
  modified_base 1: mod_base = OTHER; note = 2'-O-methyl modified nucleotide with phosphorothioate linkage
  modified_base 2: mod_base = OTHER; note = 2'-O-methyl modified nucleotide with phosphorothioate linkage
  modified_base 3: mod_base = OTHER; note = 2'-O-methyl modified nucleotide with phosphorothioate linkage
  modified_base 4: mod_base = OTHER; note = 2'-O-methyl modified nucleotide
  modified_base 5: mod_base = OTHER; note = 2'-O-methyl modified nucleotide
  modified_base 8: mod_base = OTHER; note = 2'-O-methyl modified nucleotide
  modified_base 9: mod_base = OTHER; note = 2'-O-methyl modified nucleotide
  modified_base 11: mod_base = OTHER; note = 2'-O-methyl modified nucleotide
  modified_base 13: mod_base = OTHER; note = 2'-O-methyl modified nucleotide
  modified_base 18: mod_base = OTHER; note = 2'-O-methyl modified nucleotide
  modified_base 22: mod_base = OTHER; note = 2'-O-methyl modified nucleotide
  modified_base 25: mod_base = OTHER; note = 2'-O-methyl modified nucleotide
  modified_base 29: mod_base = OTHER; note = 2'-O-methyl modified nucleotide
  modified_base 30: mod_base = OTHER; note = 2'-O-methyl modified nucleotide
  modified_base 31: mod_base = OTHER; note = 2'-O-methyl modified nucleotide
  modified_base 32: mod_base = OTHER; note = 2'-O-methyl modified nucleotide
  modified_base 37: mod_base = OTHER; note = 2'-O-methyl modified nucleotide
  modified_base 38: mod_base = OTHER; note = 2'-O-methyl modified nucleotide
  modified_base 39: mod_base = OTHER; note = 2'-O-methyl modified nucleotide
  modified_base 40: mod_base = OTHER; note = 2'-O-methyl modified nucleotide
  modified_base 41: mod_base = OTHER; note = 2'-O-methyl modified nucleotide
  modified_base 42: mod_base = OTHER; note = 2'-O-methyl modified nucleotide
  modified_base 43: mod_base = OTHER; note = 2'-O-methyl modified nucleotide
  modified_base 47: mod_base = OTHER; note = 2'-O-methyl modified nucleotide
  modified_base 48: mod_base = OTHER; note = 2'-O-methyl modified nucleotide
  modified_base 51: mod_base = OTHER; note = 2'-O-methyl modified nucleotide
  modified_base 54: mod_base = OTHER; note = nucleotide with phosphorothioate linkage
  modified_base 58: mod_base = OTHER; note = 2'-O-methyl modified nucleotide
  modified_base 59: mod_base = OTHER; note = 2'-O-methyl modified nucleotide
  modified_base 61: mod_base = OTHER; note = 2'-O-methyl modified nucleotide
  modified_base 62: mod_base = OTHER; note = 2'-O-methyl modified nucleotide
  modified_base 63: mod_base = OTHER; note = 2'-O-methyl modified nucleotide
  modified_base 64: mod_base = OTHER; note = 2'-O-methyl modified nucleotide
  modified_base 65: mod_base = OTHER; note = 2'-O-methyl modified nucleotide
  modified_base 66: mod_base = OTHER; note = 2'-O-methyl modified nucleotide
  modified_base 67: mod_base = OTHER; note = 2'-O-methyl modified nucleotide
  modified_base 68: mod_base = OTHER; note = 2'-O-methyl modified nucleotide
  modified_base 69: mod_base = OTHER; note = 2'-O-methyl modified nucleotide
  modified_base 70: mod_base = OTHER; note = 2'-O-methyl modified nucleotide
  modified_base 75: mod_base = OTHER; note = 2'-O-methyl modified nucleotide
  modified_base 77: mod_base = OTHER; note = 2'-O-methyl modified nucleotide
  modified_base 80: mod_base = OTHER; note = 2'-O-methyl modified nucleotide
  modified_base 86: mod_base = OTHER; note = 2'-O-methyl modified nucleotide
  modified_base 87: mod_base = OTHER; note = 2'-O-methyl modified nucleotide
  modified_base 89: mod_base = OTHER; note = 2'-O-methyl modified nucleotide
  modified_base 90: mod_base = OTHER; note = 2'-O-methyl modified nucleotide
  modified_base 91: mod_base = OTHER; note = 2'-O-methyl modified nucleotide
  modified_base 92: mod_base = OTHER; note = 2'-O-methyl modified nucleotide
  modified_base 99: mod_base = OTHER; note = nucleotide with phosphorothioate linkage
  modified_base 100: mod_base = OTHER; note = 2'-O-methyl modified nucleotide with phosphorothioate linkage
  modified_base 101: mod_base = OTHER; note = 2'-O-methyl modified nucleotide

SEQ ID NO: 2652 - RNA, 101 nt, synthetic construct; identical to SEQ ID NO: 1652
  source 1..101: mol_type = other RNA
  modified_base 1: mod_base = OTHER; note = 2'-O-methyl modified nucleotide with phosphorothioate linkage
  modified_base 2: mod_base = OTHER; note = 2'-O-methyl modified nucleotide with phosphorothioate linkage
  modified_base 3: mod_base = OTHER; note = 2'-O-methyl modified nucleotide with phosphorothioate linkage
  modified_base 4: mod_base = OTHER; note = 2'-O-methyl modified nucleotide
  modified_base 5: mod_base = OTHER; note = 2'-O-methyl modified nucleotide
  modified_base 8: mod_base = OTHER; note = 2'-O-methyl modified nucleotide
  modified_base 9: mod_base = OTHER; note = 2'-O-methyl modified nucleotide
  modified_base 11: mod_base = OTHER; note = 2'-O-methyl modified nucleotide
  modified_base 13: mod_base = OTHER; note = 2'-O-methyl modified nucleotide
  modified_base 18: mod_base = OTHER; note = 2'-O-methyl modified nucleotide
  modified_base 22: mod_base = OTHER; note = 2'-O-methyl modified nucleotide
  modified_base 25: mod_base = OTHER; note = 2'-O-methyl modified nucleotide
  modified_base 29: mod_base = OTHER; note = 2'-O-methyl modified nucleotide
  modified_base 30: mod_base = OTHER; note = 2'-O-methyl modified nucleotide
  modified_base 31: mod_base = OTHER; note = 2'-O-methyl modified nucleotide
  modified_base 32: mod_base = OTHER; note = 2'-O-methyl modified nucleotide
  modified_base 37: mod_base = OTHER; note = 2'-O-methyl modified nucleotide
  modified_base 38: mod_base = OTHER; note = 2'-O-methyl modified nucleotide
  modified_base 39: mod_base = OTHER; note = 2'-O-methyl modified nucleotide
  modified_base 40: mod_base = OTHER; note = 2'-O-methyl modified nucleotide
  modified_base 41: mod_base = OTHER; note = 2'-O-methyl modified nucleotide
  modified_base 42: mod_base = OTHER; note = 2'-O-methyl modified nucleotide
  modified_base 43: mod_base = OTHER; note = 2'-O-methyl modified nucleotide
  modified_base 47: mod_base = OTHER; note = 2'-O-methyl modified nucleotide
  modified_base 48: mod_base = OTHER; note = 2'-O-methyl modified nucleotide
  modified_base 51: mod_base = OTHER; note = 2'-O-methyl modified nucleotide
  modified_base 54: mod_base = OTHER; note = nucleotide with phosphorothioate linkage
  modified_base 58: mod_base = OTHER; note = 2'-O-methyl modified nucleotide
  modified_base 59: mod_base = OTHER; note = 2'-O-methyl modified nucleotide
  modified_base 61: mod_base = OTHER; note = 2'-O-methyl modified nucleotide
  modified_base 62: mod_base = OTHER; note = 2'-O-methyl modified nucleotide
  modified_base 63: mod_base = OTHER; note = 2'-O-methyl modified nucleotide
  modified_base 64: mod_base = OTHER; note = 2'-O-methyl modified nucleotide
  modified_base 65: mod_base = OTHER; note = 2'-O-methyl modified nucleotide
  modified_base 66: mod_base = OTHER; note = 2'-O-methyl modified nucleotide
  modified_base 67: mod_base = OTHER; note = 2'-O-methyl modified nucleotide
  modified_base 68: mod_base = OTHER; note = 2'-O-methyl modified nucleotide
  modified_base 69: mod_base = OTHER; note = 2'-O-methyl modified nucleotide
  modified_base 70: mod_base = OTHER; note = 2'-O-methyl modified nucleotide
  modified_base 75: mod_base = OTHER; note = 2'-O-methyl modified nucleotide
  modified_base 77: mod_base = OTHER; note = 2'-O-methyl modified nucleotide
  modified_base 80: mod_base = OTHER; note = 2'-O-methyl modified nucleotide
  modified_base 86: mod_base = OTHER; note = 2'-O-methyl modified nucleotide
  modified_base 87: mod_base = OTHER; note = 2'-O-methyl modified nucleotide
  modified_base 89: mod_base = OTHER; note = 2'-O-methyl modified nucleotide
  modified_base 90: mod_base = OTHER; note = 2'-O-methyl modified nucleotide
  modified_base 91: mod_base = OTHER; note = 2'-O-methyl modified nucleotide
  modified_base 92: mod_base = OTHER; note = 2'-O-methyl modified nucleotide
  modified_base 99: mod_base = OTHER; note = nucleotide with phosphorothioate linkage
  modified_base 100: mod_base = OTHER; note = 2'-O-methyl modified nucleotide with phosphorothioate linkage
  modified_base 101: mod_base = OTHER; note = 2'-O-methyl modified nucleotide

SEQ ID NO: 2653 - RNA, 101 nt, synthetic construct; identical to SEQ ID NO: 1653
  source 1..101: mol_type = other RNA
  modified_base 1: mod_base = OTHER; note = 2'-O-methyl modified nucleotide with phosphorothioate linkage
  modified_base 2: mod_base = OTHER; note = 2'-O-methyl modified nucleotide with phosphorothioate linkage
  modified_base 3: mod_base = OTHER; note = 2'-O-methyl modified nucleotide with phosphorothioate linkage
  modified_base 4: mod_base = OTHER; note = 2'-O-methyl modified nucleotide
  modified_base 5: mod_base = OTHER; note = 2'-O-methyl modified nucleotide
  modified_base 8: mod_base = OTHER; note = 2'-O-methyl modified nucleotide
  modified_base 9: mod_base = OTHER; note = 2'-O-methyl modified nucleotide
  modified_base 11: mod_base = OTHER; note = 2'-O-methyl modified nucleotide
  modified_base 13: mod_base = OTHER; note = 2'-O-methyl modified nucleotide
  modified_base 18: mod_base = OTHER; note = 2'-O-methyl modified nucleotide
  modified_base 22: mod_base = OTHER; note = 2'-O-methyl modified nucleotide
  modified_base 25: mod_base = OTHER; note = 2'-O-methyl modified nucleotide
  modified_base 29: mod_base = OTHER; note = 2'-O-methyl modified nucleotide
  modified_base 30: mod_base = OTHER; note = 2'-O-methyl modified nucleotide
  modified_base 31: mod_base = OTHER; note = 2'-O-methyl modified nucleotide
  modified_base 32: mod_base = OTHER; note = 2'-O-methyl modified nucleotide
  modified_base 37: mod_base = OTHER; note = 2'-O-methyl modified nucleotide
  modified_base 38: mod_base = OTHER; note = 2'-O-methyl modified nucleotide
  modified_base 39: mod_base = OTHER; note = 2'-O-methyl modified nucleotide
  modified_base 40: mod_base = OTHER; note = 2'-O-methyl modified nucleotide
  modified_base 41: mod_base = OTHER; note = 2'-O-methyl modified nucleotide
  modified_base 42: mod_base = OTHER; note = 2'-O-methyl modified nucleotide
  modified_base 43: mod_base = OTHER; note = 2'-O-methyl modified nucleotide
  modified_base 47: mod_base = OTHER; note = 2'-O-methyl modified nucleotide
  modified_base 48: mod_base = OTHER; note = 2'-O-methyl modified nucleotide
  modified_base 51: mod_base = OTHER; note = 2'-O-methyl modified nucleotide
  modified_base 54: mod_base = OTHER; note = nucleotide with phosphorothioate linkage
  modified_base 58: mod_base = OTHER; note = 2'-O-methyl modified nucleotide
  modified_base 59: mod_base = OTHER; note = 2'-O-methyl modified nucleotide
  modified_base 61: mod_base = OTHER; note = 2'-O-methyl modified nucleotide
  modified_base 62: mod_base = OTHER; note = 2'-O-methyl modified nucleotide
  modified_base 63: mod_base = OTHER; note = 2'-O-methyl modified nucleotide
  modified_base 64: mod_base = OTHER; note = 2'-O-methyl modified nucleotide
  modified_base 65: mod_base = OTHER; note = 2'-O-methyl modified nucleotide
  modified_base 66: mod_base = OTHER; note = 2'-O-methyl modified nucleotide
  modified_base 67: mod_base = OTHER; note = 2'-O-methyl modified nucleotide
  modified_base 68: mod_base = OTHER; note = 2'-O-methyl modified nucleotide
  modified_base 69: mod_base = OTHER; note = 2'-O-methyl modified nucleotide
  modified_base 70: mod_base = OTHER; note = 2'-O-methyl modified nucleotide
  modified_base 75: mod_base = OTHER; note = 2'-O-methyl modified nucleotide
  modified_base 77: mod_base = OTHER; note = 2'-O-methyl modified nucleotide
  modified_base 80: mod_base = OTHER; note = 2'-O-methyl modified nucleotide
  modified_base 86: mod_base = OTHER; note = 2'-O-methyl modified nucleotide
  modified_base 87: mod_base = OTHER; note = 2'-O-methyl modified nucleotide
  modified_base 89: mod_base = OTHER; note = 2'-O-methyl modified nucleotide
  modified_base 90: mod_base = OTHER; note = 2'-O-methyl modified nucleotide
  modified_base 91: mod_base = OTHER; note = 2'-O-methyl modified nucleotide
  modified_base 92: mod_base = OTHER; note = 2'-O-methyl modified nucleotide
  modified_base 99: mod_base = OTHER; note = nucleotide with phosphorothioate linkage
  modified_base 100: mod_base = OTHER; note = 2'-O-methyl modified nucleotide with phosphorothioate linkage
  modified_base 101: mod_base = OTHER; note = 2'-O-methyl modified nucleotide

SEQ ID NO: 2654 - RNA, 101 nt, synthetic construct; identical to SEQ ID NO: 1654
  source 1..101: mol_type = other RNA
  modified_base 1: mod_base = OTHER; note = 2'-O-methyl modified nucleotide with phosphorothioate linkage
  modified_base 2: mod_base = OTHER; note = 2'-O-methyl modified nucleotide with phosphorothioate linkage
  modified_base 3: mod_base = OTHER; note = 2'-O-methyl modified nucleotide with phosphorothioate linkage
  modified_base 4: mod_base = OTHER; note = 2'-O-methyl modified nucleotide
  modified_base 5: mod_base = OTHER; note = 2'-O-methyl modified nucleotide
  modified_base 8: mod_base = OTHER; note = 2'-O-methyl modified nucleotide
  modified_base 9: mod_base = OTHER; note = 2'-O-methyl modified nucleotide
  modified_base 11: mod_base = OTHER; note = 2'-O-methyl modified nucleotide
  modified_base 13: mod_base = OTHER; note = 2'-O-methyl modified nucleotide
  modified_base 18: mod_base = OTHER; note = 2'-O-methyl modified nucleotide
  modified_base 22: mod_base = OTHER; note = 2'-O-methyl modified nucleotide
  modified_base 25: mod_base = OTHER; note = 2'-O-methyl modified nucleotide
  modified_base 29: mod_base = OTHER; note = 2'-O-methyl modified nucleotide
  modified_base 30: mod_base = OTHER; note = 2'-O-methyl modified nucleotide
  modified_base 31: mod_base = OTHER; note = 2'-O-methyl modified nucleotide
  modified_base 32: mod_base = OTHER; note = 2'-O-methyl modified nucleotide
  modified_base 37: mod_base = OTHER; note = 2'-O-methyl modified nucleotide
  modified_base 38: mod_base = OTHER; note = 2'-O-methyl modified nucleotide
  modified_base 39: mod_base = OTHER; note = 2'-O-methyl modified nucleotide
  modified_base 40: mod_base = OTHER; note = 2'-O-methyl modified nucleotide
  modified_base 41: mod_base = OTHER; note = 2'-O-methyl modified nucleotide
  modified_base 42: mod_base = OTHER; note = 2'-O-methyl modified nucleotide
  modified_base 43: mod_base = OTHER; note = 2'-O-methyl modified nucleotide
  modified_base 47: mod_base = OTHER; note = 2'-O-methyl modified nucleotide
  modified_base 48: mod_base = OTHER; note = 2'-O-methyl modified nucleotide
  modified_base 51: mod_base = OTHER; note = 2'-O-methyl modified nucleotide
  modified_base 54: mod_base = OTHER; note = nucleotide with phosphorothioate linkage
  modified_base 58: mod_base = OTHER; note = 2'-O-methyl modified nucleotide
  modified_base 59: mod_base = OTHER; note = 2'-O-methyl modified nucleotide
  modified_base 61: mod_base = OTHER; note = 2'-O-methyl modified nucleotide
  modified_base 62: mod_base = OTHER; note = 2'-O-methyl modified nucleotide
  modified_base 63: mod_base = OTHER; note = 2'-O-methyl modified nucleotide
  modified_base 64: mod_base = OTHER; note = 2'-O-methyl modified nucleotide
  modified_base 65: mod_base = OTHER; note = 2'-O-methyl modified nucleotide
  modified_base 66: mod_base = OTHER; note = 2'-O-methyl modified nucleotide
  modified_base 67: mod_base = OTHER; note = 2'-O-methyl modified nucleotide
  modified_base 68: mod_base = OTHER; note = 2'-O-methyl modified nucleotide
  modified_base 69: mod_base = OTHER; note = 2'-O-methyl modified nucleotide
  modified_base 70: mod_base = OTHER; note = 2'-O-methyl modified nucleotide
  modified_base 75: mod_base = OTHER; note = 2'-O-methyl modified nucleotide
  modified_base 77: mod_base = OTHER; note = 2'-O-methyl modified nucleotide
  modified_base 80: mod_base = OTHER; note = 2'-O-methyl modified nucleotide
  modified_base 86: mod_base = OTHER; note = 2'-O-methyl modified nucleotide
  modified_base 87: mod_base = OTHER; note = 2'-O-methyl modified nucleotide
  modified_base 89: mod_base = OTHER; note = 2'-O-methyl modified nucleotide
  modified_base 90: mod_base = OTHER; note = 2'-O-methyl modified nucleotide
  modified_base 91: mod_base = OTHER; note = 2'-O-methyl modified nucleotide
  modified_base 92: mod_base = OTHER; note = 2'-O-methyl modified nucleotide
  modified_base 99: mod_base = OTHER; note = nucleotide with phosphorothioate linkage
  modified_base 100: mod_base = OTHER; note = 2'-O-methyl modified nucleotide with phosphorothioate linkage
  modified_base 101: mod_base = OTHER; note = 2'-O-methyl modified nucleotide

SEQ ID NO: 2655 - RNA, 101 nt, synthetic construct; identical to SEQ ID NO: 1655
  source 1..101: mol_type = other RNA
  modified_base 1: mod_base = OTHER; note = 2'-O-methyl modified nucleotide with phosphorothioate linkage
  modified_base 2: mod_base = OTHER; note = 2'-O-methyl modified nucleotide with phosphorothioate linkage
  modified_base 3: mod_base = OTHER; note = 2'-O-methyl modified nucleotide with phosphorothioate linkage
  modified_base 4: mod_base = OTHER; note = 2'-O-methyl modified nucleotide
  modified_base 5: mod_base = OTHER; note = 2'-O-methyl modified nucleotide
  modified_base 8: mod_base = OTHER; note = 2'-O-methyl modified nucleotide
  modified_base 9: mod_base = OTHER; note = 2'-O-methyl modified nucleotide
  modified_base 11: mod_base = OTHER; note = 2'-O-methyl modified nucleotide
  modified_base 13: mod_base = OTHER; note = 2'-O-methyl modified nucleotide
  modified_base 18: mod_base = OTHER; note = 2'-O-methyl modified nucleotide
  modified_base 22: mod_base = OTHER; note = 2'-O-methyl modified nucleotide
  modified_base 25: mod_base = OTHER; note = 2'-O-methyl modified nucleotide
  modified_base 29: mod_base = OTHER; note = 2'-O-methyl modified nucleotide
  modified_base 30: mod_base = OTHER; note = 2'-O-methyl modified nucleotide
  modified_base 31: mod_base = OTHER; note = 2'-O-methyl modified nucleotide
  modified_base 32: mod_base = OTHER; note = 2'-O-methyl modified nucleotide
  modified_base 37: mod_base = OTHER; note = 2'-O-methyl modified nucleotide
  modified_base 38: mod_base = OTHER; note = 2'-O-methyl modified nucleotide
  modified_base 39: mod_base = OTHER; note = 2'-O-methyl modified nucleotide
  modified_base 40: mod_base = OTHER; note = 2'-O-methyl modified nucleotide
  modified_base 41: mod_base = OTHER; note = 2'-O-methyl modified nucleotide
  modified_base 42: mod_base = OTHER; note = 2'-O-methyl modified nucleotide
  modified_base 43: mod_base = OTHER; note = 2'-O-methyl modified nucleotide
  modified_base 47: mod_base = OTHER; note = 2'-O-methyl modified nucleotide
  modified_base 48: mod_base = OTHER; note = 2'-O-methyl modified nucleotide
  modified_base 51: mod_base = OTHER; note = 2'-O-methyl modified nucleotide
  modified_base 54: mod_base = OTHER; note = nucleotide with phosphorothioate linkage
  modified_base 58: mod_base = OTHER; note = 2'-O-methyl modified nucleotide
  modified_base 59: mod_base = OTHER; note = 2'-O-methyl modified nucleotide
  modified_base 61: mod_base = OTHER; note = 2'-O-methyl modified nucleotide
  modified_base 62: mod_base = OTHER; note = 2'-O-methyl modified nucleotide
  modified_base 63: mod_base = OTHER; note = 2'-O-methyl modified nucleotide
  modified_base 64: mod_base = OTHER; note = 2'-O-methyl modified nucleotide
  modified_base 65: mod_base = OTHER; note = 2'-O-methyl modified nucleotide
  modified_base 66: mod_base = OTHER; note = 2'-O-methyl modified nucleotide
  modified_base 67: mod_base = OTHER; note = 2'-O-methyl modified nucleotide
  modified_base 68: mod_base = OTHER; note = 2'-O-methyl modified nucleotide
  modified_base 69: mod_base = OTHER; note = 2'-O-methyl modified nucleotide
  modified_base 70: mod_base = OTHER; note = 2'-O-methyl modified nucleotide
  modified_base 75: mod_base = OTHER; note = 2'-O-methyl modified nucleotide
  modified_base 77: mod_base = OTHER; note = 2'-O-methyl modified nucleotide
  modified_base 80: mod_base = OTHER; note = 2'-O-methyl modified nucleotide
  modified_base 86: mod_base = OTHER; note = 2'-O-methyl modified nucleotide
  modified_base 87: mod_base = OTHER; note = 2'-O-methyl modified nucleotide
  modified_base 89: mod_base = OTHER; note = 2'-O-methyl modified nucleotide
  modified_base 90: mod_base = OTHER; note = 2'-O-methyl modified nucleotide
  modified_base 91: mod_base = OTHER; note = 2'-O-methyl modified nucleotide
  modified_base 92: mod_base = OTHER; note = 2'-O-methyl modified nucleotide
  modified_base 99: mod_base = OTHER; note = nucleotide with phosphorothioate linkage
  modified_base 100: mod_base = OTHER; note = 2'-O-methyl modified nucleotide with phosphorothioate linkage
  modified_base 101: mod_base = OTHER; note = 2'-O-methyl modified nucleotide

SEQ ID NO: 2656 - RNA, 101 nt, synthetic construct; identical to SEQ ID NO: 1656
  source 1..101: mol_type = other RNA
  modified_base 1: mod_base = OTHER; note = 2'-O-methyl modified nucleotide with phosphorothioate linkage
  modified_base 2: mod_base = OTHER; note = 2'-O-methyl modified nucleotide with phosphorothioate linkage
  modified_base 3: mod_base = OTHER; note = 2'-O-methyl modified nucleotide with phosphorothioate linkage
  modified_base 4: mod_base = OTHER; note = 2'-O-methyl modified nucleotide
  modified_base 5: mod_base = OTHER; note = 2'-O-methyl modified nucleotide
  modified_base 8: mod_base = OTHER; note = 2'-O-methyl modified nucleotide
  modified_base 9: mod_base = OTHER; note = 2'-O-methyl modified nucleotide
  modified_base 11: mod_base = OTHER; note = 2'-O-methyl modified nucleotide
  modified_base 13: mod_base = OTHER; note = 2'-O-methyl modified nucleotide
  modified_base 18: mod_base = OTHER; note = 2'-O-methyl modified nucleotide
  modified_base 22: mod_base = OTHER; note = 2'-O-methyl modified nucleotide
  modified_base 25: mod_base = OTHER; note = 2'-O-methyl modified nucleotide
  modified_base 29: mod_base = OTHER; note = 2'-O-methyl modified nucleotide
  modified_base 30: mod_base = OTHER; note = 2'-O-methyl modified nucleotide
  modified_base 31: mod_base = OTHER; note = 2'-O-methyl modified nucleotide
  modified_base 32: mod_base = OTHER; note = 2'-O-methyl modified nucleotide
  modified_base 37: mod_base = OTHER; note = 2'-O-methyl modified nucleotide
  modified_base 38: mod_base = OTHER; note = 2'-O-methyl modified nucleotide
  modified_base 39: mod_base = OTHER; note = 2'-O-methyl modified nucleotide
  modified_base 40: mod_base = OTHER; note = 2'-O-methyl modified nucleotide
  modified_base 41: mod_base = OTHER; note = 2'-O-methyl modified nucleotide
  modified_base 42: mod_base = OTHER; note = 2'-O-methyl modified nucleotide
  modified_base 43: mod_base = OTHER; note = 2'-O-methyl modified nucleotide
  modified_base 47: mod_base = OTHER; note = 2'-O-methyl modified nucleotide
  modified_base 48: mod_base = OTHER; note = 2'-O-methyl modified nucleotide
  modified_base 51: mod_base = OTHER; note = 2'-O-methyl modified nucleotide
  modified_base 54: mod_base = OTHER; note = nucleotide with phosphorothioate linkage
  modified_base 58: mod_base = OTHER; note = 2'-O-methyl modified nucleotide
  modified_base 59: mod_base = OTHER; note = 2'-O-methyl modified nucleotide
  modified_base 61: mod_base = OTHER; note = 2'-O-methyl modified nucleotide
  modified_base 62: mod_base = OTHER; note = 2'-O-methyl modified nucleotide
  modified_base 63: mod_base = OTHER; note = 2'-O-methyl modified nucleotide
  modified_base 64: mod_base = OTHER; note = 2'-O-methyl modified nucleotide
  modified_base 65: mod_base = OTHER; note = 2'-O-methyl modified nucleotide
  modified_base 66: mod_base = OTHER; note = 2'-O-methyl modified nucleotide
  modified_base 67: mod_base = OTHER; note = 2'-O-methyl modified nucleotide
  modified_base 68: mod_base = OTHER; note = 2'-O-methyl modified nucleotide
  modified_base 69: mod_base = OTHER; note = 2'-O-methyl modified nucleotide
  modified_base 70: mod_base = OTHER; note = 2'-O-methyl modified nucleotide
  modified_base 75: mod_base = OTHER; note = 2'-O-methyl modified nucleotide
  modified_base 77: mod_base = OTHER; note = 2'-O-methyl modified nucleotide
  modified_base 80: mod_base = OTHER; note = 2'-O-methyl modified nucleotide
  modified_base 86: mod_base = OTHER; note = 2'-O-methyl modified nucleotide
  modified_base 87: mod_base = OTHER; note = 2'-O-methyl modified nucleotide
  modified_base 89: mod_base = OTHER; note = 2'-O-methyl modified nucleotide
  modified_base 90: mod_base = OTHER; note = 2'-O-methyl modified nucleotide
  modified_base 91: mod_base = OTHER; note = 2'-O-methyl modified nucleotide
  modified_base 92: mod_base = OTHER; note = 2'-O-methyl modified nucleotide
  modified_base 99: mod_base = OTHER; note = nucleotide with phosphorothioate linkage
  modified_base 100: mod_base = OTHER; note = 2'-O-methyl modified nucleotide with phosphorothioate linkage
  modified_base 101: mod_base = OTHER; note = 2'-O-methyl modified nucleotide

SEQ ID NO: 2657 - RNA, 101 nt, synthetic construct; identical to SEQ ID NO: 1657
  source 1..101: mol_type = other RNA
  modified_base 1: mod_base = OTHER; note = 2'-O-methyl modified nucleotide with phosphorothioate linkage
  modified_base 2: mod_base = OTHER; note = 2'-O-methyl modified nucleotide with phosphorothioate linkage
  modified_base 3: mod_base = OTHER; note = 2'-O-methyl modified nucleotide with phosphorothioate linkage
  modified_base 4: mod_base = OTHER; note = 2'-O-methyl modified nucleotide
  modified_base 5: mod_base = OTHER; note = 2'-O-methyl modified nucleotide
  modified_base 8: mod_base = OTHER; note = 2'-O-methyl modified nucleotide
  modified_base 9: mod_base = OTHER; note = 2'-O-methyl modified nucleotide
  modified_base 11: mod_base = OTHER; note = 2'-O-methyl modified nucleotide
  modified_base 13: mod_base = OTHER; note = 2'-O-methyl modified nucleotide
  modified_base 18: mod_base = OTHER; note = 2'-O-methyl modified nucleotide
  modified_base 22: mod_base = OTHER; note = 2'-O-methyl modified nucleotide
  modified_base 25: mod_base = OTHER; note = 2'-O-methyl modified nucleotide
  modified_base 29: mod_base = OTHER; note = 2'-O-methyl modified nucleotide
  modified_base 30: mod_base = OTHER; note = 2'-O-methyl modified nucleotide
  modified_base 31: mod_base = OTHER; note = 2'-O-methyl modified nucleotide
  modified_base 32: mod_base = OTHER; note = 2'-O-methyl modified nucleotide
  modified_base 37: mod_base = OTHER; note = 2'-O-methyl modified nucleotide
  modified_base 38: mod_base = OTHER; note = 2'-O-methyl modified nucleotide
  modified_base 39: mod_base = OTHER; note = 2'-O-methyl modified nucleotide
  modified_base 40: mod_base = OTHER; note = 2'-O-methyl modified nucleotide
  modified_base 41: mod_base = OTHER; note = 2'-O-methyl modified nucleotide
  modified_base 42: mod_base = OTHER; note = 2'-O-methyl modified nucleotide
  modified_base 43: mod_base = OTHER; note = 2'-O-methyl modified nucleotide
  modified_base 47: mod_base = OTHER; note = 2'-O-methyl modified nucleotide
  modified_base 48: mod_base = OTHER; note = 2'-O-methyl modified nucleotide
  modified_base 51: mod_base = OTHER; note = 2'-O-methyl modified nucleotide
  modified_base 54: mod_base = OTHER; note = nucleotide with phosphorothioate linkage
  modified_base 58: mod_base = OTHER; note = 2'-O-methyl modified nucleotide
  modified_base 59: mod_base = OTHER; note = 2'-O-methyl modified nucleotide
  modified_base 61: mod_base = OTHER; note = 2'-O-methyl modified nucleotide
  modified_base 62: mod_base = OTHER; note = 2'-O-methyl modified nucleotide
  modified_base 63: mod_base = OTHER; note = 2'-O-methyl modified nucleotide
  modified_base 64: mod_base = OTHER; note = 2'-O-methyl modified nucleotide
  modified_base 65: mod_base = OTHER; note = 2'-O-methyl modified nucleotide
  modified_base 66: mod_base = OTHER; note = 2'-O-methyl modified nucleotide
  modified_base 67: mod_base = OTHER; note = 2'-O-methyl modified nucleotide
  modified_base 68: mod_base = OTHER; note = 2'-O-methyl modified nucleotide
  modified_base 69: mod_base = OTHER; note = 2'-O-methyl modified nucleotide
  modified_base 70: mod_base = OTHER; note = 2'-O-methyl modified nucleotide
  modified_base 75: mod_base = OTHER; note = 2'-O-methyl modified nucleotide
  modified_base 77: mod_base = OTHER; note = 2'-O-methyl modified nucleotide
  modified_base 80: mod_base = OTHER; note = 2'-O-methyl modified nucleotide
  modified_base 86: mod_base = OTHER; note = 2'-O-methyl modified nucleotide
  modified_base 87: mod_base = OTHER; note = 2'-O-methyl modified nucleotide
  modified_base 89: mod_base = OTHER; note = 2'-O-methyl modified nucleotide
  modified_base 90: mod_base = OTHER; note = 2'-O-methyl modified nucleotide
  modified_base 91: mod_base = OTHER; note = 2'-O-methyl modified nucleotide
  modified_base 92: mod_base = OTHER; note = 2'-O-methyl modified nucleotide
  modified_base 99: mod_base = OTHER; note = nucleotide with phosphorothioate linkage
  modified_base 100: mod_base = OTHER; note = 2'-O-methyl modified nucleotide with phosphorothioate linkage
  modified_base 101: mod_base = OTHER; note = 2'-O-methyl modified nucleotide

SEQ ID NO: 2658 - RNA, 101 nt, synthetic construct; identical to SEQ ID NO: 1658
  source 1..101: mol_type = other RNA
  modified_base 1: mod_base = OTHER; note = 2'-O-methyl modified nucleotide with phosphorothioate linkage
  modified_base 2: mod_base = OTHER; note = 2'-O-methyl modified nucleotide with phosphorothioate linkage
  modified_base 3: mod_base = OTHER; note = 2'-O-methyl modified nucleotide with phosphorothioate linkage
  modified_base 4: mod_base = OTHER; note = 2'-O-methyl modified nucleotide
  modified_base 5: mod_base = OTHER; note = 2'-O-methyl modified nucleotide
  modified_base 8: mod_base = OTHER; note = 2'-O-methyl modified nucleotide
  modified_base 9: mod_base = OTHER; note = 2'-O-methyl modified nucleotide
  modified_base 11: mod_base = OTHER; note = 2'-O-methyl modified nucleotide
  modified_base 13: mod_base = OTHER; note = 2'-O-methyl modified nucleotide
  modified_base 18: mod_base = OTHER; note = 2'-O-methyl modified nucleotide
  modified_base 22: mod_base = OTHER; note = 2'-O-methyl modified nucleotide
  modified_base 25: mod_base = OTHER; note = 2'-O-methyl modified nucleotide
  modified_base 29: mod_base = OTHER; note = 2'-O-methyl modified nucleotide
  modified_base 30: mod_base = OTHER; note = 2'-O-methyl modified nucleotide
  modified_base 31: mod_base = OTHER; note = 2'-O-methyl modified nucleotide
  modified_base 32: mod_base = OTHER; note = 2'-O-methyl modified nucleotide
  modified_base 37: mod_base = OTHER; note = 2'-O-methyl modified nucleotide
  modified_base 38: mod_base = OTHER; note = 2'-O-methyl modified nucleotide
  modified_base 39: mod_base = OTHER; note = 2'-O-methyl modified nucleotide
  modified_base 40: mod_base = OTHER; note = 2'-O-methyl modified nucleotide
  modified_base 41: mod_base = OTHER; note = 2'-O-methyl modified nucleotide
  modified_base 42: mod_base = OTHER; note = 2'-O-methyl modified nucleotide
  modified_base 43: mod_base = OTHER; note = 2'-O-methyl modified nucleotide
  modified_base 47: mod_base = OTHER; note = 2'-O-methyl modified nucleotide
  modified_base 48: mod_base = OTHER; note = 2'-O-methyl modified nucleotide
  modified_base 51: mod_base = OTHER; note = 2'-O-methyl modified nucleotide
  modified_base 54: mod_base = OTHER; note = nucleotide with phosphorothioate linkage
  modified_base 58: mod_base = OTHER; note = 2'-O-methyl modified nucleotide
  modified_base 59: mod_base = OTHER; note = 2'-O-methyl modified nucleotide
  modified_base 61: mod_base = OTHER; note = 2'-O-methyl modified nucleotide
  modified_base 62: mod_base = OTHER; note = 2'-O-methyl modified nucleotide
  modified_base 63: mod_base = OTHER; note = 2'-O-methyl modified nucleotide
  modified_base 64: mod_base = OTHER; note = 2'-O-methyl modified nucleotide
  modified_base 65: mod_base = OTHER; note = 2'-O-methyl modified nucleotide
  modified_base 66: mod_base = OTHER; note = 2'-O-methyl modified nucleotide
  modified_base 67: mod_base = OTHER; note = 2'-O-methyl modified nucleotide
  modified_base 68: mod_base = OTHER; note = 2'-O-methyl modified nucleotide
  modified_base 69: mod_base = OTHER; note = 2'-O-methyl modified nucleotide
  modified_base 70: mod_base = OTHER; note = 2'-O-methyl modified nucleotide
  modified_base 75: mod_base = OTHER; note = 2'-O-methyl modified nucleotide
  modified_base 77: mod_base = OTHER; note = 2'-O-methyl modified nucleotide
  modified_base 80: mod_base = OTHER; note = 2'-O-methyl modified nucleotide
  modified_base 86: mod_base = OTHER; note = 2'-O-methyl modified nucleotide
  modified_base 87: mod_base = OTHER; note = 2'-O-methyl modified nucleotide
  modified_base 89: mod_base = OTHER; note = 2'-O-methyl modified nucleotide
  modified_base 90: mod_base = OTHER; note = 2'-O-methyl modified nucleotide
  modified_base 91: mod_base = OTHER; note = 2'-O-methyl modified nucleotide
  modified_base 92: mod_base = OTHER; note = 2'-O-methyl modified nucleotide
  modified_base 99: mod_base = OTHER; note = nucleotide with phosphorothioate linkage
  modified_base 100: mod_base = OTHER; note = 2'-O-methyl modified nucleotide with phosphorothioate linkage
  modified_base 101: mod_base = OTHER; note = 2'-O-methyl modified nucleotide

SEQ ID NO: 2659 - RNA, 101 nt, synthetic construct; identical to SEQ ID NO: 1659
  source 1..101: mol_type = other RNA
  modified_base 1: mod_base = OTHER; note = 2'-O-methyl modified nucleotide with phosphorothioate linkage
  modified_base 2: mod_base = OTHER; note = 2'-O-methyl modified nucleotide with phosphorothioate linkage
  modified_base 3: mod_base = OTHER; note = 2'-O-methyl modified nucleotide with phosphorothioate linkage
  modified_base 4: mod_base = OTHER; note = 2'-O-methyl modified nucleotide
  modified_base 5: mod_base = OTHER; note = 2'-O-methyl modified nucleotide
  modified_base 8: mod_base = OTHER; note = 2'-O-methyl modified nucleotide
  modified_base 9: mod_base = OTHER; note = 2'-O-methyl modified nucleotide
  modified_base 11: mod_base = OTHER; note = 2'-O-methyl modified nucleotide
  modified_base 13: mod_base = OTHER; note = 2'-O-methyl modified nucleotide
  modified_base 18: mod_base = OTHER; note = 2'-O-methyl modified nucleotide
  modified_base 22: mod_base = OTHER; note = 2'-O-methyl modified nucleotide
  modified_base 25: mod_base = OTHER; note = 2'-O-methyl modified nucleotide
  modified_base 29: mod_base = OTHER; note = 2'-O-methyl modified nucleotide
  modified_base 30: mod_base = OTHER; note = 2'-O-methyl modified nucleotide
  modified_base 31: mod_base = OTHER; note = 2'-O-methyl modified nucleotide
  modified_base 32: mod_base = OTHER; note = 2'-O-methyl modified nucleotide
  modified_base 37: mod_base = OTHER; note = 2'-O-methyl modified nucleotide
  modified_base 38: mod_base = OTHER; note = 2'-O-methyl modified nucleotide
  modified_base 39: mod_base = OTHER; note = 2'-O-methyl modified nucleotide
  modified_base 40: mod_base = OTHER; note = 2'-O-methyl modified nucleotide
  modified_base 41: mod_base = OTHER; note = 2'-O-methyl modified nucleotide
  modified_base 42: mod_base = OTHER; note = 2'-O-methyl modified nucleotide
  modified_base 43: mod_base = OTHER; note = 2'-O-methyl modified nucleotide
  modified_base 47: mod_base = OTHER; note = 2'-O-methyl modified nucleotide
  modified_base 48: mod_base = OTHER; note = 2'-O-methyl modified nucleotide
  modified_base 51: mod_base = OTHER; note = 2'-O-methyl modified nucleotide
  modified_base 54: mod_base = OTHER; note = nucleotide with phosphorothioate linkage
  modified_base 58: mod_base = OTHER; note = 2'-O-methyl modified nucleotide
  modified_base 59: mod_base = OTHER; note = 2'-O-methyl modified nucleotide
  modified_base 61: mod_base = OTHER; note = 2'-O-methyl modified nucleotide
  modified_base 62: mod_base = OTHER; note = 2'-O-methyl modified nucleotide
  modified_base 63: mod_base = OTHER; note = 2'-O-methyl modified nucleotide
  modified_base 64: mod_base = OTHER; note = 2'-O-methyl modified nucleotide
  modified_base 65: mod_base = OTHER; note = 2'-O-methyl modified nucleotide
  modified_base 66: mod_base = OTHER; note = 2'-O-methyl modified nucleotide
  modified_base 67: mod_base = OTHER; note = 2'-O-methyl modified nucleotide
  modified_base 68: mod_base = OTHER; note = 2'-O-methyl modified nucleotide
  modified_base 69: mod_base = OTHER; note = 2'-O-methyl modified nucleotide
  modified_base 70: mod_base = OTHER; note = 2'-O-methyl modified nucleotide
  modified_base 75: mod_base = OTHER; note = 2'-O-methyl modified nucleotide
  modified_base 77: mod_base = OTHER; note = 2'-O-methyl modified nucleotide
  modified_base 80: mod_base = OTHER; note = 2'-O-methyl modified nucleotide
  modified_base 86: mod_base = OTHER; note = 2'-O-methyl modified nucleotide
  modified_base 87: mod_base = OTHER; note = 2'-O-methyl modified nucleotide
  modified_base 89: mod_base = OTHER; note = 2'-O-methyl modified nucleotide
  modified_base 90: mod_base = OTHER; note = 2'-O-methyl modified nucleotide
  modified_base 91: mod_base = OTHER; note = 2'-O-methyl modified nucleotide
  modified_base 92: mod_base = OTHER; note = 2'-O-methyl modified nucleotide
  modified_base 99: mod_base = OTHER; note = nucleotide with phosphorothioate linkage
  modified_base 100: mod_base = OTHER; note = 2'-O-methyl modified nucleotide with phosphorothioate linkage
  modified_base 101: mod_base = OTHER; note = 2'-O-methyl modified nucleotide

SEQ ID NO: 2660 - RNA, 101 nt, synthetic construct; identical to SEQ ID NO: 1660
  source 1..101: mol_type = other RNA
  modified_base 1: mod_base = OTHER; note = 2'-O-methyl modified nucleotide with phosphorothioate linkage
  modified_base 2: mod_base = OTHER; note = 2'-O-methyl modified nucleotide with phosphorothioate linkage
  modified_base 3: mod_base = OTHER; note = 2'-O-methyl modified nucleotide with phosphorothioate linkage
  modified_base 4: mod_base = OTHER; note = 2'-O-methyl modified nucleotide
  modified_base 5: mod_base = OTHER; note = 2'-O-methyl modified nucleotide
  modified_base 8: mod_base = OTHER; note = 2'-O-methyl modified nucleotide
  modified_base 9: mod_base = OTHER; note = 2'-O-methyl modified nucleotide
  modified_base 11: mod_base = OTHER; note = 2'-O-methyl modified nucleotide
  modified_base 13: mod_base = OTHER; note = 2'-O-methyl modified nucleotide
  modified_base 18: mod_base = OTHER; note = 2'-O-methyl modified nucleotide
  modified_base 22: mod_base = OTHER; note = 2'-O-methyl modified nucleotide
  modified_base 25: mod_base = OTHER; note = 2'-O-methyl modified nucleotide
  modified_base 29: mod_base = OTHER; note = 2'-O-methyl modified nucleotide
  modified_base 30: mod_base = OTHER; note = 2'-O-methyl modified nucleotide
  modified_base 31: mod_base = OTHER; note = 2'-O-methyl modified nucleotide
  modified_base 32: mod_base = OTHER; note = 2'-O-methyl modified nucleotide
  modified_base 37: mod_base = OTHER; note = 2'-O-methyl modified nucleotide
  modified_base 38: mod_base = OTHER; note = 2'-O-methyl modified nucleotide
  modified_base 39: mod_base = OTHER; note = 2'-O-methyl modified nucleotide
  modified_base 40: mod_base = OTHER; note = 2'-O-methyl modified nucleotide
  modified_base 41: mod_base = OTHER; note = 2'-O-methyl modified nucleotide
  modified_base 42: mod_base = OTHER; note = 2'-O-methyl modified nucleotide
  modified_base 43: mod_base = OTHER; note = 2'-O-methyl modified nucleotide
  modified_base 47: mod_base = OTHER; note = 2'-O-methyl modified nucleotide
  modified_base 48: mod_base = OTHER; note = 2'-O-methyl modified nucleotide
  modified_base 51: mod_base = OTHER; note = 2'-O-methyl modified nucleotide
  modified_base 54: mod_base = OTHER; note = nucleotide with phosphorothioate linkage
  modified_base 58: mod_base = OTHER; note = 2'-O-methyl modified nucleotide
  modified_base 59: mod_base = OTHER; note = 2'-O-methyl modified nucleotide
  modified_base 61: mod_base = OTHER; note = 2'-O-methyl modified nucleotide
  modified_base 62: mod_base = OTHER; note = 2'-O-methyl modified nucleotide
  modified_base 63: mod_base = OTHER; note = 2'-O-methyl modified nucleotide
  modified_base 64: mod_base = OTHER; note = 2'-O-methyl modified nucleotide
  modified_base 65: mod_base = OTHER; note = 2'-O-methyl modified nucleotide
  modified_base 66: mod_base = OTHER; note = 2'-O-methyl modified nucleotide
  modified_base 67: mod_base = OTHER; note = 2'-O-methyl modified nucleotide
  modified_base 68: mod_base = OTHER; note = 2'-O-methyl modified nucleotide
  modified_base 69: mod_base = OTHER; note = 2'-O-methyl modified nucleotide
  modified_base 70: mod_base = OTHER; note = 2'-O-methyl modified nucleotide
  modified_base 75: mod_base = OTHER; note = 2'-O-methyl modified nucleotide
  modified_base 77: mod_base = OTHER; note = 2'-O-methyl modified nucleotide
  modified_base 80: mod_base = OTHER; note = 2'-O-methyl modified nucleotide
  modified_base 86: mod_base = OTHER; note = 2'-O-methyl modified nucleotide
  modified_base 87: mod_base = OTHER; note = 2'-O-methyl modified nucleotide
  modified_base 89: mod_base = OTHER; note = 2'-O-methyl modified nucleotide
  modified_base 90: mod_base = OTHER; note = 2'-O-methyl modified nucleotide
  modified_base 91: mod_base = OTHER; note = 2'-O-methyl modified nucleotide
  modified_base 92: mod_base = OTHER; note = 2'-O-methyl modified nucleotide
  modified_base 99: mod_base = OTHER; note = nucleotide with phosphorothioate linkage
  modified_base 100: mod_base = OTHER; note = 2'-O-methyl modified nucleotide with phosphorothioate linkage
  modified_base 101: mod_base = OTHER; note = 2'-O-methyl modified nucleotide

SEQ ID NO: 2661 - RNA, 101 nt, synthetic construct; identical to SEQ ID NO: 1661
  source 1..101: mol_type = other RNA
  modified_base 1: mod_base = OTHER; note = 2'-O-methyl modified nucleotide with phosphorothioate linkage
  modified_base 2: mod_base = OTHER; note = 2'-O-methyl modified nucleotide with phosphorothioate linkage
  modified_base 3: mod_base = OTHER; note = 2'-O-methyl modified nucleotide with phosphorothioate linkage
  modified_base 4: mod_base = OTHER; note = 2'-O-methyl modified nucleotide
  modified_base 5: mod_base = OTHER; note = 2'-O-methyl modified nucleotide
  modified_base 8: mod_base = OTHER; note = 2'-O-methyl modified nucleotide
  modified_base 9: mod_base = OTHER; note = 2'-O-methyl modified nucleotide
  modified_base 11: mod_base = OTHER; note = 2'-O-methyl modified nucleotide
  modified_base 13: mod_base = OTHER; note = 2'-O-methyl modified nucleotide
  modified_base 18: mod_base = OTHER; note = 2'-O-methyl modified nucleotide
  modified_base 22: mod_base = OTHER; note = 2'-O-methyl modified nucleotide
  modified_base 25: mod_base = OTHER; note = 2'-O-methyl modified nucleotide
  modified_base 29: mod_base = OTHER; note = 2'-O-methyl modified nucleotide
  modified_base 30: mod_base = OTHER; note = 2'-O-methyl modified nucleotide
  modified_base 31: mod_base = OTHER; note = 2'-O-methyl modified nucleotide
  modified_base 32: mod_base = OTHER; note = 2'-O-methyl modified nucleotide
  modified_base 37: mod_base = OTHER; note = 2'-O-methyl modified nucleotide
  modified_base 38: mod_base = OTHER; note = 2'-O-methyl modified nucleotide
  modified_base 39: mod_base = OTHER; note = 2'-O-methyl modified nucleotide
  modified_base 40: mod_base = OTHER; note = 2'-O-methyl modified nucleotide
  modified_base 41: mod_base = OTHER; note = 2'-O-methyl modified nucleotide
  modified_base 42: mod_base = OTHER; note = 2'-O-methyl modified nucleotide
  modified_base 43: mod_base = OTHER; note = 2'-O-methyl modified nucleotide
  modified_base 47: mod_base = OTHER; note = 2'-O-methyl modified nucleotide
  modified_base 48: mod_base = OTHER; note = 2'-O-methyl modified nucleotide
  modified_base 51: mod_base = OTHER; note = 2'-O-methyl modified nucleotide
  modified_base 54: mod_base = OTHER; note = nucleotide with phosphorothioate linkage
  modified_base 58: mod_base = OTHER; note = 2'-O-methyl modified nucleotide
  modified_base 59: mod_base = OTHER; note = 2'-O-methyl modified nucleotide
  modified_base 61: mod_base = OTHER; note = 2'-O-methyl modified nucleotide
  modified_base 62: mod_base = OTHER; note = 2'-O-methyl modified nucleotide
  modified_base 63: mod_base = OTHER; note = 2'-O-methyl modified nucleotide
  modified_base 64: mod_base = OTHER; note = 2'-O-methyl modified nucleotide
  modified_base 65: mod_base = OTHER; note = 2'-O-methyl modified nucleotide
  modified_base 66: mod_base = OTHER; note = 2'-O-methyl modified nucleotide
  modified_base 67: mod_base = OTHER; note = 2'-O-methyl modified nucleotide
  modified_base 68: mod_base = OTHER; note = 2'-O-methyl modified nucleotide
  modified_base 69: mod_base = OTHER; note = 2'-O-methyl modified nucleotide
  modified_base 70: mod_base = OTHER; note = 2'-O-methyl modified nucleotide
  modified_base 75: mod_base = OTHER; note = 2'-O-methyl modified nucleotide
  modified_base 77: mod_base = OTHER; note = 2'-O-methyl modified nucleotide
  modified_base 80: mod_base = OTHER; note = 2'-O-methyl modified nucleotide
  modified_base 86: mod_base = OTHER; note = 2'-O-methyl modified nucleotide
  modified_base 87: mod_base = OTHER; note = 2'-O-methyl modified nucleotide
  modified_base 89: mod_base = OTHER; note = 2'-O-methyl modified nucleotide
  modified_base 90: mod_base = OTHER; note = 2'-O-methyl modified nucleotide
  modified_base 91: mod_base = OTHER; note = 2'-O-methyl modified nucleotide
  modified_base 92: mod_base = OTHER; note = 2'-O-methyl modified nucleotide
  modified_base 99: mod_base = OTHER; note = nucleotide with phosphorothioate linkage
  modified_base 100: mod_base = OTHER; note = 2'-O-methyl modified nucleotide with phosphorothioate linkage
  modified_base 101: mod_base = OTHER; note = 2'-O-methyl modified nucleotide

SEQ ID NO: 2662 - RNA, 101 nt, synthetic construct; identical to SEQ ID NO: 1662
  source 1..101: mol_type = other RNA
  modified_base 1: mod_base = OTHER; note = 2'-O-methyl modified nucleotide with phosphorothioate linkage
  modified_base 2: mod_base = OTHER; note = 2'-O-methyl modified nucleotide with phosphorothioate linkage
  modified_base 3: mod_base = OTHER; note = 2'-O-methyl modified nucleotide with phosphorothioate linkage
  modified_base 4: mod_base = OTHER; note = 2'-O-methyl modified nucleotide
  modified_base 5: mod_base = OTHER; note = 2'-O-methyl modified nucleotide
  modified_base 8: mod_base = OTHER; note = 2'-O-methyl modified nucleotide
  modified_base 9: mod_base = OTHER; note = 2'-O-methyl modified nucleotide
  modified_base 11: mod_base = OTHER; note = 2'-O-methyl modified nucleotide
  modified_base 13: mod_base = OTHER; note = 2'-O-methyl modified nucleotide
  modified_base 18: mod_base = OTHER; note = 2'-O-methyl modified nucleotide
  modified_base 22: mod_base = OTHER; note = 2'-O-methyl modified nucleotide
  modified_base 25: mod_base = OTHER; note = 2'-O-methyl modified nucleotide
  modified_base 29: mod_base = OTHER; note = 2'-O-methyl modified nucleotide
  modified_base 30: mod_base = OTHER; note = 2'-O-methyl modified nucleotide
  modified_base 31: mod_base = OTHER; note = 2'-O-methyl modified nucleotide
  modified_base 32: mod_base = OTHER; note = 2'-O-methyl modified nucleotide
  modified_base 37: mod_base = OTHER; note = 2'-O-methyl modified nucleotide
  modified_base 38: mod_base = OTHER; note = 2'-O-methyl modified nucleotide
  modified_base 39: mod_base = OTHER; note = 2'-O-methyl modified nucleotide
  modified_base 40: mod_base = OTHER; note = 2'-O-methyl modified nucleotide
  modified_base 41: mod_base = OTHER; note = 2'-O-methyl modified nucleotide
  modified_base 42: mod_base = OTHER; note = 2'-O-methyl modified nucleotide
  modified_base 43: mod_base = OTHER; note = 2'-O-methyl modified nucleotide
  modified_base 47: mod_base = OTHER; note = 2'-O-methyl modified nucleotide
  modified_base 48: mod_base = OTHER; note = 2'-O-methyl modified nucleotide
  modified_base 51: mod_base = OTHER; note = 2'-O-methyl modified nucleotide
  modified_base 54: mod_base = OTHER; note = nucleotide with phosphorothioate linkage
  modified_base 58: mod_base = OTHER; note = 2'-O-methyl modified nucleotide
  modified_base 59: mod_base = OTHER; note = 2'-O-methyl modified nucleotide
  modified_base 61: mod_base = OTHER; note = 2'-O-methyl modified nucleotide
  modified_base 62: mod_base = OTHER; note = 2'-O-methyl modified nucleotide
  modified_base 63: mod_base = OTHER; note = 2'-O-methyl modified nucleotide
  modified_base 64: mod_base = OTHER; note = 2'-O-methyl modified nucleotide
  modified_base 65: mod_base = OTHER; note = 2'-O-methyl modified nucleotide
  modified_base 66: mod_base = OTHER; note = 2'-O-methyl modified nucleotide
  modified_base 67: mod_base = OTHER; note = 2'-O-methyl modified nucleotide
  modified_base 68: mod_base = OTHER; note = 2'-O-methyl modified nucleotide
  modified_base 69: mod_base = OTHER; note = 2'-O-methyl modified nucleotide
  modified_base 70: mod_base = OTHER; note = 2'-O-methyl modified nucleotide
  modified_base 75: mod_base = OTHER; note = 2'-O-methyl modified nucleotide
  modified_base 77: mod_base = OTHER; note = 2'-O-methyl modified nucleotide
  modified_base 80: mod_base = OTHER; note = 2'-O-methyl modified nucleotide
  modified_base 86: mod_base = OTHER; note = 2'-O-methyl modified nucleotide
  modified_base 87: mod_base = OTHER; note = 2'-O-methyl modified nucleotide
  modified_base 89: mod_base = OTHER; note = 2'-O-methyl modified nucleotide
  modified_base 90: mod_base = OTHER; note = 2'-O-methyl modified nucleotide
  modified_base 91: mod_base = OTHER; note = 2'-O-methyl modified nucleotide
  modified_base 92: mod_base = OTHER; note = 2'-O-methyl modified nucleotide
  modified_base 99: mod_base = OTHER; note = nucleotide with phosphorothioate linkage
  modified_base 100: mod_base = OTHER; note = 2'-O-methyl modified nucleotide with phosphorothioate linkage
  modified_base 101: mod_base = OTHER; note = 2'-O-methyl modified nucleotide

SEQ ID NO: 2663 - RNA, 101 nt, synthetic construct; identical to SEQ ID NO: 1663
  source 1..101: mol_type = other RNA
  modified_base 1: mod_base = OTHER; note = 2'-O-methyl modified nucleotide with phosphorothioate linkage
  modified_base 2: mod_base = OTHER; note = 2'-O-methyl modified nucleotide with phosphorothioate linkage
  modified_base 3: mod_base = OTHER; note = 2'-O-methyl modified nucleotide with phosphorothioate linkage
  modified_base 4: mod_base = OTHER; note = 2'-O-methyl modified nucleotide
  modified_base 5: mod_base = OTHER; note = 2'-O-methyl modified nucleotide
  modified_base 8: mod_base = OTHER; note = 2'-O-methyl modified nucleotide
  modified_base 9: mod_base = OTHER; note = 2'-O-methyl modified nucleotide
  modified_base 11: mod_base = OTHER; note = 2'-O-methyl modified nucleotide
  modified_base 13: mod_base = OTHER; note = 2'-O-methyl modified nucleotide
  modified_base 18: mod_base = OTHER; note = 2'-O-methyl modified nucleotide
  modified_base 22: mod_base = OTHER; note = 2'-O-methyl modified nucleotide
  modified_base 25: mod_base = OTHER; note = 2'-O-methyl modified nucleotide
  modified_base 29: mod_base = OTHER; note = 2'-O-methyl modified nucleotide
  modified_base 30: mod_base = OTHER; note = 2'-O-methyl modified nucleotide
  modified_base 31: mod_base = OTHER; note = 2'-O-methyl modified nucleotide
  modified_base 32: mod_base = OTHER; note = 2'-O-methyl modified nucleotide
  modified_base 37: mod_base = OTHER; note = 2'-O-methyl modified nucleotide
  modified_base 38: mod_base = OTHER; note = 2'-O-methyl modified nucleotide
  modified_base 39: mod_base = OTHER; note = 2'-O-methyl modified nucleotide
  modified_base 40: mod_base = OTHER; note = 2'-O-methyl modified nucleotide
  modified_base 41: mod_base = OTHER; note = 2'-O-methyl modified nucleotide
  modified_base 42: mod_base = OTHER; note = 2'-O-methyl modified nucleotide
  modified_base 43: mod_base = OTHER; note = 2'-O-methyl modified nucleotide
  modified_base 47: mod_base = OTHER; note = 2'-O-methyl modified nucleotide
  modified_base 48: mod_base = OTHER; note = 2'-O-methyl modified nucleotide
  modified_base 51: mod_base = OTHER; note = 2'-O-methyl modified nucleotide
  modified_base 54: mod_base = OTHER; note = nucleotide with phosphorothioate linkage
  modified_base 58: mod_base = OTHER; note = 2'-O-methyl modified nucleotide
  modified_base 59: mod_base = OTHER; note = 2'-O-methyl modified nucleotide
  modified_base 61: mod_base = OTHER; note = 2'-O-methyl modified nucleotide
  modified_base 62: mod_base = OTHER; note = 2'-O-methyl modified nucleotide
  modified_base 63: mod_base = OTHER; note = 2'-O-methyl modified nucleotide
  modified_base 64: mod_base = OTHER; note = 2'-O-methyl modified nucleotide
  modified_base 65: mod_base = OTHER; note = 2'-O-methyl modified nucleotide
  modified_base 66: mod_base = OTHER; note = 2'-O-methyl modified nucleotide
  modified_base 67: mod_base = OTHER; note = 2'-O-methyl modified nucleotide
  modified_base 68: mod_base = OTHER; note = 2'-O-methyl modified nucleotide
  modified_base 69: mod_base = OTHER; note = 2'-O-methyl modified nucleotide
  modified_base 70: mod_base = OTHER; note = 2'-O-methyl modified nucleotide
  modified_base 75: mod_base = OTHER; note = 2'-O-methyl modified nucleotide
  modified_base 77: mod_base = OTHER; note = 2'-O-methyl modified nucleotide
  modified_base 80: mod_base = OTHER; note = 2'-O-methyl modified nucleotide
  modified_base 86: mod_base = OTHER; note = 2'-O-methyl modified nucleotide
  modified_base 87: mod_base = OTHER; note = 2'-O-methyl modified nucleotide
  modified_base 89: mod_base = OTHER; note = 2'-O-methyl modified nucleotide
  modified_base 90: mod_base = OTHER; note = 2'-O-methyl modified nucleotide
  modified_base 91: mod_base = OTHER; note = 2'-O-methyl modified nucleotide
  modified_base 92: mod_base = OTHER; note = 2'-O-methyl modified nucleotide
  modified_base 99: mod_base = OTHER; note = nucleotide with phosphorothioate linkage
  modified_base 100: mod_base = OTHER; note = 2'-O-methyl modified nucleotide with phosphorothioate linkage
  modified_base 101: mod_base = OTHER; note = 2'-O-methyl modified nucleotide

SEQ ID NO: 2664 - RNA, 101 nt, synthetic construct; identical to SEQ ID NO: 1664
  source 1..101: mol_type = other RNA
  modified_base 1: mod_base = OTHER; note = 2'-O-methyl modified nucleotide with phosphorothioate linkage
  modified_base 2: mod_base = OTHER; note = 2'-O-methyl modified nucleotide with phosphorothioate linkage
  modified_base 3: mod_base = OTHER; note = 2'-O-methyl modified nucleotide with phosphorothioate linkage
  modified_base 4: mod_base = OTHER; note = 2'-O-methyl modified nucleotide
  modified_base 5: mod_base = OTHER; note = 2'-O-methyl modified nucleotide
  modified_base 8: mod_base = OTHER; note = 2'-O-methyl modified nucleotide
  modified_base 9: mod_base = OTHER; note = 2'-O-methyl modified nucleotide
  modified_base 11: mod_base = OTHER; note = 2'-O-methyl modified nucleotide
  modified_base 13: mod_base = OTHER; note = 2'-O-methyl modified nucleotide
  modified_base 18: mod_base = OTHER; note = 2'-O-methyl modified nucleotide
  modified_base 22: mod_base = OTHER; note = 2'-O-methyl modified nucleotide
  modified_base 25: mod_base = OTHER; note = 2'-O-methyl modified nucleotide
  modified_base 29: mod_base = OTHER; note = 2'-O-methyl modified nucleotide
  modified_base 30: mod_base = OTHER; note = 2'-O-methyl modified nucleotide
  modified_base 31: mod_base = OTHER; note = 2'-O-methyl modified nucleotide
  modified_base 32: mod_base = OTHER; note = 2'-O-methyl modified nucleotide
  modified_base 37: mod_base = OTHER; note = 2'-O-methyl modified nucleotide
  modified_base 38: mod_base = OTHER; note = 2'-O-methyl modified nucleotide
  modified_base 39: mod_base = OTHER; note = 2'-O-methyl modified nucleotide
  modified_base 40: mod_base = OTHER; note = 2'-O-methyl modified nucleotide
  modified_base 41: mod_base = OTHER; note = 2'-O-methyl modified nucleotide
  modified_base 42: mod_base = OTHER; note = 2'-O-methyl modified nucleotide
  modified_base 43: mod_base = OTHER; note = 2'-O-methyl modified nucleotide
  modified_base 47: mod_base = OTHER; note = 2'-O-methyl modified nucleotide
  modified_base 48: mod_base = OTHER; note = 2'-O-methyl modified nucleotide
  modified_base 51: mod_base = OTHER; note = 2'-O-methyl modified nucleotide
  modified_base 54: mod_base = OTHER; note = nucleotide with phosphorothioate linkage
  modified_base 58: mod_base = OTHER; note = 2'-O-methyl modified nucleotide
  modified_base 59: mod_base = OTHER; note = 2'-O-methyl modified nucleotide
  modified_base 61: mod_base = OTHER; note = 2'-O-methyl modified nucleotide
  modified_base 62: mod_base = OTHER; note = 2'-O-methyl modified nucleotide
  modified_base 63: mod_base = OTHER; note = 2'-O-methyl modified nucleotide
  modified_base 64: mod_base = OTHER; note = 2'-O-methyl modified nucleotide
  modified_base 65: mod_base = OTHER; note = 2'-O-methyl modified nucleotide
  modified_base 66: mod_base = OTHER; note = 2'-O-methyl modified nucleotide
  modified_base 67: mod_base = OTHER; note = 2'-O-methyl modified nucleotide
  modified_base 68: mod_base = OTHER; note = 2'-O-methyl modified nucleotide
  modified_base 69: mod_base = OTHER; note = 2'-O-methyl modified nucleotide
  modified_base 70: mod_base = OTHER; note = 2'-O-methyl modified nucleotide
  modified_base 75: mod_base = OTHER; note = 2'-O-methyl modified nucleotide
  modified_base 77: mod_base = OTHER; note = 2'-O-methyl modified nucleotide
  modified_base 80: mod_base = OTHER; note = 2'-O-methyl modified nucleotide
  modified_base 86: mod_base = OTHER; note = 2'-O-methyl modified nucleotide
  modified_base 87: mod_base = OTHER; note = 2'-O-methyl modified nucleotide
  modified_base 89: mod_base = OTHER; note = 2'-O-methyl modified nucleotide
  modified_base 90: mod_base = OTHER; note = 2'-O-methyl modified nucleotide
  modified_base 91: mod_base = OTHER; note = 2'-O-methyl modified nucleotide
  modified_base 92: mod_base = OTHER; note = 2'-O-methyl modified nucleotide
  modified_base 99: mod_base = OTHER; note = nucleotide with phosphorothioate linkage
  modified_base 100: mod_base = OTHER; note = 2'-O-methyl modified nucleotide with phosphorothioate linkage
  modified_base 101: mod_base = OTHER; note = 2'-O-methyl modified nucleotide

SEQ ID NO: 2665 - RNA, 101 nt, synthetic construct; identical to SEQ ID NO: 1665
  source 1..101: mol_type = other RNA
  modified_base 1: mod_base = OTHER; note = 2'-O-methyl modified nucleotide with phosphorothioate linkage
  modified_base 2: mod_base = OTHER; note = 2'-O-methyl modified nucleotide with phosphorothioate linkage
  modified_base 3: mod_base = OTHER; note = 2'-O-methyl modified nucleotide with phosphorothioate linkage
  modified_base 4: mod_base = OTHER; note = 2'-O-methyl modified nucleotide
  modified_base 5: mod_base = OTHER; note = 2'-O-methyl modified nucleotide
  modified_base 8: mod_base = OTHER; note = 2'-O-methyl modified nucleotide
  modified_base 9: mod_base = OTHER; note = 2'-O-methyl modified nucleotide
  modified_base 11: mod_base = OTHER; note = 2'-O-methyl modified nucleotide
  modified_base 13: mod_base = OTHER; note = 2'-O-methyl modified nucleotide
  modified_base 18: mod_base = OTHER; note = 2'-O-methyl modified nucleotide
  modified_base 22: mod_base = OTHER; note = 2'-O-methyl modified nucleotide
  modified_base 25: mod_base = OTHER; note = 2'-O-methyl modified nucleotide
  modified_base 29: mod_base = OTHER; note = 2'-O-methyl modified nucleotide
  modified_base 30: mod_base = OTHER; note = 2'-O-methyl modified nucleotide
  modified_base 31: mod_base = OTHER; note = 2'-O-methyl modified nucleotide
  modified_base 32: mod_base = OTHER; note = 2'-O-methyl modified nucleotide
  modified_base 37: mod_base = OTHER; note = 2'-O-methyl modified nucleotide
  modified_base 38: mod_base = OTHER; note = 2'-O-methyl modified nucleotide
  modified_base 39: mod_base = OTHER; note = 2'-O-methyl modified nucleotide
  modified_base 40: mod_base = OTHER; note = 2'-O-methyl modified nucleotide
  modified_base 41: mod_base = OTHER; note = 2'-O-methyl modified nucleotide
  modified_base 42: mod_base = OTHER; note = 2'-O-methyl modified nucleotide
  modified_base 43: mod_base = OTHER; note = 2'-O-methyl modified nucleotide
  modified_base 47: mod_base = OTHER; note = 2'-O-methyl modified nucleotide
  modified_base 48: mod_base = OTHER; note = 2'-O-methyl modified nucleotide
  modified_base 51: mod_base = OTHER; note = 2'-O-methyl modified nucleotide
  modified_base 54: mod_base = OTHER; note = nucleotide with phosphorothioate linkage
  modified_base 58: mod_base = OTHER; note = 2'-O-methyl modified nucleotide
  modified_base 59: mod_base = OTHER; note = 2'-O-methyl modified nucleotide
  modified_base 61: mod_base = OTHER; note = 2'-O-methyl modified nucleotide
  modified_base 62: mod_base = OTHER; note = 2'-O-methyl modified nucleotide
  modified_base 63: mod_base = OTHER; note = 2'-O-methyl modified nucleotide
  modified_base 64: mod_base = OTHER; note = 2'-O-methyl modified nucleotide
  modified_base 65: mod_base = OTHER; note = 2'-O-methyl modified nucleotide
  modified_base 66: mod_base = OTHER; note = 2'-O-methyl modified nucleotide
  modified_base 67: mod_base = OTHER; note = 2'-O-methyl modified nucleotide
  modified_base 68: mod_base = OTHER; note = 2'-O-methyl modified nucleotide
  modified_base 69: mod_base = OTHER; note = 2'-O-methyl modified nucleotide
  modified_base 70: mod_base = OTHER; note = 2'-O-methyl modified nucleotide
  modified_base 75: mod_base = OTHER; note = 2'-O-methyl modified nucleotide
  modified_base 77: mod_base = OTHER; note = 2'-O-methyl modified nucleotide
  modified_base 80: mod_base = OTHER; note = 2'-O-methyl modified nucleotide
  modified_base 86: mod_base = OTHER; note = 2'-O-methyl modified nucleotide
  modified_base 87: mod_base = OTHER; note = 2'-O-methyl modified nucleotide
  modified_base 89: mod_base = OTHER; note = 2'-O-methyl modified nucleotide
  modified_base 90: mod_base = OTHER; note = 2'-O-methyl modified nucleotide
  modified_base 91: mod_base = OTHER; note = 2'-O-methyl modified nucleotide
  modified_base 92: mod_base = OTHER; note = 2'-O-methyl modified nucleotide
  modified_base 99: mod_base = OTHER; note = nucleotide with phosphorothioate linkage
  modified_base 100: mod_base = OTHER; note = 2'-O-methyl modified nucleotide with phosphorothioate linkage
  modified_base 101: mod_base = OTHER; note = 2'-O-methyl modified nucleotide

SEQ ID NO: 2666 - RNA, 101 nt, synthetic construct; identical to SEQ ID NO: 1666
  source 1..101: mol_type = other RNA
  modified_base 1: mod_base = OTHER; note = 2'-O-methyl modified nucleotide with phosphorothioate linkage
  modified_base 2: mod_base = OTHER; note = 2'-O-methyl modified nucleotide with phosphorothioate linkage
  modified_base 3: mod_base = OTHER; note = 2'-O-methyl modified nucleotide with phosphorothioate linkage
  modified_base 4: mod_base = OTHER; note = 2'-O-methyl modified nucleotide
  modified_base 5: mod_base = OTHER; note = 2'-O-methyl modified nucleotide
  modified_base 8: mod_base = OTHER; note = 2'-O-methyl modified nucleotide
  modified_base 9: mod_base = OTHER; note = 2'-O-methyl modified nucleotide
  modified_base 11: mod_base = OTHER; note = 2'-O-methyl modified nucleotide
  modified_base 13: mod_base = OTHER; note = 2'-O-methyl modified nucleotide
  modified_base 18: mod_base = OTHER; note = 2'-O-methyl modified nucleotide
  modified_base 22: mod_base = OTHER; note = 2'-O-methyl modified nucleotide
  modified_base 25: mod_base = OTHER; note = 2'-O-methyl modified nucleotide
  modified_base 29: mod_base = OTHER; note = 2'-O-methyl modified nucleotide
  modified_base 30: mod_base = OTHER; note = 2'-O-methyl modified nucleotide
  modified_base 31: mod_base = OTHER; note = 2'-O-methyl modified nucleotide
  modified_base 32: mod_base = OTHER; note = 2'-O-methyl modified nucleotide
  modified_base 37: mod_base = OTHER; note = 2'-O-methyl modified nucleotide
  modified_base 38: mod_base = OTHER; note = 2'-O-methyl modified nucleotide
  modified_base 39: mod_base = OTHER; note = 2'-O-methyl modified nucleotide
  modified_base 40: mod_base = OTHER; note = 2'-O-methyl modified nucleotide
  modified_base 41: mod_base = OTHER; note = 2'-O-methyl modified nucleotide
  modified_base 42: mod_base = OTHER; note = 2'-O-methyl modified nucleotide
  modified_base 43: mod_base = OTHER; note = 2'-O-methyl modified nucleotide
  modified_base 47: mod_base = OTHER; note = 2'-O-methyl modified nucleotide
  modified_base 48: mod_base = OTHER; note = 2'-O-methyl modified nucleotide
  modified_base 51: mod_base = OTHER; note = 2'-O-methyl modified nucleotide
  modified_base 54: mod_base = OTHER; note = nucleotide with phosphorothioate linkage
  modified_base 58: mod_base = OTHER; note = 2'-O-methyl modified nucleotide
  modified_base 59: mod_base = OTHER; note = 2'-O-methyl modified nucleotide
  modified_base 61: mod_base = OTHER; note = 2'-O-methyl modified nucleotide
  modified_base 62: mod_base = OTHER; note = 2'-O-methyl modified nucleotide
  modified_base 63: mod_base = OTHER; note = 2'-O-methyl modified nucleotide
  modified_base 64: mod_base = OTHER; note = 2'-O-methyl modified nucleotide
  modified_base 65: mod_base = OTHER; note = 2'-O-methyl modified nucleotide
  modified_base 66: mod_base = OTHER; note = 2'-O-methyl modified nucleotide
  modified_base 67: mod_base = OTHER; note = 2'-O-methyl modified nucleotide
  modified_base 68: mod_base = OTHER; note = 2'-O-methyl modified nucleotide
  modified_base 69: mod_base = OTHER; note = 2'-O-methyl modified nucleotide
  modified_base 70: mod_base = OTHER; note = 2'-O-methyl modified nucleotide
  modified_base 75: mod_base = OTHER; note = 2'-O-methyl modified nucleotide
  modified_base 77: mod_base = OTHER; note = 2'-O-methyl modified nucleotide
  modified_base 80: mod_base = OTHER; note = 2'-O-methyl modified nucleotide
  modified_base 86: mod_base = OTHER; note = 2'-O-methyl modified nucleotide
  modified_base 87: mod_base = OTHER; note = 2'-O-methyl modified nucleotide
  modified_base 89: mod_base = OTHER; note = 2'-O-methyl modified nucleotide
  modified_base 90: mod_base = OTHER; note = 2'-O-methyl modified nucleotide
  modified_base 91: mod_base = OTHER; note = 2'-O-methyl modified nucleotide
  modified_base 92: mod_base = OTHER; note = 2'-O-methyl modified nucleotide
  modified_base 99: mod_base = OTHER; note = nucleotide with phosphorothioate linkage
  modified_base 100: mod_base = OTHER; note = 2'-O-methyl modified nucleotide with phosphorothioate linkage
  modified_base 101: mod_base = OTHER; note = 2'-O-methyl modified nucleotide

SEQ ID NO: 2667 - RNA, 101 nt, synthetic construct; identical to SEQ ID NO: 1667
  source 1..101: mol_type = other RNA
  modified_base 1: mod_base = OTHER; note = 2'-O-methyl modified nucleotide with phosphorothioate linkage
  modified_base 2: mod_base = OTHER; note = 2'-O-methyl modified nucleotide with phosphorothioate linkage
  modified_base 3: mod_base = OTHER; note = 2'-O-methyl modified nucleotide with phosphorothioate linkage
  modified_base 4: mod_base = OTHER; note = 2'-O-methyl modified nucleotide
  modified_base 5: mod_base = OTHER; note = 2'-O-methyl modified nucleotide
  modified_base 8: mod_base = OTHER; note = 2'-O-methyl modified nucleotide
  modified_base 9: mod_base = OTHER; note = 2'-O-methyl modified nucleotide
  modified_base 11: mod_base = OTHER; note = 2'-O-methyl modified nucleotide
  modified_base 13: mod_base = OTHER; note = 2'-O-methyl modified nucleotide
  modified_base 18: mod_base = OTHER; note = 2'-O-methyl modified nucleotide
  modified_base 22: mod_base = OTHER; note = 2'-O-methyl modified nucleotide
  modified_base 25: mod_base = OTHER; note = 2'-O-methyl modified nucleotide
  modified_base 29: mod_base = OTHER; note = 2'-O-methyl modified nucleotide
  modified_base 30: mod_base = OTHER; note = 2'-O-methyl modified nucleotide
  modified_base 31: mod_base = OTHER; note = 2'-O-methyl modified nucleotide
  modified_base 32: mod_base = OTHER; note = 2'-O-methyl modified nucleotide
  modified_base 37: mod_base = OTHER; note = 2'-O-methyl modified nucleotide
  modified_base 38: mod_base = OTHER; note = 2'-O-methyl modified nucleotide
  modified_base 39: mod_base = OTHER; note = 2'-O-methyl modified nucleotide
  modified_base 40: mod_base = OTHER; note = 2'-O-methyl modified nucleotide
  modified_base 41: mod_base = OTHER; note = 2'-O-methyl modified nucleotide
  modified_base 42: mod_base = OTHER; note = 2'-O-methyl modified nucleotide
  modified_base 43: mod_base = OTHER; note = 2'-O-methyl modified nucleotide
  modified_base 47: mod_base = OTHER; note = 2'-O-methyl modified nucleotide
  modified_base 48: mod_base = OTHER; note = 2'-O-methyl modified nucleotide
  modified_base 51: mod_base = OTHER; note = 2'-O-methyl modified nucleotide
  modified_base 54: mod_base = OTHER; note = nucleotide with phosphorothioate linkage
  modified_base 58: mod_base = OTHER; note = 2'-O-methyl modified nucleotide
  modified_base 59: mod_base = OTHER; note = 2'-O-methyl modified nucleotide
  modified_base 61: mod_base = OTHER; note = 2'-O-methyl modified nucleotide
  modified_base 62: mod_base = OTHER; note = 2'-O-methyl modified nucleotide
  modified_base 63: mod_base = OTHER; note = 2'-O-methyl modified nucleotide
  modified_base 64: mod_base = OTHER; note = 2'-O-methyl modified nucleotide
  modified_base 65: mod_base = OTHER; note = 2'-O-methyl modified nucleotide
  modified_base 66: mod_base = OTHER; note = 2'-O-methyl modified nucleotide
  modified_base 67: mod_base = OTHER; note = 2'-O-methyl modified nucleotide
  modified_base 68: mod_base = OTHER; note = 2'-O-methyl modified nucleotide
  modified_base 69: mod_base = OTHER; note = 2'-O-methyl modified nucleotide
  modified_base 70: mod_base = OTHER; note = 2'-O-methyl modified nucleotide
  modified_base 75: mod_base = OTHER; note = 2'-O-methyl modified nucleotide
  modified_base 77: mod_base = OTHER; note = 2'-O-methyl modified nucleotide
  modified_base 80: mod_base = OTHER; note = 2'-O-methyl modified nucleotide
  modified_base 86: mod_base = OTHER; note = 2'-O-methyl modified nucleotide
  modified_base 87: mod_base = OTHER; note = 2'-O-methyl modified nucleotide
  modified_base 89: mod_base = OTHER; note = 2'-O-methyl modified nucleotide
  modified_base 90: mod_base = OTHER; note = 2'-O-methyl modified nucleotide
  modified_base 91: mod_base = OTHER; note = 2'-O-methyl modified nucleotide
  modified_base 92: mod_base = OTHER; note = 2'-O-methyl modified nucleotide
  modified_base 99: mod_base = OTHER; note = nucleotide with phosphorothioate linkage
  modified_base 100: mod_base = OTHER; note = 2'-O-methyl modified nucleotide with phosphorothioate linkage
  modified_base 101: mod_base = OTHER; note = 2'-O-methyl modified nucleotide

SEQ ID NO: 2668 - RNA, 101 nt, synthetic construct; identical to SEQ ID NO: 1668
  source 1..101: mol_type = other RNA
  modified_base 1: mod_base = OTHER; note = 2'-O-methyl modified nucleotide with phosphorothioate linkage
  modified_base 2: mod_base = OTHER; note = 2'-O-methyl modified nucleotide with phosphorothioate linkage
  modified_base 3: mod_base = OTHER; note = 2'-O-methyl modified nucleotide with phosphorothioate linkage
  modified_base 4: mod_base = OTHER; note = 2'-O-methyl modified nucleotide
  modified_base 5: mod_base = OTHER; note = 2'-O-methyl modified nucleotide
  modified_base 8: mod_base = OTHER; note = 2'-O-methyl modified nucleotide
  modified_base 9: mod_base = OTHER; note = 2'-O-methyl modified nucleotide
  modified_base 11: mod_base = OTHER; note = 2'-O-methyl modified nucleotide
  modified_base 13: mod_base = OTHER; note = 2'-O-methyl modified nucleotide
  modified_base 18: mod_base = OTHER; note = 2'-O-methyl modified nucleotide
  modified_base 22: mod_base = OTHER; note = 2'-O-methyl modified nucleotide
  modified_base 25: mod_base = OTHER; note = 2'-O-methyl modified nucleotide
  modified_base 29: mod_base = OTHER; note = 2'-O-methyl modified nucleotide
  modified_base 30: mod_base = OTHER; note = 2'-O-methyl modified nucleotide
  modified_base 31: mod_base = OTHER; note = 2'-O-methyl modified nucleotide
  modified_base 32: mod_base = OTHER; note = 2'-O-methyl modified nucleotide
  modified_base 37: mod_base = OTHER; note = 2'-O-methyl modified nucleotide
  modified_base 38: mod_base = OTHER; note = 2'-O-methyl modified nucleotide
  modified_base 39: mod_base = OTHER; note = 2'-O-methyl modified nucleotide
  modified_base 40: mod_base = OTHER; note = 2'-O-methyl modified nucleotide
  modified_base 41: mod_base = OTHER; note = 2'-O-methyl modified nucleotide
  modified_base 42: mod_base = OTHER; note = 2'-O-methyl modified nucleotide
  modified_base 43: mod_base = OTHER; note = 2'-O-methyl modified nucleotide
  modified_base 47: mod_base = OTHER; note = 2'-O-methyl modified nucleotide
  modified_base 48: mod_base = OTHER; note = 2'-O-methyl modified nucleotide
  modified_base 51: mod_base = OTHER; note = 2'-O-methyl modified nucleotide
  modified_base 54: mod_base = OTHER; note = nucleotide with phosphorothioate linkage
  modified_base 58: mod_base = OTHER; note = 2'-O-methyl modified nucleotide
  modified_base 59: mod_base = OTHER; note = 2'-O-methyl modified nucleotide
  modified_base 61: mod_base = OTHER; note = 2'-O-methyl modified nucleotide
  modified_base 62: mod_base = OTHER; note = 2'-O-methyl modified nucleotide
  modified_base 63: mod_base = OTHER; note = 2'-O-methyl modified nucleotide
  modified_base 64: mod_base = OTHER; note = 2'-O-methyl modified nucleotide
  modified_base 65: mod_base = OTHER; note = 2'-O-methyl modified nucleotide
  modified_base 66: mod_base = OTHER; note = 2'-O-methyl modified nucleotide
  modified_base 67: mod_base = OTHER; note = 2'-O-methyl modified nucleotide
  modified_base 68: mod_base = OTHER; note = 2'-O-methyl modified nucleotide
  modified_base 69: mod_base = OTHER; note = 2'-O-methyl modified nucleotide
  modified_base 70: mod_base = OTHER; note = 2'-O-methyl modified nucleotide
  modified_base 75: mod_base = OTHER; note = 2'-O-methyl modified nucleotide
  modified_base 77: mod_base = OTHER; note = 2'-O-methyl modified nucleotide
  modified_base 80: mod_base = OTHER; note = 2'-O-methyl modified nucleotide
  modified_base 86: mod_base = OTHER; note = 2'-O-methyl modified nucleotide
  modified_base 87: mod_base = OTHER; note = 2'-O-methyl modified nucleotide
  modified_base 89: mod_base = OTHER; note = 2'-O-methyl modified nucleotide
  modified_base 90: mod_base = OTHER; note = 2'-O-methyl modified nucleotide
  modified_base 91: mod_base = OTHER; note = 2'-O-methyl modified nucleotide
  modified_base 92: mod_base = OTHER; note = 2'-O-methyl modified nucleotide
  modified_base 99: mod_base = OTHER; note = nucleotide with phosphorothioate linkage
  modified_base 100: mod_base = OTHER; note = 2'-O-methyl modified nucleotide with phosphorothioate linkage
  modified_base 101: mod_base = OTHER; note = 2'-O-methyl modified nucleotide

SEQ ID NO: 2669 - RNA, 101 nt, synthetic construct; identical to SEQ ID NO: 1669
  source 1..101: mol_type = other RNA
  modified_base 1: mod_base = OTHER; note = 2'-O-methyl modified nucleotide with phosphorothioate linkage
  modified_base 2: mod_base = OTHER; note = 2'-O-methyl modified nucleotide with phosphorothioate linkage
  modified_base 3: mod_base = OTHER; note = 2'-O-methyl modified nucleotide with phosphorothioate linkage
  modified_base 4: mod_base = OTHER; note = 2'-O-methyl modified nucleotide
  modified_base 5: mod_base = OTHER; note = 2'-O-methyl modified nucleotide
  modified_base 8: mod_base = OTHER; note = 2'-O-methyl modified nucleotide
  modified_base 9: mod_base = OTHER; note = 2'-O-methyl modified nucleotide
  modified_base 11: mod_base = OTHER; note = 2'-O-methyl modified nucleotide
  modified_base 13: mod_base = OTHER; note = 2'-O-methyl modified nucleotide
  modified_base 18: mod_base = OTHER; note = 2'-O-methyl modified nucleotide
  modified_base 22: mod_base = OTHER; note = 2'-O-methyl modified nucleotide
  modified_base 25: mod_base = OTHER; note = 2'-O-methyl modified nucleotide
  modified_base 29: mod_base = OTHER; note = 2'-O-methyl modified nucleotide
  modified_base 30: mod_base = OTHER; note = 2'-O-methyl modified nucleotide
  modified_base 31: mod_base = OTHER; note = 2'-O-methyl modified nucleotide
  modified_base 32: mod_base = OTHER; note = 2'-O-methyl modified nucleotide
  modified_base 37: mod_base = OTHER; note = 2'-O-methyl modified nucleotide
  modified_base 38: mod_base = OTHER; note = 2'-O-methyl modified nucleotide
  modified_base 39: mod_base = OTHER; note = 2'-O-methyl modified nucleotide
  modified_base 40: mod_base = OTHER; note = 2'-O-methyl modified nucleotide
  modified_base 41: mod_base = OTHER; note = 2'-O-methyl modified nucleotide
  modified_base 42: mod_base = OTHER; note = 2'-O-methyl modified nucleotide
  modified_base 43: mod_base = OTHER; note = 2'-O-methyl modified nucleotide
  modified_base 47: mod_base = OTHER; note = 2'-O-methyl modified nucleotide
  modified_base 48: mod_base = OTHER; note = 2'-O-methyl modified nucleotide
  modified_base 51: mod_base = OTHER; note = 2'-O-methyl modified nucleotide
  modified_base 54: mod_base = OTHER; note = nucleotide with phosphorothioate linkage
  modified_base 58: mod_base = OTHER; note = 2'-O-methyl modified nucleotide
  modified_base 59: mod_base = OTHER; note = 2'-O-methyl modified nucleotide
  modified_base 61: mod_base = OTHER; note = 2'-O-methyl modified nucleotide
  modified_base 62: mod_base = OTHER; note = 2'-O-methyl modified nucleotide
  modified_base 63: mod_base = OTHER; note = 2'-O-methyl modified nucleotide
  modified_base 64: mod_base = OTHER; note = 2'-O-methyl modified nucleotide
  modified_base 65: mod_base = OTHER; note = 2'-O-methyl modified nucleotide
  modified_base 66: mod_base = OTHER; note = 2'-O-methyl modified nucleotide
  modified_base 67: mod_base = OTHER; note = 2'-O-methyl modified nucleotide
  modified_base 68: mod_base = OTHER; note = 2'-O-methyl modified nucleotide
  modified_base 69: mod_base = OTHER; note = 2'-O-methyl modified nucleotide
  modified_base 70: mod_base = OTHER; note = 2'-O-methyl modified nucleotide
  modified_base 75: mod_base = OTHER; note = 2'-O-methyl modified nucleotide
  modified_base 77: mod_base = OTHER; note = 2'-O-methyl modified nucleotide
  modified_base 80: mod_base = OTHER; note = 2'-O-methyl modified nucleotide
  modified_base 86: mod_base = OTHER; note = 2'-O-methyl modified nucleotide
  modified_base 87: mod_base = OTHER; note = 2'-O-methyl modified nucleotide
  modified_base 89: mod_base = OTHER; note = 2'-O-methyl modified nucleotide
  modified_base 90: mod_base = OTHER; note = 2'-O-methyl modified nucleotide
  modified_base 91: mod_base = OTHER; note = 2'-O-methyl modified nucleotide
  modified_base 92: mod_base = OTHER; note = 2'-O-methyl modified nucleotide
  modified_base 99: mod_base = OTHER; note = nucleotide with phosphorothioate linkage
  modified_base 100: mod_base = OTHER; note = 2'-O-methyl modified nucleotide with phosphorothioate linkage
  modified_base 101: mod_base = OTHER; note = 2'-O-methyl modified nucleotide

SEQ ID NO: 2670 - RNA, 101 nt, synthetic construct; identical to SEQ ID NO: 1670
  source 1..101: mol_type = other RNA
  modified_base 1: mod_base = OTHER; note = 2'-O-methyl modified nucleotide with phosphorothioate linkage
  modified_base 2: mod_base = OTHER; note = 2'-O-methyl modified nucleotide with phosphorothioate linkage
  modified_base 3: mod_base = OTHER; note = 2'-O-methyl modified nucleotide with phosphorothioate linkage
  modified_base 4: mod_base = OTHER; note = 2'-O-methyl modified nucleotide
  modified_base 5: mod_base = OTHER; note = 2'-O-methyl modified nucleotide
  modified_base 8: mod_base = OTHER; note = 2'-O-methyl modified nucleotide
  modified_base 9: mod_base = OTHER; note = 2'-O-methyl modified nucleotide
  modified_base 11: mod_base = OTHER; note = 2'-O-methyl modified nucleotide
  modified_base 13: mod_base = OTHER; note = 2'-O-methyl modified nucleotide
  modified_base 18: mod_base = OTHER; note = 2'-O-methyl modified nucleotide
  modified_base 22: mod_base = OTHER; note = 2'-O-methyl modified nucleotide
  modified_base 25: mod_base = OTHER; note = 2'-O-methyl modified nucleotide
  modified_base 29: mod_base = OTHER; note = 2'-O-methyl modified nucleotide
  modified_base 30: mod_base = OTHER; note = 2'-O-methyl modified nucleotide
  modified_base 31: mod_base = OTHER; note = 2'-O-methyl modified nucleotide
  modified_base 32: mod_base = OTHER; note = 2'-O-methyl modified nucleotide
  modified_base 37: mod_base = OTHER; note = 2'-O-methyl modified nucleotide
  modified_base 38: mod_base = OTHER; note = 2'-O-methyl modified nucleotide
  modified_base 39: mod_base = OTHER; note = 2'-O-methyl modified nucleotide
  modified_base 40: mod_base = OTHER; note = 2'-O-methyl modified nucleotide
  modified_base 41: mod_base = OTHER; note = 2'-O-methyl modified nucleotide
  modified_base 42: mod_base = OTHER; note = 2'-O-methyl modified nucleotide
  modified_base 43: mod_base = OTHER; note = 2'-O-methyl modified nucleotide
  modified_base 47: mod_base = OTHER; note = 2'-O-methyl modified nucleotide
  modified_base 48: mod_base = OTHER; note = 2'-O-methyl modified nucleotide
  modified_base 51: mod_base = OTHER; note = 2'-O-methyl modified nucleotide
  modified_base 54: mod_base = OTHER; note = nucleotide with phosphorothioate linkage
  modified_base 58: mod_base = OTHER; note = 2'-O-methyl modified nucleotide
  modified_base 59: mod_base = OTHER; note = 2'-O-methyl modified nucleotide
  modified_base 61: mod_base = OTHER; note = 2'-O-methyl modified nucleotide
  modified_base 62: mod_base = OTHER; note = 2'-O-methyl modified nucleotide
  modified_base 63: mod_base = OTHER; note = 2'-O-methyl modified nucleotide
  modified_base 64: mod_base = OTHER; note = 2'-O-methyl modified nucleotide
  modified_base 65: mod_base = OTHER; note = 2'-O-methyl modified nucleotide
  modified_base 66: mod_base = OTHER; note = 2'-O-methyl modified nucleotide
  modified_base 67: mod_base = OTHER; note = 2'-O-methyl modified nucleotide
  modified_base 68: mod_base = OTHER; note = 2'-O-methyl modified nucleotide
  modified_base 69: mod_base = OTHER; note = 2'-O-methyl modified nucleotide
  modified_base 70: mod_base = OTHER; note = 2'-O-methyl modified nucleotide
  modified_base 75: mod_base = OTHER; note = 2'-O-methyl modified nucleotide
  modified_base 77: mod_base = OTHER; note = 2'-O-methyl modified nucleotide
  modified_base 80: mod_base = OTHER; note = 2'-O-methyl modified nucleotide
  modified_base 86: mod_base = OTHER; note = 2'-O-methyl modified nucleotide
  modified_base 87: mod_base = OTHER; note = 2'-O-methyl modified nucleotide
  modified_base 89: mod_base = OTHER; note = 2'-O-methyl modified nucleotide
  modified_base 90: mod_base = OTHER; note = 2'-O-methyl modified nucleotide
  modified_base 91: mod_base = OTHER; note = 2'-O-methyl modified nucleotide
  modified_base 92: mod_base = OTHER; note = 2'-O-methyl modified nucleotide
  modified_base 99: mod_base = OTHER; note = nucleotide with phosphorothioate linkage
  modified_base 100: mod_base = OTHER; note = 2'-O-methyl modified nucleotide with phosphorothioate linkage
  modified_base 101: mod_base = OTHER; note = 2'-O-methyl modified nucleotide

SEQ ID NO: 2671 - RNA, 101 nt, synthetic construct; identical to SEQ ID NO: 1671
  source 1..101: mol_type = other RNA
  modified_base 1: mod_base = OTHER; note = 2'-O-methyl modified nucleotide with phosphorothioate linkage
  modified_base 2: mod_base = OTHER; note = 2'-O-methyl modified nucleotide with phosphorothioate linkage
  modified_base 3: mod_base = OTHER; note = 2'-O-methyl modified nucleotide with phosphorothioate linkage
  modified_base 4: mod_base = OTHER; note = 2'-O-methyl modified nucleotide
  modified_base 5: mod_base = OTHER; note = 2'-O-methyl modified nucleotide
  modified_base 8: mod_base = OTHER; note = 2'-O-methyl modified nucleotide
  modified_base 9: mod_base = OTHER; note = 2'-O-methyl modified nucleotide
  modified_base 11: mod_base = OTHER; note = 2'-O-methyl modified nucleotide
  modified_base 13: mod_base = OTHER; note = 2'-O-methyl modified nucleotide
  modified_base 18: mod_base = OTHER; note = 2'-O-methyl modified nucleotide
  modified_base 22: mod_base = OTHER; note = 2'-O-methyl modified nucleotide
  modified_base 25: mod_base = OTHER; note = 2'-O-methyl modified nucleotide
  modified_base 29: mod_base = OTHER; note = 2'-O-methyl modified nucleotide
  modified_base 30: mod_base = OTHER; note = 2'-O-methyl modified nucleotide
  modified_base 31: mod_base = OTHER; note = 2'-O-methyl modified nucleotide
  modified_base 32: mod_base = OTHER; note = 2'-O-methyl modified nucleotide
  modified_base 37: mod_base = OTHER; note = 2'-O-methyl modified nucleotide
  modified_base 38: mod_base = OTHER; note = 2'-O-methyl modified nucleotide
  modified_base 39: mod_base = OTHER; note = 2'-O-methyl modified nucleotide
  modified_base 40: mod_base = OTHER; note = 2'-O-methyl modified nucleotide
  modified_base 41: mod_base = OTHER; note = 2'-O-methyl modified nucleotide
  modified_base 42: mod_base = OTHER; note = 2'-O-methyl modified nucleotide
  modified_base 43: mod_base = OTHER; note = 2'-O-methyl modified nucleotide
  modified_base 47: mod_base = OTHER; note = 2'-O-methyl modified nucleotide
  modified_base 48: mod_base = OTHER; note = 2'-O-methyl modified nucleotide
  modified_base 51: mod_base = OTHER; note = 2'-O-methyl modified nucleotide
  modified_base 54: mod_base = OTHER; note = nucleotide with phosphorothioate linkage
  modified_base 58: mod_base = OTHER; note = 2'-O-methyl modified nucleotide
  modified_base 59: mod_base = OTHER; note = 2'-O-methyl modified nucleotide
  modified_base 61: mod_base = OTHER; note = 2'-O-methyl modified nucleotide
  modified_base 62: mod_base = OTHER; note = 2'-O-methyl modified nucleotide
  modified_base 63: mod_base = OTHER; note = 2'-O-methyl modified nucleotide
  modified_base 64: mod_base = OTHER; note = 2'-O-methyl modified nucleotide
  modified_base 65: mod_base = OTHER; note = 2'-O-methyl modified nucleotide
  modified_base 66: mod_base = OTHER; note = 2'-O-methyl modified nucleotide
  modified_base 67: mod_base = OTHER; note = 2'-O-methyl modified nucleotide
  modified_base 68: mod_base = OTHER; note = 2'-O-methyl modified nucleotide
  modified_base 69: mod_base = OTHER; note = 2'-O-methyl modified nucleotide
  modified_base 70: mod_base = OTHER; note = 2'-O-methyl modified nucleotide
  modified_base 75: mod_base = OTHER; note = 2'-O-methyl modified nucleotide
  modified_base 77: mod_base = OTHER; note = 2'-O-methyl modified nucleotide
  modified_base 80: mod_base = OTHER; note = 2'-O-methyl modified nucleotide
  modified_base 86: mod_base = OTHER; note = 2'-O-methyl modified nucleotide
  modified_base 87: mod_base = OTHER; note = 2'-O-methyl modified nucleotide
  modified_base 89: mod_base = OTHER; note = 2'-O-methyl modified nucleotide
  modified_base 90: mod_base = OTHER; note = 2'-O-methyl modified nucleotide
  modified_base 91: mod_base = OTHER; note = 2'-O-methyl modified nucleotide
  modified_base 92: mod_base = OTHER; note = 2'-O-methyl modified nucleotide
  modified_base 99: mod_base = OTHER; note = nucleotide with phosphorothioate linkage
  modified_base 100: mod_base = OTHER; note = 2'-O-methyl modified nucleotide with phosphorothioate linkage
  modified_base 101: mod_base = OTHER; note = 2'-O-methyl modified nucleotide

SEQ ID NO: 2672 - RNA, 101 nt, synthetic construct; identical to SEQ ID NO: 1672
  source 1..101: mol_type = other RNA
  modified_base 1: mod_base = OTHER; note = 2'-O-methyl modified nucleotide with phosphorothioate linkage
  modified_base 2: mod_base = OTHER; note = 2'-O-methyl modified nucleotide with phosphorothioate linkage
  modified_base 3: mod_base = OTHER; note = 2'-O-methyl modified nucleotide with phosphorothioate linkage
  modified_base 4: mod_base = OTHER; note = 2'-O-methyl modified nucleotide
  modified_base 5: mod_base = OTHER; note = 2'-O-methyl modified nucleotide
  modified_base 8: mod_base = OTHER; note = 2'-O-methyl modified nucleotide
  modified_base 9: mod_base = OTHER; note = 2'-O-methyl modified nucleotide
  modified_base 11: mod_base = OTHER; note = 2'-O-methyl modified nucleotide
  modified_base 13: mod_base = OTHER; note = 2'-O-methyl modified nucleotide
  modified_base 18: mod_base = OTHER; note = 2'-O-methyl modified nucleotide
  modified_base 22: mod_base = OTHER; note = 2'-O-methyl modified nucleotide
  modified_base 25: mod_base = OTHER; note = 2'-O-methyl modified nucleotide
  modified_base 29: mod_base = OTHER; note = 2'-O-methyl modified nucleotide
  modified_base 30: mod_base = OTHER; note = 2'-O-methyl modified nucleotide
  modified_base 31: mod_base = OTHER; note = 2'-O-methyl modified nucleotide
  modified_base 32: mod_base = OTHER; note = 2'-O-methyl modified nucleotide
  modified_base 37: mod_base = OTHER; note = 2'-O-methyl modified nucleotide
  modified_base 38: mod_base = OTHER; note = 2'-O-methyl modified nucleotide
  modified_base 39: mod_base = OTHER; note = 2'-O-methyl modified nucleotide
  modified_base 40: mod_base = OTHER; note = 2'-O-methyl modified nucleotide
  modified_base 41: mod_base = OTHER; note = 2'-O-methyl modified nucleotide
  modified_base 42: mod_base = OTHER; note = 2'-O-methyl modified nucleotide
  modified_base 43: mod_base = OTHER; note = 2'-O-methyl modified nucleotide
  modified_base 47: mod_base = OTHER; note = 2'-O-methyl modified nucleotide
  modified_base 48: mod_base = OTHER; note = 2'-O-methyl modified nucleotide
  modified_base 51: mod_base = OTHER; note = 2'-O-methyl modified nucleotide
  modified_base 54: mod_base = OTHER; note = nucleotide with phosphorothioate linkage
  modified_base 58: mod_base = OTHER; note = 2'-O-methyl modified nucleotide
  modified_base 59: mod_base = OTHER; note = 2'-O-methyl modified nucleotide
  modified_base 61: mod_base = OTHER; note = 2'-O-methyl modified nucleotide
  modified_base 62: mod_base = OTHER; note = 2'-O-methyl modified nucleotide
  modified_base 63: mod_base = OTHER; note = 2'-O-methyl modified nucleotide
  modified_base 64: mod_base = OTHER; note = 2'-O-methyl modified nucleotide
  modified_base 65: mod_base = OTHER; note = 2'-O-methyl modified nucleotide
  modified_base 66: mod_base = OTHER; note = 2'-O-methyl modified nucleotide
  modified_base 67: mod_base = OTHER; note = 2'-O-methyl modified nucleotide
  modified_base 68: mod_base = OTHER; note = 2'-O-methyl modified nucleotide
  modified_base 69: mod_base = OTHER; note = 2'-O-methyl modified nucleotide
  modified_base 70: mod_base = OTHER; note = 2'-O-methyl modified nucleotide
  modified_base 75: mod_base = OTHER; note = 2'-O-methyl modified nucleotide
  modified_base 77: mod_base = OTHER; note = 2'-O-methyl modified nucleotide
  modified_base 80: mod_base = OTHER; note = 2'-O-methyl modified nucleotide
  modified_base 86: mod_base = OTHER; note = 2'-O-methyl modified nucleotide
  modified_base 87: mod_base = OTHER; note = 2'-O-methyl modified nucleotide
  modified_base 89: mod_base = OTHER; note = 2'-O-methyl modified nucleotide
  modified_base 90: mod_base = OTHER; note = 2'-O-methyl modified nucleotide
  modified_base 91: mod_base = OTHER; note = 2'-O-methyl modified nucleotide
  modified_base 92: mod_base = OTHER; note = 2'-O-methyl modified nucleotide
  modified_base 99: mod_base = OTHER; note = nucleotide with phosphorothioate linkage
  modified_base 100: mod_base = OTHER; note = 2'-O-methyl modified nucleotide with phosphorothioate linkage
  modified_base 101: mod_base = OTHER; note = 2'-O-methyl modified nucleotide

SEQ ID NO: 2673 - RNA, 101 nt, synthetic construct; identical to SEQ ID NO: 1673
  source 1..101: mol_type = other RNA
  modified_base 1: mod_base = OTHER; note = 2'-O-methyl modified nucleotide with phosphorothioate linkage
  modified_base 2: mod_base = OTHER; note = 2'-O-methyl modified nucleotide with phosphorothioate linkage
  modified_base 3: mod_base = OTHER; note = 2'-O-methyl modified nucleotide with phosphorothioate linkage
  modified_base 4: mod_base = OTHER; note = 2'-O-methyl modified nucleotide
  modified_base 5: mod_base = OTHER; note = 2'-O-methyl modified nucleotide
  modified_base 8: mod_base = OTHER; note = 2'-O-methyl modified nucleotide
  modified_base 9: mod_base = OTHER; note = 2'-O-methyl modified nucleotide
  modified_base 11: mod_base = OTHER; note = 2'-O-methyl modified nucleotide
  modified_base 13: mod_base = OTHER; note = 2'-O-methyl modified nucleotide
  modified_base 18: mod_base = OTHER; note = 2'-O-methyl modified nucleotide
  modified_base 22: mod_base = OTHER; note = 2'-O-methyl modified nucleotide
  modified_base 25: mod_base = OTHER; note = 2'-O-methyl modified nucleotide
  modified_base 29: mod_base = OTHER; note = 2'-O-methyl modified nucleotide
  modified_base 30: mod_base = OTHER; note = 2'-O-methyl modified nucleotide
  modified_base 31: mod_base = OTHER; note = 2'-O-methyl modified nucleotide
  modified_base 32: mod_base = OTHER; note = 2'-O-methyl modified nucleotide
  modified_base 37: mod_base = OTHER; note = 2'-O-methyl modified nucleotide
  modified_base 38: mod_base = OTHER; note = 2'-O-methyl modified nucleotide
  modified_base 39: mod_base = OTHER; note = 2'-O-methyl modified nucleotide
  modified_base 40: mod_base = OTHER; note = 2'-O-methyl modified nucleotide
  modified_base 41: mod_base = OTHER; note = 2'-O-methyl modified nucleotide
  modified_base 42: mod_base = OTHER; note = 2'-O-methyl modified nucleotide
  modified_base 43: mod_base = OTHER; note = 2'-O-methyl modified nucleotide
  modified_base 47: mod_base = OTHER; note = 2'-O-methyl modified nucleotide
  modified_base 48: mod_base = OTHER; note = 2'-O-methyl modified nucleotide
  modified_base 51: mod_base = OTHER; note = 2'-O-methyl modified nucleotide
  modified_base 54: mod_base = OTHER; note = nucleotide with phosphorothioate linkage
  modified_base 58: mod_base = OTHER; note = 2'-O-methyl modified nucleotide
  modified_base 59: mod_base = OTHER; note = 2'-O-methyl modified nucleotide
  modified_base 61: mod_base = OTHER; note = 2'-O-methyl modified nucleotide
  modified_base 62: mod_base = OTHER; note = 2'-O-methyl modified nucleotide
  modified_base 63: mod_base = OTHER; note = 2'-O-methyl modified nucleotide
  modified_base 64: mod_base = OTHER; note = 2'-O-methyl modified nucleotide
  modified_base 65: mod_base = OTHER; note = 2'-O-methyl modified nucleotide
  modified_base 66: mod_base = OTHER; note = 2'-O-methyl modified nucleotide
  modified_base 67: mod_base = OTHER; note = 2'-O-methyl modified nucleotide
  modified_base 68: mod_base = OTHER; note = 2'-O-methyl modified nucleotide
  modified_base 69: mod_base = OTHER; note = 2'-O-methyl modified nucleotide
  modified_base 70: mod_base = OTHER; note = 2'-O-methyl modified nucleotide
  modified_base 75: mod_base = OTHER; note = 2'-O-methyl modified nucleotide
  modified_base 77: mod_base = OTHER; note = 2'-O-methyl modified nucleotide
  modified_base 80: mod_base = OTHER; note = 2'-O-methyl modified nucleotide
  modified_base 86: mod_base = OTHER; note = 2'-O-methyl modified nucleotide
  modified_base 87: mod_base = OTHER; note = 2'-O-methyl modified nucleotide
  modified_base 89: mod_base = OTHER; note = 2'-O-methyl modified nucleotide
  modified_base 90: mod_base = OTHER; note = 2'-O-methyl modified nucleotide
  modified_base 91: mod_base = OTHER; note = 2'-O-methyl modified nucleotide
  modified_base 92: mod_base = OTHER; note = 2'-O-methyl modified nucleotide
  modified_base 99: mod_base = OTHER; note = nucleotide with phosphorothioate linkage
  modified_base 100: mod_base = OTHER; note = 2'-O-methyl modified nucleotide with phosphorothioate linkage
  modified_base 101: mod_base = OTHER; note = 2'-O-methyl modified nucleotide

SEQ ID NO: 2674 - RNA, 101 nt, synthetic construct; identical to SEQ ID NO: 1674
  source 1..101: mol_type = other RNA
  modified_base 1: mod_base = OTHER; note = 2'-O-methyl modified nucleotide with phosphorothioate linkage
  modified_base 2: mod_base = OTHER; note = 2'-O-methyl modified nucleotide with phosphorothioate linkage
  modified_base 3: mod_base = OTHER; note = 2'-O-methyl modified nucleotide with phosphorothioate linkage
  modified_base 4: mod_base = OTHER; note = 2'-O-methyl modified nucleotide
  modified_base 5: mod_base = OTHER; note = 2'-O-methyl modified nucleotide
  modified_base 8: mod_base = OTHER; note = 2'-O-methyl modified nucleotide
  modified_base 9: mod_base = OTHER; note = 2'-O-methyl modified nucleotide
  modified_base 11: mod_base = OTHER; note = 2'-O-methyl modified nucleotide
  modified_base 13: mod_base = OTHER; note = 2'-O-methyl modified nucleotide
  modified_base 18: mod_base = OTHER; note = 2'-O-methyl modified nucleotide
  modified_base 22: mod_base = OTHER; note = 2'-O-methyl modified nucleotide
  modified_base 25: mod_base = OTHER; note = 2'-O-methyl modified nucleotide
  modified_base 29: mod_base = OTHER; note = 2'-O-methyl modified nucleotide
  modified_base 30: mod_base = OTHER; note = 2'-O-methyl modified nucleotide
  modified_base 31: mod_base = OTHER; note = 2'-O-methyl modified nucleotide
  modified_base 32: mod_base = OTHER; note = 2'-O-methyl modified nucleotide
  modified_base 37: mod_base = OTHER; note = 2'-O-methyl modified nucleotide
  modified_base 38: mod_base = OTHER; note = 2'-O-methyl modified nucleotide
  modified_base 39: mod_base = OTHER; note = 2'-O-methyl modified nucleotide
  modified_base 40: mod_base = OTHER; note = 2'-O-methyl modified nucleotide
  modified_base 41: mod_base = OTHER; note = 2'-O-methyl modified nucleotide
  modified_base 42: mod_base = OTHER; note = 2'-O-methyl modified nucleotide
  modified_base 43: mod_base = OTHER; note = 2'-O-methyl modified nucleotide
  modified_base 47: mod_base = OTHER; note = 2'-O-methyl modified nucleotide
  modified_base 48: mod_base = OTHER; note = 2'-O-methyl modified nucleotide
  modified_base 51: mod_base = OTHER; note = 2'-O-methyl modified nucleotide
  modified_base 54: mod_base = OTHER; note = nucleotide with phosphorothioate linkage
  modified_base 58: mod_base = OTHER; note = 2'-O-methyl modified nucleotide
  modified_base 59: mod_base = OTHER; note = 2'-O-methyl modified nucleotide
  modified_base 61: mod_base = OTHER; note = 2'-O-methyl modified nucleotide
  modified_base 62: mod_base = OTHER; note = 2'-O-methyl modified nucleotide
  modified_base 63: mod_base = OTHER; note = 2'-O-methyl modified nucleotide
  modified_base 64: mod_base = OTHER; note = 2'-O-methyl modified nucleotide
  modified_base 65: mod_base = OTHER; note = 2'-O-methyl modified nucleotide
  modified_base 66: mod_base = OTHER; note = 2'-O-methyl modified nucleotide
  modified_base 67: mod_base = OTHER; note = 2'-O-methyl modified nucleotide
  modified_base 68: mod_base = OTHER; note = 2'-O-methyl modified nucleotide
  modified_base 69: mod_base = OTHER; note = 2'-O-methyl modified nucleotide
  modified_base 70: mod_base = OTHER; note = 2'-O-methyl modified nucleotide
  modified_base 75: mod_base = OTHER; note = 2'-O-methyl modified nucleotide
  modified_base 77: mod_base = OTHER; note = 2'-O-methyl modified nucleotide
  modified_base 80: mod_base = OTHER; note = 2'-O-methyl modified nucleotide
  modified_base 86: mod_base = OTHER; note = 2'-O-methyl modified nucleotide
  modified_base 87: mod_base = OTHER; note = 2'-O-methyl modified nucleotide
  modified_base 89: mod_base = OTHER; note = 2'-O-methyl modified nucleotide
  modified_base 90: mod_base = OTHER; note = 2'-O-methyl modified nucleotide
  modified_base 91: mod_base = OTHER; note = 2'-O-methyl modified nucleotide
  modified_base 92: mod_base = OTHER; note = 2'-O-methyl modified nucleotide
  modified_base 99: mod_base = OTHER; note = nucleotide with phosphorothioate linkage
  modified_base 100: mod_base = OTHER; note = 2'-O-methyl modified nucleotide with phosphorothioate linkage
  modified_base 101: mod_base = OTHER; note = 2'-O-methyl modified nucleotide

SEQ ID NO: 2675 - RNA, 101 nt, synthetic construct; identical to SEQ ID NO: 1675
  source 1..101: mol_type = other RNA
  modified_base 1: mod_base = OTHER; note = 2'-O-methyl modified nucleotide with phosphorothioate linkage
  modified_base 2: mod_base = OTHER; note = 2'-O-methyl modified nucleotide with phosphorothioate linkage
  modified_base 3: mod_base = OTHER; note = 2'-O-methyl modified nucleotide with phosphorothioate linkage
  modified_base 4: mod_base = OTHER; note = 2'-O-methyl modified nucleotide
  modified_base 5: mod_base = OTHER; note = 2'-O-methyl modified nucleotide
  modified_base 8: mod_base = OTHER; note = 2'-O-methyl modified nucleotide
  modified_base 9: mod_base = OTHER; note = 2'-O-methyl modified nucleotide
  modified_base 11: mod_base = OTHER; note = 2'-O-methyl modified nucleotide
  modified_base 13: mod_base = OTHER; note = 2'-O-methyl modified nucleotide
  modified_base 18: mod_base = OTHER; note = 2'-O-methyl modified nucleotide
  modified_base 22: mod_base = OTHER; note = 2'-O-methyl modified nucleotide
  modified_base 25: mod_base = OTHER; note = 2'-O-methyl modified nucleotide
  modified_base 29: mod_base = OTHER; note = 2'-O-methyl modified nucleotide
  modified_base 30: mod_base = OTHER; note = 2'-O-methyl modified nucleotide
  modified_base 31: mod_base = OTHER; note = 2'-O-methyl modified nucleotide
  modified_base 32: mod_base = OTHER; note = 2'-O-methyl modified nucleotide
  modified_base 37: mod_base = OTHER; note = 2'-O-methyl modified nucleotide
  modified_base 38: mod_base = OTHER; note = 2'-O-methyl modified nucleotide
  modified_base 39: mod_base = OTHER; note = 2'-O-methyl modified nucleotide
  modified_base 40: mod_base = OTHER; note = 2'-O-methyl modified nucleotide
  modified_base 41: mod_base = OTHER; note = 2'-O-methyl modified nucleotide
  modified_base 42: mod_base = OTHER; note = 2'-O-methyl modified nucleotide
  modified_base 43: mod_base = OTHER; note = 2'-O-methyl modified nucleotide
  modified_base 47: mod_base = OTHER; note = 2'-O-methyl modified nucleotide
  modified_base 48: mod_base = OTHER; note = 2'-O-methyl modified nucleotide
  modified_base 51: mod_base = OTHER; note = 2'-O-methyl modified nucleotide
  modified_base 54: mod_base = OTHER; note = nucleotide with phosphorothioate linkage
  modified_base 58: mod_base = OTHER; note = 2'-O-methyl modified nucleotide
  modified_base 59: mod_base = OTHER; note = 2'-O-methyl modified nucleotide
  modified_base 61: mod_base = OTHER; note = 2'-O-methyl modified nucleotide
  modified_base 62: mod_base = OTHER; note = 2'-O-methyl modified nucleotide
  modified_base 63: mod_base = OTHER; note = 2'-O-methyl modified nucleotide
  modified_base 64: mod_base = OTHER; note = 2'-O-methyl modified nucleotide
  modified_base 65: mod_base = OTHER; note = 2'-O-methyl modified nucleotide
  modified_base 66: mod_base = OTHER; note = 2'-O-methyl modified nucleotide
  modified_base 67: mod_base = OTHER; note = 2'-O-methyl modified nucleotide
  modified_base 68: mod_base = OTHER; note = 2'-O-methyl modified nucleotide
  modified_base 69: mod_base = OTHER; note = 2'-O-methyl modified nucleotide
  modified_base 70: mod_base = OTHER; note = 2'-O-methyl modified nucleotide
  modified_base 75: mod_base = OTHER; note = 2'-O-methyl modified nucleotide
  modified_base 77: mod_base = OTHER; note = 2'-O-methyl modified nucleotide
  modified_base 80: mod_base = OTHER; note = 2'-O-methyl modified nucleotide
  modified_base 86: mod_base = OTHER; note = 2'-O-methyl modified nucleotide
  modified_base 87: mod_base = OTHER; note = 2'-O-methyl modified nucleotide
  modified_base 89: mod_base = OTHER; note = 2'-O-methyl modified nucleotide
  modified_base 90: mod_base = OTHER; note = 2'-O-methyl modified nucleotide
  modified_base 91: mod_base = OTHER; note = 2'-O-methyl modified nucleotide
  modified_base 92: mod_base = OTHER; note = 2'-O-methyl modified nucleotide
  modified_base 99: mod_base = OTHER; note = nucleotide with phosphorothioate linkage
  modified_base 100: mod_base = OTHER; note = 2'-O-methyl modified nucleotide with phosphorothioate linkage
  modified_base 101: mod_base = OTHER; note = 2'-O-methyl modified nucleotide

SEQ ID NO: 2676 - RNA, 101 nt, synthetic construct; identical to SEQ ID NO: 1676
  source 1..101: mol_type = other RNA
  modified_base 1: mod_base = OTHER; note = 2'-O-methyl modified nucleotide with phosphorothioate linkage
  modified_base 2: mod_base = OTHER; note = 2'-O-methyl modified nucleotide with phosphorothioate linkage
  modified_base 3: mod_base = OTHER; note = 2'-O-methyl modified nucleotide with phosphorothioate linkage
  modified_base 4: mod_base = OTHER; note = 2'-O-methyl modified nucleotide
  modified_base 5: mod_base = OTHER; note = 2'-O-methyl modified nucleotide
  modified_base 8: mod_base = OTHER; note = 2'-O-methyl modified nucleotide
  modified_base 9: mod_base = OTHER; note = 2'-O-methyl modified nucleotide
  modified_base 11: mod_base = OTHER; note = 2'-O-methyl modified nucleotide
  modified_base 13: mod_base = OTHER; note = 2'-O-methyl modified nucleotide
  modified_base 18: mod_base = OTHER; note = 2'-O-methyl modified nucleotide
  modified_base 22: mod_base = OTHER; note = 2'-O-methyl modified nucleotide
  modified_base 25: mod_base = OTHER; note = 2'-O-methyl modified nucleotide
  modified_base 29: mod_base = OTHER; note = 2'-O-methyl modified nucleotide
  modified_base 30: mod_base = OTHER; note = 2'-O-methyl modified nucleotide
  modified_base 31: mod_base = OTHER; note = 2'-O-methyl modified nucleotide
  modified_base 32: mod_base = OTHER; note = 2'-O-methyl modified nucleotide
  modified_base 37: mod_base = OTHER; note = 2'-O-methyl modified nucleotide
  modified_base 38: mod_base = OTHER; note = 2'-O-methyl modified nucleotide
  modified_base 39: mod_base = OTHER; note = 2'-O-methyl modified nucleotide
  modified_base 40: mod_base = OTHER; note = 2'-O-methyl modified nucleotide
  modified_base 41: mod_base = OTHER; note = 2'-O-methyl modified nucleotide
  modified_base 42: mod_base = OTHER; note = 2'-O-methyl modified nucleotide
  modified_base 43: mod_base = OTHER; note = 2'-O-methyl modified nucleotide
  modified_base 47: mod_base = OTHER; note = 2'-O-methyl modified nucleotide
  modified_base 48: mod_base = OTHER; note = 2'-O-methyl modified nucleotide
  modified_base 51: mod_base = OTHER; note = 2'-O-methyl modified nucleotide
  modified_base 54: mod_base = OTHER; note = nucleotide with phosphorothioate linkage
  modified_base 58: mod_base = OTHER; note = 2'-O-methyl modified nucleotide
  modified_base 59: mod_base = OTHER; note = 2'-O-methyl modified nucleotide
  modified_base 61: mod_base = OTHER; note = 2'-O-methyl modified nucleotide
  modified_base 62: mod_base = OTHER; note = 2'-O-methyl modified nucleotide
  modified_base 63: mod_base = OTHER; note = 2'-O-methyl modified nucleotide
  modified_base 64: mod_base = OTHER; note = 2'-O-methyl modified nucleotide
  modified_base 65: mod_base = OTHER; note = 2'-O-methyl modified nucleotide
  modified_base 66: mod_base = OTHER; note = 2'-O-methyl modified nucleotide
  modified_base 67: mod_base = OTHER; note = 2'-O-methyl modified nucleotide
  modified_base 68: mod_base = OTHER; note = 2'-O-methyl modified nucleotide
  modified_base 69: mod_base = OTHER; note = 2'-O-methyl modified nucleotide
  modified_base 70: mod_base = OTHER; note = 2'-O-methyl modified nucleotide
  modified_base 75: mod_base = OTHER; note = 2'-O-methyl modified nucleotide
  modified_base 77: mod_base = OTHER; note = 2'-O-methyl modified nucleotide
  modified_base 80: mod_base = OTHER; note = 2'-O-methyl modified nucleotide
  modified_base 86: mod_base = OTHER; note = 2'-O-methyl modified nucleotide
  modified_base 87: mod_base = OTHER; note = 2'-O-methyl modified nucleotide
  modified_base 89: mod_base = OTHER; note = 2'-O-methyl modified nucleotide
  modified_base 90: mod_base = OTHER; note = 2'-O-methyl modified nucleotide
  modified_base 91: mod_base = OTHER; note = 2'-O-methyl modified nucleotide
  modified_base 92: mod_base = OTHER; note = 2'-O-methyl modified nucleotide
  modified_base 99: mod_base = OTHER; note = nucleotide with phosphorothioate linkage
  modified_base 100: mod_base = OTHER; note = 2'-O-methyl modified nucleotide with phosphorothioate linkage
  modified_base 101: mod_base = OTHER; note = 2'-O-methyl modified nucleotide

SEQ ID NO: 2677 - RNA, 101 nt, synthetic construct; identical to SEQ ID NO: 1677
  source 1..101: mol_type = other RNA
  modified_base 1: mod_base = OTHER; note = 2'-O-methyl modified nucleotide with phosphorothioate linkage
  modified_base 2: mod_base = OTHER; note = 2'-O-methyl modified nucleotide with phosphorothioate linkage
  modified_base 3: mod_base = OTHER; note = 2'-O-methyl modified nucleotide with phosphorothioate linkage
  modified_base 4: mod_base = OTHER; note = 2'-O-methyl modified nucleotide
  modified_base 5: mod_base = OTHER; note = 2'-O-methyl modified nucleotide
  modified_base 8: mod_base = OTHER; note = 2'-O-methyl modified nucleotide
  modified_base 9: mod_base = OTHER; note = 2'-O-methyl modified nucleotide
  modified_base 11: mod_base = OTHER; note = 2'-O-methyl modified nucleotide
  modified_base 13: mod_base = OTHER; note = 2'-O-methyl modified nucleotide
  modified_base 18: mod_base = OTHER; note = 2'-O-methyl modified nucleotide
  modified_base 22: mod_base = OTHER; note = 2'-O-methyl modified nucleotide
  modified_base 25: mod_base = OTHER; note = 2'-O-methyl modified nucleotide
  modified_base 29: mod_base = OTHER; note = 2'-O-methyl modified nucleotide
  modified_base 30: mod_base = OTHER; note = 2'-O-methyl modified nucleotide
  modified_base 31: mod_base = OTHER; note = 2'-O-methyl modified nucleotide
  modified_base 32: mod_base = OTHER; note = 2'-O-methyl modified nucleotide
  modified_base 37: mod_base = OTHER; note = 2'-O-methyl modified nucleotide
  modified_base 38: mod_base = OTHER; note = 2'-O-methyl modified nucleotide
  modified_base 39: mod_base = OTHER; note = 2'-O-methyl modified nucleotide
  modified_base 40: mod_base = OTHER; note = 2'-O-methyl modified nucleotide
  modified_base 41: mod_base = OTHER; note = 2'-O-methyl modified nucleotide
  modified_base 42: mod_base = OTHER; note = 2'-O-methyl modified nucleotide
  modified_base 43: mod_base = OTHER; note = 2'-O-methyl modified nucleotide
  modified_base 47: mod_base = OTHER; note = 2'-O-methyl modified nucleotide
  modified_base 48: mod_base = OTHER; note = 2'-O-methyl modified nucleotide
  modified_base 51: mod_base = OTHER; note = 2'-O-methyl modified nucleotide
  modified_base 54: mod_base = OTHER; note = nucleotide with phosphorothioate linkage
  modified_base 58: mod_base = OTHER; note = 2'-O-methyl modified nucleotide
  modified_base 59: mod_base = OTHER; note = 2'-O-methyl modified nucleotide
  modified_base 61: mod_base = OTHER; note = 2'-O-methyl modified nucleotide
  modified_base 62: mod_base = OTHER; note = 2'-O-methyl modified nucleotide
  modified_base 63: mod_base = OTHER; note = 2'-O-methyl modified nucleotide
  modified_base 64: mod_base = OTHER; note = 2'-O-methyl modified nucleotide
  modified_base 65: mod_base = OTHER; note = 2'-O-methyl modified nucleotide
  modified_base 66: mod_base = OTHER; note = 2'-O-methyl modified nucleotide
  modified_base 67: mod_base = OTHER; note = 2'-O-methyl modified nucleotide
  modified_base 68: mod_base = OTHER; note = 2'-O-methyl modified nucleotide
  modified_base 69: mod_base = OTHER; note = 2'-O-methyl modified nucleotide
  modified_base 70: mod_base = OTHER; note = 2'-O-methyl modified nucleotide
  modified_base 75: mod_base = OTHER; note = 2'-O-methyl modified nucleotide
  modified_base 77: mod_base = OTHER; note = 2'-O-methyl modified nucleotide
  modified_base 80: mod_base = OTHER; note = 2'-O-methyl modified nucleotide
  modified_base 86: mod_base = OTHER; note = 2'-O-methyl modified nucleotide
  modified_base 87: mod_base = OTHER; note = 2'-O-methyl modified nucleotide
  modified_base 89: mod_base = OTHER; note = 2'-O-methyl modified nucleotide
  modified_base 90: mod_base = OTHER; note = 2'-O-methyl modified nucleotide
  modified_base 91: mod_base = OTHER; note = 2'-O-methyl modified nucleotide
  modified_base 92: mod_base = OTHER; note = 2'-O-methyl modified nucleotide
  modified_base 99: mod_base = OTHER; note = nucleotide with phosphorothioate linkage
  modified_base 100: mod_base = OTHER; note = 2'-O-methyl modified nucleotide with phosphorothioate linkage
  modified_base 101: mod_base = OTHER; note = 2'-O-methyl modified nucleotide

SEQ ID NO: 2678 - RNA, 101 nt, synthetic construct; identical to SEQ ID NO: 1678
  source 1..101: mol_type = other RNA
  modified_base 1: mod_base = OTHER; note = 2'-O-methyl modified nucleotide with phosphorothioate linkage
  modified_base 2: mod_base = OTHER; note = 2'-O-methyl modified nucleotide with phosphorothioate linkage
  modified_base 3: mod_base = OTHER; note = 2'-O-methyl modified nucleotide with phosphorothioate linkage
  modified_base 4: mod_base = OTHER; note = 2'-O-methyl modified nucleotide
  modified_base 5: mod_base = OTHER; note = 2'-O-methyl modified nucleotide
  modified_base 8: mod_base = OTHER; note = 2'-O-methyl modified nucleotide
  modified_base 9: mod_base = OTHER; note = 2'-O-methyl modified nucleotide
  modified_base 11: mod_base = OTHER; note = 2'-O-methyl modified nucleotide
  modified_base 13: mod_base = OTHER; note = 2'-O-methyl modified nucleotide
  modified_base 18: mod_base = OTHER; note = 2'-O-methyl modified nucleotide
  modified_base 22: mod_base = OTHER; note = 2'-O-methyl modified nucleotide
  modified_base 25: mod_base = OTHER; note = 2'-O-methyl modified nucleotide
  modified_base 29: mod_base = OTHER; note = 2'-O-methyl modified nucleotide
  modified_base 30: mod_base = OTHER; note = 2'-O-methyl modified nucleotide
  modified_base 31: mod_base = OTHER; note = 2'-O-methyl modified nucleotide
  modified_base 32: mod_base = OTHER; note = 2'-O-methyl modified nucleotide
  modified_base 37: mod_base = OTHER; note = 2'-O-methyl modified nucleotide
  modified_base 38: mod_base = OTHER; note = 2'-O-methyl modified nucleotide
  modified_base 39: mod_base = OTHER; note = 2'-O-methyl modified nucleotide
  modified_base 40: mod_base = OTHER; note = 2'-O-methyl modified nucleotide
  modified_base 41: mod_base = OTHER; note = 2'-O-methyl modified nucleotide
  modified_base 42: mod_base = OTHER; note = 2'-O-methyl modified nucleotide
  modified_base 43: mod_base = OTHER; note = 2'-O-methyl modified nucleotide
  modified_base 47: mod_base = OTHER; note = 2'-O-methyl modified nucleotide
  modified_base 48: mod_base = OTHER; note = 2'-O-methyl modified nucleotide
  modified_base 51: mod_base = OTHER; note = 2'-O-methyl modified nucleotide
  modified_base 54: mod_base = OTHER; note = nucleotide with phosphorothioate linkage
  modified_base 58: mod_base = OTHER; note = 2'-O-methyl modified nucleotide
  modified_base 59: mod_base = OTHER; note = 2'-O-methyl modified nucleotide
  modified_base 61: mod_base = OTHER; note = 2'-O-methyl modified nucleotide
  modified_base 62: mod_base = OTHER; note = 2'-O-methyl modified nucleotide
  modified_base 63: mod_base = OTHER; note = 2'-O-methyl modified nucleotide
  modified_base 64: mod_base = OTHER; note = 2'-O-methyl modified nucleotide
  modified_base 65: mod_base = OTHER; note = 2'-O-methyl modified nucleotide
  modified_base 66: mod_base = OTHER; note = 2'-O-methyl modified nucleotide
  modified_base 67: mod_base = OTHER; note = 2'-O-methyl modified nucleotide
  modified_base 68: mod_base = OTHER; note = 2'-O-methyl modified nucleotide
  modified_base 69: mod_base = OTHER; note = 2'-O-methyl modified nucleotide
  modified_base 70: mod_base = OTHER; note = 2'-O-methyl modified nucleotide
  modified_base 75: mod_base = OTHER; note = 2'-O-methyl modified nucleotide
  modified_base 77: mod_base = OTHER; note = 2'-O-methyl modified nucleotide
  modified_base 80: mod_base = OTHER; note = 2'-O-methyl modified nucleotide
  modified_base 86: mod_base = OTHER; note = 2'-O-methyl modified nucleotide
  modified_base 87: mod_base = OTHER; note = 2'-O-methyl modified nucleotide
  modified_base 89: mod_base = OTHER; note = 2'-O-methyl modified nucleotide
  modified_base 90: mod_base = OTHER; note = 2'-O-methyl modified nucleotide
  modified_base 91: mod_base = OTHER; note = 2'-O-methyl modified nucleotide
  modified_base 92: mod_base = OTHER; note = 2'-O-methyl modified nucleotide
  modified_base 99: mod_base = OTHER; note = nucleotide with phosphorothioate linkage
  modified_base 100: mod_base = OTHER; note = 2'-O-methyl modified nucleotide with phosphorothioate linkage
  modified_base 101: mod_base = OTHER; note = 2'-O-methyl modified nucleotide

SEQ ID NO: 2679 - RNA, 101 nt, synthetic construct; identical to SEQ ID NO: 1679
  source 1..101: mol_type = other RNA
  modified_base 1: mod_base = OTHER; note = 2'-O-methyl modified nucleotide with phosphorothioate linkage
  modified_base 2: mod_base = OTHER; note = 2'-O-methyl modified nucleotide with phosphorothioate linkage
  modified_base 3: mod_base = OTHER; note = 2'-O-methyl modified nucleotide with phosphorothioate linkage
  modified_base 4: mod_base = OTHER; note = 2'-O-methyl modified nucleotide
  modified_base 5: mod_base = OTHER; note = 2'-O-methyl modified nucleotide
  modified_base 8: mod_base = OTHER; note = 2'-O-methyl modified nucleotide
  modified_base 9: mod_base = OTHER; note = 2'-O-methyl modified nucleotide
  modified_base 11: mod_base = OTHER; note = 2'-O-methyl modified nucleotide
  modified_base 13: mod_base = OTHER; note = 2'-O-methyl modified nucleotide
  modified_base 18: mod_base = OTHER; note = 2'-O-methyl modified nucleotide
  modified_base 22: mod_base = OTHER; note = 2'-O-methyl modified nucleotide
  modified_base 25: mod_base = OTHER; note = 2'-O-methyl modified nucleotide
  modified_base 29: mod_base = OTHER; note = 2'-O-methyl modified nucleotide
  modified_base 30: mod_base = OTHER; note = 2'-O-methyl modified nucleotide
  modified_base 31: mod_base = OTHER; note = 2'-O-methyl modified nucleotide
  modified_base 32: mod_base = OTHER; note = 2'-O-methyl modified nucleotide
  modified_base 37: mod_base = OTHER; note = 2'-O-methyl modified nucleotide
  modified_base 38: mod_base = OTHER; note = 2'-O-methyl modified nucleotide
  modified_base 39: mod_base = OTHER; note = 2'-O-methyl modified nucleotide
  modified_base 40: mod_base = OTHER; note = 2'-O-methyl modified nucleotide
  modified_base 41: mod_base = OTHER; note = 2'-O-methyl modified nucleotide
  modified_base 42: mod_base = OTHER; note = 2'-O-methyl modified nucleotide
  modified_base 43: mod_base = OTHER; note = 2'-O-methyl modified nucleotide
  modified_base 47: mod_base = OTHER; note = 2'-O-methyl modified nucleotide
  modified_base 48: mod_base = OTHER; note = 2'-O-methyl modified nucleotide
  modified_base 51: mod_base = OTHER; note = 2'-O-methyl modified nucleotide
  modified_base 54: mod_base = OTHER; note = nucleotide with phosphorothioate linkage
  modified_base 58: mod_base = OTHER; note = 2'-O-methyl modified nucleotide
  modified_base 59: mod_base = OTHER; note = 2'-O-methyl modified nucleotide
  modified_base 61: mod_base = OTHER; note = 2'-O-methyl modified nucleotide
  modified_base 62: mod_base = OTHER; note = 2'-O-methyl modified nucleotide
  modified_base 63: mod_base = OTHER; note = 2'-O-methyl modified nucleotide
  modified_base 64: mod_base = OTHER; note = 2'-O-methyl modified nucleotide
  modified_base 65: mod_base = OTHER; note = 2'-O-methyl modified nucleotide
  modified_base 66: mod_base = OTHER; note = 2'-O-methyl modified nucleotide
  modified_base 67: mod_base = OTHER; note = 2'-O-methyl modified nucleotide
  modified_base 68: mod_base = OTHER; note = 2'-O-methyl modified nucleotide
  modified_base 69: mod_base = OTHER; note = 2'-O-methyl modified nucleotide
  modified_base 70: mod_base = OTHER; note = 2'-O-methyl modified nucleotide
  modified_base 75: mod_base = OTHER; note = 2'-O-methyl modified nucleotide
  modified_base 77: mod_base = OTHER; note = 2'-O-methyl modified nucleotide
  modified_base 80: mod_base = OTHER; note = 2'-O-methyl modified nucleotide
  modified_base 86: mod_base = OTHER; note = 2'-O-methyl modified nucleotide
  modified_base 87: mod_base = OTHER; note = 2'-O-methyl modified nucleotide
  modified_base 89: mod_base = OTHER; note = 2'-O-methyl modified nucleotide
  modified_base 90: mod_base = OTHER; note = 2'-O-methyl modified nucleotide
  modified_base 91: mod_base = OTHER; note = 2'-O-methyl modified nucleotide
  modified_base 92: mod_base = OTHER; note = 2'-O-methyl modified nucleotide
  modified_base 99: mod_base = OTHER; note = nucleotide with phosphorothioate linkage
  modified_base 100: mod_base = OTHER; note = 2'-O-methyl modified nucleotide with phosphorothioate linkage
  modified_base 101: mod_base = OTHER; note = 2'-O-methyl modified nucleotide

SEQ ID NO: 2680 - RNA, 101 nt, synthetic construct; identical to SEQ ID NO: 1680
  source 1..101: mol_type = other RNA
  modified_base 1: mod_base = OTHER; note = 2'-O-methyl modified nucleotide with phosphorothioate linkage
  modified_base 2: mod_base = OTHER; note = 2'-O-methyl modified nucleotide with phosphorothioate linkage
  modified_base 3: mod_base = OTHER; note = 2'-O-methyl modified nucleotide with phosphorothioate linkage
  modified_base 4: mod_base = OTHER; note = 2'-O-methyl modified nucleotide
  modified_base 5: mod_base = OTHER; note = 2'-O-methyl modified nucleotide
  modified_base 8: mod_base = OTHER; note = 2'-O-methyl modified nucleotide
  modified_base 9: mod_base = OTHER; note = 2'-O-methyl modified nucleotide
  modified_base 11: mod_base = OTHER; note = 2'-O-methyl modified nucleotide
  modified_base 13: mod_base = OTHER; note = 2'-O-methyl modified nucleotide
  modified_base 18: mod_base = OTHER; note = 2'-O-methyl modified nucleotide
  modified_base 22: mod_base = OTHER; note = 2'-O-methyl modified nucleotide
  modified_base 25: mod_base = OTHER; note = 2'-O-methyl modified nucleotide
  modified_base 29: mod_base = OTHER; note = 2'-O-methyl modified nucleotide
  modified_base 30: mod_base = OTHER; note = 2'-O-methyl modified nucleotide
  modified_base 31: mod_base = OTHER; note = 2'-O-methyl modified nucleotide
  modified_base 32: mod_base = OTHER; note = 2'-O-methyl modified nucleotide
  modified_base 37: mod_base = OTHER; note = 2'-O-methyl modified nucleotide
  modified_base 38: mod_base = OTHER; note = 2'-O-methyl modified nucleotide
  modified_base 39: mod_base = OTHER; note = 2'-O-methyl modified nucleotide
  modified_base 40: mod_base = OTHER; note = 2'-O-methyl modified nucleotide
  modified_base 41: mod_base = OTHER; note = 2'-O-methyl modified nucleotide
  modified_base 42: mod_base = OTHER; note = 2'-O-methyl modified nucleotide
  modified_base 43: mod_base = OTHER; note = 2'-O-methyl modified nucleotide
  modified_base 47: mod_base = OTHER; note = 2'-O-methyl modified nucleotide
  modified_base 48: mod_base = OTHER; note = 2'-O-methyl modified nucleotide
  modified_base 51: mod_base = OTHER; note = 2'-O-methyl modified nucleotide
  modified_base 54: mod_base = OTHER; note = nucleotide with phosphorothioate linkage
  modified_base 58: mod_base = OTHER; note = 2'-O-methyl modified nucleotide
  modified_base 59: mod_base = OTHER; note = 2'-O-methyl modified nucleotide
  modified_base 61: mod_base = OTHER; note = 2'-O-methyl modified nucleotide
  modified_base 62: mod_base = OTHER; note = 2'-O-methyl modified nucleotide
  modified_base 63: mod_base = OTHER; note = 2'-O-methyl modified nucleotide
  modified_base 64: mod_base = OTHER; note = 2'-O-methyl modified nucleotide
  modified_base 65: mod_base = OTHER; note = 2'-O-methyl modified nucleotide
  modified_base 66: mod_base = OTHER; note = 2'-O-methyl modified nucleotide
  modified_base 67: mod_base = OTHER; note = 2'-O-methyl modified nucleotide
  modified_base 68: mod_base = OTHER; note = 2'-O-methyl modified nucleotide
  modified_base 69: mod_base = OTHER; note = 2'-O-methyl modified nucleotide
  modified_base 70: mod_base = OTHER; note = 2'-O-methyl modified nucleotide
  modified_base 75: mod_base = OTHER; note = 2'-O-methyl modified nucleotide
  modified_base 77: mod_base = OTHER; note = 2'-O-methyl modified nucleotide
  modified_base 80: mod_base = OTHER; note = 2'-O-methyl modified nucleotide
  modified_base 86: mod_base = OTHER; note = 2'-O-methyl modified nucleotide
  modified_base 87: mod_base = OTHER; note = 2'-O-methyl modified nucleotide
  modified_base 89: mod_base = OTHER; note = 2'-O-methyl modified nucleotide
  modified_base 90: mod_base = OTHER; note = 2'-O-methyl modified nucleotide
  modified_base 91: mod_base = OTHER; note = 2'-O-methyl modified nucleotide
  modified_base 92: mod_base = OTHER; note = 2'-O-methyl modified nucleotide
  modified_base 99: mod_base = OTHER; note = nucleotide with phosphorothioate linkage
  modified_base 100: mod_base = OTHER; note = 2'-O-methyl modified nucleotide with phosphorothioate linkage
  modified_base 101: mod_base = OTHER; note = 2'-O-methyl modified nucleotide

SEQ ID NO: 2681 - RNA, 101 nt, synthetic construct; identical to SEQ ID NO: 1681
  source 1..101: mol_type = other RNA
  modified_base 1: mod_base = OTHER; note = 2'-O-methyl modified nucleotide with phosphorothioate linkage
  modified_base 2: mod_base = OTHER; note = 2'-O-methyl modified nucleotide with phosphorothioate linkage
  modified_base 3: mod_base = OTHER; note = 2'-O-methyl modified nucleotide with phosphorothioate linkage
  modified_base 4: mod_base = OTHER; note = 2'-O-methyl modified nucleotide
  modified_base 5: mod_base = OTHER; note = 2'-O-methyl modified nucleotide
  modified_base 8: mod_base = OTHER; note = 2'-O-methyl modified nucleotide
  modified_base 9: mod_base = OTHER; note = 2'-O-methyl modified nucleotide
  modified_base 11: mod_base = OTHER; note = 2'-O-methyl modified nucleotide
  modified_base 13: mod_base = OTHER; note = 2'-O-methyl modified nucleotide
  modified_base 18: mod_base = OTHER; note = 2'-O-methyl modified nucleotide
  modified_base 22: mod_base = OTHER; note = 2'-O-methyl modified nucleotide
  modified_base 25: mod_base = OTHER; note = 2'-O-methyl modified nucleotide
  modified_base 29: mod_base = OTHER; note = 2'-O-methyl modified nucleotide
  modified_base 30: mod_base = OTHER; note = 2'-O-methyl modified nucleotide
  modified_base 31: mod_base = OTHER; note = 2'-O-methyl modified nucleotide
  modified_base 32: mod_base = OTHER; note = 2'-O-methyl modified nucleotide
  modified_base 37: mod_base = OTHER; note = 2'-O-methyl modified nucleotide
  modified_base 38: mod_base = OTHER; note = 2'-O-methyl modified nucleotide
  modified_base 39: mod_base = OTHER; note = 2'-O-methyl modified nucleotide
  modified_base 40: mod_base = OTHER; note = 2'-O-methyl modified nucleotide
  modified_base 41: mod_base = OTHER; note = 2'-O-methyl modified nucleotide
  modified_base 42: mod_base = OTHER; note = 2'-O-methyl modified nucleotide
  modified_base 43: mod_base = OTHER; note = 2'-O-methyl modified nucleotide
  modified_base 47: mod_base = OTHER; note = 2'-O-methyl modified nucleotide
  modified_base 48: mod_base = OTHER; note = 2'-O-methyl modified nucleotide
  modified_base 51: mod_base = OTHER; note = 2'-O-methyl modified nucleotide
  modified_base 54: mod_base = OTHER; note = nucleotide with phosphorothioate linkage
  modified_base 58: mod_base = OTHER; note = 2'-O-methyl modified nucleotide
  modified_base 59: mod_base = OTHER; note = 2'-O-methyl modified nucleotide
  modified_base 61: mod_base = OTHER; note = 2'-O-methyl modified nucleotide
  modified_base 62: mod_base = OTHER; note = 2'-O-methyl modified nucleotide
  modified_base 63: mod_base = OTHER; note = 2'-O-methyl modified nucleotide
  modified_base 64: mod_base = OTHER; note = 2'-O-methyl modified nucleotide
  modified_base 65: mod_base = OTHER; note = 2'-O-methyl modified nucleotide
  modified_base 66: mod_base = OTHER; note = 2'-O-methyl modified nucleotide
  modified_base 67: mod_base = OTHER; note = 2'-O-methyl modified nucleotide
  modified_base 68: mod_base = OTHER; note = 2'-O-methyl modified nucleotide
  modified_base 69: mod_base = OTHER; note = 2'-O-methyl modified nucleotide
  modified_base 70: mod_base = OTHER; note = 2'-O-methyl modified nucleotide
  modified_base 75: mod_base = OTHER; note = 2'-O-methyl modified nucleotide
  modified_base 77: mod_base = OTHER; note = 2'-O-methyl modified nucleotide
  modified_base 80: mod_base = OTHER; note = 2'-O-methyl modified nucleotide
  modified_base 86: mod_base = OTHER; note = 2'-O-methyl modified nucleotide
  modified_base 87: mod_base = OTHER; note = 2'-O-methyl modified nucleotide
  modified_base 89: mod_base = OTHER; note = 2'-O-methyl modified nucleotide
  modified_base 90: mod_base = OTHER; note = 2'-O-methyl modified nucleotide
  modified_base 91: mod_base = OTHER; note = 2'-O-methyl modified nucleotide
  modified_base 92: mod_base = OTHER; note = 2'-O-methyl modified nucleotide
  modified_base 99: mod_base = OTHER; note = nucleotide with phosphorothioate linkage
  modified_base 100: mod_base = OTHER; note = 2'-O-methyl modified nucleotide with phosphorothioate linkage
  modified_base 101: mod_base = OTHER; note = 2'-O-methyl modified nucleotide

SEQ ID NO: 2682 - RNA, 101 nt, synthetic construct; identical to SEQ ID NO: 1682
  source 1..101: mol_type = other RNA
  modified_base 1: mod_base = OTHER; note = 2'-O-methyl modified nucleotide with phosphorothioate linkage
  modified_base 2: mod_base = OTHER; note = 2'-O-methyl modified nucleotide with phosphorothioate linkage
  modified_base 3: mod_base = OTHER; note = 2'-O-methyl modified nucleotide with phosphorothioate linkage
  modified_base 4: mod_base = OTHER; note = 2'-O-methyl modified nucleotide
  modified_base 5: mod_base = OTHER; note = 2'-O-methyl modified nucleotide
  modified_base 8: mod_base = OTHER; note = 2'-O-methyl modified nucleotide
  modified_base 9: mod_base = OTHER; note = 2'-O-methyl modified nucleotide
  modified_base 11: mod_base = OTHER; note = 2'-O-methyl modified nucleotide
  modified_base 13: mod_base = OTHER; note = 2'-O-methyl modified nucleotide
  modified_base 18: mod_base = OTHER; note = 2'-O-methyl modified nucleotide
  modified_base 22: mod_base = OTHER; note = 2'-O-methyl modified nucleotide
  modified_base 25: mod_base = OTHER; note = 2'-O-methyl modified nucleotide
  modified_base 29: mod_base = OTHER; note = 2'-O-methyl modified nucleotide
  modified_base 30: mod_base = OTHER; note = 2'-O-methyl modified nucleotide
  modified_base 31: mod_base = OTHER; note = 2'-O-methyl modified nucleotide
  modified_base 32: mod_base = OTHER; note = 2'-O-methyl modified nucleotide
  modified_base 37: mod_base = OTHER; note = 2'-O-methyl modified nucleotide
  modified_base 38: mod_base = OTHER; note = 2'-O-methyl modified nucleotide
  modified_base 39: mod_base = OTHER; note = 2'-O-methyl modified nucleotide
  modified_base 40: mod_base = OTHER; note = 2'-O-methyl modified nucleotide
  modified_base 41: mod_base = OTHER; note = 2'-O-methyl modified nucleotide
  modified_base 42: mod_base = OTHER; note = 2'-O-methyl modified nucleotide
  modified_base 43: mod_base = OTHER; note = 2'-O-methyl modified nucleotide
  modified_base 47: mod_base = OTHER; note = 2'-O-methyl modified nucleotide
  modified_base 48: mod_base = OTHER; note = 2'-O-methyl modified nucleotide
  modified_base 51: mod_base = OTHER; note = 2'-O-methyl modified nucleotide
  modified_base 54: mod_base = OTHER; note = nucleotide with phosphorothioate linkage
  modified_base 58: mod_base = OTHER; note = 2'-O-methyl modified nucleotide
  modified_base 59: mod_base = OTHER; note = 2'-O-methyl modified nucleotide
  modified_base 61: mod_base = OTHER; note = 2'-O-methyl modified nucleotide
  modified_base 62: mod_base = OTHER; note = 2'-O-methyl modified nucleotide
  modified_base 63: mod_base = OTHER; note = 2'-O-methyl modified nucleotide
  modified_base 64: mod_base = OTHER; note = 2'-O-methyl modified nucleotide
  modified_base 65: mod_base = OTHER; note = 2'-O-methyl modified nucleotide
  modified_base 66: mod_base = OTHER; note = 2'-O-methyl modified nucleotide
  modified_base 67: mod_base = OTHER; note = 2'-O-methyl modified nucleotide
  modified_base 68: mod_base = OTHER; note = 2'-O-methyl modified nucleotide
  modified_base 69: mod_base = OTHER; note = 2'-O-methyl modified nucleotide
  modified_base 70: mod_base = OTHER; note = 2'-O-methyl modified nucleotide
  modified_base 75: mod_base = OTHER; note = 2'-O-methyl modified nucleotide
  modified_base 77: mod_base = OTHER; note = 2'-O-methyl modified nucleotide
  modified_base 80: mod_base = OTHER; note = 2'-O-methyl modified nucleotide
  modified_base 86: mod_base = OTHER; note = 2'-O-methyl modified nucleotide
  modified_base 87: mod_base = OTHER; note = 2'-O-methyl modified nucleotide
  modified_base 89: mod_base = OTHER; note = 2'-O-methyl modified nucleotide
  modified_base 90: mod_base = OTHER; note = 2'-O-methyl modified nucleotide
  modified_base 91: mod_base = OTHER; note = 2'-O-methyl modified nucleotide
  modified_base 92: mod_base = OTHER; note = 2'-O-methyl modified nucleotide
  modified_base 99: mod_base = OTHER; note = nucleotide with phosphorothioate linkage
  modified_base 100: mod_base = OTHER; note = 2'-O-methyl modified nucleotide with phosphorothioate linkage
  modified_base 101: mod_base = OTHER; note = 2'-O-methyl modified nucleotide

SEQ ID NO: 2683 - RNA, 101 nt, synthetic construct; identical to SEQ ID NO: 1683
  source 1..101: mol_type = other RNA
  modified_base 1: mod_base = OTHER; note = 2'-O-methyl modified nucleotide with phosphorothioate linkage
  modified_base 2: mod_base = OTHER; note = 2'-O-methyl modified nucleotide with phosphorothioate linkage
  modified_base 3: mod_base = OTHER; note = 2'-O-methyl modified nucleotide with phosphorothioate linkage
  modified_base 4: mod_base = OTHER; note = 2'-O-methyl modified nucleotide
  modified_base 5: mod_base = OTHER; note = 2'-O-methyl modified nucleotide
  modified_base 8: mod_base = OTHER; note = 2'-O-methyl modified nucleotide
  modified_base 9: mod_base = OTHER; note = 2'-O-methyl modified nucleotide
  modified_base 11: mod_base = OTHER; note = 2'-O-methyl modified nucleotide
  modified_base 13: mod_base = OTHER; note = 2'-O-methyl modified nucleotide
  modified_base 18: mod_base = OTHER; note = 2'-O-methyl modified nucleotide
  modified_base 22: mod_base = OTHER; note = 2'-O-methyl modified nucleotide
  modified_base 25: mod_base = OTHER; note = 2'-O-methyl modified nucleotide
  modified_base 29: mod_base = OTHER; note = 2'-O-methyl modified nucleotide
  modified_base 30: mod_base = OTHER; note = 2'-O-methyl modified nucleotide
  modified_base 31: mod_base = OTHER; note = 2'-O-methyl modified nucleotide
  modified_base 32: mod_base = OTHER; note = 2'-O-methyl modified nucleotide
  modified_base 37: mod_base = OTHER; note = 2'-O-methyl modified nucleotide
  modified_base 38: mod_base = OTHER; note = 2'-O-methyl modified nucleotide
  modified_base 39: mod_base = OTHER; note = 2'-O-methyl modified nucleotide
  modified_base 40: mod_base = OTHER; note = 2'-O-methyl modified nucleotide
  modified_base 41: mod_base = OTHER; note = 2'-O-methyl modified nucleotide
  modified_base 42: mod_base = OTHER; note = 2'-O-methyl modified nucleotide
  modified_base 43: mod_base = OTHER; note = 2'-O-methyl modified nucleotide
  modified_base 47: mod_base = OTHER; note = 2'-O-methyl modified nucleotide
  modified_base 48: mod_base = OTHER; note = 2'-O-methyl modified nucleotide
  modified_base 51: mod_base = OTHER; note = 2'-O-methyl modified nucleotide
  modified_base 54: mod_base = OTHER; note = nucleotide with phosphorothioate linkage
  modified_base 58: mod_base = OTHER; note = 2'-O-methyl modified nucleotide
  modified_base 59: mod_base = OTHER; note = 2'-O-methyl modified nucleotide
  modified_base 61: mod_base = OTHER; note = 2'-O-methyl modified nucleotide
  modified_base 62: mod_base = OTHER; note = 2'-O-methyl modified nucleotide
  modified_base 63: mod_base = OTHER; note = 2'-O-methyl modified nucleotide
  modified_base 64: mod_base = OTHER; note = 2'-O-methyl modified nucleotide
  modified_base 65: mod_base = OTHER; note = 2'-O-methyl modified nucleotide
  modified_base 66: mod_base = OTHER; note = 2'-O-methyl modified nucleotide
  modified_base 67: mod_base = OTHER; note = 2'-O-methyl modified nucleotide
  modified_base 68: mod_base = OTHER; note = 2'-O-methyl modified nucleotide
  modified_base 69: mod_base = OTHER; note = 2'-O-methyl modified nucleotide
  modified_base 70: mod_base = OTHER; note = 2'-O-methyl modified nucleotide
  modified_base 75: mod_base = OTHER; note = 2'-O-methyl modified nucleotide
  modified_base 77: mod_base = OTHER; note = 2'-O-methyl modified nucleotide
  modified_base 80: mod_base = OTHER; note = 2'-O-methyl modified nucleotide
  modified_base 86: mod_base = OTHER; note = 2'-O-methyl modified nucleotide
  modified_base 87: mod_base = OTHER; note = 2'-O-methyl modified nucleotide
  modified_base 89: mod_base = OTHER; note = 2'-O-methyl modified nucleotide
  modified_base 90: mod_base = OTHER; note = 2'-O-methyl modified nucleotide
  modified_base 91: mod_base = OTHER; note = 2'-O-methyl modified nucleotide
  modified_base 92: mod_base = OTHER; note = 2'-O-methyl modified nucleotide
  modified_base 99: mod_base = OTHER; note = nucleotide with phosphorothioate linkage
  modified_base 100: mod_base = OTHER; note = 2'-O-methyl modified nucleotide with phosphorothioate linkage
  modified_base 101: mod_base = OTHER; note = 2'-O-methyl modified nucleotide

SEQ ID NO: 2684 - RNA, 101 nt, synthetic construct; identical to SEQ ID NO: 1684
  source 1..101: mol_type = other RNA
  modified_base 1: mod_base = OTHER; note = 2'-O-methyl modified nucleotide with phosphorothioate linkage
  modified_base 2: mod_base = OTHER; note = 2'-O-methyl modified nucleotide with phosphorothioate linkage
  modified_base 3: mod_base = OTHER; note = 2'-O-methyl modified nucleotide with phosphorothioate linkage
  modified_base 4: mod_base = OTHER; note = 2'-O-methyl modified nucleotide
  modified_base 5: mod_base = OTHER; note = 2'-O-methyl modified nucleotide
  modified_base 8: mod_base = OTHER; note = 2'-O-methyl modified nucleotide
  modified_base 9: mod_base = OTHER; note = 2'-O-methyl modified nucleotide
  modified_base 11: mod_base = OTHER; note = 2'-O-methyl modified nucleotide
  modified_base 13: mod_base = OTHER; note = 2'-O-methyl modified nucleotide
  modified_base 18: mod_base = OTHER; note = 2'-O-methyl modified nucleotide
  modified_base 22: mod_base = OTHER; note = 2'-O-methyl modified nucleotide
  modified_base 25: mod_base = OTHER; note = 2'-O-methyl modified nucleotide
  modified_base 29: mod_base = OTHER; note = 2'-O-methyl modified nucleotide
  modified_base 30: mod_base = OTHER; note = 2'-O-methyl modified nucleotide
  modified_base 31: mod_base = OTHER; note = 2'-O-methyl modified nucleotide
  modified_base 32: mod_base = OTHER; note = 2'-O-methyl modified nucleotide
  modified_base 37: mod_base = OTHER; note = 2'-O-methyl modified nucleotide
  modified_base 38: mod_base = OTHER; note = 2'-O-methyl modified nucleotide
  modified_base 39: mod_base = OTHER; note = 2'-O-methyl modified nucleotide
  modified_base 40: mod_base = OTHER; note = 2'-O-methyl modified nucleotide
  modified_base 41: mod_base = OTHER; note = 2'-O-methyl modified nucleotide
  modified_base 42: mod_base = OTHER; note = 2'-O-methyl modified nucleotide
  modified_base 43: mod_base = OTHER; note = 2'-O-methyl modified nucleotide
  modified_base 47: mod_base = OTHER; note = 2'-O-methyl modified nucleotide
  modified_base 48: mod_base = OTHER; note = 2'-O-methyl modified nucleotide
  modified_base 51: mod_base = OTHER; note = 2'-O-methyl modified nucleotide
  modified_base 54: mod_base = OTHER; note = nucleotide with phosphorothioate linkage
  modified_base 58: mod_base = OTHER; note = 2'-O-methyl modified nucleotide
  modified_base 59: mod_base = OTHER; note = 2'-O-methyl modified nucleotide
  modified_base 61: mod_base = OTHER; note = 2'-O-methyl modified nucleotide
  modified_base 62: mod_base = OTHER; note = 2'-O-methyl modified nucleotide
  modified_base 63: mod_base = OTHER; note = 2'-O-methyl modified nucleotide
  modified_base 64: mod_base = OTHER; note = 2'-O-methyl modified nucleotide
  modified_base 65: mod_base = OTHER; note = 2'-O-methyl modified nucleotide
  modified_base 66: mod_base = OTHER; note = 2'-O-methyl modified nucleotide
  modified_base 67: mod_base = OTHER; note = 2'-O-methyl modified nucleotide
  modified_base 68: mod_base = OTHER; note = 2'-O-methyl modified nucleotide
  modified_base 69: mod_base = OTHER; note = 2'-O-methyl modified nucleotide
  modified_base 70: mod_base = OTHER; note = 2'-O-methyl modified nucleotide
  modified_base 75: mod_base = OTHER; note = 2'-O-methyl modified nucleotide
  modified_base 77: mod_base = OTHER; note = 2'-O-methyl modified nucleotide
  modified_base 80: mod_base = OTHER; note = 2'-O-methyl modified nucleotide
  modified_base 86: mod_base = OTHER; note = 2'-O-methyl modified nucleotide
  modified_base 87: mod_base = OTHER; note = 2'-O-methyl modified nucleotide
  modified_base 89: mod_base = OTHER; note = 2'-O-methyl modified nucleotide
  modified_base 90: mod_base = OTHER; note = 2'-O-methyl modified nucleotide
  modified_base 91: mod_base = OTHER; note = 2'-O-methyl modified nucleotide
  modified_base 92: mod_base = OTHER; note = 2'-O-methyl modified nucleotide
  modified_base 99: mod_base = OTHER; note = nucleotide with phosphorothioate linkage
  modified_base 100: mod_base = OTHER; note = 2'-O-methyl modified nucleotide with phosphorothioate linkage
  modified_base 101: mod_base = OTHER; note = 2'-O-methyl modified nucleotide

SEQ ID NO: 2685 - RNA, 101 nt, synthetic construct; identical to SEQ ID NO: 1685
  source 1..101: mol_type = other RNA
  modified_base 1: mod_base = OTHER; note = 2'-O-methyl modified nucleotide with phosphorothioate linkage
  modified_base 2: mod_base = OTHER; note = 2'-O-methyl modified nucleotide with phosphorothioate linkage
  modified_base 3: mod_base = OTHER; note = 2'-O-methyl modified nucleotide with phosphorothioate linkage
  modified_base 4: mod_base = OTHER; note = 2'-O-methyl modified nucleotide
  modified_base 5: mod_base = OTHER; note = 2'-O-methyl modified nucleotide
  modified_base 8: mod_base = OTHER; note = 2'-O-methyl modified nucleotide
  modified_base 9: mod_base = OTHER; note = 2'-O-methyl modified nucleotide
  modified_base 11: mod_base = OTHER; note = 2'-O-methyl modified nucleotide
  modified_base 13: mod_base = OTHER; note = 2'-O-methyl modified nucleotide
  modified_base 18: mod_base = OTHER; note = 2'-O-methyl modified nucleotide
  modified_base 22: mod_base = OTHER; note = 2'-O-methyl modified nucleotide
  modified_base 25: mod_base = OTHER; note = 2'-O-methyl modified nucleotide
  modified_base 29: mod_base = OTHER; note = 2'-O-methyl modified nucleotide
  modified_base 30: mod_base = OTHER; note = 2'-O-methyl modified nucleotide
  modified_base 31: mod_base = OTHER; note = 2'-O-methyl modified nucleotide
  modified_base 32: mod_base = OTHER; note = 2'-O-methyl modified nucleotide
  modified_base 37: mod_base = OTHER; note = 2'-O-methyl modified nucleotide
  modified_base 38: mod_base = OTHER; note = 2'-O-methyl modified nucleotide
  modified_base 39: mod_base = OTHER; note = 2'-O-methyl modified nucleotide
  modified_base 40: mod_base = OTHER; note = 2'-O-methyl modified nucleotide
  modified_base 41: mod_base = OTHER; note = 2'-O-methyl modified nucleotide
  modified_base 42: mod_base = OTHER; note = 2'-O-methyl modified nucleotide
  modified_base 43: mod_base = OTHER; note = 2'-O-methyl modified nucleotide
  modified_base 47: mod_base = OTHER; note = 2'-O-methyl modified nucleotide
  modified_base 48: mod_base = OTHER; note = 2'-O-methyl modified nucleotide
  modified_base 51: mod_base = OTHER; note = 2'-O-methyl modified nucleotide
  modified_base 54: mod_base = OTHER; note = nucleotide with phosphorothioate linkage
  modified_base 58: mod_base = OTHER; note = 2'-O-methyl modified nucleotide
  modified_base 59: mod_base = OTHER; note = 2'-O-methyl modified nucleotide
  modified_base 61: mod_base = OTHER; note = 2'-O-methyl modified nucleotide
  modified_base 62: mod_base = OTHER; note = 2'-O-methyl modified nucleotide
  modified_base 63: mod_base = OTHER; note = 2'-O-methyl modified nucleotide
  modified_base 64: mod_base = OTHER; note = 2'-O-methyl modified nucleotide
  modified_base 65: mod_base = OTHER; note = 2'-O-methyl modified nucleotide
  modified_base 66: mod_base = OTHER; note = 2'-O-methyl modified nucleotide
  modified_base 67: mod_base = OTHER; note = 2'-O-methyl modified nucleotide
  modified_base 68: mod_base = OTHER; note = 2'-O-methyl modified nucleotide
  modified_base 69: mod_base = OTHER; note = 2'-O-methyl modified nucleotide
  modified_base 70: mod_base = OTHER; note = 2'-O-methyl modified nucleotide
  modified_base 75: mod_base = OTHER; note = 2'-O-methyl modified nucleotide
  modified_base 77: mod_base = OTHER; note = 2'-O-methyl modified nucleotide
  modified_base 80: mod_base = OTHER; note = 2'-O-methyl modified nucleotide
  modified_base 86: mod_base = OTHER; note = 2'-O-methyl modified nucleotide
  modified_base 87: mod_base = OTHER; note = 2'-O-methyl modified nucleotide
  modified_base 89: mod_base = OTHER; note = 2'-O-methyl modified nucleotide
  modified_base 90: mod_base = OTHER; note = 2'-O-methyl modified nucleotide
  modified_base 91: mod_base = OTHER; note = 2'-O-methyl modified nucleotide
  modified_base 92: mod_base = OTHER; note = 2'-O-methyl modified nucleotide
  modified_base 99: mod_base = OTHER; note = nucleotide with phosphorothioate linkage
  modified_base 100: mod_base = OTHER; note = 2'-O-methyl modified nucleotide with phosphorothioate linkage
  modified_base 101: mod_base = OTHER; note = 2'-O-methyl modified nucleotide

SEQ ID NO: 2686 - RNA, 101 nt, synthetic construct; identical to SEQ ID NO: 1686
  source 1..101: mol_type = other RNA
  modified_base 1: mod_base = OTHER; note = 2'-O-methyl modified nucleotide with phosphorothioate linkage
  modified_base 2: mod_base = OTHER; note = 2'-O-methyl modified nucleotide with phosphorothioate linkage
  modified_base 3: mod_base = OTHER; note = 2'-O-methyl modified nucleotide with phosphorothioate linkage
  modified_base 4: mod_base = OTHER; note = 2'-O-methyl modified nucleotide
  modified_base 5: mod_base = OTHER; note = 2'-O-methyl modified nucleotide
  modified_base 8: mod_base = OTHER; note = 2'-O-methyl modified nucleotide
  modified_base 9: mod_base = OTHER; note = 2'-O-methyl modified nucleotide
  modified_base 11: mod_base = OTHER; note = 2'-O-methyl modified nucleotide
  modified_base 13: mod_base = OTHER; note = 2'-O-methyl modified nucleotide
  modified_base 18: mod_base = OTHER; note = 2'-O-methyl modified nucleotide
  modified_base 22: mod_base = OTHER; note = 2'-O-methyl modified nucleotide
  modified_base 25: mod_base = OTHER; note = 2'-O-methyl modified nucleotide
  modified_base 29: mod_base = OTHER; note = 2'-O-methyl modified nucleotide
  modified_base 30: mod_base = OTHER; note = 2'-O-methyl modified nucleotide
  modified_base 31: mod_base = OTHER; note = 2'-O-methyl modified nucleotide
  modified_base 32: mod_base = OTHER; note = 2'-O-methyl modified nucleotide
  modified_base 37: mod_base = OTHER; note = 2'-O-methyl modified nucleotide
  modified_base 38: mod_base = OTHER; note = 2'-O-methyl modified nucleotide
  modified_base 39: mod_base = OTHER; note = 2'-O-methyl modified nucleotide
  modified_base 40: mod_base = OTHER; note = 2'-O-methyl modified nucleotide
  modified_base 41: mod_base = OTHER; note = 2'-O-methyl modified nucleotide
  modified_base 42: mod_base = OTHER; note = 2'-O-methyl modified nucleotide
  modified_base 43: mod_base = OTHER; note = 2'-O-methyl modified nucleotide
  modified_base 47: mod_base = OTHER; note = 2'-O-methyl modified nucleotide
  modified_base 48: mod_base = OTHER; note = 2'-O-methyl modified nucleotide
  modified_base 51: mod_base = OTHER; note = 2'-O-methyl modified nucleotide
  modified_base 54: mod_base = OTHER; note = nucleotide with phosphorothioate linkage
  modified_base 58: mod_base = OTHER; note = 2'-O-methyl modified nucleotide
  modified_base 59: mod_base = OTHER; note = 2'-O-methyl modified nucleotide
  modified_base 61: mod_base = OTHER; note = 2'-O-methyl modified nucleotide
  modified_base 62: mod_base = OTHER; note = 2'-O-methyl modified nucleotide
  modified_base 63: mod_base = OTHER; note = 2'-O-methyl modified nucleotide
  modified_base 64: mod_base = OTHER; note = 2'-O-methyl modified nucleotide
  modified_base 65: mod_base = OTHER; note = 2'-O-methyl modified nucleotide
  modified_base 66: mod_base = OTHER; note = 2'-O-methyl modified nucleotide
  modified_base 67: mod_base = OTHER; note = 2'-O-methyl modified nucleotide
  modified_base 68: mod_base = OTHER; note = 2'-O-methyl modified nucleotide
  modified_base 69: mod_base = OTHER; note = 2'-O-methyl modified nucleotide
  modified_base 70: mod_base = OTHER; note = 2'-O-methyl modified nucleotide
  modified_base 75: mod_base = OTHER; note = 2'-O-methyl modified nucleotide
  modified_base 77: mod_base = OTHER; note = 2'-O-methyl modified nucleotide
  modified_base 80: mod_base = OTHER; note = 2'-O-methyl modified nucleotide
  modified_base 86: mod_base = OTHER; note = 2'-O-methyl modified nucleotide
  modified_base 87: mod_base = OTHER; note = 2'-O-methyl modified nucleotide
  modified_base 89: mod_base = OTHER; note = 2'-O-methyl modified nucleotide
  modified_base 90: mod_base = OTHER; note = 2'-O-methyl modified nucleotide
  modified_base 91: mod_base = OTHER; note = 2'-O-methyl modified nucleotide
  modified_base 92: mod_base = OTHER; note = 2'-O-methyl modified nucleotide
  modified_base 99: mod_base = OTHER; note = nucleotide with phosphorothioate linkage
  modified_base 100: mod_base = OTHER; note = 2'-O-methyl modified nucleotide with phosphorothioate linkage
  modified_base 101: mod_base = OTHER; note = 2'-O-methyl modified nucleotide

SEQ ID NO: 2687 - RNA, 101 nt, synthetic construct; identical to SEQ ID NO: 1687
  source 1..101: mol_type = other RNA
  modified_base 1: mod_base = OTHER; note = 2'-O-methyl modified nucleotide with phosphorothioate linkage
  modified_base 2: mod_base = OTHER; note = 2'-O-methyl modified nucleotide with phosphorothioate linkage
  modified_base 3: mod_base = OTHER; note = 2'-O-methyl modified nucleotide with phosphorothioate linkage
  modified_base 4: mod_base = OTHER; note = 2'-O-methyl modified nucleotide
  modified_base 5: mod_base = OTHER; note = 2'-O-methyl modified nucleotide
  modified_base 8: mod_base = OTHER; note = 2'-O-methyl modified nucleotide
  modified_base 9: mod_base = OTHER; note = 2'-O-methyl modified nucleotide
  modified_base 11: mod_base = OTHER; note = 2'-O-methyl modified nucleotide
  modified_base 13: mod_base = OTHER; note = 2'-O-methyl modified nucleotide
  modified_base 18: mod_base = OTHER; note = 2'-O-methyl modified nucleotide
  modified_base 22: mod_base = OTHER; note = 2'-O-methyl modified nucleotide
  modified_base 25: mod_base = OTHER; note = 2'-O-methyl modified nucleotide
  modified_base 29: mod_base = OTHER; note = 2'-O-methyl modified nucleotide
  modified_base 30: mod_base = OTHER; note = 2'-O-methyl modified nucleotide
  modified_base 31: mod_base = OTHER; note = 2'-O-methyl modified nucleotide
  modified_base 32: mod_base = OTHER; note = 2'-O-methyl modified nucleotide
  modified_base 37: mod_base = OTHER; note = 2'-O-methyl modified nucleotide
  modified_base 38: mod_base = OTHER; note = 2'-O-methyl modified nucleotide
  modified_base 39: mod_base = OTHER; note = 2'-O-methyl modified nucleotide
  modified_base 40: mod_base = OTHER; note = 2'-O-methyl modified nucleotide
  modified_base 41: mod_base = OTHER; note = 2'-O-methyl modified nucleotide
  modified_base 42: mod_base = OTHER; note = 2'-O-methyl modified nucleotide
  modified_base 43: mod_base = OTHER; note = 2'-O-methyl modified nucleotide
  modified_base 47: mod_base = OTHER; note = 2'-O-methyl modified nucleotide
  modified_base 48: mod_base = OTHER; note = 2'-O-methyl modified nucleotide
  modified_base 51: mod_base = OTHER; note = 2'-O-methyl modified nucleotide
  modified_base 54: mod_base = OTHER; note = nucleotide with phosphorothioate linkage
  modified_base 58: mod_base = OTHER; note = 2'-O-methyl modified nucleotide
  modified_base 59: mod_base = OTHER; note = 2'-O-methyl modified nucleotide
  modified_base 61: mod_base = OTHER; note = 2'-O-methyl modified nucleotide
  modified_base 62: mod_base = OTHER; note = 2'-O-methyl modified nucleotide
  modified_base 63: mod_base = OTHER; note = 2'-O-methyl modified nucleotide
  modified_base 64: mod_base = OTHER; note = 2'-O-methyl modified nucleotide
  modified_base 65: mod_base = OTHER; note = 2'-O-methyl modified nucleotide
  modified_base 66: mod_base = OTHER; note = 2'-O-methyl modified nucleotide
  modified_base 67: mod_base = OTHER; note = 2'-O-methyl modified nucleotide
  modified_base 68: mod_base = OTHER; note = 2'-O-methyl modified nucleotide
  modified_base 69: mod_base = OTHER; note = 2'-O-methyl modified nucleotide
  modified_base 70: mod_base = OTHER; note = 2'-O-methyl modified nucleotide
  modified_base 75: mod_base = OTHER; note = 2'-O-methyl modified nucleotide
  modified_base 77: mod_base = OTHER; note = 2'-O-methyl modified nucleotide
  modified_base 80: mod_base = OTHER; note = 2'-O-methyl modified nucleotide
  modified_base 86: mod_base = OTHER; note = 2'-O-methyl modified nucleotide
  modified_base 87: mod_base = OTHER; note = 2'-O-methyl modified nucleotide
  modified_base 89: mod_base = OTHER; note = 2'-O-methyl modified nucleotide
  modified_base 90: mod_base = OTHER; note = 2'-O-methyl modified nucleotide
  modified_base 91: mod_base = OTHER; note = 2'-O-methyl modified nucleotide
  modified_base 92: mod_base = OTHER; note = 2'-O-methyl modified nucleotide
  modified_base 99: mod_base = OTHER; note = nucleotide with phosphorothioate linkage
  modified_base 100: mod_base = OTHER; note = 2'-O-methyl modified nucleotide with phosphorothioate linkage
  modified_base 101: mod_base = OTHER; note = 2'-O-methyl modified nucleotide

SEQ ID NO: 2688 - RNA, 101 nt, synthetic construct; identical to SEQ ID NO: 1688
  source 1..101: mol_type = other RNA
  modified_base 1: mod_base = OTHER; note = 2'-O-methyl modified nucleotide with phosphorothioate linkage
  modified_base 2: mod_base = OTHER; note = 2'-O-methyl modified nucleotide with phosphorothioate linkage
  modified_base 3: mod_base = OTHER; note = 2'-O-methyl modified nucleotide with phosphorothioate linkage
  modified_base 4: mod_base = OTHER; note = 2'-O-methyl modified nucleotide
  modified_base 5: mod_base = OTHER; note = 2'-O-methyl modified nucleotide
  modified_base 8: mod_base = OTHER; note = 2'-O-methyl modified nucleotide
  modified_base 9: mod_base = OTHER; note = 2'-O-methyl modified nucleotide
  modified_base 11: mod_base = OTHER; note = 2'-O-methyl modified nucleotide
  modified_base 13: mod_base = OTHER; note = 2'-O-methyl modified nucleotide
  modified_base 18: mod_base = OTHER; note = 2'-O-methyl modified nucleotide
  modified_base 22: mod_base = OTHER; note = 2'-O-methyl modified nucleotide
  modified_base 25: mod_base = OTHER; note = 2'-O-methyl modified nucleotide
  modified_base 29: mod_base = OTHER; note = 2'-O-methyl modified nucleotide
  modified_base 30: mod_base = OTHER; note = 2'-O-methyl modified nucleotide
  modified_base 31: mod_base = OTHER; note = 2'-O-methyl modified nucleotide
  modified_base 32: mod_base = OTHER; note = 2'-O-methyl modified nucleotide
  modified_base 37: mod_base = OTHER; note = 2'-O-methyl modified nucleotide
  modified_base 38: mod_base = OTHER; note = 2'-O-methyl modified nucleotide
  modified_base 39: mod_base = OTHER; note = 2'-O-methyl modified nucleotide
  modified_base 40: mod_base = OTHER; note = 2'-O-methyl modified nucleotide
  modified_base 41: mod_base = OTHER; note = 2'-O-methyl modified nucleotide
  modified_base 42: mod_base = OTHER; note = 2'-O-methyl modified nucleotide
  modified_base 43: mod_base = OTHER; note = 2'-O-methyl modified nucleotide
  modified_base 47: mod_base = OTHER; note = 2'-O-methyl modified nucleotide
  modified_base 48: mod_base = OTHER; note = 2'-O-methyl modified nucleotide
  modified_base 51: mod_base = OTHER; note = 2'-O-methyl modified nucleotide
  modified_base 54: mod_base = OTHER; note = nucleotide with phosphorothioate linkage
  modified_base 58: mod_base = OTHER; note = 2'-O-methyl modified nucleotide
  modified_base 59: mod_base = OTHER; note = 2'-O-methyl modified nucleotide
  modified_base 61: mod_base = OTHER; note = 2'-O-methyl modified nucleotide
  modified_base 62: mod_base = OTHER; note = 2'-O-methyl modified nucleotide
  modified_base 63: mod_base = OTHER; note = 2'-O-methyl modified nucleotide
  modified_base 64: mod_base = OTHER; note = 2'-O-methyl modified nucleotide
  modified_base 65: mod_base = OTHER; note = 2'-O-methyl modified nucleotide
  modified_base 66: mod_base = OTHER; note = 2'-O-methyl modified nucleotide
  modified_base 67: mod_base = OTHER; note = 2'-O-methyl modified nucleotide
  modified_base 68: mod_base = OTHER; note = 2'-O-methyl modified nucleotide
  modified_base 69: mod_base = OTHER; note = 2'-O-methyl modified nucleotide
  modified_base 70: mod_base = OTHER; note = 2'-O-methyl modified nucleotide
  modified_base 75: mod_base = OTHER; note = 2'-O-methyl modified nucleotide
  modified_base 77: mod_base = OTHER; note = 2'-O-methyl modified nucleotide
  modified_base 80: mod_base = OTHER; note = 2'-O-methyl modified nucleotide
  modified_base 86: mod_base = OTHER; note = 2'-O-methyl modified nucleotide
  modified_base 87: mod_base = OTHER; note = 2'-O-methyl modified nucleotide
  modified_base 89: mod_base = OTHER; note = 2'-O-methyl modified nucleotide
  modified_base 90: mod_base = OTHER; note = 2'-O-methyl modified nucleotide
  modified_base 91: mod_base = OTHER; note = 2'-O-methyl modified nucleotide
  modified_base 92: mod_base = OTHER; note = 2'-O-methyl modified nucleotide
  modified_base 99: mod_base = OTHER; note = nucleotide with phosphorothioate linkage
  modified_base 100: mod_base = OTHER; note = 2'-O-methyl modified nucleotide with phosphorothioate linkage
  modified_base 101: mod_base = OTHER; note = 2'-O-methyl modified nucleotide

SEQ ID NO: 2689 - RNA, 101 nt, synthetic construct; identical to SEQ ID NO: 1689
  source 1..101: mol_type = other RNA
  modified_base 1: mod_base = OTHER; note = 2'-O-methyl modified nucleotide with phosphorothioate linkage
  modified_base 2: mod_base = OTHER; note = 2'-O-methyl modified nucleotide with phosphorothioate linkage
  modified_base 3: mod_base = OTHER; note = 2'-O-methyl modified nucleotide with phosphorothioate linkage
  modified_base 4: mod_base = OTHER; note = 2'-O-methyl modified nucleotide
  modified_base 5: mod_base = OTHER; note = 2'-O-methyl modified nucleotide
  modified_base 8: mod_base = OTHER; note = 2'-O-methyl modified nucleotide
  modified_base 9: mod_base = OTHER; note = 2'-O-methyl modified nucleotide
  modified_base 11: mod_base = OTHER; note = 2'-O-methyl modified nucleotide
  modified_base 13: mod_base = OTHER; note = 2'-O-methyl modified nucleotide
  modified_base 18: mod_base = OTHER; note = 2'-O-methyl modified nucleotide
  modified_base 22: mod_base = OTHER; note = 2'-O-methyl modified nucleotide
  modified_base 25: mod_base = OTHER; note = 2'-O-methyl modified nucleotide
  modified_base 29: mod_base = OTHER; note = 2'-O-methyl modified nucleotide
  modified_base 30: mod_base = OTHER; note = 2'-O-methyl modified nucleotide
  modified_base 31: mod_base = OTHER; note = 2'-O-methyl modified nucleotide
  modified_base 32: mod_base = OTHER; note = 2'-O-methyl modified nucleotide
  modified_base 37: mod_base = OTHER; note = 2'-O-methyl modified nucleotide
  modified_base 38: mod_base = OTHER; note = 2'-O-methyl modified nucleotide
  modified_base 39: mod_base = OTHER; note = 2'-O-methyl modified nucleotide
  modified_base 40: mod_base = OTHER; note = 2'-O-methyl modified nucleotide
  modified_base 41: mod_base = OTHER; note = 2'-O-methyl modified nucleotide
  modified_base 42: mod_base = OTHER; note = 2'-O-methyl modified nucleotide
  modified_base 43: mod_base = OTHER; note = 2'-O-methyl modified nucleotide
  modified_base 47: mod_base = OTHER; note = 2'-O-methyl modified nucleotide
  modified_base 48: mod_base = OTHER; note = 2'-O-methyl modified nucleotide
  modified_base 51: mod_base = OTHER; note = 2'-O-methyl modified nucleotide
  modified_base 54: mod_base = OTHER; note = nucleotide with phosphorothioate linkage
  modified_base 58: mod_base = OTHER; note = 2'-O-methyl modified nucleotide
  modified_base 59: mod_base = OTHER; note = 2'-O-methyl modified nucleotide
  modified_base 61: mod_base = OTHER; note = 2'-O-methyl modified nucleotide
  modified_base 62: mod_base = OTHER; note = 2'-O-methyl modified nucleotide
  modified_base 63: mod_base = OTHER; note = 2'-O-methyl modified nucleotide
  modified_base 64: mod_base = OTHER; note = 2'-O-methyl modified nucleotide
  modified_base 65: mod_base = OTHER; note = 2'-O-methyl modified nucleotide
  modified_base 66: mod_base = OTHER; note = 2'-O-methyl modified nucleotide
  modified_base 67: mod_base = OTHER; note = 2'-O-methyl modified nucleotide
  modified_base 68: mod_base = OTHER; note = 2'-O-methyl modified nucleotide
  modified_base 69: mod_base = OTHER; note = 2'-O-methyl modified nucleotide
  modified_base 70: mod_base = OTHER; note = 2'-O-methyl modified nucleotide
  modified_base 75: mod_base = OTHER; note = 2'-O-methyl modified nucleotide
  modified_base 77: mod_base = OTHER; note = 2'-O-methyl modified nucleotide
  modified_base 80: mod_base = OTHER; note = 2'-O-methyl modified nucleotide
  modified_base 86: mod_base = OTHER; note = 2'-O-methyl modified nucleotide
  modified_base 87: mod_base = OTHER; note = 2'-O-methyl modified nucleotide
  modified_base 89: mod_base = OTHER; note = 2'-O-methyl modified nucleotide
  modified_base 90: mod_base = OTHER; note = 2'-O-methyl modified nucleotide
  modified_base 91: mod_base = OTHER; note = 2'-O-methyl modified nucleotide
  modified_base 92: mod_base = OTHER; note = 2'-O-methyl modified nucleotide
  modified_base 99: mod_base = OTHER; note = nucleotide with phosphorothioate linkage
  modified_base 100: mod_base = OTHER; note = 2'-O-methyl modified nucleotide with phosphorothioate linkage
  modified_base 101: mod_base = OTHER; note = 2'-O-methyl modified nucleotide

SEQ ID NO: 2690 - RNA, 101 nt, synthetic construct; identical to SEQ ID NO: 1690
  source 1..101: mol_type = other RNA
  modified_base 1: mod_base = OTHER; note = 2'-O-methyl modified nucleotide with phosphorothioate linkage
  modified_base 2: mod_base = OTHER; note = 2'-O-methyl modified nucleotide with phosphorothioate linkage
  modified_base 3: mod_base = OTHER; note = 2'-O-methyl modified nucleotide with phosphorothioate linkage
  modified_base 4: mod_base = OTHER; note = 2'-O-methyl modified nucleotide
  modified_base 5: mod_base = OTHER; note = 2'-O-methyl modified nucleotide
  modified_base 8: mod_base = OTHER; note = 2'-O-methyl modified nucleotide
  modified_base 9: mod_base = OTHER; note = 2'-O-methyl modified nucleotide
  modified_base 11: mod_base = OTHER; note = 2'-O-methyl modified nucleotide
  modified_base 13: mod_base = OTHER; note = 2'-O-methyl modified nucleotide
  modified_base 18: mod_base = OTHER; note = 2'-O-methyl modified nucleotide
  modified_base 22: mod_base = OTHER; note = 2'-O-methyl modified nucleotide
  modified_base 25: mod_base = OTHER; note = 2'-O-methyl modified nucleotide
  modified_base 29: mod_base = OTHER; note = 2'-O-methyl modified nucleotide
  modified_base 30: mod_base = OTHER; note = 2'-O-methyl modified nucleotide
  modified_base 31: mod_base = OTHER; note = 2'-O-methyl modified nucleotide
  modified_base 32: mod_base = OTHER; note = 2'-O-methyl modified nucleotide
  modified_base 37: mod_base = OTHER; note = 2'-O-methyl modified nucleotide
  modified_base 38: mod_base = OTHER; note = 2'-O-methyl modified nucleotide
  modified_base 39: mod_base = OTHER; note = 2'-O-methyl modified nucleotide
  modified_base 40: mod_base = OTHER; note = 2'-O-methyl modified nucleotide
  modified_base 41: mod_base = OTHER; note = 2'-O-methyl modified nucleotide
  modified_base 42: mod_base = OTHER; note = 2'-O-methyl modified nucleotide
  modified_base 43: mod_base = OTHER; note = 2'-O-methyl modified nucleotide
  modified_base 47: mod_base = OTHER; note = 2'-O-methyl modified nucleotide
  modified_base 48: mod_base = OTHER; note = 2'-O-methyl modified nucleotide
  modified_base 51: mod_base = OTHER; note = 2'-O-methyl modified nucleotide
  modified_base 54: mod_base = OTHER; note = nucleotide with phosphorothioate linkage
  modified_base 58: mod_base = OTHER; note = 2'-O-methyl modified nucleotide
  modified_base 59: mod_base = OTHER; note = 2'-O-methyl modified nucleotide
  modified_base 61: mod_base = OTHER; note = 2'-O-methyl modified nucleotide
  modified_base 62: mod_base = OTHER; note = 2'-O-methyl modified nucleotide
  modified_base 63: mod_base = OTHER; note = 2'-O-methyl modified nucleotide
  modified_base 64: mod_base = OTHER; note = 2'-O-methyl modified nucleotide
  modified_base 65: mod_base = OTHER; note = 2'-O-methyl modified nucleotide
  modified_base 66: mod_base = OTHER; note = 2'-O-methyl modified nucleotide
  modified_base 67: mod_base = OTHER; note = 2'-O-methyl modified nucleotide
  modified_base 68: mod_base = OTHER; note = 2'-O-methyl modified nucleotide
  modified_base 69: mod_base = OTHER; note = 2'-O-methyl modified nucleotide
  modified_base 70: mod_base = OTHER; note = 2'-O-methyl modified nucleotide
  modified_base 75: mod_base = OTHER; note = 2'-O-methyl modified nucleotide
  modified_base 77: mod_base = OTHER; note = 2'-O-methyl modified nucleotide
  modified_base 80: mod_base = OTHER; note = 2'-O-methyl modified nucleotide
  modified_base 86: mod_base = OTHER; note = 2'-O-methyl modified nucleotide
  modified_base 87: mod_base = OTHER; note = 2'-O-methyl modified nucleotide
  modified_base 89: mod_base = OTHER; note = 2'-O-methyl modified nucleotide
  modified_base 90: mod_base = OTHER; note = 2'-O-methyl modified nucleotide
  modified_base 91: mod_base = OTHER; note = 2'-O-methyl modified nucleotide
  modified_base 92: mod_base = OTHER; note = 2'-O-methyl modified nucleotide
  modified_base 99: mod_base = OTHER; note = nucleotide with phosphorothioate linkage
  modified_base 100: mod_base = OTHER; note = 2'-O-methyl modified nucleotide with phosphorothioate linkage
  modified_base 101: mod_base = OTHER; note = 2'-O-methyl modified nucleotide

SEQ ID NO: 2691 - RNA, 101 nt, synthetic construct; identical to SEQ ID NO: 1691
  source 1..101: mol_type = other RNA
  modified_base 1: mod_base = OTHER; note = 2'-O-methyl modified nucleotide with phosphorothioate linkage
  modified_base 2: mod_base = OTHER; note = 2'-O-methyl modified nucleotide with phosphorothioate linkage
  modified_base 3: mod_base = OTHER; note = 2'-O-methyl modified nucleotide with phosphorothioate linkage
  modified_base 4: mod_base = OTHER; note = 2'-O-methyl modified nucleotide
  modified_base 5: mod_base = OTHER; note = 2'-O-methyl modified nucleotide
  modified_base 8: mod_base = OTHER; note = 2'-O-methyl modified nucleotide
  modified_base 9: mod_base = OTHER; note = 2'-O-methyl modified nucleotide
  modified_base 11: mod_base = OTHER; note = 2'-O-methyl modified nucleotide
  modified_base 13: mod_base = OTHER; note = 2'-O-methyl modified nucleotide
  modified_base 18: mod_base = OTHER; note = 2'-O-methyl modified nucleotide
  modified_base 22: mod_base = OTHER; note = 2'-O-methyl modified nucleotide
  modified_base 25: mod_base = OTHER; note = 2'-O-methyl modified nucleotide
  modified_base 29: mod_base = OTHER; note = 2'-O-methyl modified nucleotide
  modified_base 30: mod_base = OTHER; note = 2'-O-methyl modified nucleotide
  modified_base 31: mod_base = OTHER; note = 2'-O-methyl modified nucleotide
  modified_base 32: mod_base = OTHER; note = 2'-O-methyl modified nucleotide
  modified_base 37: mod_base = OTHER; note = 2'-O-methyl modified nucleotide
  modified_base 38: mod_base = OTHER; note = 2'-O-methyl modified nucleotide
  modified_base 39: mod_base = OTHER; note = 2'-O-methyl modified nucleotide
  modified_base 40: mod_base = OTHER; note = 2'-O-methyl modified nucleotide
  modified_base 41: mod_base = OTHER; note = 2'-O-methyl modified nucleotide
  modified_base 42: mod_base = OTHER; note = 2'-O-methyl modified nucleotide
  modified_base 43: mod_base = OTHER; note = 2'-O-methyl modified nucleotide
  modified_base 47: mod_base = OTHER; note = 2'-O-methyl modified nucleotide
  modified_base 48: mod_base = OTHER; note = 2'-O-methyl modified nucleotide
  modified_base 51: mod_base = OTHER; note = 2'-O-methyl modified nucleotide
  modified_base 54: mod_base = OTHER; note = nucleotide with phosphorothioate linkage
  modified_base 58: mod_base = OTHER; note = 2'-O-methyl modified nucleotide
  modified_base 59: mod_base = OTHER; note = 2'-O-methyl modified nucleotide
  modified_base 61: mod_base = OTHER; note = 2'-O-methyl modified nucleotide
  modified_base 62: mod_base = OTHER; note = 2'-O-methyl modified nucleotide
  modified_base 63: mod_base = OTHER; note = 2'-O-methyl modified nucleotide
  modified_base 64: mod_base = OTHER; note = 2'-O-methyl modified nucleotide
  modified_base 65: mod_base = OTHER; note = 2'-O-methyl modified nucleotide
  modified_base 66: mod_base = OTHER; note = 2'-O-methyl modified nucleotide
  modified_base 67: mod_base = OTHER; note = 2'-O-methyl modified nucleotide
  modified_base 68: mod_base = OTHER; note = 2'-O-methyl modified nucleotide
  modified_base 69: mod_base = OTHER; note = 2'-O-methyl modified nucleotide
  modified_base 70: mod_base = OTHER; note = 2'-O-methyl modified nucleotide
  modified_base 75: mod_base = OTHER; note = 2'-O-methyl modified nucleotide
  modified_base 77: mod_base = OTHER; note = 2'-O-methyl modified nucleotide
  modified_base 80: mod_base = OTHER; note = 2'-O-methyl modified nucleotide
  modified_base 86: mod_base = OTHER; note = 2'-O-methyl modified nucleotide
  modified_base 87: mod_base = OTHER; note = 2'-O-methyl modified nucleotide
  modified_base 89: mod_base = OTHER; note = 2'-O-methyl modified nucleotide
  modified_base 90: mod_base = OTHER; note = 2'-O-methyl modified nucleotide
  modified_base 91: mod_base = OTHER; note = 2'-O-methyl modified nucleotide
  modified_base 92: mod_base = OTHER; note = 2'-O-methyl modified nucleotide
  modified_base 99: mod_base = OTHER; note = nucleotide with phosphorothioate linkage
  modified_base 100: mod_base = OTHER; note = 2'-O-methyl modified nucleotide with phosphorothioate linkage
  modified_base 101: mod_base = OTHER; note = 2'-O-methyl modified nucleotide

SEQ ID NO: 2692 - RNA, 101 nt, synthetic construct; identical to SEQ ID NO: 1692
  source 1..101: mol_type = other RNA
  modified_base 1: mod_base = OTHER; note = 2'-O-methyl modified nucleotide with phosphorothioate linkage
  modified_base 2: mod_base = OTHER; note = 2'-O-methyl modified nucleotide with phosphorothioate linkage
  modified_base 3: mod_base = OTHER; note = 2'-O-methyl modified nucleotide with phosphorothioate linkage
  modified_base 4: mod_base = OTHER; note = 2'-O-methyl modified nucleotide
  modified_base 5: mod_base = OTHER; note = 2'-O-methyl modified nucleotide
  modified_base 8: mod_base = OTHER; note = 2'-O-methyl modified nucleotide
  modified_base 9: mod_base = OTHER; note = 2'-O-methyl modified nucleotide
  modified_base 11: mod_base = OTHER; note = 2'-O-methyl modified nucleotide
  modified_base 13: mod_base = OTHER; note = 2'-O-methyl modified nucleotide
  modified_base 18: mod_base = OTHER; note = 2'-O-methyl modified nucleotide
  modified_base 22: mod_base = OTHER; note = 2'-O-methyl modified nucleotide
  modified_base 25: mod_base = OTHER; note = 2'-O-methyl modified nucleotide
  modified_base 29: mod_base = OTHER; note = 2'-O-methyl modified nucleotide
  modified_base 30: mod_base = OTHER; note = 2'-O-methyl modified nucleotide
  modified_base 31: mod_base = OTHER; note = 2'-O-methyl modified nucleotide
  modified_base 32: mod_base = OTHER; note = 2'-O-methyl modified nucleotide
  modified_base 37: mod_base = OTHER; note = 2'-O-methyl modified nucleotide
  modified_base 38: mod_base = OTHER; note = 2'-O-methyl modified nucleotide
  modified_base 39: mod_base = OTHER; note = 2'-O-methyl modified nucleotide
  modified_base 40: mod_base = OTHER; note = 2'-O-methyl modified nucleotide
  modified_base 41: mod_base = OTHER; note = 2'-O-methyl modified nucleotide
  modified_base 42: mod_base = OTHER; note = 2'-O-methyl modified nucleotide
  modified_base 43: mod_base = OTHER; note = 2'-O-methyl modified nucleotide
  modified_base 47: mod_base = OTHER; note = 2'-O-methyl modified nucleotide
  modified_base 48: mod_base = OTHER; note = 2'-O-methyl modified nucleotide
  modified_base 51: mod_base = OTHER; note = 2'-O-methyl modified nucleotide
  modified_base 54: mod_base = OTHER; note = nucleotide with phosphorothioate linkage
  modified_base 58: mod_base = OTHER; note = 2'-O-methyl modified nucleotide
  modified_base 59: mod_base = OTHER; note = 2'-O-methyl modified nucleotide
  modified_base 61: mod_base = OTHER; note = 2'-O-methyl modified nucleotide
  modified_base 62: mod_base = OTHER; note = 2'-O-methyl modified nucleotide
  modified_base 63: mod_base = OTHER; note = 2'-O-methyl modified nucleotide
  modified_base 64: mod_base = OTHER; note = 2'-O-methyl modified nucleotide
  modified_base 65: mod_base = OTHER; note = 2'-O-methyl modified nucleotide
  modified_base 66: mod_base = OTHER; note = 2'-O-methyl modified nucleotide
  modified_base 67: mod_base = OTHER; note = 2'-O-methyl modified nucleotide
  modified_base 68: mod_base = OTHER; note = 2'-O-methyl modified nucleotide
  modified_base 69: mod_base = OTHER; note = 2'-O-methyl modified nucleotide
  modified_base 70: mod_base = OTHER; note = 2'-O-methyl modified nucleotide
  modified_base 75: mod_base = OTHER; note = 2'-O-methyl modified nucleotide
  modified_base 77: mod_base = OTHER; note = 2'-O-methyl modified nucleotide
  modified_base 80: mod_base = OTHER; note = 2'-O-methyl modified nucleotide
  modified_base 86: mod_base = OTHER; note = 2'-O-methyl modified nucleotide
  modified_base 87: mod_base = OTHER; note = 2'-O-methyl modified nucleotide
  modified_base 89: mod_base = OTHER; note = 2'-O-methyl modified nucleotide
  modified_base 90: mod_base = OTHER; note = 2'-O-methyl modified nucleotide
  modified_base 91: mod_base = OTHER; note = 2'-O-methyl modified nucleotide
  modified_base 92: mod_base = OTHER; note = 2'-O-methyl modified nucleotide
  modified_base 99: mod_base = OTHER; note = nucleotide with phosphorothioate linkage
  modified_base 100: mod_base = OTHER; note = 2'-O-methyl modified nucleotide with phosphorothioate linkage
  modified_base 101: mod_base = OTHER; note = 2'-O-methyl modified nucleotide

SEQ ID NO: 2693 - RNA, 101 nt, synthetic construct; identical to SEQ ID NO: 1693
  source 1..101: mol_type = other RNA
  modified_base 1: mod_base = OTHER; note = 2'-O-methyl modified nucleotide with phosphorothioate linkage
  modified_base 2: mod_base = OTHER; note = 2'-O-methyl modified nucleotide with phosphorothioate linkage
  modified_base 3: mod_base = OTHER; note = 2'-O-methyl modified nucleotide with phosphorothioate linkage
  modified_base 4: mod_base = OTHER; note = 2'-O-methyl modified nucleotide
  modified_base 5: mod_base = OTHER; note = 2'-O-methyl modified nucleotide
  modified_base 8: mod_base = OTHER; note = 2'-O-methyl modified nucleotide
  modified_base 9: mod_base = OTHER; note = 2'-O-methyl modified nucleotide
  modified_base 11: mod_base = OTHER; note = 2'-O-methyl modified nucleotide
  modified_base 13: mod_base = OTHER; note = 2'-O-methyl modified nucleotide
  modified_base 18: mod_base = OTHER; note = 2'-O-methyl modified nucleotide
  modified_base 22: mod_base = OTHER; note = 2'-O-methyl modified nucleotide
  modified_base 25: mod_base = OTHER; note = 2'-O-methyl modified nucleotide
  modified_base 29: mod_base = OTHER; note = 2'-O-methyl modified nucleotide
  modified_base 30: mod_base = OTHER; note = 2'-O-methyl modified nucleotide
  modified_base 31: mod_base = OTHER; note = 2'-O-methyl modified nucleotide
  modified_base 32: mod_base = OTHER; note = 2'-O-methyl modified nucleotide
  modified_base 37: mod_base = OTHER; note = 2'-O-methyl modified nucleotide
  modified_base 38: mod_base = OTHER; note = 2'-O-methyl modified nucleotide
  modified_base 39: mod_base = OTHER; note = 2'-O-methyl modified nucleotide
  modified_base 40: mod_base = OTHER; note = 2'-O-methyl modified nucleotide
  modified_base 41: mod_base = OTHER; note = 2'-O-methyl modified nucleotide
  modified_base 42: mod_base = OTHER; note = 2'-O-methyl modified nucleotide
  modified_base 43: mod_base = OTHER; note = 2'-O-methyl modified nucleotide
  modified_base 47: mod_base = OTHER; note = 2'-O-methyl modified nucleotide
  modified_base 48: mod_base = OTHER; note = 2'-O-methyl modified nucleotide
  modified_base 51: mod_base = OTHER; note = 2'-O-methyl modified nucleotide
  modified_base 54: mod_base = OTHER; note = nucleotide with phosphorothioate linkage
  modified_base 58: mod_base = OTHER; note = 2'-O-methyl modified nucleotide
  modified_base 59: mod_base = OTHER; note = 2'-O-methyl modified nucleotide
  modified_base 61: mod_base = OTHER; note = 2'-O-methyl modified nucleotide
  modified_base 62: mod_base = OTHER; note = 2'-O-methyl modified nucleotide
  modified_base 63: mod_base = OTHER; note = 2'-O-methyl modified nucleotide
  modified_base 64: mod_base = OTHER; note = 2'-O-methyl modified nucleotide
  modified_base 65: mod_base = OTHER; note = 2'-O-methyl modified nucleotide
  modified_base 66: mod_base = OTHER; note = 2'-O-methyl modified nucleotide
  modified_base 67: mod_base = OTHER; note = 2'-O-methyl modified nucleotide
  modified_base 68: mod_base = OTHER; note = 2'-O-methyl modified nucleotide
  modified_base 69: mod_base = OTHER; note = 2'-O-methyl modified nucleotide
  modified_base 70: mod_base = OTHER; note = 2'-O-methyl modified nucleotide
  modified_base 75: mod_base = OTHER; note = 2'-O-methyl modified nucleotide
  modified_base 77: mod_base = OTHER; note = 2'-O-methyl modified nucleotide
  modified_base 80: mod_base = OTHER; note = 2'-O-methyl modified nucleotide
  modified_base 86: mod_base = OTHER; note = 2'-O-methyl modified nucleotide
  modified_base 87: mod_base = OTHER; note = 2'-O-methyl modified nucleotide
  modified_base 89: mod_base = OTHER; note = 2'-O-methyl modified nucleotide
  modified_base 90: mod_base = OTHER; note = 2'-O-methyl modified nucleotide
  modified_base 91: mod_base = OTHER; note = 2'-O-methyl modified nucleotide
  modified_base 92: mod_base = OTHER; note = 2'-O-methyl modified nucleotide
  modified_base 99: mod_base = OTHER; note = nucleotide with phosphorothioate linkage
  modified_base 100: mod_base = OTHER; note = 2'-O-methyl modified nucleotide with phosphorothioate linkage
  modified_base 101: mod_base = OTHER; note = 2'-O-methyl modified nucleotide

SEQ ID NO: 2694 - RNA, 101 nt, synthetic construct; identical to SEQ ID NO: 1694
  source 1..101: mol_type = other RNA
  modified_base 1: mod_base = OTHER; note = 2'-O-methyl modified nucleotide with phosphorothioate linkage
  modified_base 2: mod_base = OTHER; note = 2'-O-methyl modified nucleotide with phosphorothioate linkage
  modified_base 3: mod_base = OTHER; note = 2'-O-methyl modified nucleotide with phosphorothioate linkage
  modified_base 4: mod_base = OTHER; note = 2'-O-methyl modified nucleotide
  modified_base 5: mod_base = OTHER; note = 2'-O-methyl modified nucleotide
  modified_base 8: mod_base = OTHER; note = 2'-O-methyl modified nucleotide
  modified_base 9: mod_base = OTHER; note = 2'-O-methyl modified nucleotide
  modified_base 11: mod_base = OTHER; note = 2'-O-methyl modified nucleotide
  modified_base 13: mod_base = OTHER; note = 2'-O-methyl modified nucleotide
  modified_base 18: mod_base = OTHER; note = 2'-O-methyl modified nucleotide
  modified_base 22: mod_base = OTHER; note = 2'-O-methyl modified nucleotide
  modified_base 25: mod_base = OTHER; note = 2'-O-methyl modified nucleotide
  modified_base 29: mod_base = OTHER; note = 2'-O-methyl modified nucleotide
  modified_base 30: mod_base = OTHER; note = 2'-O-methyl modified nucleotide
  modified_base 31: mod_base = OTHER; note = 2'-O-methyl modified nucleotide
  modified_base 32: mod_base = OTHER; note = 2'-O-methyl modified nucleotide
  modified_base 37: mod_base = OTHER; note = 2'-O-methyl modified nucleotide
  modified_base 38: mod_base = OTHER; note = 2'-O-methyl modified nucleotide
  modified_base 39: mod_base = OTHER; note = 2'-O-methyl modified nucleotide
  modified_base 40: mod_base = OTHER; note = 2'-O-methyl modified nucleotide
  modified_base 41: mod_base = OTHER; note = 2'-O-methyl modified nucleotide
  modified_base 42: mod_base = OTHER; note = 2'-O-methyl modified nucleotide
  modified_base 43: mod_base = OTHER; note = 2'-O-methyl modified nucleotide
  modified_base 47: mod_base = OTHER; note = 2'-O-methyl modified nucleotide
  modified_base 48: mod_base = OTHER; note = 2'-O-methyl modified nucleotide
  modified_base 51: mod_base = OTHER; note = 2'-O-methyl modified nucleotide
  modified_base 54: mod_base = OTHER; note = nucleotide with phosphorothioate linkage
  modified_base 58: mod_base = OTHER; note = 2'-O-methyl modified nucleotide
  modified_base 59: mod_base = OTHER; note = 2'-O-methyl modified nucleotide
  modified_base 61: mod_base = OTHER; note = 2'-O-methyl modified nucleotide
  modified_base 62: mod_base = OTHER; note = 2'-O-methyl modified nucleotide
  modified_base 63: mod_base = OTHER; note = 2'-O-methyl modified nucleotide
  modified_base 64: mod_base = OTHER; note = 2'-O-methyl modified nucleotide
  modified_base 65: mod_base = OTHER; note = 2'-O-methyl modified nucleotide
  modified_base 66: mod_base = OTHER; note = 2'-O-methyl modified nucleotide
  modified_base 67: mod_base = OTHER; note = 2'-O-methyl modified nucleotide
  modified_base 68: mod_base = OTHER; note = 2'-O-methyl modified nucleotide
  modified_base 69: mod_base = OTHER; note = 2'-O-methyl modified nucleotide
  modified_base 70: mod_base = OTHER; note = 2'-O-methyl modified nucleotide
  modified_base 75: mod_base = OTHER; note = 2'-O-methyl modified nucleotide
  modified_base 77: mod_base = OTHER; note = 2'-O-methyl modified nucleotide
  modified_base 80: mod_base = OTHER; note = 2'-O-methyl modified nucleotide
  modified_base 86: mod_base = OTHER; note = 2'-O-methyl modified nucleotide
  modified_base 87: mod_base = OTHER; note = 2'-O-methyl modified nucleotide
  modified_base 89: mod_base = OTHER; note = 2'-O-methyl modified nucleotide
  modified_base 90: mod_base = OTHER; note = 2'-O-methyl modified nucleotide
  modified_base 91: mod_base = OTHER; note = 2'-O-methyl modified nucleotide
  modified_base 92: mod_base = OTHER; note = 2'-O-methyl modified nucleotide
  modified_base 99: mod_base = OTHER; note = nucleotide with phosphorothioate linkage
  modified_base 100: mod_base = OTHER; note = 2'-O-methyl modified nucleotide with phosphorothioate linkage
  modified_base 101: mod_base = OTHER; note = 2'-O-methyl modified nucleotide

SEQ ID NO: 2695 - RNA, 101 nt, synthetic construct; identical to SEQ ID NO: 1695
  source 1..101: mol_type = other RNA
  modified_base 1: mod_base = OTHER; note = 2'-O-methyl modified nucleotide with phosphorothioate linkage
  modified_base 2: mod_base = OTHER; note = 2'-O-methyl modified nucleotide with phosphorothioate linkage
  modified_base 3: mod_base = OTHER; note = 2'-O-methyl modified nucleotide with phosphorothioate linkage
  modified_base 4: mod_base = OTHER; note = 2'-O-methyl modified nucleotide
  modified_base 5: mod_base = OTHER; note = 2'-O-methyl modified nucleotide
  modified_base 8: mod_base = OTHER; note = 2'-O-methyl modified nucleotide
  modified_base 9: mod_base = OTHER; note = 2'-O-methyl modified nucleotide
  modified_base 11: mod_base = OTHER; note = 2'-O-methyl modified nucleotide
  modified_base 13: mod_base = OTHER; note = 2'-O-methyl modified nucleotide
  modified_base 18: mod_base = OTHER; note = 2'-O-methyl modified nucleotide
  modified_base 22: mod_base = OTHER; note = 2'-O-methyl modified nucleotide
  modified_base 25: mod_base = OTHER; note = 2'-O-methyl modified nucleotide
  modified_base 29: mod_base = OTHER; note = 2'-O-methyl modified nucleotide
  modified_base 30: mod_base = OTHER; note = 2'-O-methyl modified nucleotide
  modified_base 31: mod_base = OTHER; note = 2'-O-methyl modified nucleotide
  modified_base 32: mod_base = OTHER; note = 2'-O-methyl modified nucleotide
  modified_base 37: mod_base = OTHER; note = 2'-O-methyl modified nucleotide
  modified_base 38: mod_base = OTHER; note = 2'-O-methyl modified nucleotide
  modified_base 39: mod_base = OTHER; note = 2'-O-methyl modified nucleotide
  modified_base 40: mod_base = OTHER; note = 2'-O-methyl modified nucleotide
  modified_base 41: mod_base = OTHER; note = 2'-O-methyl modified nucleotide
  modified_base 42: mod_base = OTHER; note = 2'-O-methyl modified nucleotide
  modified_base 43: mod_base = OTHER; note = 2'-O-methyl modified nucleotide
  modified_base 47: mod_base = OTHER; note = 2'-O-methyl modified nucleotide
  modified_base 48: mod_base = OTHER; note = 2'-O-methyl modified nucleotide
  modified_base 51: mod_base = OTHER; note = 2'-O-methyl modified nucleotide
  modified_base 54: mod_base = OTHER; note = nucleotide with phosphorothioate linkage
  modified_base 58: mod_base = OTHER; note = 2'-O-methyl modified nucleotide
  modified_base 59: mod_base = OTHER; note = 2'-O-methyl modified nucleotide
  modified_base 61: mod_base = OTHER; note = 2'-O-methyl modified nucleotide
  modified_base 62: mod_base = OTHER; note = 2'-O-methyl modified nucleotide
  modified_base 63: mod_base = OTHER; note = 2'-O-methyl modified nucleotide
  modified_base 64: mod_base = OTHER; note = 2'-O-methyl modified nucleotide
  modified_base 65: mod_base = OTHER; note = 2'-O-methyl modified nucleotide
  modified_base 66: mod_base = OTHER; note = 2'-O-methyl modified nucleotide
  modified_base 67: mod_base = OTHER; note = 2'-O-methyl modified nucleotide
  modified_base 68: mod_base = OTHER; note = 2'-O-methyl modified nucleotide
  modified_base 69: mod_base = OTHER; note = 2'-O-methyl modified nucleotide
  modified_base 70: mod_base = OTHER; note = 2'-O-methyl modified nucleotide
  modified_base 75: mod_base = OTHER; note = 2'-O-methyl modified nucleotide
  modified_base 77: mod_base = OTHER; note = 2'-O-methyl modified nucleotide
  modified_base 80: mod_base = OTHER; note = 2'-O-methyl modified nucleotide
  modified_base 86: mod_base = OTHER; note = 2'-O-methyl modified nucleotide
  modified_base 87: mod_base = OTHER; note = 2'-O-methyl modified nucleotide
  modified_base 89: mod_base = OTHER; note = 2'-O-methyl modified nucleotide
  modified_base 90: mod_base = OTHER; note = 2'-O-methyl modified nucleotide
  modified_base 91: mod_base = OTHER; note = 2'-O-methyl modified nucleotide
  modified_base 92: mod_base = OTHER; note = 2'-O-methyl modified nucleotide
  modified_base 99: mod_base = OTHER; note = nucleotide with phosphorothioate linkage
  modified_base 100: mod_base = OTHER; note = 2'-O-methyl modified nucleotide with phosphorothioate linkage
  modified_base 101: mod_base = OTHER; note = 2'-O-methyl modified nucleotide

SEQ ID NO: 2696 - RNA, 101 nt, synthetic construct; identical to SEQ ID NO: 1696
  source 1..101: mol_type = other RNA
  modified_base 1: mod_base = OTHER; note = 2'-O-methyl modified nucleotide with phosphorothioate linkage
  modified_base 2: mod_base = OTHER; note = 2'-O-methyl modified nucleotide with phosphorothioate linkage
  modified_base 3: mod_base = OTHER; note = 2'-O-methyl modified nucleotide with phosphorothioate linkage
  modified_base 4: mod_base = OTHER; note = 2'-O-methyl modified nucleotide
  modified_base 5: mod_base = OTHER; note = 2'-O-methyl modified nucleotide
  modified_base 8: mod_base = OTHER; note = 2'-O-methyl modified nucleotide
  modified_base 9: mod_base = OTHER; note = 2'-O-methyl modified nucleotide
  modified_base 11: mod_base = OTHER; note = 2'-O-methyl modified nucleotide
  modified_base 13: mod_base = OTHER; note = 2'-O-methyl modified nucleotide
  modified_base 18: mod_base = OTHER; note = 2'-O-methyl modified nucleotide
  modified_base 22: mod_base = OTHER; note = 2'-O-methyl modified nucleotide
  modified_base 25: mod_base = OTHER; note = 2'-O-methyl modified nucleotide
  modified_base 29: mod_base = OTHER; note = 2'-O-methyl modified nucleotide
  modified_base 30: mod_base = OTHER; note = 2'-O-methyl modified nucleotide
  modified_base 31: mod_base = OTHER; note = 2'-O-methyl modified nucleotide
  modified_base 32: mod_base = OTHER; note = 2'-O-methyl modified nucleotide
  modified_base 37: mod_base = OTHER; note = 2'-O-methyl modified nucleotide
  modified_base 38: mod_base = OTHER; note = 2'-O-methyl modified nucleotide
  modified_base 39: mod_base = OTHER; note = 2'-O-methyl modified nucleotide
  modified_base 40: mod_base = OTHER; note = 2'-O-methyl modified nucleotide
  modified_base 41: mod_base = OTHER; note = 2'-O-methyl modified nucleotide
  modified_base 42: mod_base = OTHER; note = 2'-O-methyl modified nucleotide
  modified_base 43: mod_base = OTHER; note = 2'-O-methyl modified nucleotide
  modified_base 47: mod_base = OTHER; note = 2'-O-methyl modified nucleotide
  modified_base 48: mod_base = OTHER; note = 2'-O-methyl modified nucleotide
  modified_base 51: mod_base = OTHER; note = 2'-O-methyl modified nucleotide
  modified_base 54: mod_base = OTHER; note = nucleotide with phosphorothioate linkage
  modified_base 58: mod_base = OTHER; note = 2'-O-methyl modified nucleotide
  modified_base 59: mod_base = OTHER; note = 2'-O-methyl modified nucleotide
  modified_base 61: mod_base = OTHER; note = 2'-O-methyl modified nucleotide
  modified_base 62: mod_base = OTHER; note = 2'-O-methyl modified nucleotide
  modified_base 63: mod_base = OTHER; note = 2'-O-methyl modified nucleotide
  modified_base 64: mod_base = OTHER; note = 2'-O-methyl modified nucleotide
  modified_base 65: mod_base = OTHER; note = 2'-O-methyl modified nucleotide
  modified_base 66: mod_base = OTHER; note = 2'-O-methyl modified nucleotide
  modified_base 67: mod_base = OTHER; note = 2'-O-methyl modified nucleotide
  modified_base 68: mod_base = OTHER; note = 2'-O-methyl modified nucleotide
  modified_base 69: mod_base = OTHER; note = 2'-O-methyl modified nucleotide
  modified_base 70: mod_base = OTHER; note = 2'-O-methyl modified nucleotide
  modified_base 75: mod_base = OTHER; note = 2'-O-methyl modified nucleotide
  modified_base 77: mod_base = OTHER; note = 2'-O-methyl modified nucleotide
  modified_base 80: mod_base = OTHER; note = 2'-O-methyl modified nucleotide
  modified_base 86: mod_base = OTHER; note = 2'-O-methyl modified nucleotide
  modified_base 87: mod_base = OTHER; note = 2'-O-methyl modified nucleotide
  modified_base 89: mod_base = OTHER; note = 2'-O-methyl modified nucleotide
  modified_base 90: mod_base = OTHER; note = 2'-O-methyl modified nucleotide
  modified_base 91: mod_base = OTHER; note = 2'-O-methyl modified nucleotide
  modified_base 92: mod_base = OTHER; note = 2'-O-methyl modified nucleotide
  modified_base 99: mod_base = OTHER; note = nucleotide with phosphorothioate linkage
  modified_base 100: mod_base = OTHER; note = 2'-O-methyl modified nucleotide with phosphorothioate linkage
  modified_base 101: mod_base = OTHER; note = 2'-O-methyl modified nucleotide

SEQ ID NO: 2697 - RNA, 101 nt, synthetic construct; identical to SEQ ID NO: 1697
  source 1..101: mol_type = other RNA
  modified_base 1: mod_base = OTHER; note = 2'-O-methyl modified nucleotide with phosphorothioate linkage
  modified_base 2: mod_base = OTHER; note = 2'-O-methyl modified nucleotide with phosphorothioate linkage
  modified_base 3: mod_base = OTHER; note = 2'-O-methyl modified nucleotide with phosphorothioate linkage
  modified_base 4: mod_base = OTHER; note = 2'-O-methyl modified nucleotide
  modified_base 5: mod_base = OTHER; note = 2'-O-methyl modified nucleotide
  modified_base 8: mod_base = OTHER; note = 2'-O-methyl modified nucleotide
  modified_base 9: mod_base = OTHER; note = 2'-O-methyl modified nucleotide
  modified_base 11: mod_base = OTHER; note = 2'-O-methyl modified nucleotide
  modified_base 13: mod_base = OTHER; note = 2'-O-methyl modified nucleotide
  modified_base 18: mod_base = OTHER; note = 2'-O-methyl modified nucleotide
  modified_base 22: mod_base = OTHER; note = 2'-O-methyl modified nucleotide
  modified_base 25: mod_base = OTHER; note = 2'-O-methyl modified nucleotide
  modified_base 29: mod_base = OTHER; note = 2'-O-methyl modified nucleotide
  modified_base 30: mod_base = OTHER; note = 2'-O-methyl modified nucleotide
  modified_base 31: mod_base = OTHER; note = 2'-O-methyl modified nucleotide
  modified_base 32: mod_base = OTHER; note = 2'-O-methyl modified nucleotide
  modified_base 37: mod_base = OTHER; note = 2'-O-methyl modified nucleotide
  modified_base 38: mod_base = OTHER; note = 2'-O-methyl modified nucleotide
  modified_base 39: mod_base = OTHER; note = 2'-O-methyl modified nucleotide
  modified_base 40: mod_base = OTHER; note = 2'-O-methyl modified nucleotide
  modified_base 41: mod_base = OTHER; note = 2'-O-methyl modified nucleotide
  modified_base 42: mod_base = OTHER; note = 2'-O-methyl modified nucleotide
  modified_base 43: mod_base = OTHER; note = 2'-O-methyl modified nucleotide
  modified_base 47: mod_base = OTHER; note = 2'-O-methyl modified nucleotide
  modified_base 48: mod_base = OTHER; note = 2'-O-methyl modified nucleotide
  modified_base 51: mod_base = OTHER; note = 2'-O-methyl modified nucleotide
  modified_base 54: mod_base = OTHER; note = nucleotide with phosphorothioate linkage
  modified_base 58: mod_base = OTHER; note = 2'-O-methyl modified nucleotide
  modified_base 59: mod_base = OTHER; note = 2'-O-methyl modified nucleotide
  modified_base 61: mod_base = OTHER; note = 2'-O-methyl modified nucleotide
  modified_base 62: mod_base = OTHER; note = 2'-O-methyl modified nucleotide
  modified_base 63: mod_base = OTHER; note = 2'-O-methyl modified nucleotide
  modified_base 64: mod_base = OTHER; note = 2'-O-methyl modified nucleotide
  modified_base 65: mod_base = OTHER; note = 2'-O-methyl modified nucleotide
  modified_base 66: mod_base = OTHER; note = 2'-O-methyl modified nucleotide
  modified_base 67: mod_base = OTHER; note = 2'-O-methyl modified nucleotide
  modified_base 68: mod_base = OTHER; note = 2'-O-methyl modified nucleotide
  modified_base 69: mod_base = OTHER; note = 2'-O-methyl modified nucleotide
  modified_base 70: mod_base = OTHER; note = 2'-O-methyl modified nucleotide
  modified_base 75: mod_base = OTHER; note = 2'-O-methyl modified nucleotide
  modified_base 77: mod_base = OTHER; note = 2'-O-methyl modified nucleotide
  modified_base 80: mod_base = OTHER; note = 2'-O-methyl modified nucleotide
  modified_base 86: mod_base = OTHER; note = 2'-O-methyl modified nucleotide
  modified_base 87: mod_base = OTHER; note = 2'-O-methyl modified nucleotide
  modified_base 89: mod_base = OTHER; note = 2'-O-methyl modified nucleotide
  modified_base 90: mod_base = OTHER; note = 2'-O-methyl modified nucleotide
  modified_base 91: mod_base = OTHER; note = 2'-O-methyl modified nucleotide
  modified_base 92: mod_base = OTHER; note = 2'-O-methyl modified nucleotide
  modified_base 99: mod_base = OTHER; note = nucleotide with phosphorothioate linkage
  modified_base 100: mod_base = OTHER; note = 2'-O-methyl modified nucleotide with phosphorothioate linkage
  modified_base 101: mod_base = OTHER; note = 2'-O-methyl modified nucleotide

SEQ ID NO: 2698 - RNA, 101 nt, synthetic construct; identical to SEQ ID NO: 1698
  source 1..101: mol_type = other RNA
  modified_base 1: mod_base = OTHER; note = 2'-O-methyl modified nucleotide with phosphorothioate linkage
  modified_base 2: mod_base = OTHER; note = 2'-O-methyl modified nucleotide with phosphorothioate linkage
  modified_base 3: mod_base = OTHER; note = 2'-O-methyl modified nucleotide with phosphorothioate linkage
  modified_base 4: mod_base = OTHER; note = 2'-O-methyl modified nucleotide
  modified_base 5: mod_base = OTHER; note = 2'-O-methyl modified nucleotide
  modified_base 8: mod_base = OTHER; note = 2'-O-methyl modified nucleotide
  modified_base 9: mod_base = OTHER; note = 2'-O-methyl modified nucleotide
  modified_base 11: mod_base = OTHER; note = 2'-O-methyl modified nucleotide
  modified_base 13: mod_base = OTHER; note = 2'-O-methyl modified nucleotide
  modified_base 18: mod_base = OTHER; note = 2'-O-methyl modified nucleotide
  modified_base 22: mod_base = OTHER; note = 2'-O-methyl modified nucleotide
  modified_base 25: mod_base = OTHER; note = 2'-O-methyl modified nucleotide
  modified_base 29: mod_base = OTHER; note = 2'-O-methyl modified nucleotide
  modified_base 30: mod_base = OTHER; note = 2'-O-methyl modified nucleotide
  modified_base 31: mod_base = OTHER; note = 2'-O-methyl modified nucleotide
  modified_base 32: mod_base = OTHER; note = 2'-O-methyl modified nucleotide
  modified_base 37: mod_base = OTHER; note = 2'-O-methyl modified nucleotide
  modified_base 38: mod_base = OTHER; note = 2'-O-methyl modified nucleotide
  modified_base 39: mod_base = OTHER; note = 2'-O-methyl modified nucleotide
  modified_base 40: mod_base = OTHER; note = 2'-O-methyl modified nucleotide
  modified_base 41: mod_base = OTHER; note = 2'-O-methyl modified nucleotide
  modified_base 42: mod_base = OTHER; note = 2'-O-methyl modified nucleotide
  modified_base 43: mod_base = OTHER; note = 2'-O-methyl modified nucleotide
  modified_base 47: mod_base = OTHER; note = 2'-O-methyl modified nucleotide
  modified_base 48: mod_base = OTHER; note = 2'-O-methyl modified nucleotide
  modified_base 51: mod_base = OTHER; note = 2'-O-methyl modified nucleotide
  modified_base 54: mod_base = OTHER; note = nucleotide with phosphorothioate linkage
  modified_base 58: mod_base = OTHER; note = 2'-O-methyl modified nucleotide
  modified_base 59: mod_base = OTHER; note = 2'-O-methyl modified nucleotide
  modified_base 61: mod_base = OTHER; note = 2'-O-methyl modified nucleotide
  modified_base 62: mod_base = OTHER; note = 2'-O-methyl modified nucleotide
  modified_base 63: mod_base = OTHER; note = 2'-O-methyl modified nucleotide
  modified_base 64: mod_base = OTHER; note = 2'-O-methyl modified nucleotide
  modified_base 65: mod_base = OTHER; note = 2'-O-methyl modified nucleotide
  modified_base 66: mod_base = OTHER; note = 2'-O-methyl modified nucleotide
  modified_base 67: mod_base = OTHER; note = 2'-O-methyl modified nucleotide
  modified_base 68: mod_base = OTHER; note = 2'-O-methyl modified nucleotide
  modified_base 69: mod_base = OTHER; note = 2'-O-methyl modified nucleotide
  modified_base 70: mod_base = OTHER; note = 2'-O-methyl modified nucleotide
  modified_base 75: mod_base = OTHER; note = 2'-O-methyl modified nucleotide
  modified_base 77: mod_base = OTHER; note = 2'-O-methyl modified nucleotide
  modified_base 80: mod_base = OTHER; note = 2'-O-methyl modified nucleotide
  modified_base 86: mod_base = OTHER; note = 2'-O-methyl modified nucleotide
  modified_base 87: mod_base = OTHER; note = 2'-O-methyl modified nucleotide
  modified_base 89: mod_base = OTHER; note = 2'-O-methyl modified nucleotide
  modified_base 90: mod_base = OTHER; note = 2'-O-methyl modified nucleotide
  modified_base 91: mod_base = OTHER; note = 2'-O-methyl modified nucleotide
  modified_base 92: mod_base = OTHER; note = 2'-O-methyl modified nucleotide
  modified_base 99: mod_base = OTHER; note = nucleotide with phosphorothioate linkage
  modified_base 100: mod_base = OTHER; note = 2'-O-methyl modified nucleotide with phosphorothioate linkage
  modified_base 101: mod_base = OTHER; note = 2'-O-methyl modified nucleotide

SEQ ID NO: 2699 - RNA, 101 nt, synthetic construct; identical to SEQ ID NO: 1699
  source 1..101: mol_type = other RNA
  modified_base 1: mod_base = OTHER; note = 2'-O-methyl modified nucleotide with phosphorothioate linkage
  modified_base 2: mod_base = OTHER; note = 2'-O-methyl modified nucleotide with phosphorothioate linkage
  modified_base 3: mod_base = OTHER; note = 2'-O-methyl modified nucleotide with phosphorothioate linkage
  modified_base 4: mod_base = OTHER; note = 2'-O-methyl modified nucleotide
  modified_base 5: mod_base = OTHER; note = 2'-O-methyl modified nucleotide
  modified_base 8: mod_base = OTHER; note = 2'-O-methyl modified nucleotide
  modified_base 9: mod_base = OTHER; note = 2'-O-methyl modified nucleotide
  modified_base 11: mod_base = OTHER; note = 2'-O-methyl modified nucleotide
  modified_base 13: mod_base = OTHER; note = 2'-O-methyl modified nucleotide
  modified_base 18: mod_base = OTHER; note = 2'-O-methyl modified nucleotide
  modified_base 22: mod_base = OTHER; note = 2'-O-methyl modified nucleotide
  modified_base 25: mod_base = OTHER; note = 2'-O-methyl modified nucleotide
  modified_base 29: mod_base = OTHER; note = 2'-O-methyl modified nucleotide
  modified_base 30: mod_base = OTHER; note = 2'-O-methyl modified nucleotide
  modified_base 31: mod_base = OTHER; note = 2'-O-methyl modified nucleotide
  modified_base 32: mod_base = OTHER; note = 2'-O-methyl modified nucleotide
  modified_base 37: mod_base = OTHER; note = 2'-O-methyl modified nucleotide
  modified_base 38: mod_base = OTHER; note = 2'-O-methyl modified nucleotide
  modified_base 39: mod_base = OTHER; note = 2'-O-methyl modified nucleotide
  modified_base 40: mod_base = OTHER; note = 2'-O-methyl modified nucleotide
  modified_base 41: mod_base = OTHER; note = 2'-O-methyl modified nucleotide
  modified_base 42: mod_base = OTHER; note = 2'-O-methyl modified nucleotide
  modified_base 43: mod_base = OTHER; note = 2'-O-methyl modified nucleotide
  modified_base 47: mod_base = OTHER; note = 2'-O-methyl modified nucleotide
  modified_base 48: mod_base = OTHER; note = 2'-O-methyl modified nucleotide
  modified_base 51: mod_base = OTHER; note = 2'-O-methyl modified nucleotide
  modified_base 54: mod_base = OTHER; note = nucleotide with phosphorothioate linkage
  modified_base 58: mod_base = OTHER; note = 2'-O-methyl modified nucleotide
  modified_base 59: mod_base = OTHER; note = 2'-O-methyl modified nucleotide
  modified_base 61: mod_base = OTHER; note = 2'-O-methyl modified nucleotide
  modified_base 62: mod_base = OTHER; note = 2'-O-methyl modified nucleotide
  modified_base 63: mod_base = OTHER; note = 2'-O-methyl modified nucleotide
  modified_base 64: mod_base = OTHER; note = 2'-O-methyl modified nucleotide
  modified_base 65: mod_base = OTHER; note = 2'-O-methyl modified nucleotide
  modified_base 66: mod_base = OTHER; note = 2'-O-methyl modified nucleotide
  modified_base 67: mod_base = OTHER; note = 2'-O-methyl modified nucleotide
  modified_base 68: mod_base = OTHER; note = 2'-O-methyl modified nucleotide
  modified_base 69: mod_base = OTHER; note = 2'-O-methyl modified nucleotide
  modified_base 70: mod_base = OTHER; note = 2'-O-methyl modified nucleotide
  modified_base 75: mod_base = OTHER; note = 2'-O-methyl modified nucleotide
  modified_base 77: mod_base = OTHER; note = 2'-O-methyl modified nucleotide
  modified_base 80: mod_base = OTHER; note = 2'-O-methyl modified nucleotide
  modified_base 86: mod_base = OTHER; note = 2'-O-methyl modified nucleotide
  modified_base 87: mod_base = OTHER; note = 2'-O-methyl modified nucleotide
  modified_base 89: mod_base = OTHER; note = 2'-O-methyl modified nucleotide
  modified_base 90: mod_base = OTHER; note = 2'-O-methyl modified nucleotide
  modified_base 91: mod_base = OTHER; note = 2'-O-methyl modified nucleotide
  modified_base 92: mod_base = OTHER; note = 2'-O-methyl modified nucleotide
  modified_base 99: mod_base = OTHER; note = nucleotide with phosphorothioate linkage
  modified_base 100: mod_base = OTHER; note = 2'-O-methyl modified nucleotide with phosphorothioate linkage
  modified_base 101: mod_base = OTHER; note = 2'-O-methyl modified nucleotide

SEQ ID NO: 2700 - RNA, 101 nt, synthetic construct; identical to SEQ ID NO: 1700
  source 1..101: mol_type = other RNA
  modified_base 1: mod_base = OTHER; note = 2'-O-methyl modified nucleotide with phosphorothioate linkage
  modified_base 2: mod_base = OTHER; note = 2'-O-methyl modified nucleotide with phosphorothioate linkage
  modified_base 3: mod_base = OTHER; note = 2'-O-methyl modified nucleotide with phosphorothioate linkage
  modified_base 4: mod_base = OTHER; note = 2'-O-methyl modified nucleotide
  modified_base 5: mod_base = OTHER; note = 2'-O-methyl modified nucleotide
  modified_base 8: mod_base = OTHER; note = 2'-O-methyl modified nucleotide
  modified_base 9: mod_base = OTHER; note = 2'-O-methyl modified nucleotide
  modified_base 11: mod_base = OTHER; note = 2'-O-methyl modified nucleotide
  modified_base 13: mod_base = OTHER; note = 2'-O-methyl modified nucleotide
  modified_base 18: mod_base = OTHER; note = 2'-O-methyl modified nucleotide
  modified_base 22: mod_base = OTHER; note = 2'-O-methyl modified nucleotide
  modified_base 25: mod_base = OTHER; note = 2'-O-methyl modified nucleotide
  modified_base 29: mod_base = OTHER; note = 2'-O-methyl modified nucleotide
  modified_base 30: mod_base = OTHER; note = 2'-O-methyl modified nucleotide
  modified_base 31: mod_base = OTHER; note = 2'-O-methyl modified nucleotide
  modified_base 32: mod_base = OTHER; note = 2'-O-methyl modified nucleotide
  modified_base 37: mod_base = OTHER; note = 2'-O-methyl modified nucleotide
  modified_base 38: mod_base = OTHER; note = 2'-O-methyl modified nucleotide
  modified_base 39: mod_base = OTHER; note = 2'-O-methyl modified nucleotide
  modified_base 40: mod_base = OTHER; note = 2'-O-methyl modified nucleotide
  modified_base 41: mod_base = OTHER; note = 2'-O-methyl modified nucleotide
  modified_base 42: mod_base = OTHER; note = 2'-O-methyl modified nucleotide
  modified_base 43: mod_base = OTHER; note = 2'-O-methyl modified nucleotide
  modified_base 47: mod_base = OTHER; note = 2'-O-methyl modified nucleotide
  modified_base 48: mod_base = OTHER; note = 2'-O-methyl modified nucleotide
  modified_base 51: mod_base = OTHER; note = 2'-O-methyl modified nucleotide
  modified_base 54: mod_base = OTHER; note = nucleotide with phosphorothioate linkage
  modified_base 58: mod_base = OTHER; note = 2'-O-methyl modified nucleotide
  modified_base 59: mod_base = OTHER; note = 2'-O-methyl modified nucleotide
  modified_base 61: mod_base = OTHER; note = 2'-O-methyl modified nucleotide
  modified_base 62: mod_base = OTHER; note = 2'-O-methyl modified nucleotide
  modified_base 63: mod_base = OTHER; note = 2'-O-methyl modified nucleotide
  modified_base 64: mod_base = OTHER; note = 2'-O-methyl modified nucleotide
  modified_base 65: mod_base = OTHER; note = 2'-O-methyl modified nucleotide
  modified_base 66: mod_base = OTHER; note = 2'-O-methyl modified nucleotide
  modified_base 67: mod_base = OTHER; note = 2'-O-methyl modified nucleotide
  modified_base 68: mod_base = OTHER; note = 2'-O-methyl modified nucleotide
  modified_base 69: mod_base = OTHER; note = 2'-O-methyl modified nucleotide
  modified_base 70: mod_base = OTHER; note = 2'-O-methyl modified nucleotide
  modified_base 75: mod_base = OTHER; note = 2'-O-methyl modified nucleotide
  modified_base 77: mod_base = OTHER; note = 2'-O-methyl modified nucleotide
  modified_base 80: mod_base = OTHER; note = 2'-O-methyl modified nucleotide
  modified_base 86: mod_base = OTHER; note = 2'-O-methyl modified nucleotide
  modified_base 87: mod_base = OTHER; note = 2'-O-methyl modified nucleotide
  modified_base 89: mod_base = OTHER; note = 2'-O-methyl modified nucleotide
  modified_base 90: mod_base = OTHER; note = 2'-O-methyl modified nucleotide
  modified_base 91: mod_base = OTHER; note = 2'-O-methyl modified nucleotide
  modified_base 92: mod_base = OTHER; note = 2'-O-methyl modified nucleotide
  modified_base 99: mod_base = OTHER; note = nucleotide with phosphorothioate linkage
  modified_base 100: mod_base = OTHER; note = 2'-O-methyl modified nucleotide with phosphorothioate linkage
  modified_base 101: mod_base = OTHER; note = 2'-O-methyl modified nucleotide

SEQ ID NO: 2701 - RNA, 101 nt, synthetic construct; identical to SEQ ID NO: 1701
  source 1..101: mol_type = other RNA
  modified_base 1: mod_base = OTHER; note = 2'-O-methyl modified nucleotide with phosphorothioate linkage
  modified_base 2: mod_base = OTHER; note = 2'-O-methyl modified nucleotide with phosphorothioate linkage
  modified_base 3: mod_base = OTHER; note = 2'-O-methyl modified nucleotide with phosphorothioate linkage
  modified_base 4: mod_base = OTHER; note = 2'-O-methyl modified nucleotide
  modified_base 5: mod_base = OTHER; note = 2'-O-methyl modified nucleotide
  modified_base 8: mod_base = OTHER; note = 2'-O-methyl modified nucleotide
  modified_base 9: mod_base = OTHER; note = 2'-O-methyl modified nucleotide
  modified_base 11: mod_base = OTHER; note = 2'-O-methyl modified nucleotide
  modified_base 13: mod_base = OTHER; note = 2'-O-methyl modified nucleotide
  modified_base 18: mod_base = OTHER; note = 2'-O-methyl modified nucleotide
  modified_base 22: mod_base = OTHER; note = 2'-O-methyl modified nucleotide
  modified_base 25: mod_base = OTHER; note = 2'-O-methyl modified nucleotide
  modified_base 29: mod_base = OTHER; note = 2'-O-methyl modified nucleotide
  modified_base 30: mod_base = OTHER; note = 2'-O-methyl modified nucleotide
  modified_base 31: mod_base = OTHER; note = 2'-O-methyl modified nucleotide
  modified_base 32: mod_base = OTHER; note = 2'-O-methyl modified nucleotide
  modified_base 37: mod_base = OTHER; note = 2'-O-methyl modified nucleotide
  modified_base 38: mod_base = OTHER; note = 2'-O-methyl modified nucleotide
  modified_base 39: mod_base = OTHER; note = 2'-O-methyl modified nucleotide
  modified_base 40: mod_base = OTHER; note = 2'-O-methyl modified nucleotide
  modified_base 41: mod_base = OTHER; note = 2'-O-methyl modified nucleotide
  modified_base 42: mod_base = OTHER; note = 2'-O-methyl modified nucleotide
  modified_base 43: mod_base = OTHER; note = 2'-O-methyl modified nucleotide
  modified_base 47: mod_base = OTHER; note = 2'-O-methyl modified nucleotide
  modified_base 48: mod_base = OTHER; note = 2'-O-methyl modified nucleotide
  modified_base 51: mod_base = OTHER; note = 2'-O-methyl modified nucleotide
  modified_base 54: mod_base = OTHER; note = nucleotide with phosphorothioate linkage
  modified_base 58: mod_base = OTHER; note = 2'-O-methyl modified nucleotide
  modified_base 59: mod_base = OTHER; note = 2'-O-methyl modified nucleotide
  modified_base 61: mod_base = OTHER; note = 2'-O-methyl modified nucleotide
  modified_base 62: mod_base = OTHER; note = 2'-O-methyl modified nucleotide
  modified_base 63: mod_base = OTHER; note = 2'-O-methyl modified nucleotide
  modified_base 64: mod_base = OTHER; note = 2'-O-methyl modified nucleotide
  modified_base 65: mod_base = OTHER; note = 2'-O-methyl modified nucleotide
  modified_base 66: mod_base = OTHER; note = 2'-O-methyl modified nucleotide
  modified_base 67: mod_base = OTHER; note = 2'-O-methyl modified nucleotide
  modified_base 68: mod_base = OTHER; note = 2'-O-methyl modified nucleotide
  modified_base 69: mod_base = OTHER; note = 2'-O-methyl modified nucleotide
  modified_base 70: mod_base = OTHER; note = 2'-O-methyl modified nucleotide
  modified_base 75: mod_base = OTHER; note = 2'-O-methyl modified nucleotide
  modified_base 77: mod_base = OTHER; note = 2'-O-methyl modified nucleotide
  modified_base 80: mod_base = OTHER; note = 2'-O-methyl modified nucleotide
  modified_base 86: mod_base = OTHER; note = 2'-O-methyl modified nucleotide
  modified_base 87: mod_base = OTHER; note = 2'-O-methyl modified nucleotide
  modified_base 89: mod_base = OTHER; note = 2'-O-methyl modified nucleotide
  modified_base 90: mod_base = OTHER; note = 2'-O-methyl modified nucleotide
  modified_base 91: mod_base = OTHER; note = 2'-O-methyl modified nucleotide
  modified_base 92: mod_base = OTHER; note = 2'-O-methyl modified nucleotide
  modified_base 99: mod_base = OTHER; note = nucleotide with phosphorothioate linkage
  modified_base 100: mod_base = OTHER; note = 2'-O-methyl modified nucleotide with phosphorothioate linkage
  modified_base 101: mod_base = OTHER; note = 2'-O-methyl modified nucleotide

SEQ ID NO: 2702 - RNA, 101 nt, synthetic construct; identical to SEQ ID NO: 1702
  source 1..101: mol_type = other RNA
  modified_base 1: mod_base = OTHER; note = 2'-O-methyl modified nucleotide with phosphorothioate linkage
  modified_base 2: mod_base = OTHER; note = 2'-O-methyl modified nucleotide with phosphorothioate linkage
  modified_base 3: mod_base = OTHER; note = 2'-O-methyl modified nucleotide with phosphorothioate linkage
  modified_base 4: mod_base = OTHER; note = 2'-O-methyl modified nucleotide
  modified_base 5: mod_base = OTHER; note = 2'-O-methyl modified nucleotide
  modified_base 8: mod_base = OTHER; note = 2'-O-methyl modified nucleotide
  modified_base 9: mod_base = OTHER; note = 2'-O-methyl modified nucleotide
  modified_base 11: mod_base = OTHER; note = 2'-O-methyl modified nucleotide
  modified_base 13: mod_base = OTHER; note = 2'-O-methyl modified nucleotide
  modified_base 18: mod_base = OTHER; note = 2'-O-methyl modified nucleotide
  modified_base 22: mod_base = OTHER; note = 2'-O-methyl modified nucleotide
  modified_base 25: mod_base = OTHER; note = 2'-O-methyl modified nucleotide
  modified_base 29: mod_base = OTHER; note = 2'-O-methyl modified nucleotide
  modified_base 30: mod_base = OTHER; note = 2'-O-methyl modified nucleotide
  modified_base 31: mod_base = OTHER; note = 2'-O-methyl modified nucleotide
  modified_base 32: mod_base = OTHER; note = 2'-O-methyl modified nucleotide
  modified_base 37: mod_base = OTHER; note = 2'-O-methyl modified nucleotide
  modified_base 38: mod_base = OTHER; note = 2'-O-methyl modified nucleotide
  modified_base 39: mod_base = OTHER; note = 2'-O-methyl modified nucleotide
  modified_base 40: mod_base = OTHER; note = 2'-O-methyl modified nucleotide
  modified_base 41: mod_base = OTHER; note = 2'-O-methyl modified nucleotide
  modified_base 42: mod_base = OTHER; note = 2'-O-methyl modified nucleotide
  modified_base 43: mod_base = OTHER; note = 2'-O-methyl modified nucleotide
  modified_base 47: mod_base = OTHER; note = 2'-O-methyl modified nucleotide
  modified_base 48: mod_base = OTHER; note = 2'-O-methyl modified nucleotide
  modified_base 51: mod_base = OTHER; note = 2'-O-methyl modified nucleotide
  modified_base 54: mod_base = OTHER; note = nucleotide with phosphorothioate linkage
  modified_base 58: mod_base = OTHER; note = 2'-O-methyl modified nucleotide
  modified_base 59: mod_base = OTHER; note = 2'-O-methyl modified nucleotide
  modified_base 61: mod_base = OTHER; note = 2'-O-methyl modified nucleotide
  modified_base 62: mod_base = OTHER; note = 2'-O-methyl modified nucleotide
  modified_base 63: mod_base = OTHER; note = 2'-O-methyl modified nucleotide
  modified_base 64: mod_base = OTHER; note = 2'-O-methyl modified nucleotide
  modified_base 65: mod_base = OTHER; note = 2'-O-methyl modified nucleotide
  modified_base 66: mod_base = OTHER; note = 2'-O-methyl modified nucleotide
  modified_base 67: mod_base = OTHER; note = 2'-O-methyl modified nucleotide
  modified_base 68: mod_base = OTHER; note = 2'-O-methyl modified nucleotide
  modified_base 69: mod_base = OTHER; note = 2'-O-methyl modified nucleotide
  modified_base 70: mod_base = OTHER; note = 2'-O-methyl modified nucleotide
  modified_base 75: mod_base = OTHER; note = 2'-O-methyl modified nucleotide
  modified_base 77: mod_base = OTHER; note = 2'-O-methyl modified nucleotide
  modified_base 80: mod_base = OTHER; note = 2'-O-methyl modified nucleotide
  modified_base 86: mod_base = OTHER; note = 2'-O-methyl modified nucleotide
  modified_base 87: mod_base = OTHER; note = 2'-O-methyl modified nucleotide
  modified_base 89: mod_base = OTHER; note = 2'-O-methyl modified nucleotide
  modified_base 90: mod_base = OTHER; note = 2'-O-methyl modified nucleotide
  modified_base 91: mod_base = OTHER; note = 2'-O-methyl modified nucleotide
  modified_base 92: mod_base = OTHER; note = 2'-O-methyl modified nucleotide
  modified_base 99: mod_base = OTHER; note = nucleotide with phosphorothioate linkage
  modified_base 100: mod_base = OTHER; note = 2'-O-methyl modified nucleotide with phosphorothioate linkage
  modified_base 101: mod_base = OTHER; note = 2'-O-methyl modified nucleotide

SEQ ID NO: 2703 - RNA, 101 nt, synthetic construct; identical to SEQ ID NO: 1703
  source 1..101: mol_type = other RNA
  modified_base 1: mod_base = OTHER; note = 2'-O-methyl modified nucleotide with phosphorothioate linkage
  modified_base 2: mod_base = OTHER; note = 2'-O-methyl modified nucleotide with phosphorothioate linkage
  modified_base 3: mod_base = OTHER; note = 2'-O-methyl modified nucleotide with phosphorothioate linkage
  modified_base 4: mod_base = OTHER; note = 2'-O-methyl modified nucleotide
  modified_base 5: mod_base = OTHER; note = 2'-O-methyl modified nucleotide
  modified_base 8: mod_base = OTHER; note = 2'-O-methyl modified nucleotide
  modified_base 9: mod_base = OTHER; note = 2'-O-methyl modified nucleotide
  modified_base 11: mod_base = OTHER; note = 2'-O-methyl modified nucleotide
  modified_base 13: mod_base = OTHER; note = 2'-O-methyl modified nucleotide
  modified_base 18: mod_base = OTHER; note = 2'-O-methyl modified nucleotide
  modified_base 22: mod_base = OTHER; note = 2'-O-methyl modified nucleotide
  modified_base 25: mod_base = OTHER; note = 2'-O-methyl modified nucleotide
  modified_base 29: mod_base = OTHER; note = 2'-O-methyl modified nucleotide
  modified_base 30: mod_base = OTHER; note = 2'-O-methyl modified nucleotide
  modified_base 31: mod_base = OTHER; note = 2'-O-methyl modified nucleotide
  modified_base 32: mod_base = OTHER; note = 2'-O-methyl modified nucleotide
  modified_base 37: mod_base = OTHER; note = 2'-O-methyl modified nucleotide
  modified_base 38: mod_base = OTHER; note = 2'-O-methyl modified nucleotide
  modified_base 39: mod_base = OTHER; note = 2'-O-methyl modified nucleotide
  modified_base 40: mod_base = OTHER; note = 2'-O-methyl modified nucleotide
  modified_base 41: mod_base = OTHER; note = 2'-O-methyl modified nucleotide
  modified_base 42: mod_base = OTHER; note = 2'-O-methyl modified nucleotide
  modified_base 43: mod_base = OTHER; note = 2'-O-methyl modified nucleotide
  modified_base 47: mod_base = OTHER; note = 2'-O-methyl modified nucleotide
  modified_base 48: mod_base = OTHER; note = 2'-O-methyl modified nucleotide
  modified_base 51: mod_base = OTHER; note = 2'-O-methyl modified nucleotide
  modified_base 54: mod_base = OTHER; note = nucleotide with phosphorothioate linkage
  modified_base 58: mod_base = OTHER; note = 2'-O-methyl modified nucleotide
  modified_base 59: mod_base = OTHER; note = 2'-O-methyl modified nucleotide
  modified_base 61: mod_base = OTHER; note = 2'-O-methyl modified nucleotide
  modified_base 62: mod_base = OTHER; note = 2'-O-methyl modified nucleotide
  modified_base 63: mod_base = OTHER; note = 2'-O-methyl modified nucleotide
  modified_base 64: mod_base = OTHER; note = 2'-O-methyl modified nucleotide
  modified_base 65: mod_base = OTHER; note = 2'-O-methyl modified nucleotide
  modified_base 66: mod_base = OTHER; note = 2'-O-methyl modified nucleotide
  modified_base 67: mod_base = OTHER; note = 2'-O-methyl modified nucleotide
  modified_base 68: mod_base = OTHER; note = 2'-O-methyl modified nucleotide
  modified_base 69: mod_base = OTHER; note = 2'-O-methyl modified nucleotide
  modified_base 70: mod_base = OTHER; note = 2'-O-methyl modified nucleotide
  modified_base 75: mod_base = OTHER; note = 2'-O-methyl modified nucleotide
  modified_base 77: mod_base = OTHER; note = 2'-O-methyl modified nucleotide
  modified_base 80: mod_base = OTHER; note = 2'-O-methyl modified nucleotide
  modified_base 86: mod_base = OTHER; note = 2'-O-methyl modified nucleotide
  modified_base 87: mod_base = OTHER; note = 2'-O-methyl modified nucleotide
  modified_base 89: mod_base = OTHER; note = 2'-O-methyl modified nucleotide
  modified_base 90: mod_base = OTHER; note = 2'-O-methyl modified nucleotide
  modified_base 91: mod_base = OTHER; note = 2'-O-methyl modified nucleotide
  modified_base 92: mod_base = OTHER; note = 2'-O-methyl modified nucleotide
  modified_base 99: mod_base = OTHER; note = nucleotide with phosphorothioate linkage
  modified_base 100: mod_base = OTHER; note = 2'-O-methyl modified nucleotide with phosphorothioate linkage
  modified_base 101: mod_base = OTHER; note = 2'-O-methyl modified nucleotide

SEQ ID NO: 2704 - RNA, 101 nt, synthetic construct; identical to SEQ ID NO: 1704
  source 1..101: mol_type = other RNA
  modified_base 1: mod_base = OTHER; note = 2'-O-methyl modified nucleotide with phosphorothioate linkage
  modified_base 2: mod_base = OTHER; note = 2'-O-methyl modified nucleotide with phosphorothioate linkage
  modified_base 3: mod_base = OTHER; note = 2'-O-methyl modified nucleotide with phosphorothioate linkage
  modified_base 4: mod_base = OTHER; note = 2'-O-methyl modified nucleotide
  modified_base 5: mod_base = OTHER; note = 2'-O-methyl modified nucleotide
  modified_base 8: mod_base = OTHER; note = 2'-O-methyl modified nucleotide
  modified_base 9: mod_base = OTHER; note = 2'-O-methyl modified nucleotide
  modified_base 11: mod_base = OTHER; note = 2'-O-methyl modified nucleotide
  modified_base 13: mod_base = OTHER; note = 2'-O-methyl modified nucleotide
  modified_base 18: mod_base = OTHER; note = 2'-O-methyl modified nucleotide
  modified_base 22: mod_base = OTHER; note = 2'-O-methyl modified nucleotide
  modified_base 25: mod_base = OTHER; note = 2'-O-methyl modified nucleotide
  modified_base 29: mod_base = OTHER; note = 2'-O-methyl modified nucleotide
  modified_base 30: mod_base = OTHER; note = 2'-O-methyl modified nucleotide
  modified_base 31: mod_base = OTHER; note = 2'-O-methyl modified nucleotide
  modified_base 32: mod_base = OTHER; note = 2'-O-methyl modified nucleotide
  modified_base 37: mod_base = OTHER; note = 2'-O-methyl modified nucleotide
  modified_base 38: mod_base = OTHER; note = 2'-O-methyl modified nucleotide
  modified_base 39: mod_base = OTHER; note = 2'-O-methyl modified nucleotide
  modified_base 40: mod_base = OTHER; note = 2'-O-methyl modified nucleotide
  modified_base 41: mod_base = OTHER; note = 2'-O-methyl modified nucleotide
  modified_base 42: mod_base = OTHER; note = 2'-O-methyl modified nucleotide
  modified_base 43: mod_base = OTHER; note = 2'-O-methyl modified nucleotide
  modified_base 47: mod_base = OTHER; note = 2'-O-methyl modified nucleotide
  modified_base 48: mod_base = OTHER; note = 2'-O-methyl modified nucleotide
  modified_base 51: mod_base = OTHER; note = 2'-O-methyl modified nucleotide
  modified_base 54: mod_base = OTHER; note = nucleotide with phosphorothioate linkage
  modified_base 58: mod_base = OTHER; note = 2'-O-methyl modified nucleotide
  modified_base 59: mod_base = OTHER; note = 2'-O-methyl modified nucleotide
  modified_base 61: mod_base = OTHER; note = 2'-O-methyl modified nucleotide
  modified_base 62: mod_base = OTHER; note = 2'-O-methyl modified nucleotide
  modified_base 63: mod_base = OTHER; note = 2'-O-methyl modified nucleotide
  modified_base 64: mod_base = OTHER; note = 2'-O-methyl modified nucleotide
  modified_base 65: mod_base = OTHER; note = 2'-O-methyl modified nucleotide
  modified_base 66: mod_base = OTHER; note = 2'-O-methyl modified nucleotide
  modified_base 67: mod_base = OTHER; note = 2'-O-methyl modified nucleotide
  modified_base 68: mod_base = OTHER; note = 2'-O-methyl modified nucleotide
  modified_base 69: mod_base = OTHER; note = 2'-O-methyl modified nucleotide
  modified_base 70: mod_base = OTHER; note = 2'-O-methyl modified nucleotide
  modified_base 75: mod_base = OTHER; note = 2'-O-methyl modified nucleotide
  modified_base 77: mod_base = OTHER; note = 2'-O-methyl modified nucleotide
  modified_base 80: mod_base = OTHER; note = 2'-O-methyl modified nucleotide
  modified_base 86: mod_base = OTHER; note = 2'-O-methyl modified nucleotide
  modified_base 87: mod_base = OTHER; note = 2'-O-methyl modified nucleotide
  modified_base 89: mod_base = OTHER; note = 2'-O-methyl modified nucleotide
  modified_base 90: mod_base = OTHER; note = 2'-O-methyl modified nucleotide
  modified_base 91: mod_base = OTHER; note = 2'-O-methyl modified nucleotide
  modified_base 92: mod_base = OTHER; note = 2'-O-methyl modified nucleotide
  modified_base 99: mod_base = OTHER; note = nucleotide with phosphorothioate linkage
  modified_base 100: mod_base = OTHER; note = 2'-O-methyl modified nucleotide with phosphorothioate linkage
  modified_base 101: mod_base = OTHER; note = 2'-O-methyl modified nucleotide

SEQ ID NO: 2705 - RNA, 101 nt, synthetic construct; identical to SEQ ID NO: 1705
  source 1..101: mol_type = other RNA
  modified_base 1: mod_base = OTHER; note = 2'-O-methyl modified nucleotide with phosphorothioate linkage
  modified_base 2: mod_base = OTHER; note = 2'-O-methyl modified nucleotide with phosphorothioate linkage
  modified_base 3: mod_base = OTHER; note = 2'-O-methyl modified nucleotide with phosphorothioate linkage
  modified_base 4: mod_base = OTHER; note = 2'-O-methyl modified nucleotide
  modified_base 5: mod_base = OTHER; note = 2'-O-methyl modified nucleotide
  modified_base 8: mod_base = OTHER; note = 2'-O-methyl modified nucleotide
  modified_base 9: mod_base = OTHER; note = 2'-O-methyl modified nucleotide
  modified_base 11: mod_base = OTHER; note = 2'-O-methyl modified nucleotide
  modified_base 13: mod_base = OTHER; note = 2'-O-methyl modified nucleotide
  modified_base 18: mod_base = OTHER; note = 2'-O-methyl modified nucleotide
  modified_base 22: mod_base = OTHER; note = 2'-O-methyl modified nucleotide
  modified_base 25: mod_base = OTHER; note = 2'-O-methyl modified nucleotide
  modified_base 29: mod_base = OTHER; note = 2'-O-methyl modified nucleotide
  modified_base 30: mod_base = OTHER; note = 2'-O-methyl modified nucleotide
  modified_base 31: mod_base = OTHER; note = 2'-O-methyl modified nucleotide
  modified_base 32: mod_base = OTHER; note = 2'-O-methyl modified nucleotide
  modified_base 37: mod_base = OTHER; note = 2'-O-methyl modified nucleotide
  modified_base 38: mod_base = OTHER; note = 2'-O-methyl modified nucleotide
  modified_base 39: mod_base = OTHER; note = 2'-O-methyl modified nucleotide
  modified_base 40: mod_base = OTHER; note = 2'-O-methyl modified nucleotide
  modified_base 41: mod_base = OTHER; note = 2'-O-methyl modified nucleotide
  modified_base 42: mod_base = OTHER; note = 2'-O-methyl modified nucleotide
  modified_base 43: mod_base = OTHER; note = 2'-O-methyl modified nucleotide
  modified_base 47: mod_base = OTHER; note = 2'-O-methyl modified nucleotide
  modified_base 48: mod_base = OTHER; note = 2'-O-methyl modified nucleotide
  modified_base 51: mod_base = OTHER; note = 2'-O-methyl modified nucleotide
  modified_base 54: mod_base = OTHER; note = nucleotide with phosphorothioate linkage
  modified_base 58: mod_base = OTHER; note = 2'-O-methyl modified nucleotide
  modified_base 59: mod_base = OTHER; note = 2'-O-methyl modified nucleotide
  modified_base 61: mod_base = OTHER; note = 2'-O-methyl modified nucleotide
  modified_base 62: mod_base = OTHER; note = 2'-O-methyl modified nucleotide
  modified_base 63: mod_base = OTHER; note = 2'-O-methyl modified nucleotide
  modified_base 64: mod_base = OTHER; note = 2'-O-methyl modified nucleotide
  modified_base 65: mod_base = OTHER; note = 2'-O-methyl modified nucleotide
  modified_base 66: mod_base = OTHER; note = 2'-O-methyl modified nucleotide
  modified_base 67: mod_base = OTHER; note = 2'-O-methyl modified nucleotide
  modified_base 68: mod_base = OTHER; note = 2'-O-methyl modified nucleotide
  modified_base 69: mod_base = OTHER; note = 2'-O-methyl modified nucleotide
  modified_base 70: mod_base = OTHER; note = 2'-O-methyl modified nucleotide
  modified_base 75: mod_base = OTHER; note = 2'-O-methyl modified nucleotide
  modified_base 77: mod_base = OTHER; note = 2'-O-methyl modified nucleotide
  modified_base 80: mod_base = OTHER; note = 2'-O-methyl modified nucleotide
  modified_base 86: mod_base = OTHER; note = 2'-O-methyl modified nucleotide
  modified_base 87: mod_base = OTHER; note = 2'-O-methyl modified nucleotide
  modified_base 89: mod_base = OTHER; note = 2'-O-methyl modified nucleotide
  modified_base 90: mod_base = OTHER; note = 2'-O-methyl modified nucleotide
  modified_base 91: mod_base = OTHER; note = 2'-O-methyl modified nucleotide
  modified_base 92: mod_base = OTHER; note = 2'-O-methyl modified nucleotide
  modified_base 99: mod_base = OTHER; note = nucleotide with phosphorothioate linkage
  modified_base 100: mod_base = OTHER; note = 2'-O-methyl modified nucleotide with phosphorothioate linkage
  modified_base 101: mod_base = OTHER; note = 2'-O-methyl modified nucleotide

SEQ ID NO: 2706 - RNA, 101 nt, synthetic construct; identical to SEQ ID NO: 1706
  source 1..101: mol_type = other RNA
  modified_base 1: mod_base = OTHER; note = 2'-O-methyl modified nucleotide with phosphorothioate linkage
  modified_base 2: mod_base = OTHER; note = 2'-O-methyl modified nucleotide with phosphorothioate linkage
  modified_base 3: mod_base = OTHER; note = 2'-O-methyl modified nucleotide with phosphorothioate linkage
  modified_base 4: mod_base = OTHER; note = 2'-O-methyl modified nucleotide
  modified_base 5: mod_base = OTHER; note = 2'-O-methyl modified nucleotide
  modified_base 8: mod_base = OTHER; note = 2'-O-methyl modified nucleotide
  modified_base 9: mod_base = OTHER; note = 2'-O-methyl modified nucleotide
  modified_base 11: mod_base = OTHER; note = 2'-O-methyl modified nucleotide
  modified_base 13: mod_base = OTHER; note = 2'-O-methyl modified nucleotide
  modified_base 18: mod_base = OTHER; note = 2'-O-methyl modified nucleotide
  modified_base 22: mod_base = OTHER; note = 2'-O-methyl modified nucleotide
  modified_base 25: mod_base = OTHER; note = 2'-O-methyl modified nucleotide
  modified_base 29: mod_base = OTHER; note = 2'-O-methyl modified nucleotide
  modified_base 30: mod_base = OTHER; note = 2'-O-methyl modified nucleotide
  modified_base 31: mod_base = OTHER; note = 2'-O-methyl modified nucleotide
  modified_base 32: mod_base = OTHER; note = 2'-O-methyl modified nucleotide
  modified_base 37: mod_base = OTHER; note = 2'-O-methyl modified nucleotide
  modified_base 38: mod_base = OTHER; note = 2'-O-methyl modified nucleotide
  modified_base 39: mod_base = OTHER; note = 2'-O-methyl modified nucleotide
  modified_base 40: mod_base = OTHER; note = 2'-O-methyl modified nucleotide
  modified_base 41: mod_base = OTHER; note = 2'-O-methyl modified nucleotide
  modified_base 42: mod_base = OTHER; note = 2'-O-methyl modified nucleotide
  modified_base 43: mod_base = OTHER; note = 2'-O-methyl modified nucleotide
  modified_base 47: mod_base = OTHER; note = 2'-O-methyl modified nucleotide
  modified_base 48: mod_base = OTHER; note = 2'-O-methyl modified nucleotide
  modified_base 51: mod_base = OTHER; note = 2'-O-methyl modified nucleotide
  modified_base 54: mod_base = OTHER; note = nucleotide with phosphorothioate linkage
  modified_base 58: mod_base = OTHER; note = 2'-O-methyl modified nucleotide
  modified_base 59: mod_base = OTHER; note = 2'-O-methyl modified nucleotide
  modified_base 61: mod_base = OTHER; note = 2'-O-methyl modified nucleotide
  modified_base 62: mod_base = OTHER; note = 2'-O-methyl modified nucleotide
  modified_base 63: mod_base = OTHER; note = 2'-O-methyl modified nucleotide
  modified_base 64: mod_base = OTHER; note = 2'-O-methyl modified nucleotide
  modified_base 65: mod_base = OTHER; note = 2'-O-methyl modified nucleotide
  modified_base 66: mod_base = OTHER; note = 2'-O-methyl modified nucleotide
  modified_base 67: mod_base = OTHER; note = 2'-O-methyl modified nucleotide
  modified_base 68: mod_base = OTHER; note = 2'-O-methyl modified nucleotide
  modified_base 69: mod_base = OTHER; note = 2'-O-methyl modified nucleotide
  modified_base 70: mod_base = OTHER; note = 2'-O-methyl modified nucleotide
  modified_base 75: mod_base = OTHER; note = 2'-O-methyl modified nucleotide
  modified_base 77: mod_base = OTHER; note = 2'-O-methyl modified nucleotide
  modified_base 80: mod_base = OTHER; note = 2'-O-methyl modified nucleotide
  modified_base 86: mod_base = OTHER; note = 2'-O-methyl modified nucleotide
  modified_base 87: mod_base = OTHER; note = 2'-O-methyl modified nucleotide
  modified_base 89: mod_base = OTHER; note = 2'-O-methyl modified nucleotide
  modified_base 90: mod_base = OTHER; note = 2'-O-methyl modified nucleotide
  modified_base 91: mod_base = OTHER; note = 2'-O-methyl modified nucleotide
  modified_base 92: mod_base = OTHER; note = 2'-O-methyl modified nucleotide
  modified_base 99: mod_base = OTHER; note = nucleotide with phosphorothioate linkage
  modified_base 100: mod_base = OTHER; note = 2'-O-methyl modified nucleotide with phosphorothioate linkage
  modified_base 101: mod_base = OTHER; note = 2'-O-methyl modified nucleotide

SEQ ID NO: 2707 - RNA, 101 nt, synthetic construct; identical to SEQ ID NO: 1707
  source 1..101: mol_type = other RNA
  modified_base 1: mod_base = OTHER; note = 2'-O-methyl modified nucleotide with phosphorothioate linkage
  modified_base 2: mod_base = OTHER; note = 2'-O-methyl modified nucleotide with phosphorothioate linkage
  modified_base 3: mod_base = OTHER; note = 2'-O-methyl modified nucleotide with phosphorothioate linkage
  modified_base 4: mod_base = OTHER; note = 2'-O-methyl modified nucleotide
  modified_base 5: mod_base = OTHER; note = 2'-O-methyl modified nucleotide
  modified_base 8: mod_base = OTHER; note = 2'-O-methyl modified nucleotide
  modified_base 9: mod_base = OTHER; note = 2'-O-methyl modified nucleotide
  modified_base 11: mod_base = OTHER; note = 2'-O-methyl modified nucleotide
  modified_base 13: mod_base = OTHER; note = 2'-O-methyl modified nucleotide
  modified_base 18: mod_base = OTHER; note = 2'-O-methyl modified nucleotide
  modified_base 22: mod_base = OTHER; note = 2'-O-methyl modified nucleotide
  modified_base 25: mod_base = OTHER; note = 2'-O-methyl modified nucleotide
  modified_base 29: mod_base = OTHER; note = 2'-O-methyl modified nucleotide
  modified_base 30: mod_base = OTHER; note = 2'-O-methyl modified nucleotide
  modified_base 31: mod_base = OTHER; note = 2'-O-methyl modified nucleotide
  modified_base 32: mod_base = OTHER; note = 2'-O-methyl modified nucleotide
  modified_base 37: mod_base = OTHER; note = 2'-O-methyl modified nucleotide
  modified_base 38: mod_base = OTHER; note = 2'-O-methyl modified nucleotide
  modified_base 39: mod_base = OTHER; note = 2'-O-methyl modified nucleotide
  modified_base 40: mod_base = OTHER; note = 2'-O-methyl modified nucleotide
  modified_base 41: mod_base = OTHER; note = 2'-O-methyl modified nucleotide
  modified_base 42: mod_base = OTHER; note = 2'-O-methyl modified nucleotide
  modified_base 43: mod_base = OTHER; note = 2'-O-methyl modified nucleotide
  modified_base 47: mod_base = OTHER; note = 2'-O-methyl modified nucleotide
  modified_base 48: mod_base = OTHER; note = 2'-O-methyl modified nucleotide
  modified_base 51: mod_base = OTHER; note = 2'-O-methyl modified nucleotide
  modified_base 54: mod_base = OTHER; note = nucleotide with phosphorothioate linkage
  modified_base 58: mod_base = OTHER; note = 2'-O-methyl modified nucleotide
  modified_base 59: mod_base = OTHER; note = 2'-O-methyl modified nucleotide
  modified_base 61: mod_base = OTHER; note = 2'-O-methyl modified nucleotide
  modified_base 62: mod_base = OTHER; note = 2'-O-methyl modified nucleotide
  modified_base 63: mod_base = OTHER; note = 2'-O-methyl modified nucleotide
  modified_base 64: mod_base = OTHER; note = 2'-O-methyl modified nucleotide
  modified_base 65: mod_base = OTHER; note = 2'-O-methyl modified nucleotide
  modified_base 66: mod_base = OTHER; note = 2'-O-methyl modified nucleotide
  modified_base 67: mod_base = OTHER; note = 2'-O-methyl modified nucleotide
  modified_base 68: mod_base = OTHER; note = 2'-O-methyl modified nucleotide
  modified_base 69: mod_base = OTHER; note = 2'-O-methyl modified nucleotide
  modified_base 70: mod_base = OTHER; note = 2'-O-methyl modified nucleotide
  modified_base 75: mod_base = OTHER; note = 2'-O-methyl modified nucleotide
  modified_base 77: mod_base = OTHER; note = 2'-O-methyl modified nucleotide
  modified_base 80: mod_base = OTHER; note = 2'-O-methyl modified nucleotide
  modified_base 86: mod_base = OTHER; note = 2'-O-methyl modified nucleotide
  modified_base 87: mod_base = OTHER; note = 2'-O-methyl modified nucleotide
  modified_base 89: mod_base = OTHER; note = 2'-O-methyl modified nucleotide
  modified_base 90: mod_base = OTHER; note = 2'-O-methyl modified nucleotide
  modified_base 91: mod_base = OTHER; note = 2'-O-methyl modified nucleotide
  modified_base 92: mod_base = OTHER; note = 2'-O-methyl modified nucleotide
  modified_base 99: mod_base = OTHER; note = nucleotide with phosphorothioate linkage
  modified_base 100: mod_base = OTHER; note = 2'-O-methyl modified nucleotide with phosphorothioate linkage
  modified_base 101: mod_base = OTHER; note = 2'-O-methyl modified nucleotide

SEQ ID NO: 2708 - RNA, 101 nt, synthetic construct; identical to SEQ ID NO: 1708
  source 1..101: mol_type = other RNA
  modified_base 1: mod_base = OTHER; note = 2'-O-methyl modified nucleotide with phosphorothioate linkage
  modified_base 2: mod_base = OTHER; note = 2'-O-methyl modified nucleotide with phosphorothioate linkage
  modified_base 3: mod_base = OTHER; note = 2'-O-methyl modified nucleotide with phosphorothioate linkage
  modified_base 4: mod_base = OTHER; note = 2'-O-methyl modified nucleotide
  modified_base 5: mod_base = OTHER; note = 2'-O-methyl modified nucleotide
  modified_base 8: mod_base = OTHER; note = 2'-O-methyl modified nucleotide
  modified_base 9: mod_base = OTHER; note = 2'-O-methyl modified nucleotide
  modified_base 11: mod_base = OTHER; note = 2'-O-methyl modified nucleotide
  modified_base 13: mod_base = OTHER; note = 2'-O-methyl modified nucleotide
  modified_base 18: mod_base = OTHER; note = 2'-O-methyl modified nucleotide
  modified_base 22: mod_base = OTHER; note = 2'-O-methyl modified nucleotide
  modified_base 25: mod_base = OTHER; note = 2'-O-methyl modified nucleotide
  modified_base 29: mod_base = OTHER; note = 2'-O-methyl modified nucleotide
  modified_base 30: mod_base = OTHER; note = 2'-O-methyl modified nucleotide
  modified_base 31: mod_base = OTHER; note = 2'-O-methyl modified nucleotide
  modified_base 32: mod_base = OTHER; note = 2'-O-methyl modified nucleotide
  modified_base 37: mod_base = OTHER; note = 2'-O-methyl modified nucleotide
  modified_base 38: mod_base = OTHER; note = 2'-O-methyl modified nucleotide
  modified_base 39: mod_base = OTHER; note = 2'-O-methyl modified nucleotide
  modified_base 40: mod_base = OTHER; note = 2'-O-methyl modified nucleotide
  modified_base 41: mod_base = OTHER; note = 2'-O-methyl modified nucleotide
  modified_base 42: mod_base = OTHER; note = 2'-O-methyl modified nucleotide
  modified_base 43: mod_base = OTHER; note = 2'-O-methyl modified nucleotide
  modified_base 47: mod_base = OTHER; note = 2'-O-methyl modified nucleotide
  modified_base 48: mod_base = OTHER; note = 2'-O-methyl modified nucleotide
  modified_base 51: mod_base = OTHER; note = 2'-O-methyl modified nucleotide
  modified_base 54: mod_base = OTHER; note = nucleotide with phosphorothioate linkage
  modified_base 58: mod_base = OTHER; note = 2'-O-methyl modified nucleotide
  modified_base 59: mod_base = OTHER; note = 2'-O-methyl modified nucleotide
  modified_base 61: mod_base = OTHER; note = 2'-O-methyl modified nucleotide
  modified_base 62: mod_base = OTHER; note = 2'-O-methyl modified nucleotide
  modified_base 63: mod_base = OTHER; note = 2'-O-methyl modified nucleotide
  modified_base 64: mod_base = OTHER; note = 2'-O-methyl modified nucleotide
  modified_base 65: mod_base = OTHER; note = 2'-O-methyl modified nucleotide
  modified_base 66: mod_base = OTHER; note = 2'-O-methyl modified nucleotide
  modified_base 67: mod_base = OTHER; note = 2'-O-methyl modified nucleotide
  modified_base 68: mod_base = OTHER; note = 2'-O-methyl modified nucleotide
  modified_base 69: mod_base = OTHER; note = 2'-O-methyl modified nucleotide
  modified_base 70: mod_base = OTHER; note = 2'-O-methyl modified nucleotide
  modified_base 75: mod_base = OTHER; note = 2'-O-methyl modified nucleotide
  modified_base 77: mod_base = OTHER; note = 2'-O-methyl modified nucleotide
  modified_base 80: mod_base = OTHER; note = 2'-O-methyl modified nucleotide
  modified_base 86: mod_base = OTHER; note = 2'-O-methyl modified nucleotide
  modified_base 87: mod_base = OTHER; note = 2'-O-methyl modified nucleotide
  modified_base 89: mod_base = OTHER; note = 2'-O-methyl modified nucleotide
  modified_base 90: mod_base = OTHER; note = 2'-O-methyl modified nucleotide
  modified_base 91: mod_base = OTHER; note = 2'-O-methyl modified nucleotide
  modified_base 92: mod_base = OTHER; note = 2'-O-methyl modified nucleotide
  modified_base 99: mod_base = OTHER; note = nucleotide with phosphorothioate linkage
  modified_base 100: mod_base = OTHER; note = 2'-O-methyl modified nucleotide with phosphorothioate linkage
  modified_base 101: mod_base = OTHER; note = 2'-O-methyl modified nucleotide

SEQ ID NO: 2709 - RNA, 101 nt, synthetic construct; identical to SEQ ID NO: 1709
  source 1..101: mol_type = other RNA
  modified_base 1: mod_base = OTHER; note = 2'-O-methyl modified nucleotide with phosphorothioate linkage
  modified_base 2: mod_base = OTHER; note = 2'-O-methyl modified nucleotide with phosphorothioate linkage
  modified_base 3: mod_base = OTHER; note = 2'-O-methyl modified nucleotide with phosphorothioate linkage
  modified_base 4: mod_base = OTHER; note = 2'-O-methyl modified nucleotide
  modified_base 5: mod_base = OTHER; note = 2'-O-methyl modified nucleotide
  modified_base 8: mod_base = OTHER; note = 2'-O-methyl modified nucleotide
  modified_base 9: mod_base = OTHER; note = 2'-O-methyl modified nucleotide
  modified_base 11: mod_base = OTHER; note = 2'-O-methyl modified nucleotide
  modified_base 13: mod_base = OTHER; note = 2'-O-methyl modified nucleotide
  modified_base 18: mod_base = OTHER; note = 2'-O-methyl modified nucleotide
  modified_base 22: mod_base = OTHER; note = 2'-O-methyl modified nucleotide
  modified_base 25: mod_base = OTHER; note = 2'-O-methyl modified nucleotide
  modified_base 29: mod_base = OTHER; note = 2'-O-methyl modified nucleotide
  modified_base 30: mod_base = OTHER; note = 2'-O-methyl modified nucleotide
  modified_base 31: mod_base = OTHER; note = 2'-O-methyl modified nucleotide
  modified_base 32: mod_base = OTHER; note = 2'-O-methyl modified nucleotide
  modified_base 37: mod_base = OTHER; note = 2'-O-methyl modified nucleotide
  modified_base 38: mod_base = OTHER; note = 2'-O-methyl modified nucleotide
  modified_base 39: mod_base = OTHER; note = 2'-O-methyl modified nucleotide
  modified_base 40: mod_base = OTHER; note = 2'-O-methyl modified nucleotide
  modified_base 41: mod_base = OTHER; note = 2'-O-methyl modified nucleotide
  modified_base 42: mod_base = OTHER; note = 2'-O-methyl modified nucleotide
  modified_base 43: mod_base = OTHER; note = 2'-O-methyl modified nucleotide
  modified_base 47: mod_base = OTHER; note = 2'-O-methyl modified nucleotide
  modified_base 48: mod_base = OTHER; note = 2'-O-methyl modified nucleotide
  modified_base 51: mod_base = OTHER; note = 2'-O-methyl modified nucleotide
  modified_base 54: mod_base = OTHER; note = nucleotide with phosphorothioate linkage
  modified_base 58: mod_base = OTHER; note = 2'-O-methyl modified nucleotide
  modified_base 59: mod_base = OTHER; note = 2'-O-methyl modified nucleotide
  modified_base 61: mod_base = OTHER; note = 2'-O-methyl modified nucleotide
  modified_base 62: mod_base = OTHER; note = 2'-O-methyl modified nucleotide
  modified_base 63: mod_base = OTHER; note = 2'-O-methyl modified nucleotide
  modified_base 64: mod_base = OTHER; note = 2'-O-methyl modified nucleotide
  modified_base 65: mod_base = OTHER; note = 2'-O-methyl modified nucleotide
  modified_base 66: mod_base = OTHER; note = 2'-O-methyl modified nucleotide
  modified_base 67: mod_base = OTHER; note = 2'-O-methyl modified nucleotide
  modified_base 68: mod_base = OTHER; note = 2'-O-methyl modified nucleotide
  modified_base 69: mod_base = OTHER; note = 2'-O-methyl modified nucleotide
  modified_base 70: mod_base = OTHER; note = 2'-O-methyl modified nucleotide
  modified_base 75: mod_base = OTHER; note = 2'-O-methyl modified nucleotide
  modified_base 77: mod_base = OTHER; note = 2'-O-methyl modified nucleotide
  modified_base 80: mod_base = OTHER; note = 2'-O-methyl modified nucleotide
  modified_base 86: mod_base = OTHER; note = 2'-O-methyl modified nucleotide
  modified_base 87: mod_base = OTHER; note = 2'-O-methyl modified nucleotide
  modified_base 89: mod_base = OTHER; note = 2'-O-methyl modified nucleotide
  modified_base 90: mod_base = OTHER; note = 2'-O-methyl modified nucleotide
  modified_base 91: mod_base = OTHER; note = 2'-O-methyl modified nucleotide
  modified_base 92: mod_base = OTHER; note = 2'-O-methyl modified nucleotide
  modified_base 99: mod_base = OTHER; note = nucleotide with phosphorothioate linkage
  modified_base 100: mod_base = OTHER; note = 2'-O-methyl modified nucleotide with phosphorothioate linkage
  modified_base 101: mod_base = OTHER; note = 2'-O-methyl modified nucleotide

SEQ ID NO: 2710 - RNA, 101 nt, synthetic construct; identical to SEQ ID NO: 1710
  source 1..101: mol_type = other RNA
  modified_base 1: mod_base = OTHER; note = 2'-O-methyl modified nucleotide with phosphorothioate linkage
  modified_base 2: mod_base = OTHER; note = 2'-O-methyl modified nucleotide with phosphorothioate linkage
  modified_base 3: mod_base = OTHER; note = 2'-O-methyl modified nucleotide with phosphorothioate linkage
  modified_base 4: mod_base = OTHER; note = 2'-O-methyl modified nucleotide
  modified_base 5: mod_base = OTHER; note = 2'-O-methyl modified nucleotide
  modified_base 8: mod_base = OTHER; note = 2'-O-methyl modified nucleotide
  modified_base 9: mod_base = OTHER; note = 2'-O-methyl modified nucleotide
  modified_base 11: mod_base = OTHER; note = 2'-O-methyl modified nucleotide
  modified_base 13: mod_base = OTHER; note = 2'-O-methyl modified nucleotide
  modified_base 18: mod_base = OTHER; note = 2'-O-methyl modified nucleotide
  modified_base 22: mod_base = OTHER; note = 2'-O-methyl modified nucleotide
  modified_base 25: mod_base = OTHER; note = 2'-O-methyl modified nucleotide
  modified_base 29: mod_base = OTHER; note = 2'-O-methyl modified nucleotide
  modified_base 30: mod_base = OTHER; note = 2'-O-methyl modified nucleotide
  modified_base 31: mod_base = OTHER; note = 2'-O-methyl modified nucleotide
  modified_base 32: mod_base = OTHER; note = 2'-O-methyl modified nucleotide
  modified_base 37: mod_base = OTHER; note = 2'-O-methyl modified nucleotide
  modified_base 38: mod_base = OTHER; note = 2'-O-methyl modified nucleotide
  modified_base 39: mod_base = OTHER; note = 2'-O-methyl modified nucleotide
  modified_base 40: mod_base = OTHER; note = 2'-O-methyl modified nucleotide
  modified_base 41: mod_base = OTHER; note = 2'-O-methyl modified nucleotide
  modified_base 42: mod_base = OTHER; note = 2'-O-methyl modified nucleotide
  modified_base 43: mod_base = OTHER; note = 2'-O-methyl modified nucleotide
  modified_base 47: mod_base = OTHER; note = 2'-O-methyl modified nucleotide
  modified_base 48: mod_base = OTHER; note = 2'-O-methyl modified nucleotide
  modified_base 51: mod_base = OTHER; note = 2'-O-methyl modified nucleotide
  modified_base 54: mod_base = OTHER; note = nucleotide with phosphorothioate linkage
  modified_base 58: mod_base = OTHER; note = 2'-O-methyl modified nucleotide
  modified_base 59: mod_base = OTHER; note = 2'-O-methyl modified nucleotide
  modified_base 61: mod_base = OTHER; note = 2'-O-methyl modified nucleotide
  modified_base 62: mod_base = OTHER; note = 2'-O-methyl modified nucleotide
  modified_base 63: mod_base = OTHER; note = 2'-O-methyl modified nucleotide
  modified_base 64: mod_base = OTHER; note = 2'-O-methyl modified nucleotide
  modified_base 65: mod_base = OTHER; note = 2'-O-methyl modified nucleotide
  modified_base 66: mod_base = OTHER; note = 2'-O-methyl modified nucleotide
  modified_base 67: mod_base = OTHER; note = 2'-O-methyl modified nucleotide
  modified_base 68: mod_base = OTHER; note = 2'-O-methyl modified nucleotide
  modified_base 69: mod_base = OTHER; note = 2'-O-methyl modified nucleotide
  modified_base 70: mod_base = OTHER; note = 2'-O-methyl modified nucleotide
  modified_base 75: mod_base = OTHER; note = 2'-O-methyl modified nucleotide
  modified_base 77: mod_base = OTHER; note = 2'-O-methyl modified nucleotide
  modified_base 80: mod_base = OTHER; note = 2'-O-methyl modified nucleotide
  modified_base 86: mod_base = OTHER; note = 2'-O-methyl modified nucleotide
  modified_base 87: mod_base = OTHER; note = 2'-O-methyl modified nucleotide
  modified_base 89: mod_base = OTHER; note = 2'-O-methyl modified nucleotide
  modified_base 90: mod_base = OTHER; note = 2'-O-methyl modified nucleotide
  modified_base 91: mod_base = OTHER; note = 2'-O-methyl modified nucleotide
  modified_base 92: mod_base = OTHER; note = 2'-O-methyl modified nucleotide
  modified_base 99: mod_base = OTHER; note = nucleotide with phosphorothioate linkage
  modified_base 100: mod_base = OTHER; note = 2'-O-methyl modified nucleotide with phosphorothioate linkage
  modified_base 101: mod_base = OTHER; note = 2'-O-methyl modified nucleotide

SEQ ID NO: 2711 - RNA, 101 nt, synthetic construct; identical to SEQ ID NO: 1711
  source 1..101: mol_type = other RNA
  modified_base 1: mod_base = OTHER; note = 2'-O-methyl modified nucleotide with phosphorothioate linkage
  modified_base 2: mod_base = OTHER; note = 2'-O-methyl modified nucleotide with phosphorothioate linkage
  modified_base 3: mod_base = OTHER; note = 2'-O-methyl modified nucleotide with phosphorothioate linkage
  modified_base 4: mod_base = OTHER; note = 2'-O-methyl modified nucleotide
  modified_base 5: mod_base = OTHER; note = 2'-O-methyl modified nucleotide
  modified_base 8: mod_base = OTHER; note = 2'-O-methyl modified nucleotide
  modified_base 9: mod_base = OTHER; note = 2'-O-methyl modified nucleotide
  modified_base 11: mod_base = OTHER; note = 2'-O-methyl modified nucleotide
  modified_base 13: mod_base = OTHER; note = 2'-O-methyl modified nucleotide
  modified_base 18: mod_base = OTHER; note = 2'-O-methyl modified nucleotide
  modified_base 22: mod_base = OTHER; note = 2'-O-methyl modified nucleotide
  modified_base 25: mod_base = OTHER; note = 2'-O-methyl modified nucleotide
  modified_base 29: mod_base = OTHER; note = 2'-O-methyl modified nucleotide
  modified_base 30: mod_base = OTHER; note = 2'-O-methyl modified nucleotide
  modified_base 31: mod_base = OTHER; note = 2'-O-methyl modified nucleotide
  modified_base 32: mod_base = OTHER; note = 2'-O-methyl modified nucleotide
  modified_base 37: mod_base = OTHER; note = 2'-O-methyl modified nucleotide
  modified_base 38: mod_base = OTHER; note = 2'-O-methyl modified nucleotide
  modified_base 39: mod_base = OTHER; note = 2'-O-methyl modified nucleotide
  modified_base 40: mod_base = OTHER; note = 2'-O-methyl modified nucleotide
  modified_base 41: mod_base = OTHER; note = 2'-O-methyl modified nucleotide
  modified_base 42: mod_base = OTHER; note = 2'-O-methyl modified nucleotide
  modified_base 43: mod_base = OTHER; note = 2'-O-methyl modified nucleotide
  modified_base 47: mod_base = OTHER; note = 2'-O-methyl modified nucleotide
  modified_base 48: mod_base = OTHER; note = 2'-O-methyl modified nucleotide
  modified_base 51: mod_base = OTHER; note = 2'-O-methyl modified nucleotide
  modified_base 54: mod_base = OTHER; note = nucleotide with phosphorothioate linkage
  modified_base 58: mod_base = OTHER; note = 2'-O-methyl modified nucleotide
  modified_base 59: mod_base = OTHER; note = 2'-O-methyl modified nucleotide
  modified_base 61: mod_base = OTHER; note = 2'-O-methyl modified nucleotide
  modified_base 62: mod_base = OTHER; note = 2'-O-methyl modified nucleotide
  modified_base 63: mod_base = OTHER; note = 2'-O-methyl modified nucleotide
  modified_base 64: mod_base = OTHER; note = 2'-O-methyl modified nucleotide
  modified_base 65: mod_base = OTHER; note = 2'-O-methyl modified nucleotide
  modified_base 66: mod_base = OTHER; note = 2'-O-methyl modified nucleotide
  modified_base 67: mod_base = OTHER; note = 2'-O-methyl modified nucleotide
  modified_base 68: mod_base = OTHER; note = 2'-O-methyl modified nucleotide
  modified_base 69: mod_base = OTHER; note = 2'-O-methyl modified nucleotide
  modified_base 70: mod_base = OTHER; note = 2'-O-methyl modified nucleotide
  modified_base 75: mod_base = OTHER; note = 2'-O-methyl modified nucleotide
  modified_base 77: mod_base = OTHER; note = 2'-O-methyl modified nucleotide
  modified_base 80: mod_base = OTHER; note = 2'-O-methyl modified nucleotide
  modified_base 86: mod_base = OTHER; note = 2'-O-methyl modified nucleotide
  modified_base 87: mod_base = OTHER; note = 2'-O-methyl modified nucleotide
  modified_base 89: mod_base = OTHER; note = 2'-O-methyl modified nucleotide
  modified_base 90: mod_base = OTHER; note = 2'-O-methyl modified nucleotide
  modified_base 91: mod_base = OTHER; note = 2'-O-methyl modified nucleotide
  modified_base 92: mod_base = OTHER; note = 2'-O-methyl modified nucleotide
  modified_base 99: mod_base = OTHER; note = nucleotide with phosphorothioate linkage
  modified_base 100: mod_base = OTHER; note = 2'-O-methyl modified nucleotide with phosphorothioate linkage
  modified_base 101: mod_base = OTHER; note = 2'-O-methyl modified nucleotide

SEQ ID NO: 2712 - RNA, 101 nt, synthetic construct; identical to SEQ ID NO: 1712
  source 1..101: mol_type = other RNA
  modified_base 1: mod_base = OTHER; note = 2'-O-methyl modified nucleotide with phosphorothioate linkage
  modified_base 2: mod_base = OTHER; note = 2'-O-methyl modified nucleotide with phosphorothioate linkage
  modified_base 3: mod_base = OTHER; note = 2'-O-methyl modified nucleotide with phosphorothioate linkage
  modified_base 4: mod_base = OTHER; note = 2'-O-methyl modified nucleotide
  modified_base 5: mod_base = OTHER; note = 2'-O-methyl modified nucleotide
  modified_base 8: mod_base = OTHER; note = 2'-O-methyl modified nucleotide
  modified_base 9: mod_base = OTHER; note = 2'-O-methyl modified nucleotide
  modified_base 11: mod_base = OTHER; note = 2'-O-methyl modified nucleotide
  modified_base 13: mod_base = OTHER; note = 2'-O-methyl modified nucleotide
  modified_base 18: mod_base = OTHER; note = 2'-O-methyl modified nucleotide
  modified_base 22: mod_base = OTHER; note = 2'-O-methyl modified nucleotide
  modified_base 25: mod_base = OTHER; note = 2'-O-methyl modified nucleotide
  modified_base 29: mod_base = OTHER; note = 2'-O-methyl modified nucleotide
  modified_base 30: mod_base = OTHER; note = 2'-O-methyl modified nucleotide
  modified_base 31: mod_base = OTHER; note = 2'-O-methyl modified nucleotide
  modified_base 32: mod_base = OTHER; note = 2'-O-methyl modified nucleotide
  modified_base 37: mod_base = OTHER; note = 2'-O-methyl modified nucleotide
  modified_base 38: mod_base = OTHER; note = 2'-O-methyl modified nucleotide
  modified_base 39: mod_base = OTHER; note = 2'-O-methyl modified nucleotide
  modified_base 40: mod_base = OTHER; note = 2'-O-methyl modified nucleotide
  modified_base 41: mod_base = OTHER; note = 2'-O-methyl modified nucleotide
  modified_base 42: mod_base = OTHER; note = 2'-O-methyl modified nucleotide
  modified_base 43: mod_base = OTHER; note = 2'-O-methyl modified nucleotide
  modified_base 47: mod_base = OTHER; note = 2'-O-methyl modified nucleotide
  modified_base 48: mod_base = OTHER; note = 2'-O-methyl modified nucleotide
  modified_base 51: mod_base = OTHER; note = 2'-O-methyl modified nucleotide
  modified_base 54: mod_base = OTHER; note = nucleotide with phosphorothioate linkage
  modified_base 58: mod_base = OTHER; note = 2'-O-methyl modified nucleotide
  modified_base 59: mod_base = OTHER; note = 2'-O-methyl modified nucleotide
  modified_base 61: mod_base = OTHER; note = 2'-O-methyl modified nucleotide
  modified_base 62: mod_base = OTHER; note = 2'-O-methyl modified nucleotide
  modified_base 63: mod_base = OTHER; note = 2'-O-methyl modified nucleotide
  modified_base 64: mod_base = OTHER; note = 2'-O-methyl modified nucleotide
  modified_base 65: mod_base = OTHER; note = 2'-O-methyl modified nucleotide
  modified_base 66: mod_base = OTHER; note = 2'-O-methyl modified nucleotide
  modified_base 67: mod_base = OTHER; note = 2'-O-methyl modified nucleotide
  modified_base 68: mod_base = OTHER; note = 2'-O-methyl modified nucleotide
  modified_base 69: mod_base = OTHER; note = 2'-O-methyl modified nucleotide
  modified_base 70: mod_base = OTHER; note = 2'-O-methyl modified nucleotide
  modified_base 75: mod_base = OTHER; note = 2'-O-methyl modified nucleotide
  modified_base 77: mod_base = OTHER; note = 2'-O-methyl modified nucleotide
  modified_base 80: mod_base = OTHER; note = 2'-O-methyl modified nucleotide
  modified_base 86: mod_base = OTHER; note = 2'-O-methyl modified nucleotide
  modified_base 87: mod_base = OTHER; note = 2'-O-methyl modified nucleotide
  modified_base 89: mod_base = OTHER; note = 2'-O-methyl modified nucleotide
  modified_base 90: mod_base = OTHER; note = 2'-O-methyl modified nucleotide
  modified_base 91: mod_base = OTHER; note = 2'-O-methyl modified nucleotide
  modified_base 92: mod_base = OTHER; note = 2'-O-methyl modified nucleotide
  modified_base 99: mod_base = OTHER; note = nucleotide with phosphorothioate linkage
  modified_base 100: mod_base = OTHER; note = 2'-O-methyl modified nucleotide with phosphorothioate linkage
  modified_base 101: mod_base = OTHER; note = 2'-O-methyl modified nucleotide

SEQ ID NO: 2713 - RNA, 101 nt, synthetic construct; identical to SEQ ID NO: 1713
  source 1..101: mol_type = other RNA
  modified_base 1: mod_base = OTHER; note = 2'-O-methyl modified nucleotide with phosphorothioate linkage
  modified_base 2: mod_base = OTHER; note = 2'-O-methyl modified nucleotide with phosphorothioate linkage
  modified_base 3: mod_base = OTHER; note = 2'-O-methyl modified nucleotide with phosphorothioate linkage
  modified_base 4: mod_base = OTHER; note = 2'-O-methyl modified nucleotide
  modified_base 5: mod_base = OTHER; note = 2'-O-methyl modified nucleotide
  modified_base 8: mod_base = OTHER; note = 2'-O-methyl modified nucleotide
  modified_base 9: mod_base = OTHER; note = 2'-O-methyl modified nucleotide
  modified_base 11: mod_base = OTHER; note = 2'-O-methyl modified nucleotide
  modified_base 13: mod_base = OTHER; note = 2'-O-methyl modified nucleotide
  modified_base 18: mod_base = OTHER; note = 2'-O-methyl modified nucleotide
  modified_base 22: mod_base = OTHER; note = 2'-O-methyl modified nucleotide
  modified_base 25: mod_base = OTHER; note = 2'-O-methyl modified nucleotide
  modified_base 29: mod_base = OTHER; note = 2'-O-methyl modified nucleotide
  modified_base 30: mod_base = OTHER; note = 2'-O-methyl modified nucleotide
  modified_base 31: mod_base = OTHER; note = 2'-O-methyl modified nucleotide
  modified_base 32: mod_base = OTHER; note = 2'-O-methyl modified nucleotide
  modified_base 37: mod_base = OTHER; note = 2'-O-methyl modified nucleotide
  modified_base 38: mod_base = OTHER; note = 2'-O-methyl modified nucleotide
  modified_base 39: mod_base = OTHER; note = 2'-O-methyl modified nucleotide
  modified_base 40: mod_base = OTHER; note = 2'-O-methyl modified nucleotide
  modified_base 41: mod_base = OTHER; note = 2'-O-methyl modified nucleotide
  modified_base 42: mod_base = OTHER; note = 2'-O-methyl modified nucleotide
  modified_base 43: mod_base = OTHER; note = 2'-O-methyl modified nucleotide
  modified_base 47: mod_base = OTHER; note = 2'-O-methyl modified nucleotide
  modified_base 48: mod_base = OTHER; note = 2'-O-methyl modified nucleotide
  modified_base 51: mod_base = OTHER; note = 2'-O-methyl modified nucleotide
  modified_base 54: mod_base = OTHER; note = nucleotide with phosphorothioate linkage
  modified_base 58: mod_base = OTHER; note = 2'-O-methyl modified nucleotide
  modified_base 59: mod_base = OTHER; note = 2'-O-methyl modified nucleotide
  modified_base 61: mod_base = OTHER; note = 2'-O-methyl modified nucleotide
  modified_base 62: mod_base = OTHER; note = 2'-O-methyl modified nucleotide
  modified_base 63: mod_base = OTHER; note = 2'-O-methyl modified nucleotide
  modified_base 64: mod_base = OTHER; note = 2'-O-methyl modified nucleotide
  modified_base 65: mod_base = OTHER; note = 2'-O-methyl modified nucleotide
  modified_base 66: mod_base = OTHER; note = 2'-O-methyl modified nucleotide
  modified_base 67: mod_base = OTHER; note = 2'-O-methyl modified nucleotide
  modified_base 68: mod_base = OTHER; note = 2'-O-methyl modified nucleotide
  modified_base 69: mod_base = OTHER; note = 2'-O-methyl modified nucleotide
  modified_base 70: mod_base = OTHER; note = 2'-O-methyl modified nucleotide
  modified_base 75: mod_base = OTHER; note = 2'-O-methyl modified nucleotide
  modified_base 77: mod_base = OTHER; note = 2'-O-methyl modified nucleotide
  modified_base 80: mod_base = OTHER; note = 2'-O-methyl modified nucleotide
  modified_base 86: mod_base = OTHER; note = 2'-O-methyl modified nucleotide
  modified_base 87: mod_base = OTHER; note = 2'-O-methyl modified nucleotide
  modified_base 89: mod_base = OTHER; note = 2'-O-methyl modified nucleotide
  modified_base 90: mod_base = OTHER; note = 2'-O-methyl modified nucleotide
  modified_base 91: mod_base = OTHER; note = 2'-O-methyl modified nucleotide
  modified_base 92: mod_base = OTHER; note = 2'-O-methyl modified nucleotide
  modified_base 99: mod_base = OTHER; note = nucleotide with phosphorothioate linkage
  modified_base 100: mod_base = OTHER; note = 2'-O-methyl modified nucleotide with phosphorothioate linkage
  modified_base 101: mod_base = OTHER; note = 2'-O-methyl modified nucleotide

SEQ ID NO: 2714 - RNA, 101 nt, synthetic construct; identical to SEQ ID NO: 1714
  source 1..101: mol_type = other RNA
  modified_base 1: mod_base = OTHER; note = 2'-O-methyl modified nucleotide with phosphorothioate linkage
  modified_base 2: mod_base = OTHER; note = 2'-O-methyl modified nucleotide with phosphorothioate linkage
  modified_base 3: mod_base = OTHER; note = 2'-O-methyl modified nucleotide with phosphorothioate linkage
  modified_base 4: mod_base = OTHER; note = 2'-O-methyl modified nucleotide
  modified_base 5: mod_base = OTHER; note = 2'-O-methyl modified nucleotide
  modified_base 8: mod_base = OTHER; note = 2'-O-methyl modified nucleotide
  modified_base 9: mod_base = OTHER; note = 2'-O-methyl modified nucleotide
  modified_base 11: mod_base = OTHER; note = 2'-O-methyl modified nucleotide
  modified_base 13: mod_base = OTHER; note = 2'-O-methyl modified nucleotide
  modified_base 18: mod_base = OTHER; note = 2'-O-methyl modified nucleotide
  modified_base 22: mod_base = OTHER; note = 2'-O-methyl modified nucleotide
  modified_base 25: mod_base = OTHER; note = 2'-O-methyl modified nucleotide
  modified_base 29: mod_base = OTHER; note = 2'-O-methyl modified nucleotide
  modified_base 30: mod_base = OTHER; note = 2'-O-methyl modified nucleotide
  modified_base 31: mod_base = OTHER; note = 2'-O-methyl modified nucleotide
  modified_base 32: mod_base = OTHER; note = 2'-O-methyl modified nucleotide
  modified_base 37: mod_base = OTHER; note = 2'-O-methyl modified nucleotide
  modified_base 38: mod_base = OTHER; note = 2'-O-methyl modified nucleotide
  modified_base 39: mod_base = OTHER; note = 2'-O-methyl modified nucleotide
  modified_base 40: mod_base = OTHER; note = 2'-O-methyl modified nucleotide
  modified_base 41: mod_base = OTHER; note = 2'-O-methyl modified nucleotide
  modified_base 42: mod_base = OTHER; note = 2'-O-methyl modified nucleotide
  modified_base 43: mod_base = OTHER; note = 2'-O-methyl modified nucleotide
  modified_base 47: mod_base = OTHER; note = 2'-O-methyl modified nucleotide
  modified_base 48: mod_base = OTHER; note = 2'-O-methyl modified nucleotide
  modified_base 51: mod_base = OTHER; note = 2'-O-methyl modified nucleotide
  modified_base 54: mod_base = OTHER; note = nucleotide with phosphorothioate linkage
  modified_base 58: mod_base = OTHER; note = 2'-O-methyl modified nucleotide
  modified_base 59: mod_base = OTHER; note = 2'-O-methyl modified nucleotide
  modified_base 61: mod_base = OTHER; note = 2'-O-methyl modified nucleotide
  modified_base 62: mod_base = OTHER; note = 2'-O-methyl modified nucleotide
  modified_base 63: mod_base = OTHER; note = 2'-O-methyl modified nucleotide
  modified_base 64: mod_base = OTHER; note = 2'-O-methyl modified nucleotide
  modified_base 65: mod_base = OTHER; note = 2'-O-methyl modified nucleotide
  modified_base 66: mod_base = OTHER; note = 2'-O-methyl modified nucleotide
  modified_base 67: mod_base = OTHER; note = 2'-O-methyl modified nucleotide
  modified_base 68: mod_base = OTHER; note = 2'-O-methyl modified nucleotide
  modified_base 69: mod_base = OTHER; note = 2'-O-methyl modified nucleotide
  modified_base 70: mod_base = OTHER; note = 2'-O-methyl modified nucleotide
  modified_base 75: mod_base = OTHER; note = 2'-O-methyl modified nucleotide
  modified_base 77: mod_base = OTHER; note = 2'-O-methyl modified nucleotide
  modified_base 80: mod_base = OTHER; note = 2'-O-methyl modified nucleotide
  modified_base 86: mod_base = OTHER; note = 2'-O-methyl modified nucleotide
  modified_base 87: mod_base = OTHER; note = 2'-O-methyl modified nucleotide
  modified_base 89: mod_base = OTHER; note = 2'-O-methyl modified nucleotide
  modified_base 90: mod_base = OTHER; note = 2'-O-methyl modified nucleotide
  modified_base 91: mod_base = OTHER; note = 2'-O-methyl modified nucleotide
  modified_base 92: mod_base = OTHER; note = 2'-O-methyl modified nucleotide
  modified_base 99: mod_base = OTHER; note = nucleotide with phosphorothioate linkage
  modified_base 100: mod_base = OTHER; note = 2'-O-methyl modified nucleotide with phosphorothioate linkage
  modified_base 101: mod_base = OTHER; note = 2'-O-methyl modified nucleotide

SEQ ID NO: 2715 - RNA, 101 nt, synthetic construct; identical to SEQ ID NO: 1715
  source 1..101: mol_type = other RNA
  modified_base 1: mod_base = OTHER; note = 2'-O-methyl modified nucleotide with phosphorothioate linkage
  modified_base 2: mod_base = OTHER; note = 2'-O-methyl modified nucleotide with phosphorothioate linkage
  modified_base 3: mod_base = OTHER; note = 2'-O-methyl modified nucleotide with phosphorothioate linkage
  modified_base 4: mod_base = OTHER; note = 2'-O-methyl modified nucleotide
  modified_base 5: mod_base = OTHER; note = 2'-O-methyl modified nucleotide
  modified_base 8: mod_base = OTHER; note = 2'-O-methyl modified nucleotide
  modified_base 9: mod_base = OTHER; note = 2'-O-methyl modified nucleotide
  modified_base 11: mod_base = OTHER; note = 2'-O-methyl modified nucleotide
  modified_base 13: mod_base = OTHER; note = 2'-O-methyl modified nucleotide
  modified_base 18: mod_base = OTHER; note = 2'-O-methyl modified nucleotide
  modified_base 22: mod_base = OTHER; note = 2'-O-methyl modified nucleotide
  modified_base 25: mod_base = OTHER; note = 2'-O-methyl modified nucleotide
  modified_base 29: mod_base = OTHER; note = 2'-O-methyl modified nucleotide
  modified_base 30: mod_base = OTHER; note = 2'-O-methyl modified nucleotide
  modified_base 31: mod_base = OTHER; note = 2'-O-methyl modified nucleotide
  modified_base 32: mod_base = OTHER; note = 2'-O-methyl modified nucleotide
  modified_base 37: mod_base = OTHER; note = 2'-O-methyl modified nucleotide
  modified_base 38: mod_base = OTHER; note = 2'-O-methyl modified nucleotide
  modified_base 39: mod_base = OTHER; note = 2'-O-methyl modified nucleotide
  modified_base 40: mod_base = OTHER; note = 2'-O-methyl modified nucleotide
  modified_base 41: mod_base = OTHER; note = 2'-O-methyl modified nucleotide
  modified_base 42: mod_base = OTHER; note = 2'-O-methyl modified nucleotide
  modified_base 43: mod_base = OTHER; note = 2'-O-methyl modified nucleotide
  modified_base 47: mod_base = OTHER; note = 2'-O-methyl modified nucleotide
  modified_base 48: mod_base = OTHER; note = 2'-O-methyl modified nucleotide
  modified_base 51: mod_base = OTHER; note = 2'-O-methyl modified nucleotide
  modified_base 54: mod_base = OTHER; note = nucleotide with phosphorothioate linkage
  modified_base 58: mod_base = OTHER; note = 2'-O-methyl modified nucleotide
  modified_base 59: mod_base = OTHER; note = 2'-O-methyl modified nucleotide
  modified_base 61: mod_base = OTHER; note = 2'-O-methyl modified nucleotide
  modified_base 62: mod_base = OTHER; note = 2'-O-methyl modified nucleotide
  modified_base 63: mod_base = OTHER; note = 2'-O-methyl modified nucleotide
  modified_base 64: mod_base = OTHER; note = 2'-O-methyl modified nucleotide
  modified_base 65: mod_base = OTHER; note = 2'-O-methyl modified nucleotide
  modified_base 66: mod_base = OTHER; note = 2'-O-methyl modified nucleotide
  modified_base 67: mod_base = OTHER; note = 2'-O-methyl modified nucleotide
  modified_base 68: mod_base = OTHER; note = 2'-O-methyl modified nucleotide
  modified_base 69: mod_base = OTHER; note = 2'-O-methyl modified nucleotide
  modified_base 70: mod_base = OTHER; note = 2'-O-methyl modified nucleotide
  modified_base 75: mod_base = OTHER; note = 2'-O-methyl modified nucleotide
  modified_base 77: mod_base = OTHER; note = 2'-O-methyl modified nucleotide
  modified_base 80: mod_base = OTHER; note = 2'-O-methyl modified nucleotide
  modified_base 86: mod_base = OTHER; note = 2'-O-methyl modified nucleotide
  modified_base 87: mod_base = OTHER; note = 2'-O-methyl modified nucleotide
  modified_base 89: mod_base = OTHER; note = 2'-O-methyl modified nucleotide
  modified_base 90: mod_base = OTHER; note = 2'-O-methyl modified nucleotide
  modified_base 91: mod_base = OTHER; note = 2'-O-methyl modified nucleotide
  modified_base 92: mod_base = OTHER; note = 2'-O-methyl modified nucleotide
  modified_base 99: mod_base = OTHER; note = nucleotide with phosphorothioate linkage
  modified_base 100: mod_base = OTHER; note = 2'-O-methyl modified nucleotide with phosphorothioate linkage
  modified_base 101: mod_base = OTHER; note = 2'-O-methyl modified nucleotide

SEQ ID NO: 2716 - RNA, 101 nt, synthetic construct; identical to SEQ ID NO: 1716
  source 1..101: mol_type = other RNA
  modified_base 1: mod_base = OTHER; note = 2'-O-methyl modified nucleotide with phosphorothioate linkage
  modified_base 2: mod_base = OTHER; note = 2'-O-methyl modified nucleotide with phosphorothioate linkage
  modified_base 3: mod_base = OTHER; note = 2'-O-methyl modified nucleotide with phosphorothioate linkage
  modified_base 4: mod_base = OTHER; note = 2'-O-methyl modified nucleotide
  modified_base 5: mod_base = OTHER; note = 2'-O-methyl modified nucleotide
  modified_base 8: mod_base = OTHER; note = 2'-O-methyl modified nucleotide
  modified_base 9: mod_base = OTHER; note = 2'-O-methyl modified nucleotide
  modified_base 11: mod_base = OTHER; note = 2'-O-methyl modified nucleotide
  modified_base 13: mod_base = OTHER; note = 2'-O-methyl modified nucleotide
  modified_base 18: mod_base = OTHER; note = 2'-O-methyl modified nucleotide
  modified_base 22: mod_base = OTHER; note = 2'-O-methyl modified nucleotide
  modified_base 25: mod_base = OTHER; note = 2'-O-methyl modified nucleotide
  modified_base 29: mod_base = OTHER; note = 2'-O-methyl modified nucleotide
  modified_base 30: mod_base = OTHER; note = 2'-O-methyl modified nucleotide
  modified_base 31: mod_base = OTHER; note = 2'-O-methyl modified nucleotide
  modified_base 32: mod_base = OTHER; note = 2'-O-methyl modified nucleotide
  modified_base 37: mod_base = OTHER; note = 2'-O-methyl modified nucleotide
  modified_base 38: mod_base = OTHER; note = 2'-O-methyl modified nucleotide
  modified_base 39: mod_base = OTHER; note = 2'-O-methyl modified nucleotide
  modified_base 40: mod_base = OTHER; note = 2'-O-methyl modified nucleotide
  modified_base 41: mod_base = OTHER; note = 2'-O-methyl modified nucleotide
  modified_base 42: mod_base = OTHER; note = 2'-O-methyl modified nucleotide
  modified_base 43: mod_base = OTHER; note = 2'-O-methyl modified nucleotide
  modified_base 47: mod_base = OTHER; note = 2'-O-methyl modified nucleotide
  modified_base 48: mod_base = OTHER; note = 2'-O-methyl modified nucleotide
  modified_base 51: mod_base = OTHER; note = 2'-O-methyl modified nucleotide
  modified_base 54: mod_base = OTHER; note = nucleotide with phosphorothioate linkage
  modified_base 58: mod_base = OTHER; note = 2'-O-methyl modified nucleotide
  modified_base 59: mod_base = OTHER; note = 2'-O-methyl modified nucleotide
  modified_base 61: mod_base = OTHER; note = 2'-O-methyl modified nucleotide
  modified_base 62: mod_base = OTHER; note = 2'-O-methyl modified nucleotide
  modified_base 63: mod_base = OTHER; note = 2'-O-methyl modified nucleotide
  modified_base 64: mod_base = OTHER; note = 2'-O-methyl modified nucleotide
  modified_base 65: mod_base = OTHER; note = 2'-O-methyl modified nucleotide
  modified_base 66: mod_base = OTHER; note = 2'-O-methyl modified nucleotide
  modified_base 67: mod_base = OTHER; note = 2'-O-methyl modified nucleotide
  modified_base 68: mod_base = OTHER; note = 2'-O-methyl modified nucleotide
  modified_base 69: mod_base = OTHER; note = 2'-O-methyl modified nucleotide
  modified_base 70: mod_base = OTHER; note = 2'-O-methyl modified nucleotide
  modified_base 75: mod_base = OTHER; note = 2'-O-methyl modified nucleotide
  modified_base 77: mod_base = OTHER; note = 2'-O-methyl modified nucleotide
  modified_base 80: mod_base = OTHER; note = 2'-O-methyl modified nucleotide
  modified_base 86: mod_base = OTHER; note = 2'-O-methyl modified nucleotide
  modified_base 87: mod_base = OTHER; note = 2'-O-methyl modified nucleotide
  modified_base 89: mod_base = OTHER; note = 2'-O-methyl modified nucleotide
  modified_base 90: mod_base = OTHER; note = 2'-O-methyl modified nucleotide
  modified_base 91: mod_base = OTHER; note = 2'-O-methyl modified nucleotide
  modified_base 92: mod_base = OTHER; note = 2'-O-methyl modified nucleotide
  modified_base 99: mod_base = OTHER; note = nucleotide with phosphorothioate linkage
  modified_base 100: mod_base = OTHER; note = 2'-O-methyl modified nucleotide with phosphorothioate linkage
  modified_base 101: mod_base = OTHER; note = 2'-O-methyl modified nucleotide

SEQ ID NO: 2717 - RNA, 101 nt, synthetic construct; identical to SEQ ID NO: 1717
  source 1..101: mol_type = other RNA
  modified_base 1: mod_base = OTHER; note = 2'-O-methyl modified nucleotide with phosphorothioate linkage
  modified_base 2: mod_base = OTHER; note = 2'-O-methyl modified nucleotide with phosphorothioate linkage
  modified_base 3: mod_base = OTHER; note = 2'-O-methyl modified nucleotide with phosphorothioate linkage
  modified_base 4: mod_base = OTHER; note = 2'-O-methyl modified nucleotide
  modified_base 5: mod_base = OTHER; note = 2'-O-methyl modified nucleotide
  modified_base 8: mod_base = OTHER; note = 2'-O-methyl modified nucleotide
  modified_base 9: mod_base = OTHER; note = 2'-O-methyl modified nucleotide
  modified_base 11: mod_base = OTHER; note = 2'-O-methyl modified nucleotide
  modified_base 13: mod_base = OTHER; note = 2'-O-methyl modified nucleotide
  modified_base 18: mod_base = OTHER; note = 2'-O-methyl modified nucleotide
  modified_base 22: mod_base = OTHER; note = 2'-O-methyl modified nucleotide
  modified_base 25: mod_base = OTHER; note = 2'-O-methyl modified nucleotide
  modified_base 29: mod_base = OTHER; note = 2'-O-methyl modified nucleotide
  modified_base 30: mod_base = OTHER; note = 2'-O-methyl modified nucleotide
  modified_base 31: mod_base = OTHER; note = 2'-O-methyl modified nucleotide
  modified_base 32: mod_base = OTHER; note = 2'-O-methyl modified nucleotide
  modified_base 37: mod_base = OTHER; note = 2'-O-methyl modified nucleotide
  modified_base 38: mod_base = OTHER; note = 2'-O-methyl modified nucleotide
  modified_base 39: mod_base = OTHER; note = 2'-O-methyl modified nucleotide
  modified_base 40: mod_base = OTHER; note = 2'-O-methyl modified nucleotide
  modified_base 41: mod_base = OTHER; note = 2'-O-methyl modified nucleotide
  modified_base 42: mod_base = OTHER; note = 2'-O-methyl modified nucleotide
  modified_base 43: mod_base = OTHER; note = 2'-O-methyl modified nucleotide
  modified_base 47: mod_base = OTHER; note = 2'-O-methyl modified nucleotide
  modified_base 48: mod_base = OTHER; note = 2'-O-methyl modified nucleotide
  modified_base 51: mod_base = OTHER; note = 2'-O-methyl modified nucleotide
  modified_base 54: mod_base = OTHER; note = nucleotide with phosphorothioate linkage
  modified_base 58: mod_base = OTHER; note = 2'-O-methyl modified nucleotide
  modified_base 59: mod_base = OTHER; note = 2'-O-methyl modified nucleotide
  modified_base 61: mod_base = OTHER; note = 2'-O-methyl modified nucleotide
  modified_base 62: mod_base = OTHER; note = 2'-O-methyl modified nucleotide
  modified_base 63: mod_base = OTHER; note = 2'-O-methyl modified nucleotide
  modified_base 64: mod_base = OTHER; note = 2'-O-methyl modified nucleotide
  modified_base 65: mod_base = OTHER; note = 2'-O-methyl modified nucleotide
  modified_base 66: mod_base = OTHER; note = 2'-O-methyl modified nucleotide
  modified_base 67: mod_base = OTHER; note = 2'-O-methyl modified nucleotide
  modified_base 68: mod_base = OTHER; note = 2'-O-methyl modified nucleotide
  modified_base 69: mod_base = OTHER; note = 2'-O-methyl modified nucleotide
  modified_base 70: mod_base = OTHER; note = 2'-O-methyl modified nucleotide
  modified_base 75: mod_base = OTHER; note = 2'-O-methyl modified nucleotide
  modified_base 77: mod_base = OTHER; note = 2'-O-methyl modified nucleotide
  modified_base 80: mod_base = OTHER; note = 2'-O-methyl modified nucleotide
  modified_base 86: mod_base = OTHER; note = 2'-O-methyl modified nucleotide
  modified_base 87: mod_base = OTHER; note = 2'-O-methyl modified nucleotide
  modified_base 89: mod_base = OTHER; note = 2'-O-methyl modified nucleotide
  modified_base 90: mod_base = OTHER; note = 2'-O-methyl modified nucleotide
  modified_base 91: mod_base = OTHER; note = 2'-O-methyl modified nucleotide
  modified_base 92: mod_base = OTHER; note = 2'-O-methyl modified nucleotide
  modified_base 99: mod_base = OTHER; note = nucleotide with phosphorothioate linkage
  modified_base 100: mod_base = OTHER; note = 2'-O-methyl modified nucleotide with phosphorothioate linkage
  modified_base 101: mod_base = OTHER; note = 2'-O-methyl modified nucleotide

SEQ ID NO: 2718 - RNA, 101 nt, synthetic construct; identical to SEQ ID NO: 1718
  source 1..101: mol_type = other RNA
  modified_base 1: mod_base = OTHER; note = 2'-O-methyl modified nucleotide with phosphorothioate linkage
  modified_base 2: mod_base = OTHER; note = 2'-O-methyl modified nucleotide with phosphorothioate linkage
  modified_base 3: mod_base = OTHER; note = 2'-O-methyl modified nucleotide with phosphorothioate linkage
  modified_base 4: mod_base = OTHER; note = 2'-O-methyl modified nucleotide
  modified_base 5: mod_base = OTHER; note = 2'-O-methyl modified nucleotide
  modified_base 8: mod_base = OTHER; note = 2'-O-methyl modified nucleotide
  modified_base 9: mod_base = OTHER; note = 2'-O-methyl modified nucleotide
  modified_base 11: mod_base = OTHER; note = 2'-O-methyl modified nucleotide
  modified_base 13: mod_base = OTHER; note = 2'-O-methyl modified nucleotide
  modified_base 18: mod_base = OTHER; note = 2'-O-methyl modified nucleotide
  modified_base 22: mod_base = OTHER; note = 2'-O-methyl modified nucleotide
  modified_base 25: mod_base = OTHER; note = 2'-O-methyl modified nucleotide
  modified_base 29: mod_base = OTHER; note = 2'-O-methyl modified nucleotide
  modified_base 30: mod_base = OTHER; note = 2'-O-methyl modified nucleotide
  modified_base 31: mod_base = OTHER; note = 2'-O-methyl modified nucleotide
  modified_base 32: mod_base = OTHER; note = 2'-O-methyl modified nucleotide
  modified_base 37: mod_base = OTHER; note = 2'-O-methyl modified nucleotide
  modified_base 38: mod_base = OTHER; note = 2'-O-methyl modified nucleotide
  modified_base 39: mod_base = OTHER; note = 2'-O-methyl modified nucleotide
  modified_base 40: mod_base = OTHER; note = 2'-O-methyl modified nucleotide
  modified_base 41: mod_base = OTHER; note = 2'-O-methyl modified nucleotide
  modified_base 42: mod_base = OTHER; note = 2'-O-methyl modified nucleotide
  modified_base 43: mod_base = OTHER; note = 2'-O-methyl modified nucleotide
  modified_base 47: mod_base = OTHER; note = 2'-O-methyl modified nucleotide
  modified_base 48: mod_base = OTHER; note = 2'-O-methyl modified nucleotide
  modified_base 51: mod_base = OTHER; note = 2'-O-methyl modified nucleotide
  modified_base 54: mod_base = OTHER; note = nucleotide with phosphorothioate linkage
  modified_base 58: mod_base = OTHER; note = 2'-O-methyl modified nucleotide
  modified_base 59: mod_base = OTHER; note = 2'-O-methyl modified nucleotide
  modified_base 61: mod_base = OTHER; note = 2'-O-methyl modified nucleotide
  modified_base 62: mod_base = OTHER; note = 2'-O-methyl modified nucleotide
  modified_base 63: mod_base = OTHER; note = 2'-O-methyl modified nucleotide
  modified_base 64: mod_base = OTHER; note = 2'-O-methyl modified nucleotide
  modified_base 65: mod_base = OTHER; note = 2'-O-methyl modified nucleotide
  modified_base 66: mod_base = OTHER; note = 2'-O-methyl modified nucleotide
  modified_base 67: mod_base = OTHER; note = 2'-O-methyl modified nucleotide
  modified_base 68: mod_base = OTHER; note = 2'-O-methyl modified nucleotide
  modified_base 69: mod_base = OTHER; note = 2'-O-methyl modified nucleotide
  modified_base 70: mod_base = OTHER; note = 2'-O-methyl modified nucleotide
  modified_base 75: mod_base = OTHER; note = 2'-O-methyl modified nucleotide
  modified_base 77: mod_base = OTHER; note = 2'-O-methyl modified nucleotide
  modified_base 80: mod_base = OTHER; note = 2'-O-methyl modified nucleotide
  modified_base 86: mod_base = OTHER; note = 2'-O-methyl modified nucleotide
  modified_base 87: mod_base = OTHER; note = 2'-O-methyl modified nucleotide
  modified_base 89: mod_base = OTHER; note = 2'-O-methyl modified nucleotide
  modified_base 90: mod_base = OTHER; note = 2'-O-methyl modified nucleotide
  modified_base 91: mod_base = OTHER; note = 2'-O-methyl modified nucleotide
  modified_base 92: mod_base = OTHER; note = 2'-O-methyl modified nucleotide
  modified_base 99: mod_base = OTHER; note = nucleotide with phosphorothioate linkage
  modified_base 100: mod_base = OTHER; note = 2'-O-methyl modified nucleotide with phosphorothioate linkage
  modified_base 101: mod_base = OTHER; note = 2'-O-methyl modified nucleotide

SEQ ID NO: 2719 - RNA, 101 nt, synthetic construct; identical to SEQ ID NO: 1719
  source 1..101: mol_type = other RNA
  modified_base 1: mod_base = OTHER; note = 2'-O-methyl modified nucleotide with phosphorothioate linkage
  modified_base 2: mod_base = OTHER; note = 2'-O-methyl modified nucleotide with phosphorothioate linkage
  modified_base 3: mod_base = OTHER; note = 2'-O-methyl modified nucleotide with phosphorothioate linkage
  modified_base 4: mod_base = OTHER; note = 2'-O-methyl modified nucleotide
  modified_base 5: mod_base = OTHER; note = 2'-O-methyl modified nucleotide
  modified_base 8: mod_base = OTHER; note = 2'-O-methyl modified nucleotide
  modified_base 9: mod_base = OTHER; note = 2'-O-methyl modified nucleotide
  modified_base 11: mod_base = OTHER; note = 2'-O-methyl modified nucleotide
  modified_base 13: mod_base = OTHER; note = 2'-O-methyl modified nucleotide
  modified_base 18: mod_base = OTHER; note = 2'-O-methyl modified nucleotide
  modified_base 22: mod_base = OTHER; note = 2'-O-methyl modified nucleotide
  modified_base 25: mod_base = OTHER; note = 2'-O-methyl modified nucleotide
  modified_base 29: mod_base = OTHER; note = 2'-O-methyl modified nucleotide
  modified_base 30: mod_base = OTHER; note = 2'-O-methyl modified nucleotide
  modified_base 31: mod_base = OTHER; note = 2'-O-methyl modified nucleotide
  modified_base 32: mod_base = OTHER; note = 2'-O-methyl modified nucleotide
  modified_base 37: mod_base = OTHER; note = 2'-O-methyl modified nucleotide
  modified_base 38: mod_base = OTHER; note = 2'-O-methyl modified nucleotide
  modified_base 39: mod_base = OTHER; note = 2'-O-methyl modified nucleotide
  modified_base 40: mod_base = OTHER; note = 2'-O-methyl modified nucleotide
  modified_base 41: mod_base = OTHER; note = 2'-O-methyl modified nucleotide
  modified_base 42: mod_base = OTHER; note = 2'-O-methyl modified nucleotide
  modified_base 43: mod_base = OTHER; note = 2'-O-methyl modified nucleotide
  modified_base 47: mod_base = OTHER; note = 2'-O-methyl modified nucleotide
  modified_base 48: mod_base = OTHER; note = 2'-O-methyl modified nucleotide
  modified_base 51: mod_base = OTHER; note = 2'-O-methyl modified nucleotide
  modified_base 54: mod_base = OTHER; note = nucleotide with phosphorothioate linkage
  modified_base 58: mod_base = OTHER; note = 2'-O-methyl modified nucleotide
  modified_base 59: mod_base = OTHER; note = 2'-O-methyl modified nucleotide
  modified_base 61: mod_base = OTHER; note = 2'-O-methyl modified nucleotide
  modified_base 62: mod_base = OTHER; note = 2'-O-methyl modified nucleotide
  modified_base 63: mod_base = OTHER; note = 2'-O-methyl modified nucleotide
  modified_base 64: mod_base = OTHER; note = 2'-O-methyl modified nucleotide
  modified_base 65: mod_base = OTHER; note = 2'-O-methyl modified nucleotide
  modified_base 66: mod_base = OTHER; note = 2'-O-methyl modified nucleotide
  modified_base 67: mod_base = OTHER; note = 2'-O-methyl modified nucleotide
  modified_base 68: mod_base = OTHER; note = 2'-O-methyl modified nucleotide
  modified_base 69: mod_base = OTHER; note = 2'-O-methyl modified nucleotide
  modified_base 70: mod_base = OTHER; note = 2'-O-methyl modified nucleotide
  modified_base 75: mod_base = OTHER; note = 2'-O-methyl modified nucleotide
  modified_base 77: mod_base = OTHER; note = 2'-O-methyl modified nucleotide
  modified_base 80: mod_base = OTHER; note = 2'-O-methyl modified nucleotide
  modified_base 86: mod_base = OTHER; note = 2'-O-methyl modified nucleotide
  modified_base 87: mod_base = OTHER; note = 2'-O-methyl modified nucleotide
  modified_base 89: mod_base = OTHER; note = 2'-O-methyl modified nucleotide
  modified_base 90: mod_base = OTHER; note = 2'-O-methyl modified nucleotide
  modified_base 91: mod_base = OTHER; note = 2'-O-methyl modified nucleotide
  modified_base 92: mod_base = OTHER; note = 2'-O-methyl modified nucleotide
  modified_base 99: mod_base = OTHER; note = nucleotide with phosphorothioate linkage
  modified_base 100: mod_base = OTHER; note = 2'-O-methyl modified nucleotide with phosphorothioate linkage
  modified_base 101: mod_base = OTHER; note = 2'-O-methyl modified nucleotide

SEQ ID NO: 2720 - RNA, 101 nt, synthetic construct; identical to SEQ ID NO: 1720
  source 1..101: mol_type = other RNA
  modified_base 1: mod_base = OTHER; note = 2'-O-methyl modified nucleotide with phosphorothioate linkage
  modified_base 2: mod_base = OTHER; note = 2'-O-methyl modified nucleotide with phosphorothioate linkage
  modified_base 3: mod_base = OTHER; note = 2'-O-methyl modified nucleotide with phosphorothioate linkage
  modified_base 4: mod_base = OTHER; note = 2'-O-methyl modified nucleotide
  modified_base 5: mod_base = OTHER; note = 2'-O-methyl modified nucleotide
  modified_base 8: mod_base = OTHER; note = 2'-O-methyl modified nucleotide
  modified_base 9: mod_base = OTHER; note = 2'-O-methyl modified nucleotide
  modified_base 11: mod_base = OTHER; note = 2'-O-methyl modified nucleotide
  modified_base 13: mod_base = OTHER; note = 2'-O-methyl modified nucleotide
  modified_base 18: mod_base = OTHER; note = 2'-O-methyl modified nucleotide
  modified_base 22: mod_base = OTHER; note = 2'-O-methyl modified nucleotide
  modified_base 25: mod_base = OTHER; note = 2'-O-methyl modified nucleotide
  modified_base 29: mod_base = OTHER; note = 2'-O-methyl modified nucleotide
  modified_base 30: mod_base = OTHER; note = 2'-O-methyl modified nucleotide
  modified_base 31: mod_base = OTHER; note = 2'-O-methyl modified nucleotide
  modified_base 32: mod_base = OTHER; note = 2'-O-methyl modified nucleotide
  modified_base 37: mod_base = OTHER; note = 2'-O-methyl modified nucleotide
  modified_base 38: mod_base = OTHER; note = 2'-O-methyl modified nucleotide
  modified_base 39: mod_base = OTHER; note = 2'-O-methyl modified nucleotide
  modified_base 40: mod_base = OTHER; note = 2'-O-methyl modified nucleotide
  modified_base 41: mod_base = OTHER; note = 2'-O-methyl modified nucleotide
  modified_base 42: mod_base = OTHER; note = 2'-O-methyl modified nucleotide
  modified_base 43: mod_base = OTHER; note = 2'-O-methyl modified nucleotide
  modified_base 47: mod_base = OTHER; note = 2'-O-methyl modified nucleotide
  modified_base 48: mod_base = OTHER; note = 2'-O-methyl modified nucleotide
  modified_base 51: mod_base = OTHER; note = 2'-O-methyl modified nucleotide
  modified_base 54: mod_base = OTHER; note = nucleotide with phosphorothioate linkage
  modified_base 58: mod_base = OTHER; note = 2'-O-methyl modified nucleotide
  modified_base 59: mod_base = OTHER; note = 2'-O-methyl modified nucleotide
  modified_base 61: mod_base = OTHER; note = 2'-O-methyl modified nucleotide
  modified_base 62: mod_base = OTHER; note = 2'-O-methyl modified nucleotide
  modified_base 63: mod_base = OTHER; note = 2'-O-methyl modified nucleotide
  modified_base 64: mod_base = OTHER; note = 2'-O-methyl modified nucleotide
  modified_base 65: mod_base = OTHER; note = 2'-O-methyl modified nucleotide
  modified_base 66: mod_base = OTHER; note = 2'-O-methyl modified nucleotide
  modified_base 67: mod_base = OTHER; note = 2'-O-methyl modified nucleotide
  modified_base 68: mod_base = OTHER; note = 2'-O-methyl modified nucleotide
  modified_base 69: mod_base = OTHER; note = 2'-O-methyl modified nucleotide
  modified_base 70: mod_base = OTHER; note = 2'-O-methyl modified nucleotide
  modified_base 75: mod_base = OTHER; note = 2'-O-methyl modified nucleotide
  modified_base 77: mod_base = OTHER; note = 2'-O-methyl modified nucleotide
  modified_base 80: mod_base = OTHER; note = 2'-O-methyl modified nucleotide
  modified_base 86: mod_base = OTHER; note = 2'-O-methyl modified nucleotide
  modified_base 87: mod_base = OTHER; note = 2'-O-methyl modified nucleotide
  modified_base 89: mod_base = OTHER; note = 2'-O-methyl modified nucleotide
  modified_base 90: mod_base = OTHER; note = 2'-O-methyl modified nucleotide
  modified_base 91: mod_base = OTHER; note = 2'-O-methyl modified nucleotide
  modified_base 92: mod_base = OTHER; note = 2'-O-methyl modified nucleotide
  modified_base 99: mod_base = OTHER; note = nucleotide with phosphorothioate linkage
  modified_base 100: mod_base = OTHER; note = 2'-O-methyl modified nucleotide with phosphorothioate linkage
  modified_base 101: mod_base = OTHER; note = 2'-O-methyl modified nucleotide

SEQ ID NO: 2721 - RNA, 101 nt, synthetic construct; identical to SEQ ID NO: 1721
  source 1..101: mol_type = other RNA
  modified_base 1: mod_base = OTHER; note = 2'-O-methyl modified nucleotide with phosphorothioate linkage
  modified_base 2: mod_base = OTHER; note = 2'-O-methyl modified nucleotide with phosphorothioate linkage
  modified_base 3: mod_base = OTHER; note = 2'-O-methyl modified nucleotide with phosphorothioate linkage
  modified_base 4: mod_base = OTHER; note = 2'-O-methyl modified nucleotide
  modified_base 5: mod_base = OTHER; note = 2'-O-methyl modified nucleotide
  modified_base 8: mod_base = OTHER; note = 2'-O-methyl modified nucleotide
  modified_base 9: mod_base = OTHER; note = 2'-O-methyl modified nucleotide
  modified_base 11: mod_base = OTHER; note = 2'-O-methyl modified nucleotide
  modified_base 13: mod_base = OTHER; note = 2'-O-methyl modified nucleotide
  modified_base 18: mod_base = OTHER; note = 2'-O-methyl modified nucleotide
  modified_base 22: mod_base = OTHER; note = 2'-O-methyl modified nucleotide
  modified_base 25: mod_base = OTHER; note = 2'-O-methyl modified nucleotide
  modified_base 29: mod_base = OTHER; note = 2'-O-methyl modified nucleotide
  modified_base 30: mod_base = OTHER; note = 2'-O-methyl modified nucleotide
  modified_base 31: mod_base = OTHER; note = 2'-O-methyl modified nucleotide
  modified_base 32: mod_base = OTHER; note = 2'-O-methyl modified nucleotide
  modified_base 37: mod_base = OTHER; note = 2'-O-methyl modified nucleotide
  modified_base 38: mod_base = OTHER; note = 2'-O-methyl modified nucleotide
  modified_base 39: mod_base = OTHER; note = 2'-O-methyl modified nucleotide
  modified_base 40: mod_base = OTHER; note = 2'-O-methyl modified nucleotide
  modified_base 41: mod_base = OTHER; note = 2'-O-methyl modified nucleotide
  modified_base 42: mod_base = OTHER; note = 2'-O-methyl modified nucleotide
  modified_base 43: mod_base = OTHER; note = 2'-O-methyl modified nucleotide
  modified_base 47: mod_base = OTHER; note = 2'-O-methyl modified nucleotide
  modified_base 48: mod_base = OTHER; note = 2'-O-methyl modified nucleotide
  modified_base 51: mod_base = OTHER; note = 2'-O-methyl modified nucleotide
  modified_base 54: mod_base = OTHER; note = nucleotide with phosphorothioate linkage
  modified_base 58: mod_base = OTHER; note = 2'-O-methyl modified nucleotide
  modified_base 59: mod_base = OTHER; note = 2'-O-methyl modified nucleotide
  modified_base 61: mod_base = OTHER; note = 2'-O-methyl modified nucleotide
  modified_base 62: mod_base = OTHER; note = 2'-O-methyl modified nucleotide
  modified_base 63: mod_base = OTHER; note = 2'-O-methyl modified nucleotide
  modified_base 64: mod_base = OTHER; note = 2'-O-methyl modified nucleotide
  modified_base 65: mod_base = OTHER; note = 2'-O-methyl modified nucleotide
  modified_base 66: mod_base = OTHER; note = 2'-O-methyl modified nucleotide
  modified_base 67: mod_base = OTHER; note = 2'-O-methyl modified nucleotide
  modified_base 68: mod_base = OTHER; note = 2'-O-methyl modified nucleotide
  modified_base 69: mod_base = OTHER; note = 2'-O-methyl modified nucleotide
  modified_base 70: mod_base = OTHER; note = 2'-O-methyl modified nucleotide
  modified_base 75: mod_base = OTHER; note = 2'-O-methyl modified nucleotide
  modified_base 77: mod_base = OTHER; note = 2'-O-methyl modified nucleotide
  modified_base 80: mod_base = OTHER; note = 2'-O-methyl modified nucleotide
  modified_base 86: mod_base = OTHER; note = 2'-O-methyl modified nucleotide
  modified_base 87: mod_base = OTHER; note = 2'-O-methyl modified nucleotide
  modified_base 89: mod_base = OTHER; note = 2'-O-methyl modified nucleotide
  modified_base 90: mod_base = OTHER; note = 2'-O-methyl modified nucleotide
  modified_base 91: mod_base = OTHER; note = 2'-O-methyl modified nucleotide
  modified_base 92: mod_base = OTHER; note = 2'-O-methyl modified nucleotide
  modified_base 99: mod_base = OTHER; note = nucleotide with phosphorothioate linkage
  modified_base 100: mod_base = OTHER; note = 2'-O-methyl modified nucleotide with phosphorothioate linkage
  modified_base 101: mod_base = OTHER; note = 2'-O-methyl modified nucleotide

SEQ ID NO: 2722 - RNA, 101 nt, synthetic construct; identical to SEQ ID NO: 1722
  source 1..101: mol_type = other RNA
  modified_base 1: mod_base = OTHER; note = 2'-O-methyl modified nucleotide with phosphorothioate linkage
  modified_base 2: mod_base = OTHER; note = 2'-O-methyl modified nucleotide with phosphorothioate linkage
  modified_base 3: mod_base = OTHER; note = 2'-O-methyl modified nucleotide with phosphorothioate linkage
  modified_base 4: mod_base = OTHER; note = 2'-O-methyl modified nucleotide
  modified_base 5: mod_base = OTHER; note = 2'-O-methyl modified nucleotide
  modified_base 8: mod_base = OTHER; note = 2'-O-methyl modified nucleotide
  modified_base 9: mod_base = OTHER; note = 2'-O-methyl modified nucleotide
  modified_base 11: mod_base = OTHER; note = 2'-O-methyl modified nucleotide
  modified_base 13: mod_base = OTHER; note = 2'-O-methyl modified nucleotide
  modified_base 18: mod_base = OTHER; note = 2'-O-methyl modified nucleotide
  modified_base 22: mod_base = OTHER; note = 2'-O-methyl modified nucleotide
  modified_base 25: mod_base = OTHER; note = 2'-O-methyl modified nucleotide
  modified_base 29: mod_base = OTHER; note = 2'-O-methyl modified nucleotide
  modified_base 30: mod_base = OTHER; note = 2'-O-methyl modified nucleotide
  modified_base 31: mod_base = OTHER; note = 2'-O-methyl modified nucleotide
  modified_base 32: mod_base = OTHER; note = 2'-O-methyl modified nucleotide
  modified_base 37: mod_base = OTHER; note = 2'-O-methyl modified nucleotide
  modified_base 38: mod_base = OTHER; note = 2'-O-methyl modified nucleotide
  modified_base 39: mod_base = OTHER; note = 2'-O-methyl modified nucleotide
  modified_base 40: mod_base = OTHER; note = 2'-O-methyl modified nucleotide
  modified_base 41: mod_base = OTHER; note = 2'-O-methyl modified nucleotide
  modified_base 42: mod_base = OTHER; note = 2'-O-methyl modified nucleotide
  modified_base 43: mod_base = OTHER; note = 2'-O-methyl modified nucleotide
  modified_base 47: mod_base = OTHER; note = 2'-O-methyl modified nucleotide
  modified_base 48: mod_base = OTHER; note = 2'-O-methyl modified nucleotide
  modified_base 51: mod_base = OTHER; note = 2'-O-methyl modified nucleotide
  modified_base 54: mod_base = OTHER; note = nucleotide with phosphorothioate linkage
  modified_base 58: mod_base = OTHER; note = 2'-O-methyl modified nucleotide
  modified_base 59: mod_base = OTHER; note = 2'-O-methyl modified nucleotide
  modified_base 61: mod_base = OTHER; note = 2'-O-methyl modified nucleotide
  modified_base 62: mod_base = OTHER; note = 2'-O-methyl modified nucleotide
  modified_base 63: mod_base = OTHER; note = 2'-O-methyl modified nucleotide
  modified_base 64: mod_base = OTHER; note = 2'-O-methyl modified nucleotide
  modified_base 65: mod_base = OTHER; note = 2'-O-methyl modified nucleotide
  modified_base 66: mod_base = OTHER; note = 2'-O-methyl modified nucleotide
  modified_base 67: mod_base = OTHER; note = 2'-O-methyl modified nucleotide
  modified_base 68: mod_base = OTHER; note = 2'-O-methyl modified nucleotide
  modified_base 69: mod_base = OTHER; note = 2'-O-methyl modified nucleotide
  modified_base 70: mod_base = OTHER; note = 2'-O-methyl modified nucleotide
  modified_base 75: mod_base = OTHER; note = 2'-O-methyl modified nucleotide
  modified_base 77: mod_base = OTHER; note = 2'-O-methyl modified nucleotide
  modified_base 80: mod_base = OTHER; note = 2'-O-methyl modified nucleotide
  modified_base 86: mod_base = OTHER; note = 2'-O-methyl modified nucleotide
  modified_base 87: mod_base = OTHER; note = 2'-O-methyl modified nucleotide
  modified_base 89: mod_base = OTHER; note = 2'-O-methyl modified nucleotide
  modified_base 90: mod_base = OTHER; note = 2'-O-methyl modified nucleotide
  modified_base 91: mod_base = OTHER; note = 2'-O-methyl modified nucleotide
  modified_base 92: mod_base = OTHER; note = 2'-O-methyl modified nucleotide
  modified_base 99: mod_base = OTHER; note = nucleotide with phosphorothioate linkage
  modified_base 100: mod_base = OTHER; note = 2'-O-methyl modified nucleotide with phosphorothioate linkage
  modified_base 101: mod_base = OTHER; note = 2'-O-methyl modified nucleotide

SEQ ID NO: 2723 - RNA, 101 nt, synthetic construct; identical to SEQ ID NO: 1723
  source 1..101: mol_type = other RNA
  modified_base 1: mod_base = OTHER; note = 2'-O-methyl modified nucleotide with phosphorothioate linkage
  modified_base 2: mod_base = OTHER; note = 2'-O-methyl modified nucleotide with phosphorothioate linkage
  modified_base 3: mod_base = OTHER; note = 2'-O-methyl modified nucleotide with phosphorothioate linkage
  modified_base 4: mod_base = OTHER; note = 2'-O-methyl modified nucleotide
  modified_base 5: mod_base = OTHER; note = 2'-O-methyl modified nucleotide
  modified_base 8: mod_base = OTHER; note = 2'-O-methyl modified nucleotide
  modified_base 9: mod_base = OTHER; note = 2'-O-methyl modified nucleotide
  modified_base 11: mod_base = OTHER; note = 2'-O-methyl modified nucleotide
  modified_base 13: mod_base = OTHER; note = 2'-O-methyl modified nucleotide
  modified_base 18: mod_base = OTHER; note = 2'-O-methyl modified nucleotide
  modified_base 22: mod_base = OTHER; note = 2'-O-methyl modified nucleotide
  modified_base 25: mod_base = OTHER; note = 2'-O-methyl modified nucleotide
  modified_base 29: mod_base = OTHER; note = 2'-O-methyl modified nucleotide
  modified_base 30: mod_base = OTHER; note = 2'-O-methyl modified nucleotide
  modified_base 31: mod_base = OTHER; note = 2'-O-methyl modified nucleotide
  modified_base 32: mod_base = OTHER; note = 2'-O-methyl modified nucleotide
  modified_base 37: mod_base = OTHER; note = 2'-O-methyl modified nucleotide
  modified_base 38: mod_base = OTHER; note = 2'-O-methyl modified nucleotide
  modified_base 39: mod_base = OTHER; note = 2'-O-methyl modified nucleotide
  modified_base 40: mod_base = OTHER; note = 2'-O-methyl modified nucleotide
  modified_base 41: mod_base = OTHER; note = 2'-O-methyl modified nucleotide
  modified_base 42: mod_base = OTHER; note = 2'-O-methyl modified nucleotide
  modified_base 43: mod_base = OTHER; note = 2'-O-methyl modified nucleotide
  modified_base 47: mod_base = OTHER; note = 2'-O-methyl modified nucleotide
  modified_base 48: mod_base = OTHER; note = 2'-O-methyl modified nucleotide
  modified_base 51: mod_base = OTHER; note = 2'-O-methyl modified nucleotide
  modified_base 54: mod_base = OTHER; note = nucleotide with phosphorothioate linkage
  modified_base 58: mod_base = OTHER; note = 2'-O-methyl modified nucleotide
  modified_base 59: mod_base = OTHER; note = 2'-O-methyl modified nucleotide
  modified_base 61: mod_base = OTHER; note = 2'-O-methyl modified nucleotide
  modified_base 62: mod_base = OTHER; note = 2'-O-methyl modified nucleotide
  modified_base 63: mod_base = OTHER; note = 2'-O-methyl modified nucleotide
  modified_base 64: mod_base = OTHER; note = 2'-O-methyl modified nucleotide
  modified_base 65: mod_base = OTHER; note = 2'-O-methyl modified nucleotide
  modified_base 66: mod_base = OTHER; note = 2'-O-methyl modified nucleotide
  modified_base 67: mod_base = OTHER; note = 2'-O-methyl modified nucleotide
  modified_base 68: mod_base = OTHER; note = 2'-O-methyl modified nucleotide
  modified_base 69: mod_base = OTHER; note = 2'-O-methyl modified nucleotide
  modified_base 70: mod_base = OTHER; note = 2'-O-methyl modified nucleotide
  modified_base 75: mod_base = OTHER; note = 2'-O-methyl modified nucleotide
  modified_base 77: mod_base = OTHER; note = 2'-O-methyl modified nucleotide
  modified_base 80: mod_base = OTHER; note = 2'-O-methyl modified nucleotide
  modified_base 86: mod_base = OTHER; note = 2'-O-methyl modified nucleotide
  modified_base 87: mod_base = OTHER; note = 2'-O-methyl modified nucleotide
  modified_base 89: mod_base = OTHER; note = 2'-O-methyl modified nucleotide
  modified_base 90: mod_base = OTHER; note = 2'-O-methyl modified nucleotide
  modified_base 91: mod_base = OTHER; note = 2'-O-methyl modified nucleotide
  modified_base 92: mod_base = OTHER; note = 2'-O-methyl modified nucleotide
  modified_base 99: mod_base = OTHER; note = nucleotide with phosphorothioate linkage
  modified_base 100: mod_base = OTHER; note = 2'-O-methyl modified nucleotide with phosphorothioate linkage
  modified_base 101: mod_base = OTHER; note = 2'-O-methyl modified nucleotide

SEQ ID NO: 2724 - RNA, 101 nt, synthetic construct; identical to SEQ ID NO: 1724
  source 1..101: mol_type = other RNA
  modified_base 1: mod_base = OTHER; note = 2'-O-methyl modified nucleotide with phosphorothioate linkage
  modified_base 2: mod_base = OTHER; note = 2'-O-methyl modified nucleotide with phosphorothioate linkage
  modified_base 3: mod_base = OTHER; note = 2'-O-methyl modified nucleotide with phosphorothioate linkage
  modified_base 4: mod_base = OTHER; note = 2'-O-methyl modified nucleotide
  modified_base 5: mod_base = OTHER; note = 2'-O-methyl modified nucleotide
  modified_base 8: mod_base = OTHER; note = 2'-O-methyl modified nucleotide
  modified_base 9: mod_base = OTHER; note = 2'-O-methyl modified nucleotide
  modified_base 11: mod_base = OTHER; note = 2'-O-methyl modified nucleotide
  modified_base 13: mod_base = OTHER; note = 2'-O-methyl modified nucleotide
  modified_base 18: mod_base = OTHER; note = 2'-O-methyl modified nucleotide
  modified_base 22: mod_base = OTHER; note = 2'-O-methyl modified nucleotide
  modified_base 25: mod_base = OTHER; note = 2'-O-methyl modified nucleotide
  modified_base 29: mod_base = OTHER; note = 2'-O-methyl modified nucleotide
  modified_base 30: mod_base = OTHER; note = 2'-O-methyl modified nucleotide
  modified_base 31: mod_base = OTHER; note = 2'-O-methyl modified nucleotide
  modified_base 32: mod_base = OTHER; note = 2'-O-methyl modified nucleotide
  modified_base 37: mod_base = OTHER; note = 2'-O-methyl modified nucleotide
  modified_base 38: mod_base = OTHER; note = 2'-O-methyl modified nucleotide
  modified_base 39: mod_base = OTHER; note = 2'-O-methyl modified nucleotide
  modified_base 40: mod_base = OTHER; note = 2'-O-methyl modified nucleotide
  modified_base 41: mod_base = OTHER; note = 2'-O-methyl modified nucleotide
  modified_base 42: mod_base = OTHER; note = 2'-O-methyl modified nucleotide
  modified_base 43: mod_base = OTHER; note = 2'-O-methyl modified nucleotide
  modified_base 47: mod_base = OTHER; note = 2'-O-methyl modified nucleotide
  modified_base 48: mod_base = OTHER; note = 2'-O-methyl modified nucleotide
  modified_base 51: mod_base = OTHER; note = 2'-O-methyl modified nucleotide
  modified_base 54: mod_base = OTHER; note = nucleotide with phosphorothioate linkage
  modified_base 58: mod_base = OTHER; note = 2'-O-methyl modified nucleotide
  modified_base 59: mod_base = OTHER; note = 2'-O-methyl modified nucleotide
  modified_base 61: mod_base = OTHER; note = 2'-O-methyl modified nucleotide
  modified_base 62: mod_base = OTHER; note = 2'-O-methyl modified nucleotide
  modified_base 63: mod_base = OTHER; note = 2'-O-methyl modified nucleotide
  modified_base 64: mod_base = OTHER; note = 2'-O-methyl modified nucleotide
  modified_base 65: mod_base = OTHER; note = 2'-O-methyl modified nucleotide
  modified_base 66: mod_base = OTHER; note = 2'-O-methyl modified nucleotide
  modified_base 67: mod_base = OTHER; note = 2'-O-methyl modified nucleotide
  modified_base 68: mod_base = OTHER; note = 2'-O-methyl modified nucleotide
  modified_base 69: mod_base = OTHER; note = 2'-O-methyl modified nucleotide
  modified_base 70: mod_base = OTHER; note = 2'-O-methyl modified nucleotide
  modified_base 75: mod_base = OTHER; note = 2'-O-methyl modified nucleotide
  modified_base 77: mod_base = OTHER; note = 2'-O-methyl modified nucleotide
  modified_base 80: mod_base = OTHER; note = 2'-O-methyl modified nucleotide
  modified_base 86: mod_base = OTHER; note = 2'-O-methyl modified nucleotide
  modified_base 87: mod_base = OTHER; note = 2'-O-methyl modified nucleotide
  modified_base 89: mod_base = OTHER; note = 2'-O-methyl modified nucleotide
  modified_base 90: mod_base = OTHER; note = 2'-O-methyl modified nucleotide
  modified_base 91: mod_base = OTHER; note = 2'-O-methyl modified nucleotide
  modified_base 92: mod_base = OTHER; note = 2'-O-methyl modified nucleotide
  modified_base 99: mod_base = OTHER; note = nucleotide with phosphorothioate linkage
  modified_base 100: mod_base = OTHER; note = 2'-O-methyl modified nucleotide with phosphorothioate linkage
  modified_base 101: mod_base = OTHER; note = 2'-O-methyl modified nucleotide

SEQ ID NO: 2725 - RNA, 101 nt, synthetic construct; identical to SEQ ID NO: 1725
  source 1..101: mol_type = other RNA
  modified_base 1: mod_base = OTHER; note = 2'-O-methyl modified nucleotide with phosphorothioate linkage
  modified_base 2: mod_base = OTHER; note = 2'-O-methyl modified nucleotide with phosphorothioate linkage
  modified_base 3: mod_base = OTHER; note = 2'-O-methyl modified nucleotide with phosphorothioate linkage
  modified_base 4: mod_base = OTHER; note = 2'-O-methyl modified nucleotide
  modified_base 5: mod_base = OTHER; note = 2'-O-methyl modified nucleotide
  modified_base 8: mod_base = OTHER; note = 2'-O-methyl modified nucleotide
  modified_base 9: mod_base = OTHER; note = 2'-O-methyl modified nucleotide
  modified_base 11: mod_base = OTHER; note = 2'-O-methyl modified nucleotide
  modified_base 13: mod_base = OTHER; note = 2'-O-methyl modified nucleotide
  modified_base 18: mod_base = OTHER; note = 2'-O-methyl modified nucleotide
  modified_base 22: mod_base = OTHER; note = 2'-O-methyl modified nucleotide
  modified_base 25: mod_base = OTHER; note = 2'-O-methyl modified nucleotide
  modified_base 29: mod_base = OTHER; note = 2'-O-methyl modified nucleotide
  modified_base 30: mod_base = OTHER; note = 2'-O-methyl modified nucleotide
  modified_base 31: mod_base = OTHER; note = 2'-O-methyl modified nucleotide
  modified_base 32: mod_base = OTHER; note = 2'-O-methyl modified nucleotide
  modified_base 37: mod_base = OTHER; note = 2'-O-methyl modified nucleotide
  modified_base 38: mod_base = OTHER; note = 2'-O-methyl modified nucleotide
  modified_base 39: mod_base = OTHER; note = 2'-O-methyl modified nucleotide
  modified_base 40: mod_base = OTHER; note = 2'-O-methyl modified nucleotide
  modified_base 41: mod_base = OTHER; note = 2'-O-methyl modified nucleotide
  modified_base 42: mod_base = OTHER; note = 2'-O-methyl modified nucleotide
  modified_base 43: mod_base = OTHER; note = 2'-O-methyl modified nucleotide
  modified_base 47: mod_base = OTHER; note = 2'-O-methyl modified nucleotide
  modified_base 48: mod_base = OTHER; note = 2'-O-methyl modified nucleotide
  modified_base 51: mod_base = OTHER; note = 2'-O-methyl modified nucleotide
  modified_base 54: mod_base = OTHER; note = nucleotide with phosphorothioate linkage
  modified_base 58: mod_base = OTHER; note = 2'-O-methyl modified nucleotide
  modified_base 59: mod_base = OTHER; note = 2'-O-methyl modified nucleotide
  modified_base 61: mod_base = OTHER; note = 2'-O-methyl modified nucleotide
  modified_base 62: mod_base = OTHER; note = 2'-O-methyl modified nucleotide
  modified_base 63: mod_base = OTHER; note = 2'-O-methyl modified nucleotide
  modified_base 64: mod_base = OTHER; note = 2'-O-methyl modified nucleotide
  modified_base 65: mod_base = OTHER; note = 2'-O-methyl modified nucleotide
  modified_base 66: mod_base = OTHER; note = 2'-O-methyl modified nucleotide
  modified_base 67: mod_base = OTHER; note = 2'-O-methyl modified nucleotide
  modified_base 68: mod_base = OTHER; note = 2'-O-methyl modified nucleotide
  modified_base 69: mod_base = OTHER; note = 2'-O-methyl modified nucleotide
  modified_base 70: mod_base = OTHER; note = 2'-O-methyl modified nucleotide
  modified_base 75: mod_base = OTHER; note = 2'-O-methyl modified nucleotide
  modified_base 77: mod_base = OTHER; note = 2'-O-methyl modified nucleotide
  modified_base 80: mod_base = OTHER; note = 2'-O-methyl modified nucleotide
  modified_base 86: mod_base = OTHER; note = 2'-O-methyl modified nucleotide
  modified_base 87: mod_base = OTHER; note = 2'-O-methyl modified nucleotide
  modified_base 89: mod_base = OTHER; note = 2'-O-methyl modified nucleotide
  modified_base 90: mod_base = OTHER; note = 2'-O-methyl modified nucleotide
  modified_base 91: mod_base = OTHER; note = 2'-O-methyl modified nucleotide
  modified_base 92: mod_base = OTHER; note = 2'-O-methyl modified nucleotide
  modified_base 99: mod_base = OTHER; note = nucleotide with phosphorothioate linkage
  modified_base 100: mod_base = OTHER; note = 2'-O-methyl modified nucleotide with phosphorothioate linkage
  modified_base 101: mod_base = OTHER; note = 2'-O-methyl modified nucleotide

SEQ ID NO: 2726 - RNA, 101 nt, synthetic construct; identical to SEQ ID NO: 1726
  source 1..101: mol_type = other RNA
  modified_base 1: mod_base = OTHER; note = 2'-O-methyl modified nucleotide with phosphorothioate linkage
  modified_base 2: mod_base = OTHER; note = 2'-O-methyl modified nucleotide with phosphorothioate linkage
  modified_base 3: mod_base = OTHER; note = 2'-O-methyl modified nucleotide with phosphorothioate linkage
  modified_base 4: mod_base = OTHER; note = 2'-O-methyl modified nucleotide
  modified_base 5: mod_base = OTHER; note = 2'-O-methyl modified nucleotide
  modified_base 8: mod_base = OTHER; note = 2'-O-methyl modified nucleotide
  modified_base 9: mod_base = OTHER; note = 2'-O-methyl modified nucleotide
  modified_base 11: mod_base = OTHER; note = 2'-O-methyl modified nucleotide
  modified_base 13: mod_base = OTHER; note = 2'-O-methyl modified nucleotide
  modified_base 18: mod_base = OTHER; note = 2'-O-methyl modified nucleotide
  modified_base 22: mod_base = OTHER; note = 2'-O-methyl modified nucleotide
  modified_base 25: mod_base = OTHER; note = 2'-O-methyl modified nucleotide
  modified_base 29: mod_base = OTHER; note = 2'-O-methyl modified nucleotide
  modified_base 30: mod_base = OTHER; note = 2'-O-methyl modified nucleotide
  modified_base 31: mod_base = OTHER; note = 2'-O-methyl modified nucleotide
  modified_base 32: mod_base = OTHER; note = 2'-O-methyl modified nucleotide
  modified_base 37: mod_base = OTHER; note = 2'-O-methyl modified nucleotide
  modified_base 38: mod_base = OTHER; note = 2'-O-methyl modified nucleotide
  modified_base 39: mod_base = OTHER; note = 2'-O-methyl modified nucleotide
  modified_base 40: mod_base = OTHER; note = 2'-O-methyl modified nucleotide
  modified_base 41: mod_base = OTHER; note = 2'-O-methyl modified nucleotide
  modified_base 42: mod_base = OTHER; note = 2'-O-methyl modified nucleotide
  modified_base 43: mod_base = OTHER; note = 2'-O-methyl modified nucleotide
  modified_base 47: mod_base = OTHER; note = 2'-O-methyl modified nucleotide
  modified_base 48: mod_base = OTHER; note = 2'-O-methyl modified nucleotide
  modified_base 51: mod_base = OTHER; note = 2'-O-methyl modified nucleotide
  modified_base 54: mod_base = OTHER; note = nucleotide with phosphorothioate linkage
  modified_base 58: mod_base = OTHER; note = 2'-O-methyl modified nucleotide
  modified_base 59: mod_base = OTHER; note = 2'-O-methyl modified nucleotide
  modified_base 61: mod_base = OTHER; note = 2'-O-methyl modified nucleotide
  modified_base 62: mod_base = OTHER; note = 2'-O-methyl modified nucleotide
  modified_base 63: mod_base = OTHER; note = 2'-O-methyl modified nucleotide
  modified_base 64: mod_base = OTHER; note = 2'-O-methyl modified nucleotide
  modified_base 65: mod_base = OTHER; note = 2'-O-methyl modified nucleotide
  modified_base 66: mod_base = OTHER; note = 2'-O-methyl modified nucleotide
  modified_base 67: mod_base = OTHER; note = 2'-O-methyl modified nucleotide
  modified_base 68: mod_base = OTHER; note = 2'-O-methyl modified nucleotide
  modified_base 69: mod_base = OTHER; note = 2'-O-methyl modified nucleotide
  modified_base 70: mod_base = OTHER; note = 2'-O-methyl modified nucleotide
  modified_base 75: mod_base = OTHER; note = 2'-O-methyl modified nucleotide
  modified_base 77: mod_base = OTHER; note = 2'-O-methyl modified nucleotide
  modified_base 80: mod_base = OTHER; note = 2'-O-methyl modified nucleotide
  modified_base 86: mod_base = OTHER; note = 2'-O-methyl modified nucleotide
  modified_base 87: mod_base = OTHER; note = 2'-O-methyl modified nucleotide
  modified_base 89: mod_base = OTHER; note = 2'-O-methyl modified nucleotide
  modified_base 90: mod_base = OTHER; note = 2'-O-methyl modified nucleotide
  modified_base 91: mod_base = OTHER; note = 2'-O-methyl modified nucleotide
  modified_base 92: mod_base = OTHER; note = 2'-O-methyl modified nucleotide
  modified_base 99: mod_base = OTHER; note = nucleotide with phosphorothioate linkage
  modified_base 100: mod_base = OTHER; note = 2'-O-methyl modified nucleotide with phosphorothioate linkage
  modified_base 101: mod_base = OTHER; note = 2'-O-methyl modified nucleotide

SEQ ID NO: 2727 - RNA, 101 nt, synthetic construct; identical to SEQ ID NO: 1727
  source 1..101: mol_type = other RNA
  modified_base 1: mod_base = OTHER; note = 2'-O-methyl modified nucleotide with phosphorothioate linkage
  modified_base 2: mod_base = OTHER; note = 2'-O-methyl modified nucleotide with phosphorothioate linkage
  modified_base 3: mod_base = OTHER; note = 2'-O-methyl modified nucleotide with phosphorothioate linkage
  modified_base 4: mod_base = OTHER; note = 2'-O-methyl modified nucleotide
  modified_base 5: mod_base = OTHER; note = 2'-O-methyl modified nucleotide
  modified_base 8: mod_base = OTHER; note = 2'-O-methyl modified nucleotide
  modified_base 9: mod_base = OTHER; note = 2'-O-methyl modified nucleotide
  modified_base 11: mod_base = OTHER; note = 2'-O-methyl modified nucleotide
  modified_base 13: mod_base = OTHER; note = 2'-O-methyl modified nucleotide
  modified_base 18: mod_base = OTHER; note = 2'-O-methyl modified nucleotide
  modified_base 22: mod_base = OTHER; note = 2'-O-methyl modified nucleotide
  modified_base 25: mod_base = OTHER; note = 2'-O-methyl modified nucleotide
  modified_base 29: mod_base = OTHER; note = 2'-O-methyl modified nucleotide
  modified_base 30: mod_base = OTHER; note = 2'-O-methyl modified nucleotide
  modified_base 31: mod_base = OTHER; note = 2'-O-methyl modified nucleotide
  modified_base 32: mod_base = OTHER; note = 2'-O-methyl modified nucleotide
  modified_base 37: mod_base = OTHER; note = 2'-O-methyl modified nucleotide
  modified_base 38: mod_base = OTHER; note = 2'-O-methyl modified nucleotide
  modified_base 39: mod_base = OTHER; note = 2'-O-methyl modified nucleotide
  modified_base 40: mod_base = OTHER; note = 2'-O-methyl modified nucleotide
  modified_base 41: mod_base = OTHER; note = 2'-O-methyl modified nucleotide
  modified_base 42: mod_base = OTHER; note = 2'-O-methyl modified nucleotide
  modified_base 43: mod_base = OTHER; note = 2'-O-methyl modified nucleotide
  modified_base 47: mod_base = OTHER; note = 2'-O-methyl modified nucleotide
  modified_base 48: mod_base = OTHER; note = 2'-O-methyl modified nucleotide
  modified_base 51: mod_base = OTHER; note = 2'-O-methyl modified nucleotide
  modified_base 54: mod_base = OTHER; note = nucleotide with phosphorothioate linkage
  modified_base 58: mod_base = OTHER; note = 2'-O-methyl modified nucleotide
  modified_base 59: mod_base = OTHER; note = 2'-O-methyl modified nucleotide
  modified_base 61: mod_base = OTHER; note = 2'-O-methyl modified nucleotide
  modified_base 62: mod_base = OTHER; note = 2'-O-methyl modified nucleotide
  modified_base 63: mod_base = OTHER; note = 2'-O-methyl modified nucleotide
  modified_base 64: mod_base = OTHER; note = 2'-O-methyl modified nucleotide
  modified_base 65: mod_base = OTHER; note = 2'-O-methyl modified nucleotide
  modified_base 66: mod_base = OTHER; note = 2'-O-methyl modified nucleotide
  modified_base 67: mod_base = OTHER; note = 2'-O-methyl modified nucleotide
  modified_base 68: mod_base = OTHER; note = 2'-O-methyl modified nucleotide
  modified_base 69: mod_base = OTHER; note = 2'-O-methyl modified nucleotide
  modified_base 70: mod_base = OTHER; note = 2'-O-methyl modified nucleotide
  modified_base 75: mod_base = OTHER; note = 2'-O-methyl modified nucleotide
  modified_base 77: mod_base = OTHER; note = 2'-O-methyl modified nucleotide
  modified_base 80: mod_base = OTHER; note = 2'-O-methyl modified nucleotide
  modified_base 86: mod_base = OTHER; note = 2'-O-methyl modified nucleotide
  modified_base 87: mod_base = OTHER; note = 2'-O-methyl modified nucleotide
  modified_base 89: mod_base = OTHER; note = 2'-O-methyl modified nucleotide
  modified_base 90: mod_base = OTHER; note = 2'-O-methyl modified nucleotide
  modified_base 91: mod_base = OTHER; note = 2'-O-methyl modified nucleotide
  modified_base 92: mod_base = OTHER; note = 2'-O-methyl modified nucleotide
  modified_base 99: mod_base = OTHER; note = nucleotide with phosphorothioate linkage
  modified_base 100: mod_base = OTHER; note = 2'-O-methyl modified nucleotide with phosphorothioate linkage
  modified_base 101: mod_base = OTHER; note = 2'-O-methyl modified nucleotide

SEQ ID NO: 2728 - RNA, 101 nt, synthetic construct; identical to SEQ ID NO: 1728
  source 1..101: mol_type = other RNA
  modified_base 1: mod_base = OTHER; note = 2'-O-methyl modified nucleotide with phosphorothioate linkage
  modified_base 2: mod_base = OTHER; note = 2'-O-methyl modified nucleotide with phosphorothioate linkage
  modified_base 3: mod_base = OTHER; note = 2'-O-methyl modified nucleotide with phosphorothioate linkage
  modified_base 4: mod_base = OTHER; note = 2'-O-methyl modified nucleotide
  modified_base 5: mod_base = OTHER; note = 2'-O-methyl modified nucleotide
  modified_base 8: mod_base = OTHER; note = 2'-O-methyl modified nucleotide
  modified_base 9: mod_base = OTHER; note = 2'-O-methyl modified nucleotide
  modified_base 11: mod_base = OTHER; note = 2'-O-methyl modified nucleotide
  modified_base 13: mod_base = OTHER; note = 2'-O-methyl modified nucleotide
  modified_base 18: mod_base = OTHER; note = 2'-O-methyl modified nucleotide
  modified_base 22: mod_base = OTHER; note = 2'-O-methyl modified nucleotide
  modified_base 25: mod_base = OTHER; note = 2'-O-methyl modified nucleotide
  modified_base 29: mod_base = OTHER; note = 2'-O-methyl modified nucleotide
  modified_base 30: mod_base = OTHER; note = 2'-O-methyl modified nucleotide
  modified_base 31: mod_base = OTHER; note = 2'-O-methyl modified nucleotide
  modified_base 32: mod_base = OTHER; note = 2'-O-methyl modified nucleotide
  modified_base 37: mod_base = OTHER; note = 2'-O-methyl modified nucleotide
  modified_base 38: mod_base = OTHER; note = 2'-O-methyl modified nucleotide
  modified_base 39: mod_base = OTHER; note = 2'-O-methyl modified nucleotide
  modified_base 40: mod_base = OTHER; note = 2'-O-methyl modified nucleotide
  modified_base 41: mod_base = OTHER; note = 2'-O-methyl modified nucleotide
  modified_base 42: mod_base = OTHER; note = 2'-O-methyl modified nucleotide
  modified_base 43: mod_base = OTHER; note = 2'-O-methyl modified nucleotide
  modified_base 47: mod_base = OTHER; note = 2'-O-methyl modified nucleotide
  modified_base 48: mod_base = OTHER; note = 2'-O-methyl modified nucleotide
  modified_base 51: mod_base = OTHER; note = 2'-O-methyl modified nucleotide
  modified_base 54: mod_base = OTHER; note = nucleotide with phosphorothioate linkage
  modified_base 58: mod_base = OTHER; note = 2'-O-methyl modified nucleotide
  modified_base 59: mod_base = OTHER; note = 2'-O-methyl modified nucleotide
  modified_base 61: mod_base = OTHER; note = 2'-O-methyl modified nucleotide
  modified_base 62: mod_base = OTHER; note = 2'-O-methyl modified nucleotide
  modified_base 63: mod_base = OTHER; note = 2'-O-methyl modified nucleotide
  modified_base 64: mod_base = OTHER; note = 2'-O-methyl modified nucleotide
  modified_base 65: mod_base = OTHER; note = 2'-O-methyl modified nucleotide
  modified_base 66: mod_base = OTHER; note = 2'-O-methyl modified nucleotide
  modified_base 67: mod_base = OTHER; note = 2'-O-methyl modified nucleotide
  modified_base 68: mod_base = OTHER; note = 2'-O-methyl modified nucleotide
  modified_base 69: mod_base = OTHER; note = 2'-O-methyl modified nucleotide
  modified_base 70: mod_base = OTHER; note = 2'-O-methyl modified nucleotide
  modified_base 75: mod_base = OTHER; note = 2'-O-methyl modified nucleotide
  modified_base 77: mod_base = OTHER; note = 2'-O-methyl modified nucleotide
  modified_base 80: mod_base = OTHER; note = 2'-O-methyl modified nucleotide
  modified_base 86: mod_base = OTHER; note = 2'-O-methyl modified nucleotide
  modified_base 87: mod_base = OTHER; note = 2'-O-methyl modified nucleotide
  modified_base 89: mod_base = OTHER; note = 2'-O-methyl modified nucleotide
  modified_base 90: mod_base = OTHER; note = 2'-O-methyl modified nucleotide
  modified_base 91: mod_base = OTHER; note = 2'-O-methyl modified nucleotide
  modified_base 92: mod_base = OTHER; note = 2'-O-methyl modified nucleotide
  modified_base 99: mod_base = OTHER; note = nucleotide with phosphorothioate linkage
  modified_base 100: mod_base = OTHER; note = 2'-O-methyl modified nucleotide with phosphorothioate linkage
  modified_base 101: mod_base = OTHER; note = 2'-O-methyl modified nucleotide

SEQ ID NO: 2729 - RNA, 101 nt, synthetic construct; identical to SEQ ID NO: 1729
  source 1..101: mol_type = other RNA
  modified_base 1: mod_base = OTHER; note = 2'-O-methyl modified nucleotide with phosphorothioate linkage
  modified_base 2: mod_base = OTHER; note = 2'-O-methyl modified nucleotide with phosphorothioate linkage
  modified_base 3: mod_base = OTHER; note = 2'-O-methyl modified nucleotide with phosphorothioate linkage
  modified_base 4: mod_base = OTHER; note = 2'-O-methyl modified nucleotide
  modified_base 5: mod_base = OTHER; note = 2'-O-methyl modified nucleotide
  modified_base 8: mod_base = OTHER; note = 2'-O-methyl modified nucleotide
  modified_base 9: mod_base = OTHER; note = 2'-O-methyl modified nucleotide
  modified_base 11: mod_base = OTHER; note = 2'-O-methyl modified nucleotide
  modified_base 13: mod_base = OTHER; note = 2'-O-methyl modified nucleotide
  modified_base 18: mod_base = OTHER; note = 2'-O-methyl modified nucleotide
  modified_base 22: mod_base = OTHER; note = 2'-O-methyl modified nucleotide
  modified_base 25: mod_base = OTHER; note = 2'-O-methyl modified nucleotide
  modified_base 29: mod_base = OTHER; note = 2'-O-methyl modified nucleotide
  modified_base 30: mod_base = OTHER; note = 2'-O-methyl modified nucleotide
  modified_base 31: mod_base = OTHER; note = 2'-O-methyl modified nucleotide
  modified_base 32: mod_base = OTHER; note = 2'-O-methyl modified nucleotide
  modified_base 37: mod_base = OTHER; note = 2'-O-methyl modified nucleotide
  modified_base 38: mod_base = OTHER; note = 2'-O-methyl modified nucleotide
  modified_base 39: mod_base = OTHER; note = 2'-O-methyl modified nucleotide
  modified_base 40: mod_base = OTHER; note = 2'-O-methyl modified nucleotide
  modified_base 41: mod_base = OTHER; note = 2'-O-methyl modified nucleotide
  modified_base 42: mod_base = OTHER; note = 2'-O-methyl modified nucleotide
  modified_base 43: mod_base = OTHER; note = 2'-O-methyl modified nucleotide
  modified_base 47: mod_base = OTHER; note = 2'-O-methyl modified nucleotide
  modified_base 48: mod_base = OTHER; note = 2'-O-methyl modified nucleotide
  modified_base 51: mod_base = OTHER; note = 2'-O-methyl modified nucleotide
  modified_base 54: mod_base = OTHER; note = nucleotide with phosphorothioate linkage
  modified_base 58: mod_base = OTHER; note = 2'-O-methyl modified nucleotide
  modified_base 59: mod_base = OTHER; note = 2'-O-methyl modified nucleotide
  modified_base 61: mod_base = OTHER; note = 2'-O-methyl modified nucleotide
  modified_base 62: mod_base = OTHER; note = 2'-O-methyl modified nucleotide
  modified_base 63: mod_base = OTHER; note = 2'-O-methyl modified nucleotide
  modified_base 64: mod_base = OTHER; note = 2'-O-methyl modified nucleotide
  modified_base 65: mod_base = OTHER; note = 2'-O-methyl modified nucleotide
  modified_base 66: mod_base = OTHER; note = 2'-O-methyl modified nucleotide
  modified_base 67: mod_base = OTHER; note = 2'-O-methyl modified nucleotide
  modified_base 68: mod_base = OTHER; note = 2'-O-methyl modified nucleotide
  modified_base 69: mod_base = OTHER; note = 2'-O-methyl modified nucleotide
  modified_base 70: mod_base = OTHER; note = 2'-O-methyl modified nucleotide
  modified_base 75: mod_base = OTHER; note = 2'-O-methyl modified nucleotide
  modified_base 77: mod_base = OTHER; note = 2'-O-methyl modified nucleotide
  modified_base 80: mod_base = OTHER; note = 2'-O-methyl modified nucleotide
  modified_base 86: mod_base = OTHER; note = 2'-O-methyl modified nucleotide
  modified_base 87: mod_base = OTHER; note = 2'-O-methyl modified nucleotide
  modified_base 89: mod_base = OTHER; note = 2'-O-methyl modified nucleotide
  modified_base 90: mod_base = OTHER; note = 2'-O-methyl modified nucleotide
  modified_base 91: mod_base = OTHER; note = 2'-O-methyl modified nucleotide
  modified_base 92: mod_base = OTHER; note = 2'-O-methyl modified nucleotide
  modified_base 99: mod_base = OTHER; note = nucleotide with phosphorothioate linkage
  modified_base 100: mod_base = OTHER; note = 2'-O-methyl modified nucleotide with phosphorothioate linkage
  modified_base 101: mod_base = OTHER; note = 2'-O-methyl modified nucleotide

SEQ ID NO: 2730 - RNA, 101 nt, synthetic construct; identical to SEQ ID NO: 1730
  source 1..101: mol_type = other RNA
  modified_base 1: mod_base = OTHER; note = 2'-O-methyl modified nucleotide with phosphorothioate linkage
  modified_base 2: mod_base = OTHER; note = 2'-O-methyl modified nucleotide with phosphorothioate linkage
  modified_base 3: mod_base = OTHER; note = 2'-O-methyl modified nucleotide with phosphorothioate linkage
  modified_base 4: mod_base = OTHER; note = 2'-O-methyl modified nucleotide
  modified_base 5: mod_base = OTHER; note = 2'-O-methyl modified nucleotide
  modified_base 8: mod_base = OTHER; note = 2'-O-methyl modified nucleotide
  modified_base 9: mod_base = OTHER; note = 2'-O-methyl modified nucleotide
  modified_base 11: mod_base = OTHER; note = 2'-O-methyl modified nucleotide
  modified_base 13: mod_base = OTHER; note = 2'-O-methyl modified nucleotide
  modified_base 18: mod_base = OTHER; note = 2'-O-methyl modified nucleotide
  modified_base 22: mod_base = OTHER; note = 2'-O-methyl modified nucleotide
  modified_base 25: mod_base = OTHER; note = 2'-O-methyl modified nucleotide
  modified_base 29: mod_base = OTHER; note = 2'-O-methyl modified nucleotide
  modified_base 30: mod_base = OTHER; note = 2'-O-methyl modified nucleotide
  modified_base 31: mod_base = OTHER; note = 2'-O-methyl modified nucleotide
  modified_base 32: mod_base = OTHER; note = 2'-O-methyl modified nucleotide
  modified_base 37: mod_base = OTHER; note = 2'-O-methyl modified nucleotide
  modified_base 38: mod_base = OTHER; note = 2'-O-methyl modified nucleotide
  modified_base 39: mod_base = OTHER; note = 2'-O-methyl modified nucleotide
  modified_base 40: mod_base = OTHER; note = 2'-O-methyl modified nucleotide
  modified_base 41: mod_base = OTHER; note = 2'-O-methyl modified nucleotide
  modified_base 42: mod_base = OTHER; note = 2'-O-methyl modified nucleotide
  modified_base 43: mod_base = OTHER; note = 2'-O-methyl modified nucleotide
  modified_base 47: mod_base = OTHER; note = 2'-O-methyl modified nucleotide
  modified_base 48: mod_base = OTHER; note = 2'-O-methyl modified nucleotide
  modified_base 51: mod_base = OTHER; note = 2'-O-methyl modified nucleotide
  modified_base 54: mod_base = OTHER; note = nucleotide with phosphorothioate linkage
  modified_base 58: mod_base = OTHER; note = 2'-O-methyl modified nucleotide
  modified_base 59: mod_base = OTHER; note = 2'-O-methyl modified nucleotide
  modified_base 61: mod_base = OTHER; note = 2'-O-methyl modified nucleotide
  modified_base 62: mod_base = OTHER; note = 2'-O-methyl modified nucleotide
  modified_base 63: mod_base = OTHER; note = 2'-O-methyl modified nucleotide
  modified_base 64: mod_base = OTHER; note = 2'-O-methyl modified nucleotide
  modified_base 65: mod_base = OTHER; note = 2'-O-methyl modified nucleotide
  modified_base 66: mod_base = OTHER; note = 2'-O-methyl modified nucleotide
  modified_base 67: mod_base = OTHER; note = 2'-O-methyl modified nucleotide
  modified_base 68: mod_base = OTHER; note = 2'-O-methyl modified nucleotide
  modified_base 69: mod_base = OTHER; note = 2'-O-methyl modified nucleotide
  modified_base 70: mod_base = OTHER; note = 2'-O-methyl modified nucleotide
  modified_base 75: mod_base = OTHER; note = 2'-O-methyl modified nucleotide
  modified_base 77: mod_base = OTHER; note = 2'-O-methyl modified nucleotide
  modified_base 80: mod_base = OTHER; note = 2'-O-methyl modified nucleotide
  modified_base 86: mod_base = OTHER; note = 2'-O-methyl modified nucleotide
  modified_base 87: mod_base = OTHER; note = 2'-O-methyl modified nucleotide
  modified_base 89: mod_base = OTHER; note = 2'-O-methyl modified nucleotide
  modified_base 90: mod_base = OTHER; note = 2'-O-methyl modified nucleotide
  modified_base 91: mod_base = OTHER; note = 2'-O-methyl modified nucleotide
  modified_base 92: mod_base = OTHER; note = 2'-O-methyl modified nucleotide
  modified_base 99: mod_base = OTHER; note = nucleotide with phosphorothioate linkage
  modified_base 100: mod_base = OTHER; note = 2'-O-methyl modified nucleotide with phosphorothioate linkage
  modified_base 101: mod_base = OTHER; note = 2'-O-methyl modified nucleotide

SEQ ID NO: 2731 - RNA, 101 nt, synthetic construct; identical to SEQ ID NO: 1731
  source 1..101: mol_type = other RNA
  modified_base 1: mod_base = OTHER; note = 2'-O-methyl modified nucleotide with phosphorothioate linkage
  modified_base 2: mod_base = OTHER; note = 2'-O-methyl modified nucleotide with phosphorothioate linkage
  modified_base 3: mod_base = OTHER; note = 2'-O-methyl modified nucleotide with phosphorothioate linkage
  modified_base 4: mod_base = OTHER; note = 2'-O-methyl modified nucleotide
  modified_base 5: mod_base = OTHER; note = 2'-O-methyl modified nucleotide
  modified_base 8: mod_base = OTHER; note = 2'-O-methyl modified nucleotide
  modified_base 9: mod_base = OTHER; note = 2'-O-methyl modified nucleotide
  modified_base 11: mod_base = OTHER; note = 2'-O-methyl modified nucleotide
  modified_base 13: mod_base = OTHER; note = 2'-O-methyl modified nucleotide
  modified_base 18: mod_base = OTHER; note = 2'-O-methyl modified nucleotide
  modified_base 22: mod_base = OTHER; note = 2'-O-methyl modified nucleotide
  modified_base 25: mod_base = OTHER; note = 2'-O-methyl modified nucleotide
  modified_base 29: mod_base = OTHER; note = 2'-O-methyl modified nucleotide
  modified_base 30: mod_base = OTHER; note = 2'-O-methyl modified nucleotide
  modified_base 31: mod_base = OTHER; note = 2'-O-methyl modified nucleotide
  modified_base 32: mod_base = OTHER; note = 2'-O-methyl modified nucleotide
  modified_base 37: mod_base = OTHER; note = 2'-O-methyl modified nucleotide
  modified_base 38: mod_base = OTHER; note = 2'-O-methyl modified nucleotide
  modified_base 39: mod_base = OTHER; note = 2'-O-methyl modified nucleotide
  modified_base 40: mod_base = OTHER; note = 2'-O-methyl modified nucleotide
  modified_base 41: mod_base = OTHER; note = 2'-O-methyl modified nucleotide
  modified_base 42: mod_base = OTHER; note = 2'-O-methyl modified nucleotide
  modified_base 43: mod_base = OTHER; note = 2'-O-methyl modified nucleotide
  modified_base 47: mod_base = OTHER; note = 2'-O-methyl modified nucleotide
  modified_base 48: mod_base = OTHER; note = 2'-O-methyl modified nucleotide
  modified_base 51: mod_base = OTHER; note = 2'-O-methyl modified nucleotide
  modified_base 54: mod_base = OTHER; note = nucleotide with phosphorothioate linkage
  modified_base 58: mod_base = OTHER; note = 2'-O-methyl modified nucleotide
  modified_base 59: mod_base = OTHER; note = 2'-O-methyl modified nucleotide
  modified_base 61: mod_base = OTHER; note = 2'-O-methyl modified nucleotide
  modified_base 62: mod_base = OTHER; note = 2'-O-methyl modified nucleotide
  modified_base 63: mod_base = OTHER; note = 2'-O-methyl modified nucleotide
  modified_base 64: mod_base = OTHER; note = 2'-O-methyl modified nucleotide
  modified_base 65: mod_base = OTHER; note = 2'-O-methyl modified nucleotide
  modified_base 66: mod_base = OTHER; note = 2'-O-methyl modified nucleotide
  modified_base 67: mod_base = OTHER; note = 2'-O-methyl modified nucleotide
  modified_base 68: mod_base = OTHER; note = 2'-O-methyl modified nucleotide
  modified_base 69: mod_base = OTHER; note = 2'-O-methyl modified nucleotide
  modified_base 70: mod_base = OTHER; note = 2'-O-methyl modified nucleotide
  modified_base 75: mod_base = OTHER; note = 2'-O-methyl modified nucleotide
  modified_base 77: mod_base = OTHER; note = 2'-O-methyl modified nucleotide
  modified_base 80: mod_base = OTHER; note = 2'-O-methyl modified nucleotide
  modified_base 86: mod_base = OTHER; note = 2'-O-methyl modified nucleotide
  modified_base 87: mod_base = OTHER; note = 2'-O-methyl modified nucleotide
  modified_base 89: mod_base = OTHER; note = 2'-O-methyl modified nucleotide
  modified_base 90: mod_base = OTHER; note = 2'-O-methyl modified nucleotide
  modified_base 91: mod_base = OTHER; note = 2'-O-methyl modified nucleotide
  modified_base 92: mod_base = OTHER; note = 2'-O-methyl modified nucleotide
  modified_base 99: mod_base = OTHER; note = nucleotide with phosphorothioate linkage
  modified_base 100: mod_base = OTHER; note = 2'-O-methyl modified nucleotide with phosphorothioate linkage
  modified_base 101: mod_base = OTHER; note = 2'-O-methyl modified nucleotide

SEQ ID NO: 2732 - RNA, 101 nt, synthetic construct; identical to SEQ ID NO: 1732
  source 1..101: mol_type = other RNA
  modified_base 1: mod_base = OTHER; note = 2'-O-methyl modified nucleotide with phosphorothioate linkage
  modified_base 2: mod_base = OTHER; note = 2'-O-methyl modified nucleotide with phosphorothioate linkage
  modified_base 3: mod_base = OTHER; note = 2'-O-methyl modified nucleotide with phosphorothioate linkage
  modified_base 4: mod_base = OTHER; note = 2'-O-methyl modified nucleotide
  modified_base 5: mod_base = OTHER; note = 2'-O-methyl modified nucleotide
  modified_base 8: mod_base = OTHER; note = 2'-O-methyl modified nucleotide
  modified_base 9: mod_base = OTHER; note = 2'-O-methyl modified nucleotide
  modified_base 11: mod_base = OTHER; note = 2'-O-methyl modified nucleotide
  modified_base 13: mod_base = OTHER; note = 2'-O-methyl modified nucleotide
  modified_base 18: mod_base = OTHER; note = 2'-O-methyl modified nucleotide
  modified_base 22: mod_base = OTHER; note = 2'-O-methyl modified nucleotide
  modified_base 25: mod_base = OTHER; note = 2'-O-methyl modified nucleotide
  modified_base 29: mod_base = OTHER; note = 2'-O-methyl modified nucleotide
  modified_base 30: mod_base = OTHER; note = 2'-O-methyl modified nucleotide
  modified_base 31: mod_base = OTHER; note = 2'-O-methyl modified nucleotide
  modified_base 32: mod_base = OTHER; note = 2'-O-methyl modified nucleotide
  modified_base 37: mod_base = OTHER; note = 2'-O-methyl modified nucleotide
  modified_base 38: mod_base = OTHER; note = 2'-O-methyl modified nucleotide
  modified_base 39: mod_base = OTHER; note = 2'-O-methyl modified nucleotide
  modified_base 40: mod_base = OTHER; note = 2'-O-methyl modified nucleotide
  modified_base 41: mod_base = OTHER; note = 2'-O-methyl modified nucleotide
  modified_base 42: mod_base = OTHER; note = 2'-O-methyl modified nucleotide
  modified_base 43: mod_base = OTHER; note = 2'-O-methyl modified nucleotide
  modified_base 47: mod_base = OTHER; note = 2'-O-methyl modified nucleotide
  modified_base 48: mod_base = OTHER; note = 2'-O-methyl modified nucleotide
  modified_base 51: mod_base = OTHER; note = 2'-O-methyl modified nucleotide
  modified_base 54: mod_base = OTHER; note = nucleotide with phosphorothioate linkage
  modified_base 58: mod_base = OTHER; note = 2'-O-methyl modified nucleotide
  modified_base 59: mod_base = OTHER; note = 2'-O-methyl modified nucleotide
  modified_base 61: mod_base = OTHER; note = 2'-O-methyl modified nucleotide
  modified_base 62: mod_base = OTHER; note = 2'-O-methyl modified nucleotide
  modified_base 63: mod_base = OTHER; note = 2'-O-methyl modified nucleotide
  modified_base 64: mod_base = OTHER; note = 2'-O-methyl modified nucleotide
  modified_base 65: mod_base = OTHER; note = 2'-O-methyl modified nucleotide
  modified_base 66: mod_base = OTHER; note = 2'-O-methyl modified nucleotide
  modified_base 67: mod_base = OTHER; note = 2'-O-methyl modified nucleotide
  modified_base 68: mod_base = OTHER; note = 2'-O-methyl modified nucleotide
  modified_base 69: mod_base = OTHER; note = 2'-O-methyl modified nucleotide
  modified_base 70: mod_base = OTHER; note = 2'-O-methyl modified nucleotide
  modified_base 75: mod_base = OTHER; note = 2'-O-methyl modified nucleotide
  modified_base 77: mod_base = OTHER; note = 2'-O-methyl modified nucleotide
  modified_base 80: mod_base = OTHER; note = 2'-O-methyl modified nucleotide
  modified_base 86: mod_base = OTHER; note = 2'-O-methyl modified nucleotide
  modified_base 87: mod_base = OTHER; note = 2'-O-methyl modified nucleotide
  modified_base 89: mod_base = OTHER; note = 2'-O-methyl modified nucleotide
  modified_base 90: mod_base = OTHER; note = 2'-O-methyl modified nucleotide
  modified_base 91: mod_base = OTHER; note = 2'-O-methyl modified nucleotide
  modified_base 92: mod_base = OTHER; note = 2'-O-methyl modified nucleotide
  modified_base 99: mod_base = OTHER; note = nucleotide with phosphorothioate linkage
  modified_base 100: mod_base = OTHER; note = 2'-O-methyl modified nucleotide with phosphorothioate linkage
  modified_base 101: mod_base = OTHER; note = 2'-O-methyl modified nucleotide

SEQ ID NO: 2733 - RNA, 101 nt, synthetic construct; identical to SEQ ID NO: 1733
  source 1..101: mol_type = other RNA
  modified_base 1: mod_base = OTHER; note = 2'-O-methyl modified nucleotide with phosphorothioate linkage
  modified_base 2: mod_base = OTHER; note = 2'-O-methyl modified nucleotide with phosphorothioate linkage
  modified_base 3: mod_base = OTHER; note = 2'-O-methyl modified nucleotide with phosphorothioate linkage
  modified_base 4: mod_base = OTHER; note = 2'-O-methyl modified nucleotide
  modified_base 5: mod_base = OTHER; note = 2'-O-methyl modified nucleotide
  modified_base 8: mod_base = OTHER; note = 2'-O-methyl modified nucleotide
  modified_base 9: mod_base = OTHER; note = 2'-O-methyl modified nucleotide
  modified_base 11: mod_base = OTHER; note = 2'-O-methyl modified nucleotide
  modified_base 13: mod_base = OTHER; note = 2'-O-methyl modified nucleotide
  modified_base 18: mod_base = OTHER; note = 2'-O-methyl modified nucleotide
  modified_base 22: mod_base = OTHER; note = 2'-O-methyl modified nucleotide
  modified_base 25: mod_base = OTHER; note = 2'-O-methyl modified nucleotide
  modified_base 29: mod_base = OTHER; note = 2'-O-methyl modified nucleotide
  modified_base 30: mod_base = OTHER; note = 2'-O-methyl modified nucleotide
  modified_base 31: mod_base = OTHER; note = 2'-O-methyl modified nucleotide
  modified_base 32: mod_base = OTHER; note = 2'-O-methyl modified nucleotide
  modified_base 37: mod_base = OTHER; note = 2'-O-methyl modified nucleotide
  modified_base 38: mod_base = OTHER; note = 2'-O-methyl modified nucleotide
  modified_base 39: mod_base = OTHER; note = 2'-O-methyl modified nucleotide
  modified_base 40: mod_base = OTHER; note = 2'-O-methyl modified nucleotide
  modified_base 41: mod_base = OTHER; note = 2'-O-methyl modified nucleotide
  modified_base 42: mod_base = OTHER; note = 2'-O-methyl modified nucleotide
  modified_base 43: mod_base = OTHER; note = 2'-O-methyl modified nucleotide
  modified_base 47: mod_base = OTHER; note = 2'-O-methyl modified nucleotide
  modified_base 48: mod_base = OTHER; note = 2'-O-methyl modified nucleotide
  modified_base 51: mod_base = OTHER; note = 2'-O-methyl modified nucleotide
  modified_base 54: mod_base = OTHER; note = nucleotide with phosphorothioate linkage
  modified_base 58: mod_base = OTHER; note = 2'-O-methyl modified nucleotide
  modified_base 59: mod_base = OTHER; note = 2'-O-methyl modified nucleotide
  modified_base 61: mod_base = OTHER; note = 2'-O-methyl modified nucleotide
  modified_base 62: mod_base = OTHER; note = 2'-O-methyl modified nucleotide
  modified_base 63: mod_base = OTHER; note = 2'-O-methyl modified nucleotide
  modified_base 64: mod_base = OTHER; note = 2'-O-methyl modified nucleotide
  modified_base 65: mod_base = OTHER; note = 2'-O-methyl modified nucleotide
  modified_base 66: mod_base = OTHER; note = 2'-O-methyl modified nucleotide
  modified_base 67: mod_base = OTHER; note = 2'-O-methyl modified nucleotide
  modified_base 68: mod_base = OTHER; note = 2'-O-methyl modified nucleotide
  modified_base 69: mod_base = OTHER; note = 2'-O-methyl modified nucleotide
  modified_base 70: mod_base = OTHER; note = 2'-O-methyl modified nucleotide
  modified_base 75: mod_base = OTHER; note = 2'-O-methyl modified nucleotide
  modified_base 77: mod_base = OTHER; note = 2'-O-methyl modified nucleotide
  modified_base 80: mod_base = OTHER; note = 2'-O-methyl modified nucleotide
  modified_base 86: mod_base = OTHER; note = 2'-O-methyl modified nucleotide
  modified_base 87: mod_base = OTHER; note = 2'-O-methyl modified nucleotide
  modified_base 89: mod_base = OTHER; note = 2'-O-methyl modified nucleotide
  modified_base 90: mod_base = OTHER; note = 2'-O-methyl modified nucleotide
  modified_base 91: mod_base = OTHER; note = 2'-O-methyl modified nucleotide
  modified_base 92: mod_base = OTHER; note = 2'-O-methyl modified nucleotide
  modified_base 99: mod_base = OTHER; note = nucleotide with phosphorothioate linkage
  modified_base 100: mod_base = OTHER; note = 2'-O-methyl modified nucleotide with phosphorothioate linkage
  modified_base 101: mod_base = OTHER; note = 2'-O-methyl modified nucleotide

SEQ ID NO: 2734 - RNA, 101 nt, synthetic construct; identical to SEQ ID NO: 1734
  source 1..101: mol_type = other RNA
  modified_base 1: mod_base = OTHER; note = 2'-O-methyl modified nucleotide with phosphorothioate linkage
  modified_base 2: mod_base = OTHER; note = 2'-O-methyl modified nucleotide with phosphorothioate linkage
  modified_base 3: mod_base = OTHER; note = 2'-O-methyl modified nucleotide with phosphorothioate linkage
  modified_base 4: mod_base = OTHER; note = 2'-O-methyl modified nucleotide
  modified_base 5: mod_base = OTHER; note = 2'-O-methyl modified nucleotide
  modified_base 8: mod_base = OTHER; note = 2'-O-methyl modified nucleotide
  modified_base 9: mod_base = OTHER; note = 2'-O-methyl modified nucleotide
  modified_base 11: mod_base = OTHER; note = 2'-O-methyl modified nucleotide
  modified_base 13: mod_base = OTHER; note = 2'-O-methyl modified nucleotide
  modified_base 18: mod_base = OTHER; note = 2'-O-methyl modified nucleotide
  modified_base 22: mod_base = OTHER; note = 2'-O-methyl modified nucleotide
  modified_base 25: mod_base = OTHER; note = 2'-O-methyl modified nucleotide
  modified_base 29: mod_base = OTHER; note = 2'-O-methyl modified nucleotide
  modified_base 30: mod_base = OTHER; note = 2'-O-methyl modified nucleotide
  modified_base 31: mod_base = OTHER; note = 2'-O-methyl modified nucleotide
  modified_base 32: mod_base = OTHER; note = 2'-O-methyl modified nucleotide
  modified_base 37: mod_base = OTHER; note = 2'-O-methyl modified nucleotide
  modified_base 38: mod_base = OTHER; note = 2'-O-methyl modified nucleotide
  modified_base 39: mod_base = OTHER; note = 2'-O-methyl modified nucleotide
  modified_base 40: mod_base = OTHER; note = 2'-O-methyl modified nucleotide
  modified_base 41: mod_base = OTHER; note = 2'-O-methyl modified nucleotide
  modified_base 42: mod_base = OTHER; note = 2'-O-methyl modified nucleotide
  modified_base 43: mod_base = OTHER; note = 2'-O-methyl modified nucleotide
  modified_base 47: mod_base = OTHER; note = 2'-O-methyl modified nucleotide
  modified_base 48: mod_base = OTHER; note = 2'-O-methyl modified nucleotide
  modified_base 51: mod_base = OTHER; note = 2'-O-methyl modified nucleotide
  modified_base 54: mod_base = OTHER; note = nucleotide with phosphorothioate linkage
  modified_base 58: mod_base = OTHER; note = 2'-O-methyl modified nucleotide
  modified_base 59: mod_base = OTHER; note = 2'-O-methyl modified nucleotide
  modified_base 61: mod_base = OTHER; note = 2'-O-methyl modified nucleotide
  modified_base 62: mod_base = OTHER; note = 2'-O-methyl modified nucleotide
  modified_base 63: mod_base = OTHER; note = 2'-O-methyl modified nucleotide
  modified_base 64: mod_base = OTHER; note = 2'-O-methyl modified nucleotide
  modified_base 65: mod_base = OTHER; note = 2'-O-methyl modified nucleotide
  modified_base 66: mod_base = OTHER; note = 2'-O-methyl modified nucleotide
  modified_base 67: mod_base = OTHER; note = 2'-O-methyl modified nucleotide
  modified_base 68: mod_base = OTHER; note = 2'-O-methyl modified nucleotide
  modified_base 69: mod_base = OTHER; note = 2'-O-methyl modified nucleotide
  modified_base 70: mod_base = OTHER; note = 2'-O-methyl modified nucleotide
  modified_base 75: mod_base = OTHER; note = 2'-O-methyl modified nucleotide
  modified_base 77: mod_base = OTHER; note = 2'-O-methyl modified nucleotide
  modified_base 80: mod_base = OTHER; note = 2'-O-methyl modified nucleotide
  modified_base 86: mod_base = OTHER; note = 2'-O-methyl modified nucleotide
  modified_base 87: mod_base = OTHER; note = 2'-O-methyl modified nucleotide
  modified_base 89: mod_base = OTHER; note = 2'-O-methyl modified nucleotide
  modified_base 90: mod_base = OTHER; note = 2'-O-methyl modified nucleotide
  modified_base 91: mod_base = OTHER; note = 2'-O-methyl modified nucleotide
  modified_base 92: mod_base = OTHER; note = 2'-O-methyl modified nucleotide
  modified_base 99: mod_base = OTHER; note = nucleotide with phosphorothioate linkage
  modified_base 100: mod_base = OTHER; note = 2'-O-methyl modified nucleotide with phosphorothioate linkage
  modified_base 101: mod_base = OTHER; note = 2'-O-methyl modified nucleotide

SEQ ID NO: 2735 - RNA, 101 nt, synthetic construct; identical to SEQ ID NO: 1735
  source 1..101: mol_type = other RNA
  modified_base 1: mod_base = OTHER; note = 2'-O-methyl modified nucleotide with phosphorothioate linkage
  modified_base 2: mod_base = OTHER; note = 2'-O-methyl modified nucleotide with phosphorothioate linkage
  modified_base 3: mod_base = OTHER; note = 2'-O-methyl modified nucleotide with phosphorothioate linkage
  modified_base 4: mod_base = OTHER; note = 2'-O-methyl modified nucleotide
  modified_base 5: mod_base = OTHER; note = 2'-O-methyl modified nucleotide
  modified_base 8: mod_base = OTHER; note = 2'-O-methyl modified nucleotide
  modified_base 9: mod_base = OTHER; note = 2'-O-methyl modified nucleotide
  modified_base 11: mod_base = OTHER; note = 2'-O-methyl modified nucleotide
  modified_base 13: mod_base = OTHER; note = 2'-O-methyl modified nucleotide
  modified_base 18: mod_base = OTHER; note = 2'-O-methyl modified nucleotide
  modified_base 22: mod_base = OTHER; note = 2'-O-methyl modified nucleotide
  modified_base 25: mod_base = OTHER; note = 2'-O-methyl modified nucleotide
  modified_base 29: mod_base = OTHER; note = 2'-O-methyl modified nucleotide
  modified_base 30: mod_base = OTHER; note = 2'-O-methyl modified nucleotide
  modified_base 31: mod_base = OTHER; note = 2'-O-methyl modified nucleotide
  modified_base 32: mod_base = OTHER; note = 2'-O-methyl modified nucleotide
  modified_base 37: mod_base = OTHER; note = 2'-O-methyl modified nucleotide
  modified_base 38: mod_base = OTHER; note = 2'-O-methyl modified nucleotide
  modified_base 39: mod_base = OTHER; note = 2'-O-methyl modified nucleotide
  modified_base 40: mod_base = OTHER; note = 2'-O-methyl modified nucleotide
  modified_base 41: mod_base = OTHER; note = 2'-O-methyl modified nucleotide
  modified_base 42: mod_base = OTHER; note = 2'-O-methyl modified nucleotide
  modified_base 43: mod_base = OTHER; note = 2'-O-methyl modified nucleotide
  modified_base 47: mod_base = OTHER; note = 2'-O-methyl modified nucleotide
  modified_base 48: mod_base = OTHER; note = 2'-O-methyl modified nucleotide
  modified_base 51: mod_base = OTHER; note = 2'-O-methyl modified nucleotide
  modified_base 54: mod_base = OTHER; note = nucleotide with phosphorothioate linkage
  modified_base 58: mod_base = OTHER; note = 2'-O-methyl modified nucleotide
  modified_base 59: mod_base = OTHER; note = 2'-O-methyl modified nucleotide
  modified_base 61: mod_base = OTHER; note = 2'-O-methyl modified nucleotide
  modified_base 62: mod_base = OTHER; note = 2'-O-methyl modified nucleotide
  modified_base 63: mod_base = OTHER; note = 2'-O-methyl modified nucleotide
  modified_base 64: mod_base = OTHER; note = 2'-O-methyl modified nucleotide
  modified_base 65: mod_base = OTHER; note = 2'-O-methyl modified nucleotide
  modified_base 66: mod_base = OTHER; note = 2'-O-methyl modified nucleotide
  modified_base 67: mod_base = OTHER; note = 2'-O-methyl modified nucleotide
  modified_base 68: mod_base = OTHER; note = 2'-O-methyl modified nucleotide
  modified_base 69: mod_base = OTHER; note = 2'-O-methyl modified nucleotide
  modified_base 70: mod_base = OTHER; note = 2'-O-methyl modified nucleotide
  modified_base 75: mod_base = OTHER; note = 2'-O-methyl modified nucleotide
  modified_base 77: mod_base = OTHER; note = 2'-O-methyl modified nucleotide
  modified_base 80: mod_base = OTHER; note = 2'-O-methyl modified nucleotide
  modified_base 86: mod_base = OTHER; note = 2'-O-methyl modified nucleotide
  modified_base 87: mod_base = OTHER; note = 2'-O-methyl modified nucleotide
  modified_base 89: mod_base = OTHER; note = 2'-O-methyl modified nucleotide
  modified_base 90: mod_base = OTHER; note = 2'-O-methyl modified nucleotide
  modified_base 91: mod_base = OTHER; note = 2'-O-methyl modified nucleotide
  modified_base 92: mod_base = OTHER; note = 2'-O-methyl modified nucleotide
  modified_base 99: mod_base = OTHER; note = nucleotide with phosphorothioate linkage
  modified_base 100: mod_base = OTHER; note = 2'-O-methyl modified nucleotide with phosphorothioate linkage
  modified_base 101: mod_base = OTHER; note = 2'-O-methyl modified nucleotide

SEQ ID NO: 2736 - RNA, 101 nt, synthetic construct; identical to SEQ ID NO: 1736
  source 1..101: mol_type = other RNA
  modified_base 1: mod_base = OTHER; note = 2'-O-methyl modified nucleotide with phosphorothioate linkage
  modified_base 2: mod_base = OTHER; note = 2'-O-methyl modified nucleotide with phosphorothioate linkage
  modified_base 3: mod_base = OTHER; note = 2'-O-methyl modified nucleotide with phosphorothioate linkage
  modified_base 4: mod_base = OTHER; note = 2'-O-methyl modified nucleotide
  modified_base 5: mod_base = OTHER; note = 2'-O-methyl modified nucleotide
  modified_base 8: mod_base = OTHER; note = 2'-O-methyl modified nucleotide
  modified_base 9: mod_base = OTHER; note = 2'-O-methyl modified nucleotide
  modified_base 11: mod_base = OTHER; note = 2'-O-methyl modified nucleotide
  modified_base 13: mod_base = OTHER; note = 2'-O-methyl modified nucleotide
  modified_base 18: mod_base = OTHER; note = 2'-O-methyl modified nucleotide
  modified_base 22: mod_base = OTHER; note = 2'-O-methyl modified nucleotide
  modified_base 25: mod_base = OTHER; note = 2'-O-methyl modified nucleotide
  modified_base 29: mod_base = OTHER; note = 2'-O-methyl modified nucleotide
  modified_base 30: mod_base = OTHER; note = 2'-O-methyl modified nucleotide
  modified_base 31: mod_base = OTHER; note = 2'-O-methyl modified nucleotide
  modified_base 32: mod_base = OTHER; note = 2'-O-methyl modified nucleotide
  modified_base 37: mod_base = OTHER; note = 2'-O-methyl modified nucleotide
  modified_base 38: mod_base = OTHER; note = 2'-O-methyl modified nucleotide
  modified_base 39: mod_base = OTHER; note = 2'-O-methyl modified nucleotide
  modified_base 40: mod_base = OTHER; note = 2'-O-methyl modified nucleotide
  modified_base 41: mod_base = OTHER; note = 2'-O-methyl modified nucleotide
  modified_base 42: mod_base = OTHER; note = 2'-O-methyl modified nucleotide
  modified_base 43: mod_base = OTHER; note = 2'-O-methyl modified nucleotide
  modified_base 47: mod_base = OTHER; note = 2'-O-methyl modified nucleotide
  modified_base 48: mod_base = OTHER; note = 2'-O-methyl modified nucleotide
  modified_base 51: mod_base = OTHER; note = 2'-O-methyl modified nucleotide
  modified_base 54: mod_base = OTHER; note = nucleotide with phosphorothioate linkage
  modified_base 58: mod_base = OTHER; note = 2'-O-methyl modified nucleotide
  modified_base 59: mod_base = OTHER; note = 2'-O-methyl modified nucleotide
  modified_base 61: mod_base = OTHER; note = 2'-O-methyl modified nucleotide
  modified_base 62: mod_base = OTHER; note = 2'-O-methyl modified nucleotide
  modified_base 63: mod_base = OTHER; note = 2'-O-methyl modified nucleotide
  modified_base 64: mod_base = OTHER; note = 2'-O-methyl modified nucleotide
  modified_base 65: mod_base = OTHER; note = 2'-O-methyl modified nucleotide
  modified_base 66: mod_base = OTHER; note = 2'-O-methyl modified nucleotide
  modified_base 67: mod_base = OTHER; note = 2'-O-methyl modified nucleotide
  modified_base 68: mod_base = OTHER; note = 2'-O-methyl modified nucleotide
  modified_base 69: mod_base = OTHER; note = 2'-O-methyl modified nucleotide
  modified_base 70: mod_base = OTHER; note = 2'-O-methyl modified nucleotide
  modified_base 75: mod_base = OTHER; note = 2'-O-methyl modified nucleotide
  modified_base 77: mod_base = OTHER; note = 2'-O-methyl modified nucleotide
  modified_base 80: mod_base = OTHER; note = 2'-O-methyl modified nucleotide
  modified_base 86: mod_base = OTHER; note = 2'-O-methyl modified nucleotide
  modified_base 87: mod_base = OTHER; note = 2'-O-methyl modified nucleotide
  modified_base 89: mod_base = OTHER; note = 2'-O-methyl modified nucleotide
  modified_base 90: mod_base = OTHER; note = 2'-O-methyl modified nucleotide
  modified_base 91: mod_base = OTHER; note = 2'-O-methyl modified nucleotide
  modified_base 92: mod_base = OTHER; note = 2'-O-methyl modified nucleotide
  modified_base 99: mod_base = OTHER; note = nucleotide with phosphorothioate linkage
  modified_base 100: mod_base = OTHER; note = 2'-O-methyl modified nucleotide with phosphorothioate linkage
  modified_base 101: mod_base = OTHER; note = 2'-O-methyl modified nucleotide

SEQ ID NO: 2737 - RNA, 101 nt, synthetic construct; identical to SEQ ID NO: 1737
  source 1..101: mol_type = other RNA
  modified_base 1: mod_base = OTHER; note = 2'-O-methyl modified nucleotide with phosphorothioate linkage
  modified_base 2: mod_base = OTHER; note = 2'-O-methyl modified nucleotide with phosphorothioate linkage
  modified_base 3: mod_base = OTHER; note = 2'-O-methyl modified nucleotide with phosphorothioate linkage
  modified_base 4: mod_base = OTHER; note = 2'-O-methyl modified nucleotide
  modified_base 5: mod_base = OTHER; note = 2'-O-methyl modified nucleotide
  modified_base 8: mod_base = OTHER; note = 2'-O-methyl modified nucleotide
  modified_base 9: mod_base = OTHER; note = 2'-O-methyl modified nucleotide
  modified_base 11: mod_base = OTHER; note = 2'-O-methyl modified nucleotide
  modified_base 13: mod_base = OTHER; note = 2'-O-methyl modified nucleotide
  modified_base 18: mod_base = OTHER; note = 2'-O-methyl modified nucleotide
  modified_base 22: mod_base = OTHER; note = 2'-O-methyl modified nucleotide
  modified_base 25: mod_base = OTHER; note = 2'-O-methyl modified nucleotide
  modified_base 29: mod_base = OTHER; note = 2'-O-methyl modified nucleotide
  modified_base 30: mod_base = OTHER; note = 2'-O-methyl modified nucleotide
  modified_base 31: mod_base = OTHER; note = 2'-O-methyl modified nucleotide
  modified_base 32: mod_base = OTHER; note = 2'-O-methyl modified nucleotide
  modified_base 37: mod_base = OTHER; note = 2'-O-methyl modified nucleotide
  modified_base 38: mod_base = OTHER; note = 2'-O-methyl modified nucleotide
  modified_base 39: mod_base = OTHER; note = 2'-O-methyl modified nucleotide
  modified_base 40: mod_base = OTHER; note = 2'-O-methyl modified nucleotide
  modified_base 41: mod_base = OTHER; note = 2'-O-methyl modified nucleotide
  modified_base 42: mod_base = OTHER; note = 2'-O-methyl modified nucleotide
  modified_base 43: mod_base = OTHER; note = 2'-O-methyl modified nucleotide
  modified_base 47: mod_base = OTHER; note = 2'-O-methyl modified nucleotide
  modified_base 48: mod_base = OTHER; note = 2'-O-methyl modified nucleotide
  modified_base 51: mod_base = OTHER; note = 2'-O-methyl modified nucleotide
  modified_base 54: mod_base = OTHER; note = nucleotide with phosphorothioate linkage
  modified_base 58: mod_base = OTHER; note = 2'-O-methyl modified nucleotide
  modified_base 59: mod_base = OTHER; note = 2'-O-methyl modified nucleotide
  modified_base 61: mod_base = OTHER; note = 2'-O-methyl modified nucleotide
  modified_base 62: mod_base = OTHER; note = 2'-O-methyl modified nucleotide
  modified_base 63: mod_base = OTHER; note = 2'-O-methyl modified nucleotide
  modified_base 64: mod_base = OTHER; note = 2'-O-methyl modified nucleotide
  modified_base 65: mod_base = OTHER; note = 2'-O-methyl modified nucleotide
  modified_base 66: mod_base = OTHER; note = 2'-O-methyl modified nucleotide
  modified_base 67: mod_base = OTHER; note = 2'-O-methyl modified nucleotide
  modified_base 68: mod_base = OTHER; note = 2'-O-methyl modified nucleotide
  modified_base 69: mod_base = OTHER; note = 2'-O-methyl modified nucleotide
  modified_base 70: mod_base = OTHER; note = 2'-O-methyl modified nucleotide
  modified_base 75: mod_base = OTHER; note = 2'-O-methyl modified nucleotide
  modified_base 77: mod_base = OTHER; note = 2'-O-methyl modified nucleotide
  modified_base 80: mod_base = OTHER; note = 2'-O-methyl modified nucleotide
  modified_base 86: mod_base = OTHER; note = 2'-O-methyl modified nucleotide
  modified_base 87: mod_base = OTHER; note = 2'-O-methyl modified nucleotide
  modified_base 89: mod_base = OTHER; note = 2'-O-methyl modified nucleotide
  modified_base 90: mod_base = OTHER; note = 2'-O-methyl modified nucleotide
  modified_base 91: mod_base = OTHER; note = 2'-O-methyl modified nucleotide
  modified_base 92: mod_base = OTHER; note = 2'-O-methyl modified nucleotide
  modified_base 99: mod_base = OTHER; note = nucleotide with phosphorothioate linkage
  modified_base 100: mod_base = OTHER; note = 2'-O-methyl modified nucleotide with phosphorothioate linkage
  modified_base 101: mod_base = OTHER; note = 2'-O-methyl modified nucleotide

SEQ ID NO: 2738 - RNA, 101 nt, synthetic construct; identical to SEQ ID NO: 1738
  source 1..101: mol_type = other RNA
  modified_base 1: mod_base = OTHER; note = 2'-O-methyl modified nucleotide with phosphorothioate linkage
  modified_base 2: mod_base = OTHER; note = 2'-O-methyl modified nucleotide with phosphorothioate linkage
  modified_base 3: mod_base = OTHER; note = 2'-O-methyl modified nucleotide with phosphorothioate linkage
  modified_base 4: mod_base = OTHER; note = 2'-O-methyl modified nucleotide
  modified_base 5: mod_base = OTHER; note = 2'-O-methyl modified nucleotide
  modified_base 8: mod_base = OTHER; note = 2'-O-methyl modified nucleotide
  modified_base 9: mod_base = OTHER; note = 2'-O-methyl modified nucleotide
  modified_base 11: mod_base = OTHER; note = 2'-O-methyl modified nucleotide
  modified_base 13: mod_base = OTHER; note = 2'-O-methyl modified nucleotide
  modified_base 18: mod_base = OTHER; note = 2'-O-methyl modified nucleotide
  modified_base 22: mod_base = OTHER; note = 2'-O-methyl modified nucleotide
  modified_base 25: mod_base = OTHER; note = 2'-O-methyl modified nucleotide
  modified_base 29: mod_base = OTHER; note = 2'-O-methyl modified nucleotide
  modified_base 30: mod_base = OTHER; note = 2'-O-methyl modified nucleotide
  modified_base 31: mod_base = OTHER; note = 2'-O-methyl modified nucleotide
  modified_base 32: mod_base = OTHER; note = 2'-O-methyl modified nucleotide
  modified_base 37: mod_base = OTHER; note = 2'-O-methyl modified nucleotide
  modified_base 38: mod_base = OTHER; note = 2'-O-methyl modified nucleotide
  modified_base 39: mod_base = OTHER; note = 2'-O-methyl modified nucleotide
  modified_base 40: mod_base = OTHER; note = 2'-O-methyl modified nucleotide
  modified_base 41: mod_base = OTHER; note = 2'-O-methyl modified nucleotide
  modified_base 42: mod_base = OTHER; note = 2'-O-methyl modified nucleotide
  modified_base 43: mod_base = OTHER; note = 2'-O-methyl modified nucleotide
  modified_base 47: mod_base = OTHER; note = 2'-O-methyl modified nucleotide
  modified_base 48: mod_base = OTHER; note = 2'-O-methyl modified nucleotide
  modified_base 51: mod_base = OTHER; note = 2'-O-methyl modified nucleotide
  modified_base 54: mod_base = OTHER; note = nucleotide with phosphorothioate linkage
  modified_base 58: mod_base = OTHER; note = 2'-O-methyl modified nucleotide
  modified_base 59: mod_base = OTHER; note = 2'-O-methyl modified nucleotide
  modified_base 61: mod_base = OTHER; note = 2'-O-methyl modified nucleotide
  modified_base 62: mod_base = OTHER; note = 2'-O-methyl modified nucleotide
  modified_base 63: mod_base = OTHER; note = 2'-O-methyl modified nucleotide
  modified_base 64: mod_base = OTHER; note = 2'-O-methyl modified nucleotide
  modified_base 65: mod_base = OTHER; note = 2'-O-methyl modified nucleotide
  modified_base 66: mod_base = OTHER; note = 2'-O-methyl modified nucleotide
  modified_base 67: mod_base = OTHER; note = 2'-O-methyl modified nucleotide
  modified_base 68: mod_base = OTHER; note = 2'-O-methyl modified nucleotide
  modified_base 69: mod_base = OTHER; note = 2'-O-methyl modified nucleotide
  modified_base 70: mod_base = OTHER; note = 2'-O-methyl modified nucleotide
  modified_base 75: mod_base = OTHER; note = 2'-O-methyl modified nucleotide
  modified_base 77: mod_base = OTHER; note = 2'-O-methyl modified nucleotide
  modified_base 80: mod_base = OTHER; note = 2'-O-methyl modified nucleotide
  modified_base 86: mod_base = OTHER; note = 2'-O-methyl modified nucleotide
  modified_base 87: mod_base = OTHER; note = 2'-O-methyl modified nucleotide
  modified_base 89: mod_base = OTHER; note = 2'-O-methyl modified nucleotide
  modified_base 90: mod_base = OTHER; note = 2'-O-methyl modified nucleotide
  modified_base 91: mod_base = OTHER; note = 2'-O-methyl modified nucleotide
  modified_base 92: mod_base = OTHER; note = 2'-O-methyl modified nucleotide
  modified_base 99: mod_base = OTHER; note = nucleotide with phosphorothioate linkage
  modified_base 100: mod_base = OTHER; note = 2'-O-methyl modified nucleotide with phosphorothioate linkage
  modified_base 101: mod_base = OTHER; note = 2'-O-methyl modified nucleotide

SEQ ID NO: 2739 - RNA, 101 nt, synthetic construct; identical to SEQ ID NO: 1739
  source 1..101: mol_type = other RNA
  modified_base 1: mod_base = OTHER; note = 2'-O-methyl modified nucleotide with phosphorothioate linkage
  modified_base 2: mod_base = OTHER; note = 2'-O-methyl modified nucleotide with phosphorothioate linkage
  modified_base 3: mod_base = OTHER; note = 2'-O-methyl modified nucleotide with phosphorothioate linkage
  modified_base 4: mod_base = OTHER; note = 2'-O-methyl modified nucleotide
  modified_base 5: mod_base = OTHER; note = 2'-O-methyl modified nucleotide
  modified_base 8: mod_base = OTHER; note = 2'-O-methyl modified nucleotide
  modified_base 9: mod_base = OTHER; note = 2'-O-methyl modified nucleotide
  modified_base 11: mod_base = OTHER; note = 2'-O-methyl modified nucleotide
  modified_base 13: mod_base = OTHER; note = 2'-O-methyl modified nucleotide
  modified_base 18: mod_base = OTHER; note = 2'-O-methyl modified nucleotide
  modified_base 22: mod_base = OTHER; note = 2'-O-methyl modified nucleotide
  modified_base 25: mod_base = OTHER; note = 2'-O-methyl modified nucleotide
  modified_base 29: mod_base = OTHER; note = 2'-O-methyl modified nucleotide
  modified_base 30: mod_base = OTHER; note = 2'-O-methyl modified nucleotide
  modified_base 31: mod_base = OTHER; note = 2'-O-methyl modified nucleotide
  modified_base 32: mod_base = OTHER; note = 2'-O-methyl modified nucleotide
  modified_base 37: mod_base = OTHER; note = 2'-O-methyl modified nucleotide
  modified_base 38: mod_base = OTHER; note = 2'-O-methyl modified nucleotide
  modified_base 39: mod_base = OTHER; note = 2'-O-methyl modified nucleotide
  modified_base 40: mod_base = OTHER; note = 2'-O-methyl modified nucleotide
  modified_base 41: mod_base = OTHER; note = 2'-O-methyl modified nucleotide
  modified_base 42: mod_base = OTHER; note = 2'-O-methyl modified nucleotide
  modified_base 43: mod_base = OTHER; note = 2'-O-methyl modified nucleotide
  modified_base 47: mod_base = OTHER; note = 2'-O-methyl modified nucleotide
  modified_base 48: mod_base = OTHER; note = 2'-O-methyl modified nucleotide
  modified_base 51: mod_base = OTHER; note = 2'-O-methyl modified nucleotide
  modified_base 54: mod_base = OTHER; note = nucleotide with phosphorothioate linkage
  modified_base 58: mod_base = OTHER; note = 2'-O-methyl modified nucleotide
  modified_base 59: mod_base = OTHER; note = 2'-O-methyl modified nucleotide
  modified_base 61: mod_base = OTHER; note = 2'-O-methyl modified nucleotide
  modified_base 62: mod_base = OTHER; note = 2'-O-methyl modified nucleotide
  modified_base 63: mod_base = OTHER; note = 2'-O-methyl modified nucleotide
  modified_base 64: mod_base = OTHER; note = 2'-O-methyl modified nucleotide
  modified_base 65: mod_base = OTHER; note = 2'-O-methyl modified nucleotide
  modified_base 66: mod_base = OTHER; note = 2'-O-methyl modified nucleotide
  modified_base 67: mod_base = OTHER; note = 2'-O-methyl modified nucleotide
  modified_base 68: mod_base = OTHER; note = 2'-O-methyl modified nucleotide
  modified_base 69: mod_base = OTHER; note = 2'-O-methyl modified nucleotide
  modified_base 70: mod_base = OTHER; note = 2'-O-methyl modified nucleotide
  modified_base 75: mod_base = OTHER; note = 2'-O-methyl modified nucleotide
  modified_base 77: mod_base = OTHER; note = 2'-O-methyl modified nucleotide
  modified_base 80: mod_base = OTHER; note = 2'-O-methyl modified nucleotide
  modified_base 86: mod_base = OTHER; note = 2'-O-methyl modified nucleotide
  modified_base 87: mod_base = OTHER; note = 2'-O-methyl modified nucleotide
  modified_base 89: mod_base = OTHER; note = 2'-O-methyl modified nucleotide
  modified_base 90: mod_base = OTHER; note = 2'-O-methyl modified nucleotide
  modified_base 91: mod_base = OTHER; note = 2'-O-methyl modified nucleotide
  modified_base 92: mod_base = OTHER; note = 2'-O-methyl modified nucleotide
  modified_base 99: mod_base = OTHER; note = nucleotide with phosphorothioate linkage
  modified_base 100: mod_base = OTHER; note = 2'-O-methyl modified nucleotide with phosphorothioate linkage
  modified_base 101: mod_base = OTHER; note = 2'-O-methyl modified nucleotide

SEQ ID NO: 2740 - RNA, 101 nt, synthetic construct; identical to SEQ ID NO: 1740
  source 1..101: mol_type = other RNA
  modified_base 1: mod_base = OTHER; note = 2'-O-methyl modified nucleotide with phosphorothioate linkage
  modified_base 2: mod_base = OTHER; note = 2'-O-methyl modified nucleotide with phosphorothioate linkage
  modified_base 3: mod_base = OTHER; note = 2'-O-methyl modified nucleotide with phosphorothioate linkage
  modified_base 4: mod_base = OTHER; note = 2'-O-methyl modified nucleotide
  modified_base 5: mod_base = OTHER; note = 2'-O-methyl modified nucleotide
  modified_base 8: mod_base = OTHER; note = 2'-O-methyl modified nucleotide
  modified_base 9: mod_base = OTHER; note = 2'-O-methyl modified nucleotide
  modified_base 11: mod_base = OTHER; note = 2'-O-methyl modified nucleotide
  modified_base 13: mod_base = OTHER; note = 2'-O-methyl modified nucleotide
  modified_base 18: mod_base = OTHER; note = 2'-O-methyl modified nucleotide
  modified_base 22: mod_base = OTHER; note = 2'-O-methyl modified nucleotide
  modified_base 25: mod_base = OTHER; note = 2'-O-methyl modified nucleotide
  modified_base 29: mod_base = OTHER; note = 2'-O-methyl modified nucleotide
  modified_base 30: mod_base = OTHER; note = 2'-O-methyl modified nucleotide
  modified_base 31: mod_base = OTHER; note = 2'-O-methyl modified nucleotide
  modified_base 32: mod_base = OTHER; note = 2'-O-methyl modified nucleotide
  modified_base 37: mod_base = OTHER; note = 2'-O-methyl modified nucleotide
  modified_base 38: mod_base = OTHER; note = 2'-O-methyl modified nucleotide
  modified_base 39: mod_base = OTHER; note = 2'-O-methyl modified nucleotide
  modified_base 40: mod_base = OTHER; note = 2'-O-methyl modified nucleotide
  modified_base 41: mod_base = OTHER; note = 2'-O-methyl modified nucleotide
  modified_base 42: mod_base = OTHER; note = 2'-O-methyl modified nucleotide
  modified_base 43: mod_base = OTHER; note = 2'-O-methyl modified nucleotide
  modified_base 47: mod_base = OTHER; note = 2'-O-methyl modified nucleotide
  modified_base 48: mod_base = OTHER; note = 2'-O-methyl modified nucleotide
  modified_base 51: mod_base = OTHER; note = 2'-O-methyl modified nucleotide
  modified_base 54: mod_base = OTHER; note = nucleotide with phosphorothioate linkage
  modified_base 58: mod_base = OTHER; note = 2'-O-methyl modified nucleotide
  modified_base 59: mod_base = OTHER; note = 2'-O-methyl modified nucleotide
  modified_base 61: mod_base = OTHER; note = 2'-O-methyl modified nucleotide
  modified_base 62: mod_base = OTHER; note = 2'-O-methyl modified nucleotide
  modified_base 63: mod_base = OTHER; note = 2'-O-methyl modified nucleotide
  modified_base 64: mod_base = OTHER; note = 2'-O-methyl modified nucleotide
  modified_base 65: mod_base = OTHER; note = 2'-O-methyl modified nucleotide
  modified_base 66: mod_base = OTHER; note = 2'-O-methyl modified nucleotide
  modified_base 67: mod_base = OTHER; note = 2'-O-methyl modified nucleotide
  modified_base 68: mod_base = OTHER; note = 2'-O-methyl modified nucleotide
  modified_base 69: mod_base = OTHER; note = 2'-O-methyl modified nucleotide
  modified_base 70: mod_base = OTHER; note = 2'-O-methyl modified nucleotide
  modified_base 75: mod_base = OTHER; note = 2'-O-methyl modified nucleotide
  modified_base 77: mod_base = OTHER; note = 2'-O-methyl modified nucleotide
  modified_base 80: mod_base = OTHER; note = 2'-O-methyl modified nucleotide
  modified_base 86: mod_base = OTHER; note = 2'-O-methyl modified nucleotide
  modified_base 87: mod_base = OTHER; note = 2'-O-methyl modified nucleotide
  modified_base 89: mod_base = OTHER; note = 2'-O-methyl modified nucleotide
  modified_base 90: mod_base = OTHER; note = 2'-O-methyl modified nucleotide
  modified_base 91: mod_base = OTHER; note = 2'-O-methyl modified nucleotide
  modified_base 92: mod_base = OTHER; note = 2'-O-methyl modified nucleotide
  modified_base 99: mod_base = OTHER; note = nucleotide with phosphorothioate linkage
  modified_base 100: mod_base = OTHER; note = 2'-O-methyl modified nucleotide with phosphorothioate linkage
  modified_base 101: mod_base = OTHER; note = 2'-O-methyl modified nucleotide

SEQ ID NO: 2741 - RNA, 101 nt, synthetic construct; identical to SEQ ID NO: 1741
  source 1..101: mol_type = other RNA
  modified_base 1: mod_base = OTHER; note = 2'-O-methyl modified nucleotide with phosphorothioate linkage
  modified_base 2: mod_base = OTHER; note = 2'-O-methyl modified nucleotide with phosphorothioate linkage
  modified_base 3: mod_base = OTHER; note = 2'-O-methyl modified nucleotide with phosphorothioate linkage
  modified_base 4: mod_base = OTHER; note = 2'-O-methyl modified nucleotide
  modified_base 5: mod_base = OTHER; note = 2'-O-methyl modified nucleotide
  modified_base 8: mod_base = OTHER; note = 2'-O-methyl modified nucleotide
  modified_base 9: mod_base = OTHER; note = 2'-O-methyl modified nucleotide
  modified_base 11: mod_base = OTHER; note = 2'-O-methyl modified nucleotide
  modified_base 13: mod_base = OTHER; note = 2'-O-methyl modified nucleotide
  modified_base 18: mod_base = OTHER; note = 2'-O-methyl modified nucleotide
  modified_base 22: mod_base = OTHER; note = 2'-O-methyl modified nucleotide
  modified_base 25: mod_base = OTHER; note = 2'-O-methyl modified nucleotide
  modified_base 29: mod_base = OTHER; note = 2'-O-methyl modified nucleotide
  modified_base 30: mod_base = OTHER; note = 2'-O-methyl modified nucleotide
  modified_base 31: mod_base = OTHER; note = 2'-O-methyl modified nucleotide
  modified_base 32: mod_base = OTHER; note = 2'-O-methyl modified nucleotide
  modified_base 37: mod_base = OTHER; note = 2'-O-methyl modified nucleotide
  modified_base 38: mod_base = OTHER; note = 2'-O-methyl modified nucleotide
  modified_base 39: mod_base = OTHER; note = 2'-O-methyl modified nucleotide
  modified_base 40: mod_base = OTHER; note = 2'-O-methyl modified nucleotide
  modified_base 41: mod_base = OTHER; note = 2'-O-methyl modified nucleotide
  modified_base 42: mod_base = OTHER; note = 2'-O-methyl modified nucleotide
  modified_base 43: mod_base = OTHER; note = 2'-O-methyl modified nucleotide
  modified_base 47: mod_base = OTHER; note = 2'-O-methyl modified nucleotide
  modified_base 48: mod_base = OTHER; note = 2'-O-methyl modified nucleotide
  modified_base 51: mod_base = OTHER; note = 2'-O-methyl modified nucleotide
  modified_base 54: mod_base = OTHER; note = nucleotide with phosphorothioate linkage
  modified_base 58: mod_base = OTHER; note = 2'-O-methyl modified nucleotide
  modified_base 59: mod_base = OTHER; note = 2'-O-methyl modified nucleotide
  modified_base 61: mod_base = OTHER; note = 2'-O-methyl modified nucleotide
  modified_base 62: mod_base = OTHER; note = 2'-O-methyl modified nucleotide
  modified_base 63: mod_base = OTHER; note = 2'-O-methyl modified nucleotide
  modified_base 64: mod_base = OTHER; note = 2'-O-methyl modified nucleotide
  modified_base 65: mod_base = OTHER; note = 2'-O-methyl modified nucleotide
  modified_base 66: mod_base = OTHER; note = 2'-O-methyl modified nucleotide
  modified_base 67: mod_base = OTHER; note = 2'-O-methyl modified nucleotide
  modified_base 68: mod_base = OTHER; note = 2'-O-methyl modified nucleotide
  modified_base 69: mod_base = OTHER; note = 2'-O-methyl modified nucleotide
  modified_base 70: mod_base = OTHER; note = 2'-O-methyl modified nucleotide
  modified_base 75: mod_base = OTHER; note = 2'-O-methyl modified nucleotide
  modified_base 77: mod_base = OTHER; note = 2'-O-methyl modified nucleotide
  modified_base 80: mod_base = OTHER; note = 2'-O-methyl modified nucleotide
  modified_base 86: mod_base = OTHER; note = 2'-O-methyl modified nucleotide
  modified_base 87: mod_base = OTHER; note = 2'-O-methyl modified nucleotide
  modified_base 89: mod_base = OTHER; note = 2'-O-methyl modified nucleotide
  modified_base 90: mod_base = OTHER; note = 2'-O-methyl modified nucleotide
  modified_base 91: mod_base = OTHER; note = 2'-O-methyl modified nucleotide
  modified_base 92: mod_base = OTHER; note = 2'-O-methyl modified nucleotide
  modified_base 99: mod_base = OTHER; note = nucleotide with phosphorothioate linkage
  modified_base 100: mod_base = OTHER; note = 2'-O-methyl modified nucleotide with phosphorothioate linkage
  modified_base 101: mod_base = OTHER; note = 2'-O-methyl modified nucleotide

SEQ ID NO: 2742 - RNA, 101 nt, synthetic construct; identical to SEQ ID NO: 1742
  source 1..101: mol_type = other RNA
  modified_base 1: mod_base = OTHER; note = 2'-O-methyl modified nucleotide with phosphorothioate linkage
  modified_base 2: mod_base = OTHER; note = 2'-O-methyl modified nucleotide with phosphorothioate linkage
  modified_base 3: mod_base = OTHER; note = 2'-O-methyl modified nucleotide with phosphorothioate linkage
  modified_base 4: mod_base = OTHER; note = 2'-O-methyl modified nucleotide
  modified_base 5: mod_base = OTHER; note = 2'-O-methyl modified nucleotide
  modified_base 8: mod_base = OTHER; note = 2'-O-methyl modified nucleotide
  modified_base 9: mod_base = OTHER; note = 2'-O-methyl modified nucleotide
  modified_base 11: mod_base = OTHER; note = 2'-O-methyl modified nucleotide
  modified_base 13: mod_base = OTHER; note = 2'-O-methyl modified nucleotide
  modified_base 18: mod_base = OTHER; note = 2'-O-methyl modified nucleotide
  modified_base 22: mod_base = OTHER; note = 2'-O-methyl modified nucleotide
  modified_base 25: mod_base = OTHER; note = 2'-O-methyl modified nucleotide
  modified_base 29: mod_base = OTHER; note = 2'-O-methyl modified nucleotide
  modified_base 30: mod_base = OTHER; note = 2'-O-methyl modified nucleotide
  modified_base 31: mod_base = OTHER; note = 2'-O-methyl modified nucleotide
  modified_base 32: mod_base = OTHER; note = 2'-O-methyl modified nucleotide
  modified_base 37: mod_base = OTHER; note = 2'-O-methyl modified nucleotide
  modified_base 38: mod_base = OTHER; note = 2'-O-methyl modified nucleotide
  modified_base 39: mod_base = OTHER; note = 2'-O-methyl modified nucleotide
  modified_base 40: mod_base = OTHER; note = 2'-O-methyl modified nucleotide
  modified_base 41: mod_base = OTHER; note = 2'-O-methyl modified nucleotide
  modified_base 42: mod_base = OTHER; note = 2'-O-methyl modified nucleotide
  modified_base 43: mod_base = OTHER; note = 2'-O-methyl modified nucleotide
  modified_base 47: mod_base = OTHER; note = 2'-O-methyl modified nucleotide
  modified_base 48: mod_base = OTHER; note = 2'-O-methyl modified nucleotide
  modified_base 51: mod_base = OTHER; note = 2'-O-methyl modified nucleotide
  modified_base 54: mod_base = OTHER; note = nucleotide with phosphorothioate linkage
  modified_base 58: mod_base = OTHER; note = 2'-O-methyl modified nucleotide
  modified_base 59: mod_base = OTHER; note = 2'-O-methyl modified nucleotide
  modified_base 61: mod_base = OTHER; note = 2'-O-methyl modified nucleotide
  modified_base 62: mod_base = OTHER; note = 2'-O-methyl modified nucleotide
  modified_base 63: mod_base = OTHER; note = 2'-O-methyl modified nucleotide
  modified_base 64: mod_base = OTHER; note = 2'-O-methyl modified nucleotide
  modified_base 65: mod_base = OTHER; note = 2'-O-methyl modified nucleotide
  modified_base 66: mod_base = OTHER; note = 2'-O-methyl modified nucleotide
  modified_base 67: mod_base = OTHER; note = 2'-O-methyl modified nucleotide
  modified_base 68: mod_base = OTHER; note = 2'-O-methyl modified nucleotide
  modified_base 69: mod_base = OTHER; note = 2'-O-methyl modified nucleotide
  modified_base 70: mod_base = OTHER; note = 2'-O-methyl modified nucleotide
  modified_base 75: mod_base = OTHER; note = 2'-O-methyl modified nucleotide
  modified_base 77: mod_base = OTHER; note = 2'-O-methyl modified nucleotide
  modified_base 80: mod_base = OTHER; note = 2'-O-methyl modified nucleotide
  modified_base 86: mod_base = OTHER; note = 2'-O-methyl modified nucleotide
  modified_base 87: mod_base = OTHER; note = 2'-O-methyl modified nucleotide
  modified_base 89: mod_base = OTHER; note = 2'-O-methyl modified nucleotide
  modified_base 90: mod_base = OTHER; note = 2'-O-methyl modified nucleotide
  modified_base 91: mod_base = OTHER; note = 2'-O-methyl modified nucleotide
  modified_base 92: mod_base = OTHER; note = 2'-O-methyl modified nucleotide
  modified_base 99: mod_base = OTHER; note = nucleotide with phosphorothioate linkage
  modified_base 100: mod_base = OTHER; note = 2'-O-methyl modified nucleotide with phosphorothioate linkage
  modified_base 101: mod_base = OTHER; note = 2'-O-methyl modified nucleotide

SEQ ID NO: 2743 - RNA, 101 nt, synthetic construct; identical to SEQ ID NO: 1743
  source 1..101: mol_type = other RNA
  modified_base 1: mod_base = OTHER; note = 2'-O-methyl modified nucleotide with phosphorothioate linkage
  modified_base 2: mod_base = OTHER; note = 2'-O-methyl modified nucleotide with phosphorothioate linkage
  modified_base 3: mod_base = OTHER; note = 2'-O-methyl modified nucleotide with phosphorothioate linkage
  modified_base 4: mod_base = OTHER; note = 2'-O-methyl modified nucleotide
  modified_base 5: mod_base = OTHER; note = 2'-O-methyl modified nucleotide
  modified_base 8: mod_base = OTHER; note = 2'-O-methyl modified nucleotide
  modified_base 9: mod_base = OTHER; note = 2'-O-methyl modified nucleotide
  modified_base 11: mod_base = OTHER; note = 2'-O-methyl modified nucleotide
  modified_base 13: mod_base = OTHER; note = 2'-O-methyl modified nucleotide
  modified_base 18: mod_base = OTHER; note = 2'-O-methyl modified nucleotide
  modified_base 22: mod_base = OTHER; note = 2'-O-methyl modified nucleotide
  modified_base 25: mod_base = OTHER; note = 2'-O-methyl modified nucleotide
  modified_base 29: mod_base = OTHER; note = 2'-O-methyl modified nucleotide
  modified_base 30: mod_base = OTHER; note = 2'-O-methyl modified nucleotide
  modified_base 31: mod_base = OTHER; note = 2'-O-methyl modified nucleotide
  modified_base 32: mod_base = OTHER; note = 2'-O-methyl modified nucleotide
  modified_base 37: mod_base = OTHER; note = 2'-O-methyl modified nucleotide
  modified_base 38: mod_base = OTHER; note = 2'-O-methyl modified nucleotide
  modified_base 39: mod_base = OTHER; note = 2'-O-methyl modified nucleotide
  modified_base 40: mod_base = OTHER; note = 2'-O-methyl modified nucleotide
  modified_base 41: mod_base = OTHER; note = 2'-O-methyl modified nucleotide
  modified_base 42: mod_base = OTHER; note = 2'-O-methyl modified nucleotide
  modified_base 43: mod_base = OTHER; note = 2'-O-methyl modified nucleotide
  modified_base 47: mod_base = OTHER; note = 2'-O-methyl modified nucleotide
  modified_base 48: mod_base = OTHER; note = 2'-O-methyl modified nucleotide
  modified_base 51: mod_base = OTHER; note = 2'-O-methyl modified nucleotide
  modified_base 54: mod_base = OTHER; note = nucleotide with phosphorothioate linkage
  modified_base 58: mod_base = OTHER; note = 2'-O-methyl modified nucleotide
  modified_base 59: mod_base = OTHER; note = 2'-O-methyl modified nucleotide
  modified_base 61: mod_base = OTHER; note = 2'-O-methyl modified nucleotide
  modified_base 62: mod_base = OTHER; note = 2'-O-methyl modified nucleotide
  modified_base 63: mod_base = OTHER; note = 2'-O-methyl modified nucleotide
  modified_base 64: mod_base = OTHER; note = 2'-O-methyl modified nucleotide
  modified_base 65: mod_base = OTHER; note = 2'-O-methyl modified nucleotide
  modified_base 66: mod_base = OTHER; note = 2'-O-methyl modified nucleotide
  modified_base 67: mod_base = OTHER; note = 2'-O-methyl modified nucleotide
  modified_base 68: mod_base = OTHER; note = 2'-O-methyl modified nucleotide
  modified_base 69: mod_base = OTHER; note = 2'-O-methyl modified nucleotide
  modified_base 70: mod_base = OTHER; note = 2'-O-methyl modified nucleotide
  modified_base 75: mod_base = OTHER; note = 2'-O-methyl modified nucleotide
  modified_base 77: mod_base = OTHER; note = 2'-O-methyl modified nucleotide
  modified_base 80: mod_base = OTHER; note = 2'-O-methyl modified nucleotide
  modified_base 86: mod_base = OTHER; note = 2'-O-methyl modified nucleotide
  modified_base 87: mod_base = OTHER; note = 2'-O-methyl modified nucleotide
  modified_base 89: mod_base = OTHER; note = 2'-O-methyl modified nucleotide
  modified_base 90: mod_base = OTHER; note = 2'-O-methyl modified nucleotide
  modified_base 91: mod_base = OTHER; note = 2'-O-methyl modified nucleotide
  modified_base 92: mod_base = OTHER; note = 2'-O-methyl modified nucleotide
  modified_base 99: mod_base = OTHER; note = nucleotide with phosphorothioate linkage
  modified_base 100: mod_base = OTHER; note = 2'-O-methyl modified nucleotide with phosphorothioate linkage
  modified_base 101: mod_base = OTHER; note = 2'-O-methyl modified nucleotide

SEQ ID NO: 2744 - RNA, 101 nt, synthetic construct; identical to SEQ ID NO: 1744
  source 1..101: mol_type = other RNA
  modified_base 1: mod_base = OTHER; note = 2'-O-methyl modified nucleotide with phosphorothioate linkage
  modified_base 2: mod_base = OTHER; note = 2'-O-methyl modified nucleotide with phosphorothioate linkage
  modified_base 3: mod_base = OTHER; note = 2'-O-methyl modified nucleotide with phosphorothioate linkage
  modified_base 4: mod_base = OTHER; note = 2'-O-methyl modified nucleotide
  modified_base 5: mod_base = OTHER; note = 2'-O-methyl modified nucleotide
  modified_base 8: mod_base = OTHER; note = 2'-O-methyl modified nucleotide
  modified_base 9: mod_base = OTHER; note = 2'-O-methyl modified nucleotide
  modified_base 11: mod_base = OTHER; note = 2'-O-methyl modified nucleotide
  modified_base 13: mod_base = OTHER; note = 2'-O-methyl modified nucleotide
  modified_base 18: mod_base = OTHER; note = 2'-O-methyl modified nucleotide
  modified_base 22: mod_base = OTHER; note = 2'-O-methyl modified nucleotide
  modified_base 25: mod_base = OTHER; note = 2'-O-methyl modified nucleotide
  modified_base 29: mod_base = OTHER; note = 2'-O-methyl modified nucleotide
  modified_base 30: mod_base = OTHER; note = 2'-O-methyl modified nucleotide
  modified_base 31: mod_base = OTHER; note = 2'-O-methyl modified nucleotide
  modified_base 32: mod_base = OTHER; note = 2'-O-methyl modified nucleotide
  modified_base 37: mod_base = OTHER; note = 2'-O-methyl modified nucleotide
  modified_base 38: mod_base = OTHER; note = 2'-O-methyl modified nucleotide
  modified_base 39: mod_base = OTHER; note = 2'-O-methyl modified nucleotide
  modified_base 40: mod_base = OTHER; note = 2'-O-methyl modified nucleotide
  modified_base 41: mod_base = OTHER; note = 2'-O-methyl modified nucleotide
  modified_base 42: mod_base = OTHER; note = 2'-O-methyl modified nucleotide
  modified_base 43: mod_base = OTHER; note = 2'-O-methyl modified nucleotide
  modified_base 47: mod_base = OTHER; note = 2'-O-methyl modified nucleotide
  modified_base 48: mod_base = OTHER; note = 2'-O-methyl modified nucleotide
  modified_base 51: mod_base = OTHER; note = 2'-O-methyl modified nucleotide
  modified_base 54: mod_base = OTHER; note = nucleotide with phosphorothioate linkage
  modified_base 58: mod_base = OTHER; note = 2'-O-methyl modified nucleotide
  modified_base 59: mod_base = OTHER; note = 2'-O-methyl modified nucleotide
  modified_base 61: mod_base = OTHER; note = 2'-O-methyl modified nucleotide
  modified_base 62: mod_base = OTHER; note = 2'-O-methyl modified nucleotide
  modified_base 63: mod_base = OTHER; note = 2'-O-methyl modified nucleotide
  modified_base 64: mod_base = OTHER; note = 2'-O-methyl modified nucleotide
  modified_base 65: mod_base = OTHER; note = 2'-O-methyl modified nucleotide
  modified_base 66: mod_base = OTHER; note = 2'-O-methyl modified nucleotide
  modified_base 67: mod_base = OTHER; note = 2'-O-methyl modified nucleotide
  modified_base 68: mod_base = OTHER; note = 2'-O-methyl modified nucleotide
  modified_base 69: mod_base = OTHER; note = 2'-O-methyl modified nucleotide
  modified_base 70: mod_base = OTHER; note = 2'-O-methyl modified nucleotide
  modified_base 75: mod_base = OTHER; note = 2'-O-methyl modified nucleotide
  modified_base 77: mod_base = OTHER; note = 2'-O-methyl modified nucleotide
  modified_base 80: mod_base = OTHER; note = 2'-O-methyl modified nucleotide
  modified_base 86: mod_base = OTHER; note = 2'-O-methyl modified nucleotide
  modified_base 87: mod_base = OTHER; note = 2'-O-methyl modified nucleotide
  modified_base 89: mod_base = OTHER; note = 2'-O-methyl modified nucleotide
  modified_base 90: mod_base = OTHER; note = 2'-O-methyl modified nucleotide
  modified_base 91: mod_base = OTHER; note = 2'-O-methyl modified nucleotide
  modified_base 92: mod_base = OTHER; note = 2'-O-methyl modified nucleotide
  modified_base 99: mod_base = OTHER; note = nucleotide with phosphorothioate linkage
  modified_base 100: mod_base = OTHER; note = 2'-O-methyl modified nucleotide with phosphorothioate linkage
  modified_base 101: mod_base = OTHER; note = 2'-O-methyl modified nucleotide

SEQ ID NO: 2745 - RNA, 101 nt, synthetic construct; identical to SEQ ID NO: 1745
  source 1..101: mol_type = other RNA
  modified_base 1: mod_base = OTHER; note = 2'-O-methyl modified nucleotide with phosphorothioate linkage
  modified_base 2: mod_base = OTHER; note = 2'-O-methyl modified nucleotide with phosphorothioate linkage
  modified_base 3: mod_base = OTHER; note = 2'-O-methyl modified nucleotide with phosphorothioate linkage
  modified_base 4: mod_base = OTHER; note = 2'-O-methyl modified nucleotide
  modified_base 5: mod_base = OTHER; note = 2'-O-methyl modified nucleotide
  modified_base 8: mod_base = OTHER; note = 2'-O-methyl modified nucleotide
  modified_base 9: mod_base = OTHER; note = 2'-O-methyl modified nucleotide
  modified_base 11: mod_base = OTHER; note = 2'-O-methyl modified nucleotide
  modified_base 13: mod_base = OTHER; note = 2'-O-methyl modified nucleotide
  modified_base 18: mod_base = OTHER; note = 2'-O-methyl modified nucleotide
  modified_base 22: mod_base = OTHER; note = 2'-O-methyl modified nucleotide
  modified_base 25: mod_base = OTHER; note = 2'-O-methyl modified nucleotide
  modified_base 29: mod_base = OTHER; note = 2'-O-methyl modified nucleotide
  modified_base 30: mod_base = OTHER; note = 2'-O-methyl modified nucleotide
  modified_base 31: mod_base = OTHER; note = 2'-O-methyl modified nucleotide
  modified_base 32: mod_base = OTHER; note = 2'-O-methyl modified nucleotide
  modified_base 37: mod_base = OTHER; note = 2'-O-methyl modified nucleotide
  modified_base 38: mod_base = OTHER; note = 2'-O-methyl modified nucleotide
  modified_base 39: mod_base = OTHER; note = 2'-O-methyl modified nucleotide
  modified_base 40: mod_base = OTHER; note = 2'-O-methyl modified nucleotide
  modified_base 41: mod_base = OTHER; note = 2'-O-methyl modified nucleotide
  modified_base 42: mod_base = OTHER; note = 2'-O-methyl modified nucleotide
  modified_base 43: mod_base = OTHER; note = 2'-O-methyl modified nucleotide
  modified_base 47: mod_base = OTHER; note = 2'-O-methyl modified nucleotide
  modified_base 48: mod_base = OTHER; note = 2'-O-methyl modified nucleotide
  modified_base 51: mod_base = OTHER; note = 2'-O-methyl modified nucleotide
  modified_base 54: mod_base = OTHER; note = nucleotide with phosphorothioate linkage
  modified_base 58: mod_base = OTHER; note = 2'-O-methyl modified nucleotide
  modified_base 59: mod_base = OTHER; note = 2'-O-methyl modified nucleotide
  modified_base 61: mod_base = OTHER; note = 2'-O-methyl modified nucleotide
  modified_base 62: mod_base = OTHER; note = 2'-O-methyl modified nucleotide
  modified_base 63: mod_base = OTHER; note = 2'-O-methyl modified nucleotide
  modified_base 64: mod_base = OTHER; note = 2'-O-methyl modified nucleotide
  modified_base 65: mod_base = OTHER; note = 2'-O-methyl modified nucleotide
  modified_base 66: mod_base = OTHER; note = 2'-O-methyl modified nucleotide
  modified_base 67: mod_base = OTHER; note = 2'-O-methyl modified nucleotide
  modified_base 68: mod_base = OTHER; note = 2'-O-methyl modified nucleotide
  modified_base 69: mod_base = OTHER; note = 2'-O-methyl modified nucleotide
  modified_base 70: mod_base = OTHER; note = 2'-O-methyl modified nucleotide
  modified_base 75: mod_base = OTHER; note = 2'-O-methyl modified nucleotide
  modified_base 77: mod_base = OTHER; note = 2'-O-methyl modified nucleotide
  modified_base 80: mod_base = OTHER; note = 2'-O-methyl modified nucleotide
  modified_base 86: mod_base = OTHER; note = 2'-O-methyl modified nucleotide
  modified_base 87: mod_base = OTHER; note = 2'-O-methyl modified nucleotide
  modified_base 89: mod_base = OTHER; note = 2'-O-methyl modified nucleotide
  modified_base 90: mod_base = OTHER; note = 2'-O-methyl modified nucleotide
  modified_base 91: mod_base = OTHER; note = 2'-O-methyl modified nucleotide
  modified_base 92: mod_base = OTHER; note = 2'-O-methyl modified nucleotide
  modified_base 99: mod_base = OTHER; note = nucleotide with phosphorothioate linkage
  modified_base 100: mod_base = OTHER; note = 2'-O-methyl modified nucleotide with phosphorothioate linkage
  modified_base 101: mod_base = OTHER; note = 2'-O-methyl modified nucleotide

SEQ ID NO: 2746 - RNA, 101 nt, synthetic construct; identical to SEQ ID NO: 1746
  source 1..101: mol_type = other RNA
  modified_base 1: mod_base = OTHER; note = 2'-O-methyl modified nucleotide with phosphorothioate linkage
  modified_base 2: mod_base = OTHER; note = 2'-O-methyl modified nucleotide with phosphorothioate linkage
  modified_base 3: mod_base = OTHER; note = 2'-O-methyl modified nucleotide with phosphorothioate linkage
  modified_base 4: mod_base = OTHER; note = 2'-O-methyl modified nucleotide
  modified_base 5: mod_base = OTHER; note = 2'-O-methyl modified nucleotide
  modified_base 8: mod_base = OTHER; note = 2'-O-methyl modified nucleotide
  modified_base 9: mod_base = OTHER; note = 2'-O-methyl modified nucleotide
  modified_base 11: mod_base = OTHER; note = 2'-O-methyl modified nucleotide
  modified_base 13: mod_base = OTHER; note = 2'-O-methyl modified nucleotide
  modified_base 18: mod_base = OTHER; note = 2'-O-methyl modified nucleotide
  modified_base 22: mod_base = OTHER; note = 2'-O-methyl modified nucleotide
  modified_base 25: mod_base = OTHER; note = 2'-O-methyl modified nucleotide
  modified_base 29: mod_base = OTHER; note = 2'-O-methyl modified nucleotide
  modified_base 30: mod_base = OTHER; note = 2'-O-methyl modified nucleotide
  modified_base 31: mod_base = OTHER; note = 2'-O-methyl modified nucleotide
  modified_base 32: mod_base = OTHER; note = 2'-O-methyl modified nucleotide
  modified_base 37: mod_base = OTHER; note = 2'-O-methyl modified nucleotide
  modified_base 38: mod_base = OTHER; note = 2'-O-methyl modified nucleotide
  modified_base 39: mod_base = OTHER; note = 2'-O-methyl modified nucleotide
  modified_base 40: mod_base = OTHER; note = 2'-O-methyl modified nucleotide
  modified_base 41: mod_base = OTHER; note = 2'-O-methyl modified nucleotide
  modified_base 42: mod_base = OTHER; note = 2'-O-methyl modified nucleotide
  modified_base 43: mod_base = OTHER; note = 2'-O-methyl modified nucleotide
  modified_base 47: mod_base = OTHER; note = 2'-O-methyl modified nucleotide
  modified_base 48: mod_base = OTHER; note = 2'-O-methyl modified nucleotide
  modified_base 51: mod_base = OTHER; note = 2'-O-methyl modified nucleotide
  modified_base 54: mod_base = OTHER; note = nucleotide with phosphorothioate linkage
  modified_base 58: mod_base = OTHER; note = 2'-O-methyl modified nucleotide
  modified_base 59: mod_base = OTHER; note = 2'-O-methyl modified nucleotide
  modified_base 61: mod_base = OTHER; note = 2'-O-methyl modified nucleotide
  modified_base 62: mod_base = OTHER; note = 2'-O-methyl modified nucleotide
  modified_base 63: mod_base = OTHER; note = 2'-O-methyl modified nucleotide
  modified_base 64: mod_base = OTHER; note = 2'-O-methyl modified nucleotide
  modified_base 65: mod_base = OTHER; note = 2'-O-methyl modified nucleotide
  modified_base 66: mod_base = OTHER; note = 2'-O-methyl modified nucleotide
  modified_base 67: mod_base = OTHER; note = 2'-O-methyl modified nucleotide
  modified_base 68: mod_base = OTHER; note = 2'-O-methyl modified nucleotide
  modified_base 69: mod_base = OTHER; note = 2'-O-methyl modified nucleotide
  modified_base 70: mod_base = OTHER; note = 2'-O-methyl modified nucleotide
  modified_base 75: mod_base = OTHER; note = 2'-O-methyl modified nucleotide
  modified_base 77: mod_base = OTHER; note = 2'-O-methyl modified nucleotide
  modified_base 80: mod_base = OTHER; note = 2'-O-methyl modified nucleotide
  modified_base 86: mod_base = OTHER; note = 2'-O-methyl modified nucleotide
  modified_base 87: mod_base = OTHER; note = 2'-O-methyl modified nucleotide
  modified_base 89: mod_base = OTHER; note = 2'-O-methyl modified nucleotide
  modified_base 90: mod_base = OTHER; note = 2'-O-methyl modified nucleotide
  modified_base 91: mod_base = OTHER; note = 2'-O-methyl modified nucleotide
  modified_base 92: mod_base = OTHER; note = 2'-O-methyl modified nucleotide
  modified_base 99: mod_base = OTHER; note = nucleotide with phosphorothioate linkage
  modified_base 100: mod_base = OTHER; note = 2'-O-methyl modified nucleotide with phosphorothioate linkage
  modified_base 101: mod_base = OTHER; note = 2'-O-methyl modified nucleotide

SEQ ID NO: 2747 - RNA, 101 nt, synthetic construct; identical to SEQ ID NO: 1747
  source 1..101: mol_type = other RNA
  modified_base 1: mod_base = OTHER; note = 2'-O-methyl modified nucleotide with phosphorothioate linkage
  modified_base 2: mod_base = OTHER; note = 2'-O-methyl modified nucleotide with phosphorothioate linkage
  modified_base 3: mod_base = OTHER; note = 2'-O-methyl modified nucleotide with phosphorothioate linkage
  modified_base 4: mod_base = OTHER; note = 2'-O-methyl modified nucleotide
  modified_base 5: mod_base = OTHER; note = 2'-O-methyl modified nucleotide
  modified_base 8: mod_base = OTHER; note = 2'-O-methyl modified nucleotide
  modified_base 9: mod_base = OTHER; note = 2'-O-methyl modified nucleotide
  modified_base 11: mod_base = OTHER; note = 2'-O-methyl modified nucleotide
  modified_base 13: mod_base = OTHER; note = 2'-O-methyl modified nucleotide
  modified_base 18: mod_base = OTHER; note = 2'-O-methyl modified nucleotide
  modified_base 22: mod_base = OTHER; note = 2'-O-methyl modified nucleotide
  modified_base 25: mod_base = OTHER; note = 2'-O-methyl modified nucleotide
  modified_base 29: mod_base = OTHER; note = 2'-O-methyl modified nucleotide
  modified_base 30: mod_base = OTHER; note = 2'-O-methyl modified nucleotide
  modified_base 31: mod_base = OTHER; note = 2'-O-methyl modified nucleotide
  modified_base 32: mod_base = OTHER; note = 2'-O-methyl modified nucleotide
  modified_base 37: mod_base = OTHER; note = 2'-O-methyl modified nucleotide
  modified_base 38: mod_base = OTHER; note = 2'-O-methyl modified nucleotide
  modified_base 39: mod_base = OTHER; note = 2'-O-methyl modified nucleotide
  modified_base 40: mod_base = OTHER; note = 2'-O-methyl modified nucleotide
  modified_base 41: mod_base = OTHER; note = 2'-O-methyl modified nucleotide
  modified_base 42: mod_base = OTHER; note = 2'-O-methyl modified nucleotide
  modified_base 43: mod_base = OTHER; note = 2'-O-methyl modified nucleotide
  modified_base 47: mod_base = OTHER; note = 2'-O-methyl modified nucleotide
  modified_base 48: mod_base = OTHER; note = 2'-O-methyl modified nucleotide
  modified_base 51: mod_base = OTHER; note = 2'-O-methyl modified nucleotide
  modified_base 54: mod_base = OTHER; note = nucleotide with phosphorothioate linkage
  modified_base 58: mod_base = OTHER; note = 2'-O-methyl modified nucleotide
  modified_base 59: mod_base = OTHER; note = 2'-O-methyl modified nucleotide
  modified_base 61: mod_base = OTHER; note = 2'-O-methyl modified nucleotide
  modified_base 62: mod_base = OTHER; note = 2'-O-methyl modified nucleotide
  modified_base 63: mod_base = OTHER; note = 2'-O-methyl modified nucleotide
  modified_base 64: mod_base = OTHER; note = 2'-O-methyl modified nucleotide
  modified_base 65: mod_base = OTHER; note = 2'-O-methyl modified nucleotide
  modified_base 66: mod_base = OTHER; note = 2'-O-methyl modified nucleotide
  modified_base 67: mod_base = OTHER; note = 2'-O-methyl modified nucleotide
  modified_base 68: mod_base = OTHER; note = 2'-O-methyl modified nucleotide
  modified_base 69: mod_base = OTHER; note = 2'-O-methyl modified nucleotide
  modified_base 70: mod_base = OTHER; note = 2'-O-methyl modified nucleotide
  modified_base 75: mod_base = OTHER; note = 2'-O-methyl modified nucleotide
  modified_base 77: mod_base = OTHER; note = 2'-O-methyl modified nucleotide
  modified_base 80: mod_base = OTHER; note = 2'-O-methyl modified nucleotide
  modified_base 86: mod_base = OTHER; note = 2'-O-methyl modified nucleotide
  modified_base 87: mod_base = OTHER; note = 2'-O-methyl modified nucleotide
  modified_base 89: mod_base = OTHER; note = 2'-O-methyl modified nucleotide
  modified_base 90: mod_base = OTHER; note = 2'-O-methyl modified nucleotide
  modified_base 91: mod_base = OTHER; note = 2'-O-methyl modified nucleotide
  modified_base 92: mod_base = OTHER; note = 2'-O-methyl modified nucleotide
  modified_base 99: mod_base = OTHER; note = nucleotide with phosphorothioate linkage
  modified_base 100: mod_base = OTHER; note = 2'-O-methyl modified nucleotide with phosphorothioate linkage
  modified_base 101: mod_base = OTHER; note = 2'-O-methyl modified nucleotide

SEQ ID NO: 2748 - RNA, 101 nt, synthetic construct; identical to SEQ ID NO: 1748
  source 1..101: mol_type = other RNA
  modified_base 1: mod_base = OTHER; note = 2'-O-methyl modified nucleotide with phosphorothioate linkage
  modified_base 2: mod_base = OTHER; note = 2'-O-methyl modified nucleotide with phosphorothioate linkage
  modified_base 3: mod_base = OTHER; note = 2'-O-methyl modified nucleotide with phosphorothioate linkage
  modified_base 4: mod_base = OTHER; note = 2'-O-methyl modified nucleotide
  modified_base 5: mod_base = OTHER; note = 2'-O-methyl modified nucleotide
  modified_base 8: mod_base = OTHER; note = 2'-O-methyl modified nucleotide
  modified_base 9: mod_base = OTHER; note = 2'-O-methyl modified nucleotide
  modified_base 11: mod_base = OTHER; note = 2'-O-methyl modified nucleotide
  modified_base 13: mod_base = OTHER; note = 2'-O-methyl modified nucleotide
  modified_base 18: mod_base = OTHER; note = 2'-O-methyl modified nucleotide
  modified_base 22: mod_base = OTHER; note = 2'-O-methyl modified nucleotide
  modified_base 25: mod_base = OTHER; note = 2'-O-methyl modified nucleotide
  modified_base 29: mod_base = OTHER; note = 2'-O-methyl modified nucleotide
  modified_base 30: mod_base = OTHER; note = 2'-O-methyl modified nucleotide
  modified_base 31: mod_base = OTHER; note = 2'-O-methyl modified nucleotide
  modified_base 32: mod_base = OTHER; note = 2'-O-methyl modified nucleotide
  modified_base 37: mod_base = OTHER; note = 2'-O-methyl modified nucleotide
  modified_base 38: mod_base = OTHER; note = 2'-O-methyl modified nucleotide
  modified_base 39: mod_base = OTHER; note = 2'-O-methyl modified nucleotide
  modified_base 40: mod_base = OTHER; note = 2'-O-methyl modified nucleotide
  modified_base 41: mod_base = OTHER; note = 2'-O-methyl modified nucleotide
  modified_base 42: mod_base = OTHER; note = 2'-O-methyl modified nucleotide
  modified_base 43: mod_base = OTHER; note = 2'-O-methyl modified nucleotide
  modified_base 47: mod_base = OTHER; note = 2'-O-methyl modified nucleotide
  modified_base 48: mod_base = OTHER; note = 2'-O-methyl modified nucleotide
  modified_base 51: mod_base = OTHER; note = 2'-O-methyl modified nucleotide
  modified_base 54: mod_base = OTHER; note = nucleotide with phosphorothioate linkage
  modified_base 58: mod_base = OTHER; note = 2'-O-methyl modified nucleotide
  modified_base 59: mod_base = OTHER; note = 2'-O-methyl modified nucleotide
  modified_base 61: mod_base = OTHER; note = 2'-O-methyl modified nucleotide
  modified_base 62: mod_base = OTHER; note = 2'-O-methyl modified nucleotide
  modified_base 63: mod_base = OTHER; note = 2'-O-methyl modified nucleotide
  modified_base 64: mod_base = OTHER; note = 2'-O-methyl modified nucleotide
  modified_base 65: mod_base = OTHER; note = 2'-O-methyl modified nucleotide
  modified_base 66: mod_base = OTHER; note = 2'-O-methyl modified nucleotide
  modified_base 67: mod_base = OTHER; note = 2'-O-methyl modified nucleotide
  modified_base 68: mod_base = OTHER; note = 2'-O-methyl modified nucleotide
  modified_base 69: mod_base = OTHER; note = 2'-O-methyl modified nucleotide
  modified_base 70: mod_base = OTHER; note = 2'-O-methyl modified nucleotide
  modified_base 75: mod_base = OTHER; note = 2'-O-methyl modified nucleotide
  modified_base 77: mod_base = OTHER; note = 2'-O-methyl modified nucleotide
  modified_base 80: mod_base = OTHER; note = 2'-O-methyl modified nucleotide
  modified_base 86: mod_base = OTHER; note = 2'-O-methyl modified nucleotide
  modified_base 87: mod_base = OTHER; note = 2'-O-methyl modified nucleotide
  modified_base 89: mod_base = OTHER; note = 2'-O-methyl modified nucleotide
  modified_base 90: mod_base = OTHER; note = 2'-O-methyl modified nucleotide
  modified_base 91: mod_base = OTHER; note = 2'-O-methyl modified nucleotide
  modified_base 92: mod_base = OTHER; note = 2'-O-methyl modified nucleotide
  modified_base 99: mod_base = OTHER; note = nucleotide with phosphorothioate linkage
  modified_base 100: mod_base = OTHER; note = 2'-O-methyl modified nucleotide with phosphorothioate linkage
  modified_base 101: mod_base = OTHER; note = 2'-O-methyl modified nucleotide

SEQ ID NO: 2749 - RNA, 101 nt, synthetic construct; identical to SEQ ID NO: 1749
  source 1..101: mol_type = other RNA
  modified_base 1: mod_base = OTHER; note = 2'-O-methyl modified nucleotide with phosphorothioate linkage
  modified_base 2: mod_base = OTHER; note = 2'-O-methyl modified nucleotide with phosphorothioate linkage
  modified_base 3: mod_base = OTHER; note = 2'-O-methyl modified nucleotide with phosphorothioate linkage
  modified_base 4: mod_base = OTHER; note = 2'-O-methyl modified nucleotide
  modified_base 5: mod_base = OTHER; note = 2'-O-methyl modified nucleotide
  modified_base 8: mod_base = OTHER; note = 2'-O-methyl modified nucleotide
  modified_base 9: mod_base = OTHER; note = 2'-O-methyl modified nucleotide
  modified_base 11: mod_base = OTHER; note = 2'-O-methyl modified nucleotide
  modified_base 13: mod_base = OTHER; note = 2'-O-methyl modified nucleotide
  modified_base 18: mod_base = OTHER; note = 2'-O-methyl modified nucleotide
  modified_base 22: mod_base = OTHER; note = 2'-O-methyl modified nucleotide
  modified_base 25: mod_base = OTHER; note = 2'-O-methyl modified nucleotide
  modified_base 29: mod_base = OTHER; note = 2'-O-methyl modified nucleotide
  modified_base 30: mod_base = OTHER; note = 2'-O-methyl modified nucleotide
  modified_base 31: mod_base = OTHER; note = 2'-O-methyl modified nucleotide
  modified_base 32: mod_base = OTHER; note = 2'-O-methyl modified nucleotide
  modified_base 37: mod_base = OTHER; note = 2'-O-methyl modified nucleotide
  modified_base 38: mod_base = OTHER; note = 2'-O-methyl modified nucleotide
  modified_base 39: mod_base = OTHER; note = 2'-O-methyl modified nucleotide
  modified_base 40: mod_base = OTHER; note = 2'-O-methyl modified nucleotide
  modified_base 41: mod_base = OTHER; note = 2'-O-methyl modified nucleotide
  modified_base 42: mod_base = OTHER; note = 2'-O-methyl modified nucleotide
  modified_base 43: mod_base = OTHER; note = 2'-O-methyl modified nucleotide
  modified_base 47: mod_base = OTHER; note = 2'-O-methyl modified nucleotide
  modified_base 48: mod_base = OTHER; note = 2'-O-methyl modified nucleotide
  modified_base 51: mod_base = OTHER; note = 2'-O-methyl modified nucleotide
  modified_base 54: mod_base = OTHER; note = nucleotide with phosphorothioate linkage
  modified_base 58: mod_base = OTHER; note = 2'-O-methyl modified nucleotide
  modified_base 59: mod_base = OTHER; note = 2'-O-methyl modified nucleotide
  modified_base 61: mod_base = OTHER; note = 2'-O-methyl modified nucleotide
  modified_base 62: mod_base = OTHER; note = 2'-O-methyl modified nucleotide
  modified_base 63: mod_base = OTHER; note = 2'-O-methyl modified nucleotide
  modified_base 64: mod_base = OTHER; note = 2'-O-methyl modified nucleotide
  modified_base 65: mod_base = OTHER; note = 2'-O-methyl modified nucleotide
  modified_base 66: mod_base = OTHER; note = 2'-O-methyl modified nucleotide
  modified_base 67: mod_base = OTHER; note = 2'-O-methyl modified nucleotide
  modified_base 68: mod_base = OTHER; note = 2'-O-methyl modified nucleotide
  modified_base 69: mod_base = OTHER; note = 2'-O-methyl modified nucleotide
  modified_base 70: mod_base = OTHER; note = 2'-O-methyl modified nucleotide
  modified_base 75: mod_base = OTHER; note = 2'-O-methyl modified nucleotide
  modified_base 77: mod_base = OTHER; note = 2'-O-methyl modified nucleotide
  modified_base 80: mod_base = OTHER; note = 2'-O-methyl modified nucleotide
  modified_base 86: mod_base = OTHER; note = 2'-O-methyl modified nucleotide
  modified_base 87: mod_base = OTHER; note = 2'-O-methyl modified nucleotide
  modified_base 89: mod_base = OTHER; note = 2'-O-methyl modified nucleotide
  modified_base 90: mod_base = OTHER; note = 2'-O-methyl modified nucleotide
  modified_base 91: mod_base = OTHER; note = 2'-O-methyl modified nucleotide
  modified_base 92: mod_base = OTHER; note = 2'-O-methyl modified nucleotide
  modified_base 99: mod_base = OTHER; note = nucleotide with phosphorothioate linkage
  modified_base 100: mod_base = OTHER; note = 2'-O-methyl modified nucleotide with phosphorothioate linkage
  modified_base 101: mod_base = OTHER; note = 2'-O-methyl modified nucleotide

SEQ ID NO: 2750 - RNA, 101 nt, synthetic construct; identical to SEQ ID NO: 1750
  source 1..101: mol_type = other RNA
  modified_base 1: mod_base = OTHER; note = 2'-O-methyl modified nucleotide with phosphorothioate linkage
  modified_base 2: mod_base = OTHER; note = 2'-O-methyl modified nucleotide with phosphorothioate linkage
  modified_base 3: mod_base = OTHER; note = 2'-O-methyl modified nucleotide with phosphorothioate linkage
  modified_base 4: mod_base = OTHER; note = 2'-O-methyl modified nucleotide
  modified_base 5: mod_base = OTHER; note = 2'-O-methyl modified nucleotide
  modified_base 8: mod_base = OTHER; note = 2'-O-methyl modified nucleotide
  modified_base 9: mod_base = OTHER; note = 2'-O-methyl modified nucleotide
  modified_base 11: mod_base = OTHER; note = 2'-O-methyl modified nucleotide
  modified_base 13: mod_base = OTHER; note = 2'-O-methyl modified nucleotide
  modified_base 18: mod_base = OTHER; note = 2'-O-methyl modified nucleotide
  modified_base 22: mod_base = OTHER; note = 2'-O-methyl modified nucleotide
  modified_base 25: mod_base = OTHER; note = 2'-O-methyl modified nucleotide
  modified_base 29: mod_base = OTHER; note = 2'-O-methyl modified nucleotide
  modified_base 30: mod_base = OTHER; note = 2'-O-methyl modified nucleotide
  modified_base 31: mod_base = OTHER; note = 2'-O-methyl modified nucleotide
  modified_base 32: mod_base = OTHER; note = 2'-O-methyl modified nucleotide
  modified_base 37: mod_base = OTHER; note = 2'-O-methyl modified nucleotide
  modified_base 38: mod_base = OTHER; note = 2'-O-methyl modified nucleotide
  modified_base 39: mod_base = OTHER; note = 2'-O-methyl modified nucleotide
  modified_base 40: mod_base = OTHER; note = 2'-O-methyl modified nucleotide
  modified_base 41: mod_base = OTHER; note = 2'-O-methyl modified nucleotide
  modified_base 42: mod_base = OTHER; note = 2'-O-methyl modified nucleotide
  modified_base 43: mod_base = OTHER; note = 2'-O-methyl modified nucleotide
  modified_base 47: mod_base = OTHER; note = 2'-O-methyl modified nucleotide
  modified_base 48: mod_base = OTHER; note = 2'-O-methyl modified nucleotide
  modified_base 51: mod_base = OTHER; note = 2'-O-methyl modified nucleotide
  modified_base 54: mod_base = OTHER; note = nucleotide with phosphorothioate linkage
  modified_base 58: mod_base = OTHER; note = 2'-O-methyl modified nucleotide
  modified_base 59: mod_base = OTHER; note = 2'-O-methyl modified nucleotide
  modified_base 61: mod_base = OTHER; note = 2'-O-methyl modified nucleotide
  modified_base 62: mod_base = OTHER; note = 2'-O-methyl modified nucleotide
  modified_base 63: mod_base = OTHER; note = 2'-O-methyl modified nucleotide
  modified_base 64: mod_base = OTHER; note = 2'-O-methyl modified nucleotide
  modified_base 65: mod_base = OTHER; note = 2'-O-methyl modified nucleotide
  modified_base 66: mod_base = OTHER; note = 2'-O-methyl modified nucleotide
  modified_base 67: mod_base = OTHER; note = 2'-O-methyl modified nucleotide
  modified_base 68: mod_base = OTHER; note = 2'-O-methyl modified nucleotide
  modified_base 69: mod_base = OTHER; note = 2'-O-methyl modified nucleotide
  modified_base 70: mod_base = OTHER; note = 2'-O-methyl modified nucleotide
  modified_base 75: mod_base = OTHER; note = 2'-O-methyl modified nucleotide
  modified_base 77: mod_base = OTHER; note = 2'-O-methyl modified nucleotide
  modified_base 80: mod_base = OTHER; note = 2'-O-methyl modified nucleotide
  modified_base 86: mod_base = OTHER; note = 2'-O-methyl modified nucleotide
  modified_base 87: mod_base = OTHER; note = 2'-O-methyl modified nucleotide
  modified_base 89: mod_base = OTHER; note = 2'-O-methyl modified nucleotide
  modified_base 90: mod_base = OTHER; note = 2'-O-methyl modified nucleotide
  modified_base 91: mod_base = OTHER; note = 2'-O-methyl modified nucleotide
  modified_base 92: mod_base = OTHER; note = 2'-O-methyl modified nucleotide
  modified_base 99: mod_base = OTHER; note = nucleotide with phosphorothioate linkage
  modified_base 100: mod_base = OTHER; note = 2'-O-methyl modified nucleotide with phosphorothioate linkage
  modified_base 101: mod_base = OTHER; note = 2'-O-methyl modified nucleotide

SEQ ID NO: 2751 - RNA, 101 nt, synthetic construct; identical to SEQ ID NO: 1751
  source 1..101: mol_type = other RNA
  modified_base 1: mod_base = OTHER; note = 2'-O-methyl modified nucleotide with phosphorothioate linkage
  modified_base 2: mod_base = OTHER; note = 2'-O-methyl modified nucleotide with phosphorothioate linkage
  modified_base 3: mod_base = OTHER; note = 2'-O-methyl modified nucleotide with phosphorothioate linkage
  modified_base 4: mod_base = OTHER; note = 2'-O-methyl modified nucleotide
  modified_base 5: mod_base = OTHER; note = 2'-O-methyl modified nucleotide
  modified_base 8: mod_base = OTHER; note = 2'-O-methyl modified nucleotide
  modified_base 9: mod_base = OTHER; note = 2'-O-methyl modified nucleotide
  modified_base 11: mod_base = OTHER; note = 2'-O-methyl modified nucleotide
  modified_base 13: mod_base = OTHER; note = 2'-O-methyl modified nucleotide
  modified_base 18: mod_base = OTHER; note = 2'-O-methyl modified nucleotide
  modified_base 22: mod_base = OTHER; note = 2'-O-methyl modified nucleotide
  modified_base 25: mod_base = OTHER; note = 2'-O-methyl modified nucleotide
  modified_base 29: mod_base = OTHER; note = 2'-O-methyl modified nucleotide
  modified_base 30: mod_base = OTHER; note = 2'-O-methyl modified nucleotide
  modified_base 31: mod_base = OTHER; note = 2'-O-methyl modified nucleotide
  modified_base 32: mod_base = OTHER; note = 2'-O-methyl modified nucleotide
  modified_base 37: mod_base = OTHER; note = 2'-O-methyl modified nucleotide
  modified_base 38: mod_base = OTHER; note = 2'-O-methyl modified nucleotide
  modified_base 39: mod_base = OTHER; note = 2'-O-methyl modified nucleotide
  modified_base 40: mod_base = OTHER; note = 2'-O-methyl modified nucleotide
  modified_base 41: mod_base = OTHER; note = 2'-O-methyl modified nucleotide
  modified_base 42: mod_base = OTHER; note = 2'-O-methyl modified nucleotide
  modified_base 43: mod_base = OTHER; note = 2'-O-methyl modified nucleotide
  modified_base 47: mod_base = OTHER; note = 2'-O-methyl modified nucleotide
  modified_base 48: mod_base = OTHER; note = 2'-O-methyl modified nucleotide
  modified_base 51: mod_base = OTHER; note = 2'-O-methyl modified nucleotide
  modified_base 54: mod_base = OTHER; note = nucleotide with phosphorothioate linkage
  modified_base 58: mod_base = OTHER; note = 2'-O-methyl modified nucleotide
  modified_base 59: mod_base = OTHER; note = 2'-O-methyl modified nucleotide
  modified_base 61: mod_base = OTHER; note = 2'-O-methyl modified nucleotide
  modified_base 62: mod_base = OTHER; note = 2'-O-methyl modified nucleotide
  modified_base 63: mod_base = OTHER; note = 2'-O-methyl modified nucleotide
  modified_base 64: mod_base = OTHER; note = 2'-O-methyl modified nucleotide
  modified_base 65: mod_base = OTHER; note = 2'-O-methyl modified nucleotide
  modified_base 66: mod_base = OTHER; note = 2'-O-methyl modified nucleotide
  modified_base 67: mod_base = OTHER; note = 2'-O-methyl modified nucleotide
  modified_base 68: mod_base = OTHER; note = 2'-O-methyl modified nucleotide
  modified_base 69: mod_base = OTHER; note = 2'-O-methyl modified nucleotide
  modified_base 70: mod_base = OTHER; note = 2'-O-methyl modified nucleotide
  modified_base 75: mod_base = OTHER; note = 2'-O-methyl modified nucleotide
  modified_base 77: mod_base = OTHER; note = 2'-O-methyl modified nucleotide
  modified_base 80: mod_base = OTHER; note = 2'-O-methyl modified nucleotide
  modified_base 86: mod_base = OTHER; note = 2'-O-methyl modified nucleotide
  modified_base 87: mod_base = OTHER; note = 2'-O-methyl modified nucleotide
  modified_base 89: mod_base = OTHER; note = 2'-O-methyl modified nucleotide
  modified_base 90: mod_base = OTHER; note = 2'-O-methyl modified nucleotide
  modified_base 91: mod_base = OTHER; note = 2'-O-methyl modified nucleotide
  modified_base 92: mod_base = OTHER; note = 2'-O-methyl modified nucleotide
  modified_base 99: mod_base = OTHER; note = nucleotide with phosphorothioate linkage
  modified_base 100: mod_base = OTHER; note = 2'-O-methyl modified nucleotide with phosphorothioate linkage
  modified_base 101: mod_base = OTHER; note = 2'-O-methyl modified nucleotide

SEQ ID NO: 2752 - RNA, 101 nt, synthetic construct; identical to SEQ ID NO: 1752
  source 1..101: mol_type = other RNA
  modified_base 1: mod_base = OTHER; note = 2'-O-methyl modified nucleotide with phosphorothioate linkage
  modified_base 2: mod_base = OTHER; note = 2'-O-methyl modified nucleotide with phosphorothioate linkage
  modified_base 3: mod_base = OTHER; note = 2'-O-methyl modified nucleotide with phosphorothioate linkage
  modified_base 4: mod_base = OTHER; note = 2'-O-methyl modified nucleotide
  modified_base 5: mod_base = OTHER; note = 2'-O-methyl modified nucleotide
  modified_base 8: mod_base = OTHER; note = 2'-O-methyl modified nucleotide
  modified_base 9: mod_base = OTHER; note = 2'-O-methyl modified nucleotide
  modified_base 11: mod_base = OTHER; note = 2'-O-methyl modified nucleotide
  modified_base 13: mod_base = OTHER; note = 2'-O-methyl modified nucleotide
  modified_base 18: mod_base = OTHER; note = 2'-O-methyl modified nucleotide
  modified_base 22: mod_base = OTHER; note = 2'-O-methyl modified nucleotide
  modified_base 25: mod_base = OTHER; note = 2'-O-methyl modified nucleotide
  modified_base 29: mod_base = OTHER; note = 2'-O-methyl modified nucleotide
  modified_base 30: mod_base = OTHER; note = 2'-O-methyl modified nucleotide
  modified_base 31: mod_base = OTHER; note = 2'-O-methyl modified nucleotide
  modified_base 32: mod_base = OTHER; note = 2'-O-methyl modified nucleotide
  modified_base 37: mod_base = OTHER; note = 2'-O-methyl modified nucleotide
  modified_base 38: mod_base = OTHER; note = 2'-O-methyl modified nucleotide
  modified_base 39: mod_base = OTHER; note = 2'-O-methyl modified nucleotide
  modified_base 40: mod_base = OTHER; note = 2'-O-methyl modified nucleotide
  modified_base 41: mod_base = OTHER; note = 2'-O-methyl modified nucleotide
  modified_base 42: mod_base = OTHER; note = 2'-O-methyl modified nucleotide
  modified_base 43: mod_base = OTHER; note = 2'-O-methyl modified nucleotide
  modified_base 47: mod_base = OTHER; note = 2'-O-methyl modified nucleotide
  modified_base 48: mod_base = OTHER; note = 2'-O-methyl modified nucleotide
  modified_base 51: mod_base = OTHER; note = 2'-O-methyl modified nucleotide
  modified_base 54: mod_base = OTHER; note = nucleotide with phosphorothioate linkage
  modified_base 58: mod_base = OTHER; note = 2'-O-methyl modified nucleotide
  modified_base 59: mod_base = OTHER; note = 2'-O-methyl modified nucleotide
  modified_base 61: mod_base = OTHER; note = 2'-O-methyl modified nucleotide
  modified_base 62: mod_base = OTHER; note = 2'-O-methyl modified nucleotide
  modified_base 63: mod_base = OTHER; note = 2'-O-methyl modified nucleotide
  modified_base 64: mod_base = OTHER; note = 2'-O-methyl modified nucleotide
  modified_base 65: mod_base = OTHER; note = 2'-O-methyl modified nucleotide
  modified_base 66: mod_base = OTHER; note = 2'-O-methyl modified nucleotide
  modified_base 67: mod_base = OTHER; note = 2'-O-methyl modified nucleotide
  modified_base 68: mod_base = OTHER; note = 2'-O-methyl modified nucleotide
  modified_base 69: mod_base = OTHER; note = 2'-O-methyl modified nucleotide
  modified_base 70: mod_base = OTHER; note = 2'-O-methyl modified nucleotide
  modified_base 75: mod_base = OTHER; note = 2'-O-methyl modified nucleotide
  modified_base 77: mod_base = OTHER; note = 2'-O-methyl modified nucleotide
  modified_base 80: mod_base = OTHER; note = 2'-O-methyl modified nucleotide
  modified_base 86: mod_base = OTHER; note = 2'-O-methyl modified nucleotide
  modified_base 87: mod_base = OTHER; note = 2'-O-methyl modified nucleotide
  modified_base 89: mod_base = OTHER; note = 2'-O-methyl modified nucleotide
  modified_base 90: mod_base = OTHER; note = 2'-O-methyl modified nucleotide
  modified_base 91: mod_base = OTHER; note = 2'-O-methyl modified nucleotide
  modified_base 92: mod_base = OTHER; note = 2'-O-methyl modified nucleotide
  modified_base 99: mod_base = OTHER; note = nucleotide with phosphorothioate linkage
  modified_base 100: mod_base = OTHER; note = 2'-O-methyl modified nucleotide with phosphorothioate linkage
  modified_base 101: mod_base = OTHER; note = 2'-O-methyl modified nucleotide

SEQ ID NO: 2753 - RNA, 101 nt, synthetic construct; identical to SEQ ID NO: 1753
  source 1..101: mol_type = other RNA
  modified_base 1: mod_base = OTHER; note = 2'-O-methyl modified nucleotide with phosphorothioate linkage
  modified_base 2: mod_base = OTHER; note = 2'-O-methyl modified nucleotide with phosphorothioate linkage
  modified_base 3: mod_base = OTHER; note = 2'-O-methyl modified nucleotide with phosphorothioate linkage
  modified_base 4: mod_base = OTHER; note = 2'-O-methyl modified nucleotide
  modified_base 5: mod_base = OTHER; note = 2'-O-methyl modified nucleotide
  modified_base 8: mod_base = OTHER; note = 2'-O-methyl modified nucleotide
  modified_base 9: mod_base = OTHER; note = 2'-O-methyl modified nucleotide
  modified_base 11: mod_base = OTHER; note = 2'-O-methyl modified nucleotide
  modified_base 13: mod_base = OTHER; note = 2'-O-methyl modified nucleotide
  modified_base 18: mod_base = OTHER; note = 2'-O-methyl modified nucleotide
  modified_base 22: mod_base = OTHER; note = 2'-O-methyl modified nucleotide
  modified_base 25: mod_base = OTHER; note = 2'-O-methyl modified nucleotide
  modified_base 29: mod_base = OTHER; note = 2'-O-methyl modified nucleotide
  modified_base 30: mod_base = OTHER; note = 2'-O-methyl modified nucleotide
  modified_base 31: mod_base = OTHER; note = 2'-O-methyl modified nucleotide
  modified_base 32: mod_base = OTHER; note = 2'-O-methyl modified nucleotide
  modified_base 37: mod_base = OTHER; note = 2'-O-methyl modified nucleotide
  modified_base 38: mod_base = OTHER; note = 2'-O-methyl modified nucleotide
  modified_base 39: mod_base = OTHER; note = 2'-O-methyl modified nucleotide
  modified_base 40: mod_base = OTHER; note = 2'-O-methyl modified nucleotide
  modified_base 41: mod_base = OTHER; note = 2'-O-methyl modified nucleotide
  modified_base 42: mod_base = OTHER; note = 2'-O-methyl modified nucleotide
  modified_base 43: mod_base = OTHER; note = 2'-O-methyl modified nucleotide
  modified_base 47: mod_base = OTHER; note = 2'-O-methyl modified nucleotide
  modified_base 48: mod_base = OTHER; note = 2'-O-methyl modified nucleotide
  modified_base 51: mod_base = OTHER; note = 2'-O-methyl modified nucleotide
  modified_base 54: mod_base = OTHER; note = nucleotide with phosphorothioate linkage
  modified_base 58: mod_base = OTHER; note = 2'-O-methyl modified nucleotide
  modified_base 59: mod_base = OTHER; note = 2'-O-methyl modified nucleotide
  modified_base 61: mod_base = OTHER; note = 2'-O-methyl modified nucleotide
  modified_base 62: mod_base = OTHER; note = 2'-O-methyl modified nucleotide
  modified_base 63: mod_base = OTHER; note = 2'-O-methyl modified nucleotide
  modified_base 64: mod_base = OTHER; note = 2'-O-methyl modified nucleotide
  modified_base 65: mod_base = OTHER; note = 2'-O-methyl modified nucleotide
  modified_base 66: mod_base = OTHER; note = 2'-O-methyl modified nucleotide
  modified_base 67: mod_base = OTHER; note = 2'-O-methyl modified nucleotide
  modified_base 68: mod_base = OTHER; note = 2'-O-methyl modified nucleotide
  modified_base 69: mod_base = OTHER; note = 2'-O-methyl modified nucleotide
  modified_base 70: mod_base = OTHER; note = 2'-O-methyl modified nucleotide
  modified_base 75: mod_base = OTHER; note = 2'-O-methyl modified nucleotide
  modified_base 77: mod_base = OTHER; note = 2'-O-methyl modified nucleotide
  modified_base 80: mod_base = OTHER; note = 2'-O-methyl modified nucleotide
  modified_base 86: mod_base = OTHER; note = 2'-O-methyl modified nucleotide
  modified_base 87: mod_base = OTHER; note = 2'-O-methyl modified nucleotide
  modified_base 89: mod_base = OTHER; note = 2'-O-methyl modified nucleotide
  modified_base 90: mod_base = OTHER; note = 2'-O-methyl modified nucleotide
  modified_base 91: mod_base = OTHER; note = 2'-O-methyl modified nucleotide
  modified_base 92: mod_base = OTHER; note = 2'-O-methyl modified nucleotide
  modified_base 99: mod_base = OTHER; note = nucleotide with phosphorothioate linkage
  modified_base 100: mod_base = OTHER; note = 2'-O-methyl modified nucleotide with phosphorothioate linkage
  modified_base 101: mod_base = OTHER; note = 2'-O-methyl modified nucleotide

SEQ ID NO: 2754 - RNA, 101 nt, synthetic construct; identical to SEQ ID NO: 1754
  source 1..101: mol_type = other RNA
  modified_base 1: mod_base = OTHER; note = 2'-O-methyl modified nucleotide with phosphorothioate linkage
  modified_base 2: mod_base = OTHER; note = 2'-O-methyl modified nucleotide with phosphorothioate linkage
  modified_base 3: mod_base = OTHER; note = 2'-O-methyl modified nucleotide with phosphorothioate linkage
  modified_base 4: mod_base = OTHER; note = 2'-O-methyl modified nucleotide
  modified_base 5: mod_base = OTHER; note = 2'-O-methyl modified nucleotide
  modified_base 8: mod_base = OTHER; note = 2'-O-methyl modified nucleotide
  modified_base 9: mod_base = OTHER; note = 2'-O-methyl modified nucleotide
  modified_base 11: mod_base = OTHER; note = 2'-O-methyl modified nucleotide
  modified_base 13: mod_base = OTHER; note = 2'-O-methyl modified nucleotide
  modified_base 18: mod_base = OTHER; note = 2'-O-methyl modified nucleotide
  modified_base 22: mod_base = OTHER; note = 2'-O-methyl modified nucleotide
  modified_base 25: mod_base = OTHER; note = 2'-O-methyl modified nucleotide
  modified_base 29: mod_base = OTHER; note = 2'-O-methyl modified nucleotide
  modified_base 30: mod_base = OTHER; note = 2'-O-methyl modified nucleotide
  modified_base 31: mod_base = OTHER; note = 2'-O-methyl modified nucleotide
  modified_base 32: mod_base = OTHER; note = 2'-O-methyl modified nucleotide
  modified_base 37: mod_base = OTHER; note = 2'-O-methyl modified nucleotide
  modified_base 38: mod_base = OTHER; note = 2'-O-methyl modified nucleotide
  modified_base 39: mod_base = OTHER; note = 2'-O-methyl modified nucleotide
  modified_base 40: mod_base = OTHER; note = 2'-O-methyl modified nucleotide
  modified_base 41: mod_base = OTHER; note = 2'-O-methyl modified nucleotide
  modified_base 42: mod_base = OTHER; note = 2'-O-methyl modified nucleotide
  modified_base 43: mod_base = OTHER; note = 2'-O-methyl modified nucleotide
  modified_base 47: mod_base = OTHER; note = 2'-O-methyl modified nucleotide
  modified_base 48: mod_base = OTHER; note = 2'-O-methyl modified nucleotide
  modified_base 51: mod_base = OTHER; note = 2'-O-methyl modified nucleotide
  modified_base 54: mod_base = OTHER; note = nucleotide with phosphorothioate linkage
  modified_base 58: mod_base = OTHER; note = 2'-O-methyl modified nucleotide
  modified_base 59: mod_base = OTHER; note = 2'-O-methyl modified nucleotide
  modified_base 61: mod_base = OTHER; note = 2'-O-methyl modified nucleotide
  modified_base 62: mod_base = OTHER; note = 2'-O-methyl modified nucleotide
  modified_base 63: mod_base = OTHER; note = 2'-O-methyl modified nucleotide
  modified_base 64: mod_base = OTHER; note = 2'-O-methyl modified nucleotide
  modified_base 65: mod_base = OTHER; note = 2'-O-methyl modified nucleotide
  modified_base 66: mod_base = OTHER; note = 2'-O-methyl modified nucleotide
  modified_base 67: mod_base = OTHER; note = 2'-O-methyl modified nucleotide
  modified_base 68: mod_base = OTHER; note = 2'-O-methyl modified nucleotide
  modified_base 69: mod_base = OTHER; note = 2'-O-methyl modified nucleotide
  modified_base 70: mod_base = OTHER; note = 2'-O-methyl modified nucleotide
  modified_base 75: mod_base = OTHER; note = 2'-O-methyl modified nucleotide
  modified_base 77: mod_base = OTHER; note = 2'-O-methyl modified nucleotide
  modified_base 80: mod_base = OTHER; note = 2'-O-methyl modified nucleotide
  modified_base 86: mod_base = OTHER; note = 2'-O-methyl modified nucleotide
  modified_base 87: mod_base = OTHER; note = 2'-O-methyl modified nucleotide
  modified_base 89: mod_base = OTHER; note = 2'-O-methyl modified nucleotide
  modified_base 90: mod_base = OTHER; note = 2'-O-methyl modified nucleotide
  modified_base 91: mod_base = OTHER; note = 2'-O-methyl modified nucleotide
  modified_base 92: mod_base = OTHER; note = 2'-O-methyl modified nucleotide
  modified_base 99: mod_base = OTHER; note = nucleotide with phosphorothioate linkage
  modified_base 100: mod_base = OTHER; note = 2'-O-methyl modified nucleotide with phosphorothioate linkage
  modified_base 101: mod_base = OTHER; note = 2'-O-methyl modified nucleotide

SEQ ID NO: 2755 - RNA, 101 nt, synthetic construct; identical to SEQ ID NO: 1755
  source 1..101: mol_type = other RNA
  modified_base 1: mod_base = OTHER; note = 2'-O-methyl modified nucleotide with phosphorothioate linkage
  modified_base 2: mod_base = OTHER; note = 2'-O-methyl modified nucleotide with phosphorothioate linkage
  modified_base 3: mod_base = OTHER; note = 2'-O-methyl modified nucleotide with phosphorothioate linkage
  modified_base 4: mod_base = OTHER; note = 2'-O-methyl modified nucleotide
  modified_base 5: mod_base = OTHER; note = 2'-O-methyl modified nucleotide
  modified_base 8: mod_base = OTHER; note = 2'-O-methyl modified nucleotide
  modified_base 9: mod_base = OTHER; note = 2'-O-methyl modified nucleotide
  modified_base 11: mod_base = OTHER; note = 2'-O-methyl modified nucleotide
  modified_base 13: mod_base = OTHER; note = 2'-O-methyl modified nucleotide
  modified_base 18: mod_base = OTHER; note = 2'-O-methyl modified nucleotide
  modified_base 22: mod_base = OTHER; note = 2'-O-methyl modified nucleotide
  modified_base 25: mod_base = OTHER; note = 2'-O-methyl modified nucleotide
  modified_base 29: mod_base = OTHER; note = 2'-O-methyl modified nucleotide
  modified_base 30: mod_base = OTHER; note = 2'-O-methyl modified nucleotide
  modified_base 31: mod_base = OTHER; note = 2'-O-methyl modified nucleotide
  modified_base 32: mod_base = OTHER; note = 2'-O-methyl modified nucleotide
  modified_base 37: mod_base = OTHER; note = 2'-O-methyl modified nucleotide
  modified_base 38: mod_base = OTHER; note = 2'-O-methyl modified nucleotide
  modified_base 39: mod_base = OTHER; note = 2'-O-methyl modified nucleotide
  modified_base 40: mod_base = OTHER; note = 2'-O-methyl modified nucleotide
  modified_base 41: mod_base = OTHER; note = 2'-O-methyl modified nucleotide
  modified_base 42: mod_base = OTHER; note = 2'-O-methyl modified nucleotide
  modified_base 43: mod_base = OTHER; note = 2'-O-methyl modified nucleotide
  modified_base 47: mod_base = OTHER; note = 2'-O-methyl modified nucleotide
  modified_base 48: mod_base = OTHER; note = 2'-O-methyl modified nucleotide
  modified_base 51: mod_base = OTHER; note = 2'-O-methyl modified nucleotide
  modified_base 54: mod_base = OTHER; note = nucleotide with phosphorothioate linkage
  modified_base 58: mod_base = OTHER; note = 2'-O-methyl modified nucleotide
  modified_base 59: mod_base = OTHER; note = 2'-O-methyl modified nucleotide
  modified_base 61: mod_base = OTHER; note = 2'-O-methyl modified nucleotide
  modified_base 62: mod_base = OTHER; note = 2'-O-methyl modified nucleotide
  modified_base 63: mod_base = OTHER; note = 2'-O-methyl modified nucleotide
  modified_base 64: mod_base = OTHER; note = 2'-O-methyl modified nucleotide
  modified_base 65: mod_base = OTHER; note = 2'-O-methyl modified nucleotide
  modified_base 66: mod_base = OTHER; note = 2'-O-methyl modified nucleotide
  modified_base 67: mod_base = OTHER; note = 2'-O-methyl modified nucleotide
  modified_base 68: mod_base = OTHER; note = 2'-O-methyl modified nucleotide
  modified_base 69: mod_base = OTHER; note = 2'-O-methyl modified nucleotide
  modified_base 70: mod_base = OTHER; note = 2'-O-methyl modified nucleotide
  modified_base 75: mod_base = OTHER; note = 2'-O-methyl modified nucleotide
  modified_base 77: mod_base = OTHER; note = 2'-O-methyl modified nucleotide
  modified_base 80: mod_base = OTHER; note = 2'-O-methyl modified nucleotide
  modified_base 86: mod_base = OTHER; note = 2'-O-methyl modified nucleotide
  modified_base 87: mod_base = OTHER; note = 2'-O-methyl modified nucleotide
  modified_base 89: mod_base = OTHER; note = 2'-O-methyl modified nucleotide
  modified_base 90: mod_base = OTHER; note = 2'-O-methyl modified nucleotide
  modified_base 91: mod_base = OTHER; note = 2'-O-methyl modified nucleotide
  modified_base 92: mod_base = OTHER; note = 2'-O-methyl modified nucleotide
  modified_base 99: mod_base = OTHER; note = nucleotide with phosphorothioate linkage
  modified_base 100: mod_base = OTHER; note = 2'-O-methyl modified nucleotide with phosphorothioate linkage
  modified_base 101: mod_base = OTHER; note = 2'-O-methyl modified nucleotide

SEQ ID NO: 2756 - RNA, 101 nt, synthetic construct; identical to SEQ ID NO: 1756
  source 1..101: mol_type = other RNA
  modified_base 1: mod_base = OTHER; note = 2'-O-methyl modified nucleotide with phosphorothioate linkage
  modified_base 2: mod_base = OTHER; note = 2'-O-methyl modified nucleotide with phosphorothioate linkage
  modified_base 3: mod_base = OTHER; note = 2'-O-methyl modified nucleotide with phosphorothioate linkage
  modified_base 4: mod_base = OTHER; note = 2'-O-methyl modified nucleotide
  modified_base 5: mod_base = OTHER; note = 2'-O-methyl modified nucleotide
  modified_base 8: mod_base = OTHER; note = 2'-O-methyl modified nucleotide
  modified_base 9: mod_base = OTHER; note = 2'-O-methyl modified nucleotide
  modified_base 11: mod_base = OTHER; note = 2'-O-methyl modified nucleotide
  modified_base 13: mod_base = OTHER; note = 2'-O-methyl modified nucleotide
  modified_base 18: mod_base = OTHER; note = 2'-O-methyl modified nucleotide
  modified_base 22: mod_base = OTHER; note = 2'-O-methyl modified nucleotide
  modified_base 25: mod_base = OTHER; note = 2'-O-methyl modified nucleotide
  modified_base 29: mod_base = OTHER; note = 2'-O-methyl modified nucleotide
  modified_base 30: mod_base = OTHER; note = 2'-O-methyl modified nucleotide
  modified_base 31: mod_base = OTHER; note = 2'-O-methyl modified nucleotide
  modified_base 32: mod_base = OTHER; note = 2'-O-methyl modified nucleotide
  modified_base 37: mod_base = OTHER; note = 2'-O-methyl modified nucleotide
  modified_base 38: mod_base = OTHER; note = 2'-O-methyl modified nucleotide
  modified_base 39: mod_base = OTHER; note = 2'-O-methyl modified nucleotide
  modified_base 40: mod_base = OTHER; note = 2'-O-methyl modified nucleotide
  modified_base 41: mod_base = OTHER; note = 2'-O-methyl modified nucleotide
  modified_base 42: mod_base = OTHER; note = 2'-O-methyl modified nucleotide
  modified_base 43: mod_base = OTHER; note = 2'-O-methyl modified nucleotide
  modified_base 47: mod_base = OTHER; note = 2'-O-methyl modified nucleotide
  modified_base 48: mod_base = OTHER; note = 2'-O-methyl modified nucleotide
  modified_base 51: mod_base = OTHER; note = 2'-O-methyl modified nucleotide
  modified_base 54: mod_base = OTHER; note = nucleotide with phosphorothioate linkage
  modified_base 58: mod_base = OTHER; note = 2'-O-methyl modified nucleotide
  modified_base 59: mod_base = OTHER; note = 2'-O-methyl modified nucleotide
  modified_base 61: mod_base = OTHER; note = 2'-O-methyl modified nucleotide
  modified_base 62: mod_base = OTHER; note = 2'-O-methyl modified nucleotide
  modified_base 63: mod_base = OTHER; note = 2'-O-methyl modified nucleotide
  modified_base 64: mod_base = OTHER; note = 2'-O-methyl modified nucleotide
  modified_base 65: mod_base = OTHER; note = 2'-O-methyl modified nucleotide
  modified_base 66: mod_base = OTHER; note = 2'-O-methyl modified nucleotide
  modified_base 67: mod_base = OTHER; note = 2'-O-methyl modified nucleotide
  modified_base 68: mod_base = OTHER; note = 2'-O-methyl modified nucleotide
  modified_base 69: mod_base = OTHER; note = 2'-O-methyl modified nucleotide
  modified_base 70: mod_base = OTHER; note = 2'-O-methyl modified nucleotide
  modified_base 75: mod_base = OTHER; note = 2'-O-methyl modified nucleotide
  modified_base 77: mod_base = OTHER; note = 2'-O-methyl modified nucleotide
  modified_base 80: mod_base = OTHER; note = 2'-O-methyl modified nucleotide
  modified_base 86: mod_base = OTHER; note = 2'-O-methyl modified nucleotide
  modified_base 87: mod_base = OTHER; note = 2'-O-methyl modified nucleotide
  modified_base 89: mod_base = OTHER; note = 2'-O-methyl modified nucleotide
  modified_base 90: mod_base = OTHER; note = 2'-O-methyl modified nucleotide
  modified_base 91: mod_base = OTHER; note = 2'-O-methyl modified nucleotide
  modified_base 92: mod_base = OTHER; note = 2'-O-methyl modified nucleotide
  modified_base 99: mod_base = OTHER; note = nucleotide with phosphorothioate linkage
  modified_base 100: mod_base = OTHER; note = 2'-O-methyl modified nucleotide with phosphorothioate linkage
  modified_base 101: mod_base = OTHER; note = 2'-O-methyl modified nucleotide

SEQ ID NO: 2757 - RNA, 101 nt, synthetic construct; identical to SEQ ID NO: 1757
  source 1..101: mol_type = other RNA
  modified_base 1: mod_base = OTHER; note = 2'-O-methyl modified nucleotide with phosphorothioate linkage
  modified_base 2: mod_base = OTHER; note = 2'-O-methyl modified nucleotide with phosphorothioate linkage
  modified_base 3: mod_base = OTHER; note = 2'-O-methyl modified nucleotide with phosphorothioate linkage
  modified_base 4: mod_base = OTHER; note = 2'-O-methyl modified nucleotide
  modified_base 5: mod_base = OTHER; note = 2'-O-methyl modified nucleotide
  modified_base 8: mod_base = OTHER; note = 2'-O-methyl modified nucleotide
  modified_base 9: mod_base = OTHER; note = 2'-O-methyl modified nucleotide
  modified_base 11: mod_base = OTHER; note = 2'-O-methyl modified nucleotide
  modified_base 13: mod_base = OTHER; note = 2'-O-methyl modified nucleotide
  modified_base 18: mod_base = OTHER; note = 2'-O-methyl modified nucleotide
  modified_base 22: mod_base = OTHER; note = 2'-O-methyl modified nucleotide
  modified_base 25: mod_base = OTHER; note = 2'-O-methyl modified nucleotide
  modified_base 29: mod_base = OTHER; note = 2'-O-methyl modified nucleotide
  modified_base 30: mod_base = OTHER; note = 2'-O-methyl modified nucleotide
  modified_base 31: mod_base = OTHER; note = 2'-O-methyl modified nucleotide
  modified_base 32: mod_base = OTHER; note = 2'-O-methyl modified nucleotide
  modified_base 37: mod_base = OTHER; note = 2'-O-methyl modified nucleotide
  modified_base 38: mod_base = OTHER; note = 2'-O-methyl modified nucleotide
  modified_base 39: mod_base = OTHER; note = 2'-O-methyl modified nucleotide
  modified_base 40: mod_base = OTHER; note = 2'-O-methyl modified nucleotide
  modified_base 41: mod_base = OTHER; note = 2'-O-methyl modified nucleotide
  modified_base 42: mod_base = OTHER; note = 2'-O-methyl modified nucleotide
  modified_base 43: mod_base = OTHER; note = 2'-O-methyl modified nucleotide
  modified_base 47: mod_base = OTHER; note = 2'-O-methyl modified nucleotide
  modified_base 48: mod_base = OTHER; note = 2'-O-methyl modified nucleotide
  modified_base 51: mod_base = OTHER; note = 2'-O-methyl modified nucleotide
  modified_base 54: mod_base = OTHER; note = nucleotide with phosphorothioate linkage
  modified_base 58: mod_base = OTHER; note = 2'-O-methyl modified nucleotide
  modified_base 59: mod_base = OTHER; note = 2'-O-methyl modified nucleotide
  modified_base 61: mod_base = OTHER; note = 2'-O-methyl modified nucleotide
  modified_base 62: mod_base = OTHER; note = 2'-O-methyl modified nucleotide
  modified_base 63: mod_base = OTHER; note = 2'-O-methyl modified nucleotide
  modified_base 64: mod_base = OTHER; note = 2'-O-methyl modified nucleotide
  modified_base 65: mod_base = OTHER; note = 2'-O-methyl modified nucleotide
  modified_base 66: mod_base = OTHER; note = 2'-O-methyl modified nucleotide
  modified_base 67: mod_base = OTHER; note = 2'-O-methyl modified nucleotide
  modified_base 68: mod_base = OTHER; note = 2'-O-methyl modified nucleotide
  modified_base 69: mod_base = OTHER; note = 2'-O-methyl modified nucleotide
  modified_base 70: mod_base = OTHER; note = 2'-O-methyl modified nucleotide
  modified_base 75: mod_base = OTHER; note = 2'-O-methyl modified nucleotide
  modified_base 77: mod_base = OTHER; note = 2'-O-methyl modified nucleotide
  modified_base 80: mod_base = OTHER; note = 2'-O-methyl modified nucleotide
  modified_base 86: mod_base = OTHER; note = 2'-O-methyl modified nucleotide
  modified_base 87: mod_base = OTHER; note = 2'-O-methyl modified nucleotide
  modified_base 89: mod_base = OTHER; note = 2'-O-methyl modified nucleotide
  modified_base 90: mod_base = OTHER; note = 2'-O-methyl modified nucleotide
  modified_base 91: mod_base = OTHER; note = 2'-O-methyl modified nucleotide
  modified_base 92: mod_base = OTHER; note = 2'-O-methyl modified nucleotide
  modified_base 99: mod_base = OTHER; note = nucleotide with phosphorothioate linkage
  modified_base 100: mod_base = OTHER; note = 2'-O-methyl modified nucleotide with phosphorothioate linkage
  modified_base 101: mod_base = OTHER; note = 2'-O-methyl modified nucleotide

SEQ ID NO: 2758 - RNA, 101 nt, synthetic construct; identical to SEQ ID NO: 1758
  source 1..101: mol_type = other RNA
  modified_base 1: mod_base = OTHER; note = 2'-O-methyl modified nucleotide with phosphorothioate linkage
  modified_base 2: mod_base = OTHER; note = 2'-O-methyl modified nucleotide with phosphorothioate linkage
  modified_base 3: mod_base = OTHER; note = 2'-O-methyl modified nucleotide with phosphorothioate linkage
  modified_base 4: mod_base = OTHER; note = 2'-O-methyl modified nucleotide
  modified_base 5: mod_base = OTHER; note = 2'-O-methyl modified nucleotide
  modified_base 8: mod_base = OTHER; note = 2'-O-methyl modified nucleotide
  modified_base 9: mod_base = OTHER; note = 2'-O-methyl modified nucleotide
  modified_base 11: mod_base = OTHER; note = 2'-O-methyl modified nucleotide
  modified_base 13: mod_base = OTHER; note = 2'-O-methyl modified nucleotide
  modified_base 18: mod_base = OTHER; note = 2'-O-methyl modified nucleotide
  modified_base 22: mod_base = OTHER; note = 2'-O-methyl modified nucleotide
  modified_base 25: mod_base = OTHER; note = 2'-O-methyl modified nucleotide
  modified_base 29: mod_base = OTHER; note = 2'-O-methyl modified nucleotide
  modified_base 30: mod_base = OTHER; note = 2'-O-methyl modified nucleotide
  modified_base 31: mod_base = OTHER; note = 2'-O-methyl modified nucleotide
  modified_base 32: mod_base = OTHER; note = 2'-O-methyl modified nucleotide
  modified_base 37: mod_base = OTHER; note = 2'-O-methyl modified nucleotide
  modified_base 38: mod_base = OTHER; note = 2'-O-methyl modified nucleotide
  modified_base 39: mod_base = OTHER; note = 2'-O-methyl modified nucleotide
  modified_base 40: mod_base = OTHER; note = 2'-O-methyl modified nucleotide
  modified_base 41: mod_base = OTHER; note = 2'-O-methyl modified nucleotide
  modified_base 42: mod_base = OTHER; note = 2'-O-methyl modified nucleotide
  modified_base 43: mod_base = OTHER; note = 2'-O-methyl modified nucleotide
  modified_base 47: mod_base = OTHER; note = 2'-O-methyl modified nucleotide
  modified_base 48: mod_base = OTHER; note = 2'-O-methyl modified nucleotide
  modified_base 51: mod_base = OTHER; note = 2'-O-methyl modified nucleotide
  modified_base 54: mod_base = OTHER; note = nucleotide with phosphorothioate linkage
  modified_base 58: mod_base = OTHER; note = 2'-O-methyl modified nucleotide
  modified_base 59: mod_base = OTHER; note = 2'-O-methyl modified nucleotide
  modified_base 61: mod_base = OTHER; note = 2'-O-methyl modified nucleotide
  modified_base 62: mod_base = OTHER; note = 2'-O-methyl modified nucleotide
  modified_base 63: mod_base = OTHER; note = 2'-O-methyl modified nucleotide
  modified_base 64: mod_base = OTHER; note = 2'-O-methyl modified nucleotide
  modified_base 65: mod_base = OTHER; note = 2'-O-methyl modified nucleotide
  modified_base 66: mod_base = OTHER; note = 2'-O-methyl modified nucleotide
  modified_base 67: mod_base = OTHER; note = 2'-O-methyl modified nucleotide
  modified_base 68: mod_base = OTHER; note = 2'-O-methyl modified nucleotide
  modified_base 69: mod_base = OTHER; note = 2'-O-methyl modified nucleotide
  modified_base 70: mod_base = OTHER; note = 2'-O-methyl modified nucleotide
  modified_base 75: mod_base = OTHER; note = 2'-O-methyl modified nucleotide
  modified_base 77: mod_base = OTHER; note = 2'-O-methyl modified nucleotide
  modified_base 80: mod_base = OTHER; note = 2'-O-methyl modified nucleotide
  modified_base 86: mod_base = OTHER; note = 2'-O-methyl modified nucleotide
  modified_base 87: mod_base = OTHER; note = 2'-O-methyl modified nucleotide
  modified_base 89: mod_base = OTHER; note = 2'-O-methyl modified nucleotide
  modified_base 90: mod_base = OTHER; note = 2'-O-methyl modified nucleotide
  modified_base 91: mod_base = OTHER; note = 2'-O-methyl modified nucleotide
  modified_base 92: mod_base = OTHER; note = 2'-O-methyl modified nucleotide
  modified_base 99: mod_base = OTHER; note = nucleotide with phosphorothioate linkage
  modified_base 100: mod_base = OTHER; note = 2'-O-methyl modified nucleotide with phosphorothioate linkage
  modified_base 101: mod_base = OTHER; note = 2'-O-methyl modified nucleotide

SEQ ID NO: 2759 - RNA, 101 nt, synthetic construct; identical to SEQ ID NO: 1759
  source 1..101: mol_type = other RNA
  modified_base 1: mod_base = OTHER; note = 2'-O-methyl modified nucleotide with phosphorothioate linkage
  modified_base 2: mod_base = OTHER; note = 2'-O-methyl modified nucleotide with phosphorothioate linkage
  modified_base 3: mod_base = OTHER; note = 2'-O-methyl modified nucleotide with phosphorothioate linkage
  modified_base 4: mod_base = OTHER; note = 2'-O-methyl modified nucleotide
  modified_base 5: mod_base = OTHER; note = 2'-O-methyl modified nucleotide
  modified_base 8: mod_base = OTHER; note = 2'-O-methyl modified nucleotide
  modified_base 9: mod_base = OTHER; note = 2'-O-methyl modified nucleotide
  modified_base 11: mod_base = OTHER; note = 2'-O-methyl modified nucleotide
  modified_base 13: mod_base = OTHER; note = 2'-O-methyl modified nucleotide
  modified_base 18: mod_base = OTHER; note = 2'-O-methyl modified nucleotide
  modified_base 22: mod_base = OTHER; note = 2'-O-methyl modified nucleotide
  modified_base 25: mod_base = OTHER; note = 2'-O-methyl modified nucleotide
  modified_base 29: mod_base = OTHER; note = 2'-O-methyl modified nucleotide
  modified_base 30: mod_base = OTHER; note = 2'-O-methyl modified nucleotide
  modified_base 31: mod_base = OTHER; note = 2'-O-methyl modified nucleotide
  modified_base 32: mod_base = OTHER; note = 2'-O-methyl modified nucleotide
  modified_base 37: mod_base = OTHER; note = 2'-O-methyl modified nucleotide
  modified_base 38: mod_base = OTHER; note = 2'-O-methyl modified nucleotide
  modified_base 39: mod_base = OTHER; note = 2'-O-methyl modified nucleotide
  modified_base 40: mod_base = OTHER; note = 2'-O-methyl modified nucleotide
  modified_base 41: mod_base = OTHER; note = 2'-O-methyl modified nucleotide
  modified_base 42: mod_base = OTHER; note = 2'-O-methyl modified nucleotide
  modified_base 43: mod_base = OTHER; note = 2'-O-methyl modified nucleotide
  modified_base 47: mod_base = OTHER; note = 2'-O-methyl modified nucleotide
  modified_base 48: mod_base = OTHER; note = 2'-O-methyl modified nucleotide
  modified_base 51: mod_base = OTHER; note = 2'-O-methyl modified nucleotide
  modified_base 54: mod_base = OTHER; note = nucleotide with phosphorothioate linkage
  modified_base 58: mod_base = OTHER; note = 2'-O-methyl modified nucleotide
  modified_base 59: mod_base = OTHER; note = 2'-O-methyl modified nucleotide
  modified_base 61: mod_base = OTHER; note = 2'-O-methyl modified nucleotide
  modified_base 62: mod_base = OTHER; note = 2'-O-methyl modified nucleotide
  modified_base 63: mod_base = OTHER; note = 2'-O-methyl modified nucleotide
  modified_base 64: mod_base = OTHER; note = 2'-O-methyl modified nucleotide
  modified_base 65: mod_base = OTHER; note = 2'-O-methyl modified nucleotide
  modified_base 66: mod_base = OTHER; note = 2'-O-methyl modified nucleotide
  modified_base 67: mod_base = OTHER; note = 2'-O-methyl modified nucleotide
  modified_base 68: mod_base = OTHER; note = 2'-O-methyl modified nucleotide
  modified_base 69: mod_base = OTHER; note = 2'-O-methyl modified nucleotide
  modified_base 70: mod_base = OTHER; note = 2'-O-methyl modified nucleotide
  modified_base 75: mod_base = OTHER; note = 2'-O-methyl modified nucleotide
  modified_base 77: mod_base = OTHER; note = 2'-O-methyl modified nucleotide
  modified_base 80: mod_base = OTHER; note = 2'-O-methyl modified nucleotide
  modified_base 86: mod_base = OTHER; note = 2'-O-methyl modified nucleotide
  modified_base 87: mod_base = OTHER; note = 2'-O-methyl modified nucleotide
  modified_base 89: mod_base = OTHER; note = 2'-O-methyl modified nucleotide
  modified_base 90: mod_base = OTHER; note = 2'-O-methyl modified nucleotide
  modified_base 91: mod_base = OTHER; note = 2'-O-methyl modified nucleotide
  modified_base 92: mod_base = OTHER; note = 2'-O-methyl modified nucleotide
  modified_base 99: mod_base = OTHER; note = nucleotide with phosphorothioate linkage
  modified_base 100: mod_base = OTHER; note = 2'-O-methyl modified nucleotide with phosphorothioate linkage
  modified_base 101: mod_base = OTHER; note = 2'-O-methyl modified nucleotide

SEQ ID NO: 2760 - RNA, 101 nt, synthetic construct; identical to SEQ ID NO: 1760
  source 1..101: mol_type = other RNA
  modified_base 1: mod_base = OTHER; note = 2'-O-methyl modified nucleotide with phosphorothioate linkage
  modified_base 2: mod_base = OTHER; note = 2'-O-methyl modified nucleotide with phosphorothioate linkage
  modified_base 3: mod_base = OTHER; note = 2'-O-methyl modified nucleotide with phosphorothioate linkage
  modified_base 4: mod_base = OTHER; note = 2'-O-methyl modified nucleotide
  modified_base 5: mod_base = OTHER; note = 2'-O-methyl modified nucleotide
  modified_base 8: mod_base = OTHER; note = 2'-O-methyl modified nucleotide
  modified_base 9: mod_base = OTHER; note = 2'-O-methyl modified nucleotide
  modified_base 11: mod_base = OTHER; note = 2'-O-methyl modified nucleotide
  modified_base 13: mod_base = OTHER; note = 2'-O-methyl modified nucleotide
  modified_base 18: mod_base = OTHER; note = 2'-O-methyl modified nucleotide
  modified_base 22: mod_base = OTHER; note = 2'-O-methyl modified nucleotide
  modified_base 25: mod_base = OTHER; note = 2'-O-methyl modified nucleotide
  modified_base 29: mod_base = OTHER; note = 2'-O-methyl modified nucleotide
  modified_base 30: mod_base = OTHER; note = 2'-O-methyl modified nucleotide
  modified_base 31: mod_base = OTHER; note = 2'-O-methyl modified nucleotide
  modified_base 32: mod_base = OTHER; note = 2'-O-methyl modified nucleotide
  modified_base 37: mod_base = OTHER; note = 2'-O-methyl modified nucleotide
  modified_base 38: mod_base = OTHER; note = 2'-O-methyl modified nucleotide
  modified_base 39: mod_base = OTHER; note = 2'-O-methyl modified nucleotide
  modified_base 40: mod_base = OTHER; note = 2'-O-methyl modified nucleotide
  modified_base 41: mod_base = OTHER; note = 2'-O-methyl modified nucleotide
  modified_base 42: mod_base = OTHER; note = 2'-O-methyl modified nucleotide
  modified_base 43: mod_base = OTHER; note = 2'-O-methyl modified nucleotide
  modified_base 47: mod_base = OTHER; note = 2'-O-methyl modified nucleotide
  modified_base 48: mod_base = OTHER; note = 2'-O-methyl modified nucleotide
  modified_base 51: mod_base = OTHER; note = 2'-O-methyl modified nucleotide
  modified_base 54: mod_base = OTHER; note = nucleotide with phosphorothioate linkage
  modified_base 58: mod_base = OTHER; note = 2'-O-methyl modified nucleotide
  modified_base 59: mod_base = OTHER; note = 2'-O-methyl modified nucleotide
  modified_base 61: mod_base = OTHER; note = 2'-O-methyl modified nucleotide
  modified_base 62: mod_base = OTHER; note = 2'-O-methyl modified nucleotide
  modified_base 63: mod_base = OTHER; note = 2'-O-methyl modified nucleotide
  modified_base 64: mod_base = OTHER; note = 2'-O-methyl modified nucleotide
  modified_base 65: mod_base = OTHER; note = 2'-O-methyl modified nucleotide
  modified_base 66: mod_base = OTHER; note = 2'-O-methyl modified nucleotide
  modified_base 67: mod_base = OTHER; note = 2'-O-methyl modified nucleotide
  modified_base 68: mod_base = OTHER; note = 2'-O-methyl modified nucleotide
  modified_base 69: mod_base = OTHER; note = 2'-O-methyl modified nucleotide
  modified_base 70: mod_base = OTHER; note = 2'-O-methyl modified nucleotide
  modified_base 75: mod_base = OTHER; note = 2'-O-methyl modified nucleotide
  modified_base 77: mod_base = OTHER; note = 2'-O-methyl modified nucleotide
  modified_base 80: mod_base = OTHER; note = 2'-O-methyl modified nucleotide
  modified_base 86: mod_base = OTHER; note = 2'-O-methyl modified nucleotide
  modified_base 87: mod_base = OTHER; note = 2'-O-methyl modified nucleotide
  modified_base 89: mod_base = OTHER; note = 2'-O-methyl modified nucleotide
  modified_base 90: mod_base = OTHER; note = 2'-O-methyl modified nucleotide
  modified_base 91: mod_base = OTHER; note = 2'-O-methyl modified nucleotide
  modified_base 92: mod_base = OTHER; note = 2'-O-methyl modified nucleotide
  modified_base 99: mod_base = OTHER; note = nucleotide with phosphorothioate linkage
  modified_base 100: mod_base = OTHER; note = 2'-O-methyl modified nucleotide with phosphorothioate linkage
  modified_base 101: mod_base = OTHER; note = 2'-O-methyl modified nucleotide

SEQ ID NO: 2761 - RNA, 101 nt, synthetic construct; identical to SEQ ID NO: 1761
  source 1..101: mol_type = other RNA
  modified_base 1: mod_base = OTHER; note = 2'-O-methyl modified nucleotide with phosphorothioate linkage
  modified_base 2: mod_base = OTHER; note = 2'-O-methyl modified nucleotide with phosphorothioate linkage
  modified_base 3: mod_base = OTHER; note = 2'-O-methyl modified nucleotide with phosphorothioate linkage
  modified_base 4: mod_base = OTHER; note = 2'-O-methyl modified nucleotide
  modified_base 5: mod_base = OTHER; note = 2'-O-methyl modified nucleotide
  modified_base 8: mod_base = OTHER; note = 2'-O-methyl modified nucleotide
  modified_base 9: mod_base = OTHER; note = 2'-O-methyl modified nucleotide
  modified_base 11: mod_base = OTHER; note = 2'-O-methyl modified nucleotide
  modified_base 13: mod_base = OTHER; note = 2'-O-methyl modified nucleotide
  modified_base 18: mod_base = OTHER; note = 2'-O-methyl modified nucleotide
  modified_base 22: mod_base = OTHER; note = 2'-O-methyl modified nucleotide
  modified_base 25: mod_base = OTHER; note = 2'-O-methyl modified nucleotide
  modified_base 29: mod_base = OTHER; note = 2'-O-methyl modified nucleotide
  modified_base 30: mod_base = OTHER; note = 2'-O-methyl modified nucleotide
  modified_base 31: mod_base = OTHER; note = 2'-O-methyl modified nucleotide
  modified_base 32: mod_base = OTHER; note = 2'-O-methyl modified nucleotide
  modified_base 37: mod_base = OTHER; note = 2'-O-methyl modified nucleotide
  modified_base 38: mod_base = OTHER; note = 2'-O-methyl modified nucleotide
  modified_base 39: mod_base = OTHER; note = 2'-O-methyl modified nucleotide
  modified_base 40: mod_base = OTHER; note = 2'-O-methyl modified nucleotide
  modified_base 41: mod_base = OTHER; note = 2'-O-methyl modified nucleotide
  modified_base 42: mod_base = OTHER; note = 2'-O-methyl modified nucleotide
  modified_base 43: mod_base = OTHER; note = 2'-O-methyl modified nucleotide
  modified_base 47: mod_base = OTHER; note = 2'-O-methyl modified nucleotide
  modified_base 48: mod_base = OTHER; note = 2'-O-methyl modified nucleotide
  modified_base 51: mod_base = OTHER; note = 2'-O-methyl modified nucleotide
  modified_base 54: mod_base = OTHER; note = nucleotide with phosphorothioate linkage
  modified_base 58: mod_base = OTHER; note = 2'-O-methyl modified nucleotide
  modified_base 59: mod_base = OTHER; note = 2'-O-methyl modified nucleotide
  modified_base 61: mod_base = OTHER; note = 2'-O-methyl modified nucleotide
  modified_base 62: mod_base = OTHER; note = 2'-O-methyl modified nucleotide
  modified_base 63: mod_base = OTHER; note = 2'-O-methyl modified nucleotide
  modified_base 64: mod_base = OTHER; note = 2'-O-methyl modified nucleotide
  modified_base 65: mod_base = OTHER; note = 2'-O-methyl modified nucleotide
  modified_base 66: mod_base = OTHER; note = 2'-O-methyl modified nucleotide
  modified_base 67: mod_base = OTHER; note = 2'-O-methyl modified nucleotide
  modified_base 68: mod_base = OTHER; note = 2'-O-methyl modified nucleotide
  modified_base 69: mod_base = OTHER; note = 2'-O-methyl modified nucleotide
  modified_base 70: mod_base = OTHER; note = 2'-O-methyl modified nucleotide
  modified_base 75: mod_base = OTHER; note = 2'-O-methyl modified nucleotide
  modified_base 77: mod_base = OTHER; note = 2'-O-methyl modified nucleotide
  modified_base 80: mod_base = OTHER; note = 2'-O-methyl modified nucleotide
  modified_base 86: mod_base = OTHER; note = 2'-O-methyl modified nucleotide
  modified_base 87: mod_base = OTHER; note = 2'-O-methyl modified nucleotide
  modified_base 89: mod_base = OTHER; note = 2'-O-methyl modified nucleotide
  modified_base 90: mod_base = OTHER; note = 2'-O-methyl modified nucleotide
  modified_base 91: mod_base = OTHER; note = 2'-O-methyl modified nucleotide
  modified_base 92: mod_base = OTHER; note = 2'-O-methyl modified nucleotide
  modified_base 99: mod_base = OTHER; note = nucleotide with phosphorothioate linkage
  modified_base 100: mod_base = OTHER; note = 2'-O-methyl modified nucleotide with phosphorothioate linkage
  modified_base 101: mod_base = OTHER; note = 2'-O-methyl modified nucleotide

SEQ ID NO: 2762 - RNA, 101 nt, synthetic construct; identical to SEQ ID NO: 1762
  source 1..101: mol_type = other RNA
  modified_base 1: mod_base = OTHER; note = 2'-O-methyl modified nucleotide with phosphorothioate linkage
  modified_base 2: mod_base = OTHER; note = 2'-O-methyl modified nucleotide with phosphorothioate linkage
  modified_base 3: mod_base = OTHER; note = 2'-O-methyl modified nucleotide with phosphorothioate linkage
  modified_base 4: mod_base = OTHER; note = 2'-O-methyl modified nucleotide
  modified_base 5: mod_base = OTHER; note = 2'-O-methyl modified nucleotide
  modified_base 8: mod_base = OTHER; note = 2'-O-methyl modified nucleotide
  modified_base 9: mod_base = OTHER; note = 2'-O-methyl modified nucleotide
  modified_base 11: mod_base = OTHER; note = 2'-O-methyl modified nucleotide
  modified_base 13: mod_base = OTHER; note = 2'-O-methyl modified nucleotide
  modified_base 18: mod_base = OTHER; note = 2'-O-methyl modified nucleotide
  modified_base 22: mod_base = OTHER; note = 2'-O-methyl modified nucleotide
  modified_base 25: mod_base = OTHER; note = 2'-O-methyl modified nucleotide
  modified_base 29: mod_base = OTHER; note = 2'-O-methyl modified nucleotide
  modified_base 30: mod_base = OTHER; note = 2'-O-methyl modified nucleotide
  modified_base 31: mod_base = OTHER; note = 2'-O-methyl modified nucleotide
  modified_base 32: mod_base = OTHER; note = 2'-O-methyl modified nucleotide
  modified_base 37: mod_base = OTHER; note = 2'-O-methyl modified nucleotide
  modified_base 38: mod_base = OTHER; note = 2'-O-methyl modified nucleotide
  modified_base 39: mod_base = OTHER; note = 2'-O-methyl modified nucleotide
  modified_base 40: mod_base = OTHER; note = 2'-O-methyl modified nucleotide
  modified_base 41: mod_base = OTHER; note = 2'-O-methyl modified nucleotide
  modified_base 42: mod_base = OTHER; note = 2'-O-methyl modified nucleotide
  modified_base 43: mod_base = OTHER; note = 2'-O-methyl modified nucleotide
  modified_base 47: mod_base = OTHER; note = 2'-O-methyl modified nucleotide
  modified_base 48: mod_base = OTHER; note = 2'-O-methyl modified nucleotide
  modified_base 51: mod_base = OTHER; note = 2'-O-methyl modified nucleotide
  modified_base 54: mod_base = OTHER; note = nucleotide with phosphorothioate linkage
  modified_base 58: mod_base = OTHER; note = 2'-O-methyl modified nucleotide
  modified_base 59: mod_base = OTHER; note = 2'-O-methyl modified nucleotide
  modified_base 61: mod_base = OTHER; note = 2'-O-methyl modified nucleotide
  modified_base 62: mod_base = OTHER; note = 2'-O-methyl modified nucleotide
  modified_base 63: mod_base = OTHER; note = 2'-O-methyl modified nucleotide
  modified_base 64: mod_base = OTHER; note = 2'-O-methyl modified nucleotide
  modified_base 65: mod_base = OTHER; note = 2'-O-methyl modified nucleotide
  modified_base 66: mod_base = OTHER; note = 2'-O-methyl modified nucleotide
  modified_base 67: mod_base = OTHER; note = 2'-O-methyl modified nucleotide
  modified_base 68: mod_base = OTHER; note = 2'-O-methyl modified nucleotide
  modified_base 69: mod_base = OTHER; note = 2'-O-methyl modified nucleotide
  modified_base 70: mod_base = OTHER; note = 2'-O-methyl modified nucleotide
  modified_base 75: mod_base = OTHER; note = 2'-O-methyl modified nucleotide
  modified_base 77: mod_base = OTHER; note = 2'-O-methyl modified nucleotide
  modified_base 80: mod_base = OTHER; note = 2'-O-methyl modified nucleotide
  modified_base 86: mod_base = OTHER; note = 2'-O-methyl modified nucleotide
  modified_base 87: mod_base = OTHER; note = 2'-O-methyl modified nucleotide
  modified_base 89: mod_base = OTHER; note = 2'-O-methyl modified nucleotide
  modified_base 90: mod_base = OTHER; note = 2'-O-methyl modified nucleotide
  modified_base 91: mod_base = OTHER; note = 2'-O-methyl modified nucleotide
  modified_base 92: mod_base = OTHER; note = 2'-O-methyl modified nucleotide
  modified_base 99: mod_base = OTHER; note = nucleotide with phosphorothioate linkage
  modified_base 100: mod_base = OTHER; note = 2'-O-methyl modified nucleotide with phosphorothioate linkage
  modified_base 101: mod_base = OTHER; note = 2'-O-methyl modified nucleotide

SEQ ID NO: 2763 - RNA, 101 nt, synthetic construct; identical to SEQ ID NO: 1763
  source 1..101: mol_type = other RNA
  modified_base 1: mod_base = OTHER; note = 2'-O-methyl modified nucleotide with phosphorothioate linkage
  modified_base 2: mod_base = OTHER; note = 2'-O-methyl modified nucleotide with phosphorothioate linkage
  modified_base 3: mod_base = OTHER; note = 2'-O-methyl modified nucleotide with phosphorothioate linkage
  modified_base 4: mod_base = OTHER; note = 2'-O-methyl modified nucleotide
  modified_base 5: mod_base = OTHER; note = 2'-O-methyl modified nucleotide
  modified_base 8: mod_base = OTHER; note = 2'-O-methyl modified nucleotide
  modified_base 9: mod_base = OTHER; note = 2'-O-methyl modified nucleotide
  modified_base 11: mod_base = OTHER; note = 2'-O-methyl modified nucleotide
  modified_base 13: mod_base = OTHER; note = 2'-O-methyl modified nucleotide
  modified_base 18: mod_base = OTHER; note = 2'-O-methyl modified nucleotide
  modified_base 22: mod_base = OTHER; note = 2'-O-methyl modified nucleotide
  modified_base 25: mod_base = OTHER; note = 2'-O-methyl modified nucleotide
  modified_base 29: mod_base = OTHER; note = 2'-O-methyl modified nucleotide
  modified_base 30: mod_base = OTHER; note = 2'-O-methyl modified nucleotide
  modified_base 31: mod_base = OTHER; note = 2'-O-methyl modified nucleotide
  modified_base 32: mod_base = OTHER; note = 2'-O-methyl modified nucleotide
  modified_base 37: mod_base = OTHER; note = 2'-O-methyl modified nucleotide
  modified_base 38: mod_base = OTHER; note = 2'-O-methyl modified nucleotide
  modified_base 39: mod_base = OTHER; note = 2'-O-methyl modified nucleotide
  modified_base 40: mod_base = OTHER; note = 2'-O-methyl modified nucleotide
  modified_base 41: mod_base = OTHER; note = 2'-O-methyl modified nucleotide
  modified_base 42: mod_base = OTHER; note = 2'-O-methyl modified nucleotide
  modified_base 43: mod_base = OTHER; note = 2'-O-methyl modified nucleotide
  modified_base 47: mod_base = OTHER; note = 2'-O-methyl modified nucleotide
  modified_base 48: mod_base = OTHER; note = 2'-O-methyl modified nucleotide
  modified_base 51: mod_base = OTHER; note = 2'-O-methyl modified nucleotide
  modified_base 54: mod_base = OTHER; note = nucleotide with phosphorothioate linkage
  modified_base 58: mod_base = OTHER; note = 2'-O-methyl modified nucleotide
  modified_base 59: mod_base = OTHER; note = 2'-O-methyl modified nucleotide
  modified_base 61: mod_base = OTHER; note = 2'-O-methyl modified nucleotide
  modified_base 62: mod_base = OTHER; note = 2'-O-methyl modified nucleotide
  modified_base 63: mod_base = OTHER; note = 2'-O-methyl modified nucleotide
  modified_base 64: mod_base = OTHER; note = 2'-O-methyl modified nucleotide
  modified_base 65: mod_base = OTHER; note = 2'-O-methyl modified nucleotide
  modified_base 66: mod_base = OTHER; note = 2'-O-methyl modified nucleotide
  modified_base 67: mod_base = OTHER; note = 2'-O-methyl modified nucleotide
  modified_base 68: mod_base = OTHER; note = 2'-O-methyl modified nucleotide
  modified_base 69: mod_base = OTHER; note = 2'-O-methyl modified nucleotide
  modified_base 70: mod_base = OTHER; note = 2'-O-methyl modified nucleotide
  modified_base 75: mod_base = OTHER; note = 2'-O-methyl modified nucleotide
  modified_base 77: mod_base = OTHER; note = 2'-O-methyl modified nucleotide
  modified_base 80: mod_base = OTHER; note = 2'-O-methyl modified nucleotide
  modified_base 86: mod_base = OTHER; note = 2'-O-methyl modified nucleotide
  modified_base 87: mod_base = OTHER; note = 2'-O-methyl modified nucleotide
  modified_base 89: mod_base = OTHER; note = 2'-O-methyl modified nucleotide
  modified_base 90: mod_base = OTHER; note = 2'-O-methyl modified nucleotide
  modified_base 91: mod_base = OTHER; note = 2'-O-methyl modified nucleotide
  modified_base 92: mod_base = OTHER; note = 2'-O-methyl modified nucleotide
  modified_base 99: mod_base = OTHER; note = nucleotide with phosphorothioate linkage
  modified_base 100: mod_base = OTHER; note = 2'-O-methyl modified nucleotide with phosphorothioate linkage
  modified_base 101: mod_base = OTHER; note = 2'-O-methyl modified nucleotide

SEQ ID NO: 2764 - RNA, 101 nt, synthetic construct; identical to SEQ ID NO: 1764
  source 1..101: mol_type = other RNA
  modified_base 1: mod_base = OTHER; note = 2'-O-methyl modified nucleotide with phosphorothioate linkage
  modified_base 2: mod_base = OTHER; note = 2'-O-methyl modified nucleotide with phosphorothioate linkage
  modified_base 3: mod_base = OTHER; note = 2'-O-methyl modified nucleotide with phosphorothioate linkage
  modified_base 4: mod_base = OTHER; note = 2'-O-methyl modified nucleotide
  modified_base 5: mod_base = OTHER; note = 2'-O-methyl modified nucleotide
  modified_base 8: mod_base = OTHER; note = 2'-O-methyl modified nucleotide
  modified_base 9: mod_base = OTHER; note = 2'-O-methyl modified nucleotide
  modified_base 11: mod_base = OTHER; note = 2'-O-methyl modified nucleotide
  modified_base 13: mod_base = OTHER; note = 2'-O-methyl modified nucleotide
  modified_base 18: mod_base = OTHER; note = 2'-O-methyl modified nucleotide
  modified_base 22: mod_base = OTHER; note = 2'-O-methyl modified nucleotide
  modified_base 25: mod_base = OTHER; note = 2'-O-methyl modified nucleotide
  modified_base 29: mod_base = OTHER; note = 2'-O-methyl modified nucleotide
  modified_base 30: mod_base = OTHER; note = 2'-O-methyl modified nucleotide
  modified_base 31: mod_base = OTHER; note = 2'-O-methyl modified nucleotide
  modified_base 32: mod_base = OTHER; note = 2'-O-methyl modified nucleotide
  modified_base 37: mod_base = OTHER; note = 2'-O-methyl modified nucleotide
  modified_base 38: mod_base = OTHER; note = 2'-O-methyl modified nucleotide
  modified_base 39: mod_base = OTHER; note = 2'-O-methyl modified nucleotide
  modified_base 40: mod_base = OTHER; note = 2'-O-methyl modified nucleotide
  modified_base 41: mod_base = OTHER; note = 2'-O-methyl modified nucleotide
  modified_base 42: mod_base = OTHER; note = 2'-O-methyl modified nucleotide
  modified_base 43: mod_base = OTHER; note = 2'-O-methyl modified nucleotide
  modified_base 47: mod_base = OTHER; note = 2'-O-methyl modified nucleotide
  modified_base 48: mod_base = OTHER; note = 2'-O-methyl modified nucleotide
  modified_base 51: mod_base = OTHER; note = 2'-O-methyl modified nucleotide
  modified_base 54: mod_base = OTHER; note = nucleotide with phosphorothioate linkage
  modified_base 58: mod_base = OTHER; note = 2'-O-methyl modified nucleotide
  modified_base 59: mod_base = OTHER; note = 2'-O-methyl modified nucleotide
  modified_base 61: mod_base = OTHER; note = 2'-O-methyl modified nucleotide
  modified_base 62: mod_base = OTHER; note = 2'-O-methyl modified nucleotide
  modified_base 63: mod_base = OTHER; note = 2'-O-methyl modified nucleotide
  modified_base 64: mod_base = OTHER; note = 2'-O-methyl modified nucleotide
  modified_base 65: mod_base = OTHER; note = 2'-O-methyl modified nucleotide
  modified_base 66: mod_base = OTHER; note = 2'-O-methyl modified nucleotide
  modified_base 67: mod_base = OTHER; note = 2'-O-methyl modified nucleotide
  modified_base 68: mod_base = OTHER; note = 2'-O-methyl modified nucleotide
  modified_base 69: mod_base = OTHER; note = 2'-O-methyl modified nucleotide
  modified_base 70: mod_base = OTHER; note = 2'-O-methyl modified nucleotide
  modified_base 75: mod_base = OTHER; note = 2'-O-methyl modified nucleotide
  modified_base 77: mod_base = OTHER; note = 2'-O-methyl modified nucleotide
  modified_base 80: mod_base = OTHER; note = 2'-O-methyl modified nucleotide
  modified_base 86: mod_base = OTHER; note = 2'-O-methyl modified nucleotide
  modified_base 87: mod_base = OTHER; note = 2'-O-methyl modified nucleotide
  modified_base 89: mod_base = OTHER; note = 2'-O-methyl modified nucleotide
  modified_base 90: mod_base = OTHER; note = 2'-O-methyl modified nucleotide
  modified_base 91: mod_base = OTHER; note = 2'-O-methyl modified nucleotide
  modified_base 92: mod_base = OTHER; note = 2'-O-methyl modified nucleotide
  modified_base 99: mod_base = OTHER; note = nucleotide with phosphorothioate linkage
  modified_base 100: mod_base = OTHER; note = 2'-O-methyl modified nucleotide with phosphorothioate linkage
  modified_base 101: mod_base = OTHER; note = 2'-O-methyl modified nucleotide

SEQ ID NO: 2765 - RNA, 101 nt, synthetic construct; identical to SEQ ID NO: 1765
  source 1..101: mol_type = other RNA
  modified_base 1: mod_base = OTHER; note = 2'-O-methyl modified nucleotide with phosphorothioate linkage
  modified_base 2: mod_base = OTHER; note = 2'-O-methyl modified nucleotide with phosphorothioate linkage
  modified_base 3: mod_base = OTHER; note = 2'-O-methyl modified nucleotide with phosphorothioate linkage
  modified_base 4: mod_base = OTHER; note = 2'-O-methyl modified nucleotide
  modified_base 5: mod_base = OTHER; note = 2'-O-methyl modified nucleotide
  modified_base 8: mod_base = OTHER; note = 2'-O-methyl modified nucleotide
  modified_base 9: mod_base = OTHER; note = 2'-O-methyl modified nucleotide
  modified_base 11: mod_base = OTHER; note = 2'-O-methyl modified nucleotide
  modified_base 13: mod_base = OTHER; note = 2'-O-methyl modified nucleotide
  modified_base 18: mod_base = OTHER; note = 2'-O-methyl modified nucleotide
  modified_base 22: mod_base = OTHER; note = 2'-O-methyl modified nucleotide
  modified_base 25: mod_base = OTHER; note = 2'-O-methyl modified nucleotide
  modified_base 29: mod_base = OTHER; note = 2'-O-methyl modified nucleotide
  modified_base 30: mod_base = OTHER; note = 2'-O-methyl modified nucleotide
  modified_base 31: mod_base = OTHER; note = 2'-O-methyl modified nucleotide
  modified_base 32: mod_base = OTHER; note = 2'-O-methyl modified nucleotide
  modified_base 37: mod_base = OTHER; note = 2'-O-methyl modified nucleotide
  modified_base 38: mod_base = OTHER; note = 2'-O-methyl modified nucleotide
  modified_base 39: mod_base = OTHER; note = 2'-O-methyl modified nucleotide
  modified_base 40: mod_base = OTHER; note = 2'-O-methyl modified nucleotide
  modified_base 41: mod_base = OTHER; note = 2'-O-methyl modified nucleotide
  modified_base 42: mod_base = OTHER; note = 2'-O-methyl modified nucleotide
  modified_base 43: mod_base = OTHER; note = 2'-O-methyl modified nucleotide
  modified_base 47: mod_base = OTHER; note = 2'-O-methyl modified nucleotide
  modified_base 48: mod_base = OTHER; note = 2'-O-methyl modified nucleotide
  modified_base 51: mod_base = OTHER; note = 2'-O-methyl modified nucleotide
  modified_base 54: mod_base = OTHER; note = nucleotide with phosphorothioate linkage
  modified_base 58: mod_base = OTHER; note = 2'-O-methyl modified nucleotide
  modified_base 59: mod_base = OTHER; note = 2'-O-methyl modified nucleotide
  modified_base 61: mod_base = OTHER; note = 2'-O-methyl modified nucleotide
  modified_base 62: mod_base = OTHER; note = 2'-O-methyl modified nucleotide
  modified_base 63: mod_base = OTHER; note = 2'-O-methyl modified nucleotide
  modified_base 64: mod_base = OTHER; note = 2'-O-methyl modified nucleotide
  modified_base 65: mod_base = OTHER; note = 2'-O-methyl modified nucleotide
  modified_base 66: mod_base = OTHER; note = 2'-O-methyl modified nucleotide
  modified_base 67: mod_base = OTHER; note = 2'-O-methyl modified nucleotide
  modified_base 68: mod_base = OTHER; note = 2'-O-methyl modified nucleotide
  modified_base 69: mod_base = OTHER; note = 2'-O-methyl modified nucleotide
  modified_base 70: mod_base = OTHER; note = 2'-O-methyl modified nucleotide
  modified_base 75: mod_base = OTHER; note = 2'-O-methyl modified nucleotide
  modified_base 77: mod_base = OTHER; note = 2'-O-methyl modified nucleotide
  modified_base 80: mod_base = OTHER; note = 2'-O-methyl modified nucleotide
  modified_base 86: mod_base = OTHER; note = 2'-O-methyl modified nucleotide
  modified_base 87: mod_base = OTHER; note = 2'-O-methyl modified nucleotide
  modified_base 89: mod_base = OTHER; note = 2'-O-methyl modified nucleotide
  modified_base 90: mod_base = OTHER; note = 2'-O-methyl modified nucleotide
  modified_base 91: mod_base = OTHER; note = 2'-O-methyl modified nucleotide
  modified_base 92: mod_base = OTHER; note = 2'-O-methyl modified nucleotide
  modified_base 99: mod_base = OTHER; note = nucleotide with phosphorothioate linkage
  modified_base 100: mod_base = OTHER; note = 2'-O-methyl modified nucleotide with phosphorothioate linkage
  modified_base 101: mod_base = OTHER; note = 2'-O-methyl modified nucleotide

SEQ ID NO: 2766 - RNA, 101 nt, synthetic construct; identical to SEQ ID NO: 1766
  source 1..101: mol_type = other RNA
  modified_base 1: mod_base = OTHER; note = 2'-O-methyl modified nucleotide with phosphorothioate linkage
  modified_base 2: mod_base = OTHER; note = 2'-O-methyl modified nucleotide with phosphorothioate linkage
  modified_base 3: mod_base = OTHER; note = 2'-O-methyl modified nucleotide with phosphorothioate linkage
  modified_base 4: mod_base = OTHER; note = 2'-O-methyl modified nucleotide
  modified_base 5: mod_base = OTHER; note = 2'-O-methyl modified nucleotide
  modified_base 8: mod_base = OTHER; note = 2'-O-methyl modified nucleotide
  modified_base 9: mod_base = OTHER; note = 2'-O-methyl modified nucleotide
  modified_base 11: mod_base = OTHER; note = 2'-O-methyl modified nucleotide
  modified_base 13: mod_base = OTHER; note = 2'-O-methyl modified nucleotide
  modified_base 18: mod_base = OTHER; note = 2'-O-methyl modified nucleotide
  modified_base 22: mod_base = OTHER; note = 2'-O-methyl modified nucleotide
  modified_base 25: mod_base = OTHER; note = 2'-O-methyl modified nucleotide
  modified_base 29: mod_base = OTHER; note = 2'-O-methyl modified nucleotide
  modified_base 30: mod_base = OTHER; note = 2'-O-methyl modified nucleotide
  modified_base 31: mod_base = OTHER; note = 2'-O-methyl modified nucleotide
  modified_base 32: mod_base = OTHER; note = 2'-O-methyl modified nucleotide
  modified_base 37: mod_base = OTHER; note = 2'-O-methyl modified nucleotide
  modified_base 38: mod_base = OTHER; note = 2'-O-methyl modified nucleotide
  modified_base 39: mod_base = OTHER; note = 2'-O-methyl modified nucleotide
  modified_base 40: mod_base = OTHER; note = 2'-O-methyl modified nucleotide
  modified_base 41: mod_base = OTHER; note = 2'-O-methyl modified nucleotide
  modified_base 42: mod_base = OTHER; note = 2'-O-methyl modified nucleotide
  modified_base 43: mod_base = OTHER; note = 2'-O-methyl modified nucleotide
  modified_base 47: mod_base = OTHER; note = 2'-O-methyl modified nucleotide
  modified_base 48: mod_base = OTHER; note = 2'-O-methyl modified nucleotide
  modified_base 51: mod_base = OTHER; note = 2'-O-methyl modified nucleotide
  modified_base 54: mod_base = OTHER; note = nucleotide with phosphorothioate linkage
  modified_base 58: mod_base = OTHER; note = 2'-O-methyl modified nucleotide
  modified_base 59: mod_base = OTHER; note = 2'-O-methyl modified nucleotide
  modified_base 61: mod_base = OTHER; note = 2'-O-methyl modified nucleotide
  modified_base 62: mod_base = OTHER; note = 2'-O-methyl modified nucleotide
  modified_base 63: mod_base = OTHER; note = 2'-O-methyl modified nucleotide
  modified_base 64: mod_base = OTHER; note = 2'-O-methyl modified nucleotide
  modified_base 65: mod_base = OTHER; note = 2'-O-methyl modified nucleotide
  modified_base 66: mod_base = OTHER; note = 2'-O-methyl modified nucleotide
  modified_base 67: mod_base = OTHER; note = 2'-O-methyl modified nucleotide
  modified_base 68: mod_base = OTHER; note = 2'-O-methyl modified nucleotide
  modified_base 69: mod_base = OTHER; note = 2'-O-methyl modified nucleotide
  modified_base 70: mod_base = OTHER; note = 2'-O-methyl modified nucleotide
  modified_base 75: mod_base = OTHER; note = 2'-O-methyl modified nucleotide
  modified_base 77: mod_base = OTHER; note = 2'-O-methyl modified nucleotide
  modified_base 80: mod_base = OTHER; note = 2'-O-methyl modified nucleotide
  modified_base 86: mod_base = OTHER; note = 2'-O-methyl modified nucleotide
  modified_base 87: mod_base = OTHER; note = 2'-O-methyl modified nucleotide
  modified_base 89: mod_base = OTHER; note = 2'-O-methyl modified nucleotide
  modified_base 90: mod_base = OTHER; note = 2'-O-methyl modified nucleotide
  modified_base 91: mod_base = OTHER; note = 2'-O-methyl modified nucleotide
  modified_base 92: mod_base = OTHER; note = 2'-O-methyl modified nucleotide
  modified_base 99: mod_base = OTHER; note = nucleotide with phosphorothioate linkage
  modified_base 100: mod_base = OTHER; note = 2'-O-methyl modified nucleotide with phosphorothioate linkage
  modified_base 101: mod_base = OTHER; note = 2'-O-methyl modified nucleotide

SEQ ID NO: 2767 - RNA, 101 nt, synthetic construct; identical to SEQ ID NO: 1767
  source 1..101: mol_type = other RNA
  modified_base 1: mod_base = OTHER; note = 2'-O-methyl modified nucleotide with phosphorothioate linkage
  modified_base 2: mod_base = OTHER; note = 2'-O-methyl modified nucleotide with phosphorothioate linkage
  modified_base 3: mod_base = OTHER; note = 2'-O-methyl modified nucleotide with phosphorothioate linkage
  modified_base 4: mod_base = OTHER; note = 2'-O-methyl modified nucleotide
  modified_base 5: mod_base = OTHER; note = 2'-O-methyl modified nucleotide
  modified_base 8: mod_base = OTHER; note = 2'-O-methyl modified nucleotide
  modified_base 9: mod_base = OTHER; note = 2'-O-methyl modified nucleotide
  modified_base 11: mod_base = OTHER; note = 2'-O-methyl modified nucleotide
  modified_base 13: mod_base = OTHER; note = 2'-O-methyl modified nucleotide
  modified_base 18: mod_base = OTHER; note = 2'-O-methyl modified nucleotide
  modified_base 22: mod_base = OTHER; note = 2'-O-methyl modified nucleotide
  modified_base 25: mod_base = OTHER; note = 2'-O-methyl modified nucleotide
  modified_base 29: mod_base = OTHER; note = 2'-O-methyl modified nucleotide
  modified_base 30: mod_base = OTHER; note = 2'-O-methyl modified nucleotide
  modified_base 31: mod_base = OTHER; note = 2'-O-methyl modified nucleotide
  modified_base 32: mod_base = OTHER; note = 2'-O-methyl modified nucleotide
  modified_base 37: mod_base = OTHER; note = 2'-O-methyl modified nucleotide
  modified_base 38: mod_base = OTHER; note = 2'-O-methyl modified nucleotide
  modified_base 39: mod_base = OTHER; note = 2'-O-methyl modified nucleotide
  modified_base 40: mod_base = OTHER; note = 2'-O-methyl modified nucleotide
  modified_base 41: mod_base = OTHER; note = 2'-O-methyl modified nucleotide
  modified_base 42: mod_base = OTHER; note = 2'-O-methyl modified nucleotide
  modified_base 43: mod_base = OTHER; note = 2'-O-methyl modified nucleotide
  modified_base 47: mod_base = OTHER; note = 2'-O-methyl modified nucleotide
  modified_base 48: mod_base = OTHER; note = 2'-O-methyl modified nucleotide
  modified_base 51: mod_base = OTHER; note = 2'-O-methyl modified nucleotide
  modified_base 54: mod_base = OTHER; note = nucleotide with phosphorothioate linkage
  modified_base 58: mod_base = OTHER; note = 2'-O-methyl modified nucleotide
  modified_base 59: mod_base = OTHER; note = 2'-O-methyl modified nucleotide
  modified_base 61: mod_base = OTHER; note = 2'-O-methyl modified nucleotide
  modified_base 62: mod_base = OTHER; note = 2'-O-methyl modified nucleotide
  modified_base 63: mod_base = OTHER; note = 2'-O-methyl modified nucleotide
  modified_base 64: mod_base = OTHER; note = 2'-O-methyl modified nucleotide
  modified_base 65: mod_base = OTHER; note = 2'-O-methyl modified nucleotide
  modified_base 66: mod_base = OTHER; note = 2'-O-methyl modified nucleotide
  modified_base 67: mod_base = OTHER; note = 2'-O-methyl modified nucleotide
  modified_base 68: mod_base = OTHER; note = 2'-O-methyl modified nucleotide
  modified_base 69: mod_base = OTHER; note = 2'-O-methyl modified nucleotide
  modified_base 70: mod_base = OTHER; note = 2'-O-methyl modified nucleotide
  modified_base 75: mod_base = OTHER; note = 2'-O-methyl modified nucleotide
  modified_base 77: mod_base = OTHER; note = 2'-O-methyl modified nucleotide
  modified_base 80: mod_base = OTHER; note = 2'-O-methyl modified nucleotide
  modified_base 86: mod_base = OTHER; note = 2'-O-methyl modified nucleotide
  modified_base 87: mod_base = OTHER; note = 2'-O-methyl modified nucleotide
  modified_base 89: mod_base = OTHER; note = 2'-O-methyl modified nucleotide
  modified_base 90: mod_base = OTHER; note = 2'-O-methyl modified nucleotide
  modified_base 91: mod_base = OTHER; note = 2'-O-methyl modified nucleotide
  modified_base 92: mod_base = OTHER; note = 2'-O-methyl modified nucleotide
  modified_base 99: mod_base = OTHER; note = nucleotide with phosphorothioate linkage
  modified_base 100: mod_base = OTHER; note = 2'-O-methyl modified nucleotide with phosphorothioate linkage
  modified_base 101: mod_base = OTHER; note = 2'-O-methyl modified nucleotide

SEQ ID NO: 2768 - RNA, 101 nt, synthetic construct; identical to SEQ ID NO: 1768
  source 1..101: mol_type = other RNA
  modified_base 1: mod_base = OTHER; note = 2'-O-methyl modified nucleotide with phosphorothioate linkage
  modified_base 2: mod_base = OTHER; note = 2'-O-methyl modified nucleotide with phosphorothioate linkage
  modified_base 3: mod_base = OTHER; note = 2'-O-methyl modified nucleotide with phosphorothioate linkage
  modified_base 4: mod_base = OTHER; note = 2'-O-methyl modified nucleotide
  modified_base 5: mod_base = OTHER; note = 2'-O-methyl modified nucleotide
  modified_base 8: mod_base = OTHER; note = 2'-O-methyl modified nucleotide
  modified_base 9: mod_base = OTHER; note = 2'-O-methyl modified nucleotide
  modified_base 11: mod_base = OTHER; note = 2'-O-methyl modified nucleotide
  modified_base 13: mod_base = OTHER; note = 2'-O-methyl modified nucleotide
  modified_base 18: mod_base = OTHER; note = 2'-O-methyl modified nucleotide
  modified_base 22: mod_base = OTHER; note = 2'-O-methyl modified nucleotide
  modified_base 25: mod_base = OTHER; note = 2'-O-methyl modified nucleotide
  modified_base 29: mod_base = OTHER; note = 2'-O-methyl modified nucleotide
  modified_base 30: mod_base = OTHER; note = 2'-O-methyl modified nucleotide
  modified_base 31: mod_base = OTHER; note = 2'-O-methyl modified nucleotide
  modified_base 32: mod_base = OTHER; note = 2'-O-methyl modified nucleotide
  modified_base 37: mod_base = OTHER; note = 2'-O-methyl modified nucleotide
  modified_base 38: mod_base = OTHER; note = 2'-O-methyl modified nucleotide
  modified_base 39: mod_base = OTHER; note = 2'-O-methyl modified nucleotide
  modified_base 40: mod_base = OTHER; note = 2'-O-methyl modified nucleotide
  modified_base 41: mod_base = OTHER; note = 2'-O-methyl modified nucleotide
  modified_base 42: mod_base = OTHER; note = 2'-O-methyl modified nucleotide
  modified_base 43: mod_base = OTHER; note = 2'-O-methyl modified nucleotide
  modified_base 47: mod_base = OTHER; note = 2'-O-methyl modified nucleotide
  modified_base 48: mod_base = OTHER; note = 2'-O-methyl modified nucleotide
  modified_base 51: mod_base = OTHER; note = 2'-O-methyl modified nucleotide
  modified_base 54: mod_base = OTHER; note = nucleotide with phosphorothioate linkage
  modified_base 58: mod_base = OTHER; note = 2'-O-methyl modified nucleotide
  modified_base 59: mod_base = OTHER; note = 2'-O-methyl modified nucleotide
  modified_base 61: mod_base = OTHER; note = 2'-O-methyl modified nucleotide
  modified_base 62: mod_base = OTHER; note = 2'-O-methyl modified nucleotide
  modified_base 63: mod_base = OTHER; note = 2'-O-methyl modified nucleotide
  modified_base 64: mod_base = OTHER; note = 2'-O-methyl modified nucleotide
  modified_base 65: mod_base = OTHER; note = 2'-O-methyl modified nucleotide
  modified_base 66: mod_base = OTHER; note = 2'-O-methyl modified nucleotide
  modified_base 67: mod_base = OTHER; note = 2'-O-methyl modified nucleotide
  modified_base 68: mod_base = OTHER; note = 2'-O-methyl modified nucleotide
  modified_base 69: mod_base = OTHER; note = 2'-O-methyl modified nucleotide
  modified_base 70: mod_base = OTHER; note = 2'-O-methyl modified nucleotide
  modified_base 75: mod_base = OTHER; note = 2'-O-methyl modified nucleotide
  modified_base 77: mod_base = OTHER; note = 2'-O-methyl modified nucleotide
  modified_base 80: mod_base = OTHER; note = 2'-O-methyl modified nucleotide
  modified_base 86: mod_base = OTHER; note = 2'-O-methyl modified nucleotide
  modified_base 87: mod_base = OTHER; note = 2'-O-methyl modified nucleotide
  modified_base 89: mod_base = OTHER; note = 2'-O-methyl modified nucleotide
  modified_base 90: mod_base = OTHER; note = 2'-O-methyl modified nucleotide
  modified_base 91: mod_base = OTHER; note = 2'-O-methyl modified nucleotide
  modified_base 92: mod_base = OTHER; note = 2'-O-methyl modified nucleotide
  modified_base 99: mod_base = OTHER; note = nucleotide with phosphorothioate linkage
  modified_base 100: mod_base = OTHER; note = 2'-O-methyl modified nucleotide with phosphorothioate linkage
  modified_base 101: mod_base = OTHER; note = 2'-O-methyl modified nucleotide

SEQ ID NO: 2769 - RNA, 101 nt, synthetic construct; identical to SEQ ID NO: 1769
  source 1..101: mol_type = other RNA
  modified_base 1: mod_base = OTHER; note = 2'-O-methyl modified nucleotide with phosphorothioate linkage
  modified_base 2: mod_base = OTHER; note = 2'-O-methyl modified nucleotide with phosphorothioate linkage
  modified_base 3: mod_base = OTHER; note = 2'-O-methyl modified nucleotide with phosphorothioate linkage
  modified_base 4: mod_base = OTHER; note = 2'-O-methyl modified nucleotide
  modified_base 5: mod_base = OTHER; note = 2'-O-methyl modified nucleotide
  modified_base 8: mod_base = OTHER; note = 2'-O-methyl modified nucleotide
  modified_base 9: mod_base = OTHER; note = 2'-O-methyl modified nucleotide
  modified_base 11: mod_base = OTHER; note = 2'-O-methyl modified nucleotide
  modified_base 13: mod_base = OTHER; note = 2'-O-methyl modified nucleotide
  modified_base 18: mod_base = OTHER; note = 2'-O-methyl modified nucleotide
  modified_base 22: mod_base = OTHER; note = 2'-O-methyl modified nucleotide
  modified_base 25: mod_base = OTHER; note = 2'-O-methyl modified nucleotide
  modified_base 29: mod_base = OTHER; note = 2'-O-methyl modified nucleotide
  modified_base 30: mod_base = OTHER; note = 2'-O-methyl modified nucleotide
  modified_base 31: mod_base = OTHER; note = 2'-O-methyl modified nucleotide
  modified_base 32: mod_base = OTHER; note = 2'-O-methyl modified nucleotide
  modified_base 37: mod_base = OTHER; note = 2'-O-methyl modified nucleotide
  modified_base 38: mod_base = OTHER; note = 2'-O-methyl modified nucleotide
  modified_base 39: mod_base = OTHER; note = 2'-O-methyl modified nucleotide
  modified_base 40: mod_base = OTHER; note = 2'-O-methyl modified nucleotide
  modified_base 41: mod_base = OTHER; note = 2'-O-methyl modified nucleotide
  modified_base 42: mod_base = OTHER; note = 2'-O-methyl modified nucleotide
  modified_base 43: mod_base = OTHER; note = 2'-O-methyl modified nucleotide
  modified_base 47: mod_base = OTHER; note = 2'-O-methyl modified nucleotide
  modified_base 48: mod_base = OTHER; note = 2'-O-methyl modified nucleotide
  modified_base 51: mod_base = OTHER; note = 2'-O-methyl modified nucleotide
  modified_base 54: mod_base = OTHER; note = nucleotide with phosphorothioate linkage
  modified_base 58: mod_base = OTHER; note = 2'-O-methyl modified nucleotide
  modified_base 59: mod_base = OTHER; note = 2'-O-methyl modified nucleotide
  modified_base 61: mod_base = OTHER; note = 2'-O-methyl modified nucleotide
  modified_base 62: mod_base = OTHER; note = 2'-O-methyl modified nucleotide
  modified_base 63: mod_base = OTHER; note = 2'-O-methyl modified nucleotide
  modified_base 64: mod_base = OTHER; note = 2'-O-methyl modified nucleotide
  modified_base 65: mod_base = OTHER; note = 2'-O-methyl modified nucleotide
  modified_base 66: mod_base = OTHER; note = 2'-O-methyl modified nucleotide
  modified_base 67: mod_base = OTHER; note = 2'-O-methyl modified nucleotide
  modified_base 68: mod_base = OTHER; note = 2'-O-methyl modified nucleotide
  modified_base 69: mod_base = OTHER; note = 2'-O-methyl modified nucleotide
  modified_base 70: mod_base = OTHER; note = 2'-O-methyl modified nucleotide
  modified_base 75: mod_base = OTHER; note = 2'-O-methyl modified nucleotide
  modified_base 77: mod_base = OTHER; note = 2'-O-methyl modified nucleotide
  modified_base 80: mod_base = OTHER; note = 2'-O-methyl modified nucleotide
  modified_base 86: mod_base = OTHER; note = 2'-O-methyl modified nucleotide
  modified_base 87: mod_base = OTHER; note = 2'-O-methyl modified nucleotide
  modified_base 89: mod_base = OTHER; note = 2'-O-methyl modified nucleotide
  modified_base 90: mod_base = OTHER; note = 2'-O-methyl modified nucleotide
  modified_base 91: mod_base = OTHER; note = 2'-O-methyl modified nucleotide
  modified_base 92: mod_base = OTHER; note = 2'-O-methyl modified nucleotide
  modified_base 99: mod_base = OTHER; note = nucleotide with phosphorothioate linkage
  modified_base 100: mod_base = OTHER; note = 2'-O-methyl modified nucleotide with phosphorothioate linkage
  modified_base 101: mod_base = OTHER; note = 2'-O-methyl modified nucleotide

SEQ ID NO: 2770 - RNA, 101 nt, synthetic construct; identical to SEQ ID NO: 1770
  source 1..101: mol_type = other RNA
  modified_base 1: mod_base = OTHER; note = 2'-O-methyl modified nucleotide with phosphorothioate linkage
  modified_base 2: mod_base = OTHER; note = 2'-O-methyl modified nucleotide with phosphorothioate linkage
  modified_base 3: mod_base = OTHER; note = 2'-O-methyl modified nucleotide with phosphorothioate linkage
  modified_base 4: mod_base = OTHER; note = 2'-O-methyl modified nucleotide
  modified_base 5: mod_base = OTHER; note = 2'-O-methyl modified nucleotide
  modified_base 8: mod_base = OTHER; note = 2'-O-methyl modified nucleotide
  modified_base 9: mod_base = OTHER; note = 2'-O-methyl modified nucleotide
  modified_base 11: mod_base = OTHER; note = 2'-O-methyl modified nucleotide
  modified_base 13: mod_base = OTHER; note = 2'-O-methyl modified nucleotide
  modified_base 18: mod_base = OTHER; note = 2'-O-methyl modified nucleotide
  modified_base 22: mod_base = OTHER; note = 2'-O-methyl modified nucleotide
  modified_base 25: mod_base = OTHER; note = 2'-O-methyl modified nucleotide
  modified_base 29: mod_base = OTHER; note = 2'-O-methyl modified nucleotide
  modified_base 30: mod_base = OTHER; note = 2'-O-methyl modified nucleotide
  modified_base 31: mod_base = OTHER; note = 2'-O-methyl modified nucleotide
  modified_base 32: mod_base = OTHER; note = 2'-O-methyl modified nucleotide
  modified_base 37: mod_base = OTHER; note = 2'-O-methyl modified nucleotide
  modified_base 38: mod_base = OTHER; note = 2'-O-methyl modified nucleotide
  modified_base 39: mod_base = OTHER; note = 2'-O-methyl modified nucleotide
  modified_base 40: mod_base = OTHER; note = 2'-O-methyl modified nucleotide
  modified_base 41: mod_base = OTHER; note = 2'-O-methyl modified nucleotide
  modified_base 42: mod_base = OTHER; note = 2'-O-methyl modified nucleotide
  modified_base 43: mod_base = OTHER; note = 2'-O-methyl modified nucleotide
  modified_base 47: mod_base = OTHER; note = 2'-O-methyl modified nucleotide
  modified_base 48: mod_base = OTHER; note = 2'-O-methyl modified nucleotide
  modified_base 51: mod_base = OTHER; note = 2'-O-methyl modified nucleotide
  modified_base 54: mod_base = OTHER; note = nucleotide with phosphorothioate linkage
  modified_base 58: mod_base = OTHER; note = 2'-O-methyl modified nucleotide
  modified_base 59: mod_base = OTHER; note = 2'-O-methyl modified nucleotide
  modified_base 61: mod_base = OTHER; note = 2'-O-methyl modified nucleotide
  modified_base 62: mod_base = OTHER; note = 2'-O-methyl modified nucleotide
  modified_base 63: mod_base = OTHER; note = 2'-O-methyl modified nucleotide
  modified_base 64: mod_base = OTHER; note = 2'-O-methyl modified nucleotide
  modified_base 65: mod_base = OTHER; note = 2'-O-methyl modified nucleotide
  modified_base 66: mod_base = OTHER; note = 2'-O-methyl modified nucleotide
  modified_base 67: mod_base = OTHER; note = 2'-O-methyl modified nucleotide
  modified_base 68: mod_base = OTHER; note = 2'-O-methyl modified nucleotide
  modified_base 69: mod_base = OTHER; note = 2'-O-methyl modified nucleotide
  modified_base 70: mod_base = OTHER; note = 2'-O-methyl modified nucleotide
  modified_base 75: mod_base = OTHER; note = 2'-O-methyl modified nucleotide
  modified_base 77: mod_base = OTHER; note = 2'-O-methyl modified nucleotide
  modified_base 80: mod_base = OTHER; note = 2'-O-methyl modified nucleotide
  modified_base 86: mod_base = OTHER; note = 2'-O-methyl modified nucleotide
  modified_base 87: mod_base = OTHER; note = 2'-O-methyl modified nucleotide
  modified_base 89: mod_base = OTHER; note = 2'-O-methyl modified nucleotide
  modified_base 90: mod_base = OTHER; note = 2'-O-methyl modified nucleotide
  modified_base 91: mod_base = OTHER; note = 2'-O-methyl modified nucleotide
  modified_base 92: mod_base = OTHER; note = 2'-O-methyl modified nucleotide
  modified_base 99: mod_base = OTHER; note = nucleotide with phosphorothioate linkage
  modified_base 100: mod_base = OTHER; note = 2'-O-methyl modified nucleotide with phosphorothioate linkage
  modified_base 101: mod_base = OTHER; note = 2'-O-methyl modified nucleotide

SEQ ID NO: 2771 - RNA, 101 nt, synthetic construct; identical to SEQ ID NO: 1771
  source 1..101: mol_type = other RNA
  modified_base 1: mod_base = OTHER; note = 2'-O-methyl modified nucleotide with phosphorothioate linkage
  modified_base 2: mod_base = OTHER; note = 2'-O-methyl modified nucleotide with phosphorothioate linkage
  modified_base 3: mod_base = OTHER; note = 2'-O-methyl modified nucleotide with phosphorothioate linkage
  modified_base 4: mod_base = OTHER; note = 2'-O-methyl modified nucleotide
  modified_base 5: mod_base = OTHER; note = 2'-O-methyl modified nucleotide
  modified_base 8: mod_base = OTHER; note = 2'-O-methyl modified nucleotide
  modified_base 9: mod_base = OTHER; note = 2'-O-methyl modified nucleotide
  modified_base 11: mod_base = OTHER; note = 2'-O-methyl modified nucleotide
  modified_base 13: mod_base = OTHER; note = 2'-O-methyl modified nucleotide
  modified_base 18: mod_base = OTHER; note = 2'-O-methyl modified nucleotide
  modified_base 22: mod_base = OTHER; note = 2'-O-methyl modified nucleotide
  modified_base 25: mod_base = OTHER; note = 2'-O-methyl modified nucleotide
  modified_base 29: mod_base = OTHER; note = 2'-O-methyl modified nucleotide
  modified_base 30: mod_base = OTHER; note = 2'-O-methyl modified nucleotide
  modified_base 31: mod_base = OTHER; note = 2'-O-methyl modified nucleotide
  modified_base 32: mod_base = OTHER; note = 2'-O-methyl modified nucleotide
  modified_base 37: mod_base = OTHER; note = 2'-O-methyl modified nucleotide
  modified_base 38: mod_base = OTHER; note = 2'-O-methyl modified nucleotide
  modified_base 39: mod_base = OTHER; note = 2'-O-methyl modified nucleotide
  modified_base 40: mod_base = OTHER; note = 2'-O-methyl modified nucleotide
  modified_base 41: mod_base = OTHER; note = 2'-O-methyl modified nucleotide
  modified_base 42: mod_base = OTHER; note = 2'-O-methyl modified nucleotide
  modified_base 43: mod_base = OTHER; note = 2'-O-methyl modified nucleotide
  modified_base 47: mod_base = OTHER; note = 2'-O-methyl modified nucleotide
  modified_base 48: mod_base = OTHER; note = 2'-O-methyl modified nucleotide
  modified_base 51: mod_base = OTHER; note = 2'-O-methyl modified nucleotide
  modified_base 54: mod_base = OTHER; note = nucleotide with phosphorothioate linkage
  modified_base 58: mod_base = OTHER; note = 2'-O-methyl modified nucleotide
  modified_base 59: mod_base = OTHER; note = 2'-O-methyl modified nucleotide
  modified_base 61: mod_base = OTHER; note = 2'-O-methyl modified nucleotide
  modified_base 62: mod_base = OTHER; note = 2'-O-methyl modified nucleotide
  modified_base 63: mod_base = OTHER; note = 2'-O-methyl modified nucleotide
  modified_base 64: mod_base = OTHER; note = 2'-O-methyl modified nucleotide
  modified_base 65: mod_base = OTHER; note = 2'-O-methyl modified nucleotide
  modified_base 66: mod_base = OTHER; note = 2'-O-methyl modified nucleotide
  modified_base 67: mod_base = OTHER; note = 2'-O-methyl modified nucleotide
  modified_base 68: mod_base = OTHER; note = 2'-O-methyl modified nucleotide
  modified_base 69: mod_base = OTHER; note = 2'-O-methyl modified nucleotide
  modified_base 70: mod_base = OTHER; note = 2'-O-methyl modified nucleotide
  modified_base 75: mod_base = OTHER; note = 2'-O-methyl modified nucleotide
  modified_base 77: mod_base = OTHER; note = 2'-O-methyl modified nucleotide
  modified_base 80: mod_base = OTHER; note = 2'-O-methyl modified nucleotide
  modified_base 86: mod_base = OTHER; note = 2'-O-methyl modified nucleotide
  modified_base 87: mod_base = OTHER; note = 2'-O-methyl modified nucleotide
  modified_base 89: mod_base = OTHER; note = 2'-O-methyl modified nucleotide
  modified_base 90: mod_base = OTHER; note = 2'-O-methyl modified nucleotide
  modified_base 91: mod_base = OTHER; note = 2'-O-methyl modified nucleotide
  modified_base 92: mod_base = OTHER; note = 2'-O-methyl modified nucleotide
  modified_base 99: mod_base = OTHER; note = nucleotide with phosphorothioate linkage
  modified_base 100: mod_base = OTHER; note = 2'-O-methyl modified nucleotide with phosphorothioate linkage
  modified_base 101: mod_base = OTHER; note = 2'-O-methyl modified nucleotide

SEQ ID NO: 2772 - RNA, 101 nt, synthetic construct; identical to SEQ ID NO: 1772
  source 1..101: mol_type = other RNA
  modified_base 1: mod_base = OTHER; note = 2'-O-methyl modified nucleotide with phosphorothioate linkage
  modified_base 2: mod_base = OTHER; note = 2'-O-methyl modified nucleotide with phosphorothioate linkage
  modified_base 3: mod_base = OTHER; note = 2'-O-methyl modified nucleotide with phosphorothioate linkage
  modified_base 4: mod_base = OTHER; note = 2'-O-methyl modified nucleotide
  modified_base 5: mod_base = OTHER; note = 2'-O-methyl modified nucleotide
  modified_base 8: mod_base = OTHER; note = 2'-O-methyl modified nucleotide
  modified_base 9: mod_base = OTHER; note = 2'-O-methyl modified nucleotide
  modified_base 11: mod_base = OTHER; note = 2'-O-methyl modified nucleotide
  modified_base 13: mod_base = OTHER; note = 2'-O-methyl modified nucleotide
  modified_base 18: mod_base = OTHER; note = 2'-O-methyl modified nucleotide
  modified_base 22: mod_base = OTHER; note = 2'-O-methyl modified nucleotide
  modified_base 25: mod_base = OTHER; note = 2'-O-methyl modified nucleotide
  modified_base 29: mod_base = OTHER; note = 2'-O-methyl modified nucleotide
  modified_base 30: mod_base = OTHER; note = 2'-O-methyl modified nucleotide
  modified_base 31: mod_base = OTHER; note = 2'-O-methyl modified nucleotide
  modified_base 32: mod_base = OTHER; note = 2'-O-methyl modified nucleotide
  modified_base 37: mod_base = OTHER; note = 2'-O-methyl modified nucleotide
  modified_base 38: mod_base = OTHER; note = 2'-O-methyl modified nucleotide
  modified_base 39: mod_base = OTHER; note = 2'-O-methyl modified nucleotide
  modified_base 40: mod_base = OTHER; note = 2'-O-methyl modified nucleotide
  modified_base 41: mod_base = OTHER; note = 2'-O-methyl modified nucleotide
  modified_base 42: mod_base = OTHER; note = 2'-O-methyl modified nucleotide
  modified_base 43: mod_base = OTHER; note = 2'-O-methyl modified nucleotide
  modified_base 47: mod_base = OTHER; note = 2'-O-methyl modified nucleotide
  modified_base 48: mod_base = OTHER; note = 2'-O-methyl modified nucleotide
  modified_base 51: mod_base = OTHER; note = 2'-O-methyl modified nucleotide
  modified_base 54: mod_base = OTHER; note = nucleotide with phosphorothioate linkage
  modified_base 58: mod_base = OTHER; note = 2'-O-methyl modified nucleotide
  modified_base 59: mod_base = OTHER; note = 2'-O-methyl modified nucleotide
  modified_base 61: mod_base = OTHER; note = 2'-O-methyl modified nucleotide
  modified_base 62: mod_base = OTHER; note = 2'-O-methyl modified nucleotide
  modified_base 63: mod_base = OTHER; note = 2'-O-methyl modified nucleotide
  modified_base 64: mod_base = OTHER; note = 2'-O-methyl modified nucleotide
  modified_base 65: mod_base = OTHER; note = 2'-O-methyl modified nucleotide
  modified_base 66: mod_base = OTHER; note = 2'-O-methyl modified nucleotide
  modified_base 67: mod_base = OTHER; note = 2'-O-methyl modified nucleotide
  modified_base 68: mod_base = OTHER; note = 2'-O-methyl modified nucleotide
  modified_base 69: mod_base = OTHER; note = 2'-O-methyl modified nucleotide
  modified_base 70: mod_base = OTHER; note = 2'-O-methyl modified nucleotide
  modified_base 75: mod_base = OTHER; note = 2'-O-methyl modified nucleotide
  modified_base 77: mod_base = OTHER; note = 2'-O-methyl modified nucleotide
  modified_base 80: mod_base = OTHER; note = 2'-O-methyl modified nucleotide
  modified_base 86: mod_base = OTHER; note = 2'-O-methyl modified nucleotide
  modified_base 87: mod_base = OTHER; note = 2'-O-methyl modified nucleotide
  modified_base 89: mod_base = OTHER; note = 2'-O-methyl modified nucleotide
  modified_base 90: mod_base = OTHER; note = 2'-O-methyl modified nucleotide
  modified_base 91: mod_base = OTHER; note = 2'-O-methyl modified nucleotide
  modified_base 92: mod_base = OTHER; note = 2'-O-methyl modified nucleotide
  modified_base 99: mod_base = OTHER; note = nucleotide with phosphorothioate linkage
  modified_base 100: mod_base = OTHER; note = 2'-O-methyl modified nucleotide with phosphorothioate linkage
  modified_base 101: mod_base = OTHER; note = 2'-O-methyl modified nucleotide

SEQ ID NO: 2773 - RNA, 101 nt, synthetic construct; identical to SEQ ID NO: 1773
  source 1..101: mol_type = other RNA
  modified_base 1: mod_base = OTHER; note = 2'-O-methyl modified nucleotide with phosphorothioate linkage
  modified_base 2: mod_base = OTHER; note = 2'-O-methyl modified nucleotide with phosphorothioate linkage
  modified_base 3: mod_base = OTHER; note = 2'-O-methyl modified nucleotide with phosphorothioate linkage
  modified_base 4: mod_base = OTHER; note = 2'-O-methyl modified nucleotide
  modified_base 5: mod_base = OTHER; note = 2'-O-methyl modified nucleotide
  modified_base 8: mod_base = OTHER; note = 2'-O-methyl modified nucleotide
  modified_base 9: mod_base = OTHER; note = 2'-O-methyl modified nucleotide
  modified_base 11: mod_base = OTHER; note = 2'-O-methyl modified nucleotide
  modified_base 13: mod_base = OTHER; note = 2'-O-methyl modified nucleotide
  modified_base 18: mod_base = OTHER; note = 2'-O-methyl modified nucleotide
  modified_base 22: mod_base = OTHER; note = 2'-O-methyl modified nucleotide
  modified_base 25: mod_base = OTHER; note = 2'-O-methyl modified nucleotide
  modified_base 29: mod_base = OTHER; note = 2'-O-methyl modified nucleotide
  modified_base 30: mod_base = OTHER; note = 2'-O-methyl modified nucleotide
  modified_base 31: mod_base = OTHER; note = 2'-O-methyl modified nucleotide
  modified_base 32: mod_base = OTHER; note = 2'-O-methyl modified nucleotide
  modified_base 37: mod_base = OTHER; note = 2'-O-methyl modified nucleotide
  modified_base 38: mod_base = OTHER; note = 2'-O-methyl modified nucleotide
  modified_base 39: mod_base = OTHER; note = 2'-O-methyl modified nucleotide
  modified_base 40: mod_base = OTHER; note = 2'-O-methyl modified nucleotide
  modified_base 41: mod_base = OTHER; note = 2'-O-methyl modified nucleotide
  modified_base 42: mod_base = OTHER; note = 2'-O-methyl modified nucleotide
  modified_base 43: mod_base = OTHER; note = 2'-O-methyl modified nucleotide
  modified_base 47: mod_base = OTHER; note = 2'-O-methyl modified nucleotide
  modified_base 48: mod_base = OTHER; note = 2'-O-methyl modified nucleotide
  modified_base 51: mod_base = OTHER; note = 2'-O-methyl modified nucleotide
  modified_base 54: mod_base = OTHER; note = nucleotide with phosphorothioate linkage
  modified_base 58: mod_base = OTHER; note = 2'-O-methyl modified nucleotide
  modified_base 59: mod_base = OTHER; note = 2'-O-methyl modified nucleotide
  modified_base 61: mod_base = OTHER; note = 2'-O-methyl modified nucleotide
  modified_base 62: mod_base = OTHER; note = 2'-O-methyl modified nucleotide
  modified_base 63: mod_base = OTHER; note = 2'-O-methyl modified nucleotide
  modified_base 64: mod_base = OTHER; note = 2'-O-methyl modified nucleotide
  modified_base 65: mod_base = OTHER; note = 2'-O-methyl modified nucleotide
  modified_base 66: mod_base = OTHER; note = 2'-O-methyl modified nucleotide
  modified_base 67: mod_base = OTHER; note = 2'-O-methyl modified nucleotide
  modified_base 68: mod_base = OTHER; note = 2'-O-methyl modified nucleotide
  modified_base 69: mod_base = OTHER; note = 2'-O-methyl modified nucleotide
  modified_base 70: mod_base = OTHER; note = 2'-O-methyl modified nucleotide
  modified_base 75: mod_base = OTHER; note = 2'-O-methyl modified nucleotide
  modified_base 77: mod_base = OTHER; note = 2'-O-methyl modified nucleotide
  modified_base 80: mod_base = OTHER; note = 2'-O-methyl modified nucleotide
  modified_base 86: mod_base = OTHER; note = 2'-O-methyl modified nucleotide
  modified_base 87: mod_base = OTHER; note = 2'-O-methyl modified nucleotide
  modified_base 89: mod_base = OTHER; note = 2'-O-methyl modified nucleotide
  modified_base 90: mod_base = OTHER; note = 2'-O-methyl modified nucleotide
  modified_base 91: mod_base = OTHER; note = 2'-O-methyl modified nucleotide
  modified_base 92: mod_base = OTHER; note = 2'-O-methyl modified nucleotide
  modified_base 99: mod_base = OTHER; note = nucleotide with phosphorothioate linkage
  modified_base 100: mod_base = OTHER; note = 2'-O-methyl modified nucleotide with phosphorothioate linkage
  modified_base 101: mod_base = OTHER; note = 2'-O-methyl modified nucleotide

SEQ ID NO: 2774 - RNA, 101 nt, synthetic construct; identical to SEQ ID NO: 1774
  source 1..101: mol_type = other RNA
  modified_base 1: mod_base = OTHER; note = 2'-O-methyl modified nucleotide with phosphorothioate linkage
  modified_base 2: mod_base = OTHER; note = 2'-O-methyl modified nucleotide with phosphorothioate linkage
  modified_base 3: mod_base = OTHER; note = 2'-O-methyl modified nucleotide with phosphorothioate linkage
  modified_base 4: mod_base = OTHER; note = 2'-O-methyl modified nucleotide
  modified_base 5: mod_base = OTHER; note = 2'-O-methyl modified nucleotide
  modified_base 8: mod_base = OTHER; note = 2'-O-methyl modified nucleotide
  modified_base 9: mod_base = OTHER; note = 2'-O-methyl modified nucleotide
  modified_base 11: mod_base = OTHER; note = 2'-O-methyl modified nucleotide
  modified_base 13: mod_base = OTHER; note = 2'-O-methyl modified nucleotide
  modified_base 18: mod_base = OTHER; note = 2'-O-methyl modified nucleotide
  modified_base 22: mod_base = OTHER; note = 2'-O-methyl modified nucleotide
  modified_base 25: mod_base = OTHER; note = 2'-O-methyl modified nucleotide
  modified_base 29: mod_base = OTHER; note = 2'-O-methyl modified nucleotide
  modified_base 30: mod_base = OTHER; note = 2'-O-methyl modified nucleotide
  modified_base 31: mod_base = OTHER; note = 2'-O-methyl modified nucleotide
  modified_base 32: mod_base = OTHER; note = 2'-O-methyl modified nucleotide
  modified_base 37: mod_base = OTHER; note = 2'-O-methyl modified nucleotide
  modified_base 38: mod_base = OTHER; note = 2'-O-methyl modified nucleotide
  modified_base 39: mod_base = OTHER; note = 2'-O-methyl modified nucleotide
  modified_base 40: mod_base = OTHER; note = 2'-O-methyl modified nucleotide
  modified_base 41: mod_base = OTHER; note = 2'-O-methyl modified nucleotide
  modified_base 42: mod_base = OTHER; note = 2'-O-methyl modified nucleotide
  modified_base 43: mod_base = OTHER; note = 2'-O-methyl modified nucleotide
  modified_base 47: mod_base = OTHER; note = 2'-O-methyl modified nucleotide
  modified_base 48: mod_base = OTHER; note = 2'-O-methyl modified nucleotide
  modified_base 51: mod_base = OTHER; note = 2'-O-methyl modified nucleotide
  modified_base 54: mod_base = OTHER; note = nucleotide with phosphorothioate linkage
  modified_base 58: mod_base = OTHER; note = 2'-O-methyl modified nucleotide
  modified_base 59: mod_base = OTHER; note = 2'-O-methyl modified nucleotide
  modified_base 61: mod_base = OTHER; note = 2'-O-methyl modified nucleotide
  modified_base 62: mod_base = OTHER; note = 2'-O-methyl modified nucleotide
  modified_base 63: mod_base = OTHER; note = 2'-O-methyl modified nucleotide
  modified_base 64: mod_base = OTHER; note = 2'-O-methyl modified nucleotide
  modified_base 65: mod_base = OTHER; note = 2'-O-methyl modified nucleotide
  modified_base 66: mod_base = OTHER; note = 2'-O-methyl modified nucleotide
  modified_base 67: mod_base = OTHER; note = 2'-O-methyl modified nucleotide
  modified_base 68: mod_base = OTHER; note = 2'-O-methyl modified nucleotide
  modified_base 69: mod_base = OTHER; note = 2'-O-methyl modified nucleotide
  modified_base 70: mod_base = OTHER; note = 2'-O-methyl modified nucleotide
  modified_base 75: mod_base = OTHER; note = 2'-O-methyl modified nucleotide
  modified_base 77: mod_base = OTHER; note = 2'-O-methyl modified nucleotide
  modified_base 80: mod_base = OTHER; note = 2'-O-methyl modified nucleotide
  modified_base 86: mod_base = OTHER; note = 2'-O-methyl modified nucleotide
  modified_base 87: mod_base = OTHER; note = 2'-O-methyl modified nucleotide
  modified_base 89: mod_base = OTHER; note = 2'-O-methyl modified nucleotide
  modified_base 90: mod_base = OTHER; note = 2'-O-methyl modified nucleotide
  modified_base 91: mod_base = OTHER; note = 2'-O-methyl modified nucleotide
  modified_base 92: mod_base = OTHER; note = 2'-O-methyl modified nucleotide
  modified_base 99: mod_base = OTHER; note = nucleotide with phosphorothioate linkage
  modified_base 100: mod_base = OTHER; note = 2'-O-methyl modified nucleotide with phosphorothioate linkage
  modified_base 101: mod_base = OTHER; note = 2'-O-methyl modified nucleotide

SEQ ID NO: 2775-2827 - skipped (53 entries)

SEQ ID NO: 2828 - RNA, 101 nt, synthetic construct; identical to SEQ ID NO: 1828
  source 1..101: mol_type = other RNA
  modified_base 1: mod_base = OTHER; note = 2'-O-methyl modified nucleotide with phosphorothioate linkage
  modified_base 2: mod_base = OTHER; note = 2'-O-methyl modified nucleotide with phosphorothioate linkage
  modified_base 3: mod_base = OTHER; note = 2'-O-methyl modified nucleotide with phosphorothioate linkage
  modified_base 4: mod_base = OTHER; note = 2'-O-methyl modified nucleotide
  modified_base 5: mod_base = OTHER; note = 2'-O-methyl modified nucleotide
  modified_base 8: mod_base = OTHER; note = 2'-O-methyl modified nucleotide
  modified_base 9: mod_base = OTHER; note = 2'-O-methyl modified nucleotide
  modified_base 11: mod_base = OTHER; note = 2'-O-methyl modified nucleotide
  modified_base 13: mod_base = OTHER; note = 2'-O-methyl modified nucleotide
  modified_base 18: mod_base = OTHER; note = 2'-O-methyl modified nucleotide
  modified_base 22: mod_base = OTHER; note = 2'-O-methyl modified nucleotide
  modified_base 25: mod_base = OTHER; note = 2'-O-methyl modified nucleotide
  modified_base 29: mod_base = OTHER; note = 2'-O-methyl modified nucleotide
  modified_base 30: mod_base = OTHER; note = 2'-O-methyl modified nucleotide
  modified_base 31: mod_base = OTHER; note = 2'-O-methyl modified nucleotide
  modified_base 32: mod_base = OTHER; note = 2'-O-methyl modified nucleotide
  modified_base 37: mod_base = OTHER; note = 2'-O-methyl modified nucleotide
  modified_base 38: mod_base = OTHER; note = 2'-O-methyl modified nucleotide
  modified_base 39: mod_base = OTHER; note = 2'-O-methyl modified nucleotide
  modified_base 40: mod_base = OTHER; note = 2'-O-methyl modified nucleotide
  modified_base 41: mod_base = OTHER; note = 2'-O-methyl modified nucleotide
  modified_base 42: mod_base = OTHER; note = 2'-O-methyl modified nucleotide
  modified_base 43: mod_base = OTHER; note = 2'-O-methyl modified nucleotide
  modified_base 47: mod_base = OTHER; note = 2'-O-methyl modified nucleotide
  modified_base 48: mod_base = OTHER; note = 2'-O-methyl modified nucleotide
  modified_base 51: mod_base = OTHER; note = 2'-O-methyl modified nucleotide
  modified_base 54: mod_base = OTHER; note = nucleotide with phosphorothioate linkage
  modified_base 58: mod_base = OTHER; note = 2'-O-methyl modified nucleotide
  modified_base 59: mod_base = OTHER; note = 2'-O-methyl modified nucleotide
  modified_base 61: mod_base = OTHER; note = 2'-O-methyl modified nucleotide
  modified_base 62: mod_base = OTHER; note = 2'-O-methyl modified nucleotide
  modified_base 63: mod_base = OTHER; note = 2'-O-methyl modified nucleotide
  modified_base 64: mod_base = OTHER; note = 2'-O-methyl modified nucleotide
  modified_base 65: mod_base = OTHER; note = 2'-O-methyl modified nucleotide
  modified_base 66: mod_base = OTHER; note = 2'-O-methyl modified nucleotide
  modified_base 67: mod_base = OTHER; note = 2'-O-methyl modified nucleotide
  modified_base 68: mod_base = OTHER; note = 2'-O-methyl modified nucleotide
  modified_base 69: mod_base = OTHER; note = 2'-O-methyl modified nucleotide
  modified_base 70: mod_base = OTHER; note = 2'-O-methyl modified nucleotide
  modified_base 75: mod_base = OTHER; note = 2'-O-methyl modified nucleotide
  modified_base 77: mod_base = OTHER; note = 2'-O-methyl modified nucleotide
  modified_base 80: mod_base = OTHER; note = 2'-O-methyl modified nucleotide
  modified_base 86: mod_base = OTHER; note = 2'-O-methyl modified nucleotide
  modified_base 87: mod_base = OTHER; note = 2'-O-methyl modified nucleotide
  modified_base 89: mod_base = OTHER; note = 2'-O-methyl modified nucleotide
  modified_base 90: mod_base = OTHER; note = 2'-O-methyl modified nucleotide
  modified_base 91: mod_base = OTHER; note = 2'-O-methyl modified nucleotide
  modified_base 92: mod_base = OTHER; note = 2'-O-methyl modified nucleotide
  modified_base 99: mod_base = OTHER; note = nucleotide with phosphorothioate linkage
  modified_base 100: mod_base = OTHER; note = 2'-O-methyl modified nucleotide with phosphorothioate linkage
  modified_base 101: mod_base = OTHER; note = 2'-O-methyl modified nucleotide

SEQ ID NO: 2829 - RNA, 101 nt, synthetic construct; identical to SEQ ID NO: 1829
  source 1..101: mol_type = other RNA
  modified_base 1: mod_base = OTHER; note = 2'-O-methyl modified nucleotide with phosphorothioate linkage
  modified_base 2: mod_base = OTHER; note = 2'-O-methyl modified nucleotide with phosphorothioate linkage
  modified_base 3: mod_base = OTHER; note = 2'-O-methyl modified nucleotide with phosphorothioate linkage
  modified_base 4: mod_base = OTHER; note = 2'-O-methyl modified nucleotide
  modified_base 5: mod_base = OTHER; note = 2'-O-methyl modified nucleotide
  modified_base 8: mod_base = OTHER; note = 2'-O-methyl modified nucleotide
  modified_base 9: mod_base = OTHER; note = 2'-O-methyl modified nucleotide
  modified_base 11: mod_base = OTHER; note = 2'-O-methyl modified nucleotide
  modified_base 13: mod_base = OTHER; note = 2'-O-methyl modified nucleotide
  modified_base 18: mod_base = OTHER; note = 2'-O-methyl modified nucleotide
  modified_base 22: mod_base = OTHER; note = 2'-O-methyl modified nucleotide
  modified_base 25: mod_base = OTHER; note = 2'-O-methyl modified nucleotide
  modified_base 29: mod_base = OTHER; note = 2'-O-methyl modified nucleotide
  modified_base 30: mod_base = OTHER; note = 2'-O-methyl modified nucleotide
  modified_base 31: mod_base = OTHER; note = 2'-O-methyl modified nucleotide
  modified_base 32: mod_base = OTHER; note = 2'-O-methyl modified nucleotide
  modified_base 37: mod_base = OTHER; note = 2'-O-methyl modified nucleotide
  modified_base 38: mod_base = OTHER; note = 2'-O-methyl modified nucleotide
  modified_base 39: mod_base = OTHER; note = 2'-O-methyl modified nucleotide
  modified_base 40: mod_base = OTHER; note = 2'-O-methyl modified nucleotide
  modified_base 41: mod_base = OTHER; note = 2'-O-methyl modified nucleotide
  modified_base 42: mod_base = OTHER; note = 2'-O-methyl modified nucleotide
  modified_base 43: mod_base = OTHER; note = 2'-O-methyl modified nucleotide
  modified_base 47: mod_base = OTHER; note = 2'-O-methyl modified nucleotide
  modified_base 48: mod_base = OTHER; note = 2'-O-methyl modified nucleotide
  modified_base 51: mod_base = OTHER; note = 2'-O-methyl modified nucleotide
  modified_base 54: mod_base = OTHER; note = nucleotide with phosphorothioate linkage
  modified_base 58: mod_base = OTHER; note = 2'-O-methyl modified nucleotide
  modified_base 59: mod_base = OTHER; note = 2'-O-methyl modified nucleotide
  modified_base 61: mod_base = OTHER; note = 2'-O-methyl modified nucleotide
  modified_base 62: mod_base = OTHER; note = 2'-O-methyl modified nucleotide
  modified_base 63: mod_base = OTHER; note = 2'-O-methyl modified nucleotide
  modified_base 64: mod_base = OTHER; note = 2'-O-methyl modified nucleotide
  modified_base 65: mod_base = OTHER; note = 2'-O-methyl modified nucleotide
  modified_base 66: mod_base = OTHER; note = 2'-O-methyl modified nucleotide
  modified_base 67: mod_base = OTHER; note = 2'-O-methyl modified nucleotide
  modified_base 68: mod_base = OTHER; note = 2'-O-methyl modified nucleotide
  modified_base 69: mod_base = OTHER; note = 2'-O-methyl modified nucleotide
  modified_base 70: mod_base = OTHER; note = 2'-O-methyl modified nucleotide
  modified_base 75: mod_base = OTHER; note = 2'-O-methyl modified nucleotide
  modified_base 77: mod_base = OTHER; note = 2'-O-methyl modified nucleotide
  modified_base 80: mod_base = OTHER; note = 2'-O-methyl modified nucleotide
  modified_base 86: mod_base = OTHER; note = 2'-O-methyl modified nucleotide
  modified_base 87: mod_base = OTHER; note = 2'-O-methyl modified nucleotide
  modified_base 89: mod_base = OTHER; note = 2'-O-methyl modified nucleotide
  modified_base 90: mod_base = OTHER; note = 2'-O-methyl modified nucleotide
  modified_base 91: mod_base = OTHER; note = 2'-O-methyl modified nucleotide
  modified_base 92: mod_base = OTHER; note = 2'-O-methyl modified nucleotide
  modified_base 99: mod_base = OTHER; note = nucleotide with phosphorothioate linkage
  modified_base 100: mod_base = OTHER; note = 2'-O-methyl modified nucleotide with phosphorothioate linkage
  modified_base 101: mod_base = OTHER; note = 2'-O-methyl modified nucleotide

SEQ ID NO: 2830 - RNA, 101 nt, synthetic construct; identical to SEQ ID NO: 1830
  source 1..101: mol_type = other RNA
  modified_base 1: mod_base = OTHER; note = 2'-O-methyl modified nucleotide with phosphorothioate linkage
  modified_base 2: mod_base = OTHER; note = 2'-O-methyl modified nucleotide with phosphorothioate linkage
  modified_base 3: mod_base = OTHER; note = 2'-O-methyl modified nucleotide with phosphorothioate linkage
  modified_base 4: mod_base = OTHER; note = 2'-O-methyl modified nucleotide
  modified_base 5: mod_base = OTHER; note = 2'-O-methyl modified nucleotide
  modified_base 8: mod_base = OTHER; note = 2'-O-methyl modified nucleotide
  modified_base 9: mod_base = OTHER; note = 2'-O-methyl modified nucleotide
  modified_base 11: mod_base = OTHER; note = 2'-O-methyl modified nucleotide
  modified_base 13: mod_base = OTHER; note = 2'-O-methyl modified nucleotide
  modified_base 18: mod_base = OTHER; note = 2'-O-methyl modified nucleotide
  modified_base 22: mod_base = OTHER; note = 2'-O-methyl modified nucleotide
  modified_base 25: mod_base = OTHER; note = 2'-O-methyl modified nucleotide
  modified_base 29: mod_base = OTHER; note = 2'-O-methyl modified nucleotide
  modified_base 30: mod_base = OTHER; note = 2'-O-methyl modified nucleotide
  modified_base 31: mod_base = OTHER; note = 2'-O-methyl modified nucleotide
  modified_base 32: mod_base = OTHER; note = 2'-O-methyl modified nucleotide
  modified_base 37: mod_base = OTHER; note = 2'-O-methyl modified nucleotide
  modified_base 38: mod_base = OTHER; note = 2'-O-methyl modified nucleotide
  modified_base 39: mod_base = OTHER; note = 2'-O-methyl modified nucleotide
  modified_base 40: mod_base = OTHER; note = 2'-O-methyl modified nucleotide
  modified_base 41: mod_base = OTHER; note = 2'-O-methyl modified nucleotide
  modified_base 42: mod_base = OTHER; note = 2'-O-methyl modified nucleotide
  modified_base 43: mod_base = OTHER; note = 2'-O-methyl modified nucleotide
  modified_base 47: mod_base = OTHER; note = 2'-O-methyl modified nucleotide
  modified_base 48: mod_base = OTHER; note = 2'-O-methyl modified nucleotide
  modified_base 51: mod_base = OTHER; note = 2'-O-methyl modified nucleotide
  modified_base 54: mod_base = OTHER; note = nucleotide with phosphorothioate linkage
  modified_base 58: mod_base = OTHER; note = 2'-O-methyl modified nucleotide
  modified_base 59: mod_base = OTHER; note = 2'-O-methyl modified nucleotide
  modified_base 61: mod_base = OTHER; note = 2'-O-methyl modified nucleotide
  modified_base 62: mod_base = OTHER; note = 2'-O-methyl modified nucleotide
  modified_base 63: mod_base = OTHER; note = 2'-O-methyl modified nucleotide
  modified_base 64: mod_base = OTHER; note = 2'-O-methyl modified nucleotide
  modified_base 65: mod_base = OTHER; note = 2'-O-methyl modified nucleotide
  modified_base 66: mod_base = OTHER; note = 2'-O-methyl modified nucleotide
  modified_base 67: mod_base = OTHER; note = 2'-O-methyl modified nucleotide
  modified_base 68: mod_base = OTHER; note = 2'-O-methyl modified nucleotide
  modified_base 69: mod_base = OTHER; note = 2'-O-methyl modified nucleotide
  modified_base 70: mod_base = OTHER; note = 2'-O-methyl modified nucleotide
  modified_base 75: mod_base = OTHER; note = 2'-O-methyl modified nucleotide
  modified_base 77: mod_base = OTHER; note = 2'-O-methyl modified nucleotide
  modified_base 80: mod_base = OTHER; note = 2'-O-methyl modified nucleotide
  modified_base 86: mod_base = OTHER; note = 2'-O-methyl modified nucleotide
  modified_base 87: mod_base = OTHER; note = 2'-O-methyl modified nucleotide
  modified_base 89: mod_base = OTHER; note = 2'-O-methyl modified nucleotide
  modified_base 90: mod_base = OTHER; note = 2'-O-methyl modified nucleotide
  modified_base 91: mod_base = OTHER; note = 2'-O-methyl modified nucleotide
  modified_base 92: mod_base = OTHER; note = 2'-O-methyl modified nucleotide
  modified_base 99: mod_base = OTHER; note = nucleotide with phosphorothioate linkage
  modified_base 100: mod_base = OTHER; note = 2'-O-methyl modified nucleotide with phosphorothioate linkage
  modified_base 101: mod_base = OTHER; note = 2'-O-methyl modified nucleotide

SEQ ID NO: 2831 - RNA, 101 nt, synthetic construct; identical to SEQ ID NO: 1831
  source 1..101: mol_type = other RNA
  modified_base 1: mod_base = OTHER; note = 2'-O-methyl modified nucleotide with phosphorothioate linkage
  modified_base 2: mod_base = OTHER; note = 2'-O-methyl modified nucleotide with phosphorothioate linkage
  modified_base 3: mod_base = OTHER; note = 2'-O-methyl modified nucleotide with phosphorothioate linkage
  modified_base 4: mod_base = OTHER; note = 2'-O-methyl modified nucleotide
  modified_base 5: mod_base = OTHER; note = 2'-O-methyl modified nucleotide
  modified_base 8: mod_base = OTHER; note = 2'-O-methyl modified nucleotide
  modified_base 9: mod_base = OTHER; note = 2'-O-methyl modified nucleotide
  modified_base 11: mod_base = OTHER; note = 2'-O-methyl modified nucleotide
  modified_base 13: mod_base = OTHER; note = 2'-O-methyl modified nucleotide
  modified_base 18: mod_base = OTHER; note = 2'-O-methyl modified nucleotide
  modified_base 22: mod_base = OTHER; note = 2'-O-methyl modified nucleotide
  modified_base 25: mod_base = OTHER; note = 2'-O-methyl modified nucleotide
  modified_base 29: mod_base = OTHER; note = 2'-O-methyl modified nucleotide
  modified_base 30: mod_base = OTHER; note = 2'-O-methyl modified nucleotide
  modified_base 31: mod_base = OTHER; note = 2'-O-methyl modified nucleotide
  modified_base 32: mod_base = OTHER; note = 2'-O-methyl modified nucleotide
  modified_base 37: mod_base = OTHER; note = 2'-O-methyl modified nucleotide
  modified_base 38: mod_base = OTHER; note = 2'-O-methyl modified nucleotide
  modified_base 39: mod_base = OTHER; note = 2'-O-methyl modified nucleotide
  modified_base 40: mod_base = OTHER; note = 2'-O-methyl modified nucleotide
  modified_base 41: mod_base = OTHER; note = 2'-O-methyl modified nucleotide
  modified_base 42: mod_base = OTHER; note = 2'-O-methyl modified nucleotide
  modified_base 43: mod_base = OTHER; note = 2'-O-methyl modified nucleotide
  modified_base 47: mod_base = OTHER; note = 2'-O-methyl modified nucleotide
  modified_base 48: mod_base = OTHER; note = 2'-O-methyl modified nucleotide
  modified_base 51: mod_base = OTHER; note = 2'-O-methyl modified nucleotide
  modified_base 54: mod_base = OTHER; note = nucleotide with phosphorothioate linkage
  modified_base 58: mod_base = OTHER; note = 2'-O-methyl modified nucleotide
  modified_base 59: mod_base = OTHER; note = 2'-O-methyl modified nucleotide
  modified_base 61: mod_base = OTHER; note = 2'-O-methyl modified nucleotide
  modified_base 62: mod_base = OTHER; note = 2'-O-methyl modified nucleotide
  modified_base 63: mod_base = OTHER; note = 2'-O-methyl modified nucleotide
  modified_base 64: mod_base = OTHER; note = 2'-O-methyl modified nucleotide
  modified_base 65: mod_base = OTHER; note = 2'-O-methyl modified nucleotide
  modified_base 66: mod_base = OTHER; note = 2'-O-methyl modified nucleotide
  modified_base 67: mod_base = OTHER; note = 2'-O-methyl modified nucleotide
  modified_base 68: mod_base = OTHER; note = 2'-O-methyl modified nucleotide
  modified_base 69: mod_base = OTHER; note = 2'-O-methyl modified nucleotide
  modified_base 70: mod_base = OTHER; note = 2'-O-methyl modified nucleotide
  modified_base 75: mod_base = OTHER; note = 2'-O-methyl modified nucleotide
  modified_base 77: mod_base = OTHER; note = 2'-O-methyl modified nucleotide
  modified_base 80: mod_base = OTHER; note = 2'-O-methyl modified nucleotide
  modified_base 86: mod_base = OTHER; note = 2'-O-methyl modified nucleotide
  modified_base 87: mod_base = OTHER; note = 2'-O-methyl modified nucleotide
  modified_base 89: mod_base = OTHER; note = 2'-O-methyl modified nucleotide
  modified_base 90: mod_base = OTHER; note = 2'-O-methyl modified nucleotide
  modified_base 91: mod_base = OTHER; note = 2'-O-methyl modified nucleotide
  modified_base 92: mod_base = OTHER; note = 2'-O-methyl modified nucleotide
  modified_base 99: mod_base = OTHER; note = nucleotide with phosphorothioate linkage
  modified_base 100: mod_base = OTHER; note = 2'-O-methyl modified nucleotide with phosphorothioate linkage
  modified_base 101: mod_base = OTHER; note = 2'-O-methyl modified nucleotide

SEQ ID NO: 2832 - RNA, 101 nt, synthetic construct; identical to SEQ ID NO: 1832
  source 1..101: mol_type = other RNA
  modified_base 1: mod_base = OTHER; note = 2'-O-methyl modified nucleotide with phosphorothioate linkage
  modified_base 2: mod_base = OTHER; note = 2'-O-methyl modified nucleotide with phosphorothioate linkage
  modified_base 3: mod_base = OTHER; note = 2'-O-methyl modified nucleotide with phosphorothioate linkage
  modified_base 4: mod_base = OTHER; note = 2'-O-methyl modified nucleotide
  modified_base 5: mod_base = OTHER; note = 2'-O-methyl modified nucleotide
  modified_base 8: mod_base = OTHER; note = 2'-O-methyl modified nucleotide
  modified_base 9: mod_base = OTHER; note = 2'-O-methyl modified nucleotide
  modified_base 11: mod_base = OTHER; note = 2'-O-methyl modified nucleotide
  modified_base 13: mod_base = OTHER; note = 2'-O-methyl modified nucleotide
  modified_base 18: mod_base = OTHER; note = 2'-O-methyl modified nucleotide
  modified_base 22: mod_base = OTHER; note = 2'-O-methyl modified nucleotide
  modified_base 25: mod_base = OTHER; note = 2'-O-methyl modified nucleotide
  modified_base 29: mod_base = OTHER; note = 2'-O-methyl modified nucleotide
  modified_base 30: mod_base = OTHER; note = 2'-O-methyl modified nucleotide
  modified_base 31: mod_base = OTHER; note = 2'-O-methyl modified nucleotide
  modified_base 32: mod_base = OTHER; note = 2'-O-methyl modified nucleotide
  modified_base 37: mod_base = OTHER; note = 2'-O-methyl modified nucleotide
  modified_base 38: mod_base = OTHER; note = 2'-O-methyl modified nucleotide
  modified_base 39: mod_base = OTHER; note = 2'-O-methyl modified nucleotide
  modified_base 40: mod_base = OTHER; note = 2'-O-methyl modified nucleotide
  modified_base 41: mod_base = OTHER; note = 2'-O-methyl modified nucleotide
  modified_base 42: mod_base = OTHER; note = 2'-O-methyl modified nucleotide
  modified_base 43: mod_base = OTHER; note = 2'-O-methyl modified nucleotide
  modified_base 47: mod_base = OTHER; note = 2'-O-methyl modified nucleotide
  modified_base 48: mod_base = OTHER; note = 2'-O-methyl modified nucleotide
  modified_base 51: mod_base = OTHER; note = 2'-O-methyl modified nucleotide
  modified_base 54: mod_base = OTHER; note = nucleotide with phosphorothioate linkage
  modified_base 58: mod_base = OTHER; note = 2'-O-methyl modified nucleotide
  modified_base 59: mod_base = OTHER; note = 2'-O-methyl modified nucleotide
  modified_base 61: mod_base = OTHER; note = 2'-O-methyl modified nucleotide
  modified_base 62: mod_base = OTHER; note = 2'-O-methyl modified nucleotide
  modified_base 63: mod_base = OTHER; note = 2'-O-methyl modified nucleotide
  modified_base 64: mod_base = OTHER; note = 2'-O-methyl modified nucleotide
  modified_base 65: mod_base = OTHER; note = 2'-O-methyl modified nucleotide
  modified_base 66: mod_base = OTHER; note = 2'-O-methyl modified nucleotide
  modified_base 67: mod_base = OTHER; note = 2'-O-methyl modified nucleotide
  modified_base 68: mod_base = OTHER; note = 2'-O-methyl modified nucleotide
  modified_base 69: mod_base = OTHER; note = 2'-O-methyl modified nucleotide
  modified_base 70: mod_base = OTHER; note = 2'-O-methyl modified nucleotide
  modified_base 75: mod_base = OTHER; note = 2'-O-methyl modified nucleotide
  modified_base 77: mod_base = OTHER; note = 2'-O-methyl modified nucleotide
  modified_base 80: mod_base = OTHER; note = 2'-O-methyl modified nucleotide
  modified_base 86: mod_base = OTHER; note = 2'-O-methyl modified nucleotide
  modified_base 87: mod_base = OTHER; note = 2'-O-methyl modified nucleotide
  modified_base 89: mod_base = OTHER; note = 2'-O-methyl modified nucleotide
  modified_base 90: mod_base = OTHER; note = 2'-O-methyl modified nucleotide
  modified_base 91: mod_base = OTHER; note = 2'-O-methyl modified nucleotide
  modified_base 92: mod_base = OTHER; note = 2'-O-methyl modified nucleotide
  modified_base 99: mod_base = OTHER; note = nucleotide with phosphorothioate linkage
  modified_base 100: mod_base = OTHER; note = 2'-O-methyl modified nucleotide with phosphorothioate linkage
  modified_base 101: mod_base = OTHER; note = 2'-O-methyl modified nucleotide

SEQ ID NO: 2833 - RNA, 101 nt, synthetic construct; identical to SEQ ID NO: 1833
  source 1..101: mol_type = other RNA
  modified_base 1: mod_base = OTHER; note = 2'-O-methyl modified nucleotide with phosphorothioate linkage
  modified_base 2: mod_base = OTHER; note = 2'-O-methyl modified nucleotide with phosphorothioate linkage
  modified_base 3: mod_base = OTHER; note = 2'-O-methyl modified nucleotide with phosphorothioate linkage
  modified_base 4: mod_base = OTHER; note = 2'-O-methyl modified nucleotide
  modified_base 5: mod_base = OTHER; note = 2'-O-methyl modified nucleotide
  modified_base 8: mod_base = OTHER; note = 2'-O-methyl modified nucleotide
  modified_base 9: mod_base = OTHER; note = 2'-O-methyl modified nucleotide
  modified_base 11: mod_base = OTHER; note = 2'-O-methyl modified nucleotide
  modified_base 13: mod_base = OTHER; note = 2'-O-methyl modified nucleotide
  modified_base 18: mod_base = OTHER; note = 2'-O-methyl modified nucleotide
  modified_base 22: mod_base = OTHER; note = 2'-O-methyl modified nucleotide
  modified_base 25: mod_base = OTHER; note = 2'-O-methyl modified nucleotide
  modified_base 29: mod_base = OTHER; note = 2'-O-methyl modified nucleotide
  modified_base 30: mod_base = OTHER; note = 2'-O-methyl modified nucleotide
  modified_base 31: mod_base = OTHER; note = 2'-O-methyl modified nucleotide
  modified_base 32: mod_base = OTHER; note = 2'-O-methyl modified nucleotide
  modified_base 37: mod_base = OTHER; note = 2'-O-methyl modified nucleotide
  modified_base 38: mod_base = OTHER; note = 2'-O-methyl modified nucleotide
  modified_base 39: mod_base = OTHER; note = 2'-O-methyl modified nucleotide
  modified_base 40: mod_base = OTHER; note = 2'-O-methyl modified nucleotide
  modified_base 41: mod_base = OTHER; note = 2'-O-methyl modified nucleotide
  modified_base 42: mod_base = OTHER; note = 2'-O-methyl modified nucleotide
  modified_base 43: mod_base = OTHER; note = 2'-O-methyl modified nucleotide
  modified_base 47: mod_base = OTHER; note = 2'-O-methyl modified nucleotide
  modified_base 48: mod_base = OTHER; note = 2'-O-methyl modified nucleotide
  modified_base 51: mod_base = OTHER; note = 2'-O-methyl modified nucleotide
  modified_base 54: mod_base = OTHER; note = nucleotide with phosphorothioate linkage
  modified_base 58: mod_base = OTHER; note = 2'-O-methyl modified nucleotide
  modified_base 59: mod_base = OTHER; note = 2'-O-methyl modified nucleotide
  modified_base 61: mod_base = OTHER; note = 2'-O-methyl modified nucleotide
  modified_base 62: mod_base = OTHER; note = 2'-O-methyl modified nucleotide
  modified_base 63: mod_base = OTHER; note = 2'-O-methyl modified nucleotide
  modified_base 64: mod_base = OTHER; note = 2'-O-methyl modified nucleotide
  modified_base 65: mod_base = OTHER; note = 2'-O-methyl modified nucleotide
  modified_base 66: mod_base = OTHER; note = 2'-O-methyl modified nucleotide
  modified_base 67: mod_base = OTHER; note = 2'-O-methyl modified nucleotide
  modified_base 68: mod_base = OTHER; note = 2'-O-methyl modified nucleotide
  modified_base 69: mod_base = OTHER; note = 2'-O-methyl modified nucleotide
  modified_base 70: mod_base = OTHER; note = 2'-O-methyl modified nucleotide
  modified_base 75: mod_base = OTHER; note = 2'-O-methyl modified nucleotide
  modified_base 77: mod_base = OTHER; note = 2'-O-methyl modified nucleotide
  modified_base 80: mod_base = OTHER; note = 2'-O-methyl modified nucleotide
  modified_base 86: mod_base = OTHER; note = 2'-O-methyl modified nucleotide
  modified_base 87: mod_base = OTHER; note = 2'-O-methyl modified nucleotide
  modified_base 89: mod_base = OTHER; note = 2'-O-methyl modified nucleotide
  modified_base 90: mod_base = OTHER; note = 2'-O-methyl modified nucleotide
  modified_base 91: mod_base = OTHER; note = 2'-O-methyl modified nucleotide
  modified_base 92: mod_base = OTHER; note = 2'-O-methyl modified nucleotide
  modified_base 99: mod_base = OTHER; note = nucleotide with phosphorothioate linkage
  modified_base 100: mod_base = OTHER; note = 2'-O-methyl modified nucleotide with phosphorothioate linkage
  modified_base 101: mod_base = OTHER; note = 2'-O-methyl modified nucleotide

SEQ ID NO: 2834-3000 - skipped (167 entries)

SEQ ID NO: 3001 - RNA, 101 nt, synthetic construct; identical to SEQ ID NO: 1066
  source 1..101: mol_type = other RNA
  modified_base 1: mod_base = OTHER; note = 2'-O-methyl modified nucleotide with phosphorothioate linkage
  modified_base 2: mod_base = OTHER; note = 2'-O-methyl modified nucleotide with phosphorothioate linkage
  modified_base 3: mod_base = OTHER; note = 2'-O-methyl modified nucleotide with phosphorothioate linkage
  modified_base 4: mod_base = OTHER; note = 2'-O-methyl modified nucleotide
  modified_base 5: mod_base = OTHER; note = 2'-O-methyl modified nucleotide
  modified_base 8: mod_base = OTHER; note = 2'-O-methyl modified nucleotide
  modified_base 9: mod_base = OTHER; note = 2'-O-methyl modified nucleotide
  modified_base 11: mod_base = OTHER; note = 2'-O-methyl modified nucleotide
  modified_base 13: mod_base = OTHER; note = 2'-O-methyl modified nucleotide
  modified_base 18: mod_base = OTHER; note = 2'-O-methyl modified nucleotide
  modified_base 22: mod_base = OTHER; note = 2'-O-methyl modified nucleotide
  modified_base 25: mod_base = OTHER; note = 2'-O-methyl modified nucleotide
  modified_base 29: mod_base = OTHER; note = 2'-O-methyl modified nucleotide
  modified_base 30: mod_base = OTHER; note = 2'-O-methyl modified nucleotide
  modified_base 31: mod_base = OTHER; note = 2'-O-methyl modified nucleotide
  modified_base 32: mod_base = OTHER; note = 2'-O-methyl modified nucleotide
  modified_base 37: mod_base = OTHER; note = 2'-O-methyl modified nucleotide
  modified_base 38: mod_base = OTHER; note = 2'-O-methyl modified nucleotide
  modified_base 39: mod_base = OTHER; note = 2'-O-methyl modified nucleotide
  modified_base 40: mod_base = OTHER; note = 2'-O-methyl modified nucleotide
  modified_base 41: mod_base = OTHER; note = 2'-O-methyl modified nucleotide
  modified_base 42: mod_base = OTHER; note = 2'-O-methyl modified nucleotide
  modified_base 43: mod_base = OTHER; note = 2'-O-methyl modified nucleotide
  modified_base 47: mod_base = OTHER; note = 2'-O-methyl modified nucleotide
  modified_base 48: mod_base = OTHER; note = 2'-O-methyl modified nucleotide
  modified_base 51: mod_base = OTHER; note = 2'-O-methyl modified nucleotide
  modified_base 58: mod_base = OTHER; note = 2'-O-methyl modified nucleotide
  modified_base 59: mod_base = OTHER; note = 2'-O-methyl modified nucleotide
  modified_base 61: mod_base = OTHER; note = 2'-O-methyl modified nucleotide
  modified_base 62: mod_base = OTHER; note = 2'-O-methyl modified nucleotide
  modified_base 63: mod_base = OTHER; note = 2'-O-methyl modified nucleotide
  modified_base 64: mod_base = OTHER; note = 2'-O-methyl modified nucleotide
  modified_base 65: mod_base = OTHER; note = 2'-O-methyl modified nucleotide
  modified_base 66: mod_base = OTHER; note = 2'-O-methyl modified nucleotide
  modified_base 67: mod_base = OTHER; note = 2'-O-methyl modified nucleotide
  modified_base 68: mod_base = OTHER; note = 2'-O-methyl modified nucleotide
  modified_base 69: mod_base = OTHER; note = 2'-O-methyl modified nucleotide
  modified_base 70: mod_base = OTHER; note = 2'-O-methyl modified nucleotide
  modified_base 75: mod_base = OTHER; note = 2'-O-methyl modified nucleotide
  modified_base 77: mod_base = OTHER; note = 2'-O-methyl modified nucleotide
  modified_base 80: mod_base = OTHER; note = 2'-O-methyl modified nucleotide
  modified_base 86: mod_base = OTHER; note = 2'-O-methyl modified nucleotide
  modified_base 87: mod_base = OTHER; note = 2'-O-methyl modified nucleotide
  modified_base 89: mod_base = OTHER; note = 2'-O-methyl modified nucleotide
  modified_base 90: mod_base = OTHER; note = 2'-O-methyl modified nucleotide
  modified_base 91: mod_base = OTHER; note = 2'-O-methyl modified nucleotide
  modified_base 92: mod_base = OTHER; note = 2'-O-methyl modified nucleotide
  modified_base 99: mod_base = OTHER; note = nucleotide with phosphorothioate linkage
  modified_base 100: mod_base = OTHER; note = 2'-O-methyl modified nucleotide with phosphorothioate linkage
  modified_base 101: mod_base = OTHER; note = 2'-O-methyl modified nucleotide

SEQ ID NO: 3002 - RNA, 101 nt, synthetic construct; identical to SEQ ID NO: 1061
  source 1..101: mol_type = other RNA
  modified_base 1: mod_base = OTHER; note = 2'-O-methyl modified nucleotide with phosphorothioate linkage
  modified_base 2: mod_base = OTHER; note = 2'-O-methyl modified nucleotide with phosphorothioate linkage
  modified_base 3: mod_base = OTHER; note = 2'-O-methyl modified nucleotide with phosphorothioate linkage
  modified_base 4: mod_base = OTHER; note = 2'-O-methyl modified nucleotide
  modified_base 5: mod_base = OTHER; note = 2'-O-methyl modified nucleotide
  modified_base 8: mod_base = OTHER; note = 2'-O-methyl modified nucleotide
  modified_base 9: mod_base = OTHER; note = 2'-O-methyl modified nucleotide
  modified_base 11: mod_base = OTHER; note = 2'-O-methyl modified nucleotide
  modified_base 13: mod_base = OTHER; note = 2'-O-methyl modified nucleotide
  modified_base 18: mod_base = OTHER; note = 2'-O-methyl modified nucleotide
  modified_base 22: mod_base = OTHER; note = 2'-O-methyl modified nucleotide
  modified_base 25: mod_base = OTHER; note = 2'-O-methyl modified nucleotide
  modified_base 29: mod_base = OTHER; note = 2'-O-methyl modified nucleotide
  modified_base 30: mod_base = OTHER; note = 2'-O-methyl modified nucleotide
  modified_base 31: mod_base = OTHER; note = 2'-O-methyl modified nucleotide
  modified_base 32: mod_base = OTHER; note = 2'-O-methyl modified nucleotide
  modified_base 37: mod_base = OTHER; note = 2'-O-methyl modified nucleotide
  modified_base 38: mod_base = OTHER; note = 2'-O-methyl modified nucleotide
  modified_base 39: mod_base = OTHER; note = 2'-O-methyl modified nucleotide
  modified_base 40: mod_base = OTHER; note = 2'-O-methyl modified nucleotide
  modified_base 41: mod_base = OTHER; note = 2'-O-methyl modified nucleotide
  modified_base 42: mod_base = OTHER; note = 2'-O-methyl modified nucleotide
  modified_base 43: mod_base = OTHER; note = 2'-O-methyl modified nucleotide
  modified_base 47: mod_base = OTHER; note = 2'-O-methyl modified nucleotide
  modified_base 48: mod_base = OTHER; note = 2'-O-methyl modified nucleotide
  modified_base 51: mod_base = OTHER; note = 2'-O-methyl modified nucleotide
  modified_base 58: mod_base = OTHER; note = 2'-O-methyl modified nucleotide
  modified_base 59: mod_base = OTHER; note = 2'-O-methyl modified nucleotide
  modified_base 61: mod_base = OTHER; note = 2'-O-methyl modified nucleotide
  modified_base 62: mod_base = OTHER; note = 2'-O-methyl modified nucleotide
  modified_base 63: mod_base = OTHER; note = 2'-O-methyl modified nucleotide
  modified_base 64: mod_base = OTHER; note = 2'-O-methyl modified nucleotide
  modified_base 65: mod_base = OTHER; note = 2'-O-methyl modified nucleotide
  modified_base 66: mod_base = OTHER; note = 2'-O-methyl modified nucleotide
  modified_base 67: mod_base = OTHER; note = 2'-O-methyl modified nucleotide
  modified_base 68: mod_base = OTHER; note = 2'-O-methyl modified nucleotide
  modified_base 69: mod_base = OTHER; note = 2'-O-methyl modified nucleotide
  modified_base 70: mod_base = OTHER; note = 2'-O-methyl modified nucleotide
  modified_base 75: mod_base = OTHER; note = 2'-O-methyl modified nucleotide
  modified_base 77: mod_base = OTHER; note = 2'-O-methyl modified nucleotide
  modified_base 80: mod_base = OTHER; note = 2'-O-methyl modified nucleotide
  modified_base 86: mod_base = OTHER; note = 2'-O-methyl modified nucleotide
  modified_base 87: mod_base = OTHER; note = 2'-O-methyl modified nucleotide
  modified_base 89: mod_base = OTHER; note = 2'-O-methyl modified nucleotide
  modified_base 90: mod_base = OTHER; note = 2'-O-methyl modified nucleotide
  modified_base 91: mod_base = OTHER; note = 2'-O-methyl modified nucleotide
  modified_base 92: mod_base = OTHER; note = 2'-O-methyl modified nucleotide
  modified_base 99: mod_base = OTHER; note = nucleotide with phosphorothioate linkage
  modified_base 100: mod_base = OTHER; note = 2'-O-methyl modified nucleotide with phosphorothioate linkage
  modified_base 101: mod_base = OTHER; note = 2'-O-methyl modified nucleotide

SEQ ID NO: 3003 - RNA, 101 nt, synthetic construct; identical to SEQ ID NO: 1111
  source 1..101: mol_type = other RNA
  modified_base 1: mod_base = OTHER; note = 2'-O-methyl modified nucleotide with phosphorothioate linkage
  modified_base 2: mod_base = OTHER; note = 2'-O-methyl modified nucleotide with phosphorothioate linkage
  modified_base 3: mod_base = OTHER; note = 2'-O-methyl modified nucleotide with phosphorothioate linkage
  modified_base 4: mod_base = OTHER; note = 2'-O-methyl modified nucleotide
  modified_base 5: mod_base = OTHER; note = 2'-O-methyl modified nucleotide
  modified_base 8: mod_base = OTHER; note = 2'-O-methyl modified nucleotide
  modified_base 9: mod_base = OTHER; note = 2'-O-methyl modified nucleotide
  modified_base 11: mod_base = OTHER; note = 2'-O-methyl modified nucleotide
  modified_base 13: mod_base = OTHER; note = 2'-O-methyl modified nucleotide
  modified_base 18: mod_base = OTHER; note = 2'-O-methyl modified nucleotide
  modified_base 22: mod_base = OTHER; note = 2'-O-methyl modified nucleotide
  modified_base 25: mod_base = OTHER; note = 2'-O-methyl modified nucleotide
  modified_base 29: mod_base = OTHER; note = 2'-O-methyl modified nucleotide
  modified_base 30: mod_base = OTHER; note = 2'-O-methyl modified nucleotide
  modified_base 31: mod_base = OTHER; note = 2'-O-methyl modified nucleotide
  modified_base 32: mod_base = OTHER; note = 2'-O-methyl modified nucleotide
  modified_base 37: mod_base = OTHER; note = 2'-O-methyl modified nucleotide
  modified_base 38: mod_base = OTHER; note = 2'-O-methyl modified nucleotide
  modified_base 39: mod_base = OTHER; note = 2'-O-methyl modified nucleotide
  modified_base 40: mod_base = OTHER; note = 2'-O-methyl modified nucleotide
  modified_base 41: mod_base = OTHER; note = 2'-O-methyl modified nucleotide
  modified_base 42: mod_base = OTHER; note = 2'-O-methyl modified nucleotide
  modified_base 43: mod_base = OTHER; note = 2'-O-methyl modified nucleotide
  modified_base 47: mod_base = OTHER; note = 2'-O-methyl modified nucleotide
  modified_base 48: mod_base = OTHER; note = 2'-O-methyl modified nucleotide
  modified_base 51: mod_base = OTHER; note = 2'-O-methyl modified nucleotide
  modified_base 58: mod_base = OTHER; note = 2'-O-methyl modified nucleotide
  modified_base 59: mod_base = OTHER; note = 2'-O-methyl modified nucleotide
  modified_base 61: mod_base = OTHER; note = 2'-O-methyl modified nucleotide
  modified_base 62: mod_base = OTHER; note = 2'-O-methyl modified nucleotide
  modified_base 63: mod_base = OTHER; note = 2'-O-methyl modified nucleotide
  modified_base 64: mod_base = OTHER; note = 2'-O-methyl modified nucleotide
  modified_base 65: mod_base = OTHER; note = 2'-O-methyl modified nucleotide
  modified_base 66: mod_base = OTHER; note = 2'-O-methyl modified nucleotide
  modified_base 67: mod_base = OTHER; note = 2'-O-methyl modified nucleotide
  modified_base 68: mod_base = OTHER; note = 2'-O-methyl modified nucleotide
  modified_base 69: mod_base = OTHER; note = 2'-O-methyl modified nucleotide
  modified_base 70: mod_base = OTHER; note = 2'-O-methyl modified nucleotide
  modified_base 75: mod_base = OTHER; note = 2'-O-methyl modified nucleotide
  modified_base 77: mod_base = OTHER; note = 2'-O-methyl modified nucleotide
  modified_base 80: mod_base = OTHER; note = 2'-O-methyl modified nucleotide
  modified_base 86: mod_base = OTHER; note = 2'-O-methyl modified nucleotide
  modified_base 87: mod_base = OTHER; note = 2'-O-methyl modified nucleotide
  modified_base 89: mod_base = OTHER; note = 2'-O-methyl modified nucleotide
  modified_base 90: mod_base = OTHER; note = 2'-O-methyl modified nucleotide
  modified_base 91: mod_base = OTHER; note = 2'-O-methyl modified nucleotide
  modified_base 92: mod_base = OTHER; note = 2'-O-methyl modified nucleotide
  modified_base 99: mod_base = OTHER; note = nucleotide with phosphorothioate linkage
  modified_base 100: mod_base = OTHER; note = 2'-O-methyl modified nucleotide with phosphorothioate linkage
  modified_base 101: mod_base = OTHER; note = 2'-O-methyl modified nucleotide

SEQ ID NO: 3004 - RNA, 101 nt, synthetic construct; identical to SEQ ID NO: 1107
  source 1..101: mol_type = other RNA
  modified_base 1: mod_base = OTHER; note = 2'-O-methyl modified nucleotide with phosphorothioate linkage
  modified_base 2: mod_base = OTHER; note = 2'-O-methyl modified nucleotide with phosphorothioate linkage
  modified_base 3: mod_base = OTHER; note = 2'-O-methyl modified nucleotide with phosphorothioate linkage
  modified_base 4: mod_base = OTHER; note = 2'-O-methyl modified nucleotide
  modified_base 5: mod_base = OTHER; note = 2'-O-methyl modified nucleotide
  modified_base 8: mod_base = OTHER; note = 2'-O-methyl modified nucleotide
  modified_base 9: mod_base = OTHER; note = 2'-O-methyl modified nucleotide
  modified_base 11: mod_base = OTHER; note = 2'-O-methyl modified nucleotide
  modified_base 13: mod_base = OTHER; note = 2'-O-methyl modified nucleotide
  modified_base 18: mod_base = OTHER; note = 2'-O-methyl modified nucleotide
  modified_base 22: mod_base = OTHER; note = 2'-O-methyl modified nucleotide
  modified_base 25: mod_base = OTHER; note = 2'-O-methyl modified nucleotide
  modified_base 29: mod_base = OTHER; note = 2'-O-methyl modified nucleotide
  modified_base 30: mod_base = OTHER; note = 2'-O-methyl modified nucleotide
  modified_base 31: mod_base = OTHER; note = 2'-O-methyl modified nucleotide
  modified_base 32: mod_base = OTHER; note = 2'-O-methyl modified nucleotide
  modified_base 37: mod_base = OTHER; note = 2'-O-methyl modified nucleotide
  modified_base 38: mod_base = OTHER; note = 2'-O-methyl modified nucleotide
  modified_base 39: mod_base = OTHER; note = 2'-O-methyl modified nucleotide
  modified_base 40: mod_base = OTHER; note = 2'-O-methyl modified nucleotide
  modified_base 41: mod_base = OTHER; note = 2'-O-methyl modified nucleotide
  modified_base 42: mod_base = OTHER; note = 2'-O-methyl modified nucleotide
  modified_base 43: mod_base = OTHER; note = 2'-O-methyl modified nucleotide
  modified_base 47: mod_base = OTHER; note = 2'-O-methyl modified nucleotide
  modified_base 48: mod_base = OTHER; note = 2'-O-methyl modified nucleotide
  modified_base 51: mod_base = OTHER; note = 2'-O-methyl modified nucleotide
  modified_base 58: mod_base = OTHER; note = 2'-O-methyl modified nucleotide
  modified_base 59: mod_base = OTHER; note = 2'-O-methyl modified nucleotide
  modified_base 61: mod_base = OTHER; note = 2'-O-methyl modified nucleotide
  modified_base 62: mod_base = OTHER; note = 2'-O-methyl modified nucleotide
  modified_base 63: mod_base = OTHER; note = 2'-O-methyl modified nucleotide
  modified_base 64: mod_base = OTHER; note = 2'-O-methyl modified nucleotide
  modified_base 65: mod_base = OTHER; note = 2'-O-methyl modified nucleotide
  modified_base 66: mod_base = OTHER; note = 2'-O-methyl modified nucleotide
  modified_base 67: mod_base = OTHER; note = 2'-O-methyl modified nucleotide
  modified_base 68: mod_base = OTHER; note = 2'-O-methyl modified nucleotide
  modified_base 69: mod_base = OTHER; note = 2'-O-methyl modified nucleotide
  modified_base 70: mod_base = OTHER; note = 2'-O-methyl modified nucleotide
  modified_base 75: mod_base = OTHER; note = 2'-O-methyl modified nucleotide
  modified_base 77: mod_base = OTHER; note = 2'-O-methyl modified nucleotide
  modified_base 80: mod_base = OTHER; note = 2'-O-methyl modified nucleotide
  modified_base 86: mod_base = OTHER; note = 2'-O-methyl modified nucleotide
  modified_base 87: mod_base = OTHER; note = 2'-O-methyl modified nucleotide
  modified_base 89: mod_base = OTHER; note = 2'-O-methyl modified nucleotide
  modified_base 90: mod_base = OTHER; note = 2'-O-methyl modified nucleotide
  modified_base 91: mod_base = OTHER; note = 2'-O-methyl modified nucleotide
  modified_base 92: mod_base = OTHER; note = 2'-O-methyl modified nucleotide
  modified_base 99: mod_base = OTHER; note = nucleotide with phosphorothioate linkage
  modified_base 100: mod_base = OTHER; note = 2'-O-methyl modified nucleotide with phosphorothioate linkage
  modified_base 101: mod_base = OTHER; note = 2'-O-methyl modified nucleotide

SEQ ID NO: 3005 - RNA, 101 nt, synthetic construct; identical to SEQ ID NO: 1215
  source 1..101: mol_type = other RNA
  modified_base 1: mod_base = OTHER; note = 2'-O-methyl modified nucleotide with phosphorothioate linkage
  modified_base 2: mod_base = OTHER; note = 2'-O-methyl modified nucleotide with phosphorothioate linkage
  modified_base 3: mod_base = OTHER; note = 2'-O-methyl modified nucleotide with phosphorothioate linkage
  modified_base 4: mod_base = OTHER; note = 2'-O-methyl modified nucleotide
  modified_base 5: mod_base = OTHER; note = 2'-O-methyl modified nucleotide
  modified_base 8: mod_base = OTHER; note = 2'-O-methyl modified nucleotide
  modified_base 9: mod_base = OTHER; note = 2'-O-methyl modified nucleotide
  modified_base 11: mod_base = OTHER; note = 2'-O-methyl modified nucleotide
  modified_base 13: mod_base = OTHER; note = 2'-O-methyl modified nucleotide
  modified_base 18: mod_base = OTHER; note = 2'-O-methyl modified nucleotide
  modified_base 22: mod_base = OTHER; note = 2'-O-methyl modified nucleotide
  modified_base 25: mod_base = OTHER; note = 2'-O-methyl modified nucleotide
  modified_base 29: mod_base = OTHER; note = 2'-O-methyl modified nucleotide
  modified_base 30: mod_base = OTHER; note = 2'-O-methyl modified nucleotide
  modified_base 31: mod_base = OTHER; note = 2'-O-methyl modified nucleotide
  modified_base 32: mod_base = OTHER; note = 2'-O-methyl modified nucleotide
  modified_base 37: mod_base = OTHER; note = 2'-O-methyl modified nucleotide
  modified_base 38: mod_base = OTHER; note = 2'-O-methyl modified nucleotide
  modified_base 39: mod_base = OTHER; note = 2'-O-methyl modified nucleotide
  modified_base 40: mod_base = OTHER; note = 2'-O-methyl modified nucleotide
  modified_base 41: mod_base = OTHER; note = 2'-O-methyl modified nucleotide
  modified_base 42: mod_base = OTHER; note = 2'-O-methyl modified nucleotide
  modified_base 43: mod_base = OTHER; note = 2'-O-methyl modified nucleotide
  modified_base 47: mod_base = OTHER; note = 2'-O-methyl modified nucleotide
  modified_base 48: mod_base = OTHER; note = 2'-O-methyl modified nucleotide
  modified_base 51: mod_base = OTHER; note = 2'-O-methyl modified nucleotide
  modified_base 58: mod_base = OTHER; note = 2'-O-methyl modified nucleotide
  modified_base 59: mod_base = OTHER; note = 2'-O-methyl modified nucleotide
  modified_base 61: mod_base = OTHER; note = 2'-O-methyl modified nucleotide
  modified_base 62: mod_base = OTHER; note = 2'-O-methyl modified nucleotide
  modified_base 63: mod_base = OTHER; note = 2'-O-methyl modified nucleotide
  modified_base 64: mod_base = OTHER; note = 2'-O-methyl modified nucleotide
  modified_base 65: mod_base = OTHER; note = 2'-O-methyl modified nucleotide
  modified_base 66: mod_base = OTHER; note = 2'-O-methyl modified nucleotide
  modified_base 67: mod_base = OTHER; note = 2'-O-methyl modified nucleotide
  modified_base 68: mod_base = OTHER; note = 2'-O-methyl modified nucleotide
  modified_base 69: mod_base = OTHER; note = 2'-O-methyl modified nucleotide
  modified_base 70: mod_base = OTHER; note = 2'-O-methyl modified nucleotide
  modified_base 75: mod_base = OTHER; note = 2'-O-methyl modified nucleotide
  modified_base 77: mod_base = OTHER; note = 2'-O-methyl modified nucleotide
  modified_base 80: mod_base = OTHER; note = 2'-O-methyl modified nucleotide
  modified_base 86: mod_base = OTHER; note = 2'-O-methyl modified nucleotide
  modified_base 87: mod_base = OTHER; note = 2'-O-methyl modified nucleotide
  modified_base 89: mod_base = OTHER; note = 2'-O-methyl modified nucleotide
  modified_base 90: mod_base = OTHER; note = 2'-O-methyl modified nucleotide
  modified_base 91: mod_base = OTHER; note = 2'-O-methyl modified nucleotide
  modified_base 92: mod_base = OTHER; note = 2'-O-methyl modified nucleotide
  modified_base 99: mod_base = OTHER; note = nucleotide with phosphorothioate linkage
  modified_base 100: mod_base = OTHER; note = 2'-O-methyl modified nucleotide with phosphorothioate linkage
  modified_base 101: mod_base = OTHER; note = 2'-O-methyl modified nucleotide

SEQ ID NO: 3006 - RNA, 101 nt, synthetic construct; identical to SEQ ID NO: 1301
  source 1..101: mol_type = other RNA
  modified_base 1: mod_base = OTHER; note = 2'-O-methyl modified nucleotide with phosphorothioate linkage
  modified_base 2: mod_base = OTHER; note = 2'-O-methyl modified nucleotide with phosphorothioate linkage
  modified_base 3: mod_base = OTHER; note = 2'-O-methyl modified nucleotide with phosphorothioate linkage
  modified_base 4: mod_base = OTHER; note = 2'-O-methyl modified nucleotide
  modified_base 5: mod_base = OTHER; note = 2'-O-methyl modified nucleotide
  modified_base 8: mod_base = OTHER; note = 2'-O-methyl modified nucleotide
  modified_base 9: mod_base = OTHER; note = 2'-O-methyl modified nucleotide
  modified_base 11: mod_base = OTHER; note = 2'-O-methyl modified nucleotide
  modified_base 13: mod_base = OTHER; note = 2'-O-methyl modified nucleotide
  modified_base 18: mod_base = OTHER; note = 2'-O-methyl modified nucleotide
  modified_base 22: mod_base = OTHER; note = 2'-O-methyl modified nucleotide
  modified_base 25: mod_base = OTHER; note = 2'-O-methyl modified nucleotide
  modified_base 29: mod_base = OTHER; note = 2'-O-methyl modified nucleotide
  modified_base 30: mod_base = OTHER; note = 2'-O-methyl modified nucleotide
  modified_base 31: mod_base = OTHER; note = 2'-O-methyl modified nucleotide
  modified_base 32: mod_base = OTHER; note = 2'-O-methyl modified nucleotide
  modified_base 37: mod_base = OTHER; note = 2'-O-methyl modified nucleotide
  modified_base 38: mod_base = OTHER; note = 2'-O-methyl modified nucleotide
  modified_base 39: mod_base = OTHER; note = 2'-O-methyl modified nucleotide
  modified_base 40: mod_base = OTHER; note = 2'-O-methyl modified nucleotide
  modified_base 41: mod_base = OTHER; note = 2'-O-methyl modified nucleotide
  modified_base 42: mod_base = OTHER; note = 2'-O-methyl modified nucleotide
  modified_base 43: mod_base = OTHER; note = 2'-O-methyl modified nucleotide
  modified_base 47: mod_base = OTHER; note = 2'-O-methyl modified nucleotide
  modified_base 48: mod_base = OTHER; note = 2'-O-methyl modified nucleotide
  modified_base 51: mod_base = OTHER; note = 2'-O-methyl modified nucleotide
  modified_base 58: mod_base = OTHER; note = 2'-O-methyl modified nucleotide
  modified_base 59: mod_base = OTHER; note = 2'-O-methyl modified nucleotide
  modified_base 61: mod_base = OTHER; note = 2'-O-methyl modified nucleotide
  modified_base 62: mod_base = OTHER; note = 2'-O-methyl modified nucleotide
  modified_base 63: mod_base = OTHER; note = 2'-O-methyl modified nucleotide
  modified_base 64: mod_base = OTHER; note = 2'-O-methyl modified nucleotide
  modified_base 65: mod_base = OTHER; note = 2'-O-methyl modified nucleotide
  modified_base 66: mod_base = OTHER; note = 2'-O-methyl modified nucleotide
  modified_base 67: mod_base = OTHER; note = 2'-O-methyl modified nucleotide
  modified_base 68: mod_base = OTHER; note = 2'-O-methyl modified nucleotide
  modified_base 69: mod_base = OTHER; note = 2'-O-methyl modified nucleotide
  modified_base 70: mod_base = OTHER; note = 2'-O-methyl modified nucleotide
  modified_base 75: mod_base = OTHER; note = 2'-O-methyl modified nucleotide
  modified_base 77: mod_base = OTHER; note = 2'-O-methyl modified nucleotide
  modified_base 80: mod_base = OTHER; note = 2'-O-methyl modified nucleotide
  modified_base 86: mod_base = OTHER; note = 2'-O-methyl modified nucleotide
  modified_base 87: mod_base = OTHER; note = 2'-O-methyl modified nucleotide
  modified_base 89: mod_base = OTHER; note = 2'-O-methyl modified nucleotide
  modified_base 90: mod_base = OTHER; note = 2'-O-methyl modified nucleotide
  modified_base 91: mod_base = OTHER; note = 2'-O-methyl modified nucleotide
  modified_base 92: mod_base = OTHER; note = 2'-O-methyl modified nucleotide
  modified_base 99: mod_base = OTHER; note = nucleotide with phosphorothioate linkage
  modified_base 100: mod_base = OTHER; note = 2'-O-methyl modified nucleotide with phosphorothioate linkage
  modified_base 101: mod_base = OTHER; note = 2'-O-methyl modified nucleotide

SEQ ID NO: 3007 - RNA, 101 nt, synthetic construct; identical to SEQ ID NO: 1422
  source 1..101: mol_type = other RNA
  modified_base 1: mod_base = OTHER; note = 2'-O-methyl modified nucleotide with phosphorothioate linkage
  modified_base 2: mod_base = OTHER; note = 2'-O-methyl modified nucleotide with phosphorothioate linkage
  modified_base 3: mod_base = OTHER; note = 2'-O-methyl modified nucleotide with phosphorothioate linkage
  modified_base 4: mod_base = OTHER; note = 2'-O-methyl modified nucleotide
  modified_base 5: mod_base = OTHER; note = 2'-O-methyl modified nucleotide
  modified_base 8: mod_base = OTHER; note = 2'-O-methyl modified nucleotide
  modified_base 9: mod_base = OTHER; note = 2'-O-methyl modified nucleotide
  modified_base 11: mod_base = OTHER; note = 2'-O-methyl modified nucleotide
  modified_base 13: mod_base = OTHER; note = 2'-O-methyl modified nucleotide
  modified_base 18: mod_base = OTHER; note = 2'-O-methyl modified nucleotide
  modified_base 22: mod_base = OTHER; note = 2'-O-methyl modified nucleotide
  modified_base 25: mod_base = OTHER; note = 2'-O-methyl modified nucleotide
  modified_base 29: mod_base = OTHER; note = 2'-O-methyl modified nucleotide
  modified_base 30: mod_base = OTHER; note = 2'-O-methyl modified nucleotide
  modified_base 31: mod_base = OTHER; note = 2'-O-methyl modified nucleotide
  modified_base 32: mod_base = OTHER; note = 2'-O-methyl modified nucleotide
  modified_base 37: mod_base = OTHER; note = 2'-O-methyl modified nucleotide
  modified_base 38: mod_base = OTHER; note = 2'-O-methyl modified nucleotide
  modified_base 39: mod_base = OTHER; note = 2'-O-methyl modified nucleotide
  modified_base 40: mod_base = OTHER; note = 2'-O-methyl modified nucleotide
  modified_base 41: mod_base = OTHER; note = 2'-O-methyl modified nucleotide
  modified_base 42: mod_base = OTHER; note = 2'-O-methyl modified nucleotide
  modified_base 43: mod_base = OTHER; note = 2'-O-methyl modified nucleotide
  modified_base 47: mod_base = OTHER; note = 2'-O-methyl modified nucleotide
  modified_base 48: mod_base = OTHER; note = 2'-O-methyl modified nucleotide
  modified_base 51: mod_base = OTHER; note = 2'-O-methyl modified nucleotide
  modified_base 58: mod_base = OTHER; note = 2'-O-methyl modified nucleotide
  modified_base 59: mod_base = OTHER; note = 2'-O-methyl modified nucleotide
  modified_base 61: mod_base = OTHER; note = 2'-O-methyl modified nucleotide
  modified_base 62: mod_base = OTHER; note = 2'-O-methyl modified nucleotide
  modified_base 63: mod_base = OTHER; note = 2'-O-methyl modified nucleotide
  modified_base 64: mod_base = OTHER; note = 2'-O-methyl modified nucleotide
  modified_base 65: mod_base = OTHER; note = 2'-O-methyl modified nucleotide
  modified_base 66: mod_base = OTHER; note = 2'-O-methyl modified nucleotide
  modified_base 67: mod_base = OTHER; note = 2'-O-methyl modified nucleotide
  modified_base 68: mod_base = OTHER; note = 2'-O-methyl modified nucleotide
  modified_base 69: mod_base = OTHER; note = 2'-O-methyl modified nucleotide
  modified_base 70: mod_base = OTHER; note = 2'-O-methyl modified nucleotide
  modified_base 75: mod_base = OTHER; note = 2'-O-methyl modified nucleotide
  modified_base 77: mod_base = OTHER; note = 2'-O-methyl modified nucleotide
  modified_base 80: mod_base = OTHER; note = 2'-O-methyl modified nucleotide
  modified_base 86: mod_base = OTHER; note = 2'-O-methyl modified nucleotide
  modified_base 87: mod_base = OTHER; note = 2'-O-methyl modified nucleotide
  modified_base 89: mod_base = OTHER; note = 2'-O-methyl modified nucleotide
  modified_base 90: mod_base = OTHER; note = 2'-O-methyl modified nucleotide
  modified_base 91: mod_base = OTHER; note = 2'-O-methyl modified nucleotide
  modified_base 92: mod_base = OTHER; note = 2'-O-methyl modified nucleotide
  modified_base 99: mod_base = OTHER; note = nucleotide with phosphorothioate linkage
  modified_base 100: mod_base = OTHER; note = 2'-O-methyl modified nucleotide with phosphorothioate linkage
  modified_base 101: mod_base = OTHER; note = 2'-O-methyl modified nucleotide

SEQ ID NO: 3008 - RNA, 101 nt, synthetic construct; identical to SEQ ID NO: 1828
  source 1..101: mol_type = other RNA
  modified_base 1: mod_base = OTHER; note = 2'-O-methyl modified nucleotide with phosphorothioate linkage
  modified_base 2: mod_base = OTHER; note = 2'-O-methyl modified nucleotide with phosphorothioate linkage
  modified_base 3: mod_base = OTHER; note = 2'-O-methyl modified nucleotide with phosphorothioate linkage
  modified_base 4: mod_base = OTHER; note = 2'-O-methyl modified nucleotide
  modified_base 5: mod_base = OTHER; note = 2'-O-methyl modified nucleotide
  modified_base 8: mod_base = OTHER; note = 2'-O-methyl modified nucleotide
  modified_base 9: mod_base = OTHER; note = 2'-O-methyl modified nucleotide
  modified_base 11: mod_base = OTHER; note = 2'-O-methyl modified nucleotide
  modified_base 13: mod_base = OTHER; note = 2'-O-methyl modified nucleotide
  modified_base 18: mod_base = OTHER; note = 2'-O-methyl modified nucleotide
  modified_base 22: mod_base = OTHER; note = 2'-O-methyl modified nucleotide
  modified_base 25: mod_base = OTHER; note = 2'-O-methyl modified nucleotide
  modified_base 29: mod_base = OTHER; note = 2'-O-methyl modified nucleotide
  modified_base 30: mod_base = OTHER; note = 2'-O-methyl modified nucleotide
  modified_base 31: mod_base = OTHER; note = 2'-O-methyl modified nucleotide
  modified_base 32: mod_base = OTHER; note = 2'-O-methyl modified nucleotide
  modified_base 37: mod_base = OTHER; note = 2'-O-methyl modified nucleotide
  modified_base 38: mod_base = OTHER; note = 2'-O-methyl modified nucleotide
  modified_base 39: mod_base = OTHER; note = 2'-O-methyl modified nucleotide
  modified_base 40: mod_base = OTHER; note = 2'-O-methyl modified nucleotide
  modified_base 41: mod_base = OTHER; note = 2'-O-methyl modified nucleotide
  modified_base 42: mod_base = OTHER; note = 2'-O-methyl modified nucleotide
  modified_base 43: mod_base = OTHER; note = 2'-O-methyl modified nucleotide
  modified_base 47: mod_base = OTHER; note = 2'-O-methyl modified nucleotide
  modified_base 48: mod_base = OTHER; note = 2'-O-methyl modified nucleotide
  modified_base 51: mod_base = OTHER; note = 2'-O-methyl modified nucleotide
  modified_base 58: mod_base = OTHER; note = 2'-O-methyl modified nucleotide
  modified_base 59: mod_base = OTHER; note = 2'-O-methyl modified nucleotide
  modified_base 61: mod_base = OTHER; note = 2'-O-methyl modified nucleotide
  modified_base 62: mod_base = OTHER; note = 2'-O-methyl modified nucleotide
  modified_base 63: mod_base = OTHER; note = 2'-O-methyl modified nucleotide
  modified_base 64: mod_base = OTHER; note = 2'-O-methyl modified nucleotide
  modified_base 65: mod_base = OTHER; note = 2'-O-methyl modified nucleotide
  modified_base 66: mod_base = OTHER; note = 2'-O-methyl modified nucleotide
  modified_base 67: mod_base = OTHER; note = 2'-O-methyl modified nucleotide
  modified_base 68: mod_base = OTHER; note = 2'-O-methyl modified nucleotide
  modified_base 69: mod_base = OTHER; note = 2'-O-methyl modified nucleotide
  modified_base 70: mod_base = OTHER; note = 2'-O-methyl modified nucleotide
  modified_base 75: mod_base = OTHER; note = 2'-O-methyl modified nucleotide
  modified_base 77: mod_base = OTHER; note = 2'-O-methyl modified nucleotide
  modified_base 80: mod_base = OTHER; note = 2'-O-methyl modified nucleotide
  modified_base 86: mod_base = OTHER; note = 2'-O-methyl modified nucleotide
  modified_base 87: mod_base = OTHER; note = 2'-O-methyl modified nucleotide
  modified_base 89: mod_base = OTHER; note = 2'-O-methyl modified nucleotide
  modified_base 90: mod_base = OTHER; note = 2'-O-methyl modified nucleotide
  modified_base 91: mod_base = OTHER; note = 2'-O-methyl modified nucleotide
  modified_base 92: mod_base = OTHER; note = 2'-O-methyl modified nucleotide
  modified_base 99: mod_base = OTHER; note = nucleotide with phosphorothioate linkage
  modified_base 100: mod_base = OTHER; note = 2'-O-methyl modified nucleotide with phosphorothioate linkage
  modified_base 101: mod_base = OTHER; note = 2'-O-methyl modified nucleotide

SEQ ID NO: 3009 - RNA, 101 nt, synthetic construct; identical to SEQ ID NO: 1829
  source 1..101: mol_type = other RNA
  modified_base 1: mod_base = OTHER; note = 2'-O-methyl modified nucleotide with phosphorothioate linkage
  modified_base 2: mod_base = OTHER; note = 2'-O-methyl modified nucleotide with phosphorothioate linkage
  modified_base 3: mod_base = OTHER; note = 2'-O-methyl modified nucleotide with phosphorothioate linkage
  modified_base 4: mod_base = OTHER; note = 2'-O-methyl modified nucleotide
  modified_base 5: mod_base = OTHER; note = 2'-O-methyl modified nucleotide
  modified_base 8: mod_base = OTHER; note = 2'-O-methyl modified nucleotide
  modified_base 9: mod_base = OTHER; note = 2'-O-methyl modified nucleotide
  modified_base 11: mod_base = OTHER; note = 2'-O-methyl modified nucleotide
  modified_base 13: mod_base = OTHER; note = 2'-O-methyl modified nucleotide
  modified_base 18: mod_base = OTHER; note = 2'-O-methyl modified nucleotide
  modified_base 22: mod_base = OTHER; note = 2'-O-methyl modified nucleotide
  modified_base 25: mod_base = OTHER; note = 2'-O-methyl modified nucleotide
  modified_base 29: mod_base = OTHER; note = 2'-O-methyl modified nucleotide
  modified_base 30: mod_base = OTHER; note = 2'-O-methyl modified nucleotide
  modified_base 31: mod_base = OTHER; note = 2'-O-methyl modified nucleotide
  modified_base 32: mod_base = OTHER; note = 2'-O-methyl modified nucleotide
  modified_base 37: mod_base = OTHER; note = 2'-O-methyl modified nucleotide
  modified_base 38: mod_base = OTHER; note = 2'-O-methyl modified nucleotide
  modified_base 39: mod_base = OTHER; note = 2'-O-methyl modified nucleotide
  modified_base 40: mod_base = OTHER; note = 2'-O-methyl modified nucleotide
  modified_base 41: mod_base = OTHER; note = 2'-O-methyl modified nucleotide
  modified_base 42: mod_base = OTHER; note = 2'-O-methyl modified nucleotide
  modified_base 43: mod_base = OTHER; note = 2'-O-methyl modified nucleotide
  modified_base 47: mod_base = OTHER; note = 2'-O-methyl modified nucleotide
  modified_base 48: mod_base = OTHER; note = 2'-O-methyl modified nucleotide
  modified_base 51: mod_base = OTHER; note = 2'-O-methyl modified nucleotide
  modified_base 58: mod_base = OTHER; note = 2'-O-methyl modified nucleotide
  modified_base 59: mod_base = OTHER; note = 2'-O-methyl modified nucleotide
  modified_base 61: mod_base = OTHER; note = 2'-O-methyl modified nucleotide
  modified_base 62: mod_base = OTHER; note = 2'-O-methyl modified nucleotide
  modified_base 63: mod_base = OTHER; note = 2'-O-methyl modified nucleotide
  modified_base 64: mod_base = OTHER; note = 2'-O-methyl modified nucleotide
  modified_base 65: mod_base = OTHER; note = 2'-O-methyl modified nucleotide
  modified_base 66: mod_base = OTHER; note = 2'-O-methyl modified nucleotide
  modified_base 67: mod_base = OTHER; note = 2'-O-methyl modified nucleotide
  modified_base 68: mod_base = OTHER; note = 2'-O-methyl modified nucleotide
  modified_base 69: mod_base = OTHER; note = 2'-O-methyl modified nucleotide
  modified_base 70: mod_base = OTHER; note = 2'-O-methyl modified nucleotide
  modified_base 75: mod_base = OTHER; note = 2'-O-methyl modified nucleotide
  modified_base 77: mod_base = OTHER; note = 2'-O-methyl modified nucleotide
  modified_base 80: mod_base = OTHER; note = 2'-O-methyl modified nucleotide
  modified_base 86: mod_base = OTHER; note = 2'-O-methyl modified nucleotide
  modified_base 87: mod_base = OTHER; note = 2'-O-methyl modified nucleotide
  modified_base 89: mod_base = OTHER; note = 2'-O-methyl modified nucleotide
  modified_base 90: mod_base = OTHER; note = 2'-O-methyl modified nucleotide
  modified_base 91: mod_base = OTHER; note = 2'-O-methyl modified nucleotide
  modified_base 92: mod_base = OTHER; note = 2'-O-methyl modified nucleotide
  modified_base 99: mod_base = OTHER; note = nucleotide with phosphorothioate linkage
  modified_base 100: mod_base = OTHER; note = 2'-O-methyl modified nucleotide with phosphorothioate linkage
  modified_base 101: mod_base = OTHER; note = 2'-O-methyl modified nucleotide

SEQ ID NO: 3010 - RNA, 101 nt, synthetic construct; identical to SEQ ID NO: 1830
  source 1..101: mol_type = other RNA
  modified_base 1: mod_base = OTHER; note = 2'-O-methyl modified nucleotide with phosphorothioate linkage
  modified_base 2: mod_base = OTHER; note = 2'-O-methyl modified nucleotide with phosphorothioate linkage
  modified_base 3: mod_base = OTHER; note = 2'-O-methyl modified nucleotide with phosphorothioate linkage
  modified_base 4: mod_base = OTHER; note = 2'-O-methyl modified nucleotide
  modified_base 5: mod_base = OTHER; note = 2'-O-methyl modified nucleotide
  modified_base 8: mod_base = OTHER; note = 2'-O-methyl modified nucleotide
  modified_base 9: mod_base = OTHER; note = 2'-O-methyl modified nucleotide
  modified_base 11: mod_base = OTHER; note = 2'-O-methyl modified nucleotide
  modified_base 13: mod_base = OTHER; note = 2'-O-methyl modified nucleotide
  modified_base 18: mod_base = OTHER; note = 2'-O-methyl modified nucleotide
  modified_base 22: mod_base = OTHER; note = 2'-O-methyl modified nucleotide
  modified_base 25: mod_base = OTHER; note = 2'-O-methyl modified nucleotide
  modified_base 29: mod_base = OTHER; note = 2'-O-methyl modified nucleotide
  modified_base 30: mod_base = OTHER; note = 2'-O-methyl modified nucleotide
  modified_base 31: mod_base = OTHER; note = 2'-O-methyl modified nucleotide
  modified_base 32: mod_base = OTHER; note = 2'-O-methyl modified nucleotide
  modified_base 37: mod_base = OTHER; note = 2'-O-methyl modified nucleotide
  modified_base 38: mod_base = OTHER; note = 2'-O-methyl modified nucleotide
  modified_base 39: mod_base = OTHER; note = 2'-O-methyl modified nucleotide
  modified_base 40: mod_base = OTHER; note = 2'-O-methyl modified nucleotide
  modified_base 41: mod_base = OTHER; note = 2'-O-methyl modified nucleotide
  modified_base 42: mod_base = OTHER; note = 2'-O-methyl modified nucleotide
  modified_base 43: mod_base = OTHER; note = 2'-O-methyl modified nucleotide
  modified_base 47: mod_base = OTHER; note = 2'-O-methyl modified nucleotide
  modified_base 48: mod_base = OTHER; note = 2'-O-methyl modified nucleotide
  modified_base 51: mod_base = OTHER; note = 2'-O-methyl modified nucleotide
  modified_base 58: mod_base = OTHER; note = 2'-O-methyl modified nucleotide
  modified_base 59: mod_base = OTHER; note = 2'-O-methyl modified nucleotide
  modified_base 61: mod_base = OTHER; note = 2'-O-methyl modified nucleotide
  modified_base 62: mod_base = OTHER; note = 2'-O-methyl modified nucleotide
  modified_base 63: mod_base = OTHER; note = 2'-O-methyl modified nucleotide
  modified_base 64: mod_base = OTHER; note = 2'-O-methyl modified nucleotide
  modified_base 65: mod_base = OTHER; note = 2'-O-methyl modified nucleotide
  modified_base 66: mod_base = OTHER; note = 2'-O-methyl modified nucleotide
  modified_base 67: mod_base = OTHER; note = 2'-O-methyl modified nucleotide
  modified_base 68: mod_base = OTHER; note = 2'-O-methyl modified nucleotide
  modified_base 69: mod_base = OTHER; note = 2'-O-methyl modified nucleotide
  modified_base 70: mod_base = OTHER; note = 2'-O-methyl modified nucleotide
  modified_base 75: mod_base = OTHER; note = 2'-O-methyl modified nucleotide
  modified_base 77: mod_base = OTHER; note = 2'-O-methyl modified nucleotide
  modified_base 80: mod_base = OTHER; note = 2'-O-methyl modified nucleotide
  modified_base 86: mod_base = OTHER; note = 2'-O-methyl modified nucleotide
  modified_base 87: mod_base = OTHER; note = 2'-O-methyl modified nucleotide
  modified_base 89: mod_base = OTHER; note = 2'-O-methyl modified nucleotide
  modified_base 90: mod_base = OTHER; note = 2'-O-methyl modified nucleotide
  modified_base 91: mod_base = OTHER; note = 2'-O-methyl modified nucleotide
  modified_base 92: mod_base = OTHER; note = 2'-O-methyl modified nucleotide
  modified_base 99: mod_base = OTHER; note = nucleotide with phosphorothioate linkage
  modified_base 100: mod_base = OTHER; note = 2'-O-methyl modified nucleotide with phosphorothioate linkage
  modified_base 101: mod_base = OTHER; note = 2'-O-methyl modified nucleotide

SEQ ID NO: 3011 - RNA, 10 nt, synthetic construct
  source 1..10: mol_type = other RNA
ttcgaaagac

SEQ ID NO: 3012 - protein, 60 aa, synthetic construct
  VARIANT 1: note = Any amino acid
  VARIANT 3: note = Any amino acid
  VARIANT 5: note = Any amino acid
  VARIANT 7: note = Any amino acid
  VARIANT 9: note = Any amino acid
  VARIANT 11: note = Any amino acid
  VARIANT 13: note = Any amino acid
  VARIANT 15: note = Any amino acid
  VARIANT 17: note = Any amino acid
  VARIANT 19: note = Any amino acid
  VARIANT 21: note = Any amino acid
  VARIANT 23: note = Any amino acid
  VARIANT 25: note = Any amino acid
  VARIANT 27: note = Any amino acid
  VARIANT 29: note = Any amino acid
  VARIANT 31: note = Any amino acid
  VARIANT 33: note = Any amino acid
  VARIANT 35: note = Any amino acid
  VARIANT 37: note = Any amino acid
  VARIANT 39: note = Any amino acid
  VARIANT 41: note = Any amino acid
  VARIANT 43: note = Any amino acid
  VARIANT 45: note = Any amino acid
  VARIANT 47: note = Any amino acid
  VARIANT 49: note = Any amino acid
  VARIANT 51: note = Any amino acid
  VARIANT 53: note = Any amino acid
  VARIANT 55: note = Any amino acid
  VARIANT 57: note = Any amino acid
  VARIANT 59: note = Any amino acid
  VARIANT 1..60: note = This sequence may encompass 1-30 XP repeating units
XPXPXPXPXPXPXPXPXPXPXPXPXPXPXPXPXPXPXPXPXPXPXPXPXPXPXPXPXPXP

SEQ ID NO: 3013 - protein, 7 aa, synthetic construct
PKKKRKV

SEQ ID NO: 3014 - protein, 6 aa, synthetic construct
HHHHHH

SEQ ID NO: 3015 - protein, 8 aa, synthetic construct
HHHHHHHH

SEQ ID NO: 3016 - RNA, 22 nt, synthetic construct
  source 1..22: mol_type = other RNA
  modified_base 1: mod_base = OTHER; note = 2'-O-methyl modified nucleotide attached to position 37 of SEQ ID NO: 2482 via a L1 linker
  modified_base 2: mod_base = OTHER; note = 2'-O-methyl modified nucleotide
  modified_base 6: mod_base = OTHER; note = 2'-O-methyl modified nucleotide
  modified_base 7: mod_base = OTHER; note = 2'-O-methyl modified nucleotide
  modified_base 10: mod_base = OTHER; note = 2'-O-methyl modified nucleotide
  modified_base 13: mod_base = OTHER; note = nucleotide with phosphorothioate linkage
  modified_base 17: mod_base = OTHER; note = 2'-O-methyl modified nucleotide
  modified_base 18: mod_base = OTHER; note = 2'-O-methyl modified nucleotide
  modified_base 20: mod_base = OTHER; note = 2'-O-methyl modified nucleotide
  modified_base 21: mod_base = OTHER; note = 2'-O-methyl modified nucleotide
  modified_base 22: mod_base = OTHER; note = 2'-O-methyl modified nucleotide attached to position 1 of SEQ ID NO: 3111 via a L1 linker
ccgttgctacaataaggccgtc

SEQ ID NO: 3017 - RNA, 22 nt, synthetic construct
  source 1..22: mol_type = other RNA
  modified_base 1: mod_base = OTHER; note = 2'-O-methyl modified nucleotide attached to position 37 of SEQ ID NO: 2483 via a L1 linker
  modified_base 2: mod_base = OTHER; note = 2'-O-methyl modified nucleotide
  modified_base 6: mod_base = OTHER; note = 2'-O-methyl modified nucleotide
  modified_base 7: mod_base = OTHER; note = 2'-O-methyl modified nucleotide
  modified_base 10: mod_base = OTHER; note = 2'-O-methyl modified nucleotide
  modified_base 13: mod_base = OTHER; note = nucleotide with phosphorothioate linkage
  modified_base 17: mod_base = OTHER; note = 2'-O-methyl modified nucleotide
  modified_base 18: mod_base = OTHER; note = 2'-O-methyl modified nucleotide
  modified_base 20: mod_base = OTHER; note = 2'-O-methyl modified nucleotide
  modified_base 21: mod_base = OTHER; note = 2'-O-methyl modified nucleotide
  modified_base 22: mod_base = OTHER; note = 2'-O-methyl modified nucleotide attached to position 1 of SEQ ID NO: 3112 via a L1 linker
ccgttgctacaataaggccgtc

SEQ ID NO: 3018 - RNA, 22 nt, synthetic construct
  source 1..22: mol_type = other RNA
  modified_base 1: mod_base = OTHER; note = 2'-O-methyl modified nucleotide attached to position 37 of SEQ ID NO: 2484 via a L1 linker
  modified_base 2: mod_base = OTHER; note = 2'-O-methyl modified nucleotide
  modified_base 6: mod_base = OTHER; note = 2'-O-methyl modified nucleotide
  modified_base 7: mod_base = OTHER; note = 2'-O-methyl modified nucleotide
  modified_base 10: mod_base = OTHER; note = 2'-O-methyl modified nucleotide
  modified_base 13: mod_base = OTHER; note = nucleotide with phosphorothioate linkage
  modified_base 17: mod_base = OTHER; note = 2'-O-methyl modified nucleotide
  modified_base 18: mod_base = OTHER; note = 2'-O-methyl modified nucleotide
  modified_base 20: mod_base = OTHER; note = 2'-O-methyl modified nucleotide
  modified_base 21: mod_base = OTHER; note = 2'-O-methyl modified nucleotide
  modified_base 22: mod_base = OTHER; note = 2'-O-methyl modified nucleotide attached to position 1 of SEQ ID NO: 3113 via a L1 linker
ccgttgctacaataaggccgtc

SEQ ID NO: 3019 - RNA, 22 nt, synthetic construct
  source 1..22: mol_type = other RNA
  modified_base 1: mod_base = OTHER; note = 2'-O-methyl modified nucleotide attached to position 37 of SEQ ID NO: 2485 via a L1 linker
  modified_base 2: mod_base = OTHER; note = 2'-O-methyl modified nucleotide
  modified_base 6: mod_base = OTHER; note = 2'-O-methyl modified nucleotide
  modified_base 7: mod_base = OTHER; note = 2'-O-methyl modified nucleotide
  modified_base 10: mod_base = OTHER; note = 2'-O-methyl modified nucleotide
  modified_base 13: mod_base = OTHER; note = nucleotide with phosphorothioate linkage
  modified_base 17: mod_base = OTHER; note = 2'-O-methyl modified nucleotide
  modified_base 18: mod_base = OTHER; note = 2'-O-methyl modified nucleotide
  modified_base 20: mod_base = OTHER; note = 2'-O-methyl modified nucleotide
  modified_base 21: mod_base = OTHER; note = 2'-O-methyl modified nucleotide
  modified_base 22: mod_base = OTHER; note = 2'-O-methyl modified nucleotide attached to position 1 of SEQ ID NO: 3114 via a L1 linker
ccgttgctacaataaggccgtc

SEQ ID NO: 3020 - RNA, 22 nt, synthetic construct
  source 1..22: mol_type = other RNA
  modified_base 1: mod_base = OTHER; note = 2'-O-methyl modified nucleotide attached to position 37 of SEQ ID NO: 2486 via a L1 linker
  modified_base 2: mod_base = OTHER; note = 2'-O-methyl modified nucleotide
  modified_base 6: mod_base = OTHER; note = 2'-O-methyl modified nucleotide
  modified_base 7: mod_base = OTHER; note = 2'-O-methyl modified nucleotide
  modified_base 10: mod_base = OTHER; note = 2'-O-methyl modified nucleotide
  modified_base 13: mod_base = OTHER; note = nucleotide with phosphorothioate linkage
  modified_base 17: mod_base = OTHER; note = 2'-O-methyl modified nucleotide
  modified_base 18: mod_base = OTHER; note = 2'-O-methyl modified nucleotide
  modified_base 20: mod_base = OTHER; note = 2'-O-methyl modified nucleotide
  modified_base 21: mod_base = OTHER; note = 2'-O-methyl modified nucleotide
  modified_base 22: mod_base = OTHER; note = 2'-O-methyl modified nucleotide attached to position 1 of SEQ ID NO: 3115 via a L1 linker
ccgttgctacaataaggccgtc

SEQ ID NO: 3021 - RNA, 22 nt, synthetic construct
  source 1..22: mol_type = other RNA
  modified_base 1: mod_base = OTHER; note = 2'-O-methyl modified nucleotide attached to position 37 of SEQ ID NO: 2487 via a L1 linker
  modified_base 2: mod_base = OTHER; note = 2'-O-methyl modified nucleotide
  modified_base 6: mod_base = OTHER; note = 2'-O-methyl modified nucleotide
  modified_base 7: mod_base = OTHER; note = 2'-O-methyl modified nucleotide
  modified_base 10: mod_base = OTHER; note = 2'-O-methyl modified nucleotide
  modified_base 13: mod_base = OTHER; note = nucleotide with phosphorothioate linkage
  modified_base 17: mod_base = OTHER; note = 2'-O-methyl modified nucleotide
  modified_base 18: mod_base = OTHER; note = 2'-O-methyl modified nucleotide
  modified_base 20: mod_base = OTHER; note = 2'-O-methyl modified nucleotide
  modified_base 21: mod_base = OTHER; note = 2'-O-methyl modified nucleotide
  modified_base 22: mod_base = OTHER; note = 2'-O-methyl modified nucleotide attached to position 1 of SEQ ID NO: 3116 via a L1 linker
ccgttgctacaataaggccgtc

SEQ ID NO: 3022 - RNA, 22 nt, synthetic construct
  source 1..22: mol_type = other RNA
  modified_base 1: mod_base = OTHER; note = 2'-O-methyl modified nucleotide attached to position 37 of SEQ ID NO: 2488 via a L1 linker
  modified_base 2: mod_base = OTHER; note = 2'-O-methyl modified nucleotide
  modified_base 6: mod_base = OTHER; note = 2'-O-methyl modified nucleotide
  modified_base 7: mod_base = OTHER; note = 2'-O-methyl modified nucleotide
  modified_base 10: mod_base = OTHER; note = 2'-O-methyl modified nucleotide
  modified_base 13: mod_base = OTHER; note = nucleotide with phosphorothioate linkage
  modified_base 17: mod_base = OTHER; note = 2'-O-methyl modified nucleotide
  modified_base 18: mod_base = OTHER; note = 2'-O-methyl modified nucleotide
  modified_base 20: mod_base = OTHER; note = 2'-O-methyl modified nucleotide
  modified_base 21: mod_base = OTHER; note = 2'-O-methyl modified nucleotide
  modified_base 22: mod_base = OTHER; note = 2'-O-methyl modified nucleotide attached to position 1 of SEQ ID NO: 3117 via a L1 linker
ccgttgctacaataaggccgtc

SEQ ID NO: 3023 - RNA, 22 nt, synthetic construct
  source 1..22: mol_type = other RNA
  modified_base 1: mod_base = OTHER; note = 2'-O-methyl modified nucleotide attached to position 37 of SEQ ID NO: 2489 via a L1 linker
  modified_base 2: mod_base = OTHER; note = 2'-O-methyl modified nucleotide
  modified_base 6: mod_base = OTHER; note = 2'-O-methyl modified nucleotide
  modified_base 7: mod_base = OTHER; note = 2'-O-methyl modified nucleotide
  modified_base 10: mod_base = OTHER; note = 2'-O-methyl modified nucleotide
  modified_base 13: mod_base = OTHER; note = nucleotide with phosphorothioate linkage
  modified_base 17: mod_base = OTHER; note = 2'-O-methyl modified nucleotide
  modified_base 18: mod_base = OTHER; note = 2'-O-methyl modified nucleotide
  modified_base 20: mod_base = OTHER; note = 2'-O-methyl modified nucleotide
  modified_base 21: mod_base = OTHER; note = 2'-O-methyl modified nucleotide
  modified_base 22: mod_base = OTHER; note = 2'-O-methyl modified nucleotide attached to position 1 of SEQ ID NO: 3118 via a L1 linker
ccgttgctacaataaggccgtc

SEQ ID NO: 3024 - RNA, 22 nt, synthetic construct
  source 1..22: mol_type = other RNA
  modified_base 1: mod_base = OTHER; note = 2'-O-methyl modified nucleotide attached to position 37 of SEQ ID NO: 2490 via a L1 linker
  modified_base 2: mod_base = OTHER; note = 2'-O-methyl modified nucleotide
  modified_base 6: mod_base = OTHER; note = 2'-O-methyl modified nucleotide
  modified_base 7: mod_base = OTHER; note = 2'-O-methyl modified nucleotide
  modified_base 10: mod_base = OTHER; note = 2'-O-methyl modified nucleotide
  modified_base 13: mod_base = OTHER; note = nucleotide with phosphorothioate linkage
  modified_base 17: mod_base = OTHER; note = 2'-O-methyl modified nucleotide
  modified_base 18: mod_base = OTHER; note = 2'-O-methyl modified nucleotide
  modified_base 20: mod_base = OTHER; note = 2'-O-methyl modified nucleotide
  modified_base 21: mod_base = OTHER; note = 2'-O-methyl modified nucleotide
  modified_base 22: mod_base = OTHER; note = 2'-O-methyl modified nucleotide attached to position 1 of SEQ ID NO: 3119 via a L1 linker
ccgttgctacaataaggccgtc

SEQ ID NO: 3025 - RNA, 22 nt, synthetic construct
  source 1..22: mol_type = other RNA
  modified_base 1: mod_base = OTHER; note = 2'-O-methyl modified nucleotide attached to position 37 of SEQ ID NO: 2491 via a L1 linker
  modified_base 2: mod_base = OTHER; note = 2'-O-methyl modified nucleotide
  modified_base 6: mod_base = OTHER; note = 2'-O-methyl modified nucleotide
  modified_base 7: mod_base = OTHER; note = 2'-O-methyl modified nucleotide
  modified_base 10: mod_base = OTHER; note = 2'-O-methyl modified nucleotide
  modified_base 13: mod_base = OTHER; note = nucleotide with phosphorothioate linkage
  modified_base 17: mod_base = OTHER; note = 2'-O-methyl modified nucleotide
  modified_base 18: mod_base = OTHER; note = 2'-O-methyl modified nucleotide
  modified_base 20: mod_base = OTHER; note = 2'-O-methyl modified nucleotide
  modified_base 21: mod_base = OTHER; note = 2'-O-methyl modified nucleotide
  modified_base 22: mod_base = OTHER; note = 2'-O-methyl modified nucleotide attached to position 1 of SEQ ID NO: 3120 via a L1 linker
ccgttgctacaataaggccgtc

SEQ ID NO: 3026 - RNA, 22 nt, synthetic construct
  source 1..22: mol_type = other RNA
  modified_base 1: mod_base = OTHER; note = 2'-O-methyl modified nucleotide attached to position 37 of SEQ ID NO: 2492 via a L1 linker
  modified_base 2: mod_base = OTHER; note = 2'-O-methyl modified nucleotide
  modified_base 6: mod_base = OTHER; note = 2'-O-methyl modified nucleotide
  modified_base 7: mod_base = OTHER; note = 2'-O-methyl modified nucleotide
  modified_base 10: mod_base = OTHER; note = 2'-O-methyl modified nucleotide
  modified_base 13: mod_base = OTHER; note = nucleotide with phosphorothioate linkage
  modified_base 17: mod_base = OTHER; note = 2'-O-methyl modified nucleotide
  modified_base 18: mod_base = OTHER; note = 2'-O-methyl modified nucleotide
  modified_base 20: mod_base = OTHER; note = 2'-O-methyl modified nucleotide
  modified_base 21: mod_base = OTHER; note = 2'-O-methyl modified nucleotide
  modified_base 22: mod_base = OTHER; note = 2'-O-methyl modified nucleotide attached to position 1 of SEQ ID NO: 3121 via a L1 linker
ccgttgctacaataaggccgtc

SEQ ID NO: 3027 - RNA, 22 nt, synthetic construct
  source 1..22: mol_type = other RNA
  modified_base 1: mod_base = OTHER; note = 2'-O-methyl modified nucleotide attached to position 37 of SEQ ID NO: 2493 via a L1 linker
  modified_base 2: mod_base = OTHER; note = 2'-O-methyl modified nucleotide
  modified_base 6: mod_base = OTHER; note = 2'-O-methyl modified nucleotide
  modified_base 7: mod_base = OTHER; note = 2'-O-methyl modified nucleotide
  modified_base 10: mod_base = OTHER; note = 2'-O-methyl modified nucleotide
  modified_base 13: mod_base = OTHER; note = nucleotide with phosphorothioate linkage
  modified_base 17: mod_base = OTHER; note = 2'-O-methyl modified nucleotide
  modified_base 18: mod_base = OTHER; note = 2'-O-methyl modified nucleotide
  modified_base 20: mod_base = OTHER; note = 2'-O-methyl modified nucleotide
  modified_base 21: mod_base = OTHER; note = 2'-O-methyl modified nucleotide
  modified_base 22: mod_base = OTHER; note = 2'-O-methyl modified nucleotide attached to position 1 of SEQ ID NO: 3122 via a L1 linker
ccgttgctacaataaggccgtc

(The sequence listing continues in the following parts.)
